United States Patent Application Publication US 2022/0096574 A1 - sequence listing, part 7

SEQ ID NO: 29245 - protein, 210 aa, Chryseobacterium taklimakanense
  misc_feature (1)..(210): tr|A0A239XEI9|A0A239XEI9_9FLAO 7-carboxy-7-deazaguanine synthase OS=Chryseobacterium taklimakanense OX=536441 GN=queE PE=3 SV=1
MTKEEQDILLKEGKILPVMEHFYTIQGEGAHTGKAAYFIRLGGCDVGCHWCDVKESWNPDLHPLMDVEEVAETAASYCKTIVLTGGEPLMWNLDVLTSKLKELGCQIHIETSGAYPMSGQLDWITLSPKKTGLPLDEIYSKAQELKVIIFNNHDFQFAEEQAAKVSENCKLYLQSEWSKRDAMYPKITDFILANPKWQASVQTHKYLNIP

SEQ ID NO: 29246 - protein, 210 aa, Chryseobacterium treverense
  misc_feature (1)..(210): tr|A0A1I3LNT3|A0A1I3LNT3_9FLAO 7-carboxy-7-deazaguanine synthase OS=Chryseobacterium treverense OX=631455 GN=q ueE PE=3 SV=1
MTKEEENILLKEGKMLPVMEHFYTIQGEGAHTGKAAYFIRLGGCDVGCHWCDVKESWDPNLHPLLNTEEIAQTAARNCKTIVLTGGEPLMYNLEYLTRRLKELGCDIHIETSGAYEMSGHLDWITLSPKKTGLPKPAIYEKASELKMIIFNNNDFKFAEEQAAKVSESCELYLQSEWSKRNEMYPKITDYILANPKWRASVQTHKYLNIP

SEQ ID NO: 29247 - protein, 209 aa, Chryseobacterium ureilyticum
  misc_feature (1)..(209): tr|A0A1N7Q2D4|A0A1N7Q2D4_9FLAO 7-carboxy-7-deazaguanine synthase OS=Chryseobacterium ureilyticum OX=373668 GN= queE PE=3 SV=1
MNKEQDILLKEGKMLPVMEHFYTLQGEGAHTGKAAYFIRLGGCDVGCHWCDVKESWDPELHPLMDAVEIAETAAKHCKTIVLTGGEPLTWNLEILTSKLKELGCTIHIETSGAYPMSGHLDWITLSPKKTGLPKQEIYQKAHELKVIVFNNHDFEFAQEQASKVSENCKLYLQSEWSKRDDMYPKITDFILEHPEWQASVQTHKYLNIP

SEQ ID NO: 29248 - protein, 209 aa, Chryseobacterium viscerum
  misc_feature (1)..(209): tr|A0A316WEW9|A0A316WEW9_9FLAO 7-carboxy-7-deazaguanine synthase OS=Chryseobacterium viscerum OX=1037377 GN=qu eE PE=3 SV=1
MNKEEDILLKEGKMLPVMEHFYTLQGEGAHTGKASYFIRLGGCDVGCHWCDVKESWDPKLHPLMNAVEIAEMAAKHCKTIVLTGGEPLMWNLEILTSRLKELGCTVHIETSGAYPMSGHLDWITLSPKKTGLPKEEIYQKANELKMIIFNQHDFTFAQEQASKVSENCRLYLQSEWSKRDDMYPKITDFILEHPEWQASVQTHKYLNIP

SEQ ID NO: 29249 - protein, 209 aa, Chryseobacterium wanjuense
  misc_feature (1)..(209): tr|A0A1I0RUE4|A0A1I0RUE4_9FLAO 7-carboxy-7-deazaguanine synthase OS=Chryseobacterium wanjuense OX=356305 GN=qu eE PE=3 SV=1
MNLTEEILLKEGKMLPVMEHFYTLQGEGAHTGKAAYFIRLGGCDVGCHWCDVKESWDPNLHPLMNAEEIAETAAKHCKTIVLTGGEPLMWNLDILTSKLKELGCTIHIETSGAYPMSGQIDWITLSPKKTGLPKEEIYAKAHELKVIVFNNNDFKFAQEQAAKVSGNCTLYLQSEWSKRDEMYPKITDFILEHPEWRASVQTHKYLNIP

SEQ ID NO: 29250 - protein, 210 aa, Chryseobacterium xixisoli
  misc_feature (1)..(210): tr|A0A4R8I6T0|A0A4R8I6T0_9FLAO 7-carboxy-7-deazaguanine synthase OS=Chryseobacterium xixisoli OX=1476462 GN=qu eE PE=3 SV=1
MTKEEEDILLKEGKMLPVMEHFYTIQGEGFHAGKAAYFIRLGGCDVGCHWCDVKESWDPTLHPLMNTEEIAETAAKYCKTIVLTGGEPLMWNLEILTSKLKELGCTIHIETSGAYPMSGHLDWITLSPKKTGLPLADIYNEASELKMIIFNQNDFKFAQEQGEKVNENCELYLQSEWSKRDAMYPKITDFILENPKWRSSIQTHKYLNIP

SEQ ID NO: 29251 - protein, 210 aa, Chryseobacterium zeae
  misc_feature (1)..(210): tr|A0A1N6INT5|A0A1N6INT5_9FLAO 7-carboxy-7-deazaguanine synthase OS=Chryseobacterium zeae OX=1416779 GN=queE P E=3 SV=1
MTKEEEDILLKEGKMLPVMEHFYTIQGEGFHAGKAAYFIRLGGCDVGCHWCDVKESWDPTLHPLMNTEEIAETAAKYCKTIVLTGGEPLMWNLEILTSKLKELGCTIHIETSGAYPMSGHLDWITLSPKKTGLPLADIYKEASELKMIIFNQNDFKFAQEQGEKVNDDCVLYLQSEWSKRDAMYPKITDFILENPTWRSSIQTHKYLNIP

SEQ ID NO: 29252 - protein, 193 aa, Chryseolinea flava
  misc_feature (1)..(193): tr|A0A364Y1I0|A0A364Y1I0_9BACT 7-carboxy-7-deazaguanine synthase OS=Chryseolinea flava OX=2059302 GN=queE PE=3 SV=1
MEDFYTIQGEGFYQGHAAYFVRLGGCDVGCVWCDVKESWDASLHPMLSIAEIVSRVKTGKGKIVVITGGEPVMYNLEKLTHALKDSGLRTHIETSGVYPLTGTWDWVCFSPKKFKKPDTSIFEKADELKVIINHKSDIAWAEEFTSKLKPSCQLFLQPEWSKEKEMLPLIIEYVKDNPKWQVSLQVHKYMNIP

SEQ ID NO: 29253 - protein, 207 aa, Chryseolinea serpens
  misc_feature (1)..(207): tr|A0A1M5X213|A0A1M5X213_9BACT 7-carboxy-7-deazaguanine synthase OS=Chryseolinea serpens OX=947013 GN=queE PE= 3 SV=1
MEIKEKHLVTTLPLMEDFYTIQGEGFYQGSAAYFIRLGGCDVGCVWCDVKESWDVNAHPSVSVDVMMERAKTSGTEIVVITGGEPAMHDLTALTQTLKANGMRTHIETSGVYPLTGQWDWVCFSPKKFKEPHPSVFVQADELKVIVYNKSDFAWAAEFAAVVRPDCQLYLQPEWSKEKEMLPLIIDYVKANPQWQVSLQVHKYMNIP

SEQ ID NO: 29254 - protein, 209 aa, Chryseolinea sp.
  misc_feature (1)..(209): tr|A0A385SIL1|A0A385SIL1_9BACT 7-carboxy-7-deazaguanine synthase OS=Chryseolinea sp. KIS68-18 OX=2321403 GN=qu eE PE=3 SV=1
MAVEIKEKNQVTTLPLMEDFYTIQGEGFYQGSAAYFIRLGGCDVGCVWCDVKESWDVNAHPSVSVDTMMERAKASGTEIVVVTGGEPAMHDLTALTQALNANGMRTHIETSGVYPLTGQWDWVCFSPKKFKEPHPSVFGQADELKVIVYNKSDFAWAAEFAAVVRPDCQLYLQPEWSKEKEMLPLIIDYVKANPQWQVSLQVHKYMNIP

SEQ ID NO: 29255 - protein, 208 aa, Chrysiogenales bacterium
  misc_feature (1)..(208): tr|A0A524JUK2|A0A524JUK2_9BACT 7-carboxy-7-deazaguanine synthase OS=Chrysiogenales bacterium OX=2528039 GN=que E PE=3 SV=1
MPGPLMPKINEIFWSAQGEGLNSGVSAIFIRMAGCSLRCPYCDTRGAWQGGRDMSPAEIEAAVDLLQVAYPGARLVISGGEPLEQDLKELAKVLRRKHYFVAVETNGLHFQDLPFDWWTVSPKDAAAYRVHPRLWARISEIKLLVTPALDMTVLKKIRGRSPAPIILQPERHDRDRFRRTFAFFRACSLQGIADVRLGLQLHRVYRIS

SEQ ID NO: 29256 - protein, 231 aa, Chthoniobacter flavus
  misc_feature (1)..(231): tr|B4D1V4|B4D1V4_9BACT 7-carboxy-7-deazaguanine synthas e OS=Chthoniobacter flavus Ellin428 OX=497964 GN=queE P E=3 SV=1
MLISEIFYSIQGEGELTGVPSVFVRTSGCNLRCRWCDTKYASWNPQGDEMSIAEIFARVDAFPATHVVLTGGEPMVAKGIHELAQRFREAGKHITIETAGTIAPEGIACDLASLSPKLGNSTPLEGEIAEGWRERHEKARLQPEVLRAWIERHPFQLKFVVEQSSDVEEIEALLDRIGAPIPPHKVQLMPQGTDLQTIHGREESLIDLCKRRGYRYCHRLHIALFGNTRGT

SEQ ID NO: 29257 - protein, 217 aa, Chthoniobacterales bacterium
  misc_feature (1)..(217): tr|A0A2W5YN86|A0A2W5YN86_9BACT 7-carboxy-7-deazaguanine synthase OS=Chthoniobacterales bacterium OX=2201154 GN =queE PE=3 SV=1
MREPTLTIHEIYRSIQGESTWAGLPCVFVRLTFCDLRCTYCDTTQAFYQGEKKTLPEILATVTAFDCPLVEITGGEPLLQKNVLPLMSALADSSKTVLVETSGAHDISSVDPRVHRIMDLKTPSSGESHRNLWANIAHLTMRDEVKFVIGSREDYEWSRDSLREHNLSARCRAILFSPIFGRIEPREIAEWILADKLPVRFQLQLHKFIWPPEARGV

SEQ ID NO: 29258 - protein, 220 aa, Chthoniobacterales bacterium
  misc_feature (1)..(220): tr|A0A2W5YWU4|A0A2W5YWU4_9BACT 7-carboxy-7-deazaguanine synthase OS=Chthoniobacterales bacterium OX=2201154 GN =queE PE=3 SV=1
MKEPGEKTLTINEIYHSIQGESTWAGEPCVFVRLTFCDLRCTYCDTEYAFYEGKKQTLDEIAAAVAAFQCPVVEITGGEPLLQKNVLPLMTMLADAGHTVLLETSGAHDISAVDPRVHRIMDLKTPGSGESERNLFSNIEHLTPRDEVKFVIGSREDYEWSREQVEQHALVSRCRAVLFSPIFGRIDPREIVEWILADRLPVRFQLQMHKFIWTPTKRGV

SEQ ID NO: 29259 - protein, 271 aa, Chthonomonas calidirosea
  misc_feature (1)..(271): tr|S0EVQ6|S0EVQ6_CHTCT 7-carboxy-7-deazaguanine synthas e OS=Chthonomonas calidirosea (strain DSM 23976 / ICMP 18418 / T49) OX=1303518 GN=queE PE=3 SV=1
MSYLLKTFSTTRPEAEARLPKARLVEVFSSVQGEGLLVGYRQVFVRTYGCNLRCTYCDSPETLKESPMPTVCRIEWPVGTGRFETLPNPVEVEQLTQVLQRFLKMPHHSVAITGGEPLLQARFLKAWLPAVRSLRLKTFLETNGLLPEHLRQIVALLDYVSMDIKAPSATGLEPEKTWPMHRQFLEVARSTNVYTKMVITPRTTDDELDRAIDLIESVDASIPFILQPVTPFGQEPVGVSPARLLELQSRAAARLSEVRVIPQTHKLVSLL

SEQ ID NO: 29260 - protein, 244 aa, Ciceribacter sp.
  misc_feature (1)..(244): tr|A0A4Q2TH48|A0A4Q2TH48_9RHIZ 7-carboxy-7-deazaguanine synthase OS=Ciceribacter sp. F8825 OX=2509717 GN=queE PE=3 SV=1
MTETSSLTVLVSEIFGPTIQGEGVLIGLPTVFVRTGGCDYRCSWCDSLHAVESRFRHDWKPMSTGDIWSEVTRLSGGEPLTVSLSGGNPAIQPLGDLIDLGHSEGYRFALETQGSLARPWFARLDTLVLSPKPPSSGMACDRTILTDCVEAAGDGPQTVLKFVVFDVEDFAFAREVSAHFPALPVYLQPGNHTPPPADGEGNVDLDGLTERMRWLVDAVAGERWFAAHVLPQLHVMLWGNRRGV

SEQ ID NO: 29261 - protein, 235 aa, Citreicella sp.
  misc_feature (1)..(235): tr|D0DDU2|D0DDU2_9RHOB 7-carboxy-7-deazaguanine synthas e OS=Citreicella sp. SE45 OX=501479 GN=queE PE=3 SV=1
MSLRIAEIFGPTIQGEGALIGEPTVFVRTGGCDYRCSWCDSLHAVESRYRDTWAAMSDSAVWDEVLRLSGGQPLTVSLSGGNPAIQDFAPVIARGRAAGYRFACETQGSVARPWFAELDTLVLSPKPPSSGETVDWDAFAACVRAGSAARQMVMKIVIFDDTDYAWARDAHARHPELPLYLQPGNPEVDPETPVDPQALADRLGWLVERTMADAWFTPRILPQLHVLIWGNKRGV

SEQ ID NO: 29262 - protein, 223 aa, Citrobacter amalonaticus
  misc_feature (1)..(223): tr|A0A2S4RVZ1|A0A2S4RVZ1_CITAM 7-carboxy-7-deazaguanine synthase OS=Citrobacter amalonaticus OX=35703 GN=queE PE=3 SV=1
MQYPINEMFQTLQGEGYFTGVPAIFIRLQGCPVGCAWCDTKHTWDKLADREVSLFSILAKTKESDKWGAGSAEDLLAIIGRQGWTARHVVITGGEPCIHDLTPLTGLLEKNGYSCQIETSGTHEVRCSHATWVTVSPKVNMRGGYDVLSQALERADEIKHPVGRVRDIEALDELLATLTDEKQRVIALQPVSQKEDATRLCIETCIARNWRLSMQTHKYLNIA

SEQ ID NO: 29263 - protein, 223 aa, Citrobacter amalonaticus
  misc_feature (1)..(223): tr|A0A0X8S1Z4|A0A0X8S1Z4_CITAM 7-carboxy-7-deazaguanine synthase OS=Citrobacter amalonaticus OX=35703 GN=queE PE=3 SV=1
MQYPINEMFQTLQGEGYFTGVPAIFIRLQGCPVGCAWCDTKHTWDKLEDREVSLYSILAKTKESDKWGAASSEDLLAVIGRQGYTARHVVITGGEPCIHDLMPLTDLLEKNGFSCQIETSGTHEVRCTPNTWVTVSPKVNMRGGYDVLSQALERANEIKHPVGRVRDIEALDELLATLSDDKPRVIALQPISQKEDATRLCIDTCIARNWRLSMQTHKYLNIA

SEQ ID NO: 29264 - protein, 223 aa, Citrobacter braakii
  misc_feature (1)..(223): tr|A0A1R0FZ00|A0A1R0FZ00_CITBR 7-carboxy-7-deazaguanine synthase OS=Citrobacter braakii OX=57706 GN=queE PE=3 SV=1
MQYPINEMFQTLQGEGYFTGVPAIFIRLQGCPVGCAWCDTKHTWDKLEDREVSLYSILAKTKESDKWGAASSEDLLAVIVRQGYTARHVVITGGEPCIHDLMPLTDLLEKNGFSCQIETSGTHEVRCTPNTWVTVSPKVNMRGGYDVLSQALERANEIKHPVGRVRDIEALDELLATLSDDKPRIIALQPISQKEDATRLCIDTCIARNWRLSMQTHKYLNIA

SEQ ID NO: 29265 - protein, 223 aa, Citrobacter braakii
  misc_feature (1)..(223): tr|A0A4R0MBV5|A0A4R0MBV5_CITBR 7-carboxy-7-deazaguanine synthase OS=Citrobacter braakii OX=57706 GN=queE PE=3 SV=1
MQYPINEMFQTLQGEGYFTGVPAIFIRLQGCPVGCAWCDTKHTWDKLEDREVSLYSILAKTKESDKWGAASSEDLLAVILHQGYTARHVVITGGEPCIHDLMPLTDLLEKNGFSCQIETSGTHEVRCTPNTWVTVSPKVNMRGGYDVLSQALERANEIKHPVGRVRDIEALDELLATLSDDKPRIIALQPISQKEDATRLCIDTCIARNWRLSMQTHKYLNIA

SEQ ID NO: 29266 - protein, 223 aa, Citrobacter farmeri
  misc_feature (1)..(223): tr|A0A223JVE0|A0A223JVE0_9ENTR 7-carboxy-7-deazaguanine synthase OS=Citrobacter farmeri OX=67824 GN=queE PE=3 SV=1
MQYPINEMFQTLQGEGYFTGVPAIFIRLQGCPVGCAWCDTKHTWDKLEDREVSLYSILAKTKESDKWGAASSEDLLAVIGRQGYTARHVVITGGEPCIHDLMPLTDLLEKNGFSCQIETSGTHEVRCTPNTWVTVSPKVNMRGGYDVLSQALERANEIKHPVGRVRDIEALDELLATLSDDKPRVIALQPISQKEDATRLCIETCIARNWRLSMQTHKYLNIA

SEQ ID NO: 29267 - protein, 223 aa, Citrobacter freundii
  misc_feature (1)..(223): tr|A0A336P252|A0A336P252_CITFR 7-carboxy-7-deazaguanine synthase OS=Citrobacter freundii OX=546 GN=queE_1 PE=3 SV=1
MQYPINEMFQTLQGEGYFTGVPAIFIRLQGCPVGCAWCDTKHTWDKLEDREVSLYSILAKTKESDKWGAANSEDLLAVILRQGYTARHVVITGGEPCIHDLMPLTDLLEKNGFSCQIETSGTHEVRCTPNTWVTVSPKVNMRGGYDVLSQALERANEIKHPVGRVRDIEALDELLATLSDDKPRIIALQPISQKDDATRLCIETCIARNWRLSMQTHKYLNIA

SEQ ID NO: 29268 - protein, 223 aa, Citrobacter freundii
  misc_feature (1)..(223): tr|A0A0D7M2N8|A0A0D7M2N8_CITFR 7-carboxy-7-deazaguanine synthase OS=Citrobacter freundii OX=546 GN=queE PE=3 S V=1
MQYPINEMFQTLQGEGYFTGVPAIFIRLQGCPVGCAWCDTKHTWDKLEDREVSLYSILAKTKESDKWGAASSEDLLAVISRQGYTARHVVITGGEPCIHDLMPLTDLLEKNGFSCQIETSGTHEVRCTPNTWVTVSPKVNMRGGYDVLSQALERANEIKHPVGRVRDIEALDELLATLSDDKPRIIALQPISQKEDATRLCIDTCIARNWRLSMQTHKYLNIA

SEQ ID NO: 29269 - protein, 223 aa, Citrobacter gillenii
  misc_feature (1)..(223): tr|A0A3E2KP47|A0A3E2KP47_9ENTR 7-carboxy-7-deazaguanine synthase OS=Citrobacter gillenii OX=67828 GN=queE PE=3 SV=1
MQYPINEMFQTLQGEGYFTGVPAIFIRLQGCPVGCAWCDTKHTWDKLEDREVSLYSILAKTKESDKWGAASGEDLLAVIQRQGYTARHVVITGGEPCIHDLMPLTDLLEKNGFSCQIETSGTHEVRCTPNTWVTVSPKVNMRGGYDVLSQALERANEIKHPVGRVRDIEALDELLATLTDDKPRIIALQPISQKDDATRLCIDTCIARNWRLSMQTHKYLNIA

SEQ ID NO: 29270 - protein, 223 aa, Citrobacter koseri
  misc_feature (1)..(223): tr|A0A381GYL6|A0A381GYL6_CITKO 7-carboxy-7-deazaguanine synthase OS=Citrobacter koseri OX=545 GN=queE PE=3 SV= 1
MQYPINEIFQTLQGEGYFTGVPAIFIRLQGCPVGCAWCDTKHTWDKLEDREVSLYSILAKTKESDKWGAASSEDLLAVINRQGYTARHAVITGGEPCIHDLMPLTDLLEKNGFSCQIETSGTHEVRCTPNTWVTVSPKVNMRGGYDVLSQALERANEIKHPVGRVRDIEALDELLATLSDDKPRIIALQPISQKEDATRLCIETCIARNWRLSMQTHKYLNIA

SEQ ID NO: 29271 - protein, 223 aa, Citrobacter koseri
  misc_feature (1)..(223): tr|A8ANY6|A8ANY6_CITK8 7-carboxy-7-deazaguanine synthas e OS=Citrobacter koseri (strain ATCC BAA-895 / CDC 4225 -83 / SGSC4696) OX=290338 GN=queE PE=3 SV=1
MQYPINEMFQTLQGEGYFTGVPAIFIRLQGCPVGCAWCDTKHTWDKLEDREVSLYSILAKTKESDKWGAASSEDLLAVISRQGYTARHVVITGGEPCIHDLMPLTDLLEKNGFSCQIETSGTHEVRCTPNTWVTVSPKVNMRGGYDVLSQALERANEIKHPVGRVRDIEALDELLATLSDDKPRIIALQPISQKEDATRLCIETCIVRNWRLSMQTHKYLNIA

SEQ ID NO: 29272 - protein, 223 aa, Citrobacter murliniae
  misc_feature (1)..(223): tr|A0A4S3RZK6|A0A4S3RZK6_9ENTR 7-carboxy-7-deazaguanine synthase OS=Citrobacter murliniae OX=67829 GN=queE PE= 3 SV=1
MQYPINEMFQTLQGEGYFTGVPAIFIRLQGCPVGCAWCDTKHTWDKLEDREVSLYSILAKTKESDKWGAASSEDLLTVIQRQGYTARHVVITGGEPCIHDLMPLTDLLEKNGFSCQIETSGTHEVRCTPNTWVTVSPKVNMRGGYDVLSQALERANEIKHPVGRVRDIEALDELLATLTDDKPRIIALQPISQKEDATRLCIDTCIARNWRLSMQTHKYLNIA

SEQ ID NO: 29273 - protein, 223 aa, Citrobacter pasteurii
  misc_feature (1)..(223): tr|A0A0A1RWS7|A0A0A1RWS7_9ENTR 7-carboxy-7-deazaguanine synthase OS=Citrobacter pasteurii OX=1563222 GN=queE P E=3 SV=1
MQYPINEMFQTLQGEGYFTGVPAIFIRLQGCPVGCAWCDTKHTWDKLEDREVSLYSILAKTKESDKWGAASSEDLLAVIQRQGYTARHVVITGGEPCIHDLMPLTDLLEKNGFSCQIETSGTHEVRCTPNTWVTVSPKVNMRGGYDVLSQALERANEIKHPVGRVRDIEALDELLATLSDDKPRIIALQPISQKEDATRLCIDTCIARNWRLSMQTHKYLNIA

SEQ ID NO: 29274 - protein, 223 aa, Citrobacter portucalensis; identical to SEQ ID NO: 29268
  misc_feature (1)..(223): tr|A0A4P7UZT6|A0A4P7UZT6_9ENTR 7-carboxy-7-deazaguanine synthase OS=Citrobacter portucalensis OX=1639133 GN=qu eE PE=3 SV=1

SEQ ID NO: 29275 - protein, 223 aa, Citrobacter rodentium
  misc_feature (1)..(223): tr|A0A482PG06|A0A482PG06_CITRO 7-carboxy-7-deazaguanine synthase OS=Citrobacter rodentium OX=67825 GN=queE PE= 3 SV=1
MQYPINEMFQTLQGEGYFTGVPAIFIRLQGCPVGCAWCDTKHTWDKLEDREVSLFSILAKTKESDKWGAASSEDLLAVINRQGYTARHVVITGGEPCIHDLMPLTALLEKNGFSCQIETSGTHEVRCTPNTWVTVSPKVNMRGGYDILSQALERANEIKHPVGRVRDIEALDELLATLSDDKPRVIALQPISQKEDATRLCIETCIARNWRLSMQTHKYLNIA

SEQ ID NO: 29276 - protein, 223 aa, Citrobacter sp.; identical to SEQ ID NO: 29263
  misc_feature (1)..(223): tr|A0A3Q8D786|A0A3Q8D786_9ENTR 7-carboxy-7-deazaguanine synthase OS=Citrobacter sp. CFNIH10 OX=1920110 GN=queE PE=3 SV=1

SEQ ID NO: 29277 - protein, 223 aa, Citrobacter sp.
  misc_feature (1)..(223): tr|A0A4P6WP34|A0A4P6WP34_9ENTR 7-carboxy-7-deazaguanine synthase OS=Citrobacter sp. LY-1 OX=2546350 GN=queE PE =3 SV=1
MQYPINEMFQTLQGEGYFTGVPAIFIRLQGCPVGCAWCDTKHTWDKLEDREVSLYSILAKTKESDKWGAASSEDLLAVILRQGYTARHVVITGGEPCIHDLMPLTDLLEKNGFSCQIETSGTHEVRCTPNTWVTVSPKVNMRGGYDVLSQALERANEIKHPVGRVRDIEALDELLATLSDDKPRIIALQPISQKEDATRLCIDTCIARNWRLSMQTHKYLNIA

SEQ ID NO: 29278 - protein, 223 aa, Citrobacter werkmanii
  misc_feature (1)..(223): tr|A0A422V9D2|A0A422V9D2_9ENTR 7-carboxy-7-deazaguanine synthase OS=Citrobacter werkmanii OX=67827 GN=queE PE= 3 SV=1
MQYPINEMFQTLQGEGYFTGVPAIFIRLQGCPVGCAWCDTKHTWDKLEDREVSLYSILAKTKESDKWGAASSEDLLAVIQRQSYTARHVVITGGEPCIHDLMPLTDLLEKNGFSCQIETSGTHEVRCTPNTWVTVSPKVNMRGGYDVLSQALERANEIKHPVGRVRDIEALDELLATLSDDKPRIIALQPISQKEDATRLCIDTCIARNWRLSMQTHKYLNIA

SEQ ID NO: 29279 - protein, 223 aa, Citrobacter werkmanii; identical to SEQ ID NO: 29278
  misc_feature (1)..(223): tr|A0A090U3E0|A0A090U3E0_9ENTR 7-carboxy-7-deazaguanine synthase OS=Citrobacter werkmanii NBRC 105721 OX=11149 21 GN=queE PE=3 SV=1

SEQ ID NO: 29280 - protein, 242 aa, Citrobacter youngae
  misc_feature (1)..(242): tr|D4BGZ6|D4BGZ6_9ENTR 7-carboxy-7-deazaguanine synthas e OS=Citrobacter youngae ATCC 29220 OX=500640 GN=queE P E=3 SV=1
MILWWGSAIIIVYPHIENAMQYPINEMFQTLQGEGYFTGVPAIFIRLQGCPVGCAWCDTKHTWDKLEDREVSLYSILAKTKESDKWGAASSEDLLAVIQRQGYTARHVVITGGEPCIHDLMPLTDLLEKNGFSCQIETSGTHEVRCTPNTWVTVSPKVNMRGGYDVLSQALERANEIKHPVGRVRDIEALDELLATLSDDKPRIIALQPISQKEDATRLCIDTCIACNWRLSMQTHKYLNIA

SEQ ID NO: 29281 - protein, 223 aa, Citrobacter youngae
  misc_feature (1)..(223): tr|A0A549VC30|A0A549VC30_9ENTR 7-carboxy-7-deazaguanine synthase OS=Citrobacter youngae OX=133448 GN=queE PE=3 SV=1
MQYPINEMFQTLQGEGYFTGVPAIFIRLQGCPVGCAWCDTKHTWDKLEDREVSLYSILAKTKESDKWGAASSEDLLAVIQRQGYTARHVVITGGEPCIHDLMPLTDLLEKNGFSCQIETSGTHEVRCTPNTWVTVSPKVNMRGGYDVLSQALERANEIKHPVGRVRDIEALDELLATLSDEKPRIIALQPISQKEDATRLCIDTCIARNWRLSMQTHKYLNIA

SEQ ID NO: 29282 - protein, 244 aa, Citromicrobium sp.
  misc_feature (1)..(244): tr|A0A2P0B0M0|A0A2P0B0M0_9SPHN 7-carboxy-7-deazaguanine synthase OS=Citromicrobium sp. RCC1897 OX=1812182 GN=q ueE PE=3 SV=1
MSLVLATDDAGGPEIFASVQGEGPSAGEPTAFVRLSRCNLACVWCDTAYTWHFAGDDRPHRSGQTFDRNANQVTLEVEDVAARIAALGQRRLVVTGGEPMLQAPALAQLLALLPDVTVEIETNGTAFPPPKLEVWVDQFNISPKLTHSGNARELAIVPAVLRRYASDGRAFFKFVVAEPADVEEVREVVRANALPRGRVFVMAEGTDGATLRARQDWLVPLCLEHGYRLSDRLHIHLFGDTRGT

SEQ ID NO: 29283 - protein, 234 aa, Citromicrobium sp.
  misc_feature (1)..(234): tr|A0A326GCA0|A0A326GCA0_9SPHN 7-carboxy-7-deazaguanine synthase OS=Citromicrobium sp. OX=2024827 GN=queE PE=3 SV=1
MPRTIFASVQGEGPSAGMPVAFMRLSRCNLACVWCDTAYTWHFQGDERPHRDGIEYDRKANQVSLPVDEVAARVLALGQSRLVITGGEPLLQAPALARMLDLLPDIGVEIETNGTTTAPPALDIRIDQFNVSPKLAHSGNAAELALLPERLDAYATDPRAWFKFVIAEPSDVDEVLALRDRYRFKPGHVFLMPEGTDSATLRTREKWLADLCLQHGFRMSDRLHIHLFGDTRGT

SEQ ID NO: 29284 - protein, 209 aa, Cloacibacterium normanense
  misc_feature (1)..(209): tr|A0A1E5UCB6|A0A1E5UCB6_9FLAO 7-carboxy-7-deazaguanine synthase OS=Cloacibacterium normanense OX=237258 GN=qu eE PE=3 SV=1
MDLTEEILLKEGKMLPVMEHFYTLQGEGHHTGKAAYFIRLGGCDVGCHWCDVKESWDPELHPLMDTVEIAEIAASYCKTIVLTGGEPLMWNLEILTKRLKELGCQIHIETSGAYDMSGTLDWITLSPKKTGLPKEGIYKVANELKIIVFNNHDFTFAEEQAAKVSENCKLYLQSEWSKRNEMYPKITDFILANPKWQASVQTHKYLNIP

SEQ ID NO: 29285 - protein, 209 aa, Cloacibacterium normanense
  misc_feature (1)..(209): tr|A0A2S7I627|A0A2S7I627_9FLAO 7-carboxy-7-deazaguanine synthase OS=Cloacibacterium normanense OX=237258 GN=qu eE PE=3 SV=1
MDLTKEILLKEGKMLPVMEHFYTLQGEGHHTGKAAYFIRLGGCDVGCHWCDVKESWDPELHPLMDTVEIAEIAASYCKTIVLTGGEPLMWNLEILTKRLKELGCQIHIETSGAYEMSGTLDWITLSPKKTGLPKEEIYKVANELKIIVFNNHDLFFAEEQAAKVSENCKLYLQSEWSKRNEMYPKITDFILANPKWQASVQTHKYLNIP

SEQ ID NO: 29286 - protein, 209 aa, Cloacimonas acidaminovorans
  misc_feature (1)..(209): tr|B0VFJ6|B0VFJ6_CLOAI 7-carboxy-7-deazaguanine synthas e OS=Cloacimonas acidaminovorans (strain Evry) OX=45934 9 GN=queE PE=3 SV=1
MEKHLNVTEIFYSLQGESAYSGYPCIFIRLSECNLRCVYCDTQYAFGKGKSMAISSIMEEVKKYPCSLTEITGGEPLLQEDVDALFEELHKSSYKILLETNGAISLEKVPDYVIKIVDVKTPGSGMVDAFLKDNLDYLNDKDELKFVLTDKNDYQFALSFLAQYKPKVNIIHFSPLTEVLEPKELAKWMLKDGIKAKLTLQLHKIIGIE

SEQ ID NO: 29287 - protein, 244 aa, Clostridia bacterium
  misc_feature (1)..(244): tr|A0A523C2E0|A0A523C2E0_9FIRM 7-carboxy-7-deazaguanine synthase OS=Clostridia bacterium OX=2044939 GN=queE PE =3 SV=1
MAGYLAEVFSSVQGEGLWVGARHLFLRLSGCNLSCGYCDTPAALRPSPDWRLEKMPGRREFVSMANPVGGEDLATILLALLGSPHRALAVTGGEPLLQADFLAELLAYVSRKIPVYLETNGTLPDRLGKLLPMVDIISMDIKLPGACGRELWEEHREFLRLAGKKRLFVKIVVTSDTLDEEIEQAMALVAGEDGRIPVVLQPVTPGSRAQPPAAARLRAWQERALSALEDVRVIPQVHPILREL

SEQ ID NO: 29288 - protein, 220 aa, Clostridiaceae bacterium
  misc_feature (1)..(220): tr|A0A316N2D3|A0A316N2D3_9CLOT 7-carboxy-7-deazaguanine synthase OS=Clostridiaceae bacterium OX=1898204 GN=que E PE=3 SV=1
MNTYKVVEIFESINGEGMKAGELSVFVRLCGCNLHCSYCDTSWANEKDAPYQEMTARQIVQKAEAYGTKNVTLTGGEPLLAEHVLELLEALSEKFCVEIETNGSIALDPFCKKDRKVIFTMDYKLKGSGMEEQMCLSNFALLQRDDTVKFVVSDQTDLERAYEIEQKYALGQKCHVLISPVFGKIIPADMVAFMMEKKWVTARMQIQMHKVIWDPQARGV

SEQ ID NO: 29289 - protein, 221 aa, Clostridiales bacterium
  misc_feature (1)..(221): tr|A0A1F8U0K5|A0A1F8U0K5_9FIRM 7-carboxy-7-deazaguanine synthase OS=Clostridiales bacterium GWB2_37_7 OX=17976 77 GN=queE PE=3 SV=1
MDFKVVEKFVSINGEGRLCGQLAIFIRFAGCNLSCSYCDTAWANEKNIPYERMSSRDIYEYVKSTGVRNITLTGGEPLWQEGIIELLEVLSKDKELHVEIETNGSVLLDKFLNIENPPSFTMDYKLPSSNMENKMALDNFKYLTSKDTVKFVAGRIEDLEKTKEIINRYNLADKTSVYISPVFGEIHLDSIVEFMKDNKMNGIHLQVQLHKIIWEPSKRGV

SEQ ID NO: 29290 - protein, 317 aa, Clostridiales bacterium
  misc_feature (1)..(317): tr|A0A354IDB7|A0A354IDB7_9FIRM 7-carboxy-7-deazaguanine synthase OS=Clostridiales bacterium OX=1898207 GN=queE PE=3 SV=1
MAEEFARLAHAAQRKTLEMAVDAALKARKKDREKTYLQILNVAKTFYGKNIKPESFENVRKAIQDPDNKWIRFINRVLDETDPNVAKTTLLNLGYEAFFRGTSMIRKNREKYDCNIPWLILFDPTSACNMHCTGCWAAEYGHKQSLSYEVMDKVLTEGKPLGLHACLFTGGEPLLRKGMGALLRRLSKQPELRIEIETNGSVDLTPFAGLSPAITFTMDYKLPGSGMEAEMCTNNLRLLSPDDTVKFVAGSREDLLRALEIIRQYDLTHRCHVYLSPVFGRIEPAEMVAFMQEHVLNDVTLQLQMHKIIWDPNMRGV

SEQ ID NO: 29291 - protein, 210 aa, Clostridium aceticum
  misc_feature (1)..(210): tr|A0A0G3WEL0|A0A0G3WEL0_9CLOT 7-carboxy-7-deazaguanine synthase OS=Clostridium aceticum OX=84022 GN=queE PE=3 SV=1
MLKVNEIFLSIQGEGISTGYPTVFLRLSGCNLRCLYCDTSYSYEDGEEMTMEEVLEKVTSYGYKRVCLTGGEPLLQQEIKTLLTALKEYEINIETNGSVDIRLFPLGEKHRFTMDIKTPSSGEAENNCLSNFKYLRENDEIKIVIGDHQDYLWAKDLLRQHYEQGIITFSPIYNRVDPKKIVQWMLEDGIDARFQLQLHKILWDPEERGV

SEQ ID NO: 29292 - protein, 221 aa, Clostridium acetireducens
  misc_feature (1)..(221): tr|A0A1E8EZ74|A0A1E8EZ74_9CLOT 7-carboxy-7-deazaguanine synthase OS=Clostridium acetireducens DSM 10703 OX=112 1290 GN=queE_2 PE=3 SV=1
MNFKVVEKFVSINGEGTLAGQLAVFIRFAGCNLNCSYCDTTWANEKDVCYELNTAEDIYNYIKSTGVRNVTLTGGEPLLQKGIIDLLKLLSKHKEIHVEIETNGSVLLDEFLAIENPHSFTMDYKLPSSNMESKMLLDNFKYLTKKDTVKFVSGSIEDLEKAKYIIDTYKLTERTNVYISPVFGQISLDSIVEFMKCNNMNGVNMQIQLHKIIWNPNKRGV

SEQ ID NO: 29293 - protein, 171 aa, Clostridium acetireducens
  misc_feature (1)..(171): tr|A0A1E8EZL0|A0A1E8EZL0_9CLOT Anaerobic ribonucleoside -triphosphate reductase-activating protein OS=Clostridi um acetireducens DSM 10703 OX=1121290 GN=queE_1 PE=3 SV =1
MIILNIQVAGFLDNSLVNGQGLRSVLFVSGCRHNCLGCHNKEMQSFNYGDALDIDIVLDRIKRNIPIIRGVTFSGGEPFEQSEALWILAKKIKELKLSIWCYTGYTYEYIISHVSENKYWNNMLKYIDVLIDGKFEEDKKDLNIKYRGSKNQRIIDVKKSLDLGKIVTIDL

SEQ ID NO: 29294 - protein, 221 aa, Clostridium acetobutylicum
  misc_feature (1)..(221): sp|Q97D55|QUEE_CLOAB 7-carboxy-7-deazaguanine synthase OS=Clostridium acetobutylicum (strain ATCC 824 / DSM 79 2 / JCM 1419 / LMG 5710 / VKM B-1787) OX=272562 GN=queE PE=3 SV=1
MNYKVVEKFVSINGEGLKSGQLSVFIRFAGCNLNCNYCDTKWANEKDVKYTLMTEKEILSYIKETGVKNVTLTGGEPLLQDGIVELLNLLSLDSTLRVEIETNGSVSLENFLNFKNAPSFTMDYKLPDSSMENFMKTSNFKFLNKKDVIKFVVSSLKDLKKAMDIITEFNLSKKTNIYISPVFGRISPETIVDFMKDNKLNDVTLQIQIHKIIWNPNKRGV

SEQ ID NO: 29295 - protein, 223 aa, Clostridium acidisoli
  misc_feature (1)..(223): tr|A0A1W1XKC8|A0A1W1XKC8_9CLOT 7-carboxy-7-deazaguanine synthase OS=Clostridium acidisoli DSM 12555 OX=1121291 GN=queE PE=3 SV=1
MNYNVIEKFLSIDGEGPTAGEIATFIRFGGCNLKCDWCDTAYSISRSAIGDSLTKEEIYIIIKDNGTKNVTLTGGEPLIQEGIEDLIYFLAKDSKLLIHIETNGSVPFYKFERINHLNNVSFIVDYKLPSSKMESNMHLKNFEMLSSKDVCKFVIGTEEDLKKAKIVLEKYKLLRKCLVYFSPITTSIKLVKIVEFMKSNKLNGVRLQIQLHKIIWNPETRGV

SEQ ID NO: 29296 - protein, 222 aa, [Clostridium] algidixylanolyticum
  misc_feature (1)..(222): tr|A0A419T7V9|A0A419T7V9_9FIRM 7-carboxy-7-deazaguanine synthase OS=[Clostridium] algidixylanolyticum OX=94868 GN=queE PE=3 SV=1
MAQYKVVEKFVSINGEGILAGQLAVFIRFQGCNLSCSFCDTAWANKDDAEFTFMTEQQIKDYIKETGVKNVTLTGGEPLLVPDILQLLQLLATDQFLHIEIETNGSIELNTFADISNPPAFTMDYKLPGSLMEDKMLVSNLTLLTKKDTVKFVVGNKEDLNRAKEVIIAYDLTTRCHIYISPVFGKINLEEIVDYLIQNCLNGVTMQLQMHKVIWNPNKRGV

SEQ ID NO: 29297 - protein, 221 aa, Clostridium argentinense
  misc_feature (1)..(221): tr|A0A0C1U3W1|A0A0C1U3W1_9CLOT 7-carboxy-7-deazaguanine synthase OS=Clostridium argentinense CDC 2741 OX=14181 04 GN=queE PE=3 SV=1
MKLKVVEKFVSINGEGLLCGQLAVFIRFPGCNLNCSYCDTSWANEKNVAYEYMSIEDIYSYIKSTKVKNVTLTGGEPLLQQGTIELIERLSKDSELHVEIETNGSVLLQEFLKTEKPPSFTMDYKLPSSNMERNMELNNFKYLTKKDTVKFVSGSVDDLEKAKYIIDKFKLIDKTNVYVSPVFGGISLDSIVEFMKENNMNGVTLQVQLHKVIWDANKRGV

SEQ ID NO: 29298 - protein, 220 aa, Clostridium bartlettii
  misc_feature (1)..(220): tr|R5XRW5|R5XRW5_9CLOT 7-carboxy-7-deazaguanine synthas e OS=Clostridium bartlettii CAG:1329 OX=1263063 GN=queE PE=3 SV=1
MFNIIEKFVSIDGEGPTAGELATFIRFQGCNLRCSWCDTTYSFDKSEITEVLSAHEIYDYIKSTGVSNVTLTGGEPLFQENIDEVLSLLNDDKNLVVHIETNGAIDILPFKEKYPNIIFILDYKLASSNMTHLMKLDNLNYVTNKDVYKFVLGSDEDLQEAYELITKFNLTNKCLVYFSPVFGAIKLEDIVEFMKEKNLNKVRLQVQLHKVIWDPNMKGV

SEQ ID NO: 29299 - protein, 222 aa, Clostridium beijerinckii
  misc_feature (1)..(222): tr|A0A2S2B0W1|A0A2S2B0W1_CLOBE 7-carboxy-7-deazaguanine synthase OS=Clostridium beijerinckii OX=1520 GN=queE P E=3 SV=1
MFNIVEKFLSIDGEGPSSGELATFIRFQGCNLRCSWCDTTYSWEKESTCEVLNAKEIYSYIKENKATNVTLTGGEPLIQENIDELLELLDSDDNLQIHIETNGSVDIEPFKKKYTHSNLHYIVDFKLPSSNMTNKMNLSNLNIVEPNDVYKFVLGSNEDLQIAYDVIKKYNLTSKCLVYLSPVSGTINMEEIVEFMKDKNLNKVRLQIQLHKVIWDKNARGV

SEQ ID NO: 29300 - protein, 222 aa, Clostridium beijerinckii
  misc_feature (1)..(222): tr|A0A0K2MDX6|A0A0K2MDX6_CLOBE 7-carboxy-7-deazaguanine synthase OS=Clostridium beijerinckii NRRL B-598 OX=142 8454 GN=queE PE=3 SV=1
MFNIIEKFLSIDGEGPTSGELATFIRFQGCNLRCSWCDTTYSWDKENTSEVLTAEEIYKYIKENKVTNVTLTGGEPLIQKNIHELLGLLNSDDNLKVHIETNGAVNIGTFKNKFINNNISYIVDFKLPSSNMMDRMDFNNLSIVESNDVYKFVIGSKEDLQIAYEIICKHNLTSKCFVYLSPVSGNIEMQEIVEFMKDKNLNKVRLQVQLHKIIWDKNARGV

SEQ ID NO: 29301 - protein, 222 aa, Clostridium bornimense
  misc_feature (1)..(222): tr|W6RT34|W6RT34_9CLOT 7-carboxy-7-deazaguanine synthas e OS=Clostridium bornimense OX=1216932 GN=queE PE=3 SV= 1
MFNIIEKFLSIDGEGPTSGQLATFIRFQHCNLRCTWCDTTYSWDKENTTEVLSAKEIYDYIKANGAKNVTLTGGEPLIQEGIDELLELLDNDKDLSVHIETNGSVDIASFKARHRGGNISYIVDFKLPKSGMTKKMNLENLKNIESTDVYKFVVGSNEDLEMAYNIIKDYDLTSKCLIYFSPVLGEIEMDEIVEFMKDKKLNNVRLQVQLHKIIWHKDARGV

SEQ ID NO: 29302 - protein, 221 aa, Clostridium botulinum
  misc_feature (1)..(221): tr|A5I230|A5I230_CLOBH 7-carboxy-7-deazaguanine synthas e OS=Clostridium botulinum (strain Hall / ATCC 3502 / N CTC 13319 / Type A) OX=441771 GN=queE PE=3 SV=1
MDFKVVERFVSINGEGRRCGQLAIFIRFAGCNLNCSYCDTLWANEKDVPYEVLSSKDIYEYIKSKEVKNVTLTGGEPLLQKGIMELLKLLSKDKELYVEIETNGSILLDEFLNIENSPSFTMDYKLPLSNMENKMALDNFKYLTKKDTVKFVSGSIEDLEKAREIINKYNLVDKTNVYISPVFGKINLDTIVEFMKNNRMNGVNLQLQLHKIIWEPSKRGV

SEQ ID NO: 29303 - protein, 221 aa, Clostridium botulinum; identical to SEQ ID NO: 29302
  misc_feature (1)..(221): tr|C1FN25|C1FN25_CLOBJ 7-carboxy-7-deazaguanine synthas e OS=Clostridium botulinum (strain Kyoto / Type A2) OX= 536232 GN=queE PE=3 SV=1

SEQ ID NO: 29304 - protein, 222 aa, Clostridium butyricum
  misc_feature (1)..(222): tr|C4IIS5|C4IIS5_CLOBU 7-carboxy-7-deazaguanine synthas e OS=Clostridium butyricum E4 str. BoNT E BL5262 OX=632 245 GN=queE PE=3 SV=1
MFNIIEKFLSVDGEGPSSGELATFIRFQGCNLRCSWCDTVYSWQKENINERLNAKEIYDYIKSNKVNNVTLTGGEPLIQKNIDELLRLLDDDSNLNIHIETNGSIDIEPFKKKYTRGNISYIVDFKLPSSKMSSHMNYNNINMISKNDVYKFVIGNMDDLKKAYEIIHVYDLANKCKVYLSPVTGNIEMSDIVEFMKDKNMNKVRLQVQLHKIIWDKDARGV

SEQ ID NO: 29305 - protein, 222 aa, Clostridium butyricum
  misc_feature (1)..(222): tr|A0A0Q0TZC7|A0A0Q0TZC7_CLOBU 7-carboxy-7-deazaguanine synthase OS=Clostridium butyricum OX=1492 GN=queE PE=3 SV=1
MFNIIEKFLSVDGEGPSSGELATFIRFQGCNLRCSWCDTVYSWQKENINERLNAQEIYDYIKSNKVNNVTLTGGEPLIQKNIDELLRLLDDDSNLNIHIETNGSIDIEPFKKKYTRGNISYIVDFKLPSSKMSSHMNYNNINMISKNDVYKFVIGNMDDLKKAYEIIHVYDLANKCKVYLSPVTGNIEMSDIVEFMKDKNMNKVKLQVQLHKIIWDKDARGV

SEQ ID NO: 29306 - protein, 221 aa, Clostridium carboxidivorans
  misc_feature (1)..(221): tr|C6PUT3|C6PUT3_9CLOT 7-carboxy-7-deazaguanine synthas e OS=Clostridium carboxidivorans P7 OX=536227 GN=queE P E=3 SV=1
MGFKVVEKFISINGEGPMSGQLAVFIRFAGCNLRCSYCDTLWANEKDVPYETFNAKEIYEYIKSTSIKNVTLTGGEPLMQQDIMELLKLLCEDKNLYVEVETNGSIAVDKFLKVENPPSLTMDYKLPSSNMENNMNMDNLKYLTKNDTVKFVAGSIEDLEKAKNIIYIHKLVEKTRVYISPVFGKIAMDEIVQFMLDNKMNGVNLQVQLHKIIWDPDKRGV

SEQ ID NO: 29307 - protein, 220 aa, Clostridium cellulovorans
  misc_feature (1)..(220): tr|D9SMJ4|D9SMJ4_CLOC7 7-carboxy-7-deazaguanine synthas e OS=Clostridium cellulovorans (strain ATCC 35296 / DSM 3052 / OCM 3 / 743B) OX=573061 GN=queE PE=3 SV=1
MYKVVEKFVSINGEGLRAGELAVFIRFLGCNLKCSYCDTKWANEPECPYELMSGEEIYAYIKETGVRNVTLTGGEPLIQKEMKELIDLLLKDGLLRIEIETNGSVDVQQINYSSERVSITLDYKGKSSLMEGYMKRDSFKLLTKKDSVKFVVGDNEDLERALSFIKECELLEKTNVLFSCIFDKIQPAEVVEFMKNNKLIEARIQLQLHKYIWGPTVKGV

SEQ ID NO: 29308 - protein, 222 aa, Clostridium chromiireducens
  misc_feature (1)..(222): tr|A0A1V4IC14|A0A1V4IC14_9CLOT 7-carboxy-7-deazaguanine synthase OS=Clostridium chromiireducens OX=225345 GN=q ueE PE=3 SV=1
MFNVIEKFLSIDGEGPTSGELATFVRFQGCNLRCSWCDTTYSWDKENIYERLNSKDIYNYIKENKAKNVTLTGGEPLVQDNIDELLELLNSDNNLKVHIETNGSVDIEPFKKRYIENNISYIVDFKLPSSHMTEKMNLNNLEVVGLDDVYKFVVGSREDLQMAYDIIRRYDLTSKCLVYLSPVSGNIDMQEIVEFMKDKNLNNVKLQIQLHKIIWDKNARGV

SEQ ID NO: 29309 - protein, 220 aa, [Clostridium] cocleatum
  misc_feature (1)..(220): tr|A0A1I0EYN7|A0A1I0EYN7_9FIRM 7-carboxy-7-deazaguanine synthase OS=[Clostridium] cocleatum OX=69824 GN=queE P E=3 SV=1
MNKYKVIEKFISINGEGSRAGQLSAFIRFNYCNLNCSYCDTKYANTVDASYELLTEQDILDYLNDNNVINVTLTGGEPLIQDNIDILINLLLENNYSVEIETNGSIDIKPFINKKRPIFTLDYKTPSSNMENKMYLNNYQYLTKNDVVKFVVGNYDDLNKTKEIINTYDLTNHAKVYLSPVFGMIEPSTIVDYMIKHQMNDVYMQLQMHKFIWDVNQRGV

SEQ ID NO: 29310 - protein, 222 aa, Clostridium colicanis
  misc_feature (1)..(222): tr|A0A151AR20|A0A151AR20_9CLOT 7-carboxy-7-deazaguanine synthase OS=Clostridium colicanis DSM 13634 OX=1121305 GN=queE PE=3 SV=1
MTHYKVAEKFISLNGEGVLVGQPAVFIRFHGCNLSCSFCDTTWANEKDAAYSLMTEHQIYEYIKGTGIKNVTLTGGEPLLVPAIEELLCLLSSDQCLHVEIETNGSIDLSPFANIQNPPSFTMDYKLPSSLMEDKMLVSNFKILSKKDTVKFVVGNMEDLNRAREVIHEYDLANKCHVLISPVYGRIKLDKIADYLIKHRMNNVAMQLQMHKIIWEPNRRGV

SEQ ID NO: 29311 - protein, 221 aa, Clostridium combesii
  misc_feature (1)..(221): tr|A0A2G7HEE3|A0A2G7HEE3_9CLOT 7-carboxy-7-deazaguanine synthase OS=Clostridium combesii OX=39481 GN=queE PE=3 SV=1
MDFKVVERFVSINGEGRRCGQLAIFIRFAGCNLNCSYCDTLWANEKDVPYEVLSSKDIYEYIKSKEVKNVTLTGGEPLLQKGIMELLKLLSKDKELYVEIETNGSILLDEFLNIENSPSFTMDYKLPLSNMENKMALDNFKYLTKKDTVKFVSGSIEDLEKAREIINKYNLVDKTNVYISPVFGKINLDTIVEFIKNNRMNGVNLQLQLHKIIWEPSKRGV

SEQ ID NO: 29312 - protein, 169 aa, Clostridium coskatii
  misc_feature (1)..(169): tr|A0A166S605|A0A166S605_9CLOT Anaerobic ribonucleoside -triphosphate reductase-activating protein OS=Clostridi um coskatii OX=1705578 GN=queE PE=3 SV=1
MGCKKIRLAGIAYESLVNGPGMRRVFFAQGCRHNCKGCFNPSTHDFKGGQLKDIDKLVCDIKDNPMVSGVTFSGGDPFEQPEEFAYMADKIKELNLNIWCYTGYTFESIVNGSDMAKKCLLNNVDVLVDGKFEENKKDTKLKFKGSSNQRIIDVKKSLDSNDVVVLTFS

SEQ ID NO: 29313 - protein, 220 aa, Clostridium cylindrosporum
  misc_feature (1)..(220): tr|A0A0J8D839|A0A0J8D839_CLOCY 7-carboxy-7-deazaguanine synthase OS=Clostridium cylindrosporum DSM 605 OX=1121 307 GN=queE PE=3 SV=1
MFNIIEKFLSVDGEGPTSGELATFIRFFNCNLRCSWCDTTYSWDRYNISEVLSARDIYDYIKGNGARNVTLTGGEPLIQDGIENLLDMLNKDSDLVVHIETNGSIDILPFKERFQNISFIVDYKLPKSGMTNRMNTGNLKSVEIDDVYKFVVGSREDLDVAYSIIKEHELTSKCLVYFSPVLGEIEMETIVDFMKEKKLNEVRLQVQLHKVIWDKDARGV

SEQ ID NO: 29314 - protein, 222 aa, Clostridium diolis
  misc_feature (1)..(222): tr|A0A2P8RLY3|A0A2P8RLY3_9CLOT 7-carboxy-7-deazaguanine synthase OS=Clostridium diolis OX=223919 GN=queE PE=3 SV=1
MFNIIEKFLSIDGEGPTSGELATFIRFQGCNLRCSWCDTTYSWDKENTSEVLTAEEIYKYIKENKVTNVTLTGGEPLIQKNIHELLELLNSDDNLKVHIETNGAVNIGTFKNKFINNNISYIIDFKLPSSNMMDRMDFNNLSIIESGDVYKFVIGSKEDLQIAYEIICKYNLTSKCFVYLSPVSGNIEMQEIVEFMKDKNLNKVRLQVQLHKIIWDKNARGV

SEQ ID NO: 29315 - protein, 222 aa, Clostridium diolis; identical to SEQ ID NO: 29300
  misc_feature (1)..(222): tr|A0A5A5ULG4|A0A5A5ULG4_9CLOT 7-carboxy-7-deazaguanine synthase OS=Clostridium diolis OX=223919 GN=queE PE=3 SV=1

SEQ ID NO: 29316 - protein, 222 aa, Clostridium disporicum
  misc_feature (1)..(222): tr|A0A174ELU8|A0A174ELU8_9CLOT 7-carboxy-7-deazaguanine synthase OS=Clostridium disporicum OX=84024 GN=queE PE =3 SV=1
MVKYKVVEKFVSINGEGKKAGQLAVFIRFQGCNLRCSYCDTMWANEKDVEYEYMSCEDIYNYVKENNVTNITLTGGEPLLQKGISSLIKMLMEDGNYQVEIETNGSISIEEFMKLDKPPAFTIDYKLPASGMEEAMDKSNFELLQKKDTVKFVISDMNDLIVTKNIIKKYNLIEKCSVYLSPVFNKIDSKEIVNFMIDNNLNKVNVQIQMHKIIWDSNSRGV

SEQ ID NO: 29317 - protein, 221 aa, Clostridium estertheticum
  misc_feature (1)..(221): tr|A0A1J0GE58|A0A1J0GE58_9CLOT 7-carboxy-7-deazaguanine synthase OS=Clostridium estertheticum subsp. esterthet icum OX=1552 GN=queE PE=3 SV=1
MEYKVVEKFISVNGEGPLSGQLVVFIRFAGCNLNCSYCDTTWANEKDASYNLMTPDDIYEYIKSTQIRNVTLTGGEPLLQEGIIELLNVLSIDNSIHIEIETNGSINLSKFANIENPPSFNMDYKLPSSNMEGPMDLNNFAYLTYKDTVKFVASSMEDLQKSKRIIDKYALTNKTNVYISPVFGQIDLEKIVEFMKSNKMNGVNLQVQLHKIIWDPNKRGV

SEQ ID NO: 29318 - protein, 221 aa, Clostridium felsineum
  misc_feature (1)..(221): tr|A0A1S8L3U1|A0A1S8L3U1_9CLOT 7-carboxy-7-deazaguanine synthase OS=Clostridium felsineum DSM 794 OX=1121310 G N=queE_2 PE=3 SV=1
MNYKVVEKFISINGEGLKAGKLSTFIRFAGCNLNCVYCDTKWANEENVKYTLMTENEIYSYIKETGVKNVTLTGGEPLLQNNIKELLSLLSSNNDLNVEIETNGSINLEAFLDYKNMPSFTMDYKLPDSGMETFMKTSNFKFLTMKDVIKFVVSSLKDLEKVTELIKEFKLTHKTNVYISPVFGKISPETIVEFMKNNKLNDVTLQIQIHKIIWNPNKRGV

SEQ ID NO: 29319 - protein, 498 aa, Clostridium felsineum
  misc_feature (1)..(498): tr|A0A1S8LIQ6|A0A1S8LIQ6_9CLOT 7-carboxy-7-deazaguanine synthase OS=Clostridium felsineum DSM 794 OX=1121310 G N=queE_1 PE=4 SV=1
MINYNNTFYEVNDGIVFNKIDERILVYKNKFYELKGDNLEIFKLLISRGKFNLEDRFKRKFLILYKIGLIKECTYGIKELIISKDTNIFKYENKFYIVNFKYGNINELSENDYKKLKAKDLSLSESSITDLLIKNYLQYKTNKESINNKEIKDKRVYIIFSYNCNMQCVYCFESHVNKNHISQDTFNKILNLVKDIDSRYNQTIVLYGGEPLLDENYNCIQALFNNELKRTKFDIITNGTNIDRYKELFLEFREKINDFIITLDGTEDIHNKRRRFGSNSFTIIIKNIETLIKNNFTVKIRINLDDKNISCQADLIKYLNEIFRENTQKLVIEYHRVEEKKNPLYEPISFKKLYELAKNNKSSNILVLYNDEIINRFINPSFYCKNEYYSDNYCDYYNNIVIDFNGSIYHCNEAMGNKDMIIEHIDRFKLDSLYENKTNDLTEKCKWCRYFVICKGNCFMENKIKKDLINRPVCRRKQYDDLINFIIENNSVKGIGNI

SEQ ID NO: 29320 - protein, 222 aa, [Clostridium] fimetarium
  misc_feature (1)..(222): tr|A0A1I0RJ12|A0A1I0RJ12_9FIRM 7-carboxy-7-deazaguanine synthase OS=[Clostridium] fimetarium OX=99656 GN=queE PE=3 SV=1
MSQYKVVEKFVSINGEGVFAGQLAVFIRFQGCNLSCSFCDTLWANAKNAPYTLMSEHQIYDYIKETGIKNVTLTGGEPLLVPDILTLLQLLATDQFLRVEIETNGSIALDSFVGISNSPTFTMDYKLPGSLMEANMLVSNFNILSKQDTVKFVVGSTEDLNRAKDIITIYGLTTKCHVYISPVFGKIQLQEIVDFLIANCLNDVTMQIQMHKVIWDPNKRGV

SEQ ID NO: 29321 - protein, 209 aa, Clostridium formicaceticum
  misc_feature (1)..(209): tr|A0A1D9FS23|A0A1D9FS23_9CLOT 7-carboxy-7-deazaguanine synthase OS=Clostridium formicaceticum OX=1497 GN=queE PE=3 SV=1
MKVNEIFLSIQGEGISTGYPTVFLRLAGCNLRCRYCDTSYSYAEGEEMTVEEVFKKVTSYGYKRVCLTGGEPLLQQEIKILLAALKEYEINIETNGSVDICLFPLGENHRFTMDIKTPSSGEADSNCLSNFKYLREKDEIKIVLGDYQDYLWARDLLKQHYKKGIITFSPIYNRIDPKKIVQWMLEDRIDARFQLQLHKILWHPEARGV

SEQ ID NO: 29322 - protein, 221 aa, Clostridium gasigenes
  misc_feature (1)..(221): tr|A0A1H0NUM2|A0A1H0NUM2_9CLOT 7-carboxy-7-deazaguanine synthase OS=Clostridium gasigenes OX=94869 GN=queE PE= 3 SV=1
MNFKVVEKFVSINGEGRLCGQLAIFIRFAGCNLNCSYCDTTWANEKNVSYDLMSSMDIYEYIKSTKVKNITLTGGEPLLQNGILELLEVLSKDTELSVEIETNGSVLINKFCNIKNPPSFTMDYKLPSSNMEDKMDLANFEYLTKNDTVKFVCGSLDDLSKSKYIIDKYNLIDKASVYISPVFGKINISDMVDFMKDNNMNNVNLQIQIHKIIWDKNKRGV

SEQ ID NO: 29323 - protein, 199 aa, [Clostridium] hiranonis
  misc_feature (1)..(199): tr|A0A5C0T3B0|A0A5C0T3B0_9FIRM 7-carboxy-7-deazaguanine synthase OS=[Clostridium] hiranonis OX=89152 GN=queE P E=4 SV=1
MMTIFYPIGDSLYVNLTNKCPCRCVFCVREEHETVGNNNSLWLDHDPSMEEIKADLERFNLDDYKEIVFCGFGEPMMRMDDLIETAKYIKSKADIKTRINTNGLGDLIHEKNTAECIKDCIDSVSISLNAPDKESYCRVTRPKFGEQSFEAMLKFAEECRDCGINIAFSVVDEITPEEIEKSKELAESLGVKLRVRHKR

SEQ ID NO: 29324 - protein, 221 aa, Clostridium homopropionicum
  misc_feature (1)..(221): tr|A0A0L6Z6T3|A0A0L6Z6T3_9CLOT 7-carboxy-7-deazaguanine synthase OS=Clostridium homopropionicum DSM 5847 OX=11 21318 GN=queE_2 PE=3 SV=1
MNFKIVEKFVSVNGEGPLCGQLAVFIRFSGCNLNCSYCDTAWANKIDIPYELMTDKDIYDYIKSTGIKNITLTGGEPLIQEGIIELLKRLSKDRELHVEIETNGSVIFDKFSHIENPPSFTMDYKLPSSNMENKMALDNFKYLSKKDTVKFVSGSIEDLERAKNLIDTYSLVDRTRLYISPVFGKISMDKIVEFMKYNKMNGVNLQLQLHKVIWDPKKRGV

SEQ ID NO: 29325 - protein, 158 aa, Clostridium homopropionicum
  misc_feature (1)..(158): tr|A0A0L6Z7F0|A0A0L6Z7F0_9CLOT Anaerobic ribonucleoside -triphosphate reductase-activating protein OS=Clostridi um homopropionicum DSM 5847 OX=1121318 GN=queE_1 PE=3 S V=1
MKLRVAGFLDNTMVNGKGLRSTLFLSGCNHNCEGCQNKEMQSFQYGDDVELEKINERIKRNIPLISGVTFSGGEPFEQAKELTELAKKIKEENLDIWCYTGYTIEEILKSNDEYKLNLLKQLDVLVDGKFNKHLVEGALKYTGSRNQRIINLKEVNIF

SEQ ID NO: 29326 - protein, 275 aa, [Clostridium] hylemonae
  misc_feature (1)..(275): tr|A0A5C0STE7|A0A5C0STE7_9FIRM 7-carboxy-7-deazaguanine synthase OS=[Clostridium] hylemonae DSM 15053 OX=55397 3 GN=queE_2 PE=4 SV=1
MKKECRVCMHRCVLDEGQTGRCRARMNRGGEIICGNYGHITALALDPIEKKPLRRFFPGTKVLSVGSYGCNLNCPFCQNHDISMRGEDRRRNVFLTPEELAERAAELGEKGNIGIAFTYNEPMISYEYIRDTALLVRKAKMKSVVVTNGSVTEETLRRVLPYIDAMNIDLKGFTEEYYHMLGGDLETVKHFIQCAAQECHVELTTLIVPGKNDSAGEMRELARWAAGIDRKLPLHVTRFFPAFRMEDGCPTDIQTVYRLAGEAAKYLDHVYTGNC

SEQ ID NO: 29327 - protein, 198 aa, [Clostridium] hylemonae
  misc_feature (1)..(198): tr|C0C518|C0C518_9FIRM 7-carboxy-7-deazaguanine synthas e OS=[Clostridium] hylemonae DSM 15053 OX=553973 GN=que E_1 PE=4 SV=1
MADILYTYKNQVYANITNKCDCRCTFCIRSHEDSVGDAKTLWHKTDPSLEEVIAAMDAFDFTGYDELVYCGYGEPTCALETLTASAKYAKEKYGVRIRVNTNGLANLYYGRDIIPALAGIVDSVSISLNAPTSEEYDKVTRPRFTGAFDALLQFASECKDYIPDVRLTIVDVLPQDKIEASQALADSLGITLRIRKYA

SEQ ID NO: 29328 - protein, 258 aa, [Clostridium] indolis
  misc_feature (1)..(258): tr|A0A3P6KCQ0|A0A3P6KCQ0_9FIRM Putative 7-cyano-7-deaza guanosine (PreQ0) biosynthesis protein QueE OS=[Clostri dium] indolis OX=69825 GN=NCTC11811_01034 PE=4 SV=1
MTSSNSALPHFKKPISISHGPWEAYNDFSEHNQLTLSNIEFTTTNLFNMRCSHCAVGYTLQTSDPTPLPMDLIYRRLDEVPNLKTISITGGEPMFSKKSIKNVVKPLLKYAFDRGIYVQMNSNLILSLDRYLEIAEYIDVMHISHNWGTIDTFTEVGFGAMQKQPPLKAKLKLYDQMLLNTRTLSEQGMFISAETMLNKSTQPHLNKIHNEIVYDMKCQRHEIHPMYPADFASQLEVLSLREIKETIHYLLDHRHPGT

SEQ ID NO: 29329 - protein, 238 aa, [Clostridium] indolis
  misc_feature (1)..(238): tr|A0A3P6JDR5|A0A3P6JDR5_9FIRM 7-carboxy-7-deazaguanine synthase OS=[Clostridium] indolis OX=69825 GN=queE PE= 3 SV=1
MSKIPVLEIFGPTIQGEGRVIGRKTMFVRTAGCDYRCSWCDSSFTWDGSAKEDIRMMNAEEIYAALYDLAGESFNHVTISGGNPALIRGIQGLVDLFEEKGIQSALETQGSKFQPWMTQIDDLTISPKPPSSMMKPNLPILDDVIAKCVPETLNLKVVIFDDDDYEFAKMIHHRYPDTPFYLQVGNPYLDGDYVEAHTEKLLSLYETLVDRVMVSNDMNNVYVLPQLHTLLWSNKKGV

SEQ ID NO: 29330 - protein, 221 aa, Clostridium magnum
  misc_feature (1)..(221): tr|A0A161YNA9|A0A161YNA9_9CLOT 7-carboxy-7-deazaguanine synthase OS=Clostridium magnum DSM 2767 OX=1121326 GN= queE PE=3 SV=1
MNFKVIEKFVSINGEGLSCGQLAVFIRFAGCNLNCSYCDTTWANEKDVSYELMSSEDIYEYIKSTEVKNITLTGGEPLLQEGILDLLKKLSKDKGLSVEIETNGSILLSNFSDIDNPPSFTMDYKLPSSNMEDKMSLGNFKHLTKRDTIKFVAGSMEDLEKVKYLIDKFKLTETTNVYISPVFGKINMDKIVEFMKDNKMNGVNLQIQLHKVIWNPNKRGV

SEQ ID NO: 29331 - protein, 222 aa, Clostridium novyi
  misc_feature (1)..(222): tr|A0Q1F6|A0Q1F6_CLONN 7-carboxy-7-deazaguanine synthas e OS=Clostridium novyi (strain NT) OX=386415 GN=queE PE =3 SV=1
MNYKVVEKFISINGEGKSSGQLSVFIRFAGCNLNCSYCDTKWANEEKAPYSIMTEKEIYEYIKLTEIKNVTLTGGEPLLQEGILTLLKLLCSDENLNIEIETNGSIPLKDFTSIKNNPPKFTMDYKLPYSNMENHMITDNFNYLTKKDVIKFVVANKNDLQKLKSIIYKYNLIDKTNIYISPVYGEIEMNSIVEFMKENKLNGVTLQMQLHKIIWDPNKRGV

SEQ ID NO: 29332 - protein, 222 aa, Clostridium novyi
  misc_feature (1)..(222): tr|A0A0A0IBW8|A0A0A0IBW8_CLONO 7-carboxy-7-deazaguanine synthase OS=Clostridium novyi A str. 4552 OX=1444289 G N=queE PE=3 SV=1
MDYKVVEKFISINGEGKSSGQLSVFIRFAGCNLHCSYCDTKWANEKKVPFCIMTEEEIYKYIQSTKIKNVTLTGGEPLLQEGILTLLKLLCSDKNLSIEIETNGSIPLKDFITIKNNSPNFTMDYKLPCSNMENHMITDNFNYLTKKDVIKFVVANKNDLQKLKSIMYKYNLIDKTNIYISPVYGEIEMNLIVEFMKENKLNGVTLQMQLHKIIWDPNKRGV

SEQ ID NO: 29333 - protein, 250 aa, Clostridium pasteurianum
  misc_feature (1)..(250): tr|A0A0H3J6Q1|A0A0H3J6Q1_CLOPA 7-carboxy-7-deazaguanine synthase OS=Clostridium pasteurianum DSM 525 = ATCC 60 13 OX=1262449 GN=queE PE=3 SV=1
MPQRAYIKEIFKSIQGEAEYVGYEQIFVRFIGCNIKCNYCDTDINKSEHLKFYKNWDLNNYESVKNPVSPEELIKLIEKLDPENSVHSISLTGGEPLINIDFLKEFLPKFKRARDTKIFLETNGTLAEELSGIAEYVDIVSMDLKLASYLEDKKNLMNEHRLFLKQCVENNIATYVKVVIDNNFNQEELNNYLALVEPYRNNIKVYIQPMMQGDKMLVNSEKLRAAFELCKSKGLVPRIIPQIHKMLSLN

SEQ ID NO: 29334 - protein, 250 aa, Clostridium pasteurianum
  misc_feature (1)..(250): tr|R4K1R4|R4K1R4_CLOPA 7-carboxy-7-deazaguanine synthas e OS=Clostridium pasteurianum BC1 OX=86416 GN=queE PE=3 SV=1
MPQRTYIKEIFKSIQGEAEYVGYEQIFVRFIGCNIKCNYCDTDIDRCEEVTVYKNWDSKDYKTLRNPLDSAGLIKIIKELDAEERVHSISLTGGEPLINIDFLKEFLPEFKKVCSTKVFLETNGILHEELHSIAKYVDIVSMDLKLASYLRNRENFIPQHSEFLNECIENNIATYVKIVLDDNFSLEELNNYLDVVEPYKHKVNVYIQPMMDGDKMLISSQKLKLAFDCCREININVRIIPQIHKMLCLN

SEQ ID NO: 29335 - protein, 222 aa, [Clostridium] polysaccharolyticum
  misc_feature (1)..(222): tr|A0A1I0BGA6|A0A1I0BGA6_9FIRM 7-carboxy-7-deazaguanine synthase OS=[Clostridium] polysaccharolyticum OX=29364 GN=queE PE=3 SV=1
MATYQVAEKFVSINGEGTKAGQLAVFIRFKGCNLSCSYCDTGWANHKDTFYESMTEQDILNYILETGVQNVTLTGGEPLLQKNIEILLKLLEKEKTLQVEIETNGSISIEKYRVSDNFPSFTMDYKLPDSKMEQKMCLGNMAKLRRKDTVKFVTGSEKDLERAAELIKQYDLINRCPVYLSPVFGQIEPEKMVAFMKEKNLNGVSLQLQMHKFIWNPEKRGV

SEQ ID NO: 29336 - protein, 237 aa, [Clostridium] populeti
  misc_feature (1)..(237): tr|A0A1I6I5Y9|A0A1I6I5Y9_9FIRM 7-carboxy-7-deazaguanine synthase OS=[Clostridium] populeti OX=37658 GN=queE PE =3 SV=1
MDNLTDVKNNQIAMVEIFQSIEGEGTKAGTPTTFIRLFGCNLRCSWCDTKYSYEPDKPRFYASVEQILEQATTYGSSSVCLTGGEPLLSFKNAYALLLGLGELDFIKDIHIETNGSIDLTPYCKLRNDNANLNQKVRFVVDYKPISSGQNEKMNLNNFSLLSNRDEIKFVIGSEEDFLLARTVIEQYYQSGQILFSPLWGKIEPARLVSLMLDSKLLHARLSLQLHKMIWGQDKEGV

SEQ ID NO: 29337 - protein, 222 aa, Clostridium puniceum
  misc_feature (1)..(222): tr|A0A1S8THW1|A0A1S8THW1_9CLOT 7-carboxy-7-deazaguanine synthase OS=Clostridium puniceum OX=29367 GN=queE_1 PE =3 SV=1
MFNIVEKFLSIDGEGPSSGELAAFIRFQGCNLRCSWCDTTYSWDKESICEVLNAKEIYDYIKETGVINVTLTGGEPLIQENIDELLTLLNSDDTLKIHIETNGAVDIEPFKNRHKKNNISYIIDFKLPSSKMSDKMNLNNLKIVKKNDVYKFVVGSNEDLQMAYDLIIKYELASNCLVYLSPVSGNIDMEEIVEFMKEKKINKVRLQIQLHKIIWDKNARGV

SEQ ID NO: 29338 - protein, 203 aa, Clostridium puniceum
  misc_feature (1)..(203): tr|A0A1S8SZN1|A0A1S8SZN1_9CLOT 7-carboxy-7-deazaguanine synthase OS=Clostridium puniceum OX=29367 GN=queE_2 PE =4 SV=1
MDIKIPFYEKYKEKIRCRVCPRNCILDEGKLGICRVRTLKSSVPTAINYGEATSAGVDSIEKKPLYHFKPSKNILSLGSFGCNMTCTFCQNCEISQRKPKAEYINIKKLINIIPTIENNARIAFTCNEPFMWYECVYEAAKKIKKNNSGTSVVIVTNGYINEEPLLKLLPYVDAMNIDLKGYTNRYYNKIYLYREFLLARKNS

SEQ ID NO: 29339 - protein, 221 aa, Clostridium roseum
  misc_feature (1)..(221): tr|A0A1S8LZJ2|A0A1S8LZJ2_9CLOT 7-carboxy-7-deazaguanine synthase OS=Clostridium roseum OX=84029 GN=queE PE=3 S V=1
MNYKVVEKFISINGEGLKAGKLSTFIRFAGCNLNCVYCDTKWANEENVKYTLMTENEIYSYIKETGVKNVTLTGGEPLLQNNIKELLSLLSSNNDLNVEIETNGSINLEAFLDYKNMPSFTMDYKLPDSGMETFMKTSNFKFLTRKDVIKFVVSSLKDLEKVTELIKEFKLTHKTNVYISPVFGKISPETIVEFMKNNKLNDVTLQIQIHKIIWNPNKRGV

SEQ ID NO: 29340 - protein, 222 aa, Clostridium saccharobutylicum
  misc_feature (1)..(222): tr|A0A1S8NBM5|A0A1S8NBM5_CLOSA 7-carboxy-7-deazaguanine synthase OS=Clostridium saccharobutylicum OX=169679 GN =queE_1 PE=3 SV=1
MFNIVEKFLSIDGEGPTSGEIATFIRFQGCNLRCSWCDTVYSWGKESTNEKLSANEIYQYIKENGATNVTLTGGEPLIQENIDELLNILNKDENLMVHIETNGAVNIGTFKEKHKGGNISYIVDFKLPSSNMTNSMDMNNLKIVESSDVYKFVVGSSEDLNMAYDIIKKYDLTSKCLVYLSPVCGNIEMKDIVEFMKEKKLNKVRLQVQLHKVIWDKSERGV

SEQ ID NO: 29341 - protein, 216 aa, Clostridium saccharobutylicum
  misc_feature (1)..(216): tr|A0A1S8MYZ3|A0A1S8MYZ3_CLOSA 7-carboxy-7-deazaguanine synthase OS=Clostridium saccharobutylicum OX=169679 GN =queE_2 PE=4 SV=1
MTILYTAKNGIYTNLNDILKEEKNIKHNVYVNLTNKCSCACTFCLRNTKEMDKSNSLWLDREPTSDEVISEFEKYDLNNFNEIIFCGFGEPTMALDTLLKIATYLKNKNSNLPIRINTNGLCDLVYKKEIAPLFKELVDTISISLNASNAKDYLNLTRNNFGLESFDAMLKFAVNCKTYIPNVVMTVVDCIGQEEINACQAICDKIGVTLRVRPFE

SEQ ID NO: 29342 - protein, 222 aa, Clostridium saccharoperbutylacetonicum
  misc_feature (1)..(222): tr|M1MGL2|M1MGL2_9CLOT 7-carboxy-7-deazaguanine synthas e OS=Clostridium saccharoperbutylacetonicum N1-4(HMT) O X=931276 GN=queE PE=3 SV=1
MFNIVEKFISVDGEGPSSGELATFIRFQGCNLRCTWCDTTYSWDKSSICEILSADEIYNYIKENNVINVTLTGGEPLIQKNIDELLKLLNDDENLKVHIETNGAVDIEPFKKIYNSKNICYIVDYKLPSSQMTNKMSNNNLKVIGKSDVYKFVIGSIEDLEHAYDIIIRNDLTSKCIVYFSPVSGKIDLKEIVEFMKNKRLNKVRLQTQLHKIIWDNNARGV

SEQ ID NO: 29343 - protein, 198 aa, Clostridium scindens
  misc_feature (1)..(198): tr|B0N9A4|B0N9A4_CLOS5 7-carboxy-7-deazaguanine synthas e OS=Clostridium scindens (strain ATCC 35704 / DSM 5676 / VPI 13733 / 19) OX=411468 GN=queE_1 PE=4 SV=1
MADILYTYKDQVYANITNKCNCRCRFCIRSHEDGVGDADTLWHKTDPTLEQIKEAMDAFDFAGYKELVFCGYGEPTCAIDNLVASAKYAKEKYGLSIRVNTNGLANLYYGKDVIPLLAQAVDSVSISLNAPTSEQYNEVSRPQLDNAFEGLLQFATECKGQIPSVKLTIVDVLPKEEIEACKKLAASLDIPLRIRRYA

SEQ ID NO: 29344 - protein, 222 aa, Clostridium sp.
  misc_feature (1)..(222): tr|A0A1M4NEB2|A0A1M4NEB2_9CLOT 7-carboxy-7-deazaguanine synthase OS=Clostridium sp. N3C OX=1776758 GN=queE_1 P E=3 SV=1
MANYKVVEKFISLNGEGILAGQPAVFIRFHGCNLSCSYCDTTWANEKDAPFSLMTEEEIYEYIKESGIKNVTLTGGEPLLVPDIGQLLKLLSTNQDIHVEIETNGSIDLSPFANIPNAPSFTMDYKLPSSFMEDKMLASNFQILRKKDAVKFVVGNREDLNRTREVIYEYDLTSRCHVLISPVYGKIQLAEIADYLIEYGMNNVAMQLQTHKIIWGPNERGV

SEQ ID NO: 29345 - protein, 221 aa, Clostridium sp.
  misc_feature (1)..(221): tr|R5K9I0|R5K9I0_9CLOT 7-carboxy-7-deazaguanine synthas e OS=Clostridium sp. CAG:632 OX=1262830 GN=queE PE=3 SV =1
MIYKVVETFISINGEGQHAGELALFIRFAGCNLNCNYCDTRWANQPDVVYQEMTETEIKALVTDSGVRNVTLTGGEPLLQPGMYQLLETMGSLPDIRIEIETNGSVDIGPYMTLIRRPAFTLDYKLPGSGMEAGMNTENYRYLTKEDTVKFVISDKADLTRAREIIEQYQLEGRCGIYYSPVFGRIRPAEIVDDMIEHRLNGVHMQLQMHKFIWDPEQRGV

SEQ ID NO: 29346 - protein, 221 aa, [Clostridium] spiroforme
  misc_feature (1)..(221): tr|A0A1Y4QH40|A0A1Y4QH40_9FIRM 7-carboxy-7-deazaguanine synthase OS=[Clostridium] spiroforme OX=29348 GN=queE PE=3 SV=1
MNRYKVVEKFISINGEGSRVGQLAAFIRFHYCNLNCSYCDSKYANGDNAKYDLLTSTDILNYLNENKVINVTLTGGEPLLQDNINDLINILIDHGYSVEIETNGSVDIAPFINGMNRPIFTLDYKLPGSNMENKMNLNNYQYLTKVDVVKFVIGDLEDLNRTKQIIDKYDLSNNVKVYFSPVFDKIEPSVIVDYMIKHHLNNITLQLQLHKFIWDVNKRGV

SEQ ID NO: 29347 - protein, 217 aa, Clostridium sporogenes
  misc_feature (1)..(217): tr|A0A1V9IV41|A0A1V9IV41_CLOSG 7-carboxy-7-deazaguanine synthase OS=Clostridium sporogenes OX=1509 GN=queE PE= 3 SV=1
MVESFVSINGEGRRCGQLAIFIRFAGCNLNCSYCDTLWANEKDVPYEVLSSKDIYEYIKSKEVKNVTLTGGEPLLQKGIMELLKLLSKDKELYVEIETNGSILLDEFLNIENSPSFTMDYKLPLSNMENKMALDNFKYLTKKDTVKFVSGSIEDLEKAREIINKYNLVDKTNVYISPVFGKINLDTIVEFMKNNRMNGVNLQLQLHKIIWEPSKRGV

SEQ ID NO: 29348 - protein, 217 aa, Clostridium sporogenes
  misc_feature (1)..(217): tr|A0A1V9IWJ0|A0A1V9IWJ0_CLOSG 7-carboxy-7-deazaguanine synthase OS=Clostridium sporogenes OX=1509 GN=queE PE= 3 SV=1
MVEKFVSINGEGRRAGQLAIFIRFAGCNLNCSYCDTLWANEKDVSYELMTSEDIYEYIKSQEIKNITLTGGEPLLQKGIIELLKLLSKDKELYVEIETNGSVLLDKFLGIENPPSFTMDYKLPSSNMENRMVLDNFKYLTDKDTVKFVSGSIEDLKKAKEIIDKYSLIDKTNVYISPVFGKIHLDNIVKFMKYNRMNGVNLQVQLHKIIWDPNKKGV

SEQ ID NO: 29349 - protein, 221 aa, Clostridium taeniosporum
  misc_feature (1)..(221): tr|A0A1D7XKS0|A0A1D7XKS0_9CLOT 7-carboxy-7-deazaguanine synthase OS=Clostridium taeniosporum OX=394958 GN=queE PE=3 SV=1
MNFKVVEKFISINGEGPLCGQLAVFIRFAGCNLDCSYCDTTWANEKNVSYEWMASKDIYEYIKSTKVRNITLTGGEPLLQNGIIELLELLSKDKKIHVEIETNGSVLINKFLTIENPPSFTMDYKLPSSNMEDKMELENFKYLTEKDTVKFVSGSIEDLKKAKYIIDKYNLIDKTSVYISPVFGKINMNDIVEFMKENNMNKVNLQIQLHKVIWEPSKRGV

SEQ ID NO: 29350 - protein, 221 aa, Clostridium tagluense
  misc_feature (1)..(221): tr|A0A401UUJ5|A0A401UUJ5_9CLOT 7-carboxy-7-deazaguanine synthase OS=Clostridium tagluense OX=360422 GN=queE PE =3 SV=1
MKFKVVEKFTSVNGEGPLSGQLVVFIRFAGCNLNCSYCDTTWANTPDVCYDLMTATDIYKYIKSTEIRNVTLTGGEPLLQEGIIELLEMLSKDSLLHIEIETNGSVALNEFSIIENPPSFNMDYKLPWSNMEDKMNLDNFASLSYKDTVKFVCGSNEDLQKTKFIIDKYELSNKTNVYISPVFGQIDLEMIVDFMKDNKMNGVNLQIQLHKIIWDPNKRGV

SEQ ID NO: 29351 - protein, 222 aa, Clostridium tepidiprofundi
  misc_feature (1)..(222): tr|A0A151B428|A0A151B428_9CLOT 7-carboxy-7-deazaguanine synthase OS=Clostridium tepidiprofundi DSM 19306 OX=11 21338 GN=queE PE=3 SV=1
MKYRVVEKFTSINGEGKLSGQLSVFIRFAGCNLNCSYCDTQWANKKDVKYELMTAKEIYEYIKSTNIKNVTLTGGEPLIQDGILELLSVLSKDCELSVEIETNGSVDISLFSGIKFNPPKFTMDYKLASSNMEQYMLVNNFNFLGKKDIVKFVVGNIEDLKRAKYIIEEYDLANKTNVYISPVFGKIYMKDIVEFMKINTMNDVTLQMQLHKIIWDPQKRGV

SEQ ID NO: 29352 - protein, 221 aa, Clostridium tepidum
  misc_feature (1)..(221): tr|A0A1S9I1E9|A0A1S9I1E9_9CLOT 7-carboxy-7-deazaguanine synthase OS=Clostridium tepidum OX=1962263 GN=queE PE= 3 SV=1
MDFKVVEKFVSINGEGRRAGQLAIFIRFAGCNLNCSYCDTSWANEKEVYYELMTSEDIYKYIKSQDIKNITLTGGEPLLQKGIVELLKLLSQDKELNIEIETNGSILLDKFLGIENPPSFTMDYKLPSSNMENRMALDNFKYLTNKDTVKFVSGSIEDLKKATEIIDKYSLINKTNIYISPVFGKIDLENIVKFMKDNKMNGVNLQVQLHKIIWDPSKKGV

SEQ ID NO: 29353 - protein, 221 aa, Clostridium tetanomorphum
  misc_feature (1)..(221): tr|A0A037Z8R4|A0A037Z8R4_CLOTT 7-carboxy-7-deazaguanine synthase OS=Clostridium tetanomorphum DSM 665 OX=12303 42 GN=queE PE=3 SV=1
MQFKVVEKFTSINGEGSLSGQLAVFIRFAGCNLSCSYCDTTWANKEDVSYELMTCEKIYNYIKSTRVRNVTLTGGEPLLQEGILELLEVLSKDKELHTEIETNGSVLLDKFSNIENPPSFTMDYKLPSSNMEDKMELNNFKYLTKKDTVKFVSGTMGDLEKAKHIIDKYNLIYKTNIYISPIFEKINMDTIVEFMKNNKMNGVNLQLQLHKVIWDPNKRGV

SEQ ID NO: 29354 - protein, 222 aa, [Clostridium] thermoalcaliphilum
  misc_feature (1)..(222): tr|A0A1V4IB15|A0A1V4IB15_9FIRM 7-carboxy-7-deazaguanine synthase OS=[Clostridium] thermoalcaliphilum OX=29349 GN=queE PE=3 SV=1
MNYKIVEKFVSINGEGDLSGQLSVFIRFAMCNLECSYCDTLWANDKNVKYELMNGKDIYEYIKSTKIKNITLTGGEPLIQEGILELVDFISQDSELNIEIETNGSVDISKVASLNKNNIKFTMDYKLDSSNMRNKMNIDNFKYIRNCDTVKFVVGDCDDLSVTKSIIEEYGLVNKCKVYISPVFGKIEPSEIVEFMKGNKMNGVTLQIQLHKIIWEPHKRGV

SEQ ID NO: 29355 - protein, 218 aa, Clostridium thermobutyricum
  misc_feature (1)..(218): tr|A0A1V4SXZ4|A0A1V4SXZ4_9CLOT 7-carboxy-7-deazaguanine synthase OS=Clostridium thermobutyricum DSM 4928 OX=11 21339 GN=queE PE=3 SV=1
MNVVEIFQSIDGEANRAGNLTNFIRLAGCNLRCNYCDTDYALNKADGKEMSINEIISKLDKDIKNVTLTGGEPLWNKENAIPLLKELVSKGFNVSVETNGSINLKNYIKEFPSVSFIVDYKSPSSNMEKFMDMENFNILRDIDCVKFVVGSLEDLEKMEEVIKNTNLHKTEAEIFVSPIFEKIEPKEIVEFLLQRKLVKVRVQIQMHKVIWDPMMKGV

SEQ ID NO: 29356 - protein, 218 aa, Clostridium thermobutyricum
  misc_feature (1)..(218): tr|N9XJV3|N9XJV3_9CLOT 7-carboxy-7-deazaguanine synthas e OS=Clostridium thermobutyricum OX=29372 GN=queE PE=3 SV=1
MNVVEIFQSIDGEANRAGNLTNFIRLAGCNLRCNYCDTDYALNKTDGKEMSINEIISKLDKDIKNITLTGGEPLWNEDNAKPLLKELVSNGFNVSVETNGSINLKNYIKEFPSVSFIVDYKSPSSNMEKFMDMENFNILRDIDCVKFVVGSLEDLKKMEEVIKNTNLHKAEAEIFVSPVFGEIEPKEIVEFLLKRKLVKVRVQIQMHKVIWDPMMKGV

SEQ ID NO: 29357 - protein, 222 aa, Clostridium thermopalmarium
  misc_feature (1)..(222): tr|A0A2T0AQG4|A0A2T0AQG4_9CLOT 7-carboxy-7-deazaguanine synthase OS=Clostridium thermopalmarium DSM 5974 OX=11 21340 GN=queE PE=3 SV=1
MTHYKVAEKFISLNGEGVLVGQPAVFIRFHGCNLSCSFCDTTWANEKDAAYSLMTEHQIYEYIKGTGIKNVTLTGGEPLLVPAIEELLCLLSSDQCLHVEIETNGSIDLSPFANIQNPPSFTMDYKLPSSLMEDKMLVSNFKILSKKDTVKFVVGNMEDLNRAREVIHEYDLANKCHVLISPVYGRIKLDKIADYLIKHRMNNVAMQLQMHKIIWEPNRREV

SEQ ID NO: 29358 - protein, 221 aa, Clostridium uliginosum
  misc_feature (1)..(221): tr|A0A1I1GQX9|A0A1I1GQX9_9CLOT 7-carboxy-7-deazaguanine synthase OS=Clostridium uliginosum OX=119641 GN=queE P E=3 SV=1
MNFKVVEKFVSINGEGRLCGQLAVFIRFAGCNLNCSYCDTTWANEKNVSYDLMSCHDIYEYIKSTKVRNITLTGGEPLLQEGIIGLLELLSQDNKLDVEIETNGSVLIDKFSTIENPPSFTMDYKLPSSNMEDKMSLQNFKYLTKRDTVKFVSGSIEDLQKAKYIIDKYSLVDKTNVYISPVFGKINMDDIVEFMKKNNMNKVNLQIQLHKVIWEVNKRGV

SEQ ID NO: 29359 - protein, 218 aa, Clostridium ventriculi
  misc_feature (1)..(218): tr|A0A173WU06|A0A173WU06_CLOVE 7-carboxy-7-deazaguanine synthase OS=Clostridium ventriculi OX=1267 GN=queE PE= 3 SV=1
MKVVEIFQSIDGEAFNAGKITNFIRLSGCNLRCNYCDTIYGQNLSDGEEMSIDDILKKLDKGIKNITLTGGEPLLNKENAYSLLNALVKEKYNVSVETNGSIDMKDFVKDFPTVAFIVDYKSPSSEMQEKMLINNFNILRPIDCVKFVVGDILDLKTMEKVYKETELVKGKTPIFVSPVFGKIELVEIVEFLKTRKLNDIRMQIQMHKIIWSPETKGV

SEQ ID NO: 29360 - protein, 223 aa, Clostridium vincentii
  misc_feature (1)..(223): tr|A0A2T0BDX9|A0A2T0BDX9_9CLOT 7-carboxy-7-deazaguanine synthase OS=Clostridium vincentii OX=52704 GN=queE PE= 3 SV=1
MEYNVIEKFLSIDGEGPTAGEIATFIRFGGCNLCCKWCDTAYSIDGKIKGQTLNKEDIYRYIKDNGTKNVTLTGGEPLIQEDIEELIYFLAKDSELLIHIETNGSIPFYNFKKIENLDNVSFILDYKLPSSGMENKMDMKNYKVVSKKDVCKFVIETMEDLIKAKEIVEKFSLTEKCLVYFSPITTSIEPALIVDFMKRNKMNNIRLQIQLHKIIWSPETREV

SEQ ID NO: 29361 - protein, 222 aa, Cnuella takakiae
  misc_feature (1)..(222): tr|A0A1M5C1S8|A0A1M5C1S8_9BACT 7-carboxy-7-deazaguanine synthase OS=Cnuella takakiae OX=1302690 GN=queE PE=3 S V=1
MAAFVQIQLSTCEQSDMTELATKTTTLPVMEHFYTLQGEGAYMGKAAYFIRLGGCDVGCVWCDVKESWDAAKHPQWAIADLVATVKATPTEIVVITGGEPLMHDLTELTGQLKAAGLRTHIETSGSSPLSGTLDWITLSPKKFKQPLRGVLPHAHELKIVVFNKSDFDWARQWAAQVGPHCRLYIQPEWSKAAQITPLIIEFIKENPQWQLSLQVHKYINVP

SEQ ID NO: 29362 - protein, 230 aa, Cobetia crustatorum
  misc_feature (1)..(230): tr|A0A558HN94|A0A558HN94_9GAMM 7-carboxy-7-deazaguanine synthase OS=Cobetia crustatorum OX=553385 GN=queE PE=3 SV=1
MYTVKEAFYTLQGEGARAGRASVFCRFAGCNLWSGRERDRDTSVCRFCDTDFIGTDGQNGGKFREAQSLADFLASLWPEHSGIATPYVVFTGGEPLLQLDSVLIDAMHAHGFEIAVETNGTVIPPAGIDWLCVSPKGASTLIVSAGDELKLVYPQPEALPERFASLDFTHFYLQPLDTSALEALPAPAAALAHYHEVLARETPMTQCVNYCMANPQWQLSLQTHKISGID

SEQ ID NO: 29363 - protein, 230 aa, Cobetia marina
  misc_feature (1)..(230): tr|A0A4V5PZP6|A0A4V5PZP6_COBMA 7-carboxy-7-deazaguanine synthase OS=Cobetia marina OX=28258 GN=queE PE=3 SV=1
MYTVKEAFYTLQGEGARAGRASVFCRFAGCNLWSGREQDRDTSVCRFCDTDFVGTNGQNGGKFRTASELADFLASLWPEHSGIATPYVVFTGGEPLLQLDRELVDAMHARGFEIAVETNGTVTPPAGIDWLCVSPKGASELVLTGGDELKLVYPQPEALPERFVSLDFAHFYLQPLDTAALDALPAPAAAREHYREVLATDTPMNQCVSYCMANPQWQLSLQTHKISGID

SEQ ID NO: 29364 - protein, 230 aa, Cobetia marina
  misc_feature (1)..(230): tr|A0A4Y4GPK3|A0A4Y4GPK3_COBMA 7-carboxy-7-deazaguanine synthase OS=Cobetia marina OX=28258 GN=queE PE=3 SV=1
MYTVKEAFYTLQGEGARAGRASVFCRFAGCNLWSGREQDRDTSVCRFCDTDFVGTNGQNGGKFRTASELADFLASLWPEHTGIATPYVVFTGGEPLLQLDRELVDAMHARGFEIAVETNGTVAPPAGIDWLCVSPKGASELVLTGGDELKLVYPQPEALPERFVSLDFAHFYLQPLDTAALDALPAPAAAREHYREVLATDTPMNQCVSYCMANPQWQLSLQTHKISGID

SEQ ID NO: 29365 - protein, 230 aa, Cobetia sp.; identical to SEQ ID NO: 29363
  misc_feature (1)..(230): tr|A0A2S4K6B1|A0A2S4K6B1_9GAMM 7-carboxy-7-deazaguanine synthase OS=Cobetia sp. MM1IDA2H-1 OX=1268241 GN=queE PE=3 SV=1

SEQ ID NO: 29366 - protein, 230 aa, Cobetia sp.
  misc_feature (1)..(230): tr|A0A2E4Q1B7|A0A2E4Q1B7_9GAMM 7-carboxy-7-deazaguanine synthase OS=Cobetia sp. OX=1873876 GN=queE PE=3 SV=1
MYTVKEAFYTLQGEGARAGRASVFCRFAGCNLWSGREQDRDTSVCRFCDTDFVGTNGQNGGKFRTANALADFLASLWPEHTGIATPYVVFTGGEPLLQLDSELVDAMHARGFEIAVETNGTVEPPAGIDWLCVSPKGASELVLTGGDELKLVYPQPEALPERFVSLDFAHFYLQPLDTAALDALPAPAAAREHYREVLASDTPMNQCVSYCMRNPQWQLSLQTHKISGID

SEQ ID NO: 29367 - protein, 277 aa, Cocleimonas flava
  misc_feature (1)..(277): tr|A0A4R1EVA2|A0A4R1EVA2_9GAMM 7-carboxy-7-deazaguanine synthase OS=Cocleimonas flava OX=634765 GN=queE PE=3 S V=1
MSIPSIVTPPLSGTFSTESVSNDSTDLISISEIFGPTIQGEGALIGTQTIFVRTAGCDYRCSWCDTGYAVLPEFDNDWKNMDAESVFNKIESLSNKQAMWITLSGGNPAMQNLEPLIKLGQAKGYKFSMETQGSIAKPWFALLDQLTFSPKPPSSGMRFKHKGLQRCLDACETLEIINSQTHPDVSLKFVVADQDDLLWAKEIAEQYPQLPCYVQPCNNNADINVDNRSTADDLENKEENSPYDQKQKMLWLIDAVQSLNWTDVRVLPQLHVWLNVE

SEQ ID NO: 29368 - protein, 239 aa, Cognatishimia maritima
  misc_feature (1)..(239): tr|A0A1M5L5T8|A0A1M5L5T8_9RHOB 7-carboxy-7-deazaguanine synthase OS=Cognatishimia maritima OX=870908 GN=queE P E=3 SV=1
MTILRIAEIFGPTIQGEGAVIGAPTVFVRAGGCDYRCSWCDSLHAVDSEYRHTWAKMTTEDIWDEVERLSGGVPLTVSLSGGNPAIQDFGPLIAHGKSKGFDFALETQGSVARDWFSELSPLILSPKPPSSGEEVDWDTFDACVKAAGNAETVLKIVIFDEADYLWAKEAAARYPELPLYIQPGNHTPPPPDAEDAKIDMDGIMHRYEWLIDRTLADRWFAPKILPQLHVLIWGNKRGV

SEQ ID NO: 29369 - protein, 239 aa, Cohaesibacter gelatinilyticus
  misc_feature (1)..(239): tr|A0A285N6P1|A0A285N6P1_9RHIZ 7-carboxy-7-deazaguanine synthase OS=Cohaesibacter gelatinilyticus OX=372072 GN =queE PE=3 SV=1
MSKIRVSEIFGPTIQGEGALIGEPTVFVRTGGCDYRCSWCDSLHAVDSDYRADWLPMDAYEIFEKIIKLSKGKPLTVSLSGGNPAIQDFGPLIEMGKKQGYRFALETQGSITQDWFKDLDLLILSPKPPSSDQVVDWDAFEACVRAAQQARTAMKIVIFDDEDYRWAKGVADRYSSLPLYIQPGNHTPPPPDEPDARIDMQGILDRMEWLVDKTLNDGWFAPRILPQLHVLLWGNKRGV

SEQ ID NO: 29370 - protein, 242 aa, Cohnella luojiensis
  misc_feature (1)..(242): tr|A0A4Y8LUH2|A0A4Y8LUH2_9BACL 7-carboxy-7-deazaguanine synthase OS=Cohnella luojiensis OX=652876 GN=queE PE=3 SV=1
MAASKFPVIEIFGPTVQGEGMVIGQKTMFVRTAGCDYSCVWCDSAFTWDGSGKKETRLLTAEEIVEGLRAVGGNTFSHVTISGGNPALLPHLEELIELLHEDGIQVALETQGSRWQDWFLLIDELTLSPKPPSSTMSTDWNVLDAIVGKLISNRRNFSLKVVVFDELDLRYAATVHHRYKNVPFFLQAGNDDVKEPDSSLLLNRLMQKYVWLVETVMDSDELKNVRVLPQLHAWLWGNKRGY

SEQ ID NO: 29371 - protein, 243 aa, Cohnella lupini
  misc_feature (1)..(243): tr|A0A3D9I8F3|A0A3D9I8F3_9BACL 7-carboxy-7-deazaguanine synthase OS=Cohnella lupini OX=1294267 GN=queE PE=3 SV =1
MTVVSRFPVIEIFGPTVQGEGMVIGQKTMFIRTAGCDYSCVWCDSAFTWDGSGKKETRMLTAEEIVDELRAVGGNAYSHVTISGGNPALLPRLEQLIERLHDDGIRVALETQGSKWQDWFLLVDELTLSPKPPSSTMTTDWVALDAIVSKLTAGERDFSLKVVVFDEADLRYAISVHRRYGNVAFFLQAGNDDVKESDTTTLLHRLMRKYVWLVETVMASEELTNVRVLPQLHAWLWGNKRGY

SEQ ID NO: 29372 - protein, 255 aa, Cohnella sp.
  misc_feature (1)..(255): tr|A0A1I0ZM63|A0A1I0ZM63_9BACL 7-carboxy-7-deazaguanine synthase OS=Cohnella sp. OV330 OX=1855288 GN=queE PE=3 SV=1
MTPVLKQAPNEQESRAARIPVMEVFGPTVQGEGMVIGRKTKFVRTAGCDYRCSWCDSAFTWDGTGKDDIRLMNPDDILRELTALDGSAPDHVTLSGGNPALLPQLGALIAALRAAGAVVALETQGSKWQDWFLDIDELTISPKPPSSGMTTDWAALERIVARLAQGGRHFSLKVVIFDETDLAYAADVHLRFPGIPFYLQAGNGRLGEQDRAQLLPYLLARYEWLVDRVVADAGWRDVHVLPQLHAWIWGNKKGV

SEQ ID NO: 29373 - protein, 242 aa, Cohnella sp.
  misc_feature (1)..(242): tr|A0A3G3JYS5|A0A3G3JYS5_9BACL 7-carboxy-7-deazaguanine synthase OS=Cohnella sp. 18JY8-7 OX=2480923 GN=queE PE =3 SV=1
MASNRFPIMEIFGPTIQGEGMVIGQKTMFVRTAGCDYSCSWCDSAFTWDGTGKQDIRMLMASEIFQELSRIGGESFSHVTLSGGNPALLPQLNELIDLLHENGIAVALETQGSLWRDWFLQIDELTLSPKPPSSGMQTDWDILDELVSRLSDHNRCFCLKVVVFDDADIRFAEEVHRRYPEVSMFLQAGNNDIMETDSTVLLKRLMKCYEWLVQSVMASTVLRSVRVLPQLHTWLWGNKRGV

SEQ ID NO: 29374 - protein, 269 aa, Coleofasciculus chthonoplastes
  misc_feature (1)..(269): tr|B4VPZ5|B4VPZ5_9CYAN 7-carboxy-7-deazaguanine synthas e OS=Coleofasciculus chthonoplastes PCC 7420 OX=118168 GN=queE PE=3 SV=1
MNLPIQCQKMSAKTGLTARLIELFSAIQGEGRNVGTRQLFIRLALCDLRCHFCDSQNTWAVPNLASVEQTPGHRDFETHPNPVTVDQLLAWVERQNYPGLHESISITGGEPLLQAPFLREFLPVVQHRTGLPIYLETGGHRPEQLAQILPYLNSIGMDMKLPSVSGEECWHAHRQFLQVCGDADVEVFVKLIIAQTTNTAELELAAELVAACNPSIPVFLQPVTPLAQPHHAPMIPPTPTQVLEWQALMKRHLKSVRVIPQTHKMIGQL

SEQ ID NO: 29375 - protein, 200 aa, Collimonas arenae
  misc_feature (1)..(200): tr|A0A127QLC9|A0A127QLC9_9BURK 7-carboxy-7-deazaguanine synthase OS=Collimonas arenae OX=279058 GN=queE PE=3 S V=1
MQGEGTHAGRPAVFCRFSGCNLWTGREEDRSSAVCQFCDTDFVGTDGEGGGKFKDGESLAQTINALWPATYAASKFVVFTGGEPLLQLDAALIDSMHAAGFEIAIETNGTLEPPSGIDWICVSPKMGSVLKLRKGNELKVVIPQIGQSLAAYESLDFEHFYVQAMDGPQLAHNLELAIETCKRNPKWKLSLQTHKLLQIP

SEQ ID NO: 29376 - protein, 220 aa, Collimonas arenae
  misc_feature (1)..(220): tr|A0A0A1FDE2|A0A0A1FDE2_9BURK 7-carboxy-7-deazaguanine synthase OS=Collimonas arenae OX=279058 GN=queE PE=3 S V=1
MANRKYEYKVTYSIKEIFYTLQGEGTHAGRPAVFCRFSGCNLWSGREEDRSTAVCQFCDTDFVGTDGEGGGKFKTSELLADTINALWPTTYTGSKFVVFTGGEPLLQLDTALVESMHAAGFEIAIETNGTLEPPAGIDWICVSPKMGSVLKLRKGNELKVVIPQIGQSLAAYESLDFDHFYVQAMDGPQQAHNIQLAIETCKRNPKWKLSLQTHKLLQIP

SEQ ID NO: 29377 - protein, 211 aa, Collimonas fungivorans
  misc_feature (1)..(211): tr|G0AB80|G0AB80_COLFT 7-carboxy-7-deazaguanine synthas e OS=Collimonas fungivorans (strain Ter331) OX=1005048 GN=queE PE=3 SV=1
MTYSIKEIFYTLQGEGTHAGRPAVFCRFSGCNLWSGREEDRSTAVCQFCDTDFVGTDGEGGGKFKDSAALADTINALWPETYAASKFVVFTGGEPLLQLDAALIDSMHAAGFEIAIETNGTLLPPPGIDWICVSPKMGSVLKLRKGNELKVVIPQVGQSLAAYESLDFEHFYVQAMDGPQLAHNLELAIETCKRNPKWKLSLQTHKLLQIP

SEQ ID NO: 29378 - protein, 211 aa, Collimonas fungivorans
  misc_feature (1)..(211): tr|A0A127P9C8|A0A127P9C8_9BURK 7-carboxy-7-deazaguanine synthase OS=Collimonas fungivorans OX=158899 GN=queE P E=3 SV=1
MTYSIKEIFYTLQGEGTHAGRPAVFCRFSGCNLWTGREEDRSSAVCQFCDTDFVGTDGEGGGKFKDSAALADTINALWPETYAASKFVVFTGGEPLLQLDAALIDSMHAAGFEIAIETNGTLLPPPGIDWICVSPKMGSVLKLRKGNELKVVIPQLGQSLAAYESLDFEHFYVQAMDGPQLAHNLELAIETCKRNPKWKLSLQTHKLLQIP

SEQ ID NO: 29379 - protein, 211 aa, Collimonas pratensis
  misc_feature (1)..(211): tr|A0A127Q7G4|A0A127Q7G4_9BURK 7-carboxy-7-deazaguanine synthase OS=Collimonas pratensis OX=279113 GN=queE PE= 3 SV=1
MTYSIKEIFYTLQGEGTHAGRPAVFCRFSGCNLWSGREEDRSTAVCQFCDTDFVGTDGEGGGKFKTSAALADTINALWPSTYTGSKFVVFTGGEPLLQLDAALVDSMHAAGFEIAIETNGTLEPPAGIDWICVSPKMGSVLKLRKGNELKVVIPQLGQSLATYESLDFDHFYVQAMDGPQQAQNIQLAIETCKRNPKWKLSLQTHKLLQIP

SEQ ID NO: 29380 - protein, 211 aa, Collimonas sp.
  misc_feature (1)..(211): tr|A0A1H3B4T5|A0A1H3B4T5_9BURK 7-carboxy-7-deazaguanine synthase OS=Collimonas sp. OK242 OX=1798195 GN=queE PE =3 SV=1
MTYSIKEIFYTLQGEGTHAGRPAVFCRFSGCNLWTGREEDRSTAVCQFCDTDFVGTDGEGGGKFKDSASLASAINALWPETYAASKFVVFTGGEPLLQLDAALIDSMHAAGFEIAIETNGTLLPPPGIDWICVSPKMGSVLKLRKGNELKVVIPQIGQSLAAYESLDFEHFYVQAMDGPQLAHNLALAIETCKRNPKWKLSLQTHKLLQIP

SEQ ID NO: 29381 - protein, 211 aa, Collimonas sp.
  misc_feature (1)..(211): tr|A0A1I3G335|A0A1I3G335_9BURK 7-carboxy-7-deazaguanine synthase OS=Collimonas sp. OK307 OX=1801620 GN=queE PE =3 SV=1
MTYSIKEIFYTLQGEGTHAGRPAVFCRFSGCNLWTGREEDRSTAVCQFCDTDFVGTDGEGGGKFKDSESLAGTINALWPETYAASKFVVFTGGEPLLQLDAALIDSMHAAGFEIAIETNGTLLPPPGIDWICVSPKMGSVLKLRKGNELKVVIPQIGQSLAAYESLDFEHFYVQAMDGPQLAHNLELAIETCKRNPKWKLSLQTHKLLQIP

SEQ ID NO: 29382 - protein, 224 aa, Colwellia beringensis
  misc_feature (1)..(224): tr|A0A222GCH1|A0A222GCH1_9GAMM 7-carboxy-7-deazaguanine synthase OS=Colwellia beringensis OX=1967665 GN=queE P E=3 SV=1
MTTRYKINELFETLQGEGSFTGQPSIFLRLQGCPVGCSWCDTKHTWDIHPELEIPSKTLLDKSEETEQWSNLSLDDMAAIFSQQGYKAKHIVITGGEPCMVDLTELCLYFEAQGYSCQVETSGTFEIRVSEQCWVTVSPKVNMRGGYKILASAMQRANEIKHPVATEQHVDDLKALLAEHKVENKQIYLQPISQKQRATELAIATCIENNWRLSVQVHKYIGIE

SEQ ID NO: 29383 - protein, 224 aa, Colwellia chukchiensis
  misc_feature (1)..(224): tr|A0A1H7MBA5|A0A1H7MBA5_9GAMM 7-carboxy-7-deazaguanine synthase OS=Colwellia chukchiensis OX=641665 GN=queE P E=3 SV=1
MTTRYKINELFETLQGEGSFTGQPSIFLRLQGCPVGCSWCDTKHTWEIHPELEVNSKQLLSKSEETEQWSNLTLDEMAAIFSQQGFQAKHIVITGGEPCMVDLTELCHYFEAQGYSCQVETSGTFEIRVSKQCWVTVSPKVNMRGGYKILASAMQRANEIKHPVATEQHIDDLKALLAEHKVEHKQIYLQPISQKQRATELAIASCIANNWRLSVQVHKYIGIE

SEQ ID NO: 29384 - protein, 222 aa, Colwellia demingiae
  misc_feature (1)..(222): tr|A0A5C6QBB2|A0A5C6QBB2_9GAMM 7-carboxy-7-deazaguanine synthase OS=Colwellia demingiae OX=89401 GN=queE PE=3 SV=1
MNYKINELFETIQGEGSFTGQPSIFIRLQGCPVGCSWCDTKHTWDIELTDQVSPEIMLAKKAETAQWANFSAEDILALVKEKHFNAKHIVITGGEPCMVDLTPLCETFENLGYSTQIETSGTFEILTTAKCWVTVSPKIKMRGGYDILASAMSRANEIKHPVATEQNVDDLKALLAMHQVENTPVYLQPISQKKRATELAIATCIANNWRLSVQVHKYIGIE

SEQ ID NO: 29385 - protein, 224 aa, Colwellia hornerae
  misc_feature (1)..(224): tr|A0A5C6QM95|A0A5C6QM95_9GAMM 7-carboxy-7-deazaguanine synthase OS=Colwellia hornerae OX=89402 GN=queE PE=3 S V=1
MTVKYKINELFETIQGEGAFTGQPSIFIRLQGCPVACSWCDTKHTWAINLEDEVTPNAMLTKEAESQTWSALTVKDILAMITAEGYQAKHIVITGGEPAMVDLLPLCQALETHGFSCQLETSGTFELQVSAKCWVTVSPKVNMKGGYKILNSAMLRANEIKHPVATEQHIDDLKALLAEHNIVNTQVYLQPISQKERATALAIKSCIENNWRLSVQVHKYLGIE

SEQ ID NO: 29386 - protein, 238 aa, Colwellia marinimaniae
  misc_feature (1)..(238): tr|A0A1Z5I5R1|A0A1Z5I5R1_9GAMM 7-carboxy-7-deazaguanine synthase OS=Colwellia marinimaniae OX=1513592 GN=ygcF PE=3 SV=1
MPNKTHHHVAEKTIIPMNYKINELFETIQGEGSFTGQPSIFIRLQGCPVGCSWCDTKHTWQIELDDQVSPDIMLAKKAETSQWSSFTVAEIFALVQDKNFQAKHIVITGGEPCMVDLTPLCQLFEQQGYSTQIETSGTFEIITTEKCWVTVSPKINMRGGYKILASAMSRANEIKHPIATEQHVDDLKALLALHKVENTAIYLQPISQKKRATELAIATCIANNWRLSIQVHKYIGIE

SEQ ID NO: 29387 - protein, 226 aa, Colwellia psychrerythraea
  misc_feature (1)..(226): tr|Q47ZX2|Q47ZX2_COLP3 7-carboxy-7-deazaguanine synthas e OS=Colwellia psychrerythraea (strain 34H / ATCC BAA-6 81) OX=167879 GN=queE PE=3 SV=1
MNLETTYKINEIFETLQGEGSFTGQPSIFIRLQGCPVGCSWCDTKHTWEVSLEQEVAQNNIVSKKSENDSWGIFTIVQLKELFLSEGYQAKHIVITGGEPCMYDLKPLCQNFEALGYSCQVETSGTFEIQVSKKCWVTVSPKVNMKGGFKVLKSALLRADEIKHPVATEQHIDDLKALLNEHEIENKQIYIQPISQKKRATELAIRSCIENNWRLSVQVHKYIGIE

SEQ ID NO: 29388 - protein, 222 aa, Colwellia psychrerythraea
  misc_feature (1)..(222): tr|A0A1Y5EDG0|A0A1Y5EDG0_COLPS 7-carboxy-7-deazaguanine synthase OS=Colwellia psychrerythraea OX=28229 GN=queE PE=3 SV=1
MKYKINELFETIQGEGSFTGQPSIFIRLQGCPVGCSWCDTKHTWDIELDDQVSPEVMLTKTAETSQWSNFTPEDIITLVKDKNFQAKHIVITGGEPCMVDLTPLCELFEQQGYSTQIETSGTFEIITTAECWVTVSPKINMRGGYEVLASAMSRANEIKHPIATEQHVDDLKALLAKHQVDNTPIYLQPISQKKRATELAIETCIANNWRLSVQVHKYIGIE

SEQ ID NO: 29389 - protein, 224 aa, Colwellia sp.
  misc_feature (1)..(224): tr|A0A136HMR7|A0A136HMR7_9GAMM 7-carboxy-7-deazaguanine synthase OS=Colwellia sp. Phe_37 OX=1795872 GN=queE PE =3 SV=1
MTTRYKINELFETLQGEGSYTGQPSIFLRLQGCPVACSWCDTKHTWDIHPELEINSEQLLSKSQETEQWTNLSLDDIAAIFAQQGYNAKHIVITGGEPCMVDLTELCLYFEARGYSCQVETSGTFEIKVSPQCWVTVSPKVNMRGGYKILASAMQRANEIKHPVGTEQHIDDLKALLAKHQVENKQIYLQPISQKQRATELAIATCIENNWRLSVQVHKYIGIE

SEQ ID NO: 29390 - protein, 221 aa, Colwellia sp.
  misc_feature (1)..(221): tr|A0A2G2FHC7|A0A2G2FHC7_COLSX 7-carboxy-7-deazaguanine synthase OS=Colwellia sp. OX=56799 GN=queE PE=3 SV=1
MYKINEVFETIQGEASFTGTPSIFLRLQGCPVGCSWCDTKQTWDVDNVYKVSLDETVEKKADSDHWADASAEQVLELFKSRGYTAKHVVITGGEPCMYDLNPVCKLLHDNGFTTQIETSGTFEILAPEQTWVTVSPKINMRGGYEVLTSAMKRANEIKHPVAMQKHVEELEELFAKTGVNPKLVYLQPISQKVSATKLAIDTCIAKNWRLSIQVHKYLGIS

SEQ ID NO: 29391 - protein, 250 aa, Colwelliaceae bacterium
  misc_feature (1)..(250): tr|A0A2D6RD26|A0A2D6RD26_9GAMM 7-carboxy-7-deazaguanine synthase OS=Colwelliaceae bacterium OX=2026726 GN=queE PE=3 SV=1
MKMKISEDFYSVQGEGISQGVPSYFVRLQGCNLICGGPCGRLKDEGKATWYCDTEPVWRQGMEVSNEELVGKIQDTGQFENVLSGDTHIVWTGGEPTLPKHQKDIVGFLDHLHQKDWKIKPYSEIETNGTQILDSDLLKSVQQLNVSPKLANSGMKGSLRIVPEAINSALQHENSWFKFVVTDESDIEEFERYFTIPYEIPRNRVIIMPGCDNLDGLPVATRKCYELSMKHGYRTISRGHILAWNKKTGI

SEQ ID NO: 29392 - protein, 211 aa, Comamonadaceae bacterium
  misc_feature (1)..(211): tr|A0A2M8E3U0|A0A2M8E3U0_9BURK 7-carboxy-7-deazaguanine synthase OS=Comamonadaceae bacterium CG_4_9_14_0_8_um_ filter_60_18 OX=1973950 GN=queE PE=3 SV=1
MTYSVKEIFYTLQGEGHHAGRPAVFCRFAGCNLWNGAEASRASALCQFCDTDFVGTDGPGGGKFRQPHTLAERINALWPKAYPAHKYVVFTGGEPLLQLDVPLIEALHAVGFEVAIETNGTLPVPEGVDWVCVSPKMGAALALRQGHELKVVIPQPGQPMDVYAALRFDHHFVQAMDGPAQLNNLQLAVDYCKAHPQWKLSLQTHKLLQIP

SEQ ID NO: 29393 - protein, 202 aa, Comamonadaceae bacterium
  misc_feature (1)..(202): tr|A0A5C9CG39|A0A5C9CG39_9BURK 7-carboxy-7-deazaguanine synthase OS=Comamonadaceae bacterium OX=1871071 GN=que E PE=3 SV=1
MTYSVKEIFYTLQGEGQQAGRPAVFCRFAGCNLWTGTENRRASAVCQFCDTDFVGVDGEGGAERIYALWPAAYPAHKYVVFTGGEPLLQLDTPLIEAIHAAGFEVAIETNGTLPVPEGVDWVCVSPKMGAKLVVHEGDEIKVVIPQPGQPLDVYAALDFDHYFVQAMDGPLQADNQRLAVEYCKAHPQWKLSLQTHKLLQIP

SEQ ID NO: 29394 - protein, 218 aa, Comamonas serinivorans
  misc_feature (1)..(218): tr|A0A1Y0EQ03|A0A1Y0EQ03_9BURK 7-carboxy-7-deazaguanine synthase OS=Comamonas serinivorans OX=1082851 GN=queE PE=3 SV=1
MLPINEVFETIQGEACMTGTPSVFLRLQACPVGCPWCDTKHTWALDPARQVAVADMLAKTDDADTWAAMEVDELLATVQAFRARHVVITGGEPALYDLVPLTTLLIAHSYSVQIETSGTHPIRVHPDTWVTVSPKLDMPGGLPVLPEALARANEVKHPVGKPADVERLLGLDLGRVPRSLIWLQPISQSPKATALCVDEATRHGWRVSIQTHKFLGVR

SEQ ID NO: 29395 - protein, 212 aa, Comamonas sp.
  misc_feature (1)..(212): tr|A0A0M2DPI3|A0A0M2DPI3_9BURK 7-carboxy-7-deazaguanine synthase OS=Comamonas sp. E6 OX=364029 GN=queE PE=3 SV =1
MTYSVKEIFYTLQGEGGQAGTPAVFCRFAGCNLWTGREQDRPNAICQFCDTDFVGTDGTLGGKFATADELAERILSQWPADDSRHRMVVLTGGEPLLQVDPALIAALHARGFRISVESNGTVAAPEGIDWLCISPKAGADWIQRSGQELKLVWPQPTFDLAAIEASTEFQHYFLQPMDNAQQGSNIAACIAQCMQRPGWRLSLQTHKLTGIR

SEQ ID NO: 29396 - protein, 212 aa, Comamonas sp.
  misc_feature (1)..(212): tr|A0A5D3H3U4|A0A5D3H3U4_9BURK 7-carboxy-7-deazaguanine synthase OS=Comamonas sp. Z3 OX=2601247 GN=queE PE=3 S V=1
MTYSVKEIFYTLQGEGGQAGTPAVFCRFAGCNLWTGREQDRPNAICQFCDTDFVGTDGTLGGKFATADALAERILSQWPADDSQHRMVVLTGGEPLLQVDEALIAALHARGFRISVESNGTVAAPEGIDWLCISPKAGADWIQRSGQELKLVWPQPTFDLAAIEASTDFQHYFLQPMDNAQQSGNITACIEQCMQRPGWRLSLQTHKLTGIR

SEQ ID NO: 29397 - protein, 212 aa, Comamonas testosteroni
  misc_feature (1)..(212): tr|A0A076PPI5|A0A076PPI5_COMTE 7-carboxy-7-deazaguanine synthase OS=Comamonas testosteroni TK102 OX=1392005 GN =queE PE=3 SV=1
MTYSVKEIFYTLQGEGGQAGTPAVFCRFAGCNLWTGREQDRPNAICQFCDTDFVGTDGTLGGKFATADALAERILSQWPADDSLHRMVVLTGGEPLLQVDEALIAALHARGFRISVESNGTVAAPEGIDWLCISPKAGADWIQRSGQELKLVWPQPTFDLAAIEASTDFQHYFLQPMDNAQQSGNITACIEQCMQRPGWRLSLQTHKLTGIR

SEQ ID NO: 29398 - protein, 212 aa, Comamonas testosteroni
  misc_feature (1)..(212): tr|A0A096FKU0|A0A096FKU0_COMTE 7-carboxy-7-deazaguanine synthase OS=Comamonas testosteroni OX=285 GN=queE PE=3 SV=1
MTYSVKEIFYTLQGEGGQAGTPAVFCRFAGCNLWTGREQDRPNAICQFCDTDFVGTDGTLGGKFATADALAERILSQWPADDSRHRMVVLTGGEPLLQVDEALIAALHSRGFRISVESNGTVAAPEGIDWLCISPKAGADWIQRSGQELKLVWPQPTFDLAAIEASTEFQHYFLQPMDNAMQSSNIAACIEQCMQRPAWRLSLQTHKLTGIR

SEQ ID NO: 29399 - protein, 212 aa, Comamonas thiooxydans
  misc_feature (1)..(212): tr|A0A0E3BPQ5|A0A0E3BPQ5_9BURK 7-carboxy-7-deazaguanine synthase OS=Comamonas thiooxydans OX=363952 GN=queE PE =3 SV=1
MTYSVKEIFYTLQGEGGQAGMPAVFCRFAGCNLWTGREQDRPKAICQFCDTDFVGTDGTLGGKFATADELAERILGQWPADDSRHRMVVLTGGEPLLQVDQALIAALHVRGFRISVESNGTVAAPEGIDWLCISPKAGADWIQRSGQELKLVWPQPTFDLAAIEASTEFQHYFLQPMDNARQGSNIAACIAQCMQRPGWRLSLQTHKLTGIR

SEQ ID NO: 29400 - protein, 212 aa, Comamonas thiooxydans; identical to SEQ ID NO: 29395
  misc_feature (1)..(212): tr|A0A096EHS2|A0A096EHS2_9BURK 7-carboxy-7-deazaguanine synthase OS=Comamonas thiooxydans OX=363952 GN=queE PE =3 SV=1

SEQ ID NO: 29401 - protein, 211 aa, Commensalibacter intestini
  misc_feature (1)..(211): tr|G6F1Y3|G6F1Y3_9PROT 7-carboxy-7-deazaguanine synthas e OS=Commensalibacter intestini A911 OX=1088868 GN=queE PE=3 SV=1
MSYAVKEIFLTLQGEGGQIGRTAVFCRFTGCNLWSGKEEDRHQAVCQFCDTDFVGMDGEGGGRFTDAAALANAIETTWGARDAQQRFVVFTGGEPLLQLDSELVHLLKQKGFYIAVETNGTLPVPDAVDWICVSPKAGAELVQTCGDELKLIYPQEGLNPQDFIGLKFTTFRLQPKDDAHKQEHLQKAIEFCQNHPIWHLSLQTHKLIGIP

SEQ ID NO: 29402 - protein, 211 aa, Commensalibacter intestini
  misc_feature (1)..(211): tr|A0A251ZVP7|A0A251ZVP7_9PROT 7-carboxy-7-deazaguanine synthase OS=Commensalibacter intestini OX=479936 GN=qu eE PE=3 SV=1
MSYAVKEIFLTLQGEGGQIGRTAVFCRFTGCNLWSGKEEDRHQAVCQFCDTDFVGMDGEGGGRFTDAAALANAIETTWGTRDAQQRFVVFTGGEPLLQLDSELVHLLKQKGFYIAVETNGTLPVPDAVDWICVSPKAGAELVQTCGDELKLIYPQEGLNPQDFIGLKFTTFRLQPKDDAHKQEHLQKAIEFCQNHPIWHLSLQTHKLIGIP

SEQ ID NO: 29403 - protein, 212 aa, Commensalibacter sp.
  misc_feature (1)..(212): tr|W7DKS1|W7DKS1_9PROT 7-carboxy-7-deazaguanine synthas e OS=Commensalibacter sp. MX01 OX=1208583 GN=queE PE=3 SV=1
MSYAVKEIFLTLQGEGGQIGRTSVFCRFTGCNLWSGQEADRKDAVCQFCDTNFVGMDGENGGRFPDAQSLANAIEACWGTIRDPKQRFVVFTGGEPLLQLDKVLIEAIKQKGFYIAVETNGTLPVPQGVDWICVSPKAGAELIQISGDELKLIYPQEGLDPHRFTSLDFTTFRLQPKDDMNKTEHIKKAIKYCQEHPLWHLSLQTHKLIGIP

SEQ ID NO: 29404 - protein, 211 aa, Commensalibacter sp.
  misc_feature (1)..(211): tr|A0A318N1M8|A0A318N1M8_9PROT 7-carboxy-7-deazaguanine synthase OS=Commensalibacter sp. ESL0284 OX=2070537 GN =queE PE=3 SV=1
MSYAVKEIFLTLQGEGYFAGRTAVFCRFSGCNLWSGQEKDRATAICQFCDTDFVGMDGSGGGRFEDANSLAIAIEKHWGERDTSYRFVVFTGGEPLLQLDKSLIDVLKKKGFFIAVETNGTMLVPKGVDWICVSPKQGAALMQMHGDELKLVYPQEAMNPQKFESLSFKSFRLQPRDDEQRDKHLRQAIQYCQDHPKWYLSLQTHKLIGIP

SEQ ID NO: 29405 - protein, 209 aa, Confluentibacter sp.
  misc_feature (1)..(209): tr|A0A2N3HKD1|A0A2N3HKD1_9FLAO 7-carboxy-7-deazaguanine synthase OS=Confluentibacter sp. 3B OX=1909700 GN=queE PE=3 SV=1
MNKDLQILVDKGEMLPLMEEFYTIQGEGFHKGTAAYFIRIGGCDVGCHWCDVKESWNADLHPPTEVYKIVENAKKHSDTIVVTGGEPLTWDMSILTNALKAEGLQIHIETSGAYKLTGIWDWICLSPKKMKLPTLEVYEKANELKMIIYNKDDFRFAEDQAAMVNKDCILYMQPEWSKRDKVIPEIVDYVMKNPKWKVSLQTHKYLNIP

SEQ ID NO: 29406 - protein, 239 aa, Confluentimicrobium lipolyticum
  misc_feature (1)..(239): tr|A0A238KR56|A0A238KR56_9RHOB 7-carboxy-7-deazaguanine synthase OS=Confluentimicrobium lipolyticum OX=1524263 GN=queE PE=3 SV=1
MTTLRIAEIFGPTIQGEGALIGAPTVFVRAGGCDYRCSWCDSLHAVDSEYRHEWAPMQPEDVWQKVRDLSGDKPLTVTVSGGNPAIQDFGPLIALGKAQGYGFALETQGSVARDWFAELEMLVLSPKPPSSGETVDWAVFDTCLAKAGDAPTVLKIVIFDDADYAWARDVAARYPALPLYLQPGNHTPPPPDAEDAVIDMDGIMDRMTWLVDKTLADGWYSPRILPQLHVLLWGNKRGV

SEQ ID NO: 29407 - protein, 226 aa, Congregibacter litoralis
  misc_feature (1)..(226): tr|A4A9R9|A4A9R9_9GAMM 7-carboxy-7-deazaguanine synthas e OS=Congregibacter litoralis KT71 OX=314285 GN=queE PE =3 SV=1
MGAVATADGVVAADTLRITEIFYSLQGEARTVGLPTVFVRLTGCPLRCLYCDTEYAFHGGEIMSLEHIADQVAAHKPAYVTVTGGEPLAQPNCLPLLSRLCDQGYEVSLETSGAMSVAGVDPRVVKVLDLKTPASGEVARNDYGNVQYLTPNDQVKFVICDRGDYEWARFKLDEYTLGDRVSDVLFSPSHEQLAPRELAEWILGDGLQVRLQLQLHKYLWDDAPGH

SEQ ID NO: 29408 - protein, 220 aa, Coprobacillus sp.
  misc_feature (1)..(220): tr|H1AM47|H1AM47_9FIRM 7-carboxy-7-deazaguanine synthas e OS=Coprobacillus sp. 8_2_54BFAA OX=469597 GN=queE PE= 3 SV=1
MNNYKVVEKFISINGEGSRAGQLAAFIRFHYCNLNCSYCDTRYANDSNSNYELLSAQNILDYLKANKVVNVTLTGGEPLLQQNIDYLIDLLLKNGFSVEIETNGSIDIKPFIKETRPIFTLDYKVPSSTMENEMCLNNYQYLTKNDVVKFVVSNLSDLNKAKEIIDTYDLVNRTKVYFSPVFGKIEPRMIIDYMVKHHLNGINMQLQMHKFIWDINQRGV

SEQ ID NO: 29409 - protein, 220 aa, Coprobacillus sp.
  misc_feature (1)..(220): tr|G9QXV7|G9QXV7_9FIRM 7-carboxy-7-deazaguanine synthas e OS=Coprobacillus sp. 3_3_56FAA OX=665941 GN=queE PE=3 SV=1
MNNYKVVEKFISINGEGSRAGQLAAFIRFHYCNLNCSYCDTRYANDSNSNYELLSAQNILDYLKANKVVNVTLTGGEPLLQQNIDYLIDLLLKNGFSVEIETNGSIDIKPFIKETRPIFTLDYKVPSSTMENEMCLNNYQYLTKNDVVKFVVSNLSDLNKAKEIIDTYDLVNRTKVYFSPVFGKIEPRRIVDYMVKHHLNGINMQLQMHKFIWDINQRGV

SEQ ID NO: 29410 - protein, 184 aa, Coprobacter fastidiosus
  misc_feature (1)..(184): tr|A0A495WNK4|A0A495WNK4_9BACT 7-carboxy-7-deazaguanine synthase OS=Coprobacter fastidiosus NSB1 OX=1349822 GN =queE PE=3 SV=1
MKKINEIFYSIQGEGYYTGVPAIFIRFSGCNLNCEFCDTDHSLGKIMSDEEILDIIRKFPAKHVVLTGGEPSMQLDDCFLSLLKAQGFYLQIETNGTLTKGFDAVTRWCDWITCSPKKDCVRKQMDELKVVYLSQDMSVYKQYSCKHKMLQPCSMQNTKEVIEFIKKNPEWRLSLQTHKYLHIR

SEQ ID NO: 29411 - protein, 184 aa, Coprobacter secundus
  misc_feature (1)..(184): tr|A0A0B2JAI8|A0A0B2JAI8_9BACT 7-carboxy-7-deazaguanine synthase OS=Coprobacter secundus OX=1501392 GN=queE PE =3 SV=1
MKKINEIFYSLQGEGYYTGTPAVFVRFSGCNLNCDFCDTEHLSGVFMSDNEILTEITQYPTRHIVLTGGEPTLQIDVPFMQMLKEDNWYIQIETNGTLTSGLSIADRWADWVTCSPKKDCIREKANELKVVYTGQDMSQYDSFICDIRSLQPCSMLNTQEVIDYIKKHPQWRLSLQTHKMLDIR

SEQ ID NO: 29412 - protein, 187 aa, Coprobacter sp.
  misc_feature (1)..(187): tr|A0A316SM52|A0A316SM52_9BACT 7-carboxy-7-deazaguanine synthase OS=Coprobacter sp. OX=1941478 GN=queE PE=3 SV =1
MKKINEIFYSLQGEGFHTGTPAVFVRFSGCNLSCAFCDTDHKNGTLLSNEAIIEQISRFPARIVILTGGEPSLFIDKEFIDQLHEAGFRVHIETNGTHTIPGNIDWITCSPKIDCQEEKNVPLLLQEADELKVVYRKQNLDILSNFRCKVRFLQPCSGKNIPETVSYILSHPEWRLSLQTHKILDIR

SEQ ID NO: 29413 - protein, 223 aa, Coprococcus catus
  misc_feature (1)..(223): tr|D4J8R0|D4J8R0_9FIRM 7-carboxy-7-deazaguanine synthas e OS=Coprococcus catus GD/7 OX=717962 GN=queE PE=3 SV=1
MERTYEVVEHFVSINGEGPLAGQLAVFVRFKGCNLSCLYCDTKWANEPDVPARVMTAEEIHQAIMETGVRNVTLTGGEPLDRPHISELLEKLAADHSLHVEIETNGSVSLAPFVNIPNRPSFTMDYKLSCSGMETAMDTDNFSLLTEKDTVKFVTGSLADCERAVEIMKQFRLIGRCHLYFSPVFGSIDPADIVEFMKEQQLNGVNLQIQMHKVIWDPDRRGV

SEQ ID NO: 29414 - protein, 223 aa, Coprococcus catus
  misc_feature (1)..(223): tr|A0A3E2TS81|A0A3E2TS81_9FIRM 7-carboxy-7-deazaguanine synthase OS=Coprococcus catus OX=116085 GN=queE PE=3 S V=1
MERTYEVVEHFVSINGEGPLAGQLAVFVRFKGCNLSCLYCDTKWANEPDVPARVMTAEEIHQAIMETGVRNVTLTGGEPLDRPYISELLEKLAADHLLHVEIETNGSVSLAPFVNIPNRPSFTMDYKLSCSGMETAMDTDNFSLLTEKDTVKFVTGSLADCERAVEIMKQFRLIGRCHLYFSPVFGSIDPADIVEFMKEQQLNGVNLQIQMHKVIWDPDRRGV

SEQ ID NO: 29415 - protein, 216 aa, Coprococcus comes
  misc_feature (1)..(216): tr|A0A412QBE2|A0A412QBE2_9FIRM 7-carboxy-7-deazaguanine synthase OS=Coprococcus comes OX=410072 GN=queE PE=3 S V=1
MKVVEKFTSINGEGTRAGELAVFIRFKGCNLKCSYCDTMWANELACPYQEETPADIVNYVLATGIRNVTLTGGEPLLQKEIKELIHHLLKAGVRVEIETNGSVSLTDFCEERPVFTMDYKLPSSGCESQMILENMELLVSDDTVKFVTGSQEDLQKAMEVIRTYDLTNRCHVYFSPVFGSIEPVQIVNFMLEHQLNDVRLQIQMHKIIWDPNERGV

SEQ ID NO: 29416 - protein, 222 aa, Coprococcus comes; identical to SEQ ID NO: 28429
  misc_feature (1)..(222): tr|A0A412QAY7|A0A412QAY7_9FIRM 7-carboxy-7-deazaguanine synthase OS=Coprococcus comes OX=410072 GN=queE PE=3 S V=1

SEQ ID NO: 29417 - protein, 222 aa, Coprococcus eutactus
  misc_feature (1)..(222): tr|R5WBH2|R5WBH2_9FIRM 7-carboxy-7-deazaguanine synthas e OS=Coprococcus eutactus CAG:665 OX=1263071 GN=queE PE =3 SV=1
MSTYRVVERFISINGEAARAGELAVFIRFAGCNLDCGYCDTKWANEPGVDYQELTEDELVDYVRRTEVKNVTLTGGEPLIQKDIDKLLLAFALEDDIRVEIETNGSVDIAEFKALGGNVSYTLDYKCPSSGMESDMCLANYNYIDKNDSVKFVVGSQEDLEKCLEIIREYALDERTRVFISPVYGSIDPADIVDFMIENGMNDVKLQLQLHKFIWDPEERGV

SEQ ID NO: 29418 - protein, 222 aa, Coprococcus eutactus
  misc_feature (1)..(222): tr|A8STP3|A8STP3_9FIRM 7-carboxy-7-deazaguanine synthas e OS=Coprococcus eutactus ATCC 27759 OX=411474 GN=queE PE=3 SV=1
MSTYRVVERFISINGEAARAGELAVFIRFAGCNLNCGYCDTKWANEPGVDYQELTEDELVDYVRRTEVKNVTLTGGEPLIQKDIDKLLLAFALEDDIRVEIETNGSVDIAEFKALGGNVSYTLDYKCPSSGMESDMCLANYNYIDKNDSVKFVVGSQEDLEKCLEIIREYALDERTRVFISPVYGSIDPADIVDFMIENGMNDVKLQLQLHKFIWDPEERGV

SEQ ID NO: 29419 - protein, 222 aa, Coprococcus sp.
  misc_feature (1)..(222): tr|A0A417SZW9|A0A417SZW9_9FIRM 7-carboxy-7-deazaguanine synthase OS=Coprococcus sp. OM04-5BH OX=2293093 GN=que E PE=3 SV=1
MAQFKVAERFVSINGESARAGELAVFIRFAGCNLNCGYCDTKWANEKDTEYELLSDEELISYIKRTEIKNVTLTGGEPLIQEDIDELLLKLSLEGDIRVEVETNGSIDIAEFKAVADGISYTLDYKLPGSGCEDKMCISNYNYVDKNDAVKFVVGSIKDLDRAREVIYTYGLDVKTRVYISPVFGSIELEDIVDYMIENNMNDVKLQLQMHKIIWDPETRGV

SEQ ID NO: 29420 - protein, 222 aa, Coprococcus sp.
  misc_feature (1)..(222): tr|A0A355XB58|A0A355XB58_9FIRM 7-carboxy-7-deazaguanine synthase OS=Coprococcus sp. OX=2049024 GN=queE PE=3 SV =1
MSTYRVVERFISINGEAARAGELAVFIRFAGCNLDCGYCDTKWANEAGVPYEELTEDEIIDYVRRTKVKNVTLTGGEPLIQKDIDKLLLAFELEDDVRVEIETNGSVDIAEFKALGGNVSYTLDYKCPSSGMESEMCLANYNYIDKNDSVKFVVGSQEDLEKCFEIVREYALDEKTRVFISPVYGSIDPADIVDFMIENDMNDVKLQLQLHKFIWDPEERGV

SEQ ID NO: 29421 - protein, 226 aa, Coraliomargarita akajimensis
  misc_feature (1)..(226): tr|D5EK67|D5EK67_CORAD 7-carboxy-7-deazaguanine synthas e OS=Coraliomargarita akajimensis (strain DSM 45221 / I AM 15411 / JCM 23193 / KCTC 12865 / 04OKA010-24) OX=583 355 GN=queE PE=3 SV=1
MAKQLPVHEQFYSFQGEGCHAGRAAYFIRLFGCPVHCPWCDSAGTWHPDYVPESIDRVLANDLLASVQKTAAEFVVITGGEPAIHDLSELTAVLRRAGYPVHLETSGAFELKGVFDWVTLSPKRWKLPLPENLKRADEFKLIVDELGAIEEYARLPGVLRSVPVWLHPEWSQQRNQAILSAITEWVKAHGAPFRAGWQMHKQYAADLDDPRSAPAAPLGGDPERGY

SEQ ID NO: 29422 - protein, 216 aa, Coraliomargarita sp.
  misc_feature (1)..(216): tr|A0A424QUY2|A0A424QUY2_9BACT 7-carboxy-7-deazaguanine synthase OS=Coraliomargarita sp. TMED73 OX=1986604 GN= queE PE=3 SV=1
MPRQLPIHERFHSFQGECCHAGRAAFFIRTYGCPVHCPWCDSAGTWHPDHKPQAINRIEALALAEEAAAARPAFVVITGGEPTIHDLTPLTEALHAIDLPVHLETSGAFPIRGQFDWITLSPKRWKLPLEQNLSRADEFKIIVDAPDAIDEYLAACPTPPGIPIWLHPEWNISTDPAILDAITARVKTSGDPFRAGWQLHKPYAADALDPRSVPEK

SEQ ID NO: 29423 - protein, 225 aa, Coraliomargarita sp.
  misc_feature (1)..(225): tr|A0A2E0NIB5|A0A2E0NIB5_9BACT 7-carboxy-7-deazaguanine synthase OS=Coraliomargarita sp. OX=2024828 GN=queE PE =3 SV=1
MARKLPVHEQFYSFQGEGFYVGRAAYFIRLFGCPVHCPWCDSAGTWHPEHIPKKIPRLDVDTLAAAAASTQAEFTVITGGEPAIHDLSELCEALKKAGQAVHLETSGSFPLKGDFDWITLSPKRWKLPLEENILIANEFKCIIDTPSAIEEYNSIIGHKNVPIWLHPEWSRHEDPTILNTITEWIKQHGAPYRGGWQLHKNYGADLLDPGSAPLAPLGGDTLRGY

SEQ ID NO: 29424 - protein, 226 aa, Corallincola sp.
  misc_feature (1)..(226): tr|A0A368NQW3|A0A368NQW3_9GAMM 7-carboxy-7-deazaguanine synthase OS=Corallincola sp. C4 OX=2282215 GN=queE PE= 3 SV=1
MAYPVNEVFETIQGEGVYTGVPAIFVRLQGCPVGCSWCDTKHTWPLDDDAKIDVVDLLAEQGETECWSEMTSKQLLNLFAEQGYTAKHVVITGGEPCVYNLSDLTSTLFSRGYHCQIETSGTFEVLVDDKTWVTVSPKVAMKGGYDVLASALLRANEIKHPVAKQSHIDELDALLAPISASGQLSGKTICLQPISQKPRATELAVRTCIARNWRLSIQTHKYLGIE

SEQ ID NO: 29425 - protein, 230 aa, Corallococcus coralloides
  misc_feature (1)..(230): tr|A0A410RJH2|A0A410RJH2_CORCK 7-carboxy-7-deazaguanine synthase OS=Corallococcus coralloides OX=184914 GN=ygc F PE=3 SV=1
MPAARPHIEPRRVPTADSVVVKELYLSLQGESSHAGMLCGFIRLTGCHLRCTYCDSEFAFHGGSRMKISEVVEKALAWNTPTVEVTGGEPLLQPGVYPLMEALLDAGLKVLLETSGAIDVRLVPPAVHKIVDMKTPSSGECDRNDYRNLTSMNANDELKIVIGSRVDYEWARALVTEHKLGQKPYGVLFSTIFDKLHPRQLAEWIIEDRLPVRFQLQMHKYLWDPNERGV

SEQ ID NO: 29426 - protein, 238 aa, Corallococcus coralloides
  misc_feature (1)..(238): tr|H8N156|H8N156_CORCM 7-carboxy-7-deazaguanine synthas e OS=Corallococcus coralloides (strain ATCC 25202 / DSM 2259 / NBRC 100086 / M2) OX=1144275 GN=ygcF PE=3 SV=1
MRPFAPHAMPAARPHIEPRRVPTADSVVVKELYLSLQGESSHAGMLCGFIRLTGCHLRCTYCDSEFAFHGGSRMKIPEVVEKALAWNTPTVEVTGGEPLLQPGVYPLMEALLDAGLKVLLETSGAIDVRLVPPAVHKIVDMKTPSSGECDRNDYRNLTSMNANDELKIVIGSRVDYEWARALVTEHQLGKKPYSVLFSTIFDKLHPRQLAEWIIEDRLPVRFQLQMHKYLWDPNERGV

SEQ ID NO: 29427 - protein, 230 aa, Corallococcus exiguus
  misc_feature (1)..(230): tr|A0A5C5DYP7|A0A5C5DYP7_9DELT 7-carboxy-7-deazaguanine synthase OS=Corallococcus exiguus OX=83462 GN=queE PE= 3 SV=1
MPAARPHIEPRRVPTADSVVVKELYLSLQGESSHAGMLCGFIRLTGCHLRCTYCDSEFAFHGGSRMKVSEVVEKALAWNSPTVEVTGGEPLLQPGVYPLMEALLDAGLKVLLETSGAIDVRLVPPAVHKIVDMKTPSSGECDRNDYRNLTSMNANDELKIVIGSRVDYEWARALVQEHQLGKKPYGVLFSTIFDKLHPRQLAEWIIEDRLPVRFQLQMHKYLWDPNERGV

SEQ ID NO: 29428 - protein, 230 aa, Corallococcus sp.
  misc_feature (1)..(230): tr|A0A3A8M5Y0|A0A3A8M5Y0_9DELT 7-carboxy-7-deazaguanine synthase OS=Corallococcus sp. CA040B OX=2316726 GN=que E PE=3 SV=1
MPVARPHIEPRRLPSADSVVVKEIYLSLQGESSHAGLLCAFIRLTGCHLRCTYCDSEFAFHGGSRMKNADIVTQILALNTPAVEVTGGEPLLQPGVYPLMESLLGAGLKVLLETSGAIDVRLVPPAVHKIVDMKTPSSGECDRNDLRNLVSMNANDELKFVIGSREDYEWSRALITEHRLGTKPYSVLFSTIFDKLHPRELAEWIIEDRLPVRFQLQMHKYLWDPNARGV

SEQ ID NO: 29429 - protein, 230 aa, Corallococcus sp.
  misc_feature (1)..(230): tr|A0A3A8K9H0|A0A3A8K9H0_9DELT 7-carboxy-7-deazaguanine synthase OS=Corallococcus sp. CA053C OX=2316732 GN=que E PE=3 SV=1
MPVARPHIEPRRAPSADSVVVKEIYLSLQGESSHAGLLCAFIRLTGCHLRCTYCDSEFAFHGGNRMKNADIVTQILALNTPAVEVTGGEPLLQPGVYPLMESLLDAGLKVLLETSGAIDVRLVPPAVHKIVDMKTPSSGECDRNDYRNFVSMNANDELKFVIGSREDYEWSRALITEHRLGTKPYSVLFSTVFDKLHPRQLAEWIIEDRLPVRFQLQMHKYLWDPNARGV

SEQ ID NO: 29430 - protein, 256 aa, Coriobacteriia bacterium
  misc_feature (1)..(256): tr|A0A2V2E851|A0A2V2E851_9ACTN 7-carboxy-7-deazaguanine synthase OS=Coriobacteriia bacterium OX=2052159 GN=que E PE=3 SV=1
MSGRDAAHGSAAFASLEASADCTLPVAERFVSVNGEGRAAGKLAAFIRFTGCNLACSYCDTMWANAPAAAECAERVSVADLVAWARETRVECITLTGGEPALQPELPRLVRALLAEPGPLGRGLRVEIETNGAADLCELASLRDECASLPGSLTFTVDWKLPASGMEDRMLRENFALLDACDTVKFVCGGEGDLVRMLEVSRELGLPNRVPVYLSPVFGRLDPARIVDFMQDNNLTWATAQLQLHKIIWPGVEKGV

SEQ ID NO: 29431 - protein, 238 aa, Corynebacterium striatum
  misc_feature (1)..(238): tr|A0A2H1ADM8|A0A2H1ADM8_CORST 7-carboxy-7-deazaguanine synthase OS=Corynebacterium striatum OX=43770 GN=queE PE=3 SV=1
MSKIPVLEIFGPTIQGEGRVIGRKTMFVRTAGCDYRCSWCDSSFTWDGSAKEEIRMMDATEIYAQLYDIAGESFNHVTISGGNPALIKGIQTLVDLFEDKGIQSALETQGSKFQPWMTQIDDLTISPKPPSSMMKPNLPILDDVIAKCKPETLNLKVVIFNDEDFEFAKMIHHRYPNVPFYLQVGNPYLDGEYVESHTEKLLSLYETLVNRVMDSSDMNNVYVLPQLHTLLWSNKKGV

SEQ ID NO: 29432 - protein, 223 aa, Cosenzaea myxofaciens
  misc_feature (1)..(223): tr|A0A198GAZ0|A0A198GAZ0_9GAMM 7-carboxy-7-deazaguanine synthase OS=Cosenzaea myxofaciens ATCC 19692 OX=135433 7 GN=queE PE=3 SV=1
MQYPINEVFQTLQGEGVFTGVPALFVRLQGCPVGCSWCDTKHTWEKKEEKKVPLGDIPIKTQESDNWGSAYVSDILSLFKQQNYTAKHVVITGGEPCLYDLRALTEGLEQAGYDCQIETSGTHEIMCSEKTWVTLSPKVGMKGGYHVLTAAINRANEIKHPVGREKDIEALDSLLSLRTQQPTPVVALQPISCKDRATQLCIKTCIERNWRFSMQTHKYLNIA

SEQ ID NO: 29433 - protein, 213 aa, Coxiella burnetii
  misc_feature (1)..(213): tr|A9KGT6|A9KGT6_COXBN 7-carboxy-7-deazaguanine synthas e OS=Coxiella burnetii (strain Dugway 5J108-111) OX=434 922 GN=queE PE=3 SV=1
MDKLRITEIFYSLQGETKTVGLPTVFVRLTGCPLRCHYCDTPYAFYGGQSLLLEDVVHQVASYQTRYVTVTGGEPLAQPACLPLLQRLCDLNYRVSLETSGALDISNVDPRVIKIVDVKTPGSKEMARNRFGNFEYLLPHDQVKFVICDRRDYEWAKDIINRYDLISRAEVLFSPSHEQLDKQQLADWIVEDRLSVRFQLQLHKYVWGDVRGK

SEQ ID NO: 29434 - protein, 213 aa, Coxiella burnetii; identical to SEQ ID NO: 29433
  misc_feature (1)..(213): tr|Q83F56|Q83F56_COXBU 7-carboxy-7-deazaguanine synthas e OS=Coxiella burnetii (strain RSA 493 / Nine Mile phas e I) OX=227377 GN=queE PE=3 SV=1

SEQ ID NO: 29435 - protein, 214 aa, Coxiella sp.
  misc_feature (1)..(214): tr|A0A2G1ZWQ5|A0A2G1ZWQ5_9COXI 7-carboxy-7-deazaguanine synthase OS=Coxiella sp. (in: Bacteria) OX=59288 GN=qu eE PE=3 SV=1
MIDTLRITEIFYSLQGETRTVGLPTVFVRLTGCPLRCGYCDTAYAFKGGTLTPIDSILNTVADYNPRYVTVTGGEPLAQPMCHTLLTQLCDRGYAVSLETSGAIDVAAVDKRVTKVVDFKTPGSLEVERNLFQNVDYLLPHDQVKFVICDREDYDWAKKIMTEHQLAQRCEVLFSPSHQQLSNQQLADWIIADNLTVRFQLQLHKVIWGDVPGV

SEQ ID NO: 29436 - protein, 241 aa, Coxiella sp.
  misc_feature (1)..(241): tr|A0A0S7Y0A5|A0A0S7Y0A5_9COXI 7-carboxy-7-deazaguanine synthase OS=Coxiella sp. DG_40 OX=1703354 GN=queE PE=3 SV=1
MQNSNSSLLISEDFYSIQGEGVCCGIPAVFLRLSKCNLDCKGFSEGCDTKQLWTKGDKYIFDQIIRRWQENGWFKKMQDGAHLVLTGGEPLLQMDSLFSFVERLEKILNMHPYIELETNATILIDDKFLNKIDQINASPKLSNSGNSREKAYKRKVLLQLSQLAKTKFKFVIQHKEDIFEILNRYVLPFNINPNNIWLMPEGSTRQVIQKNSAMVVELCKQYMMNFSPRLQIDIWNELSGV

SEQ ID NO: 29437 - protein, 273 aa, Coxiellaceae bacterium
  misc_feature (1)..(273): tr|A0A2E9Z7P9|A0A2E9Z7P9_9COXI 7-carboxy-7-deazaguanine synthase OS=Coxiellaceae bacterium OX=2026727 GN=queE PE=3 SV=1
MILETTIQPKKAPPRKSSKVDTLNISEDFYSIQGEGATTGVPAYFIRLKACNLMCGGRDGSLMEEGKATWWCDTEYVWRKGLEKPFEYLTDRWTDQGLMDWIKQGRVHLIWTGGEPTIPKNQRGISNFLDWFDVQYCSDVACTPYSEVETNGTIFIEDGFFNKLDQINCSVKLANSGMNAKRRIVPKALERIMSHKNYFFKFVISTEDCLKEIVEDFVDPFNIDPRRVLMMPGLDKRENYHERTLFCMDMAKKYGFVGLTRLHVSAWDQLTGV

SEQ ID NO: 29438 - protein, 220 aa, Coxiellaceae bacterium
  misc_feature (1)..(220): tr|A0A3B9W4G6|A0A3B9W4G6_9COXI 7-carboxy-7-deazaguanine synthase OS=Coxiellaceae bacterium OX=2026727 GN=queE PE=3 SV=1
MLYKVVDVTSLRITEIFYSLQGESSTVGYPTVFVRLTGCPLRCVYCDSAYAFKGGKRFTITEVLSEVAAYQPKYVTVTGGEPLAQPACIELLKQLCDAGYFVSIETSGALDISPIDQRVMTVMDWKTPESGEMHRNRQENVKYLKSMDQVKYVISSREDYEWSKSSMIEHGFVDRCDVLFSPVYEKLQPQHLADWIVDDRLPVRFQFQLHKLLWNDEPGR

SEQ ID NO: 29439 - protein, 221 aa, Crassaminicella sp.
  misc_feature (1)..(221): tr|A0A5C0SG37|A0A5C0SG37_9CLOT 7-carboxy-7-deazaguanine synthase OS=Crassaminicella sp. SY095 OX=2599308 GN=qu eE PE=3 SV=1
MMYKVVEKFVSINGEGRLSGQLAVFIRFLGCNLDCSYCDTKWANKENTSYTLMSEEEIYEYIKGTKVKNVTLTGGEPLLQENIIQLIEYLSKDNELSIEIETNGSVSLKEFTKIKNRPRFTMDYKLPSSGMEYKMLIDNFSYLKKEDTVKFVAGSMHDLERAKDIIDKYELKNRASVYVSPVFGKIDVKGMVEFMKEHKMNDVTLQLQLHKIIWDPEKKGV

SEQ ID NO: 29440 - protein, 210 aa, Crenobacter cavernae
  misc_feature (1)..(210): tr|A0A4Q2JD02|A0A4Q2JD02_9NEIS 7-carboxy-7-deazaguanine synthase OS=Crenobacter cavernae OX=2290923 GN=queE PE =3 SV=1
MTYTVKEIFYTLQGEGGQAGRAAVFCRFAGCNLWSGREQDRAAAVCRFCDTDFVGTGPDGGKFADAETLARRIAEEWQGAGGTPYVVCTGGEPLLQLDSALVDALHARGFEVAVETNGTIAAPAGIDWICVSPKGQAPLVQTSGHELKLVYPQEDAPSPEALAELDFKHFYLQPLDDARQRANTEAAIAYCMAHPQWKLSLQTHKLTGIR

SEQ ID NO: 29441 - protein, 210 aa, Crenobacter cavernae
  misc_feature (1)..(210): tr|A0A345Y7C8|A0A345Y7C8_9NEIS 7-carboxy-7-deazaguanine synthase OS=Crenobacter cavernae OX=2290923 GN=queE PE =3 SV=1
MTYTVKEIFYTLQGEGGQAGRAAVFCRFAGCNLWSGREQDRAAAVCRFCDTDFVGTGPDGGKFADAATLAERIAEEWKGAGGTPYVVCTGGEPLLQLDSALLDALHARGFEVAVETNGTITAPAGIDWICVSPKGQAPLVQTSGHELKLVYPQLDAPLPETLAGLDFSHFFLQPLDDPDQRANTEAAIAYCMAHPQWKLSLQTHKLTGIR

SEQ ID NO: 29442 - protein, 210 aa, Crenobacter luteus
  misc_feature (1)..(210): tr|A0A165FPU5|A0A165FPU5_9NEIS 7-carboxy-7-deazaguanine synthase OS=Crenobacter luteus OX=1452487 GN=queE PE=3 SV=1
MSYTVKEIFYTLQGEGGQAGRPAVFCRFAGCNLWSGREQDRAAAVCRFCDTDFVGTGPDGGKFTDAQTLAERIAAEWRGVGGKPYVVCTGGEPLLQLDAPLIDALHAKGFEVAVETNGTIAAPAGIDWICVSPKGTAPLAQTSGHELKLVYPQTDAPAPDALAELDFEHFYLQPLDDADQRANTEAAIAYCLAHPQWKLSLQTHKLTGIR

SEQ ID NO: 29443 - protein, 208 aa, Crenobacter sp.
  misc_feature (1)..(208): tr|A0A4T0V6J4|A0A4T0V6J4_9NEIS 7-carboxy-7-deazaguanine synthase OS=Crenobacter sp. GY 70310 OX=2563443 GN=que E PE=3 SV=1
MYTVRELFYTLQGEGAQVGRAAVFCRFAGCNLWSGREADRERAVCRFCDTDFVGVGPDGGRFADAASLARAIAGCWQGGDGARLVVFTGGEPLLQLDAALIGAVHAAGFKIAVETNGTLEAPDGIDWLCVSPKAGADWVQRCGDEIKLVYPQPGLIPAAVDASGFTHAWLQPMDGPDRAANTQAAIDYCLQHPRWRLSLQNHKLVGLR

SEQ ID NO: 29444 - protein, 238 aa, Crenotalea thermophila
  misc_feature (1)..(238): tr|A0A1I7NGS5|A0A1I7NGS5_9BACT 7-carboxy-7-deazaguanine synthase OS=Crenotalea thermophila OX=1393122 GN=queE PE=3 SV=1
MPNEPDRGFHPNFAEMHADTAHIKPLKVADTACPLNAADPDRLPVMETFYSLQGEGFHQGKAAFFIRLAGCDVGCVWCDVKESWMAEGYPVLSATEIAHQAALHPARMAIITGGEPTLYDLRALCQALHQQGFRVHLETSGAHELVGDFDWICLSPKKFKSPLKSVCQQAHELKVVIYHRSDFAWAETHARQVTPACKLYLQPEWSRRERMTPLIIDYIQQHPQWELSLQLHKYVQIP

SEQ ID NO: 29445 - protein, 215 aa, Crenothrix polyspora
  misc_feature (1)..(215): tr|A0A1R4HB60|A0A1R4HB60_9GAMM 7-carboxy-7-deazaguanine synthase OS=Crenothrix polyspora OX=360316 GN=queE PE= 3 SV=1
MTESSLRITEIFYSLQGESNTVGLPTVFIRLTGCPLRCVYCDTAYAFSGGQRMAVTDIVADVAQYGTRYVTVTGGEPLAQSACHELMTALADAGYTVSLETSGAIDVSAVDARVIKVMDLKTPSSGELAKNLYQNIDFVTPDDQIKFVIGTDEDYDWSKALLTEYNLPERCQVLFSPVMGQQHPTELANKILQDRLPVRFQIQLHKLLWDDARGK

SEQ ID NO: 29446 - protein, 215 aa, Crenothrix polyspora
  misc_feature (1)..(215): tr|A0A1R4HG44|A0A1R4HG44_9GAMM 7-carboxy-7-deazaguanine synthase OS=Crenothrix polyspora OX=360316 GN=queE PE= 3 SV=1
MTDSSLRITEIFYSLQGESNTVGLPTVFIRLTGCPLRCVYCDTAYAFTGGQRMSLAAILSAVAEYDTRYVTVTGGEPLAQPVCLELMTALADAGYKVSLETSGAIDVSGVDARVIKVMDLKTPSSGELAKNLYQNIDFIGSDDQIKFVIGTNEDYDWSKALLTEYNLTERCQVLFSPVMGQQHPTELADKILQDRLPVRFQIQLHKLLWNDAQGK

SEQ ID NO: 29447 - protein, 214 aa, Crenothrix sp.
  misc_feature (1)..(214): tr|A0A1Y2ZXD1|A0A1Y2ZXD1_9GAMM 7-carboxy-7-deazaguanine synthase OS=Crenothrix sp. D3 OX=1880899 GN=queE PE=3 SV=1
MTHSLRITEIFYSLQGESNTVGLPTVFIRLTGCPLRCVYCDTAYAFTGGKKMTLADILADVEQYGGKYITVTGGEPLAQPACLELMTQLLDKGYTVSLETSGALDVSAVDLRAIKVMDIKTPSSGEMDKNRYANIEHLTTQDQIKFVIGNDDDYSWSKAILAEYDLLNRCEILFSPVMGQQNPTELADKILSDRLPVRFQIQLHKLLWDDAQGK

SEQ ID NO: 29448 - protein, 219 aa, Criblamydia sequanensis
  misc_feature (1)..(219): tr|A0A090E2T1|A0A090E2T1_9BACT 7-carboxy-7-deazaguanine synthase OS=Criblamydia sequanensis CRIB-18 OX=1437425 GN=queE PE=3 SV=1
METNTKTLRLIELFGSVQGETSFSGLPTTFIRLASCNLRCTWCDTPYSFGRGDAYSLEEILKQVKENHLKWVCITGGEPLLQENVYPLMQALIDLGYIVSLETSGSLCTQRVPEKVAIILDIKCPGSGMESKNLFSNLNHLKNNDEVKFVIKDEIDYRYSLDICRKFGLFEREKQPLFSPVHDELDSKLLIDWIKRDKIAVRLNLQIHKFIWSKDTKGV

SEQ ID NO: 29449 - protein, 202 aa, Cricetibacter osteomyelitidis
  misc_feature (1)..(202): tr|A0A4V2T1G2|A0A4V2T1G2_9PAST 7-carboxy-7-deazaguanine synthase OS=Cricetibacter osteomyelitidis OX=1521931 G N=queE PE=3 SV=1
MLTYNIVEIFESLQGEGFNTGMPSIFIRFGKCNLACPWCDTNYNQYESWSLERILTKVRSFSAKNVIITGGEPTVVPKLEILLESLKSENYFLAIETNGLKPIPLQIDYIATSPKRMYQHKYQRRCIPFAHEVRIVADGDVLAFCEQMENRIKAKHYYLSPCETDGEMNLLDTITQLGKLNQRTNKPKWQLSLQTHKLIGIE

SEQ ID NO: 29450 - protein, 264 aa, Crinalium epipsammum
  misc_feature (1)..(264): tr|K9W417|K9W417_9CYAN 7-carboxy-7-deazaguanine synthas e OS=Crinalium epipsammum PCC 9333 OX=1173022 GN=queE P E=3 SV=1
MTPQTSDKQIARLIEIFSAIQGEGLNIGTRQIFIRFALCDLRCNYCDSAHTWEIPATCKIEKTPGERDFETYSNPVSIETLLEWVERQNQPGLHDSISLTGGEPLLHARFLKAFLPQVRALTNLPIYLETGGHRPEQLKMILPYLDSVGMDIKLPSVSGEEHWQAHREFLKCCYDSEVEVFAKLIISNNTEQAELEKAAELIASFSPSIPVYLQPVTPLEIPNVDETVLLPPLPEKVLNWQALMKRYLKQVRVVPQTHKMIGQL

SEQ ID NO: 29451 - protein, 210 aa, Croceibacter atlanticus
  misc_feature (1)..(210): tr|A3U882|A3U882_CROAH 7-carboxy-7-deazaguanine synthas e OS=Croceibacter atlanticus (strain ATCC BAA-628 / HTC C2559 / KCTC 12090) OX=216432 GN=queE PE=3 SV=1
MTKEEISQLVEEGKMLPLMEEFYTIQGEGYHKGTAAYFIRIGGCDVGCHWCDVKESWDAEKHPPTATERIVSEAVKYSKTIVVTGGEPLTWDMTLLTQMLKAEGAQTHIETSGAYTLTGKWDWICLSPKKLKLPTKEVYEKANELKVIIFNKHDLKFAEEQAAKVNKDCILYLQPEWSVRDKVVPLIVDFVMANPQWKVSLQTHKYLNIP

SEQ ID NO: 29452 - protein, 248 aa, Croceicoccus marinus
  misc_feature (1)..(248): tr|A0A1Z1F931|A0A1Z1F931_9SPHN 7-carboxy-7-deazaguanine synthase OS=Croceicoccus marinus OX=450378 GN=queE PE= 3 SV=1
MPIVLATTQPGEPEIFASLQGEGPSTGRPSVFVRLSRCNLACVWCDTAYTWRFSGDNRPHRGGESFARKANQVAIDEHDAAQKILALDPDRLVVTGGEPLLQAPALTRLITLLRDIRPRLHVEVETNGTVEAPHALDRLIDQYNVSPKLAHSGNDADLALVPERLQAYSEDPRAFFKFVIATPADLDEVLELKRTYGILPSRLQLMPEGTDSATLYDRMRWLAPLAMRHGLRLTDRLHIHLYGDTRGT

SEQ ID NO: 29453 - protein, 244 aa, Croceicoccus naphthovorans
  misc_feature (1)..(244): tr|A0A0G3XK98|A0A0G3XK98_9SPHN 7-carboxy-7-deazaguanine synthase OS=Croceicoccus naphthovorans OX=1348774 GN=q ueE PE=3 SV=1
MSLTLATDDTGGPEIFASLQGEGASIGRPVAFVRLSRCNLACTWCDTAYTWHFEGDNRPHRDGVTFDRKANQVVLDEADVAKRIAALGQNRLVITGGEPMLQAAALAKMLDHLPDIEVEIETNGTVKPPARLDVRVDQFNVSPKLAHSGNSATQALIPDMLDFWADDPRAFLKFVIAEPADLAEAMGLVDRHRHPKDRVYLMPEGTSGDVLSTRMRWLAPLAIRHGVRLTDRQHIHLFGDTRGT

SEQ ID NO: 29454 - protein, 248 aa, Croceicoccus ponticola
  misc_feature (1)..(248): tr|A0A437GWK0|A0A437GWK0_9SPHN 7-carboxy-7-deazaguanine synthase OS=Croceicoccus ponticola OX=2217664 GN=queE PE=3 SV=1
MTLTLATTVPGEPEIFASLQGEGPSIGRPVAFVRLSRCNLACTWCDTAYTWHFEGDNRPHRDGVAFDRSANQVVLDETEVAARIAALGQSRLVITGGEPLLQGPALAKMLEHLDTIAPGMQVEIETNGTVRPTARLDVRVDQYNVSPKLPHSGNPATLALIPEMLDFWADDPRAFLKFVVSEPADLDEVTALIEAHRHPKDRVFVMPEGTDSITLRERERWLADAALERGLRMTDRLHIHLYGDTRGT

SEQ ID NO: 29455 - protein, 248 aa, Croceicoccus sp.
  misc_feature (1)..(248): tr|A0A2D8D5D7|A0A2D8D5D7_9SPHN 7-carboxy-7-deazaguanine synthase OS=Croceicoccus sp. OX=1927144 GN=queE PE=3 S V=1
MPIVLATTQPGEPEIFASLQGEGPSTGRPSVFVRLSRCNLACVWCDTAYTWRFSGDNRPHRGGESFARKANQVAVDEGDAAQKILALDPDRLVVTGGEPLLQAPALTRLITLLREIRPRLHVEIETNGTVEAPRALDTLIDQYNVSPKLAHSGNDADLALIPERLQAYSEDPRAFFKFVIATPADLDEVLDLKRTYGILPSRLQLMPEGTDSATLYDRMRWLAPLAMQHGLRLTDRLHIHLYGDTRGT

SEQ ID NO: 29456 - protein, 204 aa, Croceitalea dokdonensis
  misc_feature (1)..(204): tr|A0A0P7B0Q1|A0A0P7B0Q1_9FLAO 7-carboxy-7-deazaguanine synthase OS=Croceitalea dokdonensis DOKDO 023 OX=13003 41 GN=queE PE=3 SV=1
MDLVDKGAMLPLMEEFYTIQGEGFHKGTAAYFVRIGGCDVGCHWCDVKESWNAETHPPTAIEHILSNSKKYSDTIVITGGEPLTWDMGPLTQGLKAQGQHIHIETSGAYPLTGVWDWICLSPKKNKLPVGDIYQKAHELKMIVYNKHDFIFAEEQAAKVSKDCMLYLQPEWSVREKVTPLIVEYVMKHPKWKVSLQTHKYLNIP

SEQ ID NO: 29457 - protein, 210 aa, Croceivirga radicis
  misc_feature (1)..(210): tr|A0A1V6LPS6|A0A1V6LPS6_9FLAO 7-carboxy-7-deazaguanine synthase OS=Croceivirga radicis OX=1929488 GN=queE PE= 3 SV=1
MVLQDVMDLVEKGQMLPLMEEFYTIQGEGYFKGTAAYFIRVGGCDVGCHWCDVKESWNAETHPPTAIEKIINNAASYSDTIVITGGEPLTWDMGPLTQGLKAKGLKTHIETSGAYTLTGVWDWICLSPKKMKLPVPEVYEKANELKVIVYNKHDLIFAEEQAKKVNKDCILYLQPEWSVRDKVVPMIVDYVMANPQWKVSLQTHKYLNIP

SEQ ID NO: 29458 - protein, 193 aa, Crocinitomicaceae bacterium
  misc_feature (1)..(193): tr|A0A358Y876|A0A358Y876_9FLAO 7-carboxy-7-deazaguanine synthase OS=Crocinitomicaceae bacterium OX=2026728 GN= queE PE=3 SV=1
MEYFHTIQGEGFHTGRSAFFIRLGGCDVGCVWCDVKESWNVAAHPKLSTEKLIDIVKNSQAEFVVITGGEPAMHDLTDLTNRLRNQQIYSAIETSGCYPLLGEIDWYCFSPKKFKAPCNEAYEKANELKVIINHKSDLEWAEMHAEKVSNDCLLYLQPEWSNLERNTEWIVSYVKSNPKWKISLQTHKYMNIP

SEQ ID NO: 29459 - protein, 193 aa, Crocinitomicaceae bacterium
  misc_feature (1)..(193): tr|A0A2E4TE58|A0A2E4TE58_9FLAO 7-carboxy-7-deazaguanine synthase OS=Crocinitomicaceae bacterium OX=2026728 GN= queE PE=3 SV=1
MERFPTLQGEGAWTGHAAWFIRLGGCDVGCSWCDVKESWPLEAHPRVDVATLVQEAVASGLPRVVVTGGEPTMHDLGPLTEALKAEGLATHLETSGTGAVSGQWDWVTLSPKKFKACQEAWYSQANELKVVVVNSHDLEWAEEHAAKIQTGTAMFLQPEWDRREEVMERVLNRIQEAPQWRLSLQTHRFIGLP

SEQ ID NO: 29460 - protein, 205 aa, Crocinitomix sp.
  misc_feature (1)..(205): tr|A0A2W1N614|A0A2W1N614_9FLAO 7-carboxy-7-deazaguanine synthase OS=Crocinitomix sp. SM1701 OX=2219161 GN=queE PE=3 SV=1
MIPYNESLEIPLMESFYSVQGEGFHTGRPAFFIRFSGCNVGCSWCDVKESWDATIHPLVQIDSILQEVLDSGTNFVVITGGEPTMYNLAPLTAALKKNNIEIAIETSGAYPINGQIDWICLSPKKFKMPLEENYAKANELKMIAVNNHDFKWALELDQKVSPQCKRFIQPEWDKQDGILPKVIDFVKENIHWKISLQTHKILNVR

SEQ ID NO: 29461 - protein, 213 aa, Crocosphaera chwakensis
  misc_feature (1)..(213): tr|A3IMF5|A3IMF5_9CHRO 7-carboxy-7-deazaguanine synthas e OS=Crocosphaera chwakensis CCY0110 OX=391612 GN=queE PE=3 SV=1
MNSLASVGMKAIAPQLKTYPIVERFHSLQGEGTWTGMSAFFIRLAGCDVHCPWCDQKESWNSNLYPQQSIKTLTDAAKAANPAMVVITGGEPLIHDLFPLTKGLKQLGLRVHLETSGAYPLTGEFDWITLSPKPFKVPHETVYSQVNELKVIIANEADLNWAEKQEKKVPSQTIKYLQPEWNSPESKSLIFDYILSNPQWRMSLQIHKFLGVR

SEQ ID NO: 29462 - protein, 213 aa, Crocosphaera subtropica
  misc_feature (1)..(213): tr|B1WT29|B1WT29_CROS5 7-carboxy-7-deazaguanine synthas e OS=Crocosphaera subtropica (strain ATCC 51142 / BH68) OX=43989 GN=queE PE=3 SV=1
MNSLASVDMKAIAPQLMTYPIVEIFHSLQGEGTWTGMSAFFIRLAGCDVHCPWCDQKESWTSKIYPQQSIKTLAEAAKAANPAMVVITGGEPLMYDLFPLTKALKKLGLRVHLETSGAYPFSGQFDWVTLSPKPFKVPHESIYPQVNELKVVITNQEDFHWAEEQEKKVPPQALKYLQPEWNYPESQSLIFDYIRKAPQWRMSLQIHKFLGVR

SEQ ID NO: 29463 - protein, 213 aa, Crocosphaera watsonii
  misc_feature (1)..(213): tr|T2J2L3|T2J2L3_CROWT 7-carboxy-7-deazaguanine synthas e OS=Crocosphaera watsonii WH 0401 OX=555881 GN=queE PE =3 SV=1
MNSLASVSQKEISSQLITYPIVETFHSLQGEGTWTGVNAFFIRLAGCDVHCPWCDQKESWTSKKYPQQSIKILAEVSKMANPFMVVITGGEPLMYDLFPLTKALKKLGLRVHLETSGSHSFTGQFDWVTFSPKPFKLPHESIYSQVNELKIVIANQEDLHWAEEEAKKVPREAIKYLQPEWNTPESQSLIFDYILKHPQWRMSLQTHKFLGVR

SEQ ID NO: 29464 - protein, 213 aa, Crocosphaera watsonii
  misc_feature (1)..(213): tr|T2J2Q6|T2J2Q6_CROWT 7-carboxy-7-deazaguanine synthas e OS=Crocosphaera watsonii WH 0005 OX=423472 GN=queE PE =3 SV=1
MNSLASVSQKAIASQLITYPIVETFHSLQGEGTWTGVNAFFIRLAGCDVHCPWCDQKESWTSKKYPQQSIKILAEVSKMANPFMVVITGGEPLMYDLFPLTKALKKLGLRVHLETSGSHSFTGQFDWVTFSPKPFKLPHESIYSQVNELKIVIANQEDLHWAEEEAKKVPREAIKYLQPEWNTPESQSLIFDYILKHPQWRMSLQTHKFLGVR

SEQ ID NO: 29465 - protein, 223 aa, Cronobacter condimenti
  misc_feature (1)..(223): tr|K7ZX58|K7ZX58_9ENTR 7-carboxy-7-deazaguanine synthas e OS=Cronobacter condimenti 1330 OX=1073999 GN=queE PE= 3 SV=1
MQYPINEMFQTLQGEGYFTGVPAIFIRLQGCPVGCAWCDTKHTWEKLADREVSLFSIIAKTKESDKWGAASPEDLLAAIERQGYTARHVVITGGEPCIHNLLPLTEMLEAQGFSCQIETSGTHDVRCTTGTWVTVSPKVNMRGGYDVLDQALMRADEIKHPVGRMRDIEALDELLARLHDERQRVIALQPISQKDDATRLCIETCIARNWRLSMQTHKYLNIA

SEQ ID NO: 29466 - protein, 223 aa, Cronobacter dublinensis
  misc_feature (1)..(223): tr|K8BBW1|K8BBW1_9ENTR 7-carboxy-7-deazaguanine synthas e OS=Cronobacter dublinensis 1210 OX=1208656 GN=queE PE =3 SV=1
MQYPINEMFQTLQGEGYFTGVPAIFIRLQGCPVGCAWCDTKHTWETLADREVSLFSIIAKTKESDKWGAASPEDLLAAIERQAYTARHVVITGGEPCIHDLLPLTELLEAHGFSCQIETSGTHEVRCTTGTWVTVSPKVNMRGGYEVLDQALMRADEIKHPVGRVRDIEALDELLARLHDERQRVIALQPISQKEDATRLCIETCIARNWRLSMQTHKYLNIA

SEQ ID NO: 29467 - protein, 223 aa, Cronobacter dublinensis
  misc_feature (1)..(223): tr|K8BIN8|K8BIN8_9ENTR 7-carboxy-7-deazaguanine synthas e OS=Cronobacter dublinensis 582 OX=1208661 GN=queE PE= 3 SV=1
MQYPINEMFQTLQGEGYFTGVPAIFIRLQGCPVGCAWCDTKHTWETLADREVSLFSIIAKTKESDKWGAASPEDLLAAIERQAYTSRHVVITGGEPCIHDLLPLTELLEAHGFSCQIETSGTHEVRCTTGTWVTVSPKVNMRGGYEVLDQALMRADEIKHPVGRMRDIEALDELLARLHDERQRVIALQPISQKEDATRLCIETCIARNWRLSMQTHKYLNIA

SEQ ID NO: 29468 - protein, 223 aa, Cronobacter malonaticus
  misc_feature (1)..(223): tr|V5TVN0|V5TVN0_9ENTR 7-carboxy-7-deazaguanine synthas e OS=Cronobacter malonaticus OX=413503 GN=queE PE=3 SV= 1
MQYPINEMFQTLQGEGYFTGVPAIFIRLQGCPVGCAWCDTKHTWDKLADREVSLFSIIAKTKESDKWGAASPEDLLAAIERQAYTARHVVITGGEPCIHDLLPLTELLEAHGFSCQIETSGTHEVRCTTGTWVTVSPKVNMRGGYEVLDQALMRADEIKHPVGRMRDIEALDELLARLHDERQRVIALQPISQKEDATRLCIETCIARNWRLSMQTHKYLNIA

SEQ ID NO: 29469 - protein, 223 aa, Cronobacter malonaticus
  misc_feature (1)..(223): tr|A0A423XYT9|A0A423XYT9_9ENTR 7-carboxy-7-deazaguanine synthase OS=Cronobacter malonaticus OX=413503 GN=queE PE=3 SV=1
MQYPINEMFQTLQGEGYFTGVPAIFIRLQGCPVGCAWCDTKHTWDKLADREVSLFSIIAKTKESDKWGAASPEELLAAIERQAYTARHVVITGGEPCIHDLLPLTELLEAHGFSCQIETSGTHEVRCTTGTWVTVSPKVNMRGGYEVLDQALMRADEIKHPVGRMRDIEALDELLARLHDERQRVIALQPISQKEDATRLCIETCIARNWRLSMQTHKYLNIA

SEQ ID NO: 29470 - protein, 223 aa, Cronobacter muytjensii
  misc_feature (1)..(223): tr|A0A2T7AS14|A0A2T7AS14_9ENTR 7-carboxy-7-deazaguanine synthase OS=Cronobacter muytjensii OX=413501 GN=queE P E=3 SV=1
MQYPINEMFQTLQGEGYFTGVPAIFIRLQGCPVGCAWCDTKHTWEKLADREVSLFSIIAKTKESDKWGAASPEELLAAIERQGYTARHVVITGGEPCIHDLLPLTELLEAHGFSCQIETSGTHEVRCTTGTWVTVSPKVNMRGGYDVLDQALMRADEIKHPVGRMRDIEALDELLACLHDERQRVIALQPISQKDDATRLCIEVCIARNWRLSMQTHKYLNIA

SEQ ID NO: 29471 - protein, 223 aa, Cronobacter sakazakii
  misc_feature (1)..(223): tr|A7MJ75|A7MJ75_CROS8 7-carboxy-7-deazaguanine synthas e OS=Cronobacter sakazakii (strain ATCC BAA-894) OX=290 339 GN=queE PE=3 SV=1
MQYPINEMFQTLQGEGYFTGVPAIFIRLQGCPVGCAWCDTKHTWETLADREVSLFSIIAKTKESDKWGAASPEDLLAAIERQAYTARHVVITGGEPCIHDLLPLTELLEAHGYSCQIETSGTHEVRCTTGTWVTVSPKVNMRGGYEVLDQALMRADEIKHPVGRMRDIEALDELLARLHDERQRVIALQPISQKEDATRLCIETCIARNWRLSMQTHKYLNIA

SEQ ID NO: 29472 - protein, 223 aa, Cronobacter sakazakii; identical to SEQ ID NO: 29471
  misc_feature (1)..(223): tr|K8DC68|K8DC68_CROSK 7-carboxy-7-deazaguanine synthas e OS=Cronobacter sakazakii 696 OX=1208664 GN=queE PE=3 SV=1

SEQ ID NO: 29473 - protein, 223 aa, Cronobacter sp.
  misc_feature (1)..(223): tr|A0A5J6X7X6|A0A5J6X7X6_9ENTR 7-carboxy-7-deazaguanine synthase QueE OS=Cronobacter sp. JZ38 OX=1906275 GN=BJ P61_05335 PE=4 SV=1
MQYPINEMFQTLQGEGYFTGVPAIFIRLQGCPVGCAWCDTKHTWEKLADREVSLFSIIAKTKESDKWGAASPEDLLAAIERQAYTARHVVITGGEPCIHDLLPLTELLEAHGFSCQIETSGTHEVRCTTGTWVTVSPKVNMRGGYDVLDQALMRADEIKHPVGRVRDIEALDELLARLNDERQRVIALQPISQKEDATRLCIETCIARNWRLSMQTHKYLNIA

SEQ ID NO: 29474 - protein, 223 aa, Cronobacter turicensis
  misc_feature (1)..(223): tr|C9XZ32|C9XZ32_CROTZ 7-carboxy-7-deazaguanine synthas e OS=Cronobacter turicensis (strain DSM 18703 / LMG 238 27 / z3032) OX=693216 GN=ygcF PE=3 SV=1
MQYPINEMFQTLQGEGYFTGVPAIFIRLQGCPVGCAWCDTKHTWETLADREVSLFSIIAKTKESDKWGSASPEELLAAIERQAYTARHVVITGGEPCIHDLLPLTELLEAHGYSCQIETSGTHEVRCTTGTWVTVSPKVNMRGGYEVLDQALMRADEIKHPVGRMRDIEALDELLARLHDERQRVIALQPISQKDDATRLCIETCIARNWRLSMQTHKYLNIA

SEQ ID NO: 29475 - protein, 223 aa, Cronobacter turicensis
  misc_feature (1)..(223): tr|A0A2T7B6Q4|A0A2T7B6Q4_9ENTR 7-carboxy-7-deazaguanine synthase OS=Cronobacter turicensis OX=413502 GN=queE P E=3 SV=1
MQYPINEMFQTLQGEGYFTGVPAIFIRLQGCPVGCAWCDTKHTWETLADREVSLFSIIAKTKESDKWGSASPEELLAAIERQAYTARHVVITGGEPCIHDLLPLTELLEAHGYSCQIETSGTHEVRCTTGTWVTVSPKVNMRGGYEVLDQALMRADEIKHPVGRMRDIEALDELLARLHDERQRVIALQPISQKEDATRLCIETCIARNWRLSMQTHKYLNIA

SEQ ID NO: 29476 - protein, 223 aa, Cronobacter universalis
  misc_feature (1)..(223): tr|A0A376EUX3|A0A376EUX3_9ENTR 7-carboxy-7-deazaguanine synthase OS=Cronobacter universalis NCTC 9529 OX=10740 00 GN=queE PE=3 SV=1
MQYPINEMFQTLQGEGYFTGVPAIFIRLQGCPVGCAWCDTKHTWETLADREVSLFSIIAKTKESDKWGAASPEELLAAIERQAYTARHVVITGGEPCIHDLLPLTELLEAHGYSCQIETSGTHEVRCTTGTWVTVSPKVNMRGGYEVLDQALMRADEIKHPVGRMRDIEALDELLARLHDERQRVIALQPISQKEDATRLCIETCIARNWRLSMQTHKYLNIA

SEQ ID NO: 29477 - protein, 207 aa, Cruoricaptor ignavus
  misc_feature (1)..(207): tr|A0A1M6G6C2|A0A1M6G6C2_9FLAO 7-carboxy-7-deazaguanine synthase OS=Cruoricaptor ignavus OX=1118202 GN=queE PE =3 SV=1
MFSDLPNQKLSISEVFYSLQGEGARAGTPTIFVRLQGCKAKHACASMGVKCDTEFESGSQWSVKTLLEKIHTIAPNCKEITWTGGEPTDQLDEEIIYYFKEQGFFQAIETSGLNPVPKGIDFICVSPKVAEHIVKKNFPNGVDELRYVRHSGQEIPQPSIEAKNYWISPHSDGFEINSENLKHCISLSLKNPKWKLSIQQHKIWNIL

SEQ ID NO: 29478 - protein, 207 aa, Cruoricaptor ignavus
  misc_feature (1)..(207): tr|A0A1M6ASJ6|A0A1M6ASJ6_9FLAO 7-carboxy-7-deazaguanine synthase OS=Cruoricaptor ignavus OX=1118202 GN=queE PE =3 SV=1
MTLNSDLESGLALPVMEHFYTLQGEGMHSGRAAYFIRLGGCDVGCHWCDVKESWDAELHPLMNAEELAKTAAAHCKTIVITGGEPLMWNLNPLTQHLKSLGCAIHIETSGAHPLSGRLDWVTLSPKKNSLPLEEIYQRADELKVIVYNQHDFQFAKAQAEKVSDSCHLLLQSEWGRREILYPEITKFILENPKWRASVQTHKYLNIP

SEQ ID NO: 29479 - protein, 202 aa, Cryomorphaceae bacterium
  misc_feature (1)..(202): tr|A0A368DDC1|A0A368DDC1_9FLAO 7-carboxy-7-deazaguanine synthase OS=Cryomorphaceae bacterium OX=1898111 GN=que E PE=3 SV=1
MKIDCNNLPVMEMFYSLQGEGYHSGSAAFFIRIAGCDVGCHWCDVKESWDHGNHDVLNIPKIIDSIDNKTRIVVISGGEPLMWDMTVITTKLKEKNFRRHLETSGAYDISGDWDWICLSPKKQQLPKNQLYQIADELKIIIYNKHDLNFAIEESRKVNDNCKLFLQPEWGKFDKMKDEIVKFIKTNSRWRLSLQTHKFLGVD

SEQ ID NO: 29480 - protein, 203 aa, Cryomorphaceae bacterium
  misc_feature (1)..(203): tr|A0A0R2SLW9|A0A0R2SLW9_9FLAO 7-carboxy-7-deazaguanine synthase OS=Cryomorphaceae bacterium BACL23 MAG-120924 -bin60 OX=1655594 GN=queE PE=3 SV=1
MAAADAQNLPLMEAFRTVQGEGAHTGRPSFFFRIGGCDVGCHWCDVKESWDAGKHPVTPLAAMLEQLRPEDQTVVVTGGEPLMWNMGPLTEALQAAEKRVHLETSGAYPLTGTWDWICLSPKKTKAPRPEWYAVAHELKVIVYNRDDIRWAQEHAAQCHPGCILYMQPEWSRRETALPMIIEFLEDHPEWRLSLQTHKYIGMP

SEQ ID NO: 29481 - protein, 264 aa, Cryptobacterium sp.
  misc_feature (1)..(264): tr|R7CDZ9|R7CDZ9_9ACTN 7-carboxy-7-deazaguanine synthas e OS=Cryptobacterium sp. CAG:338 OX=1262868 GN=queE PE= 3 SV=1
MSSEVTFPVVERFVSINGEGLRAGRLSTFIRMAGCNLACSWCDTSWANEKDCPYEELSVSDLVSWVEDTCVSCVTLTGGEPALQQGLDTLIEALALSNNWGQLEAFDRNGVSQSGKSRYVKLDEKQATRVIEIETNGSLDLSFLHDLRLSLEKRVSTPTVLAFTVDCKLPSSGMFAEMLDSNYALLTSQDVVKFVIAGTQDLETALAQIQKYELPSKCEVFFSPVFSCIDPADIVSFMKAHELSTVRLQLQLHKIIWPEKDKGV

SEQ ID NO: 29482 - protein, 242 aa, Cryptosporangium sp.
  misc_feature (1)..(242): tr|A0A545ANE6|A0A545ANE6_9ACTN 7-carboxy-7-deazaguanine synthase OS=Cryptosporangium sp. A-T 5661 OX=2593070 G N=queE PE=3 SV=1
MTAAAAAPAPTNAEVTLRVAELFGPTLQGEGPSAGQRAVFVRLSGCNLDCGWCDTPYTWDWARFDPAQESRTLPVQAVLDWILGRDTDLVVITGGEPLIQHARLTPLAQALAAAGRRIEIETNGTIAPPDRLIECVERFNVSPKLGGSGVPIGRRIRPAALEALRGTGKAVFKFVIGAPEDLAELADLQARFGLAPVWVMPQGTHPADVVEGLRALAEPTLAHGWNLSSRLHVLVWGDQRGR

SEQ ID NO: 29483 - protein, 276 aa, Culturomica sp.
  misc_feature (1)..(276): tr|A0A356DII1|A0A356DII1_9BACT 7-carboxy-7-deazaguanine synthase OS=Culturomica sp. OX=1926652 GN=queE PE=3 SV =1
MVEKDKIILARDGVFPITRNAEGEPVSSLPNSGLCCPGTIQGEGKLNGIPSLFIRLAGCNLHCIWTNPDGSLSPCDTAYASYHIRQARSCTLEEICRLIGYNTGVIDHLVITGGEPLLQYKELTELCIRLKKIKKFHITLETNATLYAEELATQIDFFSLSPKLAGSIPPPPQNILHDKQRLSPETIQKFISHTRTHNKDFQLKFVYSQETDITEIKTLLSCLTDWKKEDVLLMPQGGNSRDVEANIQQTLRHCIENGWRYCDRLHLALFSSKEGV

SEQ ID NO: 29484 - protein, 211 aa, Cupriavidus alkaliphilus
  misc_feature (1)..(211): tr|A0A2W7PUT7|A0A2W7PUT7_9BURK 7-carboxy-7-deazaguanine synthase OS=Cupriavidus alkaliphilus OX=942866 GN=queE PE=3 SV=1
MTYAVKEIFYTLQGEGANAGRAAVFCRFAGCNLWSGREQDRASAVCQFCDTDFVGTDGTRGGKYRSAGELAAVVASEWPQGAGGKPLVVCTGGEPLLQLDAPLIDALHAQGFEIAIETNGTIAVPPGIDWVCVSPKMGSELVVTHGDELKVVIPQEGQDFAAYEKLDFRHFLVQAMDGPLARENTAAAVAFCQRHPRWRLSLQTHKLLGIR

SEQ ID NO: 29485 - protein, 211 aa, Cupriavidus alkaliphilus
  misc_feature (1)..(211): tr|A0A329AYV2|A0A329AYV2_9BURK 7-carboxy-7-deazaguanine synthase OS=Cupriavidus alkaliphilus OX=942866 GN=queE PE=3 SV=1
MTYAVKEIFYTLQGEGANAGRAAVFCRFAGCNLWSGREQDRASAVCQFCDTDFVGTDGTRGGKYRSAEELAAVVASEWPQGAGGKPLVVCTGGEPLLQLDAPLIEALHAQGFEIAIETNGTIAVPPGIDWVCVSPKMGSELVVTRGDELKVVIPQEGQDFAAYEKLDFRHFLVQAMDGPLARENTAAAVAFCQRHPRWRLSLQTHKLLGIR

SEQ ID NO: 29486 - protein, 215 aa, Cupriavidus basilensis
  misc_feature (1)..(215): tr|A0A0C4YC09|A0A0C4YC09_9BURK 7-carboxy-7-deazaguanine synthase OS=Cupriavidus basilensis OX=68895 GN=queE PE =3 SV=1
MTYAVKEIFYTLQGEGANAGRAAVFCRFSGCNLWSGREEDRASAVCQFCDTDFVGTDGTEGGKYRTAEALADKIAAQWPQAVDGNAAGHALVVCTGGEPLLQLDAPLIDALHARGFEIAIETNGTLPVPEGIDWVCVSPKMGAELVVRRGDELKVVIPQDGQDFAAYEHLDFRYFLVQAMDGPLARQNTALAVEFCQRRPLWRLSLQTHKLLGIR

SEQ ID NO: 29487 - protein, 220 aa, Cupriavidus basilensis
  misc_feature (1)..(220): tr|H1S880|H1S880_9BURK 7-carboxy-7-deazaguanine synthas e OS=Cupriavidus basilensis OR16 OX=1127483 GN=queE PE= 3 SV=1
MTYAVKEIFYTLQGEGANAGRAAVFCRFSGCNLWSGREEDRASAVCQFCDTDFVGTDGTEGGKYRTAEALADKVAAQWPQAVDSAAAGRPLVVCTGGEPLLQLDAPLIDALHARGFEIAIETNGTLPVPHGIDWVCVSPKMGSELVVTRGDELKVVIPQDGQDFAAYERLDFRYFLVQAMDGPLARQNTALAVEFRSGAFRCRPTSCSASGRQIAQIAPV

SEQ ID NO: 29488 - protein, 214 aa, Cupriavidus campinensis
  misc_feature (1)..(214): tr|A0A556UVP9|A0A556UVP9_9BURK 7-carboxy-7-deazaguanine synthase OS=Cupriavidus campinensis OX=151783 GN=queE PE=3 SV=1
MTYAVKEIFYTLQGEGANAGRAAVFCRFSGCNLWTGREEDRARAVCQFCDTDFVGTDGTRGGKYKTAEELAAVVASEWPQGPGSAGGKPLVVCTGGEPLLQLDAPLIDALHAQGFEIAIETNGTLPVPDGIDWVCVSPKMGADLVVTRGDELKVVIPQDGQDFAAYEQLDFRYFMVQAMDGPLARQNTAAAVEFCQRHPRWRLSLQTHKLLGIR

SEQ ID NO: 29489 - protein, 211 aa, Cupriavidus gilardii
  misc_feature (1)..(211): tr|A0A0M5KLB6|A0A0M5KLB6_9BURK 7-carboxy-7-deazaguanine synthase OS=Cupriavidus gilardii CR3 OX=1267562 GN=nrd G PE=3 SV=1
MTYAVKEIFYTLQGEGANAGRAAVFCRFAGCNLWTGREQDREQAICRFCDTDFVGTDGTLGGKYRSAEELAAQVASQWPQGAGGRPLVVCTGGEPLLQLDAPLIDALHAQGFEIAIETNGTIAVPDGIDWVCVSPKMGAELVVTRGDELKVVIPQPGQDFAAYEALDFRYFLVQPMDGLLARENTALAVDFCQRHPRWRLSLQTHKLLGIR

SEQ ID NO: 29490 - protein, 211 aa, Cupriavidus gilardii
  misc_feature (1)..(211): tr|A0A5A8ERV3|A0A5A8ERV3_9BURK 7-carboxy-7-deazaguanine synthase OS=Cupriavidus gilardii OX=82541 GN=queE PE=3 SV=1
MTYAVKEIFYTLQGEGANAGRAAVFCRFAGCNLWTGREQDREQAICRFCDTDFVGTDGTLGGKYRSAEELAAQVSSQWPQGAGGRPLVVCTGGEPLLQLDAPLIDALHAQGFEIAIETNGTIAVPDGIDWVCVSPKMGAELVVTRGDELKVVIPQPGQDFAAYEALDFRYFLVQPMDGPLARENTALAVDFCQRHPRWRLSLQTHKLLGIR

SEQ ID NO: 29491 - protein, 211 aa, Cupriavidus metallidurans
  misc_feature (1)..(211): tr|A0A132HK53|A0A132HK53_9BURK 7-carboxy-7-deazaguanine synthase OS=Cupriavidus metallidurans OX=119219 GN=que E_1 PE=3 SV=1
MTYAVKEIFYTLQGEGANAGRAAVFCRFSGCNLWTGREEDRARAVCQFCDTDFVGTDGTLGGKYKTADELAAVVAAEWPQGAGGKPLVVCTGGEPLLQLDAPLIGALHARGFEIAIETNGTIEVPEGIDWVCVSPKMGSELVVKKGDELKVVIPQDGQDFAAYEQLDFQYFMVQAMDGPLARQNTAAAVEFCQRHPRWRLSLQTHKLLGIR

SEQ ID NO: 29492 - protein, 240 aa, Cupriavidus metallidurans
  misc_feature (1)..(240): tr|A0A132HAI7|A0A132HAI7_9BURK 7-carboxy-7-deazaguanine synthase OS=Cupriavidus metallidurans OX=119219 GN=que E_2 PE=4 SV=1
MPSARFSMRSAARPEPIVADLKVGGFTPLTSIDFPGRLAAVVFCQGCPWRCDYCHNPHLIPVASPSARVWEDVLAFLARRRGLLDGVVFSGGEPTLQAALPAAMRDVRQLGFEVALHTAGMYPDRLEAALPWVDWVGFDIKAPAHRYDHVTGTPGSATRVMDSLARLVASGVAYECRTTWDPELFDEADLMALLHTLAEKGVLRWSLQVCNRAGMPVPHPAGIADRIAAACPRIAVRMPA

SEQ ID NO: 29493 - protein, 211 aa, Cupriavidus nantongensis
  misc_feature (1)..(211): tr|A0A142JK49|A0A142JK49_9BURK 7-carboxy-7-deazaguanine synthase OS=Cupriavidus nantongensis OX=1796606 GN=que E PE=3 SV=1
MTYAVKEIFYTLQGEGANAGRAAVFCRFAGCNLWSGREQDRASAVCQFCDTDFVGTDGTRGGKYRSAEELAAVVASEWPQGAGGKPLVVCTGGEPLLQLDAPLIDALHAQGFEIAIETNGTIAVPPGIDWVCVSPKMGSELVVTRGDELKVVIPQQGQDFAAYEKLDFRHFLVQAMDGPLARENTAAAVAFCQRHPQWRLSLQTHKLLGIR

SEQ ID NO: 29494 - protein, 211 aa, Cupriavidus necator
  misc_feature (1)..(211): tr|A0A367PJW5|A0A367PJW5_CUPNE 7-carboxy-7-deazaguanine synthase OS=Cupriavidus necator OX=106590 GN=queE PE=3 SV=1
MTYAVKEIFYTLQGEGANAGRAAVFCRFAGCNLWSGREDDRASAVCQFCDTDFVGTDGTRGGKYRTAEELAAVVASEWPQGAGGQPLVVCTGGEPLLQLDAPLIDALHAQGFEIAIETNGTIAVPPGIDWVCVSPKMGSELVVTRGDELKVVIPQEGQDFATYEQLDFRHFLVQAMDGPLARENTAAAVAFCQRHPRWRLSLQTHKLLGIR

SEQ ID NO: 29495 - protein, 211 aa, Cupriavidus necator
  misc_feature (1)..(211): tr|Q0KAE5|Q0KAE5_CUPNH 7-carboxy-7-deazaguanine synthas e OS=Cupriavidus necator (strain ATCC 17699 / H16 / DSM 428 / Stanier 337) OX=381666 GN=queE PE=3 SV=1
MTYAVKEIFYTLQGEGANAGRAAVFCRFAGCNLWSGREEDRASAVCQFCDTDFVGTDGTRGGKYRTAEELAAVVASEWPQGAGGQPLVVCTGGEPLLQLDAPLIDALHAQGFEIAIETNGTIAVPPGIDWVCVSPKMGSELVVTRGDELKVVIPQEGQDFAAYEQLDFRHFLVQAMDGPLARENTAAAVAFCQRHPRWRLSLQTHKLLGIR

SEQ ID NO: 29496 - protein, 215 aa, Cupriavidus oxalaticus
  misc_feature (1)..(215): tr|A0A4P7LFZ1|A0A4P7LFZ1_9BURK 7-carboxy-7-deazaguanine synthase OS=Cupriavidus oxalaticus OX=96344 GN=queE PE =3 SV=1
MTYAVKEIFYTLQGEGANAGRAAVFCRFAGCNLWSGREEDRASAVCQFCDTDFVGTDGTRGGKYRTAGELAAVVASEWPQGAGGKPLGKPLVVCTGGEPLLQLDAPLIDALHEQGFEIAIETNGTIAVPPGIDWVCVSPKMGSELVVRGGDELKVVIPQAGQDFAAYEQLDFEHFLVQPMDGPLQRENTAAAVDFCQRHPRWRLSLQTHKLLGIR

SEQ ID NO: 29497 - protein, 215 aa, Cupriavidus oxalaticus
  misc_feature (1)..(215): tr|A0A375FWA4|A0A375FWA4_9BURK 7-carboxy-7-deazaguanine synthase OS=Cupriavidus oxalaticus OX=96344 GN=queE PE =3 SV=1
MTYAVKEIFYTLQGEGANAGRAAVFCRFAGCNLWSGREEDRASAVCQFCDTDFVGTDGTRGGKYRTAGELAAVVASEWPQGAGGKPLGKPLVVCTGGEPLLQLDAPLIDALHAQGFEIAIETNGTIAVPPGIDWVCVSPKMGSELVVRRGDELKVVIPQAGQDFAAYEQLDFRHLLVQPMDGPLQRENTAAAVDFCQRHPRWRLSLQTHKLLGIR

SEQ ID NO: 29498 - protein, 211 aa, Cupriavidus pauculus
  misc_feature (1)..(211): tr|A0A3G8H1E8|A0A3G8H1E8_9BURK 7-carboxy-7-deazaguanine synthase OS=Cupriavidus pauculus OX=82633 GN=queE PE=3 SV=1
MTYTVKEIFYTLQGEGANAGRAAVFCRFSGCNLWTGREEDRARAVCQFCDTDFVGTDGTRGGKYRTAEELAAVVASEWPQGAGGQPLVVCTGGEPLLQLDAPLIDALHAHGFEIAIETNGTIPVPEGIDWVCVSPKMGSELVVTKGDELKVVMPQAGQDFAAYEQLDFRYFLVQAMDGPLARQNTAAAVDFCQRHPRWRLSLQTHKLLGIR

SEQ ID NO: 29499 - protein, 211 aa, Cupriavidus pauculus
  misc_feature (1)..(211): tr|A0A2N5C6K4|A0A2N5C6K4_9BURK 7-carboxy-7-deazaguanine synthase OS=Cupriavidus pauculus OX=82633 GN=queE PE=3 SV=1
MTYAVKEIFYTLQGEGANAGRAAVFCRFSGCNLWTGREEDRARAVCQFCDTDFVGTDGTRGGKYKTAQELAAVVASEWPQGAGGQPLVVCTGGEPLLQLDAPLIDALHAQGFEIAIETNGTIEVPEGIDWVCVSPKMGSELVVKKGDELKVVMPQAGQDFAAYEQLDFRYFLVQAMDGPLARQNTAAAVDFCQRHPRWRLSLQTHKLLGIR

SEQ ID NO: 29500 - protein, 211 aa, Cupriavidus pinatubonensis
  misc_feature (1)..(211): tr|Q470H0|Q470H0_CUPPJ 7-carboxy-7-deazaguanine synthas e OS=Cupriavidus pinatubonensis (strain JMP 134 / LMG 1 197) OX=264198 GN=queE PE=3 SV=1
MTYAVKEIFYTLQGEGANAGRAAVFCRFAGCNLWSGREEDRATAVCQFCDTDFVGTDGTRGGKYRTAEELAGAVASEWPQGAGGKPLVVCTGGEPLLQLDAPLIDALHAQGFEIAIETNGTIKVPPGIDWVCVSPKMGSELVVRKGDELKVVIPQVGQDFAAYEQLDFQYFLVQAMDGPLARENTAAAVAFCQRHPRWRLSLQTHKLLGIR

SEQ ID NO: 29501 - protein, 214 aa, Cupriavidus plantarum
  misc_feature (1)..(214): tr|A0A316EYY3|A0A316EYY3_9BURK 7-carboxy-7-deazaguanine synthase OS=Cupriavidus plantarum OX=942865 GN=queE PE =3 SV=1
MTYAVKEIFYTLQGEGANAGRAAVFCRFAGCNLWTGREEDRARAVCQFCDTDFVGTDGTRGGKYRTADELADIVASEWPQGADAAGGKPLVVCTGGEPLLQLDKPLIDALHARGFEIAIETNGTIAVPDGIDWICVSPKMGSELVVTKGDELKVVIPQQGQDFAAYEQLDFRYFMVQAMDGPLARQNTAAAVDFCQRHPRWRLSLQTHKLLGIR

SEQ ID NO: 29502 - protein, 211 aa, Cupriavidus sp.; identical to SEQ ID NO: 29495
  misc_feature (1)..(211): tr|R7XPK1|R7XPK1_9BURK 7-carboxy-7-deazaguanine synthas e OS=Cupriavidus sp. GA3-3 OX=1229514 GN=queE PE=3 SV=1

SEQ ID NO: 29503 - protein, 211 aa, Cupriavidus sp.
  misc_feature (1)..(211): tr|A0A439EZN0|A0A439EZN0_9BURK 7-carboxy-7-deazaguanine synthase OS=Cupriavidus sp. UYMSc13B OX=1774746 GN=que E PE=3 SV=1
MTYAVKEIFYTLQGEGANAGRAAVFCRFAGCNLWSGREDDRASAVCQFCDTDFVGTDGTRGGKYRTAEELAAVVASEWPQGAGGQPLVVCTGGEPLLQLDAPLIDALHAQGFEIAIETNGTIAVPPGIDWVCVSPKMGSELVVTRGDELKVVIPQEGQDFAAYEQLDFRHFLVQAMDGPLARENTAAAVAFCQRHPRWRLSLQTHKLLGIR

SEQ ID NO: 29504 - protein, 211 aa, Cupriavidus taiwanensis
  misc_feature (1)..(211): tr|A0A375F6W8|A0A375F6W8_9BURK 7-carboxy-7-deazaguanine synthase OS=Cupriavidus taiwanensis OX=164546 GN=queE PE=3 SV=1
MTYAVKEIFYTLQGEGANAGRAAVFCRFAGCNLWSGREQDRASAVCQFCDTDFVGTDGTRGGKYRSAGELAAVVASEWPQGAGGKPLVVCTGGEPLLQLDAPLIDALHAQGFEIAIETNGTIAVPPGIDWVCVSPKMGSELVVTRGDELKVVIPQEGQDFAAYEKLDFRHFLVQAMDGPLARENTAAAVAFCQRHPRWRLSLQTHKLLGIR

SEQ ID NO: 29505 - protein, 211 aa, Cupriavidus taiwanensis
  misc_feature (1)..(211): tr|A0A375IZT5|A0A375IZT5_9BURK 7-carboxy-7-deazaguanine synthase OS=Cupriavidus taiwanensis OX=164546 GN=queE PE=3 SV=1
MTYAVKEIFYTLQGEGANAGRAAVFCRFAGCNLWSGREQDRASAVCQFCDTDFVGTDGTRGGKYRSAEELAAVVASEWPQGAGGKPLVVCTGGEPLLQLDAPLIDALHAQGFEIAIETNGTIAVPPGIDWVCVSPKMGSELVVTRGDELKVVIPQEGQDFAAYEKLDFRHFLVQAMDGPLARENTAAAVAFCQRHPRWRLSLQTHKLLGIR

SEQ ID NO: 29506 - protein, 223 aa, [Curtobacterium] plantarum
  misc_feature (1)..(223): tr|A0A3M7UEL2|A0A3M7UEL2_9GAMM 7-carboxy-7-deazaguanine synthase OS=[Curtobacterium] plantarum OX=221276 GN=qu eE PE=3 SV=1
MQYPINEMFQTLQGEGYYTGVPAIFIRLQGCPVGCSWCDTKHTWEKRTDRETSLGDILIKTVESDAWGDADAATLVSAIAQQGWTARHVVITGGEPAIYDLRPLTTALEQHGFQCQIETSGTHEIHCSERTWVTVSPKVNMRGGYDVLPQALSRADEIKHPVARERDVEALDRLLAGIDDTKARIIALQPISRKDDATRLCIETCIARNWRLSMQTHKYLNIA

SEQ ID NO: 29507 - protein, 235 aa, Curtobacterium sp.
  misc_feature (1)..(235): tr|A0A4P8SUE5|A0A4P8SUE5_9MICO 7-carboxy-7-deazaguanine synthase OS=Curtobacterium sp. SGAir0471 OX=2070337 GN =queE PE=3 SV=1
MRDRLHVSEIFTSLQGEGPSLGEYAVFLRLGRCNLSCSWCDTAYSWDWTRFNEAEEITSMPISDVVAHVLAINPRPSLLVVSGGEPLLQQPALTRLLVTLNEAAPELRVEFETNGTIRPSRMLATRANRFVVSPKLSNSDVPLERRIRPETLRTFATADANAFKFVVSNVEDVSEVVALSREVGFSRNRVWLMPEGATERQQQRSMRLLADAAIKEGFNFTPRLQVILWGDERGT

SEQ ID NO: 29508 - protein, 225 aa, Curvibacter putative
  misc_feature (1)..(225): tr|C9YHA0|C9YHA0_9BURK 7-carboxy-7-deazaguanine synthas e OS=Curvibacter putative symbiont of Hydra magnipapill ata OX=667019 GN=queE PE=3 SV=1
MLFLPLIRCGCVTAMAYQVKEIFYTLQGEGSHAGRPAVFCRFAGCNLWSGREQDRATAVCKFCDTDFVGTDGTLGGKFSTAQALAERIAAQWPAGDTAHRFVVMTGGEPLLQVDTALIDALHALGFQIAVETNGTVLVPEGIDWICVSPKAGSQWIQRQGHELKLVWPQAGITLEECEAADFKHRYLQPMDSPQRAANIETCITQCMQRPAWRLSLQTHKITGIR

SEQ ID NO: 29509 - protein, 211 aa, Curvibacter sp.
  misc_feature (1)..(211): tr|A0A1F8VVC5|A0A1F8VVC5_9BURK 7-carboxy-7-deazaguanine synthase OS=Curvibacter sp. GWA2_64_110 OX=1797747 GN= queE PE=3 SV=1
MTYAVKEIFYTLQGEGAQSGRAAVFCRFAGCNLWSGREEDRATAVCRFCDTDFVGTDGTGGGKFTTAEALADAIERAWEPAGQAGRYVVLTGGEPLLQVDEALTAALHARGFTIAVETNGTLPAPPGLDWICVSPKDQAEVVQKTGSELKLVYPQPGVDPAQFAGLAFEHFFLQPMDGPQREQNTAQAIAYCQQHPQWRLGIQSHKMIGIR

SEQ ID NO: 29510 - protein, 210 aa, Curvibacter sp.
  misc_feature (1)..(210): tr|A0A433CAM8|A0A433CAM8_9BURK 7-carboxy-7-deazaguanine synthase OS=Curvibacter sp. OX=1888168 GN=queE PE=3 SV =1
MSYAVKEVFYTLQGEGLRAGRPAVFCRFAGCNLWSGREADRATAVCRFCDTDFVGTDGTLGGKFADAQALAALIAAQWPAGQGHRYVVLTGGEPLLQVDEALTQALHAQGFEVAVETNGSLPAPAGIDWICVSPKAGAPLVQRSGHELKLVYPQAGLDPAELQHLDFEHFLLQPMDNPEQLANTRACIAYCQAQPRWRLSVQTHKVLDIR

SEQ ID NO: 29511 - protein, 265 aa, Cuspidothrix issatschenkoi
  misc_feature (1)..(265): tr|A0A2S6CT29|A0A2S6CT29_9CYAN 7-carboxy-7-deazaguanine synthase OS=Cuspidothrix issatschenkoi CHARLIE-1 OX=20 52836 GN=queE PE=3 SV=1
MTAKNQGNSTARLIEVFSAIQGEGLNVGTRQIFIRFAFCDLRCWFCDSANTWNAPPNCRIERYPGLRDFEVHSNPVPLPMLLGWVARQNIPSIHDSISLTGGEPLLHAQFLAEFLPAVRSLTNLPIYLETGGHRPEQLEIVLPYLDSVGMDLKLPSVSGESHWTEHTKFLQLCSNTKLEVFVKIIVSQSTVPEELEQAALLIAQINDQIPVFLQPVTPLTPAQQFSSVAMVAPTPEQVLAWQVLMKGFVKYVRVIPQTHKMLNQM

SEQ ID NO: 29512 - protein, 162 aa, Cyanobacteria bacterium
  misc_feature (1)..(162): tr|A0A3M1KQJ9|A0A3M1KQJ9_9CYAN 7-carboxy-7-deazaguanine synthase QueE (Fragment) OS=Cyanobacteria bacterium J0 83 OX=2420336 GN=D6756_13970 PE=3 SV=1
MEVQDYQAVTYPVVETFHSVQGEGYWTGVNAFFIRLGGCDVHCPWCDQKETWSSKGYPLVKSVELAHIAEASNCAIVIITGGEPLLHDLLPLTTSLKNLGLRIHLETSGAHPLRGEFDWLTFSPKPYRAPQQSVISQADELKVVIQKPEDIIWAETQAKNIP

SEQ ID NO: 29513 - protein, 259 aa, Cyanobacteria bacterium
  misc_feature (1)..(259): tr|A0A3B8JE38|A0A3B8JE38_9CYAN 7-carboxy-7-deazaguanine synthase OS=Cyanobacteria bacterium UBA8553 OX=2055771 GN=queE PE=3 SV=1
MSSKTLLTARLSEIFSAIQGEGLNVGSRQLFIRFALCDLRCHFCDSAHTWSVPKEYRVEHTPGVRDFESYPNPVALPVLLQWVNRLNQPGLHDSITLTGGEPLLHAPFLVEFLPPLRQLTGLPIYLETGGHRPEQLAMVLPYLDSVGMDIKLPSVSGENRWQAHADFLQLCFESSVEVFVKLIVDGNTDSGELEQAAQLVADVSPQISVFLQPVTPLESSPLLMSTPSPEQVLSWQALMKRTLKLVRVVPQTHKMIGQL

SEQ ID NO: 29514 - protein, 213 aa, Cyanobacterium aponinum
  misc_feature (1)..(213): tr|K9Z795|K9Z795_CYAAP 7-carboxy-7-deazaguanine synthas e OS=Cyanobacterium aponinum (strain PCC 10605) OX=7551 78 GN=queE PE=3 SV=1
MLLFNKKEEDIKDYLKVEYPVVEIFHSLQGEGFWAGVNAFFIRLAGCDVYCPWCDQKETWSMKKHPLFTVENLLNEINTVETKHIIITGGEPLLHNLLPLTKILKYGGYQTHLETSGSNVFTGEFDWVTLSPKPYKKPHESIYAHVDELKVVIDNENDLKWAASEAEKLPKYTVKYLQPQWENPASQKLVIDYILSHSQWRMSLQTHKYLNIL

SEQ ID NO: 29515 - protein, 213 aa, Cyanobacterium aponinum; identical to SEQ ID NO: 29514
  misc_feature (1)..(213): tr|A0A2G3PCP0|A0A2G3PCP0_9CHRO 7-carboxy-7-deazaguanine synthase OS=Cyanobacterium aponinum IPPAS B-1201 OX=20 47986 GN=queE PE=3 SV=1

SEQ ID NO: 29516 - protein, 205 aa, Unknown
  misc_feature (1)..(205): tr|A0A0R2TZS8|A0A0R2TZS8_9CYAN 7-carboxy-7-deazaguanine synthase OS=cyanobacterium BACL30 MAG-120619-bin27 OX= 1655601 GN=queE PE=3 SV=1
MTDNLPVVETFHSLQGEGLHAGRSAFFIRLAGCSVGCSWCDTKHSWPAGVHPQQALAALAAEAKAAAEAGAAFVVLTGGEPLHHDLGPLCQALEPSGLPLHLETSGVDPLSGHFAWITLSPKRHRPPTAELLAGCQELKVVVHEVADLDFAQAMAAAAAAAGNQPALLLQPGWDSPAGQALAIDYVRCHRRWRLSLQSHKLLGLR

SEQ ID NO: 29517 - protein, 205 aa, Rhopalodia gibberula
  misc_feature (1)..(205): tr|A0A2Z5T8U5|A0A2Z5T8U5_9CYAN 7-carboxy-7-deazaguanine synthase OS=cyanobacterium endosymbiont of Rhopalodia gibberula OX=1763363 GN=queE PE=3 SV=1
MKVIVPTSITYPIVETFHSIQGEGSWMGVSAFFIRLAGCDVHCYWCDQKESWPVKPHPRRTIEELAKLAKQTNPMIVVITGGEPLIHNLYPLTDELRKLGLRIHLETSGTHPFSGSFDWVTFSPKPFSPPNESTYNRVNELKVVIASELDLQWGQQEAKKVPVDTVKYLQPEWGSPKSKQLIYDFVLQHPDWRIGVQMHKFLSFR

SEQ ID NO: 29518 - protein, 203 aa, Epithemia turgida
  misc_feature (1)..(203): tr|A0A077JJI1|A0A077JJI1_9CYAN 7-carboxy-7-deazaguanine synthase OS=cyanobacterium endosymbiont of Epithemia t urgida isolate EtSB Lake Yunoko OX=1228987 GN=queE PE=3 SV=1
MISSDLITYPIVETFHSIQGEGAWMGVSAFFIRLAGCDVHCSWCDQKESWTVKPYPLRTVEELAKLAKQSNPLIVVITGGEPLIHNLDPLTDKLRRLGLRVHLETSGTHPFSGSFDWVTFSPKPLSLPNESIYSQTNELKIVIASELDLQWGQQEAKKVSSGTIKYLQPEWNSHESKQLIYDFILQCSDWRISVQIHKFLDFR

SEQ ID NO: 29519 - protein, 252 aa, Unknown
  misc_feature (1)..(252): tr|A0A2T4D233|A0A2T4D233_9CYAN 7-carboxy-7-deazaguanine synthase OS=cyanobacterium G8-9 OX=2137193 GN=queE PE= 3 SV=1
MFYLTEQFFSIQGEGKYAGVPSYFLRTGGCNLNCPGFGAEYKVDGEIRLGCDTYFAVDSAFSKSWIKVDDASELISKLKKEFIEIGYLPHMVITGGEPLMYHSDSIFYEVVSWLVTEGIEITFETNGTVEIDFEKYPAYKSCIFALSLKLKNSGEPEGKRIIPQALVNVQTYAKEAFLKFTIDAALVETTAIDEINQIRDILPNLEVYCMPVGESRDTIWKNDRAVFEFCMKHNFRYSDRLHIRVFDTTQGV

SEQ ID NO: 29520 - protein, 216 aa, Cyanobacterium sp.
  misc_feature (1)..(216): tr|A0A2K8WPL0|A0A2K8WPL0_9CHRO 7-carboxy-7-deazaguanine synthase OS=Cyanobacterium sp. HL-69 OX=2054282 GN=que E PE=3 SV=1
MINTVNKKEVKKTLNNNLLYEYPIVETFHSVQGEGFFAGVNAFFIRLAGCDVFCPWCDQKETWSMKKYPLYTVEKIVREVKQINTNTIIVTGGEPLLHDLNPLTIELKKTGKNIHLETSGAHPFSGVFDWVTFSPKPYKKPHETIYNKASELKVVVAEEKDFIWALSEGEKVSSHTIKYLQPEWNSPHTQELIFNYIKDNPSWRLSLQTHKYLGVR

SEQ ID NO: 29521 - protein, 215 aa, Cyanobacterium sp.
  misc_feature (1)..(215): tr|A0A1E5QW49|A0A1E5QW49_9CHRO 7-carboxy-7-deazaguanine synthase OS=Cyanobacterium sp. IPPAS B-1200 OX=1562720 GN=queE PE=3 SV=1
MNTVNKKEVKKTLNNNLLYEYPIVETFHSVQGEGFFAGVNAFFIRLAGCDVFCPWCDQKETWSMKKYPLYTVEKIVREVEQINTNTIIITGGEPLLHDLNPLTIELKKTGKNIHLETSGAHPFSGVFDWVTFSPKPYKIPHETIYNNASELKVVVAEEKDFMWALSEGEKVSSHTIKYLQPEWNSPHTQELIFNYIKDNPSWRLSLQTHKYLGVR

SEQ ID NO: 29522 - protein, 213 aa, Cyanobacterium stanieri
  misc_feature (1)..(213): tr|K9YI54|K9YI54_CYASC 7-carboxy-7-deazaguanine synthas e OS=Cyanobacterium stanieri (strain ATCC 29140 / PCC 7 202) OX=292563 GN=queE PE=3 SV=1
MINIIEKNAPIKDNLSYQYPIVETFHSVQGEGFYAGVNAYFIRLAGCDVFCPWCDQKETWSTKKYPLHSVEKIVNQIKQINTNIIIITGGEPLLHDLKPLTLELKKTGKNIHLETSGAHPFSGIFDWVTFSPKPYKKPHESIYNHASELKVVISQEKDFIWALSEAKKVPSHTIKYLQPEWNSPDTQDLIFNYIKENPQWRLSLQTHKYLGVR

SEQ ID NO: 29523 - protein, 217 aa, Ornithocercus magnificus
  misc_feature (1)..(217): tr|A0A4Y3G365|A0A4Y3G365_9CYAN 7-carboxy-7-deazaguanine synthase OS=cyanobiont of Ornithocercus magnificus OX= 2496102 GN=queE PE=3 SV=1
MSYLPVVETFHSLQGEGCHTGRSAFFIRLGGCRVGCSWCDTKHSWLSEPQTQRDVEDLAAEAITVRKAGAAFVVVTGGEPLHHDLDSLCRALRQHTSSTSESNSALPIHLETSGVDVLSGEPDWITLSPKRHAPPRKDILARCSELKVVIHTAADLEFAEVMAQEVQYSREKGSSTAELLLQPGWNCLEGQRLSIEHILRYPRWRLSLQCHKWLQIS

SEQ ID NO: 29524 - protein, 203 aa, Cyanobium gracile
  misc_feature (1)..(203): tr|K9P9I8|K9P9I8_CYAGP 7-carboxy-7-deazaguanine synthas e OS=Cyanobium gracile (strain ATCC 27147 / PCC 6307) O X=292564 GN=queE PE=3 SV=1
MVETFHSLQGEGLHAGRSAFFIRLAGCDVGCPWCDTKHSWPQAAHPQRPLGELAAEASAAAAAGAAFVVITGGEPLQQPLDALCAALAAAGLPLHLETSGVGQPSGRFDWITLSPKPHRPPAAALLARCDELKVVVTSPADLAFAEAMAAEADRLRPPATPGPARLLQPVWDEPAARELAVAYVRAHPDWRLSLQSHKWLGVR

SEQ ID NO: 29525 - protein, 209 aa, Cyanobium sp.
  misc_feature (1)..(209): tr|A0A182ARX4|A0A182ARX4_9CYAN 7-carboxy-7-deazaguanine synthase OS=Cyanobium sp. NIES-981 OX=1851505 GN=queE PE=3 SV=1
MVSSPPAALPVVETFHSLQGEGLHAGRSACFIRLAGCGVGCPWCDTKHSWPEAGHSRRPVAALADTVRRAAAAGAAFVVVTGGEPLHHDLTDLCEGIAPVGLPLHLETSGVDRLSGRFDWITLSPKPHRPPLPSLLAACQELKVVVHGEADLHFAVAMAQQARAAGNHPALLLQPGWDSAEGQRLALDFVRGHPAWRLSLQNHKWLAIR

SEQ ID NO: 29526 - protein, 222 aa, Cyanobium sp.
  misc_feature (1)..(222): tr|A0A4P5VDZ2|A0A4P5VDZ2_9CYAN 7-carboxy-7-deazaguanine synthase OS=Cyanobium sp. OX=2164130 GN=queE PE=3 SV=1
MSALASLSLPIVETFHSLQGEGLHAGRSAFFIRLAGCTVGCPWCDTKHSWPEASHPRHSLFDLAAAARGAAAAGAGFVVVTGGEPLQHQLEALCDQLRAATASPEQPAGLPIHLETSGVDALSGRFDWITLSPKRHRPPQQQALAACHELKVVVGQKDDLAFAEAMALAAIEAGRPNSASPPILLLQPLWDSPVGQELAIAHVRRNSRWRLSLQSHKWLGVR

SEQ ID NO: 29527 - protein, 257 aa, Cyanobium usitatum
  misc_feature (1)..(257): tr|A0A2P7MWW3|A0A2P7MWW3_9CYAN 7-carboxy-7-deazaguanine synthase OS=Cyanobium usitatum str. Tous OX=2116684 GN =queE PE=3 SV=1
MQADANKTPLARACLHASTPNQTERQALDQSGNSIPLSPVSQPLAADSLPATALPVVETFHSLQGEGLQAGRSAFFIRLGGCAVACPWCDTKHSWPADLHPQRPLAELAGEAEAAAEAGAAFVVITGGEPLHHNLGLLCQALEPSGLPLHLETSGVDQLSGRFAWITLSPKRHRPPSTELLAACQELKVVVHEAADLAFAAAMAVQAREARGGSPGPELLLQPGWDSPAGQALAIDYVRRNPQWRLSLQSHKLLGLR

SEQ ID NO: 29528 - protein, 258 aa, Cyanosarcina cf.
  misc_feature (1)..(258): tr|A0A2T1FP63|A0A2T1FP63_9CHRO 7-carboxy-7-deazaguanine synthase OS=Cyanosarcina cf. burmensis CCALA 770 OX=21 07697 GN=queE PE=3 SV=1
MTTARLIEIFSAIQGEGLNVGTRQIFIRFALCDLRCHFCDSAHTWSVPSTCRVERSPGLRDFETHPNPVPLNTLLTWIERQNSPGLHDSISLTGGEPLLHAPFLVEFLPLVRRATGLPIYLETGGHRPQQLQLILPYLDSVGMDIKLPSVSGEDRWNEHAEFLQACHQADIEVFIKAIVSSQTDLGDLAKAAKLVASVNPEIPVFLQPATPLTPSQQFGGTPIQAPTPAQVLHWQALMKQELKQVRVIPQTHKMLNQL

SEQ ID NO: 29529 - protein, 268 aa, Cyanothece sp.
  misc_feature (1)..(268): tr|B8HQA1|B8HQA1_CYAP4 7-carboxy-7-deazaguanine synthas e OS=Cyanothece sp. (strain PCC 7425 / ATCC 29141) OX=3 95961 GN=queE PE=3 SV=1
MVSSVPSSPAAEAQLNLTAPLVEVFSAIQGEGLNVGTRQIFIRFAQCDLRCHFCDSAHTWYSRPTCQIEQSPGQRDFQTYPNPVTIDQLLAWVKDLHGPHLHDSISLTGGEPLLQSQFLQRLLPQLRETIGLPLYLETGGHRPQELQQVLAWLDLVGMDIKLPSASGENYWTAHAEFLRCCHTAGVEVFCKLILSQQTEAEELEQTTELIASIDPAIPLILQPVTPLGNKPQILAPTPAQVLHWQALCKTRLKQVRVIPQTHKMIGQL

SEQ ID NO: 29530 - protein, 205 aa, Cyanothece sp.
  misc_feature (1)..(205): tr|A0A3B8Y7M5|A0A3B8Y7M5_9CYAN 7-carboxy-7-deazaguanine synthase OS=Cyanothece sp. UBA12306 OX=2055757 GN=queE PE=3 SV=1
MKAIASTTITYPIVETFHSIQGEGVSMGVSAFFIRLAGCDVHCPWCDQKESWTINPYPSQSVEVLGEAAKRANPALVIITGGEPLMHNLDPLTAQLRGLGLRVHLETSGSHPLTGQFDWVTFSPKPFQVPHDSIYPEVDELKVVIATEKDLQWAEEQATKVPPQTVKYLQPEWNTPESQQLIYDYVLGHQDWRISLQIHKFLGVR

SEQ ID NO: 29531 - protein, 208 aa, Cyclobacteriaceae bacterium
  misc_feature (1)..(208): tr|A0A3N4GZH0|A0A3N4GZH0_9BACT 7-carboxy-7-deazaguanine synthase OS=Cyclobacteriaceae bacterium YHN15 OX=24878 97 GN=queE PE=3 SV=1
MDKAKKIKEGLMLPLMEAFYTIQGEGVHSGVPAYFIRLGGCDVGCVWCDVKESWEAEKWPVIPVEEIVDRACEFSGRMVVITGGEPLMYNLGPLTALLKKKGFATHIETSGAHPFSGSFDWVCFSPKKFKVPHPSIYEKANELKVVIFHKSDFEFAEKHASLVQGNCIKSLQPEWSKANIYTESIVDYVKSHPDWKISLQTHKFMDIP

SEQ ID NO: 29532 - protein, 193 aa, Cyclobacteriaceae bacterium
  misc_feature (1)..(193): tr|A0A5C7Z627|A0A5C7Z627_9BACT 7-carboxy-7-deazaguanine synthase OS=Cyclobacteriaceae bacterium OX=2099675 GN= queE PE=3 SV=1
MEDFYTIQGEGFHQGRAAYFIRLGGCEVRCVWCDVKDSWDLNAHPQQAVDAIADKAKASGTQISVVTGGEPTMHNLQALTRALQERGLRTHLETSGAYEITGTWDWICFSPKKFKPPHASVAAQADELKVVVFHKSDFAWAEDFAKQVRPECKLYLQPEWSKENDILPQLIEYVKKNPRWQISLQVHKYMNIP

SEQ ID NO: 29533 - protein, 209 aa, Cyclobacterium amurskyense
  misc_feature (1)..(209): tr|A0A0H4PD52|A0A0H4PD52_9BACT 7-carboxy-7-deazaguanine synthase OS=Cyclobacterium amurskyense OX=320787 GN=qu eE PE=3 SV=1
MQDKKNALLNGLSLPLMEAFYTIQGEGMFSGQPAYFIRLGGCDVGCVWCDVKDSWEAERWPIVPISEMVAEAESYPARLVVITGGEPLMHNLGPLTSLLKDKGFQINMETSGAHPFSGTIDWTCLSPKKFKQPLPQVYEHANELKVVVFNKSDFDFALKHAKLVNEKCHLLLQPEWSKAEIMTPLIIDFVKENPAWRVSLQTHKYMEIP

SEQ ID NO: 29534 - protein, 210 aa, Cyclobacterium halophilum
  misc_feature (1)..(210): tr|A0A1H7BFD9|A0A1H7BFD9_9BACT 7-carboxy-7-deazaguanine synthase OS=Cyclobacterium halophilum OX=1416801 GN=qu eE PE=3 SV=1
MNVEAASRVREGQALPLMEAFYTIQGEGTYSGQPAYFIRLGGCDVGCVWCDVKDSWEAGKWPLVEIDQIVAEADAYPARLAVITGGEPLMYALGPLTQGLKEKGFTTNLETSGAHPYSGDLDWICLSPKKFKSPVPEIYTIANELKVIVYNKSDFDFARSEARKVAPSCKLLLQPEWSKAEQMMPQIVDFVKENPRWRISLQTHKYMEIP

SEQ ID NO: 29535 - protein, 209 aa, Cyclobacterium lianum
  misc_feature (1)..(209): tr|A0A1M7Q8P7|A0A1M7Q8P7_9BACT 7-carboxy-7-deazaguanine synthase OS=Cyclobacterium lianum OX=388280 GN=queE PE =3 SV=1
MKEQQELVHTGRLLPLMEAFYTIQGEGIFSGQSAYFIRLGGCDVGCVWCDVKASWEAGHWPLVSVEKIVEEAAAYPSRLVVITGGEPLMYDLSLLTSLLKEKGFHINIETSGVYPLSGSLDWICFSPKKFKAPDRGIYEQADEMKVIVFHKSDFAFALKHAALVNEKCRLLLQPEWSRAAEMTPLIIDFVKENPAWRVSLQTHKYMEIP

SEQ ID NO: 29536 - protein, 209 aa, Cyclobacterium marinum
  misc_feature (1)..(209): tr|G0J1D5|G0J1D5_CYCMS 7-carboxy-7-deazaguanine synthas e OS=Cyclobacterium marinum (strain ATCC 25205 / DSM 74 5) OX=880070 GN=queE PE=3 SV=1
MKDNKKTLSNGQYLPLMEAFYTIQGEGMFSGQPAYFIRLGGCDVGCVWCDVKDSWDKERWPKVAIEDIVAEAASYPARLVVITGGEPLMHDLAPLTHLLKEEGFQINMETSGAHPFSGTIDWTCLSPKKFKQPLPEVYAHADELKVVVYNKSDFEFALKHAKLVNEKCHLLLQPEWSKAGKMTNLIIDFVKENPAWRVSLQTHKYMEIP

SEQ ID NO: 29537 - protein, 209 aa, Cyclobacterium marinum
  misc_feature (1)..(209): tr|A0A5D9B0T9|A0A5D9B0T9_9BACT 7-carboxy-7-deazaguanine synthase OS=Cyclobacterium marinum OX=104 GN=queE PE=3 SV=1
MKDNKKTLSNGQYLPLMEAFYTIQGEGMFSGQPAYFIRLGGCDVGCVWCDVKDSWDKERWPKVAIEEIVAEAASYPARLVVITGGEPLMHDLAPLTHLLKEEGFQINMETSGAHPFSGTIDWTCLSPKKFKQPLPEVYAHADELKVVVYNKSDFEFALKHAKLVNEKCHLLLQPEWSKAGKMTNLIIDFVKENPAWRVSLQTHKYMEIP

SEQ ID NO: 29538 - protein, 209 aa, Cyclobacterium qasimii
  misc_feature (1)..(209): tr|A0A512CHK8|A0A512CHK8_9BACT 7-carboxy-7-deazaguanine synthase OS=Cyclobacterium qasimii OX=1350429 GN=queE PE=3 SV=1
MEENKNALLSGQSLPLMEAFYTIQGEGMFSGQPAYFIRLGGCDVGCVWCDVKDSWEAERWPIVPIQQMVAEAESFPARLVVITGGEPLMHNLGPLTSLLKEKGFQINMETSGAHPFSGQIDWTCLSPKKFKQPVPEVYAHADELKVVVFNKSDFDFALKHALLVNEKCHLLLQPEWSKAEIMTPLIIDFVKENPSWRVSLQTHKYMEIP

SEQ ID NO: 29539 - protein, 209 aa, Cyclobacterium qasimii; identical to SEQ ID NO: 29538
  misc_feature (1)..(209): tr|S7VNN8|S7VNN8_9BACT 7-carboxy-7-deazaguanine synthas e OS=Cyclobacterium qasimii M12-11B OX=641524 GN=queE P E=3 SV=1

SEQ ID NO: 29540 - protein, 215 aa, Cycloclasticus sp.
  misc_feature (1)..(215): tr|K0C494|K0C494_CYCSP 7-carboxy-7-deazaguanine synthas e OS=Cycloclasticus sp. (strain P1) OX=385025 GN=queE P E=3 SV=1
MPKDTLRITEIFYSLQGEGKTVGLPTTFIRLTGCPLRCGYCDTEYAFYGGETRSIDEIVQQVNELGAHYINVTGGEPLAQKRVHELMKTLCDAGYHVSLETSGALDVSGVDPRVIKVLDVKTPASGEMAKNRHENYDCLTKQDQVKYVICDRDDFQWSKQHLQEYALSDKCEVLFSPVQGELKASDLANWVLTDKLPVRFQIQLHKYLWGDEPGK

SEQ ID NO: 29541 - protein, 215 aa, Cycloclasticus sp.
  misc_feature (1)..(215): tr|A0A1X1QNV4|A0A1X1QNV4_9GAMM 7-carboxy-7-deazaguanine synthase OS=Cycloclasticus sp. symbiont of Bathymodiol us heckerae OX=1284675 GN=queE PE=3 SV=1
MSKDSLRITEIFYSLQGEGKTVGLPTTFIRLTGCPLRCGYCDTEYAFHGGEVRSIDEILVEVDGLGARYINVTGGEPLAQKRVHELMERLCDAGYQVSLETSGALDVSEVDVRVTKVLDVKTPGSLEVDKNKHANYQYLTQNDQVKYVICDVEDFHWSKEHMREHALNDKCEVLFSPVQGKLAATDLANWVLEEKLPVRFQIQLHKYLWGDVPGK

SEQ ID NO: 29542 - protein, 215 aa, Cycloclasticus zancles
  misc_feature (1)..(215): tr|S5T9R8|S5T9R8_9GAMM 7-carboxy-7-deazaguanine synthas e OS=Cycloclasticus zancles 78-ME OX=1198232 GN=queE PE =3 SV=1
MPKDTLRITEIFYSLQGEGKTVGLPTTFIRLTGCPLRCGYCDTEYAFYGGETRSIDEIVQQVKELGAHYINVTGGEPLAQKRVHELMKTLCDAGYHVSLETSGALDVSGVDPRVIKVLDVKTPASGEMAKNRHENYDCLTKQDQVKYAICDRDDFQWSKQHLQEYALSDKCEVLFSPVQGELKASDLANWVLTDKLPVRFQIQLHKYLWGDEPGK

SEQ ID NO: 29543 - protein, 208 aa, Cylindrospermopsis raciborskii
  misc_feature (1)..(208): tr|A0A1S2A0H6|A0A1S2A0H6_9CYAN 7-carboxy-7-deazaguanine synthase OS=Cylindrospermopsis raciborskii MVCC14 OX=9 40191 GN=queE PE=3 SV=1
MSILEIKLPIHETFQSTVQGEGYWTGSLVDFIRLSGCPLGCPWCDTGYADGGANLPRFERTIGELLAEIKSPRIVISGGEPFIHKHLPELVQALLGAGKQVSIETSGSFWKEVSLSAWITLSPKEHINPKYPVQNQFWSRANEAKIVIETGQEIDFYQEYLSARPDLYVYLQPEWNSSSKSLALILQLLQQKPDYKLSLQTHKYIGLQ

SEQ ID NO: 29544 - protein, 208 aa, Cylindrospermopsis raciborskii; identical to SEQ ID NO: 29543
  misc_feature (1)..(208): tr|A0A1X4G950|A0A1X4G950_9CYAN 7-carboxy-7-deazaguanine synthase OS=Cylindrospermopsis raciborskii CENA303 OX= 1170769 GN=queE PE=3 SV=1

SEQ ID NO: 29545 - protein, 208 aa, Cylindrospermopsis sp.
  misc_feature (1)..(208): tr|A0A0R0MCZ4|A0A0R0MCZ4_9CYAN 7-carboxy-7-deazaguanine synthase OS=Cylindrospermopsis sp. CR12 OX=1747196 GN= queE PE=3 SV=1
MSILEIKLPIHETFQSTVQGEGYWTGSLVDFIRLSGCPLSCPWCDTGYADGGANLRRFERTIGELLAELKSPRIVISGGEPFIHKHLPELVEALLDAGKQVNIETSGSFWKEVPLSAWITLSPKEHINPKYPVQNQFWSRANEAKIVIETGQEIDFYQEHLSAHPDLCVYLQPEWNSSSKSLALILQLLQQKPDYKLSLQTHKYIGLQ

SEQ ID NO: 29546 - protein, 273 aa, Cylindrospermum sp.
  misc_feature (1)..(273): tr|A0A1Z4QQI7|A0A1Z4QQI7_9NOST 7-carboxy-7-deazaguanine synthase OS=Cylindrospermum sp. NIES-4074 OX=2005457 G N=queE PE=3 SV=1
MRSHCYHHMITKTTVKPMARLVEVFSAIQGEGLNVGTRQIFIRFALCDLRCHFCDSAHTWNAPNTCRIERSPGLRDFEIHSNPVPLPILIEWVERQNLPCLHDSISLTGGEPLLHAPFLEQFIPEVKAITGLPVYLETGGHRPEQLAMILPYLDSVGMDLKLPSVSGESHWQEHAKFLQLCFESDLEVFVKIVISQRTDPAELESSALLVAAVSQDIPIFLQPVTPLAASEQFSQVPVLGPTPDQVLVWQALMKKSVKQVRVIPQTHKMLNQL

SEQ ID NO: 29547 - protein, 265 aa, Cylindrospermum stagnale
  misc_feature (1)..(265): tr|K9WZC0|K9WZC0_9NOST 7-carboxy-7-deazaguanine synthas e OS=Cylindrospermum stagnale PCC 7417 OX=56107 GN=queE PE=3 SV=1
MIAKTTVKPTARLVEVFSAIQGEGLNVGTRQIFIRFALCDLRCHFCDSAHTWNAPTTCRIERSPGLRDFEIHSNPVPLPILIEWVERQNLPCLHDSISLTGGEPLLHAPFLEQFLPEVRAITALPIYLETGGHRPEQLAVILPYLDSVGMDLKLPSVSGESYWPEHAKFLQLCFDSHLDVFVKIIVSQKTDPSELERSALLVAGISQDIPIFLQPVTPLVAAEQFSQIPVKAPTPDQVLVWQALMKRFVKQVRVIPQTHKMLNQM

SEQ ID NO: 29548 - protein, 230 aa, Cystobacter ferrugineus
  misc_feature (1)..(230): tr|A0A1L9B263|A0A1L9B263_9DELT 7-carboxy-7-deazaguanine synthase OS=Cystobacter ferrugineus OX=83449 GN=queE P E=3 SV=1
MPLARPHIEPRRVPTADSVVVKEIYLSVQGESSHAGLLCSFVRLTGCHLRCGYCDSEFAFHGGQRRKISEVVDEVKALGAPRVEVTGGEPLLQPGVYPLMEQLLASGLTVLLETSGAIDVRLVPPAVHKIVDMKTPSSGESDRNDYRNLESMNANDELKFVIGSREDYEWSKRLITEHRLLDKPYELLFSTVYGKITTKDLAEWVIADRLPVRFQLQMHKYIWDPNERGV

SEQ ID NO: 29549 - protein, 230 aa, Cystobacter fuscus
  misc_feature (1)..(230): tr|S9QLR2|S9QLR2_9DELT 7-carboxy-7-deazaguanine synthas e OS=Cystobacter fuscus DSM 2262 OX=1242864 GN=queE PE= 3 SV=1
MPLARPHIEPRRVPTADSLVVKEIYLSVQGESSHAGLLCSFVRLTGCHLRCSYCDSEFAFHGGQRRKISEVVDEVKALGSPRVEVTGGEPLLQPGVYPLMEQLLASGMTVLLETSGAIDVRLVPPAVHKIVDMKTPSSGESDRNDYRNLESMNANDELKFVIGSREDYEWSKRLITEHRLLDKPYELLFSTVHGKITTKDLAEWVIADRLPVRFQLQMHKYIWDPNERGV

SEQ ID NO: 29550 - protein, 230 aa, Cystobacter fuscus
  misc_feature (1)..(230): tr|A0A250IUF6|A0A250IUF6_9DELT 7-carboxy-7-deazaguanine synthase OS=Cystobacter fuscus OX=43 GN=queE PE=3 SV=1
MPLARPHIEPRRVPTADSVVVKEIYLSVQGESSHAGLLCSFVRLTGCHLRCSYCDSEFAFHGGQRRKISEVVDEVKALGSPRVEVTGGEPLLQPGVYPLMEQLLGAGLTVLLETSGAIDVRLVPPAVHKIVDMKTPSSGESDRNDYRNLESMNANDELKFVIGSREDYEWSKRLITEHRLLDRPYELLFSTVHGKITTKDLAEWVIADRLPVRFQLQMHKYIWDPNERGV

SEQ ID NO: 29551 - protein, 205 aa, Cytophaga hutchinsonii
  misc_feature (1)..(205): tr|Q11UD2|Q11UD2_CYTH3 7-carboxy-7-deazaguanine synthas e OS=Cytophaga hutchinsonii (strain ATCC 33406 / NCIMB 9469) OX=269798 GN=queE PE=3 SV=1
MHISTSIQSLPVMESFYTIQGEGHYQGRAAYFIRLAGCDVGCHWCDVKESWDASQHPMQTIEHMVAEASAFTGRIAVITGGEPLMHDLTNLTAQLKQEGFRNHIETSGAHPLSGEWDWICLSPKKFKAPLPSVIEACDELKIIVFHSSDIEWAKTFLPKLKKGCKLFLQPEWSRQEEMLPQIISFVKENPEWEISLQIHKFMNIP

SEQ ID NO: 29552 - protein, 193 aa, Cytophaga sp.
  misc_feature (1)..(193): tr|A0A4R4KKB2|A0A4R4KKB2_9BACT 7-carboxy-7-deazaguanine synthase OS=Cytophaga sp. DMA-K-7a OX=2070510 GN=queE PE=3 SV=1
MEAFYTLQGEGAHAGKAAYFIRLGGCDVGCHWCDVKESWDATRFARQSIADIVAGAMQFPGRLAVITGGEPLMYNLSALTGALQAAGFQTNIETSGVYPITGSWDWICFSPKKFKAPDPGIYAQANELKVIIYNDSDFAFAEEHAALLTSPCKLLLQPEWGKREKMLPKIIEYIKYNPQWQISLQTHKYMNIP

SEQ ID NO: 29553 - protein, 300 aa, Cytophaga xylanolytica
  misc_feature (1)..(300): tr|A0A2W7P3R7|A0A2W7P3R7_9BACT 7-carboxy-7-deazaguanine synthase OS=Cytophaga xylanolytica OX=990 GN=queE PE=3 SV=1
MHQPLAQPATVTPKTTHHLTLVQEGVFPVTRNHRGDLLEQCPNTGWHHAGTIQGEGKLAGVPSLFIRLAGCNLRCMWQMPNGEVSLCDTAYASFHTGQTRRMTVDEVLNTVRHNIGSMRHVVITGGEPMLQSRSLTELCRILKTELHLHITMETNGTLFDKELAPLIDLVSLSPKLQNATPTPASAQKMNMDYKGTFAYHAEIRKNTEAIQQWMNNCRVFDNDFQLKFVVAHPDEVDEIKTDFLNELTGWQPSDILLMPLGGNRDQLAVNTPIAVQLAVINGWRFAPRLHIDLWGNRAGV

SEQ ID NO: 29554 - protein, 210 aa, Cytophagaceae bacterium
  misc_feature (1)..(210): tr|A0A2E4HFQ9|A0A2E4HFQ9_9BACT 7-carboxy-7-deazaguanine synthase OS=Cytophagaceae bacterium OX=2026729 GN=queE PE=3 SV=1
MTKAAVQTRVDLGELLPLMEEFYTIQGEGAHTGKSAYFIRIGGCDVGCHWCDVKESWDAAIHPPTEADLIAENAAKYSDTIVVTGGEPLMWDMAPLTRKLKAKNLTVHIETSGAYPLSGQWDWICLSPKKRMPPKAEVLEKADELKVIVYNKSDFEFAEKHAALVGKDCVLFLQPEWSVREKMIPLIVDYVMKHPKWKVSLQTHKYLNIP

SEQ ID NO: 29555 - protein, 194 aa, Cytophagaceae bacterium
  misc_feature (1)..(194): tr|A0A4Q9BA73|A0A4Q9BA73_9BACT 7-carboxy-7-deazaguanine synthase OS=Cytophagaceae bacterium 103A-SOEBACH OX=25 16558 GN=queE PE=3 SV=1
MESFYTLQGEGKYQGHAAYFIRLGGCDVGCHWCDVKESWPVDTHPVKTVETLVAEALENPGRLVVITGGEPLMHDLGPLTEALQEAGFRTHIETSGVATAITGTWDWICFSPKKFKAPNEGILALTNELKVVVNHPSDIPWAQEWAEKLPKSAELYLQPEWSKQEQMNPLIVDFVKANPTWRISVQTHKFLQIP

SEQ ID NO: 29556 - protein, 203 aa, Cytophagales bacterium
  misc_feature (1)..(203): tr|A0A286IH46|A0A286IH46_9BACT 7-carboxy-7-deazaguanine synthase OS=Cytophagales bacterium TFI 002 OX=1945892 GN=queE PE=3 SV=1
MKNEEVQYPIMESFYTIQGEGVHSGKAAYFIRLGGCDVGCVWCDVKESWNAADHPFTTVGEMVLQAKENAAKLVVITGGEPLMYDMSPLTSALKSEGFVTNIETSGAYPMSGDWDWVCFSPKKFKKANESIYPVANELKVIVFNKSDFKFAEEYAALVGDDCALLLQPEWDKSDEMLPLVIDYVKANPKWKVSLQTHKFMGVD

SEQ ID NO: 29557 - protein, 193 aa, Cytophagales bacterium
  misc_feature (1)..(193): tr|A0A2M6GE91|A0A2M6GE91_9BACT 7-carboxy-7-deazaguanine synthase OS=Cytophagales bacterium CG18_big_fil_WC_8_2 1_14_2_50_42_9 OX=1973956 GN=queE PE=3 SV=1
MEAFYTIQGEGFYSGHAAYFIRLGGCDVGCHWCDVKESWDAALHPLTSLDDIVAGALAYPGRKVVITGGEPLIYNLDPLTQKLKAAGFQINIETSGAYPLSGNLDWVCVSPKKFKTPVPEILPLAHELKVIIFHKSDFAWAESYAAQVGSNTKLFLQPEWSRHAELLPLIVEYVKQHPQWQISLQTHKYMDIP

SEQ ID NO: 29558 - protein, 205 aa, Cytophagia bacterium
  misc_feature (1)..(205): tr|A0A2E0GZ44|A0A2E0GZ44_9BACT 7-carboxy-7-deazaguanine synthase OS=Cytophagia bacterium OX=2026730 GN=queE PE =3 SV=1
MKIERGSESLPVMESFYSIQGEGYHSGKPAYFIRLAGCDVKCKWCDVKDSWSISSDQYQDVNKIVNKIDKVSSEIIVITGGEPLHHNLSNLTSALRKIGKKIHLETSGTEPLTGEFDWICLSPKQNKKPLDDFFEIANELKIVIYRKNDFLWAERNASKINKKAELILQPEWSMEKRINPEIIKFIKLNPKWRISLQTHKYLDVD

SEQ ID NO: 29559 - protein, 256 aa, Dactylococcopsis salina
  misc_feature (1)..(256): tr|K9YW56|K9YW56_DACSA 7-carboxy-7-deazaguanine synthas e OS=Dactylococcopsis salina PCC 8305 OX=13035 GN=queE PE=3 SV=1
MATVATATANLVEVFSAIQGEGLNVGTRQIFIRFGGCDLRCDFCDSANTWQANSTFRVEQTPGKRDFQVYDNPVEDTQLLRWIEQQNQFNLHDSISLTGGEPLLHAKFLRQFLPQLKQSTSLPIYLETGGHRPQQLSLILDFLDCIGMDMKLPSVSGEQHWESHAAFLRLCIPQKHIFVKLIVSDQTSDDDLNQATRIIAKVSPDIPVILQPVTPLVGKTITPPRAEQVLSWQSQMKQLLREVRVIPQTHKMIGQL

SEQ ID NO: 29560 - protein, 212 aa, Dechloromonas aromatica
  misc_feature (1)..(212): tr|Q478F5|Q478F5_DECAR 7-carboxy-7-deazaguanine synthas e OS=Dechloromonas aromatica (strain RCB) OX=159087 GN= queE PE=3 SV=1
MALRITEIFYSLQGEASRVGLPTVFVRLTGCPLRCSWCDTTYSFTGGEAATVESVLAEVAKYPARQVCVTGGEPLSQKDCLPLLAALCNAGYDVSLETSGALDVSAVDPRVARIMDLKAPDSAESARNLWENLTVLTPRDEIKIVIASRGDYEWARDVLRQKKLDQICSVLFSPAQGVIEPQSLAEWILEDGLNVRFQLQLHKLLWGNMQGK

SEQ ID NO: 29561 - protein, 214 aa, Dechloromonas denitrificans
  misc_feature (1)..(214): tr|A0A133XG38|A0A133XG38_9RHOO 7-carboxy-7-deazaguanine synthase OS=Dechloromonas denitrificans OX=281362 GN=q ueE PE=3 SV=1
MAVALRLTEIFYSLQGEASRVGLPTVFVRLTGCPLRCVWCDTEYSFTGGEPATIESVLAEVGKYPARQVCVTGGEPLSQKECLPLLQALCDAGYEVSLETSGALDIAAVDPRVARIMDLKAPDSGESAKNRWENLALLNGRDEIKIVIASRDDYLWAREVLRERSLASICPVLFSPAQGRVEPAELAAWILEDGLEVRFQLQLHKLLWGNMKGK

SEQ ID NO: 29562 - protein, 212 aa, Dechloromonas sp.
  misc_feature (1)..(212): tr|A0A5C7ZFI7|A0A5C7ZFI7_9RHOO 7-carboxy-7-deazaguanine synthase OS=Dechloromonas sp. OX=1917218 GN=queE PE=3 SV=1
MALRLTEIFFSLQGEASRVGLPTVFVRLTGCPLRCTWCDTTYSFTGGEPATVESILAEVARYPARQVCVTGGEPLSQKECLPLLTALCDAGYDVSLETSGALDIADVDPRVSRIMDLKAPDSGECAKNRWENLAHLTPRDEIKIIIASDADYRWACEQIRSHRLDTLCPVLLSPAQGQFEARDLAERILGDGLNVRFQMQLHKLLWGNMKGK

SEQ ID NO: 29563 - protein, 212 aa, Dechloromonas sp.
  misc_feature (1)..(212): tr|A0A3B7A8M9|A0A3B7A8M9_9RHOO 7-carboxy-7-deazaguanine synthase OS=Dechloromonas sp. HYN0024 OX=2231055 GN=qu eE PE=3 SV=1
MPLRLTEIFYSLQGEASRAGLPTVFVRLTGCPLRCTWCDTTYSFTGGEPATIESVLAEVAKYPARQVCVTGGEPLAQKDCLGLLTALCDAGYDVSLETSGALDVAAIDQRVARIMDLKAPDSGESAKNLWSNLAVLNRRDEIKIVIASRRDYEWAREVLRDRQIDRLCPVLLSPAGGLIEPQLLAGWILEDGLNVRFQLQLHKILWGNMKGK

SEQ ID NO: 29564 - protein, 237 aa, Deferribacter autotrophicus
  misc_feature (1)..(237): tr|A0A5A8F7S8|A0A5A8F7S8_9BACT 7-carboxy-7-deazaguanine synthase OS=Deferribacter autotrophicus OX=500465 GN=q ueE PE=3 SV=1
MLQQNTLNKGFIKEIFKSYQGEGKFVGARQIFIRFADCPFSCEGCDTDFSLSENFLCDGVEYSNPVLPDELFQILRENYNFKLFHSVSITGGEPLIQKDFLSEFLPILKDNGVKVFLETSGYLVDEIIELSDYLDIISVDIKLKSVFGKKYPSNLIKDLKVINEKIYYKVVIGKNIDENEIKTVLIELAKNDVDVLYVQFKNNYFNLGLLDKLSDIGYSYGIEVFFVPQVHKLIGIL

SEQ ID NO: 29565 - protein, 231 aa, Deferribacter desulfuricans
  misc_feature (1)..(231): tr|D3PD05|D3PD05_DEFDS 7-carboxy-7-deazaguanine synthas e OS=Deferribacter desulfuricans (strain DSM 14783 / JC M 11476 / NBRC 101012 / SSM1) OX=639282 GN=queE PE=3 SV =1
MSKAFVKEIFKSVQGEGKYVGARQLFIRFAGCNINCVGCDTNYTVDRYFLCCDKKYENPVTPDNLFNLVVNNFDLNLFHSVSLTGGEPLIYCDFLKLFLQYLKNAGVRTFLETSGLIVDSILELEDYLDIISVDLKLKEVFGVEFNRDGIIKLKDINEKVYFKIVVGENLPLEKIENTIHLIKGIGVEELYIHFIDNKFNYSLLDKILDLCYYHNVMAYFIPQVHKLIGMK

SEQ ID NO: 29566 - protein, 239 aa, Defluviimonas sp.
  misc_feature (1)..(239): tr|A0A059IIX7|A0A059IIX7_9RHOB 7-carboxy-7-deazaguanine synthase OS=Defluviimonas sp. 20V17 OX=1417296 GN=queE PE=3 SV=1
MTAPRPLRIAEIFGPTIQGEGALIGEATVFIRAGGCDYRCVWCDSLHAVDSAWRETWAPMTPKAVWDEVLRLSGGRPLTVSISGGNPAIQDFAPVIARGKAEGYRFACETQGSVARPWFGDLDTLVLSPKPPSSKETVDWKAFADCVAAGAGAGRTVMKIVIFDAADLAWARAAHARHPELPLYLQPGNPEVDPERSVDPQALADRMLWLVEQTTGAGWFVPRILPQLHVLIWGNRRGV

SEQ ID NO: 29567 - protein, 222 aa, Dehalobacter sp.
  misc_feature (1)..(222): tr|T0JBC0|T0JBC0_9FIRM 7-carboxy-7-deazaguanine synthas e OS=Dehalobacter sp. UNSWDHB OX=1339256 GN=queE PE=3 S V=1
MKYRVAEIFSSINGEGPRAGELAVFVRFAGCNLQCTYCDTRWANEADVSYREMTGADLYKQILATGIKNVTLTGGEPLIQPGIAALTDLLCQDPALSVEIETNGSVSLKPFCTEANRRPGFTMDYKLASSGMEEKMVLANFELLTCRDAVKFVVGDQSDLARAREIISTYGLIKKTAVFISPVFAHIAPSEIVKFMIEHKMEGVRLQLQLHKVIWDPEKRGV

SEQ ID NO: 29568 - protein, 222 aa, Dehalobacter sp.
  misc_feature (1)..(222): tr|A0A4R4D1S9|A0A4R4D1S9_9FIRM 7-carboxy-7-deazaguanine synthase OS=Dehalobacter sp. 12DCB1 OX=2070364 GN=queE PE=3 SV=1
MKYRVAEIFSSINGEGPRAGELAVFVRFAGCNLRCTYCDTRWANEADVSYQEMTGADLYKQVLTTGIKNVTLTGGEPLIQPGIAALTNLLCQDPALSVEIETNGSVSLKPFCTEVNHRPGFTMDYKLAWSGMEDKMILANFEVLTCRDAVKFVVGDQSDLKRAREIISTYGLIKKTAVFISPVFAHIAPSEIVKFMIVHKMNGVRLQLQLHKVIWDPEKRGV

SEQ ID NO: 29569 - protein, 213 aa, Dehalococcoidaceae bacterium
  misc_feature (1)..(213): tr|A0A2E8T894|A0A2E8T894_9CHLR 7-carboxy-7-deazaguanine synthase OS=Dehalococcoidaceae bacterium OX=2026731 GN =queE PE=3 SV=1
MEIKVNEIYKSVQGESTYSGLPCTFIRLTFCNLRCSYCDTEYAFYEGTDMRIPEIIKKVNNLKCNLVEVTGGEPLVQDGCIDLLKALISNGNKILIETGGALSIEKIPKEVVIILDIKCPSSNMSDKNLWSNIDLIKPSDEIKFVIGDKKDYNWSKKIIKKYNLTDKCTILFSPVYNKIEPKTMVEWIMKDNLNVRFQTQLHKSIWNHNTKGV

SEQ ID NO: 29570 - protein, 238 aa, Dehalococcoidia bacterium
  misc_feature (1)..(238): tr|A0A523UQ67|A0A523UQ67_9CHLR 7-carboxy-7-deazaguanine synthase OS=Dehalococcoidia bacterium OX=2026734 GN=qu eE PE=3 SV=1
MVRLLKVSRQPDGRPEIFHSVQGEGVNIGKPAVFLRLGLCNLACTWCDTKYTWDWKEYDPKEQIMEMPLEEVEREILGHNCQYLVVTGGEPMIQQRQLIPLLKSLKNKGFTIEIETNGTIVPTPELANLIDHWSVSPKLGNSGNPQSSREVPQSYRFFGDLPSSHFKYVIQNEDDFAEVQSLIQKYNLAPERTILMPEAQNRSVLLERSRWLVELCKSQGCLFSTRLQILLWGSRRGV

SEQ ID NO: 29571 - protein, 235 aa, Dehalococcoidia bacterium
  misc_feature (1)..(235): tr|A0A2E9LJ16|A0A2E9LJ16_9CHLR 7-carboxy-7-deazaguanine synthase OS=Dehalococcoidia bacterium OX=2026734 GN=qu eE PE=3 SV=1
MLKVSRRSGGEPEIFHSVQGEGVSLGVPSVFLRLATCNLACRWCDTKYTWDWENFDYQTEVSELDPASVQQKIQAFDCSHVVITGGEPMLQQSELLPLVESLAEEGYTFEVETNGTIVPMPEILRHIKQWNVSPKLSTSGNLLEEAQIPLALQTFAALPKAYFKFVVAVESDVDEVCALRDRYRIPPERVLLMPEGRTPEALARKSAWLPELCLKHGFRFTTRLHIILWGDERGR

SEQ ID NO: 29572 - protein, 230 aa, Deinococcus actinosclerus
  misc_feature (1)..(230): tr|A0A0U4APK6|A0A0U4APK6_9DEIO 7-carboxy-7-deazaguanine synthase OS=Deinococcus actinosclerus OX=1768108 GN=qu eE PE=3 SV=1
MKYPVYERFYTWQGEGVHLGRAAYFIRLYGCPQACPWCDSAGTWHRDYRPDGVTLMDADELAEVVRTESPDGAVVVVTGGEPILFDLAPLTDALHAQGRRVHIETSGIAPLRGALDWVTLSPKPFGQPPLPEVVARADEVKIIVHDPGDIQAGLDTLTGLPEKAVIWLHPEWSKARERDLTVLNAITQAVKDNPRLRAGYQMHKLYRADDLDAHSDKRLIPLGGNVELGY

SEQ ID NO: 29573 - protein, 230 aa, Deinococcus actinosclerus
  misc_feature (1)..(230): tr|A0A2Z3YYA0|A0A2Z3YYA0_9DEIO 7-carboxy-7-deazaguanine synthase OS=Deinococcus actinosclerus OX=1768108 GN=qu eE PE=3 SV=1
MKYPVYEQFYTWQGEGVHLGRAAYFIRLYGCPQACPWCDSAGTWHRDYRPEGVTLMDADELAEVVRHESPDGAVVVVTGGEPILFDLAPLTDALHALGRRVHIETSGIASLRGGLDWVTLSPKPFGQPPLPDVVARADEVKIIVHEPGDIQAGLDTLTGLPENAVIWLHPEWSKARERDLTVLNAITQAVKENPRLRAGYQMHKLYRADDLDAHSDKRLIPLGGNAALGY

SEQ ID NO: 29574 - protein, 230 aa, Deinococcus cellulosilyticus
  misc_feature (1)..(230): tr|A0A511N0N9|A0A511N0N9_9DEIO 7-carboxy-7-deazaguanine synthase OS=Deinococcus cellulosilyticus NBRC 106333 = KACC 11606 OX=1223518 GN=queE PE=3 SV=1
MKYPVYERFYTWQGEGVHLGRAAYFIRLYGCPQKCFWCDSAGTWHPEYRPPQVGLYSAQELADFVVQESPDGAVVVVTGGEPILFDLTELVERLHAAGRRVHLETSGIAPLKGGIDWVTLSPKPFGMPPLREVVELTDEVKIIVHDLSDIQAGLKVLEGLPDDAVIWLHPEWSKAREKDMTVLNAITQAVKENPRLRAGYQMHKAYRADDLDPHSDKRQIPLGGNPELGV

SEQ ID NO: 29575 - protein, 230 aa, Deinococcus deserti
  misc_feature (1)..(230): tr|C1CXM5|C1CXM5_DEIDV 7-carboxy-7-deazaguanine synthas e OS=Deinococcus deserti (strain VCD115 / DSM 17065 / L MG 22923) OX=546414 GN=queE PE=3 SV=1
MKYPVFERFYTWQGEGVHLGRAAYFVRLYGCPQECPWCDSAGTWHKDYRPAGVQLMTPEAIAACVAQESPEGAVVVITGGEPILFDLTPLVEALHGLGRRVHLETSGIAPLRGAIDWVTLSPKPFGTLPLPSVVQQAHEVKIIVHDTSDIRDGLATLDGLKDDAVIWLHPEWSKARERDAAVLNAITEAVKANPRLRAGYQMHKLYRADDLDAGSDKRPIPLGGNPQLGY

SEQ ID NO: 29576 - protein, 230 aa, Deinococcus gobiensis
  misc_feature (1)..(230): tr|H8GTZ2|H8GTZ2_DEIGI 7-carboxy-7-deazaguanine synthas e OS=Deinococcus gobiensis (strain DSM 21396 / JCM 1667 9 / CGMCC 1.7299 / I-0) OX=745776 GN=queE PE=3 SV=1
MKYPVYERFYTWQGEGVHLGRAAYFIRLYGCPQACPWCDSAGTWHRDYRPEGVTLMSAEELAQAVRAESPDGAFVVVTGGEPILFDLAPLTGALHALGRRVHIETSGIAPLRGDLDWVTLSPKPFGQWPLPEVVARADEVKLIVHEPGDIRAGLETLEGLRKDAVLWLHPEWSKARERDAGVLNAITEAVKDDPRLRAGYQMHKLYRADDLDVRSDKRLIPLGGNPGLGY

SEQ ID NO: 29577 - protein, 230 aa, Deinococcus grandis
  misc_feature (1)..(230): tr|A0A100HGC3|A0A100HGC3_9DEIO 7-carboxy-7-deazaguanine synthase OS=Deinococcus grandis OX=57498 GN=queE PE=3 SV=1
MKYPVYERFYTWQGEGVHLGRAAYFIRLYGCPQACPWCDSAGTWHRDYRPDGVTLMGADELAEVVRAESPDGAVVVVTGGEPILFDLNPLTDALHALGRRVHIETSGIAPLRGELDWVTLSPKPFGQPPLPEVVALADEVKIIVHDPGDIQAGLDTLTGLREDAVIWLHPEWSKARERDLSVLNAITQAVKENPRLRAGYQMHKLYRADDLDAHSDKRLIPLGGNAALGY

SEQ ID NO: 29578 - protein, 230 aa, Deinococcus indicus
  misc_feature (1)..(230): tr|A0A246BEU4|A0A246BEU4_9DEIO 7-carboxy-7-deazaguanine synthase OS=Deinococcus indicus OX=223556 GN=queE PE=3 SV=1
MKYPVYERFYTWQGEGVHLGRAAYFIRLYGCPQACPWCDSAGTWHRDYRPDGVTLMGADELAEVVRAESPDGAVVVVTGGEPILFDLNPLTDALHALGRRVHIETSGIAPLRGALDWVTLSPKPFGQPPLPEVVARADEVKIIVHEPGDIQAGLDTLSGLPQDAVIWLHPEWSRARERDLGVLNAITQAVKENPRLRAGYQMHKLYRADDLDAHSDKRLIPLGGNAALGY

SEQ ID NO: 29579 - protein, 230 aa, Deinococcus maricopensis
  misc_feature (1)..(230): tr|E8U3S4|E8U3S4_DEIML 7-carboxy-7-deazaguanine synthas e OS=Deinococcus maricopensis (strain DSM 21211 / LMG 2 2137 / NRRL B-23946 / LB-34) OX=709986 GN=queE PE=3 SV= 1
MKYPVYERFYTWQGEGVHLGRAAYFVRLYGCPQACPWCDSAGTWHRDYRPDGVTLMTAHEIAQAVAAESPDGAVVVITGGEPILFDLTALVDALHALGRRVHLETSGIAPLRGHLDWVTLSPKPFGTPPLPEVVQRAHEVKIIVHDPSDIDAGLATLDGLPDDAVIWLHPEWSRARERDPAVLNAITETVKASPRLRAGYQMHKLYRADDLDARSVKTLIPLGGNPTLGY

SEQ ID NO: 29580 - protein, 230 aa, Deinococcus peraridilitoris
  misc_feature (1)..(230): tr|L0A1U6|L0A1U6_DEIPD 7-carboxy-7-deazaguanine synthas e OS=Deinococcus peraridilitoris (strain DSM 19664 / LM G 22246 / CIP 109416 / KR-200) OX=937777 GN=queE PE=3 S V=1
MKYPVHERFYTWQGEGVHLGRAAYFVRLYGCPQACPWCDSAGTWHTEFRPERVSLMTPREIAAGVERESPSGAVVVVTGGEPILFDLAPLVGELHALGRAVHLETSGIAELRGEIDWVTLSPKPFGTWPLPSVVARTDEVKIIVHDVLDIDAGLRTLSGLRDDAVIWLHPEWSKARDRDRRVLNAITEAVKQNPRLRAGYQMHKLYRADDLDANSVKTLIPLGGNPELGY

SEQ ID NO: 29581 - protein, 285 aa, Deinococcus proteolyticus
  misc_feature (1)..(285): tr|F0RP02|F0RP02_DEIPM 7-carboxy-7-deazaguanine synthas e OS=Deinococcus proteolyticus (strain ATCC 35074 / DSM 20540 / JCM 6276 / NBRC 101906 / NCIMB 13154 / VKM Ac- 1939 / CCM 2703 / MRP) OX=693977 GN=queE PE=3 SV
MSTGSESPLPAKRGVNEVAGHPAAEGESKGLSVEGSKGDAVLDSSTLRPLDAAKQPKYPVYERFYTWQGEGVHLGRAAYFIRLYGCPQHCPWCDSAGTWHPEYRPESVGLMDAQALADAVAAESPAGAVVIITGGEPILFDLAPLTDALHAIGRRVHIETSGIAPLRGELDWVTLSPKPTQKWPLPEVVAHADEVKIIVHEPQDIAAGLATLDGLRDDAVIWLHPEWSRAREREMRVLNAITEAVKADPRLRAGYQMHKLYRADDLDEHSDKRLIPLGGNERLGY

SEQ ID NO: 29582 - protein, 243 aa, Deinococcus radiophilus
  misc_feature (1)..(243): tr|A0A3S0JX72|A0A3S0JX72_9DEIO 7-carboxy-7-deazaguanine synthase OS=Deinococcus radiophilus OX=32062 GN=queE P E=3 SV=1
MSTGSKAEVRSSSTKYPVYERFYTWQGEGVHLGRAAYFIRLYGCPQHCPWCDSAGTWHPEYRPESVGLMDAAALAEAVAAESPDGAVVIITGGEPILFDLVPLTDALHALGRRVHIETSGIAPLRGDLDWMTLSPKPSQKWPLPAVVARADEVKIIVHDPEDIQAGLDTLGGLRQDAVIWLHPEWSRARERDMRVLNAITEAVKANPRLRAGYQMHKLYRADNLDQHSDKRLIPLGGDTALGY

SEQ ID NO: 29583 - protein, 230 aa, Deinococcus soli
  misc_feature (1)..(230): tr|A0A0F7JQV1|A0A0F7JQV1_9DEIO 7-carboxy-7-deazaguanine synthase OS=Deinococcus soli Cha et al. 2016 OX=130941 1 GN=queE PE=3 SV=1
MKYPVYERFYTWQGEGVHLGRAAYFIRLYGCPQACPWCDSAGTWHRDYRPDGVTLMDTDELAEVVRNESPDGAVVVVTGGEPILFDLKPLTDALHALGRRVHLETSGIAPLRGDLDWVTLSPKPFGQPPLPEVVAVADEVKIIVHEPGDIQAGLDTLTGLPDEAVIWLHPEWSKARERDLKVLNAITQAVKENPRLRAGYQMHKLYRADDLDAHSDKRLIPLGGNAELGY

SEQ ID NO: 29584 - protein, 230 aa, Deinococcus sp.
  misc_feature (1)..(230): tr|A0A418RE86|A0A418RE86_9DEIO 7-carboxy-7-deazaguanine synthase OS=Deinococcus sp. RM OX=2316359 GN=queE PE=3 SV=1
MKYPVYERFYTWQGEGVHLGRAAYFIRLYGCPQSCPWCDSAGTWHRDYRPDSVTLMDADELAEVVRNESPDGAVVVVTGGEPILFDLAPLTDALHALGRRVHIETSGIAPLRGELDWVTLSPKPFGQLPLPEVVPLADEVKIIVHEPGDIQAGLDTLTGLPQDAVIWLHPEWSRARERDLGVLNAITQAVKENPRLRAGYQMHKLYRADDLDAHSDKRLIPLGGNAPLGY

SEQ ID NO: 29585 - protein, 230 aa, Deinococcus sp.
  misc_feature (1)..(230): tr|A0A1T1B6K4|A0A1T1B6K4_9DEIO 7-carboxy-7-deazaguanine synthase OS=Deinococcus sp. LM3 OX=1938608 GN=queE PE= 3 SV=1
MKYPVYERFYTWQGEGVHLGRAAYFIRLYGCPQACPWCDSAGTWHRDYRPDGVTLMSADELADVVRAESPEGAVVVVTGGEPILFDLAPLTDALHALGRRVHIETSGIAPLRGELDWVTLSPKPFGQPPLPEVVVLADEVKIIVHEPGDIQAGLDTLTGLPDGAVIWLHPEWSRARERDLTVLNGITQAVKENPRLRAGYQMHKLYRADDLDAHSDKRLIPLGGNAELGY

SEQ ID NO: 29586 - protein, 230 aa, Deinococcus yavapaiensis
  misc_feature (1)..(230): tr|A0A318SFL0|A0A318SFL0_9DEIO 7-carboxy-7-deazaguanine synthase OS=Deinococcus yavapaiensis KR-236 OX=694435 GN=queE PE=3 SV=1
MKLPVYERFYTWQGEGVHLGRAAYFVRLYGCPQACPWCDSAGTWHKDYRPQGVVLMAPREIAGCVEQDSPPGAVVVVTGGEPILFDLTELVRELHALGRRVHLETSGIAELRGDLDWVTLSPKPFGQLPVRSVVARADEVKIIVHDVSDIKAGLDTLEGLRDDAVIWLHPEWSKARERDAAVLNAITEAVKANPRLRAGYQMHKLYRADDLDAHSDKRLIPLGGNVELGY

SEQ ID NO: 29587 - protein, 212 aa, Delftia acidovorans
  misc_feature (1)..(212): tr|A0A2W5IZ56|A0A2W5IZ56_DELAC 7-carboxy-7-deazaguanine synthase OS=Delftia acidovorans OX=80866 GN=queE PE=3 SV=1
MTYSVKEIFYTLQGEGGQAGTPAIFCRFAGCNLWTGREQDRASAICQFCDTDFVGTDGTLGGKFATADALAERILSQWPAGDSRHRMVVLTGGEPLLQVDEPLIAALHARGFRISVESNGTVAAPEGIDWLCISPKAGADWVQRSGQELKLVWPQPGFDLQAIEAGTRFDHYFLQPMDNVLQADNTAACIAQCLQHPAWRLSLQTHKLTGIR

SEQ ID NO: 29588 - protein, 212 aa, Delftia acidovorans
  misc_feature (1)..(212): tr|S2WFA7|S2WFA7_DELAC 7-carboxy-7-deazaguanine synthas e OS=Delftia acidovorans CCUG 15835 OX=883100 GN=queE P E=3 SV=1
MTYSVKEIFYTLQGEGGQAGTPAVFCRFAGCNLWTGREQDRASAICQFCDTDFVGTDGTLGGKFATADALAERILSQWPAGDSRHRMVVLTGGEPLLQVDAPLIAALHARGFRISVESNGTVAAPEGIDWLCISPKAGADWVQRSGQELKLVWPQPGFDLQAIEAGTRFDHYFLQPMDNVLQADNTAACIAQCLQHPAWRLSLQTHKLTGIR

SEQ ID NO: 29589 - protein, 212 aa, Delftia lacustris; identical to SEQ ID NO: 29588
  misc_feature (1)..(212): tr|A0A1H3RQU3|A0A1H3RQU3_9BURK 7-carboxy-7-deazaguanine synthase OS=Delftia lacustris OX=558537 GN=queE PE=3 S V=1

SEQ ID NO: 29590 - protein, 212 aa, Delftia sp.
  misc_feature (1)..(212): tr|A0A031HLQ0|A0A031HLQ0_9BURK 7-carboxy-7-deazaguanine synthase OS=Delftia sp. RIT313 OX=1468410 GN=queE_2 PE =3 SV=1
MTYSVKEIFYTLQGEGGQAGTPAIFCRFAGCNLWTGREQDRASAICQFCDTDFVGTDGTLGGKFATADALAERILSQWPAGDSQHRMVVLTGGEPLLQVDEPLIAALHARGFRISVESNGTVAAPEGIDWLCISPKAGADWVQRSGQELKLVWPQPGFDLQAIEAGTRFDRYFLQPMDNVLQADNTAACIAQCLQRPAWRLSLQTHKLTGIR

SEQ ID NO: 29591 - protein, 212 aa, Delftia sp.
  misc_feature (1)..(212): tr|A0A081J7Q5|A0A081J7Q5_9BURK 7-carboxy-7-deazaguanine synthase OS=Delftia sp. 670 OX=1537702 GN=queE PE=3 SV =1
MTYSVKEIFYTLQGEGGQAGTPAVFCRFAGCNLWTGREQDRASAICQFCDTDFVGTDGTLGGKFATADALAERILSQWPAGDSRHRMVVLTGGEPLLQVDEPLIAALHARGFRISVESNGTVAAPEGIDWLCISPKAGADWVQRSGQELKLVWPQPGFDLQAIEAGTRFDHYFLQPMDNVLQADNTAACIAQCLQHPAWRLSLQTHKLTGIR

SEQ ID NO: 29592 - protein, 212 aa, Delftia tsuruhatensis
  misc_feature (1)..(212): tr|A0A072T8K8|A0A072T8K8_9BURK 7-carboxy-7-deazaguanine synthase OS=Delftia tsuruhatensis OX=180282 GN=queE PE =3 SV=1
MTYSVKEIFYTLQGEGGQAGTPAVFCRFAGCNLWTGREQDRASAICQFCDTDFVGTDGTLGGKFATADALAERILSQWPAGDSRHRMVVLTGGEPLLQVDAPLIAALHARGFRISVESNGTVAAPEGIDWLCISPKAGADWVQLSGQELKLVWPQLGFDLQAIEADTRFDHYFLQPMDNILQADNTAACIAQCLQHPAWRLSLQTHKLTGIR

SEQ ID NO: 29593 - protein, 212 aa, Delftia tsuruhatensis; identical to SEQ ID NO: 29588
  misc_feature (1)..(212): tr|A0A1D8J1N8|A0A1D8J1N8_9BURK 7-carboxy-7-deazaguanine synthase OS=Delftia tsuruhatensis OX=180282 GN=queE PE =3 SV=1

SEQ ID NO: 29594 - protein, 228 aa, Unknown
  misc_feature (1)..(228): tr|A0A1V4ME53|A0A1V4ME53_9DELT 7-carboxy-7-deazaguanine synthase OS=delta proteobacterium ML8_D OX=1775672 GN= queE PE=3 SV=1
MRRINQQSTINNQRFSKSLSVSETFVSLQGEGVWTGWPCFFIRLAGCNLRCTYCDTQYAYNSGEKRDIESLLDEWRQAGVGLVQVTGGEPLLQSGTYVLLEALLNEGARVLLETNGSLGLKNVPREVIKIVDRKTPGSAMEEFFLEENLGWLKQGDQLKFVITARDDYEWAREEVVRLRLSCYTEVLFSPAWGGLAPFQLAEWIIADRLSVRFQIQLHKILWGEKRGI

SEQ ID NO: 29595 - protein, 224 aa, Unknown
  misc_feature (1)..(224): tr|Q1NNH0|Q1NNH0_9DELT 7-carboxy-7-deazaguanine synthas e OS=delta proteobacterium MLMS-1 OX=262489 GN=queE PE= 3 SV=1
MTQPASLLLSEIFYSIQGESTLAGYPCLFIRLAGCNLRCSYCDARYTYEEPGQSYSLEGVLKAMAEVGPGGRPVELVEITGGEPLLQEGVYPLLDVLLARGHQVLLETNGTRSLARLPAAVRCIMDIKCPASGMAAHLMPENLHRLTGDDEIKFVISDRADYDWAKALLNHHQLTGLGPTLSFSPVTDRLAAADLAAWLLADALPARLQLQLHTLLWPHQQRGC

SEQ ID NO: 29596 - protein, 215 aa, Deltaproteobacteria bacterium
  misc_feature (1)..(215): tr|A0A2D4RSF0|A0A2D4RSF0_9DELT 7-carboxy-7-deazaguanine synthase OS=Deltaproteobacteria bacterium OX=2026735 G N=queE PE=3 SV=1
MTVIKNIQEIIPLTIQGEGFHAGRSCSFIRLFGCPVGCWFCDTGYAPRDREDLNKLTRESIDYESLREQLQSRYVVISGGEPLYHQDFEELLERLVGDDFEVAVETSGAKAFPFEKFPQVWVTFSPKLHATEYPKDLLSPTFWSHSQEIKVVISRANDLEAYEQLLDQAAQHGIPIYLQPEWSKKGEATPLILKVLRHKPDWKISVQLHKYLQLP

SEQ ID NO: 29597 - protein, 182 aa, Deltaproteobacteria bacterium
  misc_feature (1)..(182): tr|A0A2N2HHH9|A0A2N2HHH9_9DELT 7-carboxy-7-deazaguanine synthase (Fragment) OS=Deltaproteobacteria bacterium H GW-Deltaproteobacteria-20 OX=2013748 GN=queE PE=4 SV=1
MTYQVKACFRSLQGEGAQAGRVTVFCRLSGCNLWSGRPQDRERASCRFCDTDFVGSDGPGGGSFGSADGLAGHIASVWGEGVERDERRYVVFTGGEPLLQLDEPLIRACHALGFEVGVETNGTLGCPPGLDWVCVSPKAEAPLVQTSGDELKLVYPQGQLDPRLFEAMGFRTFSLQPCDGPG

SEQ ID NO: 29598 - protein, 244 aa, Dendrosporobacter quercicolus
  misc_feature (1)..(244): tr|A0A1G9M0M2|A0A1G9M0M2_9FIRM 7-carboxy-7-deazaguanine synthase OS=Dendrosporobacter quercicolus OX=146817 GN =queE PE=3 SV=1
MKDVVDLVEVFSSIQGEGKYVGCRQLFVRLAGCNLQCDYCDTPHSYVAAEHCRIEQTAGKRDFSNSANPVKVTALALAVNQMLRQPHHSVSLTGGEPLCQAEALQQLAAQINGRVYLETNGTLPQALKQVLPYIDIISMDIKLPKTTGRVLWREHSEFLSLARAKDVFVKLVIEEGMDIRHFDQAVKLIADIGRDILLVLQPVSPLNGCKAIVPEKIIEVHNRALLRLENVRVIPQTHKFIGQL

SEQ ID NO: 29599 - protein, 240 aa, Denitratisoma sp.
  misc_feature (1)..(240): tr|A0A518UEA9|A0A518UEA9_9PROT 7-carboxy-7-deazaguanine synthase OS=Denitratisoma sp. DHT3 OX=1981880 GN=queE PE=3 SV=1
MPEQRSRQESQAATQEKVVAADLSAKLRITEVFHSIQGESTRVGLPTVFIRLSGCPLRCTWCDTEYAFTGGETMSVGEVLERVAALGGVAACPTVCVTGGEPLAQKGCPDLLSALCDAGYSVSLETSGALDIAAVDARVSRIMDLKAPGSGEAARNRWENLESLTPRDELKLVLASREDYDWAKRQLAEHRLATRCPVLFSPVQGRLAPAQLAQWILDDRLPVRFQLQLHKILWQDAKGR

SEQ ID NO: 29600 - protein, 219 aa, Denitromonas halophilus
  misc_feature (1)..(219): tr|A0A557QXS1|A0A557QXS1_9RHOO 7-carboxy-7-deazaguanine synthase OS=Denitromonas halophilus OX=1629404 GN=queE PE=3 SV=1
MSTRQTVTRLRVTEIFASVQGEASRAGLPTVFVRLTGCPLRCVWCDTEYAFNGGQTRDLSTILDEIASHGLHHICVTGGEPLAQKGCLDLLTALCDAGYDVSLETSGALDIATVDPRVSRIMDLKAPGSGEADKNRWDNLPQLTARDELKIVIANADDYAWACEQLTTHALAARCPVLFSPVAGELAPADLAEWIVRDRLPVRFQMQLHKVLWADARGK

SEQ ID NO: 29601 - protein, 219 aa, Denitromonas halophilus
  misc_feature (1)..(219): tr|A0A558C9A1|A0A558C9A1_9RHOO 7-carboxy-7-deazaguanine synthase OS=Denitromonas halophilus OX=1629404 GN=queE PE=3 SV=1
MSTRQTVTRLRVTEIFASVQGEASRAGLPTVFVRLTGCPLRCVWCDTEYAFNGGQTRDLSTILDEIASHGLHHICVTGGEPLAQKGCLDLLTALCDAGYDVSLETSGALDIATVDPRVSRIMDLKAPGSGEADKNRWDNLPQLTARDELKIVIANADDYAWACDQLKTHALATRCPVLFSPVAGELAPADLAEWIVRDRLPVRFQMQLHKVLWADARGK

SEQ ID NO: 29602 - protein, 205 aa, Desertifilum sp.
  misc_feature (1)..(205): tr|A0A1E5QL15|A0A1E5QL15_9CYAN 7-carboxy-7-deazaguanine synthase OS=Desertifilum sp. IPPAS B-1220 OX=1781255 G N=queE PE=3 SV=1
MPSIEQTIVTYPIVESFHSVQGEGYWTGTNAFFIRLAGCDVHCPWCDTKLSWKASRHPQQSVIELGKLAASVNPAIVVVTGGEPLMHDLTALTEALRAHSLQVNLETSGAHPLSGQFDWITLSPKTFLPPKPSIYPHVNELKVVIANPKDLEWATLQQSLVPESAFKYLQPEWNSRQSQKLVFDYVLQHPEWRISLQTHKFLGIQ

SEQ ID NO: 29603 - protein, 242 aa, Desmospora activa
  misc_feature (1)..(242): tr|A0A2T4Z6W2|A0A2T4Z6W2_9BACL 7-carboxy-7-deazaguanine synthase OS=Desmospora activa DSM 45169 OX=1121389 GN= queE PE=3 SV=1
MNKGWNLPEPSVYRQWKLPMVEVFETVEGEGTAAGWPTVFVRVFHCNLRCSWCDTPYSYAPAQPEYEATVGEIAAEAHRYASHRICFTGGEPLMHREKSAALLEALACPEKIEDVHIETNGAIDLTPFDALRRERPWGEKVRFIMDWKLPRSKEESRMLVDNFNCLTQRDEVKLVIADEQDFRAAVDVINRHYQRGQILFSPVFETLPPRTLVEWVLAEPLPHVRVNLQLHKFIWDPAERGV

SEQ ID NO: 29604 - protein, 242 aa, Desmospora sp.
  misc_feature (1)..(242): tr|F5SDQ9|F5SDQ9_9BACL 7-carboxy-7-deazaguanine synthas e OS=Desmospora sp. 8437 OX=997346 GN=queE PE=3 SV=1
MNNWELPQPAEYRAWKLPMVEIFETVEGEGNGAGYPTVFIRVFHCNLRCTWCDTPYSYAPARPEFEATIEEILEWVRRYPSRRICLTGGEPLMHREKSAALLAALADLNQVEDVHVETNGAIDLAPFDRLRKEGGKQREKIRFIMDYKLPASGEEHRMVRDNFRVLTDRDEVKFVIGDQEDFRAAVRVVQECHREGQILFSPVFETLPPRKLVEWVLAEPLPQVKVSLQLHKWIWDPAERGV

SEQ ID NO: 29605 - protein, 219 aa, Desulfallas geothermicus
  misc_feature (1)..(219): tr|A0A1I6D587|A0A1I6D587_9FIRM 7-carboxy-7-deazaguanine synthase OS=Desulfallas geothermicus DSM 3669 OX=11214 26 GN=queE PE=3 SV=1
MSRLPVCEIFGPTIQGEGLYSGHRTMFIRMAGCDYRCSWCDTQYAQSVSQAQQLLSEEEIVHLVNKRSCGGSRRVTVTGGNPCIHDLDKLIGLLHQENYVIHIETQGSIIPPWLYNADHVCLSPKPPSSGNVTPVSAFDKFMHSDTSKELKLVVGTEEDYIYAKQIYKQYPSYPFTLQACTKEDPLPVLKWLIEYATADPDWGDNVKVLPQLHVLIGIK

SEQ ID NO: 29606 - protein, 214 aa, Desulfamplus magnetovallimortis
  misc_feature (1)..(214): tr|A0A1W1H7W3|A0A1W1H7W3_9DELT 7-carboxy-7-deazaguanine synthase OS=Desulfamplus magnetovallimortis OX=1246637 GN=queE PE=3 SV=1
MADNILEASEIFHSLQGEGPLAGRPAVFLRLSGCIKPFCPWCDTLYSCHSGSGEKISVENICAKILSYRNDFVVITGGEPFLQWHNGLQILEKSLLDKGCRIQYETSGKVVIPESSKGIKVCSPKYINGSWHFVEDNIKRADFFKFVVSENFRQVKAFVEKHDISREKVWIMPLGACRQEQLALLPSLWEFCVENRFSFSPRLHTLTFDNQRGI

SEQ ID NO: 29607 - protein, 212 aa, Desulfarculus baarsii
  misc_feature (1)..(212): tr|E1QGK4|E1QGK4_DESB2 7-carboxy-7-deazaguanine synthas e OS=Desulfarculus baarsii (strain ATCC 33931 / DSM 207 5 / VKM B-1802 / 2st14) OX=644282 GN=queE PE=3 SV=1
MLEVCEIFQSIQGEGVDAGLPCAFVRLAGCPLRCAWCDTAYAWQGGAAMSLPEVLARALAFELELVELTGGEPLAQAETPALLGALCDAGRRVLVETSGALDIAVVDERVHLIMDVKCPGSGMSERMRWRNLDILPPGAQVKFVLADRADYEFARRVIDAHGLGHRARPLLSVVHGRLAPAKVVEWMLADRLPARFQLQLHKFIWPPEARGV

SEQ ID NO: 29608 - protein, 213 aa, Desulfarculus sp.
  misc_feature (1)..(213): tr|A0A3A6P3V8|A0A3A6P3V8_9DELT 7-carboxy-7-deazaguanine synthase OS=Desulfarculus sp. OX=2093367 GN=queE PE=3 SV=1
MRLEICEIFLSIQGESSFAGLPCAFVRTAGCPLDCRWCDTEYAKLPGRIMDLGAIVALVQEMGVNLVELTGGEPLVQEAAPQLMSLLLQRGHTVLLETSGAFDLSPVPRDVHVIMDIKCPSSGMAGRMLWPNLKLLLPHHQVKFVISDRADYEYARHLIREHRLIERVQVLLSVVAGRLDPRQAVQWMLEDRLPVRFQLQLHKYIWPPDMRGV

SEQ ID NO: 29609 - protein, 215 aa, Desulfatibacillum aliphaticivorans
  misc_feature (1)..(215): tr|B8FMW5|B8FMW5_DESAL 7-carboxy-7-deazaguanine synthas e OS=Desulfatibacillum aliphaticivorans OX=218208 GN=qu eE PE=3 SV=1
MALDVCEIFYGIQGESTYQGMPCVFIRLSGCNLRCRWCDTGYAYDAGLTMSISEIMEKAGQFGCPIVEVTGGEPLLQKETPALVDAFLNIGLLVLLETNGSQDIAKVDSRCIRIVDVKCPSSGMEEHNDYSNLSRMTEKDELKFVIASREDYEFARKRVRLLDFDGCRMNAIHFSPVFGELDPKTLAEWILQDRLEVRLHLQMHKFIWGKDARGV

SEQ ID NO: 29610 - protein, 215 aa, Desulfatibacillum alkenivorans
  misc_feature (1)..(215): tr|A0A1M6MMN2|A0A1M6MMN2_9DELT 7-carboxy-7-deazaguanine synthase OS=Desulfatibacillum alkenivorans DSM 16219 O X=1121393 GN=queE PE=3 SV=1
MALDVCEIFYGIQGESTYQGMPCVFIRLSGCNLRCRWCDTGYAYDAGLTMSISEIMDKAGQFGCPIVEVTGGEPLLQKETPALVDAFLNIGLLVLLETNGSQDIAKVDSRCIRIVDVKCPSSGMEEYNDYSNLSRMTEKDELKFVIANREDYDFARKRVRLLDFDGCRMNAIHFSPVFGELDPKTLAEWILQDRLEVRLHLQMHKFIWGKDARGV

SEQ ID NO: 29611 - protein, 214 aa, Desulfatitalea sp.
  misc_feature (1)..(214): tr|A0A0F2QVH6|A0A0F2QVH6_9DELT 7-carboxy-7-deazaguanine synthase OS=Desulfatitalea sp. BRH_c12 OX=1629708 GN=q ueE PE=3 SV=1
MALIINEIFHSLQGESSWTGLPFTFVRLTGCNLRCRYCDTEYAYTEGAPWPVDAVVAHVKTFGCPRVTITGGEPLMQSQTPALISALIETGFLVTLETNGSLDIGHLDRRCIKIVDFKGPSSGMQDHNRWSNVDCLSAEDQVKFVIADKGDFDFARAAATDLLKKIPAGHILFSAAHPLLPVDKLARWILDAHVEARLQIQLHKYIWPTVPRGV

SEQ ID NO: 29612 - protein, 197 aa, Desulfitobacterium metallireducens
  misc_feature (1)..(197): tr|W0EG76|W0EG76_9FIRM 7-carboxy-7-deazaguanine synthas e OS=Desulfitobacterium metallireducens DSM 15288 OX=87 1968 GN=queE PE=3 SV=1
MSIQYPIIESFTSIQGEGMHMGKGATFIRVAGCNLRCRWCDTSYSFDPSKARLMSAQEIVDEIPMPHQHIVITGGEPTLYDLGPLVYELHKLGKYVAIETNGTNPIPVEWGIDWVTASPKPGSGFALACSADELKYVVDDEFSIEYITDHEMIEGRIFLQVESGRPESAQKAYDLIQRFPERRLRLGIQLHKFLNVR

SEQ ID NO: 29613 - protein, 213 aa, Desulfobacca acetoxidans
  misc_feature (1)..(213): tr|F2NDB6|F2NDB6_DESAR 7-carboxy-7-deazaguanine synthas e OS=Desulfobacca acetoxidans (strain ATCC 700848 / DSM 11109 / ASRB2) OX=880072 GN=queE PE=3 SV=1
MALRVCETFISIMGEASFAGLPGFFIRLSGCNLRCRYCDTTYAYAEGVERSLASLLGEAGASGYRLVLVTGGEPLLQEECLVLLSALVERGFTVLLETNGSRPLEAVDPRVHRIIDLKCPGSGMAQHNYLKNLDYLTEKDELKFVVSNRRDFDWAMQVMAASRIWERCTVLFSPVFGLLPPSELAAWILATRLPLRLNLQLHKYIWGPDVKGM

SEQ ID NO: 29614 - protein, 213 aa, Desulfobacca sp.
  misc_feature (1)..(213): tr|A0A1F9P772|A0A1F9P772_9DELT 7-carboxy-7-deazaguanine synthase OS=Desulfobacca sp. RBG_16_60_12 OX=1797909 G N=queE PE=3 SV=1
MPLVICETFASLMGESTRAGAPAYFIRLTGCNLRCRYCDTAYAYEGGQPMTTAALVEMALAQPHRLVLVTGGEPLLQDETPALLTALLEAGFTTCLETNGSRPIGALDARVHRILDLKCPGSAMAQHNDWRNLDLLNPRDEVKFVVSHQSDFTWALEVIGRHGLAQRLPVLISPVFGQVELKEAAAWILESRLPLRLNPQLHKYIWGPGVRGI

SEQ ID NO: 29615 - protein, 214 aa, Desulfobacter hydrogenophilus
  misc_feature (1)..(214): tr|A0A328FGU2|A0A328FGU2_9DELT 7-carboxy-7-deazaguanine synthase OS=Desulfobacter hydrogenophilus OX=2291 GN=q ueE PE=3 SV=1
MPLNICEIFYSLQGESTRAGLACVFVRLSGCNLSCSWCDTTYAATQSVSMTLNQIVDQVSAFECPMVEITGGEPLIQSQTPALISALLEKGFQVLLETNGSLSIAPVDPACIRIMDVKCPLSGEAGSFLFDNFKHMTSRDEIKFVVGSRQDYEYAASIIKTRLVSHPIENIHICPVFGRIELSDLAAWILEDRLGARLSLQQHKIIWDPDLRGV

SEQ ID NO: 29616 - protein, 214 aa, Desulfobacter postgatei
  misc_feature (1)..(214): tr|I5AYH9|I5AYH9_9DELT 7-carboxy-7-deazaguanine synthas e OS=Desulfobacter postgatei 2ac9 OX=879212 GN=queE PE= 3 SV=1
MSLEICEIFYSLQGESTRAGLACVFVRLSGCNLSCSWCDTTYAAVQPVSMTIDQIVGRVAAFECPMVEITGGEPLIQTQTPALISALLEKGFQVLLETNGSLSIASVDRACIRIMDVKCPSSGEAGSFLLDNLNHMTARDEIKFVVGSRQDYEYAASFIKTHLVNHPREKVHICPVFEAIELSDLAAWILKERLGARLSLQQHKIIWDPDLRGV

SEQ ID NO: 29617 - protein, 214 aa, Desulfobacter sp.
  misc_feature (1)..(214): tr|A0A357YRR8|A0A357YRR8_9DELT 7-carboxy-7-deazaguanine synthase OS=Desulfobacter sp. OX=2294 GN=queE PE=3 SV= 1
MSLEICEIFYSLQGESTRAGLTCVFVRLSGCNLSCSWCDTTYAAVQPVSMTIDQIVGRVAAFECPMVEITGGEPLIQTQTPALISALLEKGFQVLLETNGSLSIASVDPACIRIMDVKCPSSGEAGSFLLDNFNHMTARDEIKFVVGSRQDYEYAASFIKAHLVNHPREKVHICPVFETIELSDLAAWILKDRLGARLSLQQHKIIWDPDLRGV

SEQ ID NO: 29618 - protein, 214 aa, Desulfobacter sp.
  misc_feature (1)..(214): tr|A0A2D6ETG4|A0A2D6ETG4_9DELT 7-carboxy-7-deazaguanine synthase OS=Desulfobacter sp. OX=2294 GN=queE PE=3 SV= 1
MTLRVNEIFYSIQGESLYAGCPCVFIRLSGCNLRCSYCDTRYAYHQGVEMGIVEILNRVDPYKSNLVEITGGEPLIQSGTPPLIEYLLVAGYKVMMETNGTLDIRLADDRCIKVMDIKCPSSGEVEKNDLKNLQRLKTEDQLKFVIGDRNDYEFAKEIKGLLNNEFPADHVLFSTIYEKMAPTRLAKWIIEDRLQVRLQVQLHKILWPERDRGV

SEQ ID NO: 29619 - protein, 259 aa, Desulfobacteraceae bacterium
  misc_feature (1)..(259): tr|A0A1W9UVS5|A0A1W9UVS5_9DELT 7-carboxy-7-deazaguanine synthase OS=Desulfobacteraceae bacterium 4572_35.2 OX= 1971628 GN=queE PE=3 SV=1
MCGSQITLVRVTHVTKLPLIEMFSSVQGEGPLVGRRQVFLRFAGCNLACAYCDTPFVPTASCRVETAPGSETFTLWDNPIDVHQVVNCVHGWLADLPQAHHSFSITGGEPLLHVDALVQWLPQLSQLLPLQLETNGTLTESLRSVLPWLRWVVMDFKLESQTGEPTPWNEHRQFLQLAAQVNCCVKIVVGAETPIEELQRAADIVADVARHVPVILQPRTIAGRCSVAGAQLIAWQGVLSGAGLDVRVIPQTHCYLAVL

SEQ ID NO: 29620 - protein, 214 aa, Desulfobacteraceae bacterium
  misc_feature (1)..(214): tr|A0A1W9TXN0|A0A1W9TXN0_9DELT 7-carboxy-7-deazaguanine synthase OS=Desulfobacteraceae bacterium 4572_187 OX=1 971620 GN=queE PE=3 SV=1
MTLLVNEIFYSIQGESTHSGRPCIFVRLTGCNLRCSYCDTRYAYEQGVKMDLTEIMTRIAAYMCPLVEITGGEPLLQSDTPILISKLLENGYEVLMETNGSLDISSIDGRCIKIVDIKCPTSDESEKNDMENLKRLGPKDQVKFVIENRIDYEYAKETIDFNCPDFPEEQILFSPVSEEIAPAQLAEWILEDNLNVRLNLQIHKIIWPSSERGV

SEQ ID NO: 29621 - protein, 215 aa, Desulfobacterales bacterium
  misc_feature (1)..(215): tr|A0A1V1WZC2|A0A1V1WZC2_9DELT 7-carboxy-7-deazaguanine synthase OS=Desulfobacterales bacterium S7086C20 OX=18 69302 GN=queE PE=3 SV=1
MGLKVNEIFHSIQGESSYAGRRCVFIRLTGCNLRCSYCDTKYAYKGGKELAIEEIVGQVASHQCPLVEVTGGEPLIQEETPHLIHRLLDDGYEVLMETNGSQDISQADDRCVKIVDIKCPSSGEFEQNDMENLDRLIDHDEVKFVIGDRNDFSVAKEILDARTPDFCKKHPVHFSPVFGQIEPKILADWILKDRLNVRLQLQLHKVVWPSDQRGV

SEQ ID NO: 29622 - protein, 214 aa, Desulfobacterales bacterium
  misc_feature (1)..(214): tr|A0A2G9ZUN1|A0A2G9ZUN1_9DELT 7-carboxy-7-deazaguanine synthase OS=Desulfobacterales bacterium CG23_combo_of_ CG06-09_8_20_14_all_52_9 OX=1973984 GN=queE PE=3 SV=1
MTLWVNEIFFSIQGESTYAGLPCAFVRLSGCNLRCTYCDTTYAYDQGKHMTIPEILTELKKWDPLWVEVTGGEPLLQDRTPELIRSLIGEGYRVLLETNGSFDIGRVDPKCIRIVDLKCPSSGESNRIFWQNIDRLTPKDQIKFVIQDRRDYAFAKATLEKIGSRIPYGHRLFSPVQSVLPARDLAEWILQDEIRVRLHLQLHKILWPEDPRGR

SEQ ID NO: 29623 - protein, 214 aa, Desulfobacterium sp.
  misc_feature (1)..(214): tr|A0A1W9U237|A0A1W9U237_9DELT 7-carboxy-7-deazaguanine synthase OS=Desulfobacterium sp. 4572_20 OX=1971621 GN =queE PE=3 SV=1
MLKVNEIFYSIQGESTFAGFPCIFIRLTGCNLRCRYCDTKYAYEEGDDIPVGRILATVKKFDCGLIEVTGGEPLIQNETPDLISALIKNGYTVLLETNGSQDISSVDKRCTRIVDIKCPSSGMDNNNYWKNLDYITLNDQLKFVIANRQDYLYAKKVLDKLDIKRRKKLIINFSPVFNEIVLKDLAGWILADNLPVRLQIQLHKYIWGEHTKGV

SEQ ID NO: 29624 - protein, 209 aa, Desulfobacterium vacuolatum
  misc_feature (1)..(209): tr|A0A1W2A6W6|A0A1W2A6W6_9DELT 7-carboxy-7-deazaguanine synthase OS=Desulfobacterium vacuolatum DSM 3385 OX=11 21400 GN=queE PE=3 SV=1
MMIEVSEIFTSIQGEGPFLGRPASFLRLSKCLPPLCPWCDTRHAWEPGEWISIKTVAAGIVALENKLCVITGGEPYLQWNAGLNFLEKYLIEQGLTVQYETSGKVLIPSDSRGFKVCSPKYLADTWHFIPENTSLAHCFKFVVKDDFTKVNAFIKEHHIPANKVWVMPMGALRHEQLEHSSRIWDFCVKNHYNFSPRLHTLFFNNQQGV

SEQ ID NO: 29625 - protein, 214 aa, Desulfobacula phenolica
  misc_feature (1)..(214): tr|A0A1H2IDN5|A0A1H2IDN5_9DELT 7-carboxy-7-deazaguanine synthase OS=Desulfobacula phenolica OX=90732 GN=queE P E=3 SV=1
MQLNICEIFYSLQGESSFTGLPCIFIRLSGCNLACSWCDTEYANTESHPMTIDQILKKTLSYNCNLVEITGGEPLLQDGTPFLISALLDKNYQVLLETNGSKTIKNISLDCIKIMDIKCPSSNESDSFLPENINFLTKQDEIKFVISSRKDYEFAKAIIDTKLRKISPKKIHLSPVFGQISPDAIAGWMIDDNLHARLSLQQHKIIWDPDKRGV

SEQ ID NO: 29626 - protein, 214 aa, Desulfobacula sp.
  misc_feature (1)..(214): tr|A0A1F9NAI5|A0A1F9NAI5_9DELT 7-carboxy-7-deazaguanine synthase OS=Desulfobacula sp. GWF2_41_7 OX=1797910 GN= queE PE=3 SV=1
MLLNICEIFYSLQGESTFSGLPCIFIRLSGCNLNCSWCDTPYAGEESSPMALDQILGKIRVYNCNLVEITGGEPLLQEATPALIAMLLERHYQVLLETNGSLGIQHIPKACIKIMDVKCPSSNESHQFLKENINYIGKEDEIKFVIGSMEDYEFAKEMIENELTGISQKKIHLSPVFGRILPETLAQRMIDDNLHARLSLQQHKIIWAPDKRGV

SEQ ID NO: 29627 - protein, 179 aa, Desulfobacula sp.
  misc_feature (1)..(179): tr|A0A1F9N826|A0A1F9N826_9DELT 7-carboxy-7-deazaguanine synthase (Fragment) OS=Desulfobacula sp. GWF2_41_7 OX= 1797910 GN=A2097_12630 PE=3 SV=1
SWCDTRYAEEECFSLSLEQILDRIGAYNCNLVEITGGEPLLQEATPALIALLLEKHYQVLLETNGSLSIEHVPGPCIKIVDVKCPSSNESHTFLPENLNYLGKEDEIKFVIGSLEDYDFARAMIENELGRISQKKIHLSPVFGLIEPEILAKRIIEDNLHARLSLQQHKIIWTPDARGV

SEQ ID NO: 29628 - protein, 214 aa, Desulfobacula toluolica
  misc_feature (1)..(214): tr|K0NML0|K0NML0_DESTT 7-carboxy-7-deazaguanine synthas e OS=Desulfobacula toluolica (strain DSM 7467 / Tol2) O X=651182 GN=queE PE=3 SV=1
MQLNICEIFYSLQGESSFTGLPCIFIRLSGCNLACSWCDTEYANTESHPMTIDQILKKTLSYNCNLVEITGGEPLLQDGTPVLISALLDKNYQVLLETNGSKSIKNISLDCIKIMDIKCPSSNESDSFLPENINFLTQQDEIKFVISSRKDYEFAKAIIDTKLRKISPKKIHLSPVFGQISPDAIAGWMIDDNLHARLSLQQHKIIWDPDKRGV

SEQ ID NO: 29629 - protein, 205 aa, Desulfobotulus alkaliphilus
  misc_feature (1)..(205): tr|A0A562RX14|A0A562RX14_9DELT 7-carboxy-7-deazaguanine synthase OS=Desulfobotulus alkaliphilus OX=622671 GN=q ueE PE=3 SV=1
MLFVHELFHSIQGEGPFSGRPAVFLRLSGCVTPYCSFCDTKEALEKGKEVSEEKILEEILSYKTALVVITGGEPFLQWETGLQALESRLMDEGLEVQYESSGRAGIPENVLGKIVLSPKPGQWPPPEILKRAFALKPLMEKNPEPVLKAIQATGFPPEKVWLMALGASREEQLQHMPALWEICRKYGYHFCPRLHILVHDRKKGV

SEQ ID NO: 29630 - protein, 213 aa, Desulfobulbaceae bacterium
  misc_feature (1)..(213): tr|A0A2N6C1P3|A0A2N6C1P3_9DELT 7-carboxy-7-deazaguanine synthase OS=Desulfobulbaceae bacterium OX=2053307 GN=q ueE PE=3 SV=1
MLEICELFYSIQGESSFAGFPCFFIRVAGCNLRCTYCDTHYAYEGKQKSYSISQILAELQKYPGVLVEITGGEPLLQESVYPLFEQLLTTERSVLLETNGSLSLESVPEGVVKIMDMKCPDSGMHEKMNFDNFRFMAPKDEIKFVISSREDYNWATQLVSSYDLHKKTTVTFSPVIGSLPPEKLAAWILEDRLPVRLRLQLHTIIWPGKIKGY

SEQ ID NO: 29631 - protein, 241 aa, Desulfobulbaceae bacterium
  misc_feature (1)..(241): tr|A0A0F2N8X7|A0A0F2N8X7_9DELT 7-carboxy-7-deazaguanine synthase OS=Desulfobulbaceae bacterium BRH_c16a OX=162 9713 GN=queE PE=3 SV=1
MSRTGTICISEILGPTIQGEGALIGRPTVFVRTGGCDFRCTWCDTLHAVESRFQSEWTAMTAQEILAEVKSLAGPKPLTISLSGGNPALQPLGQLIALGKSSGYTFALETQGSIAKEWFAGLDFLIISPKPPSSGMKADKQKLQECLAAAGKASSFLKFVVEDETDYLFARQAAAWFPRLPVSLQPCNPPPAEGTERDPADIEKNCDRLRWLVGRVIADAWYEVRVLPQLHVLLWGSKRGV

SEQ ID NO: 29632 - protein, 223 aa, Desulfobulbus oralis
  misc_feature (1)..(223): tr|A0A2L1GND9|A0A2L1GND9_9DELT 7-carboxy-7-deazaguanine synthase OS=Desulfobulbus oralis OX=1986146 GN=queE PE =3 SV=1
MQTSAELALCECFYSIQGESARAGLPCLFFRLAGCNLRCLWCDSTYSFTGGRPCTVAEAAAWALGHACPLVELTGGEPLLQEGAYPLIERLLAGGKEVLLETNGTLSLARVPLEVSVILDVKCPGSGMAAYFCPENLELLALRKKRGSTDEVKFVLADETDFFWALDFVRRHGLHALVPVLFSPVRPGLEPERLAELMLAHQAPARLQLQLHTLLWPGRKRGV

SEQ ID NO: 29633 - protein, 224 aa, Desulfobulbus propionicus
  misc_feature (1)..(224): tr|A0A2G6M9X9|A0A2G6M9X9_9DELT 7-carboxy-7-deazaguanine synthase OS=Desulfobulbus propionicus OX=894 GN=queE P E=3 SV=1
MTVTDTLLVNERFLSIQGESTYAGLPCLFIRLSGCNLRCGYCDAAYTWEEPGNIETVSQLMAWAARYPDTLIEITGGEPLLQENVYPLMQGFIDNGRQVLLETNGSVPLSRVPDEVAIIMDIKSPDSGMHLSLDLGNLELLRQRAHRQCPDEVKFVLCSPEDFHWAAGMVRRHKLSDHLPVLFSPVTQRISPKTVAELLLDAQLPVRLQLQLHTLLWPEKQRGA

SEQ ID NO: 29634 - protein, 225 aa, Desulfobulbus sp.
  misc_feature (1)..(225): tr|A0A0A2I4G5|A0A0A2I4G5_9DELT 7-carboxy-7-deazaguanine synthase OS=Desulfobulbus sp. Tol-SR OX=1536652 GN=que E PE=3 SV=1
MVREDRLLVSELFYSIQGESTFAGLPCVFIRLAGCNLRCSYCDAAYSYEETGREVSVDSLLDFVDGYPGTLVELTGGEPLLQPGSLLLLDRLVGRHRTVLLETNGSQPIADLPADVRVILDVKCPDSGMAASWLPDNLTAIRRRAARRPNGSEVKFVISSLRDYRFARDFVLEHDLTAHAPVLFSPVRGRISPAELAAAVLADRLPVRLQLQLHTLIWPEQTRGV

SEQ ID NO: 29635 - protein, 222 aa, Desulfocapsa sp.
  misc_feature (1)..(222): tr|A0A432R4A9|A0A432R4A9_9DELT 7-carboxy-7-deazaguanine synthase OS=Desulfocapsa sp. OX=2066021 GN=queE PE=3 S V=1
MQNKLQISEIFFSVQGESTFAGLPCIFVRLSGCNLRCNYCDAAYTWEMGDSSSVSEILTAIAKYPCRLVELTGGEPLMQQQCPELLRSLLQQGYSVLLETNGSVAINSVPPDVTSILDVKTPDSGSCDSFLMENIPEIRKRIAANPGSCEMKFVLSSKNDFLWACDFIRKHKLNASLPLLFSPVTGRVTAQELADWLMEIELSVRLQLQLHTILWPGKKRGV

SEQ ID NO: 29636 - protein, 224 aa, Desulfocapsa sp.
  misc_feature (1)..(224): tr|A0A432QN87|A0A432QN87_9DELT 7-carboxy-7-deazaguanine synthase OS=Desulfocapsa sp. OX=2066021 GN=queE PE=3 S V=1
MTVPEQLQVSELFYSIQGESTRAGLPCAFIRLSGCNLHCSYCDSSYTRDEPGKKMSIDQIITWLRDFPKTMVEITGGEPLLQDSVYPLMEKLLKADRSILLETSGSLSIQHVPTAVSIILDLKCPGSGMAEKNFWSNLDLLRYRKKLGSRDEIKFVLSSEEDFSWAQKIICKYQLTKDMPVLFSPVIPALPPERVAARILREQLPVRLQLQLHKQIWPGIHRGV

SEQ ID NO: 29637 - protein, 222 aa, Desulfocapsa sulfexigens
  misc_feature (1)..(222): tr|M1PDU7|M1PDU7_DESSD 7-carboxy-7-deazaguanine synthas e OS=Desulfocapsa sulfexigens (strain DSM 10523 / SB164 P1) OX=1167006 GN=queE PE=3 SV=1
MPANIKISEIFYSIQGESSYAGLPCIFIRLSGCNLRCNYCDAAYTWEEGDPWSIDSILAKVNSYPCDLVEVTGGEPLLQKNCPELLAGLSTQGKKTLLETNGSIAINAIPDETIAILDVKCPDSGSKDSFHPDNLLLIRNRLAATPGSAELKFVLSTQDDYIWAKNFISQHQLVGLLPILFSPVQPGVTAQDLADWILKDGLDVRLQIQLHTILWPTISRGV

SEQ ID NO: 29638 - protein, 214 aa, Desulfocarbo indianensis
  misc_feature (1)..(214): tr|A0A0K9I918|A0A0K9I918_9DELT 7-carboxy-7-deazaguanine synthase OS=Desulfocarbo indianensis OX=1348163 GN=que E PE=3 SV=1
MAILRICEIFKSIQGESSWAGLPCVFVRLAGCPLDCRWCDTAYAKQGGSDLSLESILAQVAAQGPGLVEVTGGEPMCQAGAPALIAALCRAGRTVLVETNGCEDISGLDQRAHIIMDIKCPSSGMSQRTRWENLAALKPQDEVKLVLADRGDYEYARDIIQTHGLAQRCGVLLSTVHGQLEPRLAVEWLLADQLPVRFQLQMHKYIWPPDTRGV

SEQ ID NO: 29639 - protein, 212 aa, Desulfococcus multivorans
  misc_feature (1)..(212): tr|S7TAG8|S7TAG8_DESML 7-carboxy-7-deazaguanine synthas e OS=Desulfococcus multivorans DSM 2059 OX=1121405 GN=q ueE PE=3 SV=1
MTLTVNEIFFSIQGESSFAGRPCVFIRLTGCNLRCAYCDTRYAYYDGVALDIPDILQRVADYQCPLVEVTGGEPLIQAETPLLIGELIERDFTVLLETNGTQDISRIDDRCIRIVDVKCPTSGEADKNDLDNFDRLSSHDEIKFVIGNREDYEFARTIAGRLSGRPNPVHFSPVFGRLAPDQMAAWILEDRLNVRLQPQLHKIIWNPEQRGV

SEQ ID NO: 29640 - protein, 212 aa, Desulfococcus oleovorans
  misc_feature (1)..(212): tr|A8ZTP3|A8ZTP3_DESOH 7-carboxy-7-deazaguanine synthas e OS=Desulfococcus oleovorans (strain DSM 6200 / Hxd3) OX=96561 GN=queE PE=3 SV=1
MSLHVSELFFSIQGESLDAGLACAFVRLAGCNLCCAYCDTAYARQGGTPMEIPEILDRVARFGCSLVEITGGEPLLQKETPLLIQRLLSVGYRVLLETNGTQNIGLVDKSCIRIVDVKCPSSGESEKNDARNLDRLAAHDQVKFVISDRTDYLFAKKTAGRITAVAPGHILFSTVHGVLDPAQLAHWMLADGLPVRLHLQLHKILWGEARGK

SEQ ID NO: 29641 - protein, 202 aa, Desulfofaba hansenii
  misc_feature (1)..(202): tr|A0A2M9DJX2|A0A2M9DJX2_9DELT 7-carboxy-7-deazaguanine synthase OS=Desulfofaba hansenii OX=157842 GN=queE PE= 3 SV=1
MFHSLQGEGPFMGRPAVFLRLSGCVPPLCPWCDSRHAWGPGERMPVDAILEKILAYGCDFAVITGGEPFLQWAAGLRRLVERLAPKGWDIQYETSGKIPLPADLQGYAVCSPKFLDGRWHFDTANLRRAHAFKFVVDKEPDPILAFIEQHAIDKKKVWLMAMGKSRKAQLERAADLWRVCTENGFNFSPRLHTLIFNDLKGV

SEQ ID NO: 29642 - protein, 211 aa, Desulfofarcimen acetoxidans
  misc_feature (1)..(211): tr|C8VWI0|C8VWI0_DESAS 7-carboxy-7-deazaguanine synthas e OS=Desulfofarcimen acetoxidans (strain ATCC 49208 / D SM 771 / VKM B-1644 / 5575) OX=485916 GN=queE PE=3 SV=1
MKVNEIFYSLQGEGITAGYPTVFIRLTGCNLRCLYCDTVYAYEEGQEMSVKDVADRVHEYGAHYVCITGGEPLQQKAELKLLLSLLNRYTVTIETNGSLSLEDLSFNYCHFAMDIKTPGSGMHLYNDFSNIEFLRSKDEIKFIIGSRTDYDFARGIIEKYKLAQKVIVTFSPVFGLEPRFLAQWVLEDKLFFVRVQLQIHKYIWEPGARGV

SEQ ID NO: 29643 - protein, 246 aa, Desulfofundulus australicus
  misc_feature (1)..(246): tr|A0A1M5C6W8|A0A1M5C6W8_9FIRM 7-carboxy-7-deazaguanine synthase OS=Desulfofundulus australicus DSM 11792 OX=1 121425 GN=queE PE=3 SV=1
MSPLTAPIREIFSSIQGEGIFVGCRQIFLRFAGCNLTCSYCDTPRDIPEQCYWEKRPGTRKFFTSPNPMTAQDVALILRELEPSAHHSISLTGGEPLLHALFLRELIPLIKGTRQGIYLETNGTLPAFLKPLLPFIDIIAMDIKLPGTAKVKPLWDEHREFLELARTKNTFVKIIVDENSKMEEIEKALDLICDVGDFPVVFQPVTTPDAEIKLSAEKIITWQSLAMKRLTDVRVVPQTHKFLGYL

SEQ ID NO: 29644 - protein, 243 aa, Desulfofundulus kuznetsovii
  misc_feature (1)..(243): tr|A0A101HWS8|A0A101HWS8_9FIRM 7-carboxy-7-deazaguanine synthase OS=Desulfofundulus kuznetsovii OX=58135 GN=qu eE PE=3 SV=1
MDVFVSEIFSSVQGEGPLVGCRQIFLRFAGCNLDCAYCDTPGEMRPTHCRCENALDGKDLAFYKNPLNAGQVVSAVERLKPSIHHSISLTGGEPLLQNEFLLEILPLIKGTRLGVYLETNGTLTEQLESIIGMVDFIAMDIKLPGVSGLPPMWEEHKRFLAAAVQKKVFVKVVVGGKTREEEFIQAVQHVAEIADLPLIIQPVTGSRFLKPDPARLLCLQERALDCLSDVRVIPQVHKMLELV

SEQ ID NO: 29645 - protein, 246 aa, Desulfofundulus salinum
  misc_feature (1)..(246): tr|A0A494X231|A0A494X231_9FIRM 7-carboxy-7-deazaguanine synthase OS=Desulfofundulus salinum OX=2419843 GN=queE PE=3 SV=1
MSSPVAPLVEIFSSIQGEGIWVGCRQIFLRFAGCNLTCSYCDTPRDIPRHCRWEARPGSREFLLLPNPLTPQEVALKIRKLNPAIHHSISLTGGEPLLHTSFLLELIPLLKGTRQGIYLETNGTLPDNLERILPLVDIIAMDIKLPGTANINPCWQEHRAFLKLARGKHVFVKLVVDEDSKPEEIERALDLICSVGDIPLVIQPVTTPEGKTRLKPEIAITWQSRALERLTDVRVIPQTHKFLGHL

SEQ ID NO: 29646 - protein, 246 aa, Desulfofundulus thermosubterraneus
  misc_feature (1)..(246): tr|A0A1M6DGC1|A0A1M6DGC1_9FIRM 7-carboxy-7-deazaguanine synthase OS=Desulfofundulus thermosubterraneus DSM 160 57 OX=1121432 GN=queE PE=3 SV=1
MSPPVAPLVEIFSSIQGEGIWVGCRQIFLRFAGCNLACSYCDTPRGIPQYCRWEARPGSREFLLLPNPLTAQEVALMIRKLEPAAHHSISLTGGEPLLHTSFLLELIPLLKGTRQGIYLETNGTLPDSLERILPLVDIIAMDIKLPGTANINPCWQEHRAFLKLARGKHVFVKLVVDEDSKPEEIERALDLICNVGDIPLVIQPVTTPEGKTRLNPEKAITWQSRALEKLTDVRVIPQTHKFLGHL

SEQ ID NO: 29647 - protein, 231 aa, Desulfofustis glycolicus
  misc_feature (1)..(231): tr|A0A1M5U8D4|A0A1M5U8D4_9DELT 7-carboxy-7-deazaguanine synthase OS=Desulfofustis glycolicus DSM 9705 OX=11214 09 GN=queE PE=3 SV=1
MPVLPTTVPARMLEVAELFYSLQGESSLAGFPCVFVRLAGCNLRCCYCDARYTYEETSTIRSIDDIVAAVNGYRCPLVEITGGEPLVQEETAALCATLLGRGFQVLLETNGSQSLAQVPDQVRIIMDIKCPGSGMAESLHLPNLDLLLARRQRNGRKDEIKFVLCSAEDYRWARDFVSCHRLHEYAELLFSPVIQQFPATDCAELLLRDHLPVRLQLQLHSLLWPGESRGK

SEQ ID NO: 29648 - protein, 214 aa, Desulfoglaeba alkanexedens
  misc_feature (1)..(214): tr|A0A4P8L3H0|A0A4P8L3H0_9DELT 7-carboxy-7-deazaguanine synthase OS=Desulfoglaeba alkanexedens ALDC OX=980445 GN=queE PE=3 SV=1
MGLRVHEIFRSIQGESTRAGWPCVFVRLTGCNLRCTYCDTRYAYDRGEDMAVEDILERIAAWNCNLVEITGGEPLIQEETPVLAARLLERGKTVLLETNGSRNIGEVDERCVRIVDFKCPSSGESSANDYGNLERLSPRDEVKLVVADRSDYEFARDLYHRIRRRGVTSPVHFSPVFGILAPSRLAGWILSDGLQVRLNLQLHKFIWDPDARGV

SEQ ID NO: 29649 - protein, 209 aa, Desulfoluna butyratoxydans
  misc_feature (1)..(209): tr|A0A4U8YQI2|A0A4U8YQI2_9DELT 7-carboxy-7-deazaguanine synthase OS=Desulfoluna butyratoxydans OX=231438 GN=qu eE PE=3 SV=1
MLRLHEMFASLQGEGPHTGRPAFFIRLAGCVPPLCPWCDTKGAWDEGTEVSVSDLAAAAKESGLGFVVITGGEPLRQWEEGLWELDRVLSKLGFAVQYETSGKVPVPEDIRGEVILSPKYLEGSWHVDRTSVARARHLKFVASQGTLGLIDAFVADHALDKDRVWLMPLGMTRDEQVENMPLVWDHCVKMGYRMASRLHILAFDTKKGI

SEQ ID NO: 29650 - protein, 209 aa, Desulfoluna spongiiphila
  misc_feature (1)..(209): tr|A0A1G5FXN0|A0A1G5FXN0_9DELT 7-carboxy-7-deazaguanine synthase OS=Desulfoluna spongiiphila OX=419481 GN=queE PE=3 SV=1
MLNLHEMFASLQGEGPHTGRPAFFIRLAGCVAPLCPWCDTKGAWEDGTEVSVENLLDAVKDSGHRFVVITGGEPLRQWDAGLCELDTALAERGIAVQYETSGKVPVPEGIRGEVILSPKYLDGSWHVDRKSVARAGHLKFVASEETLPVIDAFVADHALEKERVWLMPLGMTRDDQIENMPVVWDHCVKMGYRMASRLHILAFDTKKGI

SEQ ID NO: 29651 - protein, 209 aa, Desulfoluna spongiiphila
  misc_feature (1)..(209): tr|A0A5E7XBB3|A0A5E7XBB3_9DELT 7-carboxy-7-deazaguanine synthase OS=Desulfoluna spongiiphila OX=419481 GN=queE PE=3 SV=1
MLNLHEMFASLQGEGPHTGRPAFFIRLAGCVAPLCPWCDTKGAWDDGIEVSVAGLLDAVKDSGHRFVVITGGEPLRQWDAGLCELDIALAEMGIAVQYETSGKVPVPEGIRGEVILSPKYLDGSWHVDPKSVARAGHLKFVASEETLPVIDAFVVDHALDKERVWLMPLGMTRDDQIENMPVVWDHCVKMGYRMASRLHILAFDTKKGI

SEQ ID NO: 29652 - protein, 207 aa, Desulfomicrobium apsheronum
  misc_feature (1)..(207): tr|A0A1I3UN35|A0A1I3UN35_9DELT 7-carboxy-7-deazaguanine synthase OS=Desulfomicrobium apsheronum OX=52560 GN=qu eE PE=3 SV=1
MLEVSEIFVSLQGEGPLAGRPAVFVRLAGCVPPFCEWCDTPQALGGGRRMSVEAIEDEIARHPRALVVITGGEPFLQWDTGLERLARALGASSRQVQYETSGKAGIPANSGGFVVCSPKPLHAPVLDPDSLSRADAFKFVVEEDISPVLDFVAAHGIDARKVWLMPLGATRQDQMRRMAPVWELCVRHGFNFSARLHVLTFNDKRGV

SEQ ID NO: 29653 - protein, 207 aa, Desulfomicrobium norvegicum
  misc_feature (1)..(207): tr|A0A1I4KYB8|A0A1I4KYB8_DESNO 7-carboxy-7-deazaguanine synthase OS=Desulfomicrobium norvegicum (strain DSM 17 41 / NCIMB 8310) OX=52561 GN=queE PE=3 SV=1
MLEVSEIFVSLQGEGPFAGRPAVFVRLAGCVPPFCEWCDTPQALGSGRRMRVDDIEDEIARHPRALVVITGGEPFLQWDTGLARLVRALGDSSRQVQYETSGKAGIPADHGGFVVCSPKPLHAPVLDPDAVSRADAFKFVVEEDITPVLDFIAAHGIDARKVWLMPLGAVRQDQMRRMPPVWELCVRHGFNFSARLHVLTFNDKRGV

SEQ ID NO: 29654 - protein, 213 aa, Desulfomonile tiedjei
  misc_feature (1)..(213): tr|I4CAG4|I4CAG4_DESTA 7-carboxy-7-deazaguanine synthas e OS=Desulfomonile tiedjei (strain ATCC 49306 / DSM 679 9 / DCB-1) OX=706587 GN=queE PE=3 SV=1
MILNVSELFRSIQGESSFVGYPCAFVRLAGCNLRCRYCDTSYAQTAGENMSLESILERIQNYGTNLVEITGGEPLLQQETPILANALIERGHQVLVETNGTQDISVLPEKVVTIMDIKCPSSGESHNTRWENIWKLKPTDEVKFVISDRHDYEWARGIIRENFGNKKVKVLISTVFGEIPSRNVVAWLLEDKLPVRFQLQIHKYIWPHETRGV

SEQ ID NO: 29655 - protein, 214 aa, Desulfonema ishimotonii
  misc_feature (1)..(214): tr|A0A401FU04|A0A401FU04_9DELT 7-carboxy-7-deazaguanine synthase OS=Desulfonema ishimotonii OX=45657 GN=queE P E=3 SV=1
MTLRVNEIFYSIQGESTYVGRPCVFVRLTGCNLRCAYCDTRYAWDAGEEMSVDRILMRVAAYDCPLVEITGGEPLLQAETPALVSALLRKGYEVLMETNGSLDIRKADAACVKIVDIKCPGSGESRQNDFENLNRLGQRDQVKFVIGNRDDYEYAKDIVLNRCAGAEAGHLLFSPVSGKLPPDRLARWILDDRLRVRLQIQLHTILWPGTERGV

SEQ ID NO: 29656 - protein, 202 aa, Desulfopila sp.
  misc_feature (1)..(202): tr|A0A4U1AF08|A0A4U1AF08_9DELT 7-carboxy-7-deazaguanine synthase OS=Desulfopila sp. IMCC35006 OX=2569542 GN=qu eE PE=3 SV=1
MFSSLQGEGPFAGKPAVFVRLSRCLPPLCPWCDTAFAWQPGTMMEVDDLVEQIIGHGCNFVVITGGEPFLQWSTGLQCLEETLVDKGCFVQYETSGKVSLPEQSKGFIVCSPKYLDAMWHFAGTNCSVVDAFKFVVENDFQMVDDFVAAWKIPAEKVWIMPQGATREAQLKNFETIWRYCVERGFTFSPRLHILAFDNKNGV

SEQ ID NO: 29657 - protein, 209 aa, Desulforhopalus singaporensis
  misc_feature (1)..(209): tr|A0A1H0IZ63|A0A1H0IZ63_9DELT 7-carboxy-7-deazaguanine synthase OS=Desulforhopalus singaporensis OX=91360 GN= queE PE=3 SV=1
MLLCHEMFSSLQGEGPHTGRPAFFIRLSGCLEPFCPWCDTKDAWFGGSPASIEDIIQKVVRESHRFVVITGGEPFLQWDDGLSRLDRELAEMKIEVQYETSGKVAIPQQVRGEVICSPKYLSGKWHLARESMYRADAFKFVACRESIFFIDAFIAEHGIDRDRVWLMPKGKTRKEQTELLQFLWEHCVKKGYRLSARLHILCFDQKKGV

SEQ ID NO: 29658 - protein, 246 aa, Desulforudis audaxviator; identical to SEQ ID NO: 28825
  misc_feature (1)..(246): tr|B1I3W0|B1I3W0_DESAP 7-carboxy-7-deazaguanine synthas e OS=Desulforudis audaxviator (strain MP104C) OX=477974 GN=queE PE=3 SV=1

SEQ ID NO: 29659 - protein, 243 aa, Desulfosporosinus acididurans
  misc_feature (1)..(243): tr|A0A0J1FX22|A0A0J1FX22_9FIRM 7-carboxy-7-deazaguanine synthase OS=Desulfosporosinus acididurans OX=476652 GN =queE PE=3 SV=1
MIKLPVTEIFSSIQGEGPYVGTRQIFLRFPRCNLKCPYCDTETIVPKQFRIEINPGSRSFREFENPIDIFELVELLQSYDFSLHHSLSITGGEPLLWADELSSFLPLIKKKNLPIYLETNGTLPSQLLKILSLIDIISMDIKLPFGEEIFWDVHEDFLRKSLAKEVFIKIVVTEKSKLDDLQKARDLIAGINPSLLTILQPVTKVNGCESPKPGQLLDWQRFFLEKLMNVRVIPQTHVFMGQL

SEQ ID NO: 29660 - protein, 243 aa, Desulfosporosinus acidiphilus
  misc_feature (1)..(243): tr|I4D851|I4D851_DESAJ 7-carboxy-7-deazaguanine synthas e OS=Desulfosporosinus acidiphilus (strain DSM 22704 / JCM 16185 / SJ4) OX=646529 GN=queE PE=3 SV=1
MLKIPVTELFSSIQGEGPYVGARQIFLRLPKCNLNCPYCDTETIIPEKCRMESIPGSKDFRMLKNPIELNELIELLRSYDFSLHHSISITGGEPLLWADELQLLLPLIREYNLPVYLETNGTLPKQLDKILPFVDIISMDIKLPFGEKVFWNVHEDFLRKSLSKNVFLKIVVDEKAKLQDLQNARDLIANVDPSLLTILQPVTKINGIESPKPRQILDWQRLFLEKLKNVRVIPQTHVFMGQL

SEQ ID NO: 29661 - protein, 243 aa, Desulfosporosinus fructosivorans
  misc_feature (1)..(243): tr|A0A4Z0R2W2|A0A4Z0R2W2_9FIRM 7-carboxy-7-deazaguanine synthase OS=Desulfosporosinus fructosivorans OX=201866 9 GN=queE PE=3 SV=1
MFKLPVTEIFSSIQGEGPYVGVRQLFLRLPMCNLMCPYCDTETKVPGQLRVEKVPGTRIFSMLDNPVPIDKLLDLLQTFDFSMHHSLSVTGGEPLLWADELQVLLPFLKEKGLKIYLETNGTLPEQLLQILPMVDVISMDIKLPFASKNFWDVHESFLRYSTQKEVFVKLVVNQDTPLNDLQYACDLIARVDPSILTILQPVTPTQGILAPKPMQLLKWQSLLLEKLVNVRVIPQTHVFIGQL

SEQ ID NO: 29662 - protein, 198 aa, Desulfosporosinus fructosivorans
  misc_feature (1)..(198): tr|A0A4Z0R2Y7|A0A4Z0R2Y7_9FIRM 7-carboxy-7-deazaguanine synthase OS=Desulfosporosinus fructosivorans OX=201866 9 GN=queE PE=3 SV=1
MNKALYPIVEIFSSIQGEGFHMGKGSTFIRVAGCNLRCSWCDTQHSFDVSKARWMSVEEIIEESEITHQHVVITGGEPTLYDLGPLVQELHKLGKYVAIETNGTNPIPADWALDWITASPKPGSDFALCCQADELKYVVDDEFTIDCITKQYLPEGRIFLQVESGRQESAQKGYELINSHPDRRLRMGIQLHKILDVR

SEQ ID NO: 29663 - protein, 243 aa, Desulfosporosinus hippei
  misc_feature (1)..(243): tr|A0A1G7XKG7|A0A1G7XKG7_9FIRM 7-carboxy-7-deazaguanine synthase OS=Desulfosporosinus hippei DSM 8344 OX=11214 19 GN=queE PE=3 SV=1
MLKLPVTEVFSSIQGEGPYVGVRQVFLRLPGCNLRCPYCDTVTTTLQELRQERDPGSGEFSVIKNPISIDTLSQLLQKYNFSLHHSISVTGGEPLLWARELSELLPLLKEKGIKIYLETNGTLPEQLLQVMPWVDIISMDIKLPSNDDNLWDLHKSFLRLSLQKEVFVKIVVQEDTGLVDLEYARDLIAEVDPLIQTILQPVTATRGIVTPKPYQLLSWQSFFLQKLRNVRVIPQTHVFMGQL

SEQ ID NO: 29664 - protein, 243 aa, Desulfosporosinus lacus
  misc_feature (1)..(243): tr|A0A1M5WKF2|A0A1M5WKF2_9FIRM 7-carboxy-7-deazaguanine synthase OS=Desulfosporosinus lacus DSM 15449 OX=11214 20 GN=queE PE=3 SV=1
MLKLPVTEIFSSIQGEGPYVGVRQIFLRLPNCNLRCPYCDTVTTAPQQLRMETEAGSGVFNMSENPVPIEKLIKLLQIYDFSLHHSLSITGGEPLLWVNELRAILPFLREKGIKIYLETNGTLPEQLHKILPWVDIISMDIKLPFDGQSFWDVHESFLRSSLQKEVFVKIVVHQETSLTELQYARDLIVAVDPLLPTILQPVTATNEINTPKPYQLLEWQSFFLKKLTNVRVIPQTHVFMGQL

SEQ ID NO: 29665 - protein, 243 aa, Desulfosporosinus meridiei
  misc_feature (1)..(243): tr|J7IZM0|J7IZM0_DESMD 7-carboxy-7-deazaguanine synthas e OS=Desulfosporosinus meridiei (strain ATCC BAA-275 / DSM 13257 / NCIMB 13706 / S10) OX=768704 GN=queE PE=3 S V=1
MIMLPVTEVFSSIQGEGPYVGVRQIFLRLPGCNLRCPYCDTVTQTLQEFRLERDPGSGKFSVFKNPISVNTLSQLLQNYNFSLHHSISVTGGEPLLWASELRELLPFLKEKGIKIYLETNGTLPEQLLQVMPWVDIISMDIKLPSNDDNLWDIHKSFLRLSLQKEVFVKIVVQEDTKLVDLEYARDLIAEVDPLIQTILQPVTATRGIVTPKPYQLLSWQSFFLQKLRNVRVIPQTHVFMGQL

SEQ ID NO: 29666 - protein, 243 aa, Desulfosporosinus orientis
  misc_feature (1)..(243): tr|G7WDT0|G7WDT0_DESOD 7-carboxy-7-deazaguanine synthas e OS=Desulfosporosinus orientis (strain ATCC 19365 / DS M 765 / NCIMB 8382 / VKM B-1628) OX=768706 GN=queE PE=3 SV=1
MPQLPVTEIFSSIQGEGPYVGVRQIFLRLPKCNLRCPYCDTPTALSQYMRMETDPGSGAFERKKNPIPLDSLSEMLRSYDFSIHHSLSITGGEPLLWSKDLAYLLPLLKDKNIKIYLETNGTLPEQLLEILPWVDIISMDIKLPFANQTFWNVHETFLRHSLHKEVFVKIVVNEDTSIDQLQNVRDLILRVDPSIQTILQPVTPTGVIKAPKSLQLIQWQSFLLRELSMVRVIPQTHVFMGQL

SEQ ID NO: 29667 - protein, 243 aa, Desulfosporosinus sp.
  misc_feature (1)..(243): tr|A0A0F2JGT3|A0A0F2JGT3_9FIRM 7-carboxy-7-deazaguanine synthase OS=Desulfosporosinus sp. I2 OX=1617025 GN=que E PE=3 SV=1
MLELPVTEIFSSIQGEGPYVGVRQIFLRLPNCNLSCPYCDTLTSKQPQLRIELESGTQQFKQLDNPVALDKLLGLLETYDFALHHSLSLTGGEPLLWSNELKVLLPLLREKGITIYLETNGTLPEPLLQVLPWIDIISMDIKLPYDDQVFWNVHETFLRYSLQKDVFVKLVVQEDTSLLNLQIARDLIVGVRPLIPTILQPVTPTHGIKAPKPIQLLEWQRFFLEKLSNVRVIPQTHVFMGQL

SEQ ID NO: 29668 - protein, 243 aa, Desulfosporosinus sp.
  misc_feature (1)..(243): tr|A0A117SJX8|A0A117SJX8_9FIRM 7-carboxy-7-deazaguanine synthase OS=Desulfosporosinus sp. BRH_c37 OX=1734396 G N=queE PE=3 SV=1
MLDLPVTEIFSSIQGEGPYVGVRQIFLRLPKCNLSCPYCDTEIKVSEQFRVELVPGTRIFSMLKNPIPLDELLDLLQTYDFSKHHSLSVTGGEPLLWVDELQVLLPLLKEKGIDIYLETNGTLPVELLQILPMVDIISMDLKLPFDSRTFWDVHEAFLRYSTQKEIFVKIVVNQATTWKDLQNARDLIARVDPAILTILQPVTPMQGIQAPRPQQLLEWQSFLLERIINVRVIPQTHVLIGQL

SEQ ID NO: 29669 - protein, 243 aa, Desulfosporosinus youngiae
  misc_feature (1)..(243): tr|H5XVK7|H5XVK7_9FIRM 7-carboxy-7-deazaguanine synthas e OS=Desulfosporosinus youngiae DSM 17734 OX=768710 GN= queE PE=3 SV=1
MPKLPVTEIFSSIQGEGPYVGVRQVFLRLPNCNLKCPYCDTGTSVPQQLRMETETGSGMFDTHENPVSFAKLIELLQSYDFSIHHSLSVTGGEPLLWSNQLRVLLPFLQEKGIKIYLETNGTMPEQLLQVLPWVDIISMDIKLPFDGQTFWAVHETFLRYSLQKEVFVKLVVHNQTDLNELRTARDLVAGVDPQIRTILQPVTAIHGIKAPEPYQLLNWQRFFLEKLADVRVIPQTHVFMGQL

SEQ ID NO: 29670 - protein, 212 aa, Desulfotalea psychrophila
  misc_feature (1)..(212): tr|Q6ARY0|Q6ARY0_DESPS 7-carboxy-7-deazaguanine synthas e OS=Desulfotalea psychrophila (strain LSv54 / DSM 1234 3) OX=177439 GN=queE PE=3 SV=1
MPDIILDVHEIFTSIQGEGPLMGRPASFLRLSGCVEPLCPWCDTKQAWGPGKTISVEEVASRLIALGNRLCIITGGEPFLQWESGLNLLERLLLTEGIEIQYETSGKVLIPADCRGFKVCSPKYLANIWHYLPENSERADCFKFVAGDELKPVQEFITKHNLDQDRVWIMPMGTGRDEQLTRSPKIWEFCVKHHYNFSPRLHTLFFNNQQGV

SEQ ID NO: 29671 - protein, 202 aa, Desulfotignum phosphitoxidans
  misc_feature (1)..(202): tr|S0FRX2|S0FRX2_9DELT 7-carboxy-7-deazaguanine synthas e OS=Desulfotignum phosphitoxidans DSM 13687 OX=1286635 GN=queE PE=3 SV=1
MFSSIQGEGPFTGRPASFLRLSRCVPPLCPWCDTRHAWGPGTWISVSAAAEKILAHGNRLCVITGGEPFLQWESGLNLLEAYLIEKGITVQYETSGKVLIPSEAKGFKVCSPKYLSGTWQYRIENNTRADCFKFVVRDDPAHVAAFVKTHCLPETSVWIMPMGALRNEQMDRLAGVWRFCVDNRFNFSLRLHTLIFNNQKGV

SEQ ID NO: 29672 - protein, 247 aa, Desulfotomaculum aeronauticum
  misc_feature (1)..(247): tr|A0A1M6NEX9|A0A1M6NEX9_9FIRM 7-carboxy-7-deazaguanine synthase OS=Desulfotomaculum aeronauticum DSM 10349 OX =1121421 GN=queE PE=3 SV=1
MPQTYLQEIFSSVQGEGPYVGCRQIFIRFAGCNWSCAFCDTPSNEKPEVFTIENSPGQRDFTTHTNPMSAEALSAILKERYKITEHHSISFTGGEPLLQTEFLATLIPFIKGTRQGIYLETNGTLPEKLANIIDSIDIVSMDIKLQSSTGIVTPWDLHHRFLQVAAQRKVYVKIVITSETAVKEIQRAAELIGRVDSGIELVLQPVTPKGGCQIPAVDQILKLQQIALDHLANVRVIPQTHLMMGQL

SEQ ID NO: 29673 - protein, 219 aa, Desulfotomaculum arcticum
  misc_feature (1)..(219): tr|A0A1I2QIG1|A0A1I2QIG1_9FIRM 7-carboxy-7-deazaguanine synthase OS=Desulfotomaculum arcticum DSM 17038 OX=112 1424 GN=queE PE=3 SV=1
MSNIPVNEIFGPTIQGEGMYCGYRTMFIRVAGCDYRCSWCDTKYAWSINQARQVLSEEEILDQLKERAKGITHRVTITGGNPCAHDLSRLISLLKMEKYLIHIETQGSIIPSWLHDVHHVCISPKPPSSGNITNYSSFNEFMNSEVSKELKVVVGTEEDYLYAKKVHQMYKLQPLTLQACTIGDPLPVLNWLISKVSSDPDFSDSVKVMPQVHVLIGIK

SEQ ID NO: 29674 - protein, 249 aa, Desulfotomaculum copahuensis
  misc_feature (1)..(249): tr|A0A1B7LE33|A0A1B7LE33_9FIRM 7-carboxy-7-deazaguanine synthase OS=Desulfotomaculum copahuensis OX=1838280 GN =queE PE=3 SV=1
MPADSTMVTEIFSSIQGEGIFTGCRQIFIRFWGCNLNCRYCDTRTGKAPVHCRIETEPGTGNFCLLPNPLTAAEVALRAGELNPSGHQTISLTGGEPLLHTSFLSRLIPLLPPARQGIYLETNGTLPEELARIIDGIDIIAMDIKLPGTAGITPCWREHEAFLALALAKKKKVMVKIIIADYSADREIEQAVELLSRYKDIPVVLQPVSSSRGIPQLAPGRALAIQARALEKLIDVRVIPQTHKYLHLL

SEQ ID NO: 29675 - protein, 247 aa, Desulfotomaculum ferrireducens
  misc_feature (1)..(247): tr|A0A1S6IWJ2|A0A1S6IWJ2_9FIRM 7-carboxy-7-deazaguanine synthase OS=Desulfotomaculum ferrireducens OX=1833852 GN=queE PE=3 SV=1
MTRCHLQEVFSSVQGEGPYVGCRQIFIRLAGCNWHCNFCDTPGNARPASFSIEKSPGQRDFMNLTNPVNAEKLASLIKGYYDLKTHHSISLTGGEPLLQTDYLIKLIPLLAGTRQGIYLETNGTLPDKLREIIDLVAMVSMDIKLESSTGTATPWELHHRFLQVAAQKKVYVKIVITSATSSAEIKKAAELISSVNPAIELVLQPVTPKGGCGLPTAEQVLHWQSVALDYLTNVRVIPQTHLMLGQL

SEQ ID NO: 29676 - protein, 248 aa, Desulfotomaculum hydrothermale
  misc_feature (1)..(248): tr|K8E6L1|K8E6L1_9FIRM 7-carboxy-7-deazaguanine synthas e OS=Desulfotomaculum hydrothermale Lam5 = DSM 18033 OX =1121428 GN=queE PE=3 SV=1
MSGGVHLQEVFSSVQGEGPLVGCRHIFIRLAGCNLKCVYCDTPVEPFPPLWRLEKNPGRRDFITLNNPVEAASLAAVLSDHYQLNLHHAVSLTGGEPLLHTPFLKQLLPLIGGTRAGILLETNGTLPDQLASLLDSLDIISMDIKLASATGQPTPWAVHKKFLAVAAQKQVYVKVVISEHTTESEIEQTGRLIESINPQIELILQPVSAGGGVVAPAVDKVLRLQECALKILPGVRVIPQTHLMMGQL

SEQ ID NO: 29677 - protein, 247 aa, Desulfotomaculum nigrificans
  misc_feature (1)..(247): tr|F6B586|F6B586_DESCC 7-carboxy-7-deazaguanine synthas e OS=Desulfotomaculum nigrificans (strain DSM 14880 / V KM B-2319 / CO-1-SRB) OX=868595 GN=queE PE=3 SV=1
MPVAYLQEIFSSVQGEGPYVGCRQVFIRFAGCNWCCAYCDTPTEPQPATCVVEKSPGYRDFVNLANPMTPGQVAEIIRQYYNLSWHHSVSLTGGEPLLHTEYIKDLIKHLPSTRRGIFLETNGTLPDRLTEVITGIDIISMDVKLSSATGTPTPWDLHRHFIKVARQRELYVKIVVTAETKVEELQKAGELLQELAPQAVLVLQPVTPNCGVIAPPVSRVLYLQEQALKIIKNVRIIPQTHLMMGQL

SEQ ID NO: 29678 - protein, 247 aa, Desulfotomaculum putei
  misc_feature (1)..(247): tr|A0A1M4T0V2|A0A1M4T0V2_9FIRM 7-carboxy-7-deazaguanine synthase OS=Desulfotomaculum putei DSM 12395 OX=112142 9 GN=queE PE=3 SV=1
MSGAYLQEIFSSVQGEGPFVGCRQVFIRLAGCNWTCTYCDTPTDPAPKTWVMEKTPGCRNFMTLANPVEPVELAEMITSHYDLTLHHSVSLTGGEPLLHTQFLKKLIPGICGTRAGIFLETNGTLPDKLSSVIDWVDIVSMDVKLESSTGTKTPWDAHKRFLTVAARKKVYVKVVVSASTKEAEIEQTGKLIYSIDPEIELILQPVTARGGIVTPSVDRVLRLQERALKILQNVRVIPQTHLMMGQL

SEQ ID NO: 29679 - protein, 247 aa, Desulfotomaculum reducens
  misc_feature (1)..(247): tr|A4J5C9|A4J5C9_DESRM 7-carboxy-7-deazaguanine synthas e OS=Desulfotomaculum reducens (strain MI-1) OX=349161 GN=queE PE=3 SV=1
MLGAHFVEIFSSVQGEGPYVGLRQIFIRFAGCNWKCAFCDTPTNPRPEYFTMEKTPGQRDFIQVANPVKPERLSELIKQYYNLSHHHSISLTGGEPLIYHDYITRLVPALQGTRKGIYLETNGTLPEELASVINLCNMISMDIKLESATKEKTPWELHREFLKVASQRDVYVKIVVSNKTNSHELERAIEIIQSIDPNIELVFQPVTPKGGVLPPTNDSILRFQELALSAIKNVRVIPQTHLMMGQL

SEQ ID NO: 29680 - protein, 246 aa, Desulfotomaculum ruminis
  misc_feature (1)..(246): tr|F6DLB8|F6DLB8_DESRL 7-carboxy-7-deazaguanine synthas e OS=Desulfotomaculum ruminis (strain ATCC 23193 / DSM 2154 / NCIMB 8452 / DL) OX=696281 GN=queE PE=3 SV=1
MDGYLQEIFSSVQGEGPYVGVRQVFVRFAGCNWDCAYCDTPKQATPPSCLVEPIPGQPELVHLANPLEPQQVAELIRQYFTLALHHSVSLTGGEPLLHADYIQSLAKELAGTQRGIFLETNGTLPEELLKVLNDIAIISMDIKLKSSTGTETPWEVQEKFLEIAARKEVYVKIVITGATSDEEVQKAGEMVSRRAPQGALILQPVTPRNGVLAPTAGRVLHLQELALKYVQNVRVIPQTHLMMGQR

SEQ ID NO: 29681 - protein, 246 aa, Desulfotomaculum sp.
  misc_feature (1)..(246): tr|A0A3C2C4N7|A0A3C2C4N7_9FIRM 7-carboxy-7-deazaguanine synthase OS=Desulfotomaculum sp. OX=41211 GN=queE PE=3 SV=1
MSAFLVEIFSSIQGEGPLVGCRQIFLRFAGCNLRCAYCDTPNDPHPPHCRSECMPGKRDFILLPNPLTVSRLISVVEKLNPFSHHSISLTGGEPLLYSEFLCKAIPLLKTACRGIYLETNGTLPDELSRVLHLVDFIAMDVKLPGVSGLPPLWREHEKFLSVASKKRVFVKIVVDRQTTIAEVTQTARLVAGIGDILLVIQPVTYENESGRPGVSAPQLLTLQEHALSYLSRVRVIPRVHKMLDLL

SEQ ID NO: 29682 - protein, 233 aa, Desulfotomaculum sp.
  misc_feature (1)..(233): tr|A0A356UI28|A0A356UI28_9FIRM 7-carboxy-7-deazaguanine synthase OS=Desulfotomaculum sp. OX=41211 GN=queE PE=3 SV=1
MQGEGLALGQRHIFLRFPACNLNCAYCDTPRDPCPTFCCWERTPGKRDFAFLPNPLTPDQIMATVNKWDLTLHHAFSLTGGEPLLYVDFLTRLIPLLTGTREGIYLETNGTLPEQLKRIISLVNIIAMDFKLPSSSCLPPFWEKHQQFLSVAQQKDVFVKIVVTENTTDAEIKQALKVIKAVKEVAVIIQPVTLPANRPGVSPARILAIQELALRELREVRIIPQVHKWLQQL

SEQ ID NO: 29683 - protein, 210 aa, Desulfovibrio carbinolicus
  misc_feature (1)..(210): tr|A0A4P6HIV8|A0A4P6HIV8_9DELT 7-carboxy-7-deazaguanine synthase OS=Desulfovibrio carbinolicus OX=296842 GN=qu eE PE=3 SV=1
MLKVHEIFASIQGESSYAGWPCGFLRLSGCNLACRWCDTLHAGDSYAEMTVADATAALAGLGLPLVEVTGGEPLLAPQTPELVKRLCDLDLTVLVETNGSLDIAVLDARATAVVDVKCPGSGMEHRNDYGNLERLRPHDEVKFVLADRTDYDFALDISSRVWRTHIVHFSPVAATLAPAELAAWMVADRVQARLGLQLHKHIWSPDARGV

SEQ ID NO: 29684 - protein, 211 aa, Desulfovibrio carbinoliphilus
  misc_feature (1)..(211): tr|G7QC34|G7QC34_9DELT 7-carboxy-7-deazaguanine synthas e OS=Desulfovibrio carbinoliphilus subsp. oakridgensis OX=694327 GN=queE PE=3 SV=1
MSLRVHEIFASIQGESSFAGWPCAFLRLSGCNLDCVWCDTRYAAASFVEMTVPEAAAALLASGLPLVELTGGEPLLAPELPALARALLDAGATVLVETNGSRDIAVLDPRAIAILDIKCPGSGMEGRNDYRNLDRLRPRDEVKFVLAGRDDYRFALDVAKRVWDRHTVHLSPVTGSLDPAELAGWMVADRVRARLGLQLHKTIWSPEARGV

SEQ ID NO: 29685 - protein, 212 aa, Desulfovibrio desulfuricans
  misc_feature (1)..(212): tr|A0A1M6LAW2|A0A1M6LAW2_DESDE 7-carboxy-7-deazaguanine synthase OS=Desulfovibrio desulfuricans OX=876 GN=queE PE=3 SV=1
MSFKVTEIFYTLQGEGFHAGRAAVFCRFSGCNLWTGREEDRKHAACKFCDTNFVQLAESGGTFASASELASKIINTFPNIQHTKYTPYVVFTGGEPALQVTSELLNLLKERKVEIGIETNGTLPLPEGIDWITVSPKAGTQLSVTSGSELKLVWPQENVSLADFQNLDFEHFYLQPKDSLQRSAATQLAVEACRENPVWKLSLQTHKYIGIP

SEQ ID NO: 29686 - protein, 212 aa, Desulfovibrio desulfuricans
  misc_feature (1)..(212): tr|A0A4P7UHX1|A0A4P7UHX1_DESDE 7-carboxy-7-deazaguanine synthase OS=Desulfovibrio desulfuricans OX=876 GN=queE PE=3 SV=1
MSFAVKEIFYTLQGEGFHAGRPAVFCRFSGCNLWSGREEDRQFAKCRFCDTDFVGADASGGTFENASQLARVICSFFPSFTHAGYRPYVILTGGEPALQVTDELVRELTRHGAQVGMETNGTLALPDGLDWVTVSPKAGTKLVVASGNELKLVWPQEGIALQDFEQLDFDHFFLQPCDDAGQMQATQDAVRICLDRPMWKLSLQTHKFIGIR

SEQ ID NO: 29687 - protein, 210 aa, Desulfovibrio fructosivorans
  misc_feature (1)..(210): tr|E1JX67|E1JX67_DESFR 7-carboxy-7-deazaguanine synthas e OS=Desulfovibrio fructosivorans JJ OX=596151 GN=queE PE=3 SV=1
MLRVHEIFASIQGESSYAGYPCAFLRLSGCNLDCSWCDTRYASASFTAMSLDEARQKLLALGLPLVELTGGEPLLEPLAPALAASLADAGATVLVETNGSLDIGVLDPRVIAVMDVKCPGSGMEGKNDYANLDRLRPRDEVKFVLAGREDYLFARDVVRRVPAGNAVHFSPVAGRLDPAELAAWMVADASRARLALQLHKYIWSPDARGV

SEQ ID NO: 29688 - protein, 210 aa, Desulfovibrio magneticus
  misc_feature (1)..(210): tr|K6GR00|K6GR00_9DELT 7-carboxy-7-deazaguanine synthas e OS=Desulfovibrio magneticus str. Maddingley MBC34 OX= 1206767 GN=queE PE=3 SV=1
MLKVHEIFASIQGESSHAGWPCGFLRLSGCNLACRWCDTLHAGDSYAEMTVADATAALAGLGLPLVEVTGGEPLLAPQTPELVRRLCDLDLTVLVETNGSFDIAVLDPRATAVMDVKCPGSGMEHRNDYGNLERLRPRDEVKFVLADRADYDFALEIAAQVWRTHIVHFSPVAATLDPAELAAWMVADRVQARLGLQLHKHIWSPDARGV

SEQ ID NO: 29689 - protein, 210 aa, Desulfovibrio magneticus
  misc_feature (1)..(210): tr|C4XPJ4|C4XPJ4_DESMR 7-carboxy-7-deazaguanine synthas e OS=Desulfovibrio magneticus (strain ATCC 700980 / DSM 13731 / RS-1) OX=573370 GN=queE PE=3 SV=1
MLKVHEIFASIQGESSYAGWPCGFLRLSGCNLACRWCDTLHAGDSYAEMTVADATAALAGLGLPLVEVTGGEPLLAPQTPELVKRLCDLDLTVLVETNGSFDIAVLDARATAVVDVKCPGSGMEHRNDYGNLERLRPHDEVKFVLADRTDYDFALDIASRIWRTHIVHFSPVAATLASAELAAWMVADRVQARLGLQLHKHIWSPDARGV

SEQ ID NO: 29690 - protein, 216 aa, Desulfovibrio mexicanus
  misc_feature (1)..(216): tr|A0A238Z5C9|A0A238Z5C9_9DELT 7-carboxy-7-deazaguanine synthase OS=Desulfovibrio mexicanus OX=147047 GN=queE PE=3 SV=1
MSLRICEIFKSIQGESTFAGRPCVFVRLVGCNLRCAWCDTAYSHEGGEDLSAEAVLARIDALGGGLPHMLVEFTGGEPLLQPEAVALANRLARDGRTVLVETNGSLDISALHPDVAAIVDMKGPSSGESAKMDTENLERLRARDEVKFVIADRLDWERMLCLLPRIDARRNPVNLSPVPGILAAADLARWMLDADLDARLNLQLHKHIWPAEARGV

SEQ ID NO: 29691 - protein, 225 aa, Desulfovibrio piger
  misc_feature (1)..(225): tr|B6WPV8|B6WPV8_9DELT 7-carboxy-7-deazaguanine synthas e OS=Desulfovibrio piger ATCC 29098 OX=411464 GN=queE P E=3 SV=1
MRTLAVNEFFVTLQGEASFAGTPAVFVRFQGCPVACPWCDTQYAARLDGATLDFAAVRAKQGPGAGYADVEPEALLAAIREAGPRHVVLTGGEPCRHDLTELTSRLVTEGFRVQIETSGTMPIRCHADVWVTLSPKLDMPGGLEVRQDAWERAGEIKFPVDTAADLARFEQALAVARQAASRPLTELVWLQPVSQGKEATRLCVEAAFAHQWRVSVQVHKYLDLR

SEQ ID NO: 29692 - protein, 225 aa, Desulfovibrio piger
  misc_feature (1)..(225): tr|A0A1K1LE33|A0A1K1LE33_9DELT 7-carboxy-7-deazaguanine synthase OS=Desulfovibrio piger OX=901 GN=queE PE=3 SV =1
MRTLAVNEFFVTLQGEAAFAGTPAVFVRFQGCPVACPWCDTQYAARLDGATLDFAAVRAKQGPGAGYADVEPAALLAAIRQAGPRHVVLTGGEPCRHDLTELTSRLVAEGFRVQIETSGTMPIRCHAAVWVTLSPKLGMPGGLDVRQDAWERAGEIKFPVDTAEDLVRFEQALAAARRAAARPLTELVWLQPVSQGKEATRLCVEAAFARQWRVSVQVHKYLELR

SEQ ID NO: 29693 - protein, 228 aa, Desulfovibrio sp.
  misc_feature (1)..(228): tr|G2H6B6|G2H6B6_9DELT 7-carboxy-7-deazaguanine synthas e OS=Desulfovibrio sp. A2 OX=298701 GN=nrdG PE=3 SV=1
MALRVKEIFHTLQGEGVHAGRAAVFCRFSGCNLWTGREQDRADAACRFCDTDFTGTNGPGGGVFESERELAEAIVAAFPYPLAHPDPLDPLYGDGWRPYVVFTGGEPALQLTSRLLDALHARGCQCGVETNGTLPLPAGLDWVTVSPKAGARLAVTRGDELKLVWPQDGLDPADFAGLDFRHFILQPRDDSAGGDAGGADHVAACVRYCLAHPRWRLGLQTHKFLGIR

SEQ ID NO: 29694 - protein, 221 aa, Desulfovibrio sp.
  misc_feature (1)..(221): tr|S7V5G7|S7V5G7_9DELT 7-carboxy-7-deazaguanine synthas e OS=Desulfovibrio sp. X2 OX=941449 GN=queE PE=3 SV=1
MAYRVKEIFYTLQGEGARAGRAAVFCRFSGCNLWSGRAEDRATAACPFCDTDFTGTNGPGGGVFATADELAAAILAHFPAFAHPAYRPYVVFTGGEPALQLDEALIARLHAVGCELAVESNGTLPLPPGLDWVTISPKAGMQLATRAGQELKLVWPQQGLGPDDLAEFERLDFAHFFLQPCGSGGRGEDARAGASAEAVRACLARPVWRLSLQTHKYIGIP

SEQ ID NO: 29695 - protein, 216 aa, Desulfovibrio vulgaris
  misc_feature (1)..(216): sp|Q728E5|QUEE_DESVH 7-carboxy-7-deazaguanine synthase OS=Desulfovibrio vulgaris (strain Hildenborough / ATCC 29579 / DSM 644 / NCIMB 8303) OX=882 GN=queE PE=3 SV=1
MTYRVKEIFHTLQGEGMRAGRAAVFCRFSGCNLWTGWAQDRPAAVCPFCDTDFVGTDGPGGGVFEDAATLAAAILAAFPYKTGEGYRPYVVFTGGEPALQLDRPLIDILHAHGCEVAIETNGTVRLPEGIDWVTVSPKAGTRLAVTSGDELKLVWPQQGICPESYESLAFTYLLMQPRDGLGDAGRGDAESEAVRWCLAHPRWRLCLQTHKYLGIP

SEQ ID NO: 29696 - protein, 216 aa, Desulfovibrio vulgaris
  misc_feature (1)..(216): tr|A0A0H3A573|A0A0H3A573_DESVV 7-carboxy-7-deazaguanine synthase OS=Desulfovibrio vulgaris subsp. vulgaris (st rain DP4) OX=391774 GN=queE PE=3 SV=1
MTYRVKEIFHTLQGEGMRAGRAAVFCRFSGCNLWTGRAQDRPAAVCPFCDTDFVGTDGPGGGVFEDAATLAAAILAAFPYKTGEGYRPYVVFTGGEPALQLDRPLIDILHAHGCEVAIETNGTVRLPEGIDWVTVSPKAGTRLAVTSGDELKLVWPQQGICPESYESLAFTYLLMQPRDGLGDAGRGDAESEAVRWCLAHPRWRLCLQTHKYLGIP

SEQ ID NO: 29697 - protein, 214 aa, Desulfovibrionaceae bacterium
  misc_feature (1)..(214): tr|A0A1J4SMF9|A0A1J4SMF9_9DELT 7-carboxy-7-deazaguanine synthase OS=Desulfovibrionaceae bacterium CG1_02_65_16 OX=1805130 GN=queE PE=3 SV=1
MGRAVNVCEIFRSIQGESTHAGRPCVFVRLSGCNLRCRYCDTTYAYEGGESLSAPAVRERIAALECGRIEFTGGEPLLQAKAIDLMNALAGEGRDVLVETNGSRDISVLDARIAAIVDMKGPSSGESAKMDLGNFTRLRGRDELKFVIGDQADYAHMRALLPRVDCRRNTVNVSPLYGALAPADLAAWILADGLDVRLNLQQHKYIWPPDARGV

SEQ ID NO: 29698 - protein, 212 aa, Desulfovibrionales bacterium
  misc_feature (1)..(212): tr|A0A1F9PYG8|A0A1F9PYG8_9DELT 7-carboxy-7-deazaguanine synthase OS=Desulfovibrionales bacterium GWA2_65_9 OX= 1797915 GN=queE PE=3 SV=1
MSLLVCEIFKSIQGESSFAGWPCVFVRLTGCNLRCCWCDSSYAYEDGTARSVDSIVDEVRASGCQLVEITGGEPLLQPETPQLAVRLAGLGLTVLVETNGSLDISVLPPEAIAIVDMKGPSSGEAHRMDLHNLSRLRARDEVKFVVGHREDYAHMLSLLPRIDTARNTVNVSSLFGALAPAELAAWILADRLRVRLNLQQHKHIWPPDARGV

SEQ ID NO: 29699 - protein, 259 aa, Desulfurella acetivorans
  misc_feature (1)..(259): tr|W0JIT0|W0JIT0_DESAE 7-carboxy-7-deazaguanine synthas e OS=Desulfurella acetivorans A63 OX=694431 GN=queE PE= 3 SV=1
MIASGLVPKTNIVFIKLTFSIYCQKKQGIEELLVEKKYVNMILMKAKVCEIFYSLQLEGSMLGYPAVFVRFSGCNLNCEFCDTKYAFFEYDTLTQSEIENKISLYNCKRIIFTGGEPLLNAYFIESFINKLKSKYEFFLETNGTIWVDFASKFKHIVVSPKFDNLNFDVLKKYSLQNNVEFKVLVENPDSLKQIEDFLKSLNINSATLQPIYFPDEPLNQFLERTRNIIEAFKQSKLTNKDIRLIIQNHKIIYEKQRGV

SEQ ID NO: 29700 - protein, 216 aa, Desulfurella amilsii
  misc_feature (1)..(216): tr|A0A1X4XV41|A0A1X4XV41_9DELT 7-carboxy-7-deazaguanine synthase OS=Desulfurella amilsii OX=1562698 GN=queE PE =3 SV=1
MQDRICEIFYSLQLEGAMLGYPAVFVRFSGCNLNCDFCDTKYAFDEYKIMSLLEVEEVVSSYRCKRIIFTGGEPLLHASFIELFIKQFKKKYEFFLETNGTIWVDFASEFDHIVVSPKFDSLNYEVLENYKTLKNVEFKILVQNAQSLKDIETFFKNLNLISATIQPIYFSNEPLNKFIKRTQDIVEAFKKSNLANSNVRLIIQNHKIIYAEQRGV

SEQ ID NO: 29701 - protein, 216 aa, Desulfurella multipotens
  misc_feature (1)..(216): tr|A0A1G6MJC4|A0A1G6MJC4_9DELT 7-carboxy-7-deazaguanine synthase OS=Desulfurella multipotens OX=79269 GN=queE PE=3 SV=1
MKAKVCEIFYSLQLEGSMLGYPAVFVRFSGCNLNCKFCDTKYAFNDYEIMSLLQVSKAICNYNCKRIIFTGGEPLLNASFIKCLIDELGSKYDFFLETNGTIWVDFASKFKHIVVSPKFDNLNFDVLKKYSLQNNVEFKVLVENPDSLKQIEDFLKSLNINSATLQPIYFPDEPLNQFLERTRNIIEAFKQSKLTNKDVRLIIQNHKIIYEKQRGV

SEQ ID NO: 29702 - protein, 253 aa, Desulfurella sp.
  misc_feature (1)..(253): tr|A0A2N7PVZ0|A0A2N7PVZ0_9DELT 7-carboxy-7-deazaguanine synthase OS=Desulfurella sp. OX=1962857 GN=queE PE=3 S V=1
MPKTNIVFIKLTFSIYCQKKQGIEELLVEKKYVNMILMKAKVCEIFYSLQLEGSMLGYPAVFVRFSGCNLNCKFCDTKYAFNDYEIMSLLQVSKAICNYNCKRIIFTGGEPLLNASFIKCLIDELGSKYDFFLETNGTIWVDFASKFKHIVVSPKFDNLNFDVLKKYSLQNNVEFKVLVENPDSLKQIEDFLKSLNINSATLQPIYFPDEPLNQFLERTRNIIEAFKQSKLTNKDVRLIIQNHKIIYEKQRGV

SEQ ID NO: 29703 - protein, 228 aa, Desulfurellales bacterium
  misc_feature (1)..(228): tr|A0A5C7Q6V1|A0A5C7Q6V1_9DELT 7-carboxy-7-deazaguanine synthase OS=Desulfurellales bacterium OX=2482794 GN=qu eE PE=3 SV=1
MKLLELYTSVQGEGPHTSEPTQFVRFAGCNLRCPGWPCDTQHAIHPKLYKDVAENLTGAQIVRERLADWPKHICLTGGEPLIQKEIELEEFVQEARAAGYTIECFTNGTQLIPNWTLGRVRFMMDWKLSNSGEVMDRYRDARMANAVRLNKHDGIKFVVATPGCLAEAATGYAGLIQQGVEAQIWIGAVWNRGLSDAAIVDYIMTHKLPWNLNIQTHKYIWHPDKQGV

SEQ ID NO: 29704 - protein, 249 aa, Desulfurellales bacterium
  misc_feature (1)..(249): tr|A0A5C7P7J4|A0A5C7P7J4_9DELT 7-carboxy-7-deazaguanine synthase OS=Desulfurellales bacterium OX=2482794 GN=qu eE PE=3 SV=1
MMFGQNPVRKQDLTTTSLRVQEIFPTIQGEGPFAGTPAVFLRLAGCNLRCHFCDTDFESNYDNLLPPQKVVERVLQAAEHSSIRLLVITGGEPLLQDFVPALKLLFQADPTWKVQIETAGTVWLPSLEVLFLTMPRQISIVCSPKTGEVHRKVQEHCTAWKYIIREVEYQIPLIEREVDDGLPLRSTQIVGKAATLFRPAPITPRQIYLQPCDEGNDNATQHNITCAISLAMRHGYRLCLQIHKLIGLP

SEQ ID NO: 29705 - protein, 244 aa, Desulfuribacillus alkaliarsenatis
  misc_feature (1)..(244): tr|A0A1E5G5R4|A0A1E5G5R4_9BACL 7-carboxy-7-deazaguanine synthase OS=Desulfuribacillus alkaliarsenatis OX=76613 6 GN=queE PE=3 SV=1
MSHIVEVFSGIQGEGPIVGYRQIFVRFSNCQLACNYCDTNFTEKDHAMVEITPGHRDWSRWHNPISADKLVQHILSMYQHLRHHSVSLTGGEPLLHASYLKDLTNQLIEHNIKSYLETNGLLHRQLKSIISNLDLIGMDIKLESATGEATKWTEHETFLEIAKQKQVFVKIVVSNKTTIEEVEQVAKLILKQGKSIPLIMQPVTPTKEVQAPAPDMLLVLMNAAIGILTDVRVIPQTHVMLNQQ

SEQ ID NO: 29706 - protein, 247 aa, Desulfuribacillus stibiiarsenatis
  misc_feature (1)..(247): tr|A0A1E5L6I9|A0A1E5L6I9_9BACL 7-carboxy-7-deazaguanine synthase OS=Desulfuribacillus stibiiarsenatis OX=13902 49 GN=queE PE=3 SV=1
MTKFTNVVEVFSGIQGEGPIVGYRQIFIRFTGCQLNCQYCDTNFAIQEQALIEESPGRRNFLKVSNPLSDFDLYTFVKVLNEQLEHHSISLTGGEPLLHADFLQSFLPMVQPIGVQVYLETNGLLTEELQKVLPWIDVIGMDIKLESATQEVTQWEVHKEFLELAKDKNVFVKVVCSEKSTKDEIQRVARLVQAVGVDIPLILQPVTAFQSCHSPTPQQVIDFMDTALLTHKLVRVIPQTHVMLQQL

SEQ ID NO: 29707 - protein, 240 aa, Desulfurispirillum indicum
  misc_feature (1)..(240): tr|E6W2D7|E6W2D7_DESIS 7-carboxy-7-deazaguanine synthas e OS=Desulfurispirillum indicum (strain ATCC BAA-1389 / S5) OX=653733 GN=queE PE=3 SV=1
MNAMIQEMFWSVQGEGPRCGRPQLFVRLHGCNLTCSYCDTPASLIPRAPQSFPWHGRTVPNPVPLEFLQTLVAPELPFVESVSITGGEPLCQGDFVAAFGRWLCQDMAMEVLLETNGTFPGWLKENTDSFSLVSADLKFPWAQQHRDTAGELLDFLQSRQQSCQDSCKIICDDAFLACASHWLDHMVERGARFPVVLQPLTAADGSCRGVEESMKLVRTYTERGLRIWLIPQMHHLLGVQ

SEQ ID NO: 29708 - protein, 241 aa, Desulfurivibrio alkaliphilus
  misc_feature (1)..(241): tr|D6Z267|D6Z267_DESAT 7-carboxy-7-deazaguanine synthas e OS=Desulfurivibrio alkaliphilus (strain DSM 19089 / U NIQEM U267 / AHT2) OX=589865 GN=queE PE=3 SV=1
MAKENKPGGMAAEPATPPDTLPGTLPGTLMVAEIFYSLQGESSHAGYPCIFVRLAGCNLRCVYCDARYTYEEAGTCRTIAEVMAAIAELPPVSRVEITGGEPLLQEEVYSLLNALLADQRQVLLETNGTISLARVPAAVHCIMDVKCPGSGMAEHLDRENFRRLTDRDEIKFVLSDRRDYDWARKIINEYQLADHPHLIFSPVTNRLQPSELAAWLLADALPARLQLQLHTQLWPGCLRGK

SEQ ID NO: 29709 - protein, 223 aa, Desulfurobacterium atlanticum
  misc_feature (1)..(223): tr|A0A238XJ36|A0A238XJ36_9BACT 7-carboxy-7-deazaguanine synthase OS=Desulfurobacterium atlanticum OX=240169 GN =queE PE=3 SV=1
MLKVSEIFTSIQGEGVDVGRVAAFVRFSGCPLGCRFCDTEYAKREGKEISIAELISKLKKFQIPDIVVTGGEPLVQENIASFLTTLSKELWVRKIFIETCGFVFKEEIFAGKVFLNLSPKPPSMIGTDYSRFLLQYIRFFPERVNVKFLIADKTDLSYALKIVKSEPEFFKIKGLVFQPVEIPGKPYPDAVKQVLSLIFKNRSILSQFEVKVIPQVHKLLGIK

SEQ ID NO: 29710 - protein, 222 aa, Desulfurobacterium indicum
  misc_feature (1)..(222): tr|A0A1R1MMD6|A0A1R1MMD6_9BACT 7-carboxy-7-deazaguanine synthase OS=Desulfurobacterium indicum OX=1914305 GN=q ueE PE=3 SV=1
MKVYEIFSSVQGEGVDVGLVASFVRFAGCPLKCRYCDTQEARIGGTEFSHEEIIGELKNLGLSYVVVTGGEPLSQDGLPDFLFKLSSETWVKRIFVETSGFFYKADIFVKKVFVNISPKPPSMGMDFPLESLENFIVNFPDRVQVKFLILSEEDLIWILKIVRKYENYFSKKGIIFQPIGIPEKPYSESVKRAIDLVMREKTILFRFNVRVIPQIHKLVGIK

SEQ ID NO: 29711 - protein, 223 aa, Desulfurobacterium sp.
  misc_feature (1)..(223): tr|A0A432QQG6|A0A432QQG6_9BACT 7-carboxy-7-deazaguanine synthase OS=Desulfurobacterium sp. OX=2004706 GN=queE PE=3 SV=1
MSVIHISELFISIQGEGIDAGAPSFFIRTSGCSIGCKYCDTKYSWSRGREWKIDDLIEEVLKSEIPEVVITGGEPVEEKNLPVLIRKLSCIDSIRKITLETCGHIFRDDLGAPKLKIVLSPKPPTMEVEFPERALQKFLTTYEDTYIKFAVYDKNDLEVIRQFTYRNAKLIRKPIVIQPLEVPFENYVETSKRVSELVIADREFINDFKIKIIPQLHKLIGLK

SEQ ID NO: 29712 - protein, 224 aa, Desulfurobacterium thermolithotrophum
  misc_feature (1)..(224): tr|F0S1V3|F0S1V3_DESTD 7-carboxy-7-deazaguanine synthas e OS=Desulfurobacterium thermolithotrophum (strain DSM 11699 / BSA) OX=868864 GN=queE PE=3 SV=1
MRSSIAISELFTSLQGEGLDLGAPSFFIRISGCSIGCKYCDTKYSWKKGKLWDIDSLVKEVLKSKIPEVIVTGGEPVEEKNLSILIKRLSDLETVRKITLETCGHIFRDDLKYPKLKIVLSPKPPTMGVDFPTETLEKFLTTYEQVYIKFAAYDQKDLEVIKEFAYKNKNLIRAPIVIQPLEVPFEDYSYTSKRIFELVISDRKFINDFEIKIIPQIHKLIGLK

SEQ ID NO: 29713 - protein, 253 aa, Desulfuromonadaceae bacterium
  misc_feature (1)..(253): tr|A0A1G2WEF3|A0A1G2WEF3_9DELT 7-carboxy-7-deazaguanine synthase OS=Desulfuromonadaceae bacterium GWC2_58_13 O X=1801896 GN=queE PE=3 SV=1
MPAPATWKTDAQLIEVFSSIQGEGLLVGCRQVFVRMAGCNLACKFCDTAFAPTDSCRIEDAPGSGNFCGIPNPVPLDLLHDTLFRWLQAVPGAHHSISLTGGEPLLQAETLREWLPSLSKLLPIYLETNGTLAGSLEPLLPFLDFISMDIKLRSMTGTTTPWAAHRRFLDLARNKGCQVKAVVGEETPFEEIEQAARLVHETAPAVPLVLQAVTRAGGMAVSGRMLLDFQTRAARIHPLVRVIPQTHRFMGVL

SEQ ID NO: 29714 - protein, 230 aa, Desulfuromonadales bacterium
  misc_feature (1)..(230): tr|A0A1E7HVF2|A0A1E7HVF2_9DELT Radical_SAM domain-conta ining protein (Fragment) OS=Desulfuromonadales bacteriu m C00003094 OX=1869310 GN=BA870_04580 PE=3 SV=1
MNANIYEIFNSIQGEGIYAGVRQVFVRFCGCQLNCGYCDTQEAQSPVDRCRIHDRHINNPLNVNMVIDAINGLFTPSTRHISLTGGEPLLHPGFIKELAGCTSRPMYLETNAGIPDAARMVADVIDIAACDIKLPEHRSTDEYEHLLDYELETIRIFHSRGVETFAKIIVLRETTIESVKMAIFGIKSIDSEIPLILQPATPMDIDMGQLLDLMDFAGMHLSDIRIIPQM

SEQ ID NO: 29715 - protein, 248 aa, Desulfuromonadales bacterium
  misc_feature (1)..(248): tr|A0A1E7GXP1|A0A1E7GXP1_9DELT 7-carboxy-7-deazaguanine synthase OS=Desulfuromonadales bacterium C00003096 OX= 1869311 GN=queE PE=3 SV=1
MLPTDGRLIEVFSSIQGEGLLIGWRQIFVRLALCNLACRYCDTPVDVPEACRAETAPGAGSFFALPNPVSLDVLSSLVADWVGRLPGGHHSISITGGEPLMQGEMLQSWLPVLRSLLPIHLETNGTLPEVFAPLVSHVDWVSMDIKLASQTGEATPWSLHEEFLALAADRGCCVKAVVGAETTVEEVQQAAELVHRRAPAAPLILQPITRAGQVATAADHLLNLQQQAARIHPLVRVIPQTHAFLGLL

SEQ ID NO: 29716 - protein, 253 aa, Desulfuromonas acetexigens
  misc_feature (1)..(253): tr|A0A550JL18|A0A550JL18_9DELT 7-carboxy-7-deazaguanine synthase OS=Desulfuromonas acetexigens OX=38815 GN=que E PE=3 SV=1
MPAPATSPTDGHLIEVFSSIQGEGLMVGCRQIFVRLAGCNLDCAYCDTPFAPTSDCLVEETPGSGTFRALPNPVSLPTLLTLLEDWLVRTPGVHHSLSLTGGEPLLHGKLLGNWLPELARLLPLHLETNGTLPEALAPLLPHLAFISMDLKLASVTGCPTPWDVHRRFLEVARNNPGQAKAVVGPDTAGEEIEAAARLLRETAPEWPLILQALTVDGKVAVSGRELLVLQETAARIHPPVRVIPQTHRLLGVL

SEQ ID NO: 29717 - protein, 251 aa, Desulfuromonas acetoxidans
  misc_feature (1)..(251): tr|Q1K0N5|Q1K0N5_DESA6 7-carboxy-7-deazaguanine synthas e OS=Desulfuromonas acetoxidans (strain DSM 684 / 11070 ) OX=281689 GN=queE PE=3 SV=1
MPVTAVTDLPVVELFSSIQGEGPLVGCRQVFLRLAGCNLDCAYCDTDFQPSKCARIETQPGSEQFLYWENPLESTRLLAHLSTWKHQQPHLHHSLSLTGGEPLLHAEALKAWLPQLSTLFPIQLETNGTLPQALQLVIDQVEWVVMDIKLESQTGEPTPWAQHGEFLRVAVKRSCCVKLVVGPGTSESELVQAAQLVRDNAPDSEVFLQPCTVAGQCSLNGRILLQWQALIAEQGVRVRVVPQTHCFLAVL

SEQ ID NO: 29718 - protein, 228 aa, Desulfuromonas soudanensis
  misc_feature (1)..(228): tr|A0A0M4DHP4|A0A0M4DHP4_9DELT 7-carboxy-7-deazaguanine synthase OS=Desulfuromonas soudanensis OX=1603606 GN=q ueE PE=3 SV=1
MIGRRQVFVRMAGCNLDCAYCDTPFEPTISCRVEDAPGSGNFCDLPNPVALETLYNLLYAWQTVAPGVHHSISLTGGEPLIQGELLLEWLPVLRRIFPLHLETNGTLPALLEPLLPHLDWISMDLKLASLTGVPTPWEAHRDFLHLARRTNCCVKLVVGEEVSREELEEAAALVHEAGDDVLLILQPVTRDGRSGLRGADLLALQGLAARIHPQTLVIPQTHRFIDLL

SEQ ID NO: 29719 - protein, 213 aa, Desulfuromonas sp.
  misc_feature (1)..(213): tr|A0A0Q1FYG6|A0A0Q1FYG6_9DELT 7-carboxy-7-deazaguanine synthase OS=Desulfuromonas sp. SDB OX=1735325 GN=queE PE=3 SV=1
MFKINEIYPTILGESLYTGYPFIIVRFTGCPLRCSWCDTQYAYYEGNDYSLAGVMDEIAKFKYFNVLLTGGEPLAQNNLEKLIDQLLHKKYQIVVETSGALPVSGLAEKVHLVMDYKLPSSGMENKMMLKQNLNYLKTSDEIKFPVADKKDFNRAIEIIEESKLLDKVKIAVSPVMGKIDFSALAELILSSKMNIRLNLQIHKIIWPEISRGR

SEQ ID NO: 29720 - protein, 260 aa, Desulfuromonas sp.
  misc_feature (1)..(260): tr|A0A357YGG4|A0A357YGG4_9DELT 7-carboxy-7-deazaguanine synthase OS=Desulfuromonas sp. OX=892 GN=queE PE=3 SV= 1
MSGNPTMPVPVIPATESANLIEIFSSLQGEGLLVGCRQIFLRLAGCNLDCAYCDTPFQPSESCRVETLPGSGTFEEWSNPVGLDLLLPLLERWRGDFPGAHHSLSLTGGEPLLQVGVLQQWAPALKQLFPLFLETNGTLPESLALVVDELSWVSMDIKLASLTGVPTPWGDHEKFLKLAARVNCQVKVVVGDATDLHEIETVARLLRDVAPAVPLILQPVTLPSATLLNPRRLLELQGCAARIHPLVRVIPQTHRFLQLL

SEQ ID NO: 29721 - protein, 241 aa, Desulfuromonas thiophila
  misc_feature (1)..(241): tr|A0A1G7AHY7|A0A1G7AHY7_9DELT 7-carboxy-7-deazaguanine synthase OS=Desulfuromonas thiophila OX=57664 GN=queE PE=3 SV=1
MLELFSSVQGEGLLIGCRQIFLRLAGCNLCCAYCDTDFAPSAHCRVEQQPGSGQFVLWPNPVALPMVLGQIRDWLQQAPGAHHSLALTGGEPLLHGALLRDWLPQLRGLLPVQLETNGTLPQALAELLPWLDFVAMDIKLASQTGVPTPWAAHDEFLRLAAQRCCWVKLVVGPGTATTELEQAAALVVQRAPAATLVLQPRTLDHRCSLSAAELLAMQTVVAGLGVEVRVIGQMHRYLGML

SEQ ID NO: 29722 - protein, 251 aa, Desulfuromusa kysingii
  misc_feature (1)..(251): tr|A0A1H4D1W2|A0A1H4D1W2_9DELT 7-carboxy-7-deazaguanine synthase OS=Desulfuromusa kysingii OX=37625 GN=queE PE =3 SV=1
MHMPLTPKADLIEIFSSIQGEGILVGCRQIFLRFCGCNLSCRYCDTNFEKTDKCLIESIPGSGELDTLNNPLSLAQVETLLDSWNSELPSAHHSISITGGEPLLQADLLLSWLPTLRKALPIHLETNGTLPAQLGKVIQHLDWVSMDIKLHSQTGERTEWDLHRQFLEIANQTDCYVKLVVGENTPDLEMQLAADLVATVSKYIPIVLQPVTMDGRIQVSTRRLLQMQAIIAEEIPSVRVIPQTHRFMGLL

SEQ ID NO: 29723 - protein, 214 aa, Dethiosulfatarculus sandiegensis
  misc_feature (1)..(214): tr|A0A0D2HX64|A0A0D2HX64_9DELT 7-carboxy-7-deazaguanine synthase OS=Dethiosulfatarculus sandiegensis OX=142904 3 GN=queE PE=3 SV=1
MKQLKINECFLSIQGESTFAGLPCVFLRLSGCPLSCSWCDTEYAKDEGEYLSFDRIVKKLLSFDVDRIEVTGGEPLAQEPTLELLQSLCDRGLAVLLETSGALDISQVDPRVHVIMDIKCPGSGMTGRMHWSNLKSLLPHHEVKFVCQDRQDYEFARKIIKDNDLSNKVTVLFSTVTGRLAPKDLVAWVLEDRLRARFQLQMHKYIWPPDQRGV

SEQ ID NO: 29724 - protein, 221 aa, Dethiosulfatibacter aminovorans
  misc_feature (1)..(221): tr|A0A1M6ARU2|A0A1M6ARU2_9FIRM 7-carboxy-7-deazaguanine synthase OS=Dethiosulfatibacter aminovorans DSM 17477 OX=1121476 GN=queE PE=3 SV=1
MKYNVVERFTSINGEGMKAGQLAVFIRFAGCNLRCTYCDTMWANDKDVAYEPMTAEEIYDYIKGTGIVNVTITGGEPLIQAGVDKLLELLSGDESLYVEIETNGSVPLKDFMDLTNPPSFTMDYKLPSSEMENGMEKENFSYLTEKDTLKFVVGTMEDLERADELIREHRLTDTTNVYFSPVYGELPYEAIVDFMKERNLGGVTFQLQLHKFVWNPEERSV

SEQ ID NO: 29725 - protein, 245 aa, Devosia elaeis
  misc_feature (1)..(245): tr|A0A178I6X4|A0A178I6X4_9RHIZ 7-carboxy-7-deazaguanine synthase OS=Devosia elaeis OX=1770058 GN=queE PE=3 SV= 1
MSAVEPPGIRISEIFGPTIQGEGVLIGQPTVFVRTGGCDYRCAWCDSLHAVDSRFREDWRPMSVEQIWSQVRALSGGEPLMVSLSGGNPAIQALGDLIVCGHQDGYRFALETQGSVARDWFSMLDVLVLSPKPPSSQMSVDWAQFEACLDAAQGKPLTVLKLVVFGDEDYDFARDVAARYPHLPTYLQPGNHTPPSPDAADGPIDIEGVMQRMEWLVDKVTQDRWFQARVLPQLHVLLWGNKRGV

SEQ ID NO: 29726 - protein, 242 aa, Devosia elaeis
  misc_feature (1)..(242): tr|A0A178HTK1|A0A178HTK1_9RHIZ 7-carboxy-7-deazaguanine synthase OS=Devosia elaeis OX=1770058 GN=queE PE=3 SV= 1
MEPPTIRISEIFGPTIQGEGVLIGQPTVFVRTGGCDYRCAWCDSLHAVDSRFRDDWRPMSIEQIWAQVRVLSGGEPLTVSLSGGNPAIQPLGELIELGHREGYRFALETQGSVARDWFSTLDTLVLSPKPPSSQMSTDWARFEACLAAAQGRPLTVLKLVVFDDEDYAYAKDAAARYPSLPVYLQPGNHTPPSPDADDVIIDITGVMQRMEWLVDKVTQDRWFEARVLPQLHVLLWGNTRGV

SEQ ID NO: 29727 - protein, 245 aa, Devosia psychrophila
  misc_feature (1)..(245): tr|A0A0F5PZK8|A0A0F5PZK8_9RHIZ 7-carboxy-7-deazaguanine synthase OS=Devosia psychrophila OX=728005 GN=queE PE= 3 SV=1
MKHMEPPSIRVSEIFGPTIQGEGVLIGLPTVFVRTGGCDYRCSWCDSLHAVDNRFRGDWQAMSVEQIWEQVSALSGGEPLTVSLSGGNPAIQPLGELIEFGHREGYRFALETQGSVARDWFSTLDTLVLSPKPPSSQMSTDWARFEACLAVAQGRPLTVLKLVVFDDEDYAYAKDAAARYPHLPVYLQPGNHTPPSPDRDDVIVDMTGVMRRMKWLIEKVTQDRWFDARVLPQLHMLLWGNTRGV

SEQ ID NO: 29728 - protein, 245 aa, Devosia riboflavina
  misc_feature (1)..(245): tr|A0A087LYJ6|A0A087LYJ6_9RHIZ 7-carboxy-7-deazaguanine synthase OS=Devosia riboflavina OX=46914 GN=queE PE=3 SV=1
MNQMEPPSIRVSEIFGPTIQGEGVLIGLPTVFVRTGGCDYRCSWCDSLHAVDNRFRSDWQAMTVEQIWDQVRALSGGEPLTVSLSGGNPAIQPLGELIEFGHREGYRFALETQGSVARDWFSTLDTLVLSPKPPSSQMSTDWARFEACLAAAQGRPLTVLKLAVFDDEDYAYAKDAAARYPHLPIYLQPGNHTPPSPDTDDVIIDITGVMRRMDWLVNKVTHDRWFEARVLPQLHVLLWGNTRGV

SEQ ID NO: 29729 - protein, 279 aa, Devosia sp.
  misc_feature (1)..(279): tr|A0A2L1S762|A0A2L1S762_9RHIZ 7-carboxy-7-deazaguanine synthase OS=Devosia sp. I507 OX=2083786 GN=queE PE=3 S V=1
MPRPILLCLVQAATARSLCRTRQRDRQNLGGVQAVSAVEPPGIRISEIFGPTIQGEGVLIGQPTVFVRTGGCDYRCAWCDSLHAVDSRFREDWRPMSVEQIWSQVRALSGGEPLMVSLSGGNPAIQALGDLIVCGHQDGYRFALETQGSVARDWFSMLDVLVLSPKPPSSQMSVDWAQFEACLDAAQGKPLTVLKLVVFGDEDYDFARDVAARYPHLPTYLQPGNHTPPSPDAADGPIDIEGVMQRMEWLVDKVTQDRWFEARVLPQLHVLLWGNKRGV

SEQ ID NO: 29730 - protein, 219 aa, Dialister invisus
  misc_feature (1)..(219): tr|R5T8M2|R5T8M2_9FIRM 7-carboxy-7-deazaguanine synthas e OS=Dialister invisus CAG:218 OX=1263072 GN=queE PE=3 SV=1
MKNKFPVAEIFDSIEGEGKRTGYMAVFVRFAGCNIRCTYCDTAYALKESDAEEFLTKEELLGRIRSYPWKRITFTGGEPLLQPLQEICDILGEEGYEINIETNGAVPLLARRPQNLFYTMDYKCTDSGMKSFMRLPNLKELTEDDVLKFVVSSKTDLEDMKEIIIKYFPRGGPKFYVSPVWGKIEPRELVEYVRKEKLAEVCVQVQLHKIIWEPDRRGV

SEQ ID NO: 29731 - protein, 219 aa, Dialister invisus
  misc_feature (1)..(219): tr|C9LPW9|C9LPW9_9FIRM 7-carboxy-7-deazaguanine synthas e OS=Dialister invisus DSM 15470 OX=592028 GN=queE PE=3 SV=1
MKNKFPVAEIFDSIDGEGKRTGYMAVFVRFAGCNIRCTYCDTAYALKESDAEEFLTKEELLGRIRSYPWKRITFTGGEPLLHPLQEICDILGEEGYEINIETNGAVPLLARRSQNLFYTMDYKCTDSGMKSFMRLPNLKELTEEDVLKFVVSSKTDLEDMKEIIIKYFPRGGPKFYVSPVWGKIEPRELVEYVRKEKLAEVCVQVQLHKIIWEPDRRGV

SEQ ID NO: 29732 - protein, 226 aa, Dialister micraerophilus
  misc_feature (1)..(226): tr|F2BWC6|F2BWC6_9FIRM 7-carboxy-7-deazaguanine synthas e OS=Dialister micraerophilus DSM 19965 OX=888062 GN=qu eE PE=3 SV=1
MKNNGTIKGGFHIVEIFDSIEGEGKRTGYMAIFVRLASCNLRCTYCDTSYALTLKDTKEILSEKELIEKIHSYPWKKITFTGGEPMLHPLQNICETLGKEGYEINIETSGSIPLFDKRPPNLFYTMDFKCTGSGMKQHMIEENFEKLNKDDVLKFVVGDLTDLGDMRKIIKIKYNNAEQPRFYVSPVWGKIKPVELVNYVKDHKMTNVCVQVQLHKIIWNPEARGV

SEQ ID NO: 29733 - protein, 226 aa, Dialister microaerophilus
  misc_feature (1)..(226): tr|E4L7B3|E4L7B3_9FIRM 7-carboxy-7-deazaguanine synthas e OS=Dialister microaerophilus UPII 345-E OX=910314 GN= queE PE=3 SV=1
MKNNGTIKGGFHIVEIFDSIEGEGKRTGYMAIFVRLASCNLRCTYCDTSYALTLKDTKEILSEKELIEKIHSYPWKKITFTGGEPMLHPLQNICETLGKEGYEINIETSGSIPLFDKRPPNLFYTMDFKCTGSGMKQYMIEENFEKLNKDDVLKFVVGDLTDLGDMRKIIKTKYNNVEQPRFYVSPVWGKIKPVELVNYVKNHKMTNVCVQVQLHKIIWNPEARGV

SEQ ID NO: 29734 - protein, 219 aa, Dialister pneumosintes
  misc_feature (1)..(219): tr|A0A1B3WEV5|A0A1B3WEV5_9FIRM 7-carboxy-7-deazaguanine synthase OS=Dialister pneumosintes OX=39950 GN=queE PE =3 SV=1
MRHKFPVVEIFDSIDGEGKRTGYMAIFIRFAGCNLRCTYCDTSYALCSSDASIFLTKEELLTKIASYPWKRITFTGGEPLLQPLQELCEELDRAGYEMNVETNGAVPLLSQRPKNLFYTMDYKCSDSGVKSHMRLENFKELTSKDVLKFVVSSQRDLDDMQMIIKKYFTTEKPAFYVSPVWGKITPAALVDYVKEKELSEVCVQVQLHKIIWSPDKRGV

SEQ ID NO: 29735 - protein, 229 aa, Dialister sp.
  misc_feature (1)..(229): tr|A0A3C2EQG5|A0A3C2EQG5_9FIRM 7-carboxy-7-deazaguanine synthase OS=Dialister sp. OX=1955814 GN=queE PE=3 SV=1
MKKTEAYRYDDGLFHVTEIFDSIDGEGKRTGLMAIFVRLAGCNLRCSYCDTAYSLSLTDTAEALTEEELLSRIHAFPWKKITLTGGEPMLHPIRRLCEVLGKEGYEVNIETNGAVALFQERPQGTFYTMDFKCGGSGMKERMLEENFRLLGKEDVLKFVVSSKADMDEMKAIIAAHFHKGEDPAFYVSPVWGRIAPADLVEYVRRERLSDVRVQVQLHKIIWDPERRGV

SEQ ID NO: 29736 - protein, 233 aa, Dialister sp.
  misc_feature (1)..(233): tr|R6AE66|R6AE66_9FIRM 7-carboxy-7-deazaguanine synthas e OS=Dialister sp. CAG:486 OX=1262870 GN=queE PE=3 SV=1
MWQRMKKTEAYRYDDGLFHVTEIFDSIDGEGKRTGLMAIFVRLAGCNLRCSYCDTAYSLSLTDTAEALTEEELLSRIHAFPWKKITLTGGEPMLHPIRHLCEVLGKEGYEVNIETNGAVALFQERPQGTFYTMDFKCGGSGMKERMLEENFKLLGKEDVLKFVVSSKADMDEMKAIIAAHFHKGEDPAFYVSPVWGRIAPADLVEYVRRERLSDVRVQVQLHKIIWDPERRGV

SEQ ID NO: 29737 - protein, 227 aa, Dialister succinatiphilus
  misc_feature (1)..(227): tr|H1D0W5|H1D0W5_9FIRM 7-carboxy-7-deazaguanine synthas e OS=Dialister succinatiphilus YIT 11850 OX=742743 GN=q ueE PE=3 SV=1
MKSNYAYDDGLFHITEIFDSIDGEGKRTGFMAVFLRLAGCNLRCNYCDTAYSLTLEDTAEALTEEEVIRRIHGYPWKRLTITGGEPMLHPLHHLCRTLGQEGYDINIETNGAVPLWRERPEGVFYTMDFKCSGSGMKSHMNLDNFKLLNGGDVLKFVVSSKEDLDEMKDVVEHHFTAARHPQFFVSPVWGRIQPDKLVDYVRNHQLQDVRVQVQLHKIIWDPDRRGV

SEQ ID NO: 29738 - protein, 212 aa, Diaphorobacter sp.
  misc_feature (1)..(212): tr|A0A0J0UP88|A0A0J0UP88_9BURK 7-carboxy-7-deazaguanine synthase OS=Diaphorobacter sp. J5-51 OX=680496 GN=queE PE=3 SV=1
MSYSVKEIFYTLQGEGGQAGMPAVFCRFAGCNLWSGREQDRASAICRFCDTDFVGTDGTLGGKFADASTLARTIAAQWPAQDRAHRLVVLTGGEPLLQVDAPLIDALHAEGFRIAVESNGTIAAPPGIDWLCISPKAGAEWVQREGQELKLVWPQRGLDLDALETAGHFSHRFLQPMDGPNQAAHIALCIDLCMQRPAWRLSLQTHKLTGIR

SEQ ID NO: 29739 - protein, 208 aa, Dichotomicrobium thermohalophilum
  misc_feature (1)..(208): tr|A0A397QE40|A0A397QE40_9RHIZ 7-carboxy-7-deazaguanine synthase OS=Dichotomicrobium thermohalophilum OX=93306 3 GN=queE PE=3 SV=1
MYSVKEIYFTLQGEGAQTGRAAVFLRFAGCNLWTGREEDRAKAICQFCDTDFVGTDGPGGGKFAEAPALAEAVAAQWPGGGKPLVVCTGGEPLLQFDSALINALHTAGFEIAIETNGTLPAPPGIDWICVSPKAGAPLVQRSGQELKLVYPQTAAPPEAFEALDFKHFFLQPMDGPHREANTQAAARYCLDHPRWRLSLQTHKFIGLA

SEQ ID NO: 29740 - protein, 223 aa, Dickeya aquatica
  misc_feature (1)..(223): tr|A0A375AE24|A0A375AE24_9GAMM 7-carboxy-7-deazaguanine synthase OS=Dickeya aquatica OX=1401087 GN=queE PE=3 S V=1
MLYPINEMFQTLQGEGFFTGVPAVFIRLQGCPVGCSWCDTKHTWEKLPARQISLDEVLAKRGESDAWCASDVDTLLQQIAQQGYRARHVVITGGEPCLYDLTPLTQALAEQGFSTQIETSGTHEVRCSPDCWVTVSPKVNMRGGLTVLDQALQRADEIKHPVARERDIDALDTLLARLTDDKARVVALQPVSQKDEATRLCIETCIARNWRLSMQTHKYLNIA

SEQ ID NO: 29741 - protein, 223 aa, Dickeya chrysanthemi
  misc_feature (1)..(223): tr|C6CLR4|C6CLR4_DICC1 7-carboxy-7-deazaguanine synthas e OS=Dickeya chrysanthemi (strain Ech1591) OX=561229 GN =queE PE=3 SV=1
MRYPINEMFQTLQGEGFFTGVPAVFIRLQGCPVGCSWCDTKHTWERLPDRQIPLADILVKSGESDAWSHSSSEELLQQMRLQGYSAKHIVITGGEPCIHDLTPLTQALEQQGFSTQIETSGTHEVRCSSACWVTVSPKVNMRGGLAVLDQALRRADEIKHPVARERDIEALDALLARLDDDKPRVVALQPISQKDDATRLCIETCIARNWRLSMQTHKYLNIA

SEQ ID NO: 29742 - protein, 223 aa, Dickeya dadantii
  misc_feature (1)..(223): tr|E0SDK8|E0SDK8_DICD3 7-carboxy-7-deazaguanine synthas e OS=Dickeya dadantii (strain 3937) OX=198628 GN=ygcF P E=3 SV=1
MLYPINEMFQTLQGEGFFTGVPAVFIRLQGCPVGCSWCDTKHTWEKRPERQISLAEVLVKSGESDAWSGSSAGDLIQQIARQGYTARHVVITGGEPCIHDLTPLTQALEQQGFSTQIETSGTHEVRCSPNCWVTVSPKVNMRGGLAVLDQALQRANEIKHPVARERDIEALDALLARLDDDKARVVALQPISQKDDATRLCIETCIARNWRLSMQTHKYLNIA

SEQ ID NO: 29743 - protein, 223 aa, Dickeya dianthicola
  misc_feature (1)..(223): tr|A0A385Y1E8|A0A385Y1E8_9GAMM 7-carboxy-7-deazaguanine synthase OS=Dickeya dianthicola OX=204039 GN=queE PE=3 SV=1
MLYPINEMFQTLQGEGFFTGVPAVFIRLQGCPVGCSWCDTKHTWEKRPERQISLAEVVVKSGESDAWSGSSAEDLIQRMALQGYSARHVVITGGEPCLHDLIPLTQALEQQGFSTQIETSGTHEVRCSPACWVTVSPKVNMRGGLAVLDQALQRADEIKHPVARERDIAALDALLARLDDDKARVVALQPVSQKDDATRLCIETCIARNWRLSMQTHKYLNIA

SEQ ID NO: 29744 - protein, 223 aa, Dickeya fangzhongdai
  misc_feature (1)..(223): tr|A0A2K8QQI1|A0A2K8QQI1_9GAMM 7-carboxy-7-deazaguanine synthase OS=Dickeya fangzhongdai OX=1778540 GN=queE PE =3 SV=1
MLYPINEMFQTLQGEGFFTGVPAVFIRLQGCPVGCSWCDTKHTWEKLPERQIPLAEVLVKSGESDAWSGSSVEDLLQQMALQGYSARHVVITGGEPCIHDLTPLTQTLEQRGFSTQIETSGTHEVRCSPDCWVTVSPKVNMRGGLTVLDQALQRANEIKHPVARERDIEALDALLARLDDDKARVVALQPISQKDDATRLCIETCIARNWRLSMQTHKYLNIA

SEQ ID NO: 29745 - protein, 224 aa, Dickeya paradisiaca
  misc_feature (1)..(224): tr|C6CAW6|C6CAW6_DICP7 7-carboxy-7-deazaguanine synthas e OS=Dickeya paradisiaca (strain Ech703) OX=579405 GN=q ueE PE=3 SV=1
MPQYPINEMFQTLQGEGYFTGVPAVFIRLQGCPVGCSWCDTKHTWEKLAERQSSLAEVLAKTAESDVWGAADATEILSSMRELGYTARHVVITGGEPCIHDLTPLTLALEQQGFSTQIETSGTHDVRCSPATWVTVSPKVNMRGGMAVLLSALQRADEIKHPVARERDVDALDALLARLDDDKSRVVALQPVSQKEEATRLCIATCIARNWRLSMQTHKYLNIA

SEQ ID NO: 29746 - protein, 223 aa, Dickeya solani
  misc_feature (1)..(223): tr|A0A2K8VXE6|A0A2K8VXE6_9GAMM 7-carboxy-7-deazaguanine synthase OS=Dickeya solani RNS 08.23.3.1.A OX=1240086 GN=queE PE=3 SV=1
MLYPINEMFQTLQGEGFFTGVPAVFIRLQGCPVGCSWCDTKHTWEKRPERRISLAEVLVKRGESDAWSGSSAEELLQQMTLQGYSARHIVITGGEPCIHDLTSLTQALEQQGFSTQIETSGTHEVRCSPNCWVTVSPKVNMRGGLAVLDQALQRADEIKHPVARERDIEALDALLARLDDDKARVVALQPISQKDDATRLCIETCIARNWRLSMQTHKYLNIA

SEQ ID NO: 29747 - protein, 223 aa, Dickeya sp.
  misc_feature (1)..(223): tr|A0A454UJY7|A0A454UJY7_9GAMM 7-carboxy-7-deazaguanine synthase OS=Dickeya sp. FVG10-MFV-A16 OX=2487135 GN=qu eE PE=3 SV=1
MLYPINEMFQTLQGEGFFTGVPAVFIRLQGCPVGCSWCDTKHTWEKLPERQIPLAEVLVKSGESDAWSGSSVEDLLQQMALQGYSARHVVITGGEPCIYDLTPLTQTLEQRGFSTQIETSGTHEVRCSPDCWVTVSPKVNMRGGLAVLEQALQRADEIKHPVARERDIEALDALLARLDDDKARVVALQPISQKDDATRLCIETCIARNWRLSMQTHKYLNIA

SEQ ID NO: 29748 - protein, 223 aa, Dickeya sp.; identical to SEQ ID NO: 29747
  misc_feature (1)..(223): tr|A0A3N0FWV0|A0A3N0FWV0_9GAMM 7-carboxy-7-deazaguanine synthase OS=Dickeya sp. FVG1-MFV-O17 OX=2487136 GN=que E PE=3 SV=1

SEQ ID NO: 29749 - protein, 223 aa, Dickeya zeae
  misc_feature (1)..(223): tr|A0A2K9QI11|A0A2K9QI11_9GAMM 7-carboxy-7-deazaguanine synthase OS=Dickeya zeae OX=204042 GN=queE PE=3 SV=1
MRYPINEMFQTLQGEGFFTGVPAVFIRLQGCPVGCSWCDTKHTWDTLPERQISLAEVLVKCGESDAWSSSSVEELLQQITQQGYSARHVVITGGEPCIHDLTPLTQALEQQGFSTQIETSGTHEVRCSSACWVTVSPKVNMRGGLAVLDQALQRADEIKHPVARERDIEALDGLLARLDDDKARVVALQPVSQKEDATRLCIETCIARNWRLSMQTHKYLNIA

SEQ ID NO: 29750 - protein, 223 aa, Dickeya zeae
  misc_feature (1)..(223): tr|A0A0A8FGB9|A0A0A8FGB9_9GAMM 7-carboxy-7-deazaguanine synthase OS=Dickeya zeae EC1 OX=1427366 GN=queE PE=3 S V=1
MRYPINEMFQTLQGEGFFTGVPAVFIRLQGCPVGCSWCDTKHTWDTLPERQISLAEVLVKRGESDAWSSSSVEELLQQITQQGYSARHVVITGGEPCIHDLTPLTQVLEQQGFSTQIETSGTHEVRCSSACWVTVSPKVNMRGGLAVLDQALQRADEIKHPVARERDIEALEGLLARLDDDKARVVALQPVSQKEDATRLCIETCIARNWRLSMQTHKYLNIA

SEQ ID NO: 29751 - protein, 253 aa, Dictyobacter alpinus
  misc_feature (1)..(253): tr|A0A402BIA7|A0A402BIA7_9CHLR 7-carboxy-7-deazaguanine synthase OS=Dictyobacter alpinus OX=2014873 GN=exsE PE =3 SV=1
MTQTIENNRVRTKTIQVSEIFGPTIQGEGALIGKPTVFVRTGGCDYRCAWCDSLYAVLPEHKAEWASMDTRQVFAEIQRLSNNTPILVTLSGGNPAIQPLEELIDLGHQHGYTFAIETQGSVAQPWFSSLDYLTLSPKPPSSKQVTRWERLDRSILYATTNKYDREIQICLKIVIFNEEDYAYARSVAERYPALPMYLQAGNHTPPQQAQEIDISGILDRMDWLIQRTIADRWYEATVLPQLHTLLWGNKRGV

SEQ ID NO: 29752 - protein, 253 aa, Dictyobacter aurantiacus
  misc_feature (1)..(253): tr|A0A401ZQG7|A0A401ZQG7_9CHLR 7-carboxy-7-deazaguanine synthase OS=Dictyobacter aurantiacus OX=1936993 GN=exs E PE=3 SV=1
MTQTAQNISVGTKTIQVSEIFGPTIQGEGALIGKPTVFVRTGGCDYRCSWCDSLYAVLPEHKAEWHAMDTRQIFAEVERLSGHAPLLVTLSGGNPAIQPLEGLIDLGHEHGYTFAIETQGSVAQPWFAKLDYLTLSPKPPSSKQVTRWERLDRSILYATNARHTHEIQINLKIVIFDEDDYAYARYVAERYPAIPMYLQAGNHTPPQQAEEIDVSGILQRMDWLIQRTIADRWYGATVLPQLHTLLWGNKRGV

SEQ ID NO: 29753 - protein, 253 aa, Dictyobacter kobayashii
  misc_feature (1)..(253): tr|A0A402AWP8|A0A402AWP8_9CHLR 7-carboxy-7-deazaguanine synthase OS=Dictyobacter kobayashii OX=2014872 GN=exsE PE=3 SV=1
MTQTAQNIGVGTRTVQVSEIFGPTIQGEGALIGKPTVFVRTGGCDYRCAWCDSLYAVLPEHKAEWNPMETRQIFAEIARLSGDTPVLVTLSGGNPAIQPLEALIDLGHEHGYTFAIETQGSVAQPWFSKLDYLTLSPKPPSSKQVTRWERLDRSILCATNNKHGHEIQINLKIVIFDEEDYAYARYVAERYPTLPMYLQAGNHTPPQQAKEIDISGILNRMDWLIQRTIADRWYGVTVLPQLHTLLWGNKRGV

SEQ ID NO: 29754 - protein, 256 aa, Dictyobacter sp.
  misc_feature (1)..(256): tr|A0A5A5T7H4|A0A5A5T7H4_9CHLR 7-carboxy-7-deazaguanine synthase OS=Dictyobacter sp. Uno17 OX=2014874 GN=exsE PE=3 SV=1
MTQTIQPAQGTRAHTRTVMVSEIFGPTIQGEGALIGKPTVFVRTGGCDYRCSWCDSLYAVLPEHKGEWQAMDSAQIFAEVRRLSGDTPLLVTLSGGNPAIQPLEELIELGHQYGYTFAIETQGSVAQPWFAMLDYLTLSPKPPSSKQVTRWERLERCIVNATNTQPNHEIQICLKIVIFNEEDYAYARYVAEQYPAFPMYLQAGNHTPPQTADKIDISGILDRMDWLIQRTIADHWYGVTVLPQLHTLLWGNKRGV

SEQ ID NO: 29755 - protein, 206 aa, Dinghuibacter silviterrae
  misc_feature (1)..(206): tr|A0A4R8DDY3|A0A4R8DDY3_9BACT 7-carboxy-7-deazaguanine synthase OS=Dinghuibacter silviterrae OX=1539049 GN=qu eE PE=3 SV=1
MIATADTSVLLPVMESFYTLQGEGAYQGRAAWFIRLGGCDVGCVWCDVKDSWDAARHPLRSVGDLVHEAAAQPGRIAVVTGGEPLMHDCGPLTKALRQAGFRTHIETSGSSPLSGEWDWICLSPKKFKAPLPEVTGKADELKVVVYNRHDFEWATRYAALVSPECRLFLQPEWSRAEEMTPLIVDYIKANPQWTLSAQVHKFIHVP

SEQ ID NO: 29756 - protein, 218 aa, Dissulfuribacter thermophilus
  misc_feature (1)..(218): tr|A0A1B9F7C0|A0A1B9F7C0_9DELT 7-carboxy-7-deazaguanine synthase OS=Dissulfuribacter thermophilus OX=1156395 G N=queE PE=3 SV=1
MLNDMNNILEVTETFVSLQGEGLFTGVPCFFIRLSRCNLRCSYCDTEYAKAPGERKLIEDLVEEWRGSRVPFVQITGGEPLLQNGVYPLMTQLLKKGAVVLLETNGSIGLKDVPIGVYKCVDRKCPGSGEVGSWIPENLRFLGRMDSVKFVISNRNDYEWAREEVLRQGLSRFTNPIFSPVWGVLAPTELADWIVEDRTPVRLGLQMHKILWKEARGR

SEQ ID NO: 29757 - protein, 239 aa, Dokdonella fugitiva
  misc_feature (1)..(239): tr|A0A4R2IDC5|A0A4R2IDC5_9GAMM 7-carboxy-7-deazaguanine synthase OS=Dokdonella fugitiva OX=328517 GN=queE PE=3 SV=1
MTTVAARGAAAGDAVVSAGANAVASSPERLRITEIFHSLQGEADAVGWPTVFVRLTGCPLRCSWCDTTYSFHGGEWRTIDAVLDDVAKYGVRHVCVTGGEPLAQKRCLALLARLCDAGYEVSLETSGALDVGEVDARVRKVIDLKAPGSGEVARNLWSNVDRLLPHDQVKVVLADREDYDWAVARVREHRIDARCQVLFSPVHGRLAPRTLAEWVLADRLPVRMQLQLHKLLWGEEPGR

SEQ ID NO: 29758 - protein, 229 aa, Dokdonella immobilis
  misc_feature (1)..(229): tr|A0A1I4XF65|A0A1I4XF65_9GAMM 7-carboxy-7-deazaguanine synthase OS=Dokdonella immobilis OX=578942 GN=queE PE= 3 SV=1
MVATALTPDPSSATTASRRLRVTEIFHSLQGESDSVGWPTVFVRLTGCPLRCVWCDTEYSFHGGEWRDIPSILDQVGGYATHHVCVTGGEPLAQKRCLPLLVALCDEGYEVSLETSGALDIGEVDPRVRRVVDFKPPGSGEVGRNLWTNVGHLGARDQVKFVLADRADYDWAVARIEEHALARRCPILFSPVHGQLEPRALAEWILADRLPVRFQMQLHKQLWGSEPGR

SEQ ID NO: 29759 - protein, 239 aa, Dokdonella koreensis
  misc_feature (1)..(239): tr|A0A160DXG5|A0A160DXG5_9GAMM 7-carboxy-7-deazaguanine synthase OS=Dokdonella koreensis DS-123 OX=1300342 GN= queE PE=3 SV=1
MPIRPLPREHGDIATSNAALIAGKPRPERLRITEIFHSIQGEADAAGWPTVFVRLTGCPLRCTWCDTAYAFHGGTWWTIDAILADVARHGARHICVTGGEPLAQKRCLMLLTRLCDAGYEVSLETSGAIDVGAVDARVRKVLDLKAPGSGEDARNRWDNLRFLSPSDQVKFVLAGRADYEWARDVVGRHRLGQRCMVLFSPVHGSLDPRDLAEWILADRLPVRFQLQLHKILWGEESGH

SEQ ID NO: 29760 - protein, 213 aa, Dokdonia donghaensis
  misc_feature (1)..(213): tr|A0A0A2GWH2|A0A0A2GWH2_9FLAO 7-carboxy-7-deazaguanine synthase OS=Dokdonia donghaensis DSW-1 OX=1300343 GN=q ueE PE=3 SV=1
MTKQALDSLQAQIDLGEMLPLMEEFYTIQGEGFHKGTAAYFIRVGGCDVGCHWCDVKESWDAAIHPPTNANTIAENAAKYSDTIVVTGGEPLMWDMNPLTKKLKSLGLTTHIETSGAYQLSGDWDWICLSPKKRMLPTQSVLEKANELKVIIFNKSDFDFAEKHAAQVGEDCILYLQPEWSVRDKMVPLIVDYVMKNPQWKVSLQTHKYLNIP

SEQ ID NO: 29761 - protein, 210 aa, Dokdonia pacifica
  misc_feature (1)..(210): tr|A0A239E0Z4|A0A239E0Z4_9FLAO 7-carboxy-7-deazaguanine synthase OS=Dokdonia pacifica OX=1627892 GN=queE PE=3 SV=1
MTKEAIQSRVDLGELLPLMEEFYTIQGEGYHKGTAAYFIRVGGCDVGCHWCDVKESWDAAIHPPTEAVTIADNAAKYSDTIVVTGGEPLMWDMKPLTTLLKERGLQVHIETSGAYDLSGDWDWICLSPKKRMLPKDEVSQKAHELKVIVYNKSDFAFAEEQAAKVSENCILYLQPEWSVRDKMVPLIVDYVMANPKWKISLQTHKYLNIP

SEQ ID NO: 29762 - protein, 213 aa, Dokdonia sp.
  misc_feature (1)..(213): tr|A0A559RPD3|A0A559RPD3_9FLAO 7-carboxy-7-deazaguanine synthase OS=Dokdonia sp. Hel1_53 OX=1566287 GN=queE PE =3 SV=1
MTKQASEAIQAQVDLGEMLPLMEEFYTIQGEGFHKGTAAYFIRVGGCDVGCHWCDVKESWDAAIHPPTSADTIAQNAAKYSDTIVVTGGEPLMWDMNPLTEKLKSLGLTTHIETSGAYQLSGEWDWICLSPKKRMLPTPSVLEKANELKVIIFNKSDFTFAEKHAEQVGDDCILYLQPEWSVRDKIVPLIVDYVMANPKWKVSLQTHKYLNIP

SEQ ID NO: 29763 - protein, 213 aa, Dokdonia sp.
  misc_feature (1)..(213): tr|A0A2S1Q8Y1|A0A2S1Q8Y1_9FLAO 7-carboxy-7-deazaguanine synthase OS=Dokdonia sp. Dokd-P16 OX=2173169 GN=queE P E=3 SV=1
MTKQALDSLQAQIDLGEMLPLMEEFYTIQGEGFHKGTAAYFIRVGGCDVGCHWCDVKESWDAAIHPPTNANTIAENAAKYSDTIVVTGGEPLMWDMNPLTQKLKSLGLTTHIETSGAYELSGEWDWICLSPKKRMLPKASVLEKANELKVIIFNKSDFDFAEKHAAQVGEDCILYLQPEWSVRDKMVPLIVDYVMKNPKWKVSLQTHKYLNIP

SEQ ID NO: 29764 - protein, 208 aa, Dolichospermum compactum
  misc_feature (1)..(208): tr|A0A1Z4UXZ5|A0A1Z4UXZ5_9CYAN 7-carboxy-7-deazaguanine synthase OS=Dolichospermum compactum NIES-806 OX=19734 81 GN=queE PE=3 SV=1
MSFSEIKLPIHETFQSTVQGEGYWTGCLVDFIRLSGCPVACPWCDTGYADPRANLPRIERPIAELLGEIKSPRVVITGGEPFIHKHLPELVQALLVADKLVSIETSGSFWQEVSPPAWITLSPKEHLNAKYPVQSQFWSRANEVKIIIETGREIDFYEKYLSTHPNLLVYLQPEWNSSSKSLPLILQILQQKPDYRLSLQTHKYIGVQ

SEQ ID NO: 29765 - protein, 269 aa, Dolichospermum planctonicum
  misc_feature (1)..(269): tr|A0A480AJ34|A0A480AJ34_9CYAN 7-carboxy-7-deazaguanine synthase OS=Dolichospermum planctonicum OX=136072 GN=q ueE PE=3 SV=1
MTTKNKVNSTARLIEVFSAIQGEGLNVGTRQIFIRFAFCDLRCYFCDSAHTWNAPPSCQIESYPGLRDFEVHPNPVASSTLLAWIARQNLPFVHDSISLTGGEPLLHAQFLAEFLPALRSLTSLPIYLETGGHRPENLAIILPYLDSVGMDLKLPSVSGETYWPEHTKFLQLCSNSKLEVFVKIIVSQSTVVQELERAALLVAQVNEDIPVFLQPVTPLAVASLAAQEFSSVVMVAPTPDQVLEWQVLMKRFVKQVRVIPQTHKMLHQM

SEQ ID NO: 29766 - protein, 208 aa, Dolichospermum sp.
  misc_feature (1)..(208): tr|A0A5C0DYP3|A0A5C0DYP3_9CYAN 7-carboxy-7-deazaguanine synthase OS=Dolichospermum sp. UHCC 0315A OX=1914871 G N=queE PE=3 SV=1
MSLLEIKLPIHETFQSTVQGEGYWTGCLVDFIRLSGCPVGCPWCDTGYADPGANLPRVERPIAELLAEIKSPRVVISGGEPFIHKHLPDLVQALLAADKRVNIETSGSFWQAVSPAAWITLSPKEHINPKYSVKSQFWSRANEVKIVIETGGEIDFYQEHLSNHPNLLVYLQPEWNSSSKSIPLILQILQQKPDYKLSLQTHKYIGVQ

SEQ ID NO: 29767 - protein, 236 aa, Domibacillus aminovorans
  misc_feature (1)..(236): tr|A0A177KY74|A0A177KY74_9BACI 7-carboxy-7-deazaguanine synthase OS=Domibacillus aminovorans OX=29332 GN=queE PE=3 SV=1
MIPVLEIFGPTVQGEGAVIGRKTMFVRTAGCDYRCSWCDSAFTWDGSAKDDIRKMTPEDIYEELLAIGGDTFDHVTISGGNPALLPHIAALLDLFKEKEIVSALETQGSKFQSWFRDIDELTISPKPPSSGMDTDFDKLGDIIERTAGQQVSLKVVVFNEEDLAFAKKVHQFFPGVPFYIQVGNDRLEEVDDEKLLVYLAGRYEWLINLVMPDPEFKRVRVLPQLHTFVWGNKKGV

SEQ ID NO: 29768 - protein, 236 aa, Domibacillus aminovorans
  misc_feature (1)..(236): tr|A0A177L8L1|A0A177L8L1_9BACI 7-carboxy-7-deazaguanine synthase OS=Domibacillus aminovorans OX=29332 GN=queE PE=3 SV=1
MIPVLEIFGPTVQGEGAVIGRKTMFVRTAGCDYRCSWCDSAFTWDGSAKDDIRKMTPEDIYEELLAIGGDTFDHVTISGGNPALLPHIAALLDLFKEKGIVSALETQGSKFQSWFRDIDELTISPKPPSSGMDTDFDKLGDIIERTAGQQVSLKVVVFNEEDLAFAKKVHQFFPGIPFYIQVGNDRLEEVDDEKLLVYLAGRYEWLINLVMPDPEFKQVRVLPQLHTFVWGNKKGV

SEQ ID NO: 29769 - protein, 236 aa, Domibacillus antri
  misc_feature (1)..(236): tr|A0A1Q8Q8S4|A0A1Q8Q8S4_9BACI 7-carboxy-7-deazaguanine synthase OS=Domibacillus antri OX=1714264 GN=queE PE=3 SV=1
MIPVLEIFGPTVQGEGAVIGRKTMFVRTAGCDYRCSWCDSAFTWDGSAKEDIRKMTPEEIYAELLEAGGDTFDHVTISGGNPALLPQIAGLLDLFKEKGIVSALETQGSKFQPWFRDIDELTISPKPPSSGMITDFERLRHILQNVSGQNVSLKVVVFNEEDLAYAKKVHHLFPDVPFYLQVGNDRLEEVDDQKLLVHLAGRYEWLINLVMPDPDFKRVRVLPQLHTFVWGNKKGV

SEQ ID NO: 29770 - protein, 236 aa, Domibacillus enclensis
  misc_feature (1)..(236): tr|A0A1N6YHB1|A0A1N6YHB1_9BACI 7-carboxy-7-deazaguanine synthase OS=Domibacillus enclensis OX=1017273 GN=queE PE=3 SV=1
MIPVLEIFGPTVQGEGAVIGRKTMFVRTAGCDYRCSWCDSAFTWDGSAKEDIRKMTPEEIYQTLLEAGGDTFDHVTISGGNPALLAGIGELLALFKEKGIESALETQGSKYQPWFKFIDELTISPKPPSSGMDTDVDKLSFILNETKGQSVSLKVVIFNEEDLAYAKSIHQRFPDVPFYLQVGNDELDEKDDSRLLGHLARKYEWLIDRVMPDPEFKRVRVLPQLHTFVWGNKKGV

SEQ ID NO: 29771 - protein, 236 aa, Domibacillus epiphyticus
  misc_feature (1)..(236): tr|A0A1V2A9V7|A0A1V2A9V7_9BACI 7-carboxy-7-deazaguanine synthase OS=Domibacillus epiphyticus OX=1714355 GN=que E PE=3 SV=1
MIPVLEIFGPTVQGEGAVIGRKTMFVRTAGCDYRCSWCDSAFTWDGSAKDDIRKMTPEEIYEELLSVGGETFDHVTISGGNPALLPQLGGLIDLFKEKGISTALETQGSRFQPWFRDISELTLSPKPPSSGMETDIDKLHEILEGTAGQNVSLKVVVFNEQDLAYAKHIHQLFPEVPFFIQTGNDRLDEKDHAKLLVYLASRYEWLINLVMPDSDFKRVRVLPQLHTFVWGNKKGV

SEQ ID NO: 29772 - protein, 236 aa, Domibacillus iocasae
  misc_feature (1)..(236): tr|A0A1E7DTT5|A0A1E7DTT5_9BACI 7-carboxy-7-deazaguanine synthase OS=Domibacillus iocasae OX=1714016 GN=queE PE =3 SV=1
MIPVLEIFGPTVQGEGAVIGRKTMFVRTAGCDYRCSWCDSAFTWDGSAKEDIRKMTPEEIYKELKEIGGDTFDHVTISGGNPALLPHIDGLLQLFKEKGITSALETQGSKYQPWFHDIDELTISPKPPSSGMDSDFDKLAHILNEVKGQFVSLKVVVFNEEDLAYAKNVHQRFPEVPFYLQVGNDQLNETDDGKLLVHLASRYEWLINLVMPDPEFKRVRVLPQLHTFVWGNKKGV

SEQ ID NO: 29773 - protein, 236 aa, Domibacillus mangrovi
  misc_feature (1)..(236): tr|A0A1Q5NZX5|A0A1Q5NZX5_9BACI 7-carboxy-7-deazaguanine synthase OS=Domibacillus mangrovi OX=1714354 GN=queE P E=3 SV=1
MIPVLEIFGPTVQGEGAVIGRKTMFVRTAGCDYRCSWCDSAFTWDGSAKDDIRKMTPEDIYEELREVGGDTFDHVTISGGNPALLPSLAGLLDLFKEKGIVSALETQGSKFQSWFHDIDELTISPKPPSSGMDTDFDKLADIIERTAGQQVSLKVVVFNKEDLTYAKKVHQLFPGIPFYVQVGNDRLDEIDDEKLLVYLAGRYEWLINLVMPDPEFKSVRVLPQLHTFVWGNKKGV

SEQ ID NO: 29774 - protein, 235 aa, Donghicola sp.
  misc_feature (1)..(235): tr|A0A1M4N3X9|A0A1M4N3X9_9RHOB 7-carboxy-7-deazaguanine synthase OS=Donghicola sp. KarMa OX=1779855 GN=queE PE =3 SV=1
MTLRIVEIFGPTIQGEGALIGEPTVFVRAGGCDYRCSWCDSLHAVDSAYRDTWKPMSAEQVFAQVEELSGGQPLTISISGGNPAIQDFAAVIAMGKAKGYRFACETQGSISRPWFGDLDTLVLSPKPPSSGETVDWDAFDACVQAGQGAGQTVMKIVIFDDVDYAWAKDAHARHPDLPLYLQPGNPDVDPDLPVDPQALADRLLWLTETTMADRWFAPRILPQLHVLIWGNKRGV

SEQ ID NO: 29775 - protein, 235 aa, Donghicola tyrosinivorans
  misc_feature (1)..(235): tr|A0A2T0WFU3|A0A2T0WFU3_9RHOB 7-carboxy-7-deazaguanine synthase OS=Donghicola tyrosinivorans OX=1652492 GN=qu eE PE=3 SV=1
MTLRIAEIFGPTIQGEGALIGEPTVFVRAGGCDYRCSWCDSLHAVDSAYRDTWFPMQPAEVWERVDELSGGQPLTVSLSGGNPAIQDFGPLITIGKAMGYRFACETQGSIAKPWFAELDTLVLSPKPPSSGEVVDWDALDTCLEMAKGAGKIVMKVVIFDDQDYLWAKAAQATYPDLPFFLQPGNPEVDPDTPVDPQALADRLLWLTEKTMADRWFAPRILPQLHVLIWGNKRGV

SEQ ID NO: 29776 - protein, 369 aa, Dorea formicigenerans
  misc_feature (1)..(369): tr|A0A564T8U2|A0A564T8U2_9FIRM 7-carboxy-7-deazaguanine synthase OS=Dorea formicigenerans OX=39486 GN=queE PE= 4 SV=1
MEIKRLLVINVPIKNCNLKCKYCYISALKENEKGAAKFLYTPEHVGKCLSKERLGGTCIINLTGGGETLIPKEMPQYIYQLLLQGHFLEVVTNGTLTSRFDEIAEFPRNLLEHLEFKFSFHYAELKKKGWLDRYFSNVKKMWEKGCSFTVELMPYDGLIDDIDEIINLCKSELGAACQITVGRNDLTEKKDLLTSMSRKEYESVWRKFDSTMFDFKLDIFQKKIDDFCYAGAWTLYVDLGTGAAKPCYGQLSNQNIFKNPEQPIIFNPVGKHCRQPYCYNGHAFLTLGVVPELETPTYADIRNRVCEDGREWLSKEVKDAFSQKLADNNEVWDEKKKNSYERKYPFIFFKTALYDWKEIYNKVIRKRKK

SEQ ID NO: 29777 - protein, 216 aa, Dorea longicatena
  misc_feature (1)..(216): tr|A0A564UEW1|A0A564UEW1_9FIRM 7-carboxy-7-deazaguanine synthase OS=Dorea longicatena OX=88431 GN=queE PE=3 SV =1
MKVAEKFTSINGEGTRAGEIAVFVRFKGCNLRCSYCDTLWANEPECPYNEETPEEILNYVLGTGIHNVTLTGGEPLLQKDIRNLIHLLLQAGLQVEVETNGAVALAAFCEERPVFTMDYKLPSSGCEEHMITENMKLLEKNDTVKFVSGSQEDLLKALELIRTYDLTNRCHVYFSPVFGAIEPMQIVEFMLKHRLNGVRLQIQMHKVIWDPDERGV

SEQ ID NO: 29778 - protein, 216 aa, Dorea longicatena
  misc_feature (1)..(216): tr|A0A414T0J5|A0A414T0J5_9FIRM 7-carboxy-7-deazaguanine synthase OS=Dorea longicatena OX=88431 GN=queE PE=3 SV =1
MKVAEKFTSINGEGTRAGEIAVFVRFKGCNLRCSYCDTLWANEPECPYNEETPEEILNYVLGTGIHNVTLTGGEPLLQKDIRNLIHLLLQAGLQVEVETNGAVALAAFCEERPVFTMDYKLPSSGCEEHMITENMKLLEKNDTVKFVSGSQEDLLKALELIRTYDLTNRCHVYLSPVFGAIEPMQIVEFMLKHRLNGVRLQIQMHKVIWDPDERGV

SEQ ID NO: 29779 - protein, 211 aa, Duganella phyllosphaerae
  misc_feature (1)..(211): tr|A0A1E7WP80|A0A1E7WP80_9BURK 7-carboxy-7-deazaguanine synthase OS=Duganella phyllosphaerae OX=762836 GN=queE PE=3 SV=1
MTYSIKEIFYTLQGEGAHAGRPAVFCRFSGCNLWTGRESDRASAVCQFCDTDFVGTDGEGGGKFKSPQELAATINALWPASHAASKYVVFTGGEPLLQLDAALIDAMHDQGFTIAIETNGTLPVPDGVDWICVSPKMGSTLVVAKGSELKVVIPQTGQDLAAYEHLDFEHFYVQAMDGPLAAFNTTLAIETCKRNPKWKLSLQTHKLLQIP

SEQ ID NO: 29780 - protein, 211 aa, Duganella sacchari
  misc_feature (1)..(211): tr|A0A1M7L2S6|A0A1M7L2S6_9BURK 7-carboxy-7-deazaguanine synthase OS=Duganella sacchari OX=551987 GN=queE PE=3 SV=1
MTYSIKEIFYTLQGEGAHAGRPAVFCRFSGCNLWTGRESDRASAICQFCDTDFVGTDGEGGGKFKTPEALAATINALWPESYPASKYVVFTGGEPLLQLDKPLIDAMHAAGFTIAIETNGTLPVPDGVDWICVSPKMGAELVVRKGSEIKVVIPQTNQDLSVYEQLDFENFYVQAMDGPLAEFNTRLAIETCKRNPKWKLSLQTHKLLQIP

SEQ ID NO: 29781 - protein, 211 aa, Duganella sp.
  misc_feature (1)..(211): tr|A0A3E1S4P1|A0A3E1S4P1_9BURK 7-carboxy-7-deazaguanine synthase OS=Duganella sp. BJB480 OX=1871181 GN=queE PE =3 SV=1
MTYSIKEIFYTLQGEGAHAGRPAVFCRFSGCNLWTGRESDRASAVCQFCDTDFVGTDGEGGGKFTTPEALAATIDALWPETYTASKYVVFTGGEPLLQLDTALIDAMHAVGFTIAIETNGTLPVPDGVDWICVSPKMGSKLVVTKGSEIKVVIPQTGQDLSVYEQLDFENFFVQAMDGPLAEFNIKLAIDTCKRNPKWKLSLQTHKLLQIP

SEQ ID NO: 29782 - protein, 210 aa, Duganella sp.
  misc_feature (1)..(210): tr|A0A0Q8R3E4|A0A0Q8R3E4_9BURK 7-carboxy-7-deazaguanine synthase OS=Duganella sp. Root198D2 OX=1736489 GN=queE PE=3 SV=1
MTYSIKEIFYTLQGEGAHAGRPAVFCRFSGCNLWTGREQDRASAVCQFCDTDFVGTDGENGGKFAAPAALAQKIDSLWPAGHGHKYVVFTGGEPLLQLDAQLIDAMHAAGFTIAIETNGTMEVPAGVDWICVSPKMGAQLVVSKGNEIKVVIPQKDQDLAAYEGLDFENFFVQPMDGPLAAFNTTLAIETCKRNPKWKLSLQTHKLLNIP

SEQ ID NO: 29783 - protein, 193 aa, Duncaniella muris
  misc_feature (1)..(193): tr|A0A2V1IR30|A0A2V1IR30_9BACT 7-carboxy-7-deazaguanine synthase OS=Duncaniella muris OX=2094150 GN=queE PE=3 SV=1
MSYRINEIFYSLQGEGYFTGTPAVFLRMSGCNLKCGFCDTRHEEHTLMSPAQIVEAIGQYPTRHIIITGGEPSLQLDQMLVDLLHDEGWFIQIETNGTNPLPEGIDWVTCSPKQGPGGEIAVRLRNIDELKVVYEGQDVESIANSLPAMHYFLQPCSSPRYDGGSNTAATVSYILANPHWRLSLQTHKLIDIQ

SEQ ID NO: 29784 - protein, 181 aa, Duncaniella sp.
  misc_feature (1)..(181): tr|A0A4Z0V4W4|A0A4Z0V4W4_9BACT 7-carboxy-7-deazaguanine synthase OS=Duncaniella sp. TLL-A3 OX=2530391 GN=queE PE=3 SV=1
MKVNEIFYSLQGEGYHTGTPAVFLRLSGCNLKCDFCDTEHQSGTEMALGEILERVLPYPSRHIVITGGEPSLQLNDDLVEMLHNAGFYIQVETNGTNPLPEDIDWVTCSPKGESVVRLKRIDELKVVYLGQDVEEIANRYAAMHYFLQPCSGKNIAETVSYILDHTHWRLSLQTHKIIGIE

SEQ ID NO: 29785 - protein, 193 aa, Duncaniella sp.
  misc_feature (1)..(193): tr|A0A4P7VUP1|A0A4P7VUP1_9BACT 7-carboxy-7-deazaguanine synthase OS=Duncaniella sp. C9 OX=2530392 GN=queE PE=3 SV=1
MSYRINEIFYSLQGEGYFTGTPAVFLRMSGCNLKCGFCDTRHEEHTLMSPAQIVEAIGQYPTRHIIITGGEPSLQLDQMLVDLLHDEGWFIQIETNGTNPLPEGIDWVTCSPKQGHGGEIAVRLRNIDELKVVYEGQDVESIANSLPAMHYFLQPCSSPRYDGGSNTAATVSYILAHPHWRLSLQTHKLIDIQ

SEQ ID NO: 29786 - protein, 193 aa, Dyadobacter fermentans
  misc_feature (1)..(193): tr|C6VVQ3|C6VVQ3_DYAFD 7-carboxy-7-deazaguanine synthas e OS=Dyadobacter fermentans (strain ATCC 700827 / DSM 1 8053 / NS114) OX=471854 GN=queE PE=3 SV=1
MEAFYTLQGEGQHSGRAAYFIRLGGCDVGCHWCDVKESWDASIHPKFDINAIVDGALQYPGRLAVITGGEPLMYNLDALTGALQEAGFKTNIETSGVYPFTGHWDWVCFSPKKFKTPHPDIYKNADELKTIIYNKSDFDFAEEHAAKVSPECTLLMQPEWSKQDVMLPLIIDYIKDNPKWKMSLQTHKFMNIP

SEQ ID NO: 29787 - protein, 207 aa, Dyadobacter jejuensis
  misc_feature (1)..(207): tr|A0A316AF65|A0A316AF65_9BACT 7-carboxy-7-deazaguanine synthase OS=Dyadobacter jejuensis OX=1082580 GN=queE P E=3 SV=1
MELAEIETRTSLPVMEAFYTLQGEGQHSGKAAYFIRLGGCDVGCHWCDVKESWEADKHPYTSLETIVSGAKQYPGRLAVVTGGEPLMYNLDALTEKLQQAGFQTNIETSGVYPLTGHWDWICFSPKKFKEPHPDIYPAAHELKAIIYNKSDFAFAEEHAAKVGAHCSLLLQPEWSRQEMMLPLIIDYIKDNPKWKMSLQTHKYMNIP

SEQ ID NO: 29788 - protein, 193 aa, Dyadobacter jiangsuensis
  misc_feature (1)..(193): tr|A0A2P8G885|A0A2P8G885_9BACT 7-carboxy-7-deazaguanine synthase OS=Dyadobacter jiangsuensis OX=1591085 GN=que E PE=3 SV=1
MEAFYTLQGEGQHSGRAAYFIRLGGCDVGCHWCDVKESWDASIHPKFGIDSIVDGALQFPGRLAVITGGEPLMYNLDELTGALQAAGFKTNIETSGVYPFTGHWDWVCFSPKKFKTPHPDIYRNANELKAIIYNKSDFEFAEEHAAQVSPDCTLLLQPEWSKQDVMLPLIIDYIKDNPKWKMSLQTHKFMNIP

SEQ ID NO: 29789 - protein, 208 aa, Dyadobacter koreensis
  misc_feature (1)..(208): tr|A0A1H6YZ49|A0A1H6YZ49_9BACT 7-carboxy-7-deazaguanine synthase OS=Dyadobacter koreensis OX=408657 GN=queE PE =3 SV=1
MLTETLPIVTSQLPVMEAFYTLQGEGQHSGKAAYFIRLGGCEVGCHWCDVKESWDADAHPKLEINTIVEGALGYPGRLAVITGGEPLMYNLDALTDALQQAGFQTNIETSGVYPFTGHWDWVCFSPKKFKTPHSDIYINANELKSIIYNKSDFEFAEQHAALVNQECTLLLQPEWSKHEQMLPLIIDYIKDNPKWKMSLQTHKYMNIP

SEQ ID NO: 29790 - protein, 193 aa, Dyadobacter psychrophilus
  misc_feature (1)..(193): tr|A0A1T5DCC4|A0A1T5DCC4_9BACT 7-carboxy-7-deazaguanine synthase OS=Dyadobacter psychrophilus OX=651661 GN=que E PE=3 SV=1
MEAFYTLQGEGQHSGRAAYFIRLGGCEVGCHWCDVKESWNADLHPKFDINNIIEGALQYPGRLAVITGGEPLMYNLDELTGKLQDAGFKTNIETSGVYSFTGHWDWVCFSPKKFKDPHPDIYKNANELKAIIYNKSDFEFAESHAALVSDECTLLLQPEWSKHEVMLPLIIDYIKDNPKWKMSLQTHKYMNIP

SEQ ID NO: 29791 - protein, 234 aa, Dyadobacter soli
  misc_feature (1)..(234): tr|A0A1G6Y994|A0A1G6Y994_9BACT 7-carboxy-7-deazaguanine synthase OS=Dyadobacter soli OX=659014 GN=queE PE=3 SV =1
MNFVPLRDFSGAKACYTFFNIKIIKILLTETLPIVTSELPVMEAFYTLQGEGQHSGRAAYFIRLGGCDVGCHWCDVKESWDASIHPKFNIDAIVEGALQYAGRLAVITGGEPLMYNLDELTGALQEAGFKTNIETSGVYPFTGHWDWVCFSPKKFKTPHPDIYKNADELKAIIYNKSDFEFAEEHAAKVSPDCTLLLQPEWSKQDAMLPLIIDYIKDNPKWKMSLQTHKFMNIP

SEQ ID NO: 29792 - protein, 193 aa, Dyadobacter sp.
  misc_feature (1)..(193): tr|A0A4U6D5F0|A0A4U6D5F0_9BACT 7-carboxy-7-deazaguanine synthase OS=Dyadobacter sp. AR-3-8 OX=2576211 GN=queE PE=3 SV=1
MEAFYTLQGEGQHSGKAAYFIRLGGCEVGCHWCDVKESWDANAHPKQDINTIVEGALEYRGRLAVITGGEPLMYNLDALTGALQEAGFQTNIETSGVYPFTGHWNWVCFSPKKFKTPHPDIYQNANELKAIIYNKSDFEFAEEHAAKVNENCTLLLQPEWSKHQQMLPLIIDYIKDNPKWKMSLQTHKYMNIP

SEQ ID NO: 29793 - protein, 193 aa, Dyadobacter sp.
  misc_feature (1)..(193): tr|A0A5B0FS95|A0A5B0FS95_9BACT 7-carboxy-7-deazaguanine synthase OS=Dyadobacter sp. UC 10 OX=2605428 GN=queE P E=3 SV=1
MEAFYTLQGEGQHSGRAAYFIRLGGCEVGCHWCDVKESWDANLHPKYTIDAIVDGALQHPGRLAVITGGEPLMYNLDNLTGALQQAGFKTNIETSGVYPFTGRWDWVCFSPKKFKTPHSDIYSQADELKVIIYNKSDFDFAEEHAALVSDQCSLLMQPEWSKHDIMLPLIIDYIKDNPKWKMSLQTHKFMNIP

SEQ ID NO: 29794 - protein, 223 aa, Dyella japonica
  misc_feature (1)..(223): tr|A0A075JYA2|A0A075JYA2_9GAMM 7-carboxy-7-deazaguanine synthase OS=Dyella japonica A8 OX=1217721 GN=queE PE=3 SV=1
MASPTSTQAPAERLRITEIFHSIQGEADAIGWRTVFVRLTGCPLRCVWCDTEYSFYGGNWRAIDDIVAEVASHGARHVCVTGGEPLAQKRCLILLKRLCDAGHDVSLETSGALDVSLVDPRVRKVMDLKAPDSGEAARNLWSNLEQLLPHDQVKIVIASRADYEWAREVVAEHQITARCMVLFSPVHGAIQPRELAEWIIEDKLDVRFQLQLHKLLWNDAPGH

SEQ ID NO: 29795 - protein, 223 aa, Dyella japonica
  misc_feature (1)..(223): tr|A0A0G9H4I0|A0A0G9H4I0_9GAMM 7-carboxy-7-deazaguanine synthase OS=Dyella japonica DSM 16301 OX=1440762 GN=qu eE PE=3 SV=1
MASTTPTQAPAERLRITEIFHSIQGEADAIGWRTVFVRLTGCPLRCVWCDTEYSFYGGDWRDIDDIVAEVASHGAKHVCVTGGEPLAQKRCLILLKRLCDAGHDVSLETSGALDVAQVDPRVRKVMDLKAPDSGEAKRNLWSNLEHLLPHDQIKIVIASRADYEWARDVVAEHALIKRCMVLFSPVHGAIKPRDLAEWIIEDKLDVRFQLQLHKLLWNDEPGH

SEQ ID NO: 29796 - protein, 228 aa, Dyella jiangningensis
  misc_feature (1)..(228): tr|A0A328P061|A0A328P061_9GAMM 7-carboxy-7-deazaguanine synthase OS=Dyella jiangningensis OX=1379159 GN=queE P E=3 SV=1
MSSSSTSVAPTTPAQAERLRITEIFHSIQGEADAIGWRTVFVRLTGCPLRCVWCDTEYSFYGGNWRSIDDIVAEVASHGARHVCVTGGEPLAQKRCLILLTRLCDAGHDVSLETSGALDVSMVDPRVRKVMDLKAPDSGEAKRNLWSNIGHLLPHDQVKIVIASRADYEWAREAVAEHKLAERCMVLFSPVHGAIQPRELAEWIIEDKLDVRFQLQLHKLLWNDEPGH

SEQ ID NO: 29797 - protein, 228 aa, Dyella jiangningensis
  misc_feature (1)..(228): tr|A0A023NVV3|A0A023NVV3_9GAMM 7-carboxy-7-deazaguanine synthase OS=Dyella jiangningensis OX=1379159 GN=queE P E=3 SV=1
MSSSSTSVASTTPAQTERLRITEIFHSIQGEADAIGWRTVFVRLTGCPLRCVWCDTEYSFYGGNWRSIDDIVAEVASHGARHVCVTGGEPLAQKRCLILLTRLCDAGHDVSLETSGALDVSTVDPRVRKVMDLKAPDSGEAKRNLWSNIDHLLPHDQVKIVIASLADYEWARAVVAEHKLSERCMVLFSPVHGAVQPRQLAEWIIDDKLDVRFQLQLHKLLWNDEPGH

SEQ ID NO: 29798 - protein, 230 aa, Dyella marensis
  misc_feature (1)..(230): tr|A0A1I2FCK6|A0A1I2FCK6_9GAMM 7-carboxy-7-deazaguanine synthase OS=Dyella marensis OX=500610 GN=queE PE=3 SV= 1
MSEGNATVASTTSAPATAERLRITEIFHSIQGEADAIGWRTVFVRLTGCPLRCVWCDTEYSFYGGGWRDIDDILAEVASHGARHVCVTGGEPLAQKRCLILLQRLCDAGYDVSLETSGALDVAAVDPRVRKVMDLKAPGSGESARNLWSNLQHLLPHDQVKFVLASRADYEWAREAVAGHAIDRRCMVLFSPVHGKVNPRELAEWIIEDKLPVRFQLQLHKLLWNDAPGH

SEQ ID NO: 29799 - protein, 270 aa, Dyella soli
  misc_feature (1)..(270): tr|A0A4R0YKB7|A0A4R0YKB7_9GAMM 7-carboxy-7-deazaguanine synthase OS=Dyella soli OX=522319 GN=queE PE=3 SV=1
MLARRRSSRLPPNIRVPRRQAWPRNACVACSRSPQAEVRSVSDSSTSVADTTPDAGVAERLRITEIFHSIQGEADAIGWRTVFVRLTGCPLRCVWCDTEYSFYGGNWRDIDDIVAEVASHGAKHVCVTGGEPLAQKRCQILLRKLCDAGFDVSLETSGALDVSEVDARVRKVMDLKAPDSGEARRNLWSNLDHLLPHDQVKVVIASRADYEWARDKVAEVGLDRRCMVLFSPVHGAVQPRELAEWIIEDKLPVRFQLQLHKLLWNDEPGH

SEQ ID NO: 29800 - protein, 230 aa, Dyella soli
  misc_feature (1)..(230): tr|A0A4R0YN06|A0A4R0YN06_9GAMM 7-carboxy-7-deazaguanine synthase OS=Dyella soli OX=522319 GN=queE PE=3 SV=1
MSGSKASVASGTSAPAQAERLRITEIFHSIQGEADAIGWRTVFVRLTGCPLRCVWCDTEYSFYGGDWRAIDDIVAEVASHGARHVCVTGGEPLAQKRCLILLKRLCDAGHDVSLETSGALDVSLVDPRVRKVMDLKAPDSGESARNLWSNLDHLLPHDQVKIVIASRADYEWARETVAAHGLISRCMVLFSPVHGAIQPRELAEWIIEDRLDVRFQLQLHKLLWNDEPGH

SEQ ID NO: 29801 - protein, 221 aa, Dyella sp.
  misc_feature (1)..(221): tr|A0A370XB72|A0A370XB72_9GAMM 7-carboxy-7-deazaguanine synthase OS=Dyella sp. 4MSK11 OX=1927960 GN=queE PE=3 SV=1
MATETPTAVERLRITEIFHSIQGEADAIGWRTVFVRLTGCPLRCVWCDTEYSFYGGNWRDIDDILAEVASHGAKHVCVTGGEPLAQKRCLTLLQKLCDAGYEVSLETSGAIDVSTVDPRVRKVMDLKAPDSGESKRNLWSNLDHLLAHDQVKIVIASRADYEWARNAVAEHAIDQRCMVLFSPVHGAVEPRALAEWIIEDKLPVRFQLQLHKLLWNDAPGH

SEQ ID NO: 29802 - protein, 231 aa, Dyella sp.
  misc_feature (1)..(231): tr|A0A1I6KDB9|A0A1I6KDB9_9GAMM 7-carboxy-7-deazaguanine synthase OS=Dyella sp. OK004 OX=1855292 GN=queE PE=3 S V=1
MVSGSNASVAPTTSTPAVAERLRITEIFHSIQGEADAIGWRTVFVRLTGCPLRCVWCDTEYSFYGGDWQAIDDILAEVATHGAKHVCVTGGEPLAQKRCLILLQRLCDAGYDVSLETSGALDVSVVDPRVRKVMDLKAPDSGESKRNLWSNLDHLLPHDQVKIVIASRADYEWARGVVAEHAIDRRCMVLFSPVHGKVQPRELAEWIIEDKLPVRFQLQLHKLLWNDAPGH

SEQ ID NO: 29803 - protein, 230 aa, Dyella thiooxydans
  misc_feature (1)..(230): tr|A0A160N2N1|A0A160N2N1_9GAMM 7-carboxy-7-deazaguanine synthase OS=Dyella thiooxydans OX=445710 GN=queE PE=3 SV=1
MSESDTGVAAVRPAGQAADRLRITEIFHSIQGEADAIGWRTVFVRLTGCPLRCVWCDTEYSFHGGDWHTVDDILAEVASHGARHVCVTGGEPLAQKRCIPLLARLCDAGYEVSLETSGALDVSAVDPRVRKVMDLKAPDSGESARNLWANLAHLLPHDQVKIVIASRADYEWARGVVAEHGIDRRCMVLFSPVHGAVQPRELAQWIIEDRVPVRFQLQLHKLLWNDAPGH

SEQ ID NO: 29804 - protein, 193 aa, Dysgonamonadaceae bacterium
  misc_feature (1)..(193): tr|A0A2N4S9L8|A0A2N4S9L8_9BACT 7-carboxy-7-deazaguanine synthase OS=Dysgonamonadaceae bacterium OX=2065189 GN= queE PE=3 SV=1
MNLKVNEIFYSLQGEGGRTGEASIFVRLSGCNLTCDFCDTDFAFGEIVSAEDILDRISIYPCKWIIWTGGEPTLQLTDEIVVFFKNHGYMQAIETNGTHRVPAGIDYITCSPKKNFEKIKKLIPEVDELRFPIKKGDVLPDIQILPKAKKYLLSPIFEGDHIIPENVKYCIRLIMDNPQWALSLQTHKLIGIR

SEQ ID NO: 29805 - protein, 193 aa, Dysgonomonas alginatilytica
  misc_feature (1)..(193): tr|A0A2V3PS93|A0A2V3PS93_9BACT 7-carboxy-7-deazaguanine synthase OS=Dysgonomonas alginatilytica OX=1605892 GN= queE PE=3 SV=1
MKLNVNEIFYSLQGEGGRVGEPSIFIRLTQCNLTCSFCDTDFAEGDDMTLDEIAEAIAVYPCKWIIWTGGEPTIQLKDEHVAFFRDKGYKQAIETNGTRRVPSLIDYITCSPKMKYEDIRKKIPVVNEIRIPIERGNILPDVSVFPKADKYFVSPIFDGDKINPDNVSYCVDLVKENPQWSLSLQVHKLIHIE

SEQ ID NO: 29806 - protein, 191 aa, Dysgonomonas capnocytophagoides
  misc_feature (1)..(191): tr|A0A4Y8KXY5|A0A4Y8KXY5_9BACT 7-carboxy-7-deazaguanine synthase OS=Dysgonomonas capnocytophagoides OX=45254 G N=queE PE=3 SV=1
MTVNEIFYSLQGEGGRVGEPSIFIRLTKCNLACSFCDTDFADGDDMSLDDILNVISKFPCKWIIWTGGEPTLQLKNDHLAFFKERGYKQAIETNGTKPVPSLIDYITCSPKVNYSRIKELIPRVNEIRIPLLNGDVLPDIDIFPVADKYFVSPVFDGDKPNTENINYCVEQVKADTRWTLSLQVHKLIHIE

SEQ ID NO: 29807 - protein, 193 aa, Dysgonomonas gadei
  misc_feature (1)..(193): tr|F5J0D7|F5J0D7_9BACT 7-carboxy-7-deazaguanine synthas e OS=Dysgonomonas gadei ATCC BAA-286 OX=742766 GN=queE PE=3 SV=1
MKLIVNEIFYSLQGEGGRTGEASVFIRLTKCNLACSFCDTDFADGDEMSVDEILEAISVYPCKWIIWTGGEPTIQLRDAHLAVFREHGYRQAIETNGTRRVPSLIDYITCSPKQDYETIKNRIPFVHEIRMPIQAGDPVPDISVFPKADNYFLSPVFDADKINLENVAYCVELIKLHPQWRLSLQTHKLIHIE

SEQ ID NO: 29808 - protein, 193 aa, Dysgonomonas macrotermitis
  misc_feature (1)..(193): tr|A0A1M5D862|A0A1M5D862_9BACT 7-carboxy-7-deazaguanine synthase OS=Dysgonomonas macrotermitis OX=1346286 GN=q ueE PE=3 SV=1
MKLTVNEIFYSLQGEGGRVGEPSIFIRLTKCNLACSFCDTDFADGDDMSLDEILGIISRYPCKWIIWTGGEPTIQLKNEYLAFFKEHGYKQAIETNGTKRVPTLIDYITCSPKQNYSRIKDLIPKVDEIRIPLQTGDVLPDIAIFPKADKYFISPIFDGDVPNTENINYCVEQVKLDPRWTLSLQVHKLIHIE

SEQ ID NO: 29809 - protein, 193 aa, Dysgonomonas mossii
  misc_feature (1)..(193): tr|F8WVN8|F8WVN8_9BACT 7-carboxy-7-deazaguanine synthas e OS=Dysgonomonas mossii DSM 22836 OX=742767 GN=queE PE =3 SV=1
MKLIVNEIFYSLQGEGGRSGEASIFIRLTKCNLACSFCDTDFADGDVMTIDEILEEIKQYPCKWIIWTGGEPTIQLKDEYLAVFRKHGYKQAIETNGTRLVPSLIDYITCSPKQDYETIKSRIPVVNEIRIPVKVGDTIPDASIFPKADNYFLSPIFDGDKINLENVDYCVEQIKLNSQWKLSLQIHKLIHIE

SEQ ID NO: 29810 - protein, 193 aa, Dysgonomonas mossii
  misc_feature (1)..(193): tr|A0A4Y9IN51|A0A4Y9IN51_9BACT 7-carboxy-7-deazaguanine synthase OS=Dysgonomonas mossii OX=163665 GN=queE PE=3 SV=1
MKLIVNEIFYSLQGEGGRSGEASIFIRLTKCNLACSFCDTDFADGDVMTIDEILEEIKQYPCKWIIWTGGEPTIQLKDEYLAVFRKHGYKQAIETNGTRLVPSLIDYITCSPKQDYETIKSRIPVVNEIRIPVKVGDTIPDASIFPKADNYFLSPIFDGDKINLENVDYCVEQIKLNSQWKLSLQVHKLIHIE

SEQ ID NO: 29811 - protein, 193 aa, Dysgonomonas sp.
  misc_feature (1)..(193): tr|A0A1M3LC14|A0A1M3LC14_9BACT 7-carboxy-7-deazaguanine synthase OS=Dysgonomonas sp. 37-18 OX=1895907 GN=queE PE=3 SV=1
MKLIVNEIFYSLQGEGGRSGEASIFIRLTKCNLACSFCDTDFADGDVMTIDEILEEIKQYPCKWIIWTGGEPTIQLKDEYLAVFRKHGYKQAIETNGTRLVPSLIDYITCSPKQDYETIKSRIPVVNEIRIPVKVGDTIPDTSIFPKADNYFLSPIFDADKINLENVDYCVEQIKLNSQWKLSLQVHKLIHIE

SEQ ID NO: 29812 - protein, 208 aa, Echinicola sp.
  misc_feature (1)..(208): tr|A0A514CNU9|A0A514CNU9_9BACT 7-carboxy-7-deazaguanine synthase OS=Echinicola sp. LN3S3 OX=2591634 GN=queE PE =3 SV=1
MEIKQAVEKGLMLPLMEAFYTIQGEGTFTGHPAYFIRLGGCDVGCVWCDVKESWEAAKWPVLSVEEIVDGALQYPGRLVVITGGEPLMYELGPLTALLKEKGFTTNIETSGAHPFSGQFDWVCFSPKKFKEPHPSIFEKADEIKVIVFHKSDFDFAEKHAKKVQPSCKKLLQPEWSKSDKFTGEIIDYIKNHPDWNISLQTHKFMDIP

SEQ ID NO: 29813 - protein, 208 aa, Echinicola strongylocentroti
  misc_feature (1)..(208): tr|A0A2Z4IH21|A0A2Z4IH21_9BACT 7-carboxy-7-deazaguanine synthase OS=Echinicola strongylocentroti OX=1795355 GN =queE PE=3 SV=1
MEIKQAVEKGLKLPVMEAFYTIQGEGTFTGHPAYFIRLGGCDVGCVWCDVKESWEAAKWPVLSVEEIVDGALQYPGRLVVITGGEPLMYEMGPLTALLKEKGFTTNIETSGAHPFSGQFDWVCFSPKKFKEPHPSIFEKADELKVIVFHKSDFDFAEKHAKHVRSSCKKLLQPEWSKSEKFTGEIIEYIKNHPDWNISLQTHKFMDIP

SEQ ID NO: 29814 - protein, 208 aa, Echinicola vietnamensis
  misc_feature (1)..(208): tr|L0G7H9|L0G7H9_ECHVK 7-carboxy-7-deazaguanine synthas e OS=Echinicola vietnamensis (strain DSM 17526 / LMG 23 754 / KMM 6221) OX=926556 GN=queE PE=3 SV=1
MEIKQAVGKGIKLPVMEAFYTIQGEGTFTGHPAYFIRLGGCDVGCVWCDVKESWEAGKWPVQSVEEIVEGALQYPGKLVVITGGEPLMYDLGPLTALLKEKGFTINIETSGAHPFSGQFDWVCFSPKKFKEPHPSIFEKANELKVIVFHKSDFAFAEKHAAKVQPACRKLLQPEWSKAERYTGEIIDYIKKHPDWNISLQTHKFMDIP

SEQ ID NO: 29815 - protein, 219 aa, Ectothiorhodosinus mongolicus
  misc_feature (1)..(219): tr|A0A1R3W3Z5|A0A1R3W3Z5_9GAMM 7-carboxy-7-deazaguanine synthase OS=Ectothiorhodosinus mongolicus OX=233100 GN =queE PE=3 SV=1
MGEVAAAQELRITEIFLSIQGESASVGWPTVFVRLTGCPLRCVYCDTTYSFTGGELMTLEAILDQVEAHGVSHVCVTGGEPLAQPECLDLLTALCDQGYQVSLETSGALDISRVDPRVMTVMDLKTPSSGEAHRNLLSNLAHLKPTDQIKFVLAGREDYDWAVDQLRQHDLASKAQVLFSPVFKDQSPADLAEWILHDKLPVRMQLQLHKLLWGEARGR

SEQ ID NO: 29816 - protein, 212 aa, Ectothiorhodospira haloalkaliphila
  misc_feature (1)..(212): tr|W8KRX1|W8KRX1_9GAMM 7-carboxy-7-deazaguanine synthas e OS=Ectothiorhodospira haloalkaliphila OX=421628 GN=qu eE PE=3 SV=1
MNLRITEIFLSLQGESRSVGWPTVFIRLTGCPLRCGYCDTAYAFTGGRVMPLEDILARVQGYGVHHVCVTGGEPLAQPACLPLLAALCDAGHEVSLETSGALDVSAVDPRAIKVMDLKTPGSGEVARNLWENLAHLSAHDQVKFVICGRADYDWAREVVSRYGLADRVEVLFSAAFGDLAPGTLADWIVADRLPVRFQLQLHKVLWNDARGR

SEQ ID NO: 29817 - protein, 214 aa, Ectothiorhodospira magna
  misc_feature (1)..(214): tr|A0A1H8ZBB0|A0A1H8ZBB0_9GAMM 7-carboxy-7-deazaguanine synthase OS=Ectothiorhodospira magna OX=867345 GN=queE PE=3 SV=1
MSDGLQISEIFLSLQGESRTVGCPTVFVRLTGCPLRCRYCDTAYAFTGGTPLTLDAIVDQVKAYGVPHVCVTGGEPLAQPNSLSLLTALCDGGHQVSLETSGALDIAPVDPRVVKVMDIKTPSSGEIHSNRWKNLDHLAPDDQVKFVLCNRDDYLWSSGIVRTHDLARRAEILFSPVHGRLPPRDLAEWILADRLPVRFQIQLHKWLWNDARGR

SEQ ID NO: 29818 - protein, 225 aa, Ectothiorhodospira marina
  misc_feature (1)..(225): tr|A0A1H7HKS7|A0A1H7HKS7_9GAMM 7-carboxy-7-deazaguanine synthase OS=Ectothiorhodospira marina OX=1396821 GN=qu eE PE=3 SV=1
MDTPTSPSANPALPGLRITEIFLSLQGESRSVGWPTVFVRLTGCPLRCDYCDTAYAFTGGEVLPLADILKKVQAYGVRHVCVTGGEPLAQPACLQLLSALCDAGHEVSLETSGALDVSAVDPRVIKVMDLKTPGSGEAARNRWDNLVHLSSKDQVKFVICDRADYDWACEVLARDGLTDRVEVLFSVAFGDLAPGTLADWIVQDRLPVRFQLQLHKVLWDDARGR

SEQ ID NO: 29819 - protein, 230 aa, Ectothiorhodospira mobilis
  misc_feature (1)..(230): tr|A0A1I4RDN1|A0A1I4RDN1_ECTMO 7-carboxy-7-deazaguanine synthase OS=Ectothiorhodospira mobilis OX=195064 GN=qu eE PE=3 SV=1
MSEITRAGGAVPPSPARGSGLRVTEIFTSLQGEAREMGRPTVFVRLTGCPLRCSYCDTAHAFSGGAVRSLEAVLAQVAAAGVGPVCVTGGEPLAQPACLPLLSALCDAGHEVSLETGGALDVSGVDPRVVKVLDLKTPGSGESHRNLWSNLEHLGPRDQVKFVLMDRADYDWARGVMGRYALPERVEVLLSPVAGRLSPVQLADWILADRLPVRFQLQLHKLLWGDAPGR

SEQ ID NO: 29820 - protein, 216 aa, Ectothiorhodospira sp.
  misc_feature (1)..(216): tr|H1G0Y7|H1G0Y7_9GAMM 7-carboxy-7-deazaguanine synthas e OS=Ectothiorhodospira sp. PHS-1 OX=519989 GN=queE PE= 3 SV=1
MTASGRLRITEIFLSLQGESRSVGWPTVFVRLTGCPLRCGYCDTAYAFTGGAWMTLTQILEQVACYGVRHVCVTGGEPLAQPDCLPLLTALCDAGYEVSLETSGALDLALVDPRVIKVMDLKTLASGESGRNRWENLQCLGPADQIKFVLCDRADYEWARDSLQAHDLAARAEILFSPVHGRLSPRDLAEWILADRLPVRFQIQLHKWLWDDARGR

SEQ ID NO: 29821 - protein, 225 aa, Ectothiorhodospira sp.
  misc_feature (1)..(225): tr|A0A166ZZ57|A0A166ZZ57_9GAMM 7-carboxy-7-deazaguanine synthase OS=Ectothiorhodospira sp. BSL-9 OX=1442136 GN =queE PE=3 SV=1
MNVPNPLSAHSAQPSLRITEVFLSLQGESRSVGWPTVFVRLTGCPLRCGYCDTAYAFTGGQNQSLPEIVAQVQAYGVHHVCVTGGEPLAQPACLPLLSALCDAGLEVSLETSGALDVSAVDPRVIKVMDLKTPGSGEASRNRWENLDHLSTHDQIKFVICDRADYDWAREVVARYGLAERVEVLFSAAFGDLPPGTLADWIVADRLSVRFQLQLHKVLWNDARGR

SEQ ID NO: 29822 - protein, 218 aa, Ectothiorhodospiraceae bacterium
  misc_feature (1)..(218): tr|A0A2E0UNF4|A0A2E0UNF4_9GAMM 7-carboxy-7-deazaguanine synthase OS=Ectothiorhodospiraceae bacterium OX=202673 7 GN=queE PE=3 SV=1
MEVLRISEIFHSIQGEGRRAGERCAFVRLHGCGLRCTWCDTPYALDHKEGGKFMDPQEIIDEVESMNCRFVEFTGGEPLEQEACFPLMTQFCDLGYIVAVETGGHVDIGTVDPRVSVIMDLKCPTSGMQKKNRLSNIGFLKPGDELKFVLQNRADYDWAKDFIAEHSNELSEQLLLFSPVYGALDNKQLAEWILQDRLPVRMQLQLHKYIWHPEARGV

SEQ ID NO: 29823 - protein, 235 aa, Ectothiorhodospiraceae bacterium
  misc_feature (1)..(235): tr|A0A2A4Y8E1|A0A2A4Y8E1_9GAMM 7-carboxy-7-deazaguanine synthase OS=Ectothiorhodospiraceae bacterium OX=202673 7 GN=queE PE=3 SV=1
MNTESRLPSQTDINVSEASAPHAGQIRITEIFLSLQGESRTVGYPTVFVRLTGCPLRCGYCDTRYAFQGGEWMTIESILEKVAAYNTHHITVTGGEPLAQRECGGLLTRLCDTGYEVSLETSGALDVSTVDVRVVKVMDLKTPGSLEEAKNCWDNLQHLTTQDQIKFVLCDRADYDWAKQKIEQHNLLGCCDVLFSPSFEQLQPVTLADWIIEDRLLVRFQVQLHKVLWGDEQGR

SEQ ID NO: 29824 - protein, 227 aa, Edaphobacter aggregans
  misc_feature (1)..(227): tr|A0A3R9NVY5|A0A3R9NVY5_9BACT 7-carboxy-7-deazaguanine synthase OS=Edaphobacter aggregans OX=570835 GN=queE P E=3 SV=1
MYLIELYKSVQGESSFAGLPCIFVRLAGCNLRCAWCDSEYTFTGGKPFTEDEIVAQIEALAPCRLIEFTGGEPMLQARELLPLMDRLLAQDYTLMIETSGERPLAEVPKAVHKIVDVKCPSAGSAANSFRLENLSALTKNDEVKFVLSDRADYEFARDFIRAHVLEEKAGQILLSPAFQKTPSPQRTADNMALDPRKLVDWMLADGLPARLSLQIHKFIWEPQKKGV

SEQ ID NO: 29825 - protein, 227 aa, Edaphobacter dinghuensis
  misc_feature (1)..(227): tr|A0A495BWE9|A0A495BWE9_9BACT 7-carboxy-7-deazaguanine synthase OS=Edaphobacter dinghuensis OX=1560005 GN=que E PE=3 SV=1
MHLIELYKSVQGESSFAGLPCIFVRLAGCNLRCAWCDSEYTFTGGKPFTEDEIVAQIEALAPCKLVEFTGGEPMLQATQLLPLMQHLLTQNYTLMIETSGERPLAEVPKAVHKIVDVKCPGAGPAANSFHLENLEALTKNDEVKFVISTREDYDFARDFIRQHNLNSKAGGILLSPAFRQTPSPQRTADNMALDPRKLVEWMLADGLDARLSLQIHKFIWEPMKKGV

SEQ ID NO: 29826 - protein, 227 aa, Edaphobacter modestus
  misc_feature (1)..(227): tr|A0A4Q7YUB7|A0A4Q7YUB7_9BACT 7-carboxy-7-deazaguanine synthase OS=Edaphobacter modestus OX=388466 GN=queE PE =3 SV=1
MHLIELYKSVQGESSFAGVPCIFVRLAGCNLRCAWCDSEYTFSGGKPFTQDQIVAEIESLAPCKLIEFTGGEPMLQARELLPLMERLLAEGYTLMIETSGERPLAEVPKAVHKIVDVKCPGAGAAANSFRMENLDALTEKDEVKFVLSDRADYEFAREFIRENALDRKAGQILLSPAFQKTPSPLRTADNMALDPRKLVDWMLEDGLPARLSLQIHKFIWEPQKKGV

SEQ ID NO: 29827 - protein, 223 aa, Edwardsiella anguillarum
  misc_feature (1)..(223): tr|A0A076LRX8|A0A076LRX8_9GAMM 7-carboxy-7-deazaguanine synthase OS=Edwardsiella anguillarum ET080813 OX=66712 0 GN=queE PE=3 SV=1
MQYPINEVFQSLQGEGFYTGVPAIFIRLQGCPVGCSWCDSQHTWHQRPECQADLAQIVEKTAESEAWASADAAALVALLRQRGYQARHVVITGGEPCMYDLLPLTTALEQGGYRCQIETSGTHPVRCSAQTWVTVSPKVGMRGGMEVLTDALRRANEIKHPVARARDIEALDALLARLDGELPPVVALQPISCKEEATRLCIETCLARNWRLSMQTHKYLNIV

SEQ ID NO: 29828 - protein, 223 aa, Edwardsiella hoshinae
  misc_feature (1)..(223): tr|A0A376DIQ6|A0A376DIQ6_9GAMM 7-carboxy-7-deazaguanine synthase OS=Edwardsiella hoshinae OX=93378 GN=queE PE= 3 SV=1
MQYPINEIFHSLQGEGFYTGLPAIFIRLQGCPVGCSWCDSKHTWQQDAARQVDLAQVVEKAAESDAWANADVAALCALLQRRGYAARHVVITGGEPCLHDLLPLTLALEQAGYQCQIETSGTHPVRCSAQTWVTVSPKVAMRGGMTVLTSALRRANEIKHPVARERDIAALDALLASLEGALPPVVALQPISCKAGATRLCIDTCLARNWRLSMQTHKYLHIV

SEQ ID NO: 29829 - protein, 223 aa, Edwardsiella ictaluri
  misc_feature (1)..(223): tr|C5BHK9|C5BHK9_EDWI9 7-carboxy-7-deazaguanine synthas e OS=Edwardsiella ictaluri (strain 93-146) OX=634503 GN =queE PE=3 SV=1
MQYPINEVFQSLQGEGFYTGVPAIFIRLQGCPVGCSWCDSQHTWHQRPERQADLAQIVEKTAESEAWASADAAALVALLRQRGYQARRVVITGGEPCMYDLLPLTTALEQGGYRCQIETSGTHPVRCSAQTWVTVSPKVGMRGGMEVLTDALRRANEIKHPVARARDIEALDALLARLDGELPPVVALQPISCKEEATRLCIETCLARNWRLSMQTHKYLNIV

SEQ ID NO: 29830 - protein, 223 aa, Edwardsiella piscicida; identical to SEQ ID NO: 29827
  misc_feature (1)..(223): tr|A0A034SXJ5|A0A034SXJ5_9GAMM 7-carboxy-7-deazaguanine synthase OS=Edwardsiella piscicida OX=1263550 GN=queE PE=3 SV=1

SEQ ID NO: 29831 - protein, 223 aa, Edwardsiella piscicida
  misc_feature (1)..(223): tr|A0A411GZK5|A0A411GZK5_9GAMM 7-carboxy-7-deazaguanine synthase OS=Edwardsiella piscicida OX=1263550 GN=queE PE=3 SV=1
MQYPINEIFQSLQGEGFYTGVPAVFIRLQGCPVGCSWCDSQHTWHQRPECQADLAQIVEKTAESEAWASADAAALVALLRQRGYQARHVVITGGEPCMHDLLPLTTALEQGGYRCQIETSGTHPVRCSAQTWVTVSPKVGMRGGMTVLTDALRRANEIKHPVARARDIEALDALLARLDGELPPVVALQPISCKEEATRLCIETCLARNWRLSMQTHKYLNIV

SEQ ID NO: 29832 - protein, 223 aa, Edwardsiella tarda
  misc_feature (1)..(223): tr|A0A2X1JPG8|A0A2X1JPG8_EDWTA 7-carboxy-7-deazaguanine synthase OS=Edwardsiella tarda OX=636 GN=queE PE=3 SV= 1
MQYPINEIFYSLQGEGFYTGLPAIFIRLQGCPVGCSWCDSKHTWQQDAVRQVALEQVVEKAAESDAWASADVATLCALLQQRGYAARHVVITGGEPCLHDLLPLTLALEQAGYQCQIETSGTHPVRCSEQTWVTVSPKVAMRGGMAVLTSALRRANEIKHPVARERDIAALDALLATLGEALPQVVALQPISCKEGATRLCIDTCLARNWRLSMQTHKYLHIV

SEQ ID NO: 29833 - protein, 223 aa, Edwardsiella tarda; identical to SEQ ID NO: 29831
  misc_feature (1)..(223): tr|D0ZET5|D0ZET5_EDWTE 7-carboxy-7-deazaguanine synthas e OS=Edwardsiella tarda (strain EIB202) OX=498217 GN=qu eE PE=3 SV=1

SEQ ID NO: 29834 - protein, 218 aa, Effusibacillus lacus
  misc_feature (1)..(218): tr|A0A292YJ72|A0A292YJ72_9BACL 7-carboxy-7-deazaguanine synthase OS=Effusibacillus lacus OX=1348429 GN=queE PE =3 SV=1
MKVNEIFFSIQGESGSIGLPTIFVRFTGCNLRCTYCDTKYSYFEGEPDTPEGVMDKVRSYGIKRVCLTGGEPLIQPREEMQQLLDLLGEDGYEVSIETDGSIDISRFRLHDKQRFILDMKVPSSAMSDKMNFENLKRIVPERDEIKFVVGNREDYEWSKDLIRQYNLDPGLGYQLIFSPIYGELTYQQLVEWLLEDRIDARFQVQLHKIVWDPNQRGV

SEQ ID NO: 29835 - protein, 231 aa, Eggerthella sp.
  misc_feature (1)..(231): tr|A0A415XTB4|A0A415XTB4_9ACTN 7-carboxy-7-deazaguanine synthase OS=Eggerthella sp. AM16-19 OX=2292042 GN=queE PE=3 SV=1
MPVAERFVSINGEGACAGKLAAFIRFTGCNLRCGYCDTMWANVPDAAAKDEIPEQLAAWVRQAGVECVTLTGGEPVLQPLLPRLVELLLGEPGPSGRGLRVEIETNGAADLNELAELRARIGNAAPGVLSFTVDWKLPSSGMEQRMLPANFRLLDTRDTVKFVCGQGDLPRALEVARQLDLPGRVPVYLSPCFGDIEPARIVEFMQENQMTWATAQVQLHKVIWPDVERGV

SEQ ID NO: 29836 - protein, 270 aa, Eggerthella sp.
  misc_feature (1)..(270): tr|R6HLF1|R6HLF1_9ACTN 7-carboxy-7-deazaguanine synthas e OS=Eggerthella sp. CAG:209 OX=1262875 GN=queE PE=3 SV =1
MSHCQAYFDEDSEEACLLPVVERFVSVNGEGPRAGRLAAFIRFAGCNLACSWCDTAWANVNKCDHEDMKPQSLVEWVSDAGVSCVTLTGGEPTLQPGLPALIIALLGSDAWGSGNGRVVEIETNGAVDLSALHKLRSGFGKKRATDHSAAIDGIDCGAMPLVPVTDVYFTVDCKMPSSGMTAEMLPSNYELLGCGDAVKFVVASIEDLECAKSVIDQYDLCSRCEVFFSPVFSCIEPSEIVSFMERHGLFGVRLQLQLHKIIWPDRDRGV

SEQ ID NO: 29837 - protein, 215 aa, Eilatimonas milleporae
  misc_feature (1)..(215): tr|A0A3M0CD51|A0A3M0CD51_9PROT 7-carboxy-7-deazaguanine synthase OS=Eilatimonas milleporae OX=911205 GN=queE P E=3 SV=1
MTYSVKELFYTLQGEGANAGRPAVFCRFSGCNLWTGREEDRASAVCRFCDTDFIGTDGPGGGKFKTPQALATAARSLWPETPGGPRQGRPFLVCTGGEPLLQLDKPLIDAFHDAGFEIAVETNGTIQPPAGIDWLCVSPKAGADLLVDHGQELKLVYPQHGGMPDRYEILDFSHFFLQPMDGPDLPANTASAVDYCKSHPKWRLSVQTHKVIGIP

SEQ ID NO: 29838 - protein, 231 aa, Eisenbergiella tayi
  misc_feature (1)..(231): tr|A0A1E3AKH0|A0A1E3AKH0_9FIRM 7-carboxy-7-deazaguanine synthase OS=Eisenbergiella tayi OX=1432052 GN=queE PE= 4 SV=1
MQIFGFNKTTLLDFPEHVACTVFTGGCNFRCPFCQNGDLVLHGGSLPVLDEEEVFGVLRKRKGILTGVCVTGGEPTLQRDLDVFLSRVKELGYLVKLDSNGYRPEVLQSLCERGLVDYFAMDIKSSPENYARTAGVKELDMGLIRESVDFIRSCGLDYEFRTTVVRELHSSGDFLSIGEWLKGCKAYFLQSYVESEGVICKEFSSYSKEELEEFVMLLKPYIDNVSLRGVD

SEQ ID NO: 29839 - protein, 231 aa, Eisenbergiella tayi
  misc_feature (1)..(231): tr|A0A1E3A288|A0A1E3A288_9FIRM 7-carboxy-7-deazaguanine synthase OS=Eisenbergiella tayi OX=1432052 GN=queE PE= 4 SV=1
MQIFGFNKTTLLDFPEHVACTVFTGGCNFRCPFCQNGDLVLHGGSLPVLDEEEVFRVLRKRKGILTGVCVTGGEPTLQRDLDVFLSRVKELGYLVKLDSNGYRPEVLQSLCERGLVDYFAMDIKSSPENYARTAGVKELDMGLIRESVDFIRSCGLDYEFRTTVVRELHSSGDFLSIGEWLKGCKAYFLQSYVESEGVICKEFSSYSKEELEEFVMLLKPYIDNVSLRGVD

SEQ ID NO: 29840 - protein, 205 aa, Ekhidna lutea
  misc_feature (1)..(205): tr|A0A239KAL0|A0A239KAL0_9BACT 7-carboxy-7-deazaguanine synthase OS=Ekhidna lutea OX=447679 GN=queE PE=3 SV=1
MSSITDPEYLPVMESFYTIQGEGFFSGTPAYFIRLGGCDVGCVWCDVKESWDASQFDWFSIDQIVSAAKESGAHLVVVTGGEPLMYDLTLLTESLEKAGLQTNIETSGAYPLSGRWDWICFSPKKFKAPLEEFYSKSHELKVVAFNKSDFKWAEGHGDKMHSDSQLFLQPEWSKEKEMTPLIVDFVKQNPKWKISLQTHKYMDIP

SEQ ID NO: 29841 - protein, 209 aa, Elizabethkingia anophelis
  misc_feature (1)..(209): tr|T0PXC1|T0PXC1_9FLAO 7-carboxy-7-deazaguanine synthas e OS=Elizabethkingia anophelis 502 OX=1355388 GN=queE P E=3 SV=1
MNKEQDILLKEGKMLPVMEHFYTLQGEGAHTGKAAYFIRLGGCDVGCHWCDVKESWDPNLHPLMNAEEIAETAAKYCKTIVLTGGEPLMWNLEILTSKLKELGCTIHIETSGAYPMSGHLDWITLSPKKTGLPLEDIYKKASELKVIVFNNYDFKFAEEQSAKVSENCKRYLQSEWSKRNEMYPKITDYILEHPEWQASVQTHKYLNIP

SEQ ID NO: 29842 - protein, 211 aa, Elizabethkingia anophelis
  misc_feature (1)..(211): tr|A0A077EJN6|A0A077EJN6_9FLAO 7-carboxy-7-deazaguanine synthase OS=Elizabethkingia anophelis NUHP1 OX=1338011 GN=queE PE=3 SV=1
MKMNKEQDILLKEGKMLPVMEHFYTLQGEGAHTGKAAYFIRLGGCDVGCHWCDVKESWDPNLHPLMNAEEIGETAAKYCKTIVLTGGEPLMWNLEILTSKLKELGCTIHIETSGAYPMSGHLDWITLSPKKTGLPLEDIYKKASELKVIVFNNNDFKFAEEQSAKVSENCKRYLQSEWSKRNEMYPKITDYILEHPEWQASVQTHKYLNIP

SEQ ID NO: 29843 - protein, 209 aa, Elizabethkingia bruuniana
  misc_feature (1)..(209): tr|A0A5E8D5B5|A0A5E8D5B5_9FLAO 7-carboxy-7-deazaguanine synthase OS=Elizabethkingia bruuniana OX=1756149 GN=qu eE PE=3 SV=1
MNKEQDILLKEGKMLPVMEHFYTLQGEGAHTGKAAYFIRLGGCDVGCHWCDVKESWDPNLHPLMNAEEIAETAAKYCKTIVLTGGEPLMWNLEILTSKLKELGCTIHIETSGAYPMSGHLDWITLSPKKTGLPLEDIYKEASELKVIVFNNNDFKFAEEQSAKVSDNCKRYLQSEWSKRDEMYPKITDYILEHPEWQASVQTHKYLNIP

SEQ ID NO: 29844 - protein, 209 aa, Elizabethkingia meningoseptica
  misc_feature (1)..(209): tr|A0A1T3I6P6|A0A1T3I6P6_ELIME 7-carboxy-7-deazaguanine synthase OS=Elizabethkingia meningoseptica OX=238 GN=q ueE PE=3 SV=1
MNKEQDILLKEGKMLPVMEHFYTLQGEGAHTGKAAYFIRLGGCDVGCHWCDVKESWDPDLHPLMNTEEIAETAAKYCKTIVLTGGEPLMWNLEILTSKLKELDCTIHIETSGAYPMSGHLDWITLSPKKTGLPLEDIYQKASELKVIVFNNHDFTFAEEQSAKVSADCKRYLQSEWSKRNEMYPKITDYILEHPEWQASVQTHKYLNIP

SEQ ID NO: 29845 - protein, 209 aa, Elizabethkingia meningoseptica
  misc_feature (1)..(209): tr|A0A376E5V9|A0A376E5V9_ELIME 7-carboxy-7-deazaguanine synthase OS=Elizabethkingia meningoseptica OX=238 GN=q ueE PE=3 SV=1
MNKEQDILLKEGKMLPVMEHFYTLQGEGAHTGKAAYFIRLGGCDVGCHWCDVKESWDPNLHPLMNAEEIAETAAKYCKTIVLTGGEPLMWNLEILTSKLKELGCTIHIETSGAYPMSGHLDWITLSPKKTGLPLEDIYKKASELKVIVFNNNDFKFAEEQSAKVSENCKRYLQSEWSKRNEMYPKITDYILEHPEWQASVQTHKYLNIP

SEQ ID NO: 29846 - protein, 209 aa, Elizabethkingia miricola; identical to SEQ ID NO: 29843
  misc_feature (1)..(209): tr|A0A0A2H6V1|A0A0A2H6V1_ELIMR 7-carboxy-7-deazaguanine synthase OS=Elizabethkingia miricola OX=172045 GN=queE PE=3 SV=1

SEQ ID NO: 29847 - protein, 209 aa, Elizabethkingia occulta
  misc_feature (1)..(209): tr|A0A1T3MGY3|A0A1T3MGY3_9FLAO 7-carboxy-7-deazaguanine synthase OS=Elizabethkingia occulta OX=1867263 GN=queE PE=3 SV=1
MNKEQDILLKEGKMLPVMEHFYTLQGEGAHTGKAAYFIRLGGCDVGCHWCDVKESWDPNLHPLMNAEEIAETAAKYCKTIVLTGGEPLMWNLEILTSKLKELGCTIHIETSGAYPMSGHLDWITLSPKKTGLPLEDIYKEASELKVIVFNNNDFKFAEEQSAKVSDNCKRYLQSEWSKRNEMYPKITDYILEHPEWQASVQTHKYLNIP

SEQ ID NO: 29848 - protein, 209 aa, Elizabethkingia sp.; identical to SEQ ID NO: 29843
  misc_feature (1)..(209): tr|A0A2T5RY05|A0A2T5RY05_9FLAO 7-carboxy-7-deazaguanine synthase OS=Elizabethkingia sp. YR191 OX=2135666 GN=qu eE PE=3 SV=1

SEQ ID NO: 29849 - protein, 209 aa, Elizabethkingia sp.
  misc_feature (1)..(209): tr|A0A5B7UGK3|A0A5B7UGK3_9FLAO 7-carboxy-7-deazaguanine synthase OS=Elizabethkingia sp. JS20170427COW OX=25838 51 GN=queE PE=3 SV=1
MNQEQEILLKEGKMLPIMEHFYTIQGEGAHTGLAAYFIRVGGCDVGCHWCDVKESWNPDLHPLMDAEQIAITAAQHCKTIVLTGGEPLMYNLDFITSKLKDLGCNIHIETSGAYPLSGHLDWITLSPKKTKLPLEEIYQKASELKMIIFNNHDFIFAEEQVAKVNANCKLYLQSEWSKRNENYPKITDYILAHPQWQASVQTHKYLNIP

SEQ ID NO: 29850 - protein, 209 aa, Elizabethkingia ursingii; identical to SEQ ID NO: 29843
  misc_feature (1)..(209): tr|A0A1T3FJ15|A0A1T3FJ15_9FLAO 7-carboxy-7-deazaguanine synthase OS=Elizabethkingia ursingii OX=1756150 GN=que E PE=3 SV=1

SEQ ID NO: 29851 - protein, 218 aa, Elstera cyanobacteriorum
  misc_feature (1)..(218): tr|A0A255XKF3|A0A255XKF3_9PROT 7-carboxy-7-deazaguanine synthase OS=Elstera cyanobacteriorum OX=2022747 GN=que E PE=3 SV=1
MSYSVKEAFKTLQGEGAQAGRAAVFCRFAGCNLWSGRETDRAEAVCRFCDTDFVGVDGDGGGKFARPEDLAAHLAALWGPDRAFRYAVFTGGEPLLQLDAALIAAMKVEGFEIAVETNGTLPAPAGIDWICVSPKAGAPFVQTWGHELKLVFPQPELLPDVFETLDADAFGHYWLQPMDGLSDGGVMRINSTAAAVDYCQAHPRWRLSLQTHKMIGIP

SEQ ID NO: 29852 - protein, 218 aa, Elstera litoralis
  misc_feature (1)..(218): tr|A0A0F3IUZ6|A0A0F3IUZ6_9PROT 7-carboxy-7-deazaguanine synthase OS=Elstera litoralis OX=552518 GN=queE PE=3 S V=1
MSYSVKEAFKTLQGEGAQAGRAAVFCRFTGCNLWSGREADRSEAVCQFCDTDFVGTDGSGGGKFARAENLVAHLAALWGPDRAYRYVVFTGGEPLLQLDAPLIAAMKAEGFTIAVETNGTLAAPEGIDWICVSPKAGAPFVQQRGHELKLIFPQAALLPETFDTLDAEAFTHYWLQPMDGLNDGGLARSHHTAAAVAYCQAHPRWRLSLQTHKMIGIP

SEQ ID NO: 29853 - protein, 231 aa, Elusimicrobia bacterium
  misc_feature (1)..(231): tr|A0A1F9XM57|A0A1F9XM57_9BACT 7-carboxy-7-deazaguanine synthase OS=Elusimicrobia bacterium RIFOXYA2_FULL_53_3 8 OX=1797961 GN=queE PE=3 SV=1
MSAIDTANIYEIFCSIQGEGLYAGQKQIFVRFAGCNLSCAYCDEPAARSGGERTALSAIKRIIKQLAFKERARAVSFTGGEPLLQHKALKELALYAGSLKLQTHLETNGVCHRELKEVLSAIDVVAADIKLPGSAGGALWKEHGKFLSLAPKKTFVKIVVTSDTAPAEFRKGVKLAASVCGRMPFYIQPVTPRGRLRPPSAEQLAGFYRFAVSKLEHVRIFPQLHKLWKVK

SEQ ID NO: 29854 - protein, 268 aa, Elusimicrobia bacterium
  misc_feature (1)..(268): tr|A0A3B9ZX11|A0A3B9ZX11_9BACT 7-carboxy-7-deazaguanine synthase OS=Elusimicrobia bacterium OX=2030800 GN=queE PE=3 SV=1
MITAEISEIFVSIQGEGLYCGQKQVFLRFAGCNLNCVYCDEPAAHVKRCQAPFYGHRSQVIGCKSQVTSHKSQEELRAERTNYREMSVASAAAEVIQLARKNRAKAVSLTGGEPLLNWGFIMKLAPALRKAGLAVHLETNGIFYRELSKVKNLVDVVAMDIKLPSSTGQKPFWREHSEFIKTAPEKTFVKVVLTSKTSLHDFTKAVKLTASVPGIVPFFLQPATRRTLPAGAVRPPTGVFLEKACCEASSRLPVVRLLPQQHPKWGVK

SEQ ID NO: 29855 - protein, 195 aa, Elusimicrobium minutum
  misc_feature (1)..(195): tr|B2KC63|B2KC63_ELUMP 7-carboxy-7-deazaguanine synthas e OS=Elusimicrobium minutum (strain Pei191) OX=445932 G N=queE PE=3 SV=1
MQAPSFKLTEIFYSLQGEGMYTGTAAVFVRLSGCLMGCSFCDTDFKENFVMTSEEIIKEVKKYPSKIVIITGGEPAEQDICALIKSLKQAGLKVHIETNGSIYFDAQGVDNLTVSPKTYVDPNMLKSAHVIKIVVGQDTDISDLKKYFNYASEGRLIYLQPESNKQENIDLCVKLIKENPFLRLSLQTHKFAKIP

SEQ ID NO: 29856 - protein, 197 aa, Elusimicrobium sp.
  misc_feature (1)..(197): tr|A0A1Y4DJJ0|A0A1Y4DJJ0_9BACT 7-carboxy-7-deazaguanine synthase OS=Elusimicrobium sp. An273 OX=1965617 GN=que E PE=3 SV=1
MPQPSWKVNEIFYSIQGEGKHTGMPAVFIRLAGCSMNCPFCDTKYAARDGQTLQAEAILKALASWPAKAVIITGGEPSEQDLPALIGVLKDAGYEVHLETNGANDTDVSRADFVCVSPKRYVSPQMLKKAHVIKLVVGQETDLEDLQKYYAYENAHTQIYLQPESNKQENIDLCVKLLKNHPSARLSLQTHKLANIR

SEQ ID NO: 29857 - protein, 212 aa, Emcibacter congregatus
  misc_feature (1)..(212): tr|A0A2G4YPL3|A0A2G4YPL3_9PROT 7-carboxy-7-deazaguanine synthase OS=Emcibacter congregatus OX=2043170 GN=queE PE=3 SV=1
MTYSVKEIFYTLQGEGAQSGRAAVFCRFAGCNFWSGREQDRANADCSFCDTDFIGTDGPGGGKFKTAAALAEAARVCWDGMADATGTPYIVCTGGEPLMQLDSPLITAFQKKGFEVAVETNGSLPCPPELDWICVSPKSLDKLVQLTGDELKLVYPQTPVKPEDVAHLKFDHFYLQPLDEADHNHVPATLDYCRRHPQWKLSLQTHKILGIA

SEQ ID NO: 29858 - protein, 219 aa, Emcibacter nanhaiensis
  misc_feature (1)..(219): tr|A0A501PQ73|A0A501PQ73_9PROT 7-carboxy-7-deazaguanine synthase OS=Emcibacter nanhaiensis OX=1505037 GN=queE PE=3 SV=1
MTYTVKELFYTLQGEGAQAGRAAVFCRFAGCNLWSGREEDRAAAECTFCDTDFVGTGGPGGGKFASAEKLALAARALWDNEADDSGIPYIVCTGGEPLLQLDAPLIQAFHAKGFEVAVETNGTLPAPADLDWICVSPKRLDKLEQTSGHELKLVYPQKDISPEDVAHLDFEYFFLQPMDGIGADAETTRLANTQKVVEYCRRHPKWRVSLQTHKILDIP

SEQ ID NO: 29859 - protein, 215 aa, Empedobacter brevis; identical to SEQ ID NO: 27560
  misc_feature (1)..(215): tr|A0A3P6N8G2|A0A3P6N8G2_9FLAO 7-carboxy-7-deazaguanine synthase OS=Empedobacter brevis OX=247 GN=queE PE=3 SV =1

SEQ ID NO: 29860 - protein, 215 aa, Empedobacter brevis
  misc_feature (1)..(215): tr|A0A511NHT4|A0A511NHT4_9FLAO 7-carboxy-7-deazaguanine synthase OS=Empedobacter brevis NBRC 14943 = ATCC 4331 9 OX=1218108 GN=queE PE=3 SV=1
MIHIASTTAEEQQLIKEGKLLPVMEHFYTIQGEGMYTGVASYFIRLGGCDVGCHWCDVKDSWDAEKHPLTNVDELVDLATSQAKTIIITGGEPLMWDLTYLTKKLHEKGARIHIETSGAYPLSGEIDWVCLSPKKTMLPLDEVCEAAHELKCIIFNNHDFQFAEEQAARVGEDCTLFLQTEWSKRDKNLPLIIEYVKENPKWRYSLQTHKYLDIP

SEQ ID NO: 29861 - protein, 215 aa, Empedobacter falsenii
  misc_feature (1)..(215): tr|A0A376G2Y7|A0A376G2Y7_9FLAO 7-carboxy-7-deazaguanine synthase OS=Empedobacter falsenii OX=343874 GN=queE PE =3 SV=1
MIHIASTTAEEQQLIQEGKLLPVMEHFYTIQGEGMYTGVASYFIRLGGCDVGCHWCDVKDSWDAEKHPLTNVDELVDLATSQAKTIIITGGEPLMWDLTYLTKKLHEKGARIHIETSGAYPLSGEIDWVCLSPKKLMLPLDEVCEAANELKCIVFNNHDFQFAEEQAARVGKDCTLFLQTEWSKRDKNLPLIVEYVKENPKWRYSLQTHKYLDIP

SEQ ID NO: 29862 - protein, 211 aa, Empedobacter haloabium
  misc_feature (1)..(211): tr|A0A5C7CHS4|A0A5C7CHS4_9FLAO 7-carboxy-7-deazaguanine synthase OS=Empedobacter haloabium OX=592317 GN=queE P E=3 SV=1
MTYSIKEIFYTLQGEGAHAGRPAVFCRFAGCNLWTGRESDRAGAICQFCDTDFVGTDGERGGKFATPGELAAVIDSLWPASHAASKYVVFTGGEPLLQLDGPLIDAMHAAGFTIAIETNGTIAVPPGVDWICVSPKVGSKLVVAKGNELKVVIPQKDQHLADYEHLEFDNFFVQPMDGPLAAFNTTLAIDTCKANPKWKLSLQTHKLLNIP

SEQ ID NO: 29863 - protein, 215 aa, Empedobacter sp.
  misc_feature (1)..(215): tr|A0A4Z1BGK5|A0A4Z1BGK5_9FLAO 7-carboxy-7-deazaguanine synthase OS=Empedobacter sp. MRS2 OX=2491114 GN=queE P E=3 SV=1
MIHIASTTAEEQQLIQEGKLLPVMEHFYTIQGEGMYTGVASYFIRLGGCDVGCHWCDVKDSWDAEKHPLTNVDVLVDLATSQAKTIIITGGEPLMWDLTYLTKKLHEKGARIHIETSGAYPLSGEIDWVCLSPKKLMLPLDEVCEAANELKCIVFNNHDFQFAEEQAARVGKDCTLFLQTEWSKRDKNLPLIVEYVKENPKWRYSLQTHKYLDIP

SEQ ID NO: 29864 - protein, 193 aa, Emticicia sp.
  misc_feature (1)..(193): tr|A0A4Q5M515|A0A4Q5M515_9BACT 7-carboxy-7-deazaguanine synthase OS=Emticicia sp. 17J42-9 OX=2492393 GN=queE P E=3 SV=1
MESFYTLQGEGYHAGKAAYFIRLGGCDVGCVWCDVKESWDASIHPKFSIEEIVREAEKYTGRMAVITGGEPLMYDLDALTIALKEVGFQTNIETSGVYPISGVWDWVCFSPKKFKEPHESIYGASHELKVIVYNKSDFAFAEKYADLVNKDCMLLLQPEWSKQSQMLPLIIDYVKENPEWKVSLQTHKFMDIP

SEQ ID NO: 29865 - protein, 193 aa, Emticicia sp.
  misc_feature (1)..(193): tr|A0A2N4XBS8|A0A2N4XBS8_9BACT 7-carboxy-7-deazaguanine synthase OS=Emticicia sp. TH156 OX=2067454 GN=queE PE= 3 SV=1
MESFYTLQGEGYHAGKAAYFIRLGGCDVGCVWCDVKESWDASIHPQFTVDEIVDGALAYTGRMAVITGGEPLMYNLDELTASLQKAGFKTNIETSGVYEMSGHWDWVCFSPKKFKTPHESIYKQANELKVIVYNKSDFAFAEKYAASVNENCILLLQPEWSRHQEMLPLIIDYVKANPKWRVSLQTHKYMDIP

SEQ ID NO: 29866 - protein, 253 aa, Endomicrobium proavitum
  misc_feature (1)..(253): tr|A0A0G3WHL1|A0A0G3WHL1_9BACT 7-carboxy-7-deazaguanine synthase OS=Endomicrobium proavitum OX=1408281 GN=queE PE=3 SV=1
MKSKVKKQKPITNIYAPVYEVFFSYQGEGPYTGTPQIFVRFAGCNIKCNYCDTAYSIKISDNAKYYSSQELLAEIEKILKKMDCRGASRFAMTGTSKPSIAITGGEPLIHADFLKVFLPALKKYGFQVYLETNGTLPKNLKKIISFCDIVSMDFKFQSECKKSFWKEHKEFLKIAKDKVFVKCVVTKNTSLNEIKRSGQIIRSASKKICLILQPSTGKDIPLAKNLSAFYTELKKTLPNVLIMPQLHKILRIR

SEQ ID NO: 29867 - protein, 221 aa, Galathealinum brachiosum
  misc_feature (1)..(221): tr|A0A370DJ34|A0A370DJ34_9GAMM 7-carboxy-7-deazaguanine synthase OS=endosymbiont of Galathealinum brachiosum O X=2200906 GN=queE PE=3 SV=1
MSSDTQAVESRLRITEIFYSLQGESSFVGLPTVFIRLTGCPLRCGYCDTAYAFSGGEWMQISEIVRQIKQYKTTTVCVTGGEPLAQRCSGDLLKQLCDEGYQVSIETSGSIDISSVDSRVVKVMDIKTPGSGEESKNRYENIQHLTQKDEVKFVLCDREDYEWSKEVINKYKLSEKAQILFSPVHDGVVPADLADWIISDQLNVRFQFQLHKFLWDNEPGR

SEQ ID NO: 29868 - protein, 213 aa, Ridgeia piscesae
  misc_feature (1)..(213): tr|A0A0T5Z6H4|A0A0T5Z6H4_9GAMM 7-carboxy-7-deazaguanine synthase OS=endosymbiont of Ridgeia piscesae OX=54398 GN=queE PE=3 SV=1
MARLRISEIFYSLQGESRTAGLSTLFIRLTGCPLRCSYCDTEYAFSGGEWMELAAVLDQVERSAARRICVTGGEPLAQTACIELLDSLLEQGCEVSLETSGALDISAVDPRVSRVVDLKTPGSGEETRNRYANLDQLTANDQLKFVICDRADYDWSRSMLERYGLIGRCELLFSPAFGRQDPAQLAEWILADRLDVRFQLQLHKQLWGEEAGR

SEQ ID NO: 29869 - protein, 218 aa, Endozoicomonadaceae bacterium
  misc_feature (1)..(218): tr|A0A444GPU0|A0A444GPU0_9GAMM 7-carboxy-7-deazaguanine synthase OS=Endozoicomonadaceae bacterium GTF-13 OX=25 06149 GN=queE PE=3 SV=1
MYSIKEAFYSLQGEGAHSGRPAVFCRFSGCNLWSGRERDRAGAVCDFCDTAFVGSDGQNGGKFRDADQLARHLRSLWPTLNGPGIPYVILTGGEPALQLDPALVDALHTQGFEVAIETNGTRPLPQGIDWVCVSPKGNTELVVTEGDELKLVYPQPQALPGRFDKMKFSHFYLQPMASVAGLAGQPGDETALRSTIDYCLQHPQWRLSLQTHKMIGIE

SEQ ID NO: 29870 - protein, 212 aa, Endozoicomonas elysicola
  misc_feature (1)..(212): tr|A0A081KE31|A0A081KE31_9GAMM 7-carboxy-7-deazaguanine synthase OS=Endozoicomonas elysicola OX=305900 GN=queE PE=3 SV=1
MIRISEIFYSLQGETRTTGLPTVFVRLTGCPLRCTWCDTEYAFKGGDLLSSDAILGKVSEYSPKYVTVTGGEPLAQRECHQLLTLLADQGFEVSLETSGAITLSEVDPRVVKVMDLKPPASGESHRNLYENIQFLDKKDQLKFVIADRGDYDWSVSKLIEYDLANRVSDVLFSPVSGEMSAEILASWILDDRLPVRFQLQLHRMIWGDKPGV

SEQ ID NO: 29871 - protein, 216 aa, Endozoicomonas montiporae
  misc_feature (1)..(216): tr|A0A142BEA9|A0A142BEA9_9GAMM 7-carboxy-7-deazaguanine synthase OS=Endozoicomonas montiporae CL-33 OX=570277 GN=queE PE=3 SV=1
MASESLRITEIFYSLQGESNTSGLPTVFVRLTGCPLRCTWCDTEYSFSGGERMTIDAIVQQVADYGADYVCVTGGEPLAQPGCLPLLERLADAGYEVSLETSGALDVAAVDSRVVKVMDLKAPGSGEVGKNLYQNIHHLDHKDQVKFVIADRADYDWSASKLIEYNLTEKVSDVLFSPVSTGVEPAELAHWILADRLPVRFQIQLHRVIWGDKTGV

SEQ ID NO: 29872 - protein, 216 aa, Endozoicomonas montiporae; identical to SEQ ID NO: 29871
  misc_feature (1)..(216): tr|A0A081N9X6|A0A081N9X6_9GAMM 7-carboxy-7-deazaguanine synthase OS=Endozoicomonas montiporae OX=1027273 GN=qu eE PE=3 SV=1

SEQ ID NO: 29873 - protein, 216 aa, Endozoicomonas numazuensis
  misc_feature (1)..(216): tr|A0A081NE17|A0A081NE17_9GAMM 7-carboxy-7-deazaguanine synthase OS=Endozoicomonas numazuensis OX=1137799 GN=q ueE PE=3 SV=1
MTADTLRITEIFHSLQGESRTTGLPTVFVRLTGCPLRCTWCDTEYSFHGGTRMSLDEIVKEVEGYGAKYVCVTGGEPLGQPNCLPLLEQLSDKGYEVSLETSGAMDVSLVDDRVVKVMDLKPPASGESHRNLYENIQHLTANDQVKFVVANREDYDWSVSKMLQYNLANRVSDVLFSPVNDQLGPDQLADWIISDKLPVRFQVQLHRVIWGDKTGV

SEQ ID NO: 29874 - protein, 195 aa, Endozoicomonas sp.
  misc_feature (1)..(195): tr|A0A1D2X4Z9|A0A1D2X4Z9_9GAMM 7-carboxy-7-deazaguanine synthase OS=Endozoicomonas sp. (ex Bugula neritina AB1 ) OX=1868284 GN=queE PE=3 SV=1
MGLPTVFIRLTGCPLRCRWCDTEYAFQGGMSQTLKEIMAQVKSYNPLYVTVSGGEPLAQPNCLPLLSCLADQGYEVSLETSGALDISAVDPRVVKVMDLKPPASGEVGRNSYDNIGYLNPKDQVKFVMADRGDYEWSVSKLIEYNLSERVSDVLFSPVSGELMADQLAGWILEDGLPVRFQVQLHKVIWGNKAGV

SEQ ID NO: 29875 - protein, 218 aa, Endozoicomonas sp.; identical to SEQ ID NO: 29869
  misc_feature (1)..(218): tr|A0A3P3VMG5|A0A3P3VMG5_9GAMM 7-carboxy-7-deazaguanine synthase OS=Endozoicomonas sp. GTF13 OX=2528527 GN=que E PE=3 SV=1

SEQ ID NO: 29876 - protein, 210 aa, Enhydrobacter aerosaccus
  misc_feature (1)..(210): tr|A0A1T4LA96|A0A1T4LA96_9PROT 7-carboxy-7-deazaguanine synthase OS=Enhydrobacter aerosaccus OX=225324 GN=queE PE=3 SV=1
MSYAIKEIFKTLQGEGAQAGRAAVFCRFSGCNLWSGREEDRAEAQCRFCDTDFVGMDGTLGGRYATADALADAIEQAWGGERPHRFVVLTGGEPLLQVDAPLIEALHARGFEIAVETNGTVEPPDGIDWVCVSPKTTEALKVTSGHELKLVYPQAHLGPETFASLDFRRFSLQPMDGPEVAANTARAIAYCLAHPQWQLSTQTHKHLGIR

SEQ ID NO: 29877 - protein, 240 aa, Enhydrobacter sp.
  misc_feature (1)..(240): tr|A0A1V2GSP1|A0A1V2GSP1_9PROT 7-carboxy-7-deazaguanine synthase OS=Enhydrobacter sp. H5 OX=1907940 GN=queE PE =3 SV=1
MPNSTLPIRNTAIPTTDPEAGLKITEIFYSLQGEALTAGLPTIFIRLTGCPLRCVYCDTEYAFVGGERMSLAGILAVCESFPCQRICLTGGEPLAQPNAIALMNLLLSHGYEISLETSGALSVAEVPTAVSKVMDIKTPSSQEADKNLWQNLPYLTAHDQIKFVIMNRDDYDWSKQILADYQLDKKVATVWFSPMFNVEERQANVPTLATDLAEWILADALPVRFQLQLHKIIWADAKGK

SEQ ID NO: 29878 - protein, 238 aa, Enhygromyxa salina
  misc_feature (1)..(238): tr|A0A2S9YSX8|A0A2S9YSX8_9DELT 7-carboxy-7-deazaguanine synthase OS=Enhygromyxa salina OX=215803 GN=queE PE=3 SV=1
MASLRIQERFVSVQGEGALVGVPSSFVRVSGCNLRCVWCDTPRSSWAPEGEATGLDELVEWCAAGPRHVVLTGGEPMLFSPAAELSQALRAAGHHLTIETAGTVWCEGLQADLMSISPKLSHSTPWRRDPKLATMHEAARLNLDVLARLISSYAWQLKFVVRTAALEQLEADLAEIDQLVAELDLPKDAREQILLMPEGVDDTSLRAGYLAAIDSCRARNYRLGLRLHIHLFGHTPGT

SEQ ID NO: 29879 - protein, 246 aa, Enhygromyxa salina
  misc_feature (1)..(246): tr|A0A0C2CY63|A0A0C2CY63_9DELT 7-carboxy-7-deazaguanine synthase OS=Enhygromyxa salina OX=215803 GN=queE PE=3 SV=1
MRAVVSLRIQERFVSVQGEGALVGVPSSFVRVSGCNLRCVWCDTPRSSWTPEGDAATLDEIVAWCAAGPRHVVLTGGEPMLFSPAAELSQALRAAGHHLTVETAGTVWCEGLQADLMSISPKLSHSTPWQRAEQLGRKQLAPMHEAARLNLDVLARLIANYTWQLKFVVRTSSPEQLAADLDEIDQLVDALELPTNAREQILLMPEGTDDASLRAGYLAALDTCQARNFRLGLRLHIHLFGHTPGT

SEQ ID NO: 29880 - protein, 242 aa, Ensifer adhaerens
  misc_feature (1)..(242): tr|A0A0L8BS50|A0A0L8BS50_ENSAD 7-carboxy-7-deazaguanine synthase OS=Ensifer adhaerens OX=106592 GN=queE PE=3 S V=1
MTGAAIRVSEIFGPTIQGEGVLIGQPTVFVRTGGCDYRCSWCDTLHAVDSDYREQWRPMSVEEIWEEVRRLSGGVPLTVSLSGGNPAIQPLGPLIDRGHGEGYRFALETQGSVARDWFADLDVLVLSPKPPSSGMETDFAKLDDCLTMATGTPMTVLKIVVFDDHDYAYARGIAQRYPGLPIYLQPGNHTPPPPEDDSATVDIDGIMNRMLWLVDKVTGDRWFDARVLPQLHVLLWGNRRGV

SEQ ID NO: 29881 - protein, 242 aa, Ensifer adhaerens
  misc_feature (1)..(242): tr|W8IBH5|W8IBH5_ENSAD 7-carboxy-7-deazaguanine synthas e OS=Ensifer adhaerens OV14 OX=1416753 GN=exsE PE=3 SV= 1
MTGAAIRVSEIFGPTIQGEGVLIGQPTVFVRTGGCDYRCSWCDTLHAVDSKYREQWQPMSAEEIWGEVRRLSGGVPLTVSLSGGNPAIQPLGPLIDRGHGEGYRFALETQGSVARDWFADLDVLVLSPKPPSSGMETDFAKLDECLAMAAGRPMTVLKIVIFDDHDYGFAKDVAQRYPSLSVYLQPGNHTPPPPDDDSATVDIDGVMNRMLWLVDKVTGDKWFDARVLPQLHVLLWGNRRGV

SEQ ID NO: 29882 - protein, 245 aa, Ensifer alkalisoli
  misc_feature (1)..(245): tr|A0A1E3V7N0|A0A1E3V7N0_9RHIZ 7-carboxy-7-deazaguanine synthase OS=Ensifer alkalisoli OX=1752398 GN=queE PE=3 SV=1
MIGARPAEIRVSEIFGPTIQGEGALIGVPTVFVRTGGCDYRCSWCDSLHAVDSRYRDEWRPMSTEEVWQEVTALSGGTPVMVSLSGGNPAIQPLGDLITCGHAQGYRFALETQGSVARDWFADLDVLVLSPKPPSSGMETDWDAFGACLEASGGKPQTILKIVVFDEADYSYARNAAARYPQLPVYLQPGNHTPPPPEELDAPIDIEGVTERMRWLVERVTEDRWFEARVLPQLHVLLWGNKRGV

SEQ ID NO: 29883 - protein, 245 aa, Ensifer glycinis
  misc_feature (1)..(245): tr|A0A178XXB8|A0A178XXB8_9RHIZ 7-carboxy-7-deazaguanine synthase OS=Ensifer glycinis OX=1472378 GN=queE PE=3 S V=1
MTGTRPAEIRVSEIFGPTIQGEGALIGLPTVFVRTGGCDYRCSWCDSLHAVDSEYRDTWRAMTTEEVWSEVTRLSGGLPVMVSLSGGNPAIQPLGNLIARGHRKGYRFALETQGSVARDWFAELDMLVLSPKPPSSGMETDWEALDACLRMAGGRPQVLLKIVVFDEVDYAYARAAAARHPQLPIYLQPGNHTPPPPDDHDAPIDIEGVMERMRWLVDKVIEDRWFEAHVLPQLHVLIWGNRRGV

SEQ ID NO: 29884 - protein, 245 aa, Ensifer sojae
  misc_feature (1)..(245): tr|A0A249PIR3|A0A249PIR3_9RHIZ 7-carboxy-7-deazaguanine synthase OS=Ensifer sojae CCBAU 05684 OX=716928 GN=que E PE=3 SV=1
MTGSRPAEIRVSEIFGPTIQGEGALIGLPTVFVRTGGCDYRCSWCDSLHAVDSRYRDEWRPMSTEEVWQKVTSLSGGRPLMVSLSGGNPAIQPLGDLIACGHAQGYRFALETQGSVARDWFADLDVLVLSPKPPSSGMETDWDALGDCLQASAGKPQTILKIVVFDEADYSYARHAAARYPQLPVYLQPGNHTPPPPEEHDAPIDIEGVTERMRWLVERITEDRWFEARVLPQLHVLLWGNKRGV

SEQ ID NO: 29885 - protein, 245 aa, Ensifer sp.
  misc_feature (1)..(245): tr|A0A0Q9D152|A0A0Q9D152_9RHIZ 7-carboxy-7-deazaguanine synthase OS=Ensifer sp. Root278 OX=1736509 GN=queE PE= 3 SV=1
MTGPGETRIRVSEIFGPTIQGEGILIGLPTVFVRTGGCDYRCSWCDTLHAVDSEYRDQWLPMTVEEVWSEVSRLSGSKPLTVSLSGGNPAIQPLGPLIARGREEGYRFALETQGSIAKDWFADLDVLVLSPKPPSSGMKTDWNAFDDCLRMAAGRPEVALKIVVFDERDYAYARDAAGRYPHLPLYLQPGNHTPPPPDDDDATVDIDGIIDRMLWLVGKVTEDRWFEARVLPQLHVLLWGNRRGV

SEQ ID NO: 29886 - protein, 242 aa, Ensifer sp.
  misc_feature (1)..(242): tr|A0A1C0SSB9|A0A1C0SSB9_9RHIZ 7-carboxy-7-deazaguanine synthase OS=Ensifer sp. LC54 OX=1873715 GN=queE PE=3 S V=1
MTGAAIRVSEIFGPTIQGEGVLIGQPTVFVRTGGCDYRCSWCDTLHAVDSDYREQWRPMSVEEIWEEVRRLSGGVPLTVSLSGGNPAIQPLGPLIDRGHAEGYRFALETQGSVARDWFADLDVLVLSPKPPSSGMETDFAKLNDCLSMAIGRPMTVLKIVVFDDRDYVYAKDVARRYPSLPVYLQPGNHTPPPPEDDSAAVDIDGVMNRMLWLIDKVTGDKWFDARVLPQLHVLLWGNRRGV

SEQ ID NO: 29887 - protein, 223 aa, Enterobacillus tribolii
  misc_feature (1)..(223): tr|A0A370QSA0|A0A370QSA0_9ENTR 7-carboxy-7-deazaguanine synthase OS=Enterobacillus tribolii OX=1487935 GN=queE PE=3 SV=1
MQYPINELFQTLQGEGYFTGVPAIFIRLQGCPVGCSWCDTKHTWERLAEKETGMEAILTKSAESDAWGAASPAELADIIRRQGYMARHVVITGGEPALYDLLALTLQLESQGFRCQIETSGTHEIRCSDGTWVTVSPKVNMRGGLKVLAQALERADEIKHPVARQRDIDDLDALLATLNDDKGRVIALQPVSQKESATRLCIETCIARNWRLSMQTHKYLNIA

SEQ ID NO: 29888 - protein, 223 aa, Enterobacter agglomerans
  misc_feature (1)..(223): tr|A0A2A7V988|A0A2A7V988_ENTAG 7-carboxy-7-deazaguanine synthase OS=Enterobacter agglomerans OX=549 GN=queE PE =3 SV=1
MFYPINEMFQTLQGEGYYTGVPAIFIRLQGCPVGCSWCDTKHTWEKRADRETSLGDILIKTVESDAWGDADAATLLRSIEQQGWTARHVVITGGEPAIYDLRPLTTILEQHGFQCQIETSGTHAIHCSEQTWVTVSPKVNMRGGYDVLPQALSRADEIKHPVARQRDVDALDLLLAGIDDTKARIIALQPISRKDDATRLCIETCIARNWRLSMQTHKYLNIA

SEQ ID NO: 29889 - protein, 223 aa, Enterobacter agglomerans
  misc_feature (1)..(223): tr|A0A379ABT5|A0A379ABT5_ENTAG 7-carboxy-7-deazaguanine synthase OS=Enterobacter agglomerans OX=549 GN=queE PE =3 SV=1
MQYPINEMFQTLQGEGYYTGVPAIFIRLQGCPVGCSWCDTKHTWEKRTDRETSLGDILIKTVESDAWGDADAATLVSAIAQQGWTARHVVITGGEPAIYDLRPLTTALEQHSFQCQIETSGTHEIHCSERTWVTVSPKVNMRGGYDVLPQALSRADEIKHPVARERDVEALDRLLAGIDDTKARIIALQPISRKDDATRLCIETCIARNWRLSMQTHKYLNIA

SEQ ID NO: 29890 - protein, 223 aa, Enterobacter asburiae
  misc_feature (1)..(223): tr|A0A0J0G0X2|A0A0J0G0X2_ENTAS 7-carboxy-7-deazaguanine synthase OS=Enterobacter asburiae OX=61645 GN=queE PE= 3 SV=1
MQYPINEMFQTLQGEGYFTGVPAIFVRLQGCPVGCAWCDTKHTWDKLADREVSLFSILAKTKESDKWGAGSSEDLLAIIGRQGWTARHVVITGGEPCIHDLTPLTELLEKNGYSCQIETSGTHEVRCSHTTWVTVSPKVNMRGGYDVLSQALERADEIKHPVGRVRDIEALDELLATLTDEKQRVIALQPISQKDDATRLCIETCIARNWRLSMQTHKYLNIA

SEQ ID NO: 29891 - protein, 223 aa, Enterobacter asburiae
  misc_feature (1)..(223): tr|A0A0F3ZPX1|A0A0F3ZPX1_ENTAS 7-carboxy-7-deazaguanine synthase OS=Enterobacter asburiae OX=61645 GN=queE PE= 3 SV=1
MQYPINEMFQTLQGEGYFTGVPAIFIRLQGCPVGCAWCDTKHTWDKLADREVSLFSILAKTKESDKWGAGSSEDLLAIIGRQGWTARHVVITGGEPCIHDLTPLTELLEKNGYSCQIETSGTHEVRCSHTTWVTVSPKVNMRGGYDVLSQALERADEIKHPVGRVRDIEALDELLATLTDEKQRVIALQPISQKDDATRLCIETCIARNWRLSMQTHKYLNIA

SEQ ID NO: 29892 - protein, 223 aa, Enterobacter bugandensis
  misc_feature (1)..(223): tr|A0A2J7SFZ8|A0A2J7SFZ8_9ENTR 7-carboxy-7-deazaguanine synthase OS=Enterobacter bugandensis OX=881260 GN=queE PE=3 SV=1
MQYPINEMFQTLQGEGYFTGVPAIFIRLQGCPVGCAWCDTKHTWDKLADREVSLFSILAKTKESDKWGAGSAEDLLAIIGRQGWTARHVVITGGEPCIHDLTPLTELLEKNGYSCQIETSGTHEVRCSHTTWVTVSPKVNMRGGYDVLSQALERADEIKHPVGRVRDIEALDELLATLTDEKQRVIALQPISQKEDATRLCIETCIARNWRLSMQTHKYLNIA

SEQ ID NO: 29893 - protein, 223 aa, Enterobacter cancerogenus
  misc_feature (1)..(223): tr|D2ZJN8|D2ZJN8_9ENTR 7-carboxy-7-deazaguanine synthas e OS=Enterobacter cancerogenus ATCC 35316 OX=500639 GN= queE PE=3 SV=1
MQYPINEMFQTLQGEGYFTGVPAIFIRLQGCPVGCAWCDTKHTWDKLADREVSLFSILAKTKESDKWGAGNAEDLLAIIGRQGWTARHVVITGGEPCIHDLMPLTELLEKNGYSCQIETSGTHEVRCSHTTWVTVSPKVNMRGGYDVLSQALERADEIKHPVGRVRDIEALDELLATLTDEKQRIIALQPISQKEDATRLCIETCIARNWRLSMQTHKYLNIA

SEQ ID NO: 29894 - protein, 223 aa, Enterobacter cancerogenus; identical to SEQ ID NO: 29893
  misc_feature (1)..(223): tr|A0A2J7P024|A0A2J7P024_9ENTR 7-carboxy-7-deazaguanine synthase OS=Enterobacter cancerogenus OX=69218 GN=queE PE=3 SV=1

SEQ ID NO: 29895 - protein, 223 aa, Enterobacter chengduensis
  misc_feature (1)..(223): tr|A0A0F4BH33|A0A0F4BH33_9ENTR 7-carboxy-7-deazaguanine synthase OS=Enterobacter chengduensis OX=2494701 GN=qu eE PE=3 SV=1
MQYPINEMFQTLQGEGYFTGVPAIFIRLQGCPVGCAWCDTKHTWDKLADREVSLFSILAKTKESDKWGAGSSEDLLAIIGRQGWTARHVVITGGEPCIHDLTPLTELLEKNGYSCQIETSGTHEVRCSHATWVTVSPKVNMRGGYDVLSQALERADEIKHPVGRVRDIEALDELLATLTDEKQRVIALQPISQKEDATRLCIETCIARNWRLSMQTHKYLNIA

SEQ ID NO: 29896 - protein, 223 aa, Enterobacter chuandaensis
  misc_feature (1)..(223): tr|A0A3A3ZRE7|A0A3A3ZRE7_9ENTR 7-carboxy-7-deazaguanine synthase OS=Enterobacter chuandaensis OX=2497875 GN=qu eE PE=3 SV=1
MQYPINEMFQTLQGEGYFTGVPAIFIRLQGCPVGCAWCDTKHTWDKLADREVSLFSILAKTKESDKWGAGSAEDLLAIIGRQGWTARHVVITGGEPCIHDLTPLTELLEKNGYSCQIETSGTHEVRCSHTTWVTVSPKVNMRGGYDVLSQALERADEIKHPVGRVRDIEALDELLATLTDEKLRVIALQPISQKEDATRLCIETCIARNWRLSMQTHKYLNIA

SEQ ID NO: 29897 - protein, 223 aa, Enterobacter cloacae
  misc_feature (1)..(223): tr|A0A0A6H7C2|A0A0A6H7C2_ENTCL 7-carboxy-7-deazaguanine synthase OS=Enterobacter cloacae OX=550 GN=ygcF PE=3 S V=1
MQYPINEMFQTLQGEGYFTGVPAIFIRLQGCPVGCAWCDTKHTWDKLADREVSLFSILAKTKESDKWGAGSAEDLLAIIGRQGWTARHVVITGGEPCIHDLMPLTELLEKNGYSCQIETSGTHEVRCSHSTWVTVSPKVNMRGGYDVLSQALERADEIKHPVGRVRDIEALDELLATLTDEKQRVIALQPISQKDDATRLCIETCIARNWRLSMQTHKYLNIA

SEQ ID NO: 29898 - protein, 223 aa, Enterobacter cloacae
  misc_feature (1)..(223): tr|A0A5D9FHQ7|A0A5D9FHQ7_ENTCL 7-carboxy-7-deazaguanine synthase OS=Enterobacter cloacae OX=550 GN=ygcF PE=3 S V=1
MQYPINEMFQTLQGEGYFTGVPAIFIRLQGCPVGCAWCDTKHTWDKLADREVSLFSILAKTKESDKWGAGSAEDLLAIIGRQGWTARHVVITGGEPCIHDLMPLTELLEKNGYSCQIETSGTHEVRCSHSTWVTVSPKVNMRGGYDVLLQALERADEIKHPVGRVRDIEALDELLATLTDEKQRVIALQPISQKDDATRLCIETCIARNWRLSMQTHKYLNIA

SEQ ID NO: 29899 - protein, 223 aa, Enterobacter genomosp.
  misc_feature (1)..(223): tr|A0A0X4AY78|A0A0X4AY78_9ENTR 7-carboxy-7-deazaguanine synthase OS=Enterobacter genomosp. O OX=2364150 GN=que E PE=3 SV=1
MQYPINEMFQTLQGEGYFTGVPAIFIRLQGCPVGCAWCDTKHTWDKLADREVSLFSILAKTKESDKWGAGSSEDLLAIIGRQGWTARHVVITGGEPCIHDLTPLTELLEKNGYSCQIETSGTHEVRCSHTTWVTVSPKVNMRGGYDVLSQALERADEIKHPVGRVRDIEALDELLATLTDEKQRVIALQPISQKEDATRLCIETCIARNWRLSMQTHKYLNIA

SEQ ID NO: 29900 - protein, 223 aa, Enterobacter hormaechei; identical to SEQ ID NO: 29897
  misc_feature (1)..(223): tr|F5S188|F5S188_9ENTR 7-carboxy-7-deazaguanine synthas e OS=Enterobacter hormaechei ATCC 49162 OX=888063 GN=nr dG2 PE=3 SV=1

SEQ ID NO: 29901 - protein, 223 aa, Enterobacter hormaechei
  misc_feature (1)..(223): tr|A0A5A9D884|A0A5A9D884_9ENTR 7-carboxy-7-deazaguanine synthase OS=Enterobacter hormaechei OX=158836 GN=queE PE=3 SV=1
MQYPINEMFQTLQGEGYFTGVPAIFIRLQGCPVGCAWCDTKHTWDKLADREVSLFSILAKTKESDKWGAGSAEDLLAIISRQGWTARHVVITGGEPCIHDLMPLTELLEKNGYSCQIETSGTHEVRCSHSTWVTVSPKVNMRGGYDVLSQALERADEIKHPVGRVRDIEALDELLATLTDEKQRVIALQPISQKDDATRLCIETCIARNWRLSMQTHKYLNIA

SEQ ID NO: 29902 - protein, 223 aa, Enterobacter huaxiensis
  misc_feature (1)..(223): tr|A0A428LPL1|A0A428LPL1_9ENTR 7-carboxy-7-deazaguanine synthase OS=Enterobacter huaxiensis OX=2494702 GN=queE PE=3 SV=1
MQYPINEMFQTLQGEGYFTGVPAIFIRLQGCPVGCAWCDTKHTWDKLADREVSLFSILAKTKESDKWGAGSAEDLLAIIGRQGWTARHVVITGGEPCIHDLTSLTELLEKNGFSCQIETSGTHEVRCSHATWVTVSPKVNMRGGYDVLSQALERADEIKHPVGRVRDIEALDELLGTLTDEKQRVIALQPISQKDDATRLCIETCIARNWRLSMQTHKYLNIA

SEQ ID NO: 29903 - protein, 223 aa, Enterobacter kobei
  misc_feature (1)..(223): tr|A0A5C1XHU5|A0A5C1XHU5_9ENTR 7-carboxy-7-deazaguanine synthase OS=Enterobacter kobei OX=208224 GN=queE PE=3 SV=1
MQYPINEMFQTLQGEGYFTGVPAIFIRLQGCPVGCAWCDTKHTWDMLADREVSLFSILAKTKESDKWGAGSSEDLLAIIGRQGWTARHVVITGGEPCIHDLTPLTELLEKNGYSCQIETSGTHEVRCSHSTWVTVSPKVNMRGGYDVLSQALERADEIKHPVGRVRDIEALDELLATLTDEKQRVIALQPISQKEDATRLCIETCIARNWRLSMQTHKYLNIA

SEQ ID NO: 29904 - protein, 223 aa, Enterobacter kobei
  misc_feature (1)..(223): tr|A0A2J0PGP1|A0A2J0PGP1_9ENTR 7-carboxy-7-deazaguanine synthase OS=Enterobacter kobei OX=208224 GN=queE PE=3 SV=1
MQYPINEMFQTLQGEGYFTGVPAIFIRLQGCPVGCAWCDTKHTWDKLADREVSLFSILAKTKESDKWGAGSSEDLLAIIGRQGWTARHVVITGGEPCIHDLTPLTELLEKNGYSCQIETSGTHEVRCSHSTWVTVSPKVNMRGGYDVLSQALERADEIKHPVGRVRDIEALDELLATLTDEKQRVIALQPISQKEDATRLCIETCIARNWRLSMQTHKYLNIA

SEQ ID NO: 29905 - protein, 223 aa, Enterobacter lignolyticus
  misc_feature (1)..(223): tr|E3G5S7|E3G5S7_ENTLS 7-carboxy-7-deazaguanine synthas e OS=Enterobacter lignolyticus (strain SCF1) OX=701347 GN=queE PE=3 SV=1
MQYPINEMFQTLQGEGYFTGVPAIFIRLQGCPVGCAWCDTKHTWDMLEDREVSLFSILAKTKESDKWGAATAEDLLTAITRQGWTARHVVITGGEPCIHDLTPLTALLEQNGYSCQIETSGTHEVRCSHSTWVTVSPKVNMRGGFEVLSQALHRADEIKHPVGRVRDIEALDELLETLSDDKQRVIALQPISQKDDATRLCIETCIARNWRLSMQTHKYLNIA

SEQ ID NO: 29906 - protein, 223 aa, Enterobacter ludwigii
  misc_feature (1)..(223): tr|W0BM46|W0BM46_9ENTR 7-carboxy-7-deazaguanine synthas e OS=Enterobacter ludwigii OX=299767 GN=queE PE=3 SV=1
MQYPINEMFQTLQGEGYFTGVPAIFIRLQGCPVGCAWCDTKHTWDKLADREVSLFSILAKTKESDKWGAGSAEDLLAIIGRQGWTARHVVITGGEPCIHDLTPLTELLEKNGYSCQIETSGTHEVRCSHTTWVTVSPKVNMRGGYDVLSQALERADEIKHPVGRVRDIEALDELLATLTDEKQRIIALQPISQKEDATRLCIETCIARNWRLSMQTHKYLNIA

SEQ ID NO: 29907 - protein, 223 aa, Enterobacter ludwigii
  misc_feature (1)..(223): tr|A0A5A9AV58|A0A5A9AV58_9ENTR 7-carboxy-7-deazaguanine synthase OS=Enterobacter ludwigii OX=299767 GN=queE PE =3 SV=1
MQYPINEMFQTLQGEGYFTGVPAIFIRLQGCPVGCAWCDTKHTWDKLADREVSLFSILAKTKESDKWGAGSAEDLLAIIGRQGWTARHVVITGGEPCIHDLTPLTELLEKNGYSCQIETSGTHEVRCSHTTWVTVSPKVNMRGGYDVLSQALERADEIKHPVGRVRDIEALDELLATLTDEKQRIIALQPISQKEDATRLCIGTCIARNWRLSMQTHKYLNIA

SEQ ID NO: 29908 - protein, 223 aa, Enterobacter mori
  misc_feature (1)..(223): tr|A0A2J0NF63|A0A2J0NF63_9ENTR 7-carboxy-7-deazaguanine synthase OS=Enterobacter mori OX=539813 GN=queE PE=3 S V=1
MQYPINEMFQTLQGEGYFTGVPAIFIRLQGCPVGCAWCDTKHTWDKLADREVSLFSILAKTKESDKWGAGSPEDLLAIIGRQGWTARHVVITGGEPCIHDLTPLTELLEKNGYSCQIETSGTHEVRCSHTTWVTVSPKVNMRGGYDVLSQALERADEIKHPVGRVRDIEALDELLATLTDEKQRVIALQPISQKDDATRLCIETCIARNWRLSMQTHKYLNIA

SEQ ID NO: 29909 - protein, 223 aa, Enterobacter roggenkampii
  misc_feature (1)..(223): tr|A0A1S2ADV0|A0A1S2ADV0_9ENTR 7-carboxy-7-deazaguanine synthase OS=Enterobacter roggenkampii OX=1812935 GN=qu eE PE=3 SV=1
MQYPINEMFQTLQGEGYFTGVPAIFIRLQGCPVGCAWCDTKHTWDKLADREVSLFSILAKTKESDKWGAGSAEDLLAIIGRQGWTARHVVITGGEPCIHDLTPLTELLEKNGYSCQIETSGTHEVRCSHSTWVTVSPKVNMRGGYDVLSQALERADEIKHPVGRVRDIEALDELLAKLTDEKQRVIALQPISQKDDATRLCIETCIARNWRLSMQTHKYLNIA

SEQ ID NO: 29910 - protein, 223 aa, Enterobacter roggenkampii
  misc_feature (1)..(223): tr|A0A5D1UBB9|A0A5D1UBB9_9ENTR 7-carboxy-7-deazaguanine synthase OS=Enterobacter roggenkampii OX=1812935 GN=qu eE PE=3 SV=1
MQYPINEMFQTLQGEGYFTGVPAIFIRLQGCPVGCAWCDTKHTWDKLADREVSLFSILAKTKESDKWGAGSAEDLLAIIGRQGWTARHVVITGGEPCIHDLTPLTELLEKNGYSCQIETSGTHEVRCSHSTWVTVSPKVNMRGGYDVLSQALERADEIKHPVGRVRDIEALDELLATLTDEKQRVIALQPISQKDDATRLCIETCIARNWRLSMQTHKYLNIA

SEQ ID NO: 29911 - protein, 223 aa, Enterobacter sichuanensis
  misc_feature (1)..(223): tr|A0A0F1AHB3|A0A0F1AHB3_9ENTR 7-carboxy-7-deazaguanine synthase OS=Enterobacter sichuanensis OX=2071710 GN=qu eE PE=3 SV=1
MQYPINEMFQTLQGEGYFTGVPAIFIRLQGCPVGCAWCDTKHTWDKLADREVSLFSILAKTKESDKWGAGSSEDLLAIIGRQGWTARHVVITGGEPCIHDLTPLTELLEKHGYSCQIETSGTHEVRCSHTTWVTVSPKVNMRGGYDVLSQALERADEIKHPVGRVRDIEALDELLATLTDEKQRVIALQPISQKEDATRLCIETCIARNWRLSMQTHKYLNIA

SEQ ID NO: 29912 - protein, 223 aa, Enterobacter soli
  misc_feature (1)..(223): tr|A0A198H2I7|A0A198H2I7_9ENTR 7-carboxy-7-deazaguanine synthase OS=Enterobacter soli ATCC BAA-2102 OX=1354262 GN=queE PE=3 SV=1
MQYPINEMFQTLQGEGYFTGVPAIFIRLQGCPVGCAWCDTKHTWDKLADREVSLFSILAKTKESDKWGAGSSEDLLAIIGRQGWTARHVVITGGEPCIHDLTPLTELLEKNGYSCQIETSGTHEVRCSHATWVTVSPKVNMRGGYDVLSQALERADEIKHPVGRVRDIEALDELLATLSDEKQRVIALQPISQKDDATRLCIETCIARNWRLSMQTHKYLNIA

SEQ ID NO: 29913 - protein, 223 aa, Enterobacter sp.
  misc_feature (1)..(223): tr|A4WDW3|A4WDW3_ENT38 7-carboxy-7-deazaguanine synthas e OS=Enterobacter sp. (strain 638) OX=399742 GN=queE PE =3 SV=1
MQYPINEMFQTLQGEGYFTGVPAIFIRLQGCPVGCAWCDTKHTWDKLADREVSLFSILAKTKESDKWGAGSAEDLLAIIGRQGWTARHVVITGGEPCIHDLMSLTDLLEKNGYSCQIETSGTHEVRCSHTAWVTVSPKVNMRGGYDVLSQALERADEIKHPVGRMRDIEALDELLATLTDEKQRIIALQPISQKDDATRLCIETCIARNWRLSMQTHKYLNIA

SEQ ID NO: 29914 - protein, 223 aa, Enterobacter sp.
  misc_feature (1)..(223): tr|A0A1E5MUI5|A0A1E5MUI5_9ENTR 7-carboxy-7-deazaguanine synthase OS=Enterobacter sp. ku-bf2 OX=1888167 GN=queE PE=3 SV=1
MQYPINEMFQTLQGEGYFTGVPAIFIRLQGCPVGCAWCDTKHTWDKLADREVSLFSILAKTKESDKWGAGSAEDLLAIIGRQGWTARHVVITGGEPCIHDLTPLTELLEKNGYSCQIETSGTHEVRCSHTTWVTVSPKVNMRGGYDVLSQALERADEIKHPVGRVRDIEALDELLATLTDEKQRVIALQPISQKDDATRLCIETCIARNWRLSMQTHKYLNIA

SEQ ID NO: 29915 - protein, 223 aa, Enterobacterales bacterium
  misc_feature (1)..(223): tr|A0A2I0FRE3|A0A2I0FRE3_9GAMM 7-carboxy-7-deazaguanine synthase OS=Enterobacterales bacterium CwR94 OX=202558 7 GN=queE PE=3 SV=1
MQYPINEMFQTLQGEGVYTGVPAIFIRLQGCPVGCSWCDTKHTWEKRDDRETGLGDILIKTVESDAWGSADAATLVATVRQQGWTALHVVITGGEPALYDLRPLTAELEAQGFTCQIETSGTHDIHCSEKTWVTVSPKVNMRGGYDVIAQALQRADEIKHPVARLRDIEALDALLATLSDDKSRVIALQPISQKADATALCIETCIARNWRLSMQTHKYLNIA

SEQ ID NO: 29916 - protein, 223 aa, Enterobacterales bacterium
  misc_feature (1)..(223): tr|A0A389M9N9|A0A389M9N9_9GAMM 7-carboxy-7-deazaguanine synthase OS=Enterobacterales bacterium OX=1993870 GN=q ueE PE=3 SV=1
MQYPINEMFETLQGEGYFTGVPAIFVRLQGCPVGCSWCDTKHTWDKIADREVDVQRILVKTEESDAWGNATAEQLLQIIEQQGYTARHVVITGGEPCIYDLQPLTSLLEQNGFSCQIETSGTHEVRCSVNTWVTVSPKVNMRGGYDILPQALKRADEVKHPVARQRDIDALEALLATLTDEKSRIIALQPISQKEDATKLCIATCIAKNWRLSMQTHKYLNIA

SEQ ID NO: 29917 - protein, 223 aa, Enterobacteriaceae bacterium; identical to SEQ ID NO: 27928
  misc_feature (1)..(223): tr|A0A3C2BIP0|A0A3C2BIP0_9ENTR 7-carboxy-7-deazaguanine synthase OS=Enterobacteriaceae bacterium OX=1849603 GN =queE PE=3 SV=1

SEQ ID NO: 29918 - protein, 223 aa, Enterobacteriaceae bacterium
  misc_feature (1)..(223): tr|A0A2S0VI03|A0A2S0VI03_9ENTR 7-carboxy-7-deazaguanine synthase OS=Enterobacteriaceae bacterium S05 OX=205293 8 GN=queE PE=3 SV=1
MQYPINEMFQTLQGEGYFTGVPAIFIRLQGCPVGCAWCDTKHTWDKLADREVSLFSILAKTKESDKWGPASSEDLLAIIGRQGWTARHVVITGGEPCIHDLTPLTSLLEQNGFSCQIETSGTHEVLCSHNTWVTVSPKVNMRGGYDVLSQALQRADEIKHPVGRVRDIEALDELLETLSDDKPRIIALQPISQKEDATRLCIDTCIARNWRLSMQTHKYLNIA

SEQ ID NO: 29919 - protein, 261 aa, Enterorhabdus caecimuris
  misc_feature (1)..(261): tr|A0A4S4G559|A0A4S4G559_9ACTN 7-carboxy-7-deazaguanine synthase OS=Enterorhabdus caecimuris OX=671266 GN=queE PE=3 SV=1
MVPEEENDGLLDAERHQARHTIAARAQLFPVAEKFVSLNGEGLAAGRPAAFIRFAGCNMWCTYCDTRWANHPLVEVEGWSVPQLLAWVAETGVSCVTLTGGEPLLQPYLPDLVQALLSVESPRPMRVEIETNGSRDLGPMAHLREACAEAGLPGSLHFTVDWKTPTAGEAVSAAMRRENYELLDARDAVKFVVGSEEDLAFMEARADEAGLWDRCQVLVSPVWGAIEPAEIAACLIERGLDRARLQLQLHKIIWPNETKGV

SEQ ID NO: 29920 - protein, 261 aa, Enterorhabdus caecimuris
  misc_feature (1)..(261): tr|R9KVR1|R9KVR1_9ACTN 7-carboxy-7-deazaguanine synthas e OS=Enterorhabdus caecimuris B7 OX=1235794 GN=queE PE= 3 SV=1
MVPEEENDGLLDAERHQARHTIAARAQLFPVAEKFVSLNGEGLAAGRPAAFIRFAGCNMWCTYCDTRWANHPLVEVEGWSVPQLLAWVAETGVSCVTLTGGEPLLQPYLPDLVQALLAVSDPRPLRVEIETNGSRDLEPMAHLREVCAEAGLPGSLHFTVDWKTPTAGEAVSAAMRRENYELLDARDAVKFVVGSEEDLTFMEARADEAGLWDRCQVLVSPVWGAIEPAEIAACLIERGLDRARLQLQLHKIIWPNETKGV

SEQ ID NO: 29921 - protein, 261 aa, Enterorhabdus sp.
  misc_feature (1)..(261): tr|A0A4S2FAQ4|A0A4S2FAQ4_9ACTN 7-carboxy-7-deazaguanine synthase OS=Enterorhabdus sp. NM05_H27 OX=2516956 GN=q ueE PE=3 SV=1
MVPEEENDGLLDAERHQARHTIAARAQLFPVAEKFVSLNGEGLASGRPAAFIRFAGCNMWCTYCDTRWANHPLVEVEGWSVPQLLAWVAETGVSCVTLTGGEPLLQPYLPDLVQALLSVESPRPLRVEIETNGSRDLGPMAHLREAAAEAGLPGSLHFTVDWKTPTAGEAVSAAMRRENYDVLDERDAVKFVVGSEEDLAFMERMADEAGLWDRCTVLASPVWGAIEPAEIAAYLIERGLDRARLQLQLHKIIWPNESRGV

SEQ ID NO: 29922 - protein, 220 aa, Enterovibrio coralii
  misc_feature (1)..(220): tr|A0A135I8H9|A0A135I8H9_9GAMM 7-carboxy-7-deazaguanine synthase OS=Enterovibrio coralii OX=294935 GN=queE PE= 3 SV=1
MYNVNEIFETIQGEGTFTGVPSIFVRLQGCPVGCPWCDTRQTWDTLETDKRDFGAVIAKTGDSPLWAETTADEIVDYLNKSYSAKHVVITGGEPCIFDLVPLTTRLEANGYRCQIETSGTYPIKASENTWVTVSPKINMRGKLPVQKCALARANEIKHPVGTESDIEKLEALLADVDVSGKEIALQPISQKPRATVLCIETCIKKNWRLSIQTHKYLDIA

SEQ ID NO: 29923 - protein, 220 aa, Enterovibrio nigricans
  misc_feature (1)..(220): tr|A0A1T4VD01|A0A1T4VD01_9GAMM 7-carboxy-7-deazaguanine synthase OS=Enterovibrio nigricans DSM 22720 OX=112186 8 GN=queE PE=3 SV=1
MYNVNEIFETIQGEGTFTGVPSIFVRLQGCPVGCPWCDTRQTWDTLDTDQRDFGTIIAKSGDSPLWAQTTSAEIVDHLMKSYTAKHVVITGGEPCMFDLVPLTTQLEANGYRCQIETSGTYDVRASASTWVTVSPKINMRGKLPVLKCALARANEIKHPVGTESDIEKLEDLLAGIDLSEKEVALQPISQKPKATSLCIETCIKKNWRLSIQTHKYLDIA

SEQ ID NO: 29924 - protein, 221 aa, Enterovibrio norvegicus
  misc_feature (1)..(221): tr|A0A2N7LAF8|A0A2N7LAF8_9GAMM 7-carboxy-7-deazaguanine synthase OS=Enterovibrio norvegicus OX=188144 GN=queE PE=3 SV=1
MYNVNEIFETIQGEGTFTGVPSVFVRLQGCPVGCPWCDTRQTWDTLPTDERDFGAIITKTGDSPIWAAVDANDILTHLQNSYTAKHVVITGGEPCIYDLRPLTERLESAGYRCQIETSGTYPVQTTEGTWVTVSPKINMRGKLPVLESALERANEIKHPVGTESDIEKLDALLDGIALRDNAEIALQPISQKPRATALCIDTCIKRNWRLSIQTHKYLDIA

SEQ ID NO: 29925 - protein, 220 aa, Enterovibrio norvegicus
  misc_feature (1)..(220): tr|A0A1E5C176|A0A1E5C176_9GAMM 7-carboxy-7-deazaguanine synthase OS=Enterovibrio norvegicus FF-454 OX=1185651 GN=queE PE=3 SV=1
MYNVNEIFETIQGEGTFTGVPSVFVRLQGCPVGCPWCDTRQTWDTLPNDERDFGTVIAKTGDSPTWTSVSAEHILAHLTQSYTAKHVVITGGEPCIFDLFPLTTLLESAGYRCQIETSGTYKVKATVNTWVTVSPKINMRGKLPVLNEALKRANEIKHPVGTESDIEKLDALLEGIDLSNKEVALQPISQKPRATELCIKTCIRRNWRLSIQTHKYLDIA

SEQ ID NO: 29926 - protein, 220 aa, Enterovibrio pacificus
  misc_feature (1)..(220): tr|A0A1C3EPS1|A0A1C3EPS1_9GAMM 7-carboxy-7-deazaguanine synthase OS=Enterovibrio pacificus OX=1080227 GN=queE PE=3 SV=1
MYKVNEIFETIQGEGIFTGLPSIFVRLQGCPVGCAWCDTKQTWDVLEQDHRDFGEILAKTSDSPLWTSITTQSIVQHLQDSYHAKHVVITGGEPCVYDLQPLTTALEAAGYQCQIETSGTYPIQATDSTWVTVSPKIGMRGKLPVLTECLERANEIKHPVGTQSDIEKLDELLEGVVLKDKTVALQPISQKPRATALCIDTCIKRNWRLSIQTHKYLDIA

SEQ ID NO: 29927 - protein, 221 aa, Enterovibrio sp.
  misc_feature (1)..(221): tr|A0A4Q0Z0L0|A0A4Q0Z0L0_9GAMM 7-carboxy-7-deazaguanine synthase OS=Enterovibrio sp. CAIM 600 OX=1278244 GN=qu eE PE=3 SV=1
MYRINEIFETIQGEGVFTGLPSIFIRLQGCPVGCSWCDTKQTWDVFEQDERDFGEILAKESDSPNWTSLTVDNIIEHLNRSYTAKHIVITGGEPCIYDLNPLTEALEQNGYQCQIETSGTYTIHATTSTWVTVSPKIGMRGKLPVLAECLERANEIKHPVGTESDIEKLDALIEDVRLRDNVTIALQPISQKQRATQLCIDVCVKRNWRLSIQTHKYLNIA

SEQ ID NO: 29928 - protein, 211 aa, Enterovirga rhinocerotis
  misc_feature (1)..(211): tr|A0A4R7CA77|A0A4R7CA77_9RHIZ 7-carboxy-7-deazaguanine synthase OS=Enterovirga rhinocerotis OX=1339210 GN=que E PE=3 SV=1
MKRYAVKEIFYTLQGEGRQSGRAAVFCRFAGCNLWTGRDGDRAAAACRFCDTDFVGVDGEGGGFFRGAEALADAVAGCWGPGEERRFCVLTGGEPLLQVDEALVDALHARGFEIAVETNGTLEPPRGIDWIAVSPKGEAPLRLTRGNELKLVYPQEDAPPERFAGLAFDDFCLQPMDGPDSARNTALAVAYCKAHPRWRLSLQTHKWLGIP

SEQ ID NO: 29929 - protein, 235 aa, Epibacterium mobile
  misc_feature (1)..(235): tr|A0A1B1A355|A0A1B1A355_9RHOB 7-carboxy-7-deazaguanine synthase OS=Epibacterium mobile F1926 OX=1265309 GN=qu eE PE=3 SV=1
MTLRIAEIFGPTIQGEGALIGEPTVFVRAGGCDYRCSWCDSLHAVESQYRHSWAPMETDAVWAKVHKLSGGQPLTVSLSGGNPAIQDFGPLITKGRAVGYRFACETQGSIARPWFAELDTLVLSPKPPSSGENVDWDAFDSCRTIGAGARQQVIKIVIFDETDYQWAREVHRHHSDLALYLQPGNPEVDPATPVDLQTLANRLGWLTEKAMADGWFAPRILPQLHVLIWGNKRGV

SEQ ID NO: 29930 - protein, 235 aa, Epibacterium mobile
  misc_feature (1)..(235): tr|A0A1H3DH45|A0A1H3DH45_9RHOB 7-carboxy-7-deazaguanine synthase OS=Epibacterium mobile OX=379347 GN=queE PE=3 SV=1
MTLRIAEIFGPTIQGEGALIGEPTVFVRAGGCDYRCSWCDTLHAVETQYRHSWAPMETDAVWAKVHKLSGGQPLTVSLSGGNPAIQDFGPLITKGRAAGYRFACETQGSIARPWFAELDTLVLSPKPPSSGENVDWDAFDSCRAIGAGARQQVMKIVIFDETDYQWAREVHRRHSDLALYLQPGNPEVDPATPVDLQTLANRLGWLTEKAMADGWFAPRILPQLHVLIWGNKRGV

SEQ ID NO: 29931 - protein, 235 aa, Epibacterium multivorans
  misc_feature (1)..(235): tr|A0A0P1GV14|A0A0P1GV14_9RHOB 7-carboxy-7-deazaguanine synthase OS=Epibacterium multivorans OX=928856 GN=queE PE=3 SV=1
MTLRIAEIFGPTIQGEGALIGEPTVFVRTGGCDYRCSWCDSLHAVDSAYRHEWKPMTPKAVWNEVRHLSGGRPLTVSLSGGNPAIQDFAPVIALGHTEGYRFACETQGSIAKPWFADLDTLVLSPKPPSSGEAVDWDAFDACLKAAGDRPQVVLKIVVFDKTDYAWAKAASERYPGLPLYLQPGNPEVDPETPIETQDSLDRMLWLVDKVTRDRWFTPRILPQLHVLLWGNKRGV

SEQ ID NO: 29932 - protein, 235 aa, Epibacterium ulvae
  misc_feature (1)..(235): tr|A0A1G5PJN5|A0A1G5PJN5_9RHOB 7-carboxy-7-deazaguanine synthase OS=Epibacterium ulvae OX=1156985 GN=queE PE=3 SV=1
MTLRIAEIFGPTIQGEGALIGEPTVFVRAGGCDYRCSWCDSLHAVDSAFRHTWTPMQAADVWQQVLDLSGDRPLTVSISGGNPAIQDFAPVIALGQTAGYRFACETQGSIAKPWFAELNTLVLSPKPPSSGETVDWDAFDACLAAAGEAPEVVLKIVIFDETDYDWAKEVADRYAQLPLYLQPGNPEVDPEIPVETQDTLDRLLWLVDKTTAEGWFTPRILPQLHVLLWGNKRGV

SEQ ID NO: 29933 - protein, 236 aa, Epsilonproteobacteria bacterium
  misc_feature (1)..(236): tr|A0A496XTU5|A0A496XTU5_9PROT 7-carboxy-7-deazaguanine synthase OS=Epsilonproteobacteria bacterium OX=2026809 GN=queE PE=3 SV=1
MQSVKMGIHSIYLATEGEGIHIGRPQIFVRFQGCDIGCRNCDSKETWAFKGAKRPLESILLEIHNIGLKGKIKHLSITGGDPLNEVHLPGLQALLIELKKQGYYINIEAAGTKVVEEVFQLVDFISFDFKTPSTGVSTHPELILKMQQDFPGKFQVKAVVESEEDFTATHKAYLQLKERLGDISFDWCLTPSFNPREDFPMERFIMVIECNQKFGGPFKVIGQQHKWIYGSNAKNK

SEQ ID NO: 29934 - protein, 252 aa, Epsilonproteobacteria bacterium
  misc_feature (1)..(252): tr|A0A426VX90|A0A426VX90_9PROT 7-carboxy-7-deazaguanine synthase OS=Epsilonproteobacteria bacterium (ex Lamell ibrachia satsuma) OX=2496635 GN=queE PE=3 SV=1
MFYLTEQFFSIQGEGKYAGVPSYFLRTGGCNLSCPGFAAAYEVNGELRLGCDTYFAVDSAFAKSWIKVNDSTALIKRLQQEFKTIGYHPDVVITGGEPLMYYSDPVFYQVILWLLEQGIQITFETNGTIEIDFEKYPAYKSCIFALSIKLANSGEPSQKRIIPQALKNIQSYAKESFLKFTIDKNLVETTAIKEINQIREILPKLEVFCMPVGESRDTIWRNDRAVFEFCMKHNFRYSDRLHIRVFDTTQGV

SEQ ID NO: 29935 - protein, 218 aa, Epulopiscium sp.
  misc_feature (1)..(218): tr|A0A1V2YHT0|A0A1V2YHT0_9FIRM 7-carboxy-7-deazaguanine synthase OS=Epulopiscium sp. Nuni2H_MBin001 OX=1884656 GN=queE PE=3 SV=1
MKVVEKFVSIDGEGPMAGELATFVRFEGCNLRCSWCDTSYSWDGESESLTASQIYDYIISTGINHITLTGGEPLLHEDIEVLLAKLSDNYNLIVNIETNGSVLIAPFKQKFASNIRYVIDYKLPDSGMTNKMDIANLKAVTANDTYKFVIASSQDLEKAYELICEYDLNYRCNVHLSPVQEQINPQVIVDYMKQQAIQNIRLQLQLHKFIWPKECRGV

SEQ ID NO: 29936 - protein, 217 aa, Epulopiscium sp.
  misc_feature (1)..(217): tr|A0A1S9CU90|A0A1S9CU90_9FIRM 7-carboxy-7-deazaguanine synthase OS=Epulopiscium sp. Nele67-Bin004 OX=1764962 GN=queE PE=3 SV=1
MKIVEKFVSIDGEGPMAGELAVFVRFLGCNLRCSWCDTSYSWEEEHTNEEMTPKEVYTYIKQTNISHVTLTGGEPLIQQGIYELLDILDSDSSLLVHIETNGSVDIKPFKQRYKNIRYILDYKLGESTMTQKMCEKNLDQVGQNDVYKFVVASDADLQQAYQIIKKYNLPCKVYLSAVAEKLSPQQVVNFMIEKQLEGVKLQLQLHKFIWPKESRGV

SEQ ID NO: 29937 - protein, 255 aa, Erwinia amylovora
  misc_feature (1)..(255): tr|D4HWL4|D4HWL4_ERWAC 7-carboxy-7-deazaguanine synthas e OS=Erwinia amylovora (strain CFBP1430) OX=665029 GN=y gcF PE=3 SV=1
MIRPDLIRTLCLALSVQSAIICGLYSPPVEKLMQYPINEMFQTLQGEGVYTGVPAIFIRLQGCPVGCSWCDTKHTWDKLANRETSLGDILLKTVESDAWGAADAPALLETIRRHGWTAKHIVITGGEPCIHDLTPLTAALQGSGFSCQIETSGTHEVHCTAETWVTVSPKVNMRGGYDVLNQALVRADEVKHPVARQRDVDALDDLLATLSDNKARIIALQPVSQKADATQLCIDTCIARNWRLSMQTHKYLNIA

SEQ ID NO: 29938 - protein, 223 aa, Erwinia amylovora
  misc_feature (1)..(223): tr|E5B284|E5B284_ERWAM 7-carboxy-7-deazaguanine synthas e OS=Erwinia amylovora ATCC BAA-2158 OX=889211 GN=ygcF PE=3 SV=1
MQYPINEMFQTLQGEGVYTGVPAIFIRLQGCPVGCSWCDTKHTWDKLANRETSLGDILLKTVESDAWGAADAPALLETIRRHGWTAKHIVITGGEPCIYDLTPLTAALQGSGFSCQIETSGTHEVHCTAETWVTVSPKVNMRGGYDVLNQALVRADEVKHPVARQRDVDALDDLLATLSDNKARIIALQPVSQKADATQLCIDTCIARNWRLSMQTHKYLNIA

SEQ ID NO: 29939 - protein, 223 aa, Erwinia aphidicola
  misc_feature (1)..(223): tr|A0A4R6PB31|A0A4R6PB31_ERWAP 7-carboxy-7-deazaguanine synthase OS=Erwinia aphidicola OX=68334 GN=queE PE=3 S V=1
MQYPINEMFQTLQGEGVYTGVPAIFIRLQGCPVGCSWCDTKHTWDKLADRETSLGDILLKTVETDAWGAADAAALLGVIRQHGWTAKHVVITGGEPCIHDLTPLTAALQENGFSCQIETSGTHEVLCTPETWVTVSPKVNMRGGYDVLNQALIRADEVKHPVARQRDVDALDELLATLSDEKTRIIALQPISQKDDATRLCIETCIARNWRLSMQTHKYLNIA

SEQ ID NO: 29940 - protein, 223 aa, Erwinia billingiae
  misc_feature (1)..(223): tr|D8MW65|D8MW65_ERWBE 7-carboxy-7-deazaguanine synthas e OS=Erwinia billingiae (strain Eb661) OX=634500 GN=que E PE=3 SV=1
MQYPINEMFQTLQGEGFYTGVPAIFIRLQGCPVGCSWCDTKHTWDKLADRETSLGDILTKTVETDAWGSANAAALLAVIANHGWTARHIVITGGEPCIHDLTPLTATLQQHGFSCQIETSGTHEVLCSAETWVTVSPKVNMRGGYDVLNQALVRADEVKHPVARQRDVEALQALLATLNDDKPRIIALQPISQKDDATKLCIETCIKHNWRLSMQTHKYLNIA

SEQ ID NO: 29941 - protein, 223 aa, Erwinia billingiae
  misc_feature (1)..(223): tr|A0A5J6LS79|A0A5J6LS79_9GAMM 7-carboxy-7-deazaguanine synthase QueE OS=Erwinia billingiae OX=182337 GN=queE PE=4 SV=1
MQYPINEMFQTLQGEGFYTGVPAIFIRLQGCPVGCSWCDTKHTWDKLADRETSLGDILTKTVETDAWGSADAAALLAVIANHGWTARHIVITGGEPCIHDLTPLTQTLQQHGFSCQIETSGTHEVLCSAETWVTVSPKVNMRGGYDVLNQALVRADEVKHPVARQRDVEALQALLATLNDDKPRIIALQPISQKDDATKLCIETCIKHNWRLSMQTHKYLNIA

SEQ ID NO: 29942 - protein, 223 aa, Erwinia citreus
  misc_feature (1)..(223): tr|A0A358L733|A0A358L733_ERWCI 7-carboxy-7-deazaguanine synthase OS=Erwinia citreus OX=558 GN=queE PE=3 SV=1
MQYPINEMFQTLQGEGFYTGVPAIFIRLQGCPVGCSWCDTKHTWDKLADRETSLGDILLKTVETDAWGAADAEALLAVITRHGWTARHVVITGGEPCIHDLTPLTQALEQQGFSCQIETSGTHPVQCSEKTWVTVSPKVNMRGGYDVLSQALVRADEVKHPVARQRDVDALDALLATLNDSKPRIIALQPISQKDDATRLCIETCIARNWRLSMQTHKYLNIA

SEQ ID NO: 29943 - protein, 223 aa, Erwinia gerundensis
  misc_feature (1)..(223): tr|A0A0U5L6R0|A0A0U5L6R0_9GAMM 7-carboxy-7-deazaguanine synthase OS=Erwinia gerundensis OX=1619313 GN=queE PE= 3 SV=1
MQYPINEMFQTLQGEGFYTGVPAIFIRMQGCPVGCSWCDTKHTWDKLANRETALGDILVKTEESDAWGSADAATLIQTIADQQWTARHVVITGGEPAIYDLRPLTESLEQAGFSCQIETSGTHEIRCSSATWVTVSPKVNMRGGYDVIAQALQRADEVKHPVGRQRDIDELELLLSTLKDDKSRIIALQPISQKDAATRLCIETCIARNWRLSMQTHKYLNIA

SEQ ID NO: 29944 - protein, 223 aa, Erwinia iniecta
  misc_feature (1)..(223): tr|A0A0L7T1C5|A0A0L7T1C5_9GAMM 7-carboxy-7-deazaguanine synthase OS=Erwinia iniecta OX=1560201 GN=queE PE=3 SV =1
MQYPINEMFQTLQGEGFYTGVPAIFIRLQGCPVGCSWCDTKHTWDKLADRETSLGDILIKTVETDAWGSADADALLATIAQQGWTARHVVITGGEPSIYDLTPLTEALETAGFSCQIETSGTHEVQCSARTWVTVSPKVNMRGGYDVLSQALIRADEIKHPVARQRDIEALEALLATLSDDKPRIVALQPISQKEDATKLCIETCIARNWRLSMQTHKYLNIA

SEQ ID NO: 29945 - protein, 223 aa, Erwinia mallotivora
  misc_feature (1)..(223): tr|A0A014N6B9|A0A014N6B9_9GAMM 7-carboxy-7-deazaguanine synthase OS=Erwinia mallotivora OX=69222 GN=queE PE=3 SV=1
MQYPINEMFQTLQGEGFYTGVPAIFIRLQGCPVGCSWCDTKHTWDKLASRETALGDILLKTVESDAWGMADAQALLAVIGQHGWTARHVVITGGEPCIYDLTPLTEYLEQQGYRCQIETSGTHQVLCSSATWVTVSPKVNMRGGYDVLNQALVRADEVKHPVARQRDIDALDALLVTLDDQKSRIVALQPISQKKDATQLCIETCIARNWRLSMQTHKYLNIA

SEQ ID NO: 29946 - protein, 223 aa, Erwinia persicina
  misc_feature (1)..(223): tr|A0A3S7RZH0|A0A3S7RZH0_9GAMM 7-carboxy-7-deazaguanine synthase OS=Erwinia persicina OX=55211 GN=queE PE=3 SV =1
MQYPINEMFQTLQGEGLYTGVPAIFIRLQGCPVGCSWCDTKHTWDKLADRETSLGDILLKTVETDAWGAADAQALIDVIRQHGWTAKHIVITGGEPCIHDLTPLTAALQQQGFGCQIETSGTHEVRCTPDTWVTVSPKVNMRGGYDVLNQALVRADEVKHPVARQRDVDALDALLATLSDDKARIIALQPISQKADATKLCIETCIARNWRLSMQTHKYLNIA

SEQ ID NO: 29947 - protein, 223 aa, Erwinia persicina
  misc_feature (1)..(223): tr|A0A4U3FE95|A0A4U3FE95_9GAMM 7-carboxy-7-deazaguanine synthase OS=Erwinia persicina OX=55211 GN=queE PE=3 SV =1
MQYPINEMFQTLQGEGLYTGVPAIFIRLQGCPVGCSWCDTKHTWDKLADRETSLGDILLKTVETDAWGAADAQALIGVIRQHGWTAKHIVITGGEPCIHDLTPLTAALEQEGFGCQIETSGTHEVRCTPETWVTVSPKVNMRGGYDVLNQALVRADEVKHPVARQRDVDALDTLLATLSDDKARIIALQPISQKADATKLCIETCIARNWRLSMQTHKYLNIA

SEQ ID NO: 29948 - protein, 224 aa, Erwinia piriflorinigrans
  misc_feature (1)..(224): tr|V5Z587|V5Z587_9GAMM 7-carboxy-7-deazaguanine synthas e OS=Erwinia piriflorinigrans CFBP 5888 OX=1161919 GN=y gcF PE=3 SV=1
MQYPINEMFQTLQGEGFYTGVPAIFIRLQGCPVGCSWCDTKHTWDKLANRETSLGDILLKTVETDAWGAADAPALLETIRRHGWTAKHIVITGGEPCIHDLTPLTATLQDSGFSCQIETSGTHEVSCTAQTWVTVSPKVNMRGGYDVLHQALVRADEVKHPVARQRDVDALDELLATLNDDNKARIIALQPISQKADATQLCIDTCIARNWRLSMQTHKYLNIA

SEQ ID NO: 29949 - protein, 223 aa, Erwinia psidii
  misc_feature (1)..(223): tr|A0A3N6UWC1|A0A3N6UWC1_9GAMM 7-carboxy-7-deazaguanine synthase OS=Erwinia psidii OX=69224 GN=queE PE=3 SV=1
MQYPINEMFQTLQGEGFYTGVPAIFIRLQGCPVGCSWCDTKHTWDKQANRETDLGDILQKTVESDAWGAANAEALLAVITQQGWTAQHVVITGGEPCIYDLVPLTDYLEQHGFSCQIETSGTHPVRCSAATWVTVSPKVNMRGGYDVLNQALVRADEVKHPVARQRDVDALDLLLSTLHDDKNRIVALQPISLKEDATRLCIETCIARNWRLSMQTHKYLNIA

SEQ ID NO: 29950 - protein, 277 aa, Erwinia pyrifoliae
  misc_feature (1)..(277): tr|D2T5M0|D2T5M0_ERWP6 7-carboxy-7-deazaguanine synthas e OS=Erwinia pyrifoliae (strain DSM 12163 / CIP 106111 / Ep16/96) OX=644651 GN=ygcF PE=3 SV=1
MIDAGEGRQALHPLLRYALSVQIIRPDTIRTLCLALSAQSAIICARHLPPVEKLMQYPINEMFQTLQGEGFYTGVPAIFIRLQGCPVGCSWCDTKHTWDKLADRETSLGDILLKTVETDAWGAADAPALLETIRRHGWTAKHIVITGGEPCIYDLTPLTAALQDSGFSCQIETSGTHQVRCTAQTWVTVSPKVNMRGGYDVLNQALVRADEVKHPVARQRDVDALDELLATLNDNKARIIALQPISQKADATQLCIDTCIARNWRLSMQTHKYLNIA

SEQ ID NO: 29951 - protein, 223 aa, Erwinia rhapontici
  misc_feature (1)..(223): tr|A0A4R7GIQ5|A0A4R7GIQ5_ERWRD 7-carboxy-7-deazaguanine synthase OS=Erwinia rhapontici OX=55212 GN=queE PE=3 S V=1
MQYPINEMFQTLQGEGLYTGVPAIFIRLQGCPVGCSWCDTKHTWDKLADRETSLGDILLKTVETDAWGAADAEALIGVIRQHGWTAKHIVITGGEPCIHDLTPLTAALQQHGFGCQIETSGTHDVRCTPETWVTVSPKVNMRGGYDVLHQALVRADEVKHPVARQRDVDALDDLLATLSDDKARIIALQPISQKDDATKLCIETCIARNWRLSMQTHKYLNIA

SEQ ID NO: 29952 - protein, 223 aa, Erwinia sp.
  misc_feature (1)..(223): tr|E3DHJ4|E3DHJ4_ERWSE 7-carboxy-7-deazaguanine synthas e OS=Erwinia sp. (strain Ejp617) OX=215689 GN=ygcF PE=3 SV=1
MQYPINEMFQTLQGEGFYTGVPAIFIRLQGCPVGCSWCDTKHTWDKLANRETSLGDILLKTVETDAWGAADAPALLETIRRHGWTAKHIVITGGEPCIYDLTPLTAALQDSGFSCQIETSGTHQVRCTAQTWVTVSPKVNMRGGYDVLNQALARADEVKHPVARQRDVDALDELLATLNDNKARIIALQPISQKADATQLCIDTCIARNWRLSMQTHKYLNIA

SEQ ID NO: 29953 - protein, 223 aa, Erwinia sp.
  misc_feature (1)..(223): tr|A0A0Q4NN66|A0A0Q4NN66_9GAMM 7-carboxy-7-deazaguanine synthase OS=Erwinia sp. Leaf53 OX=1736225 GN=queE PE=3 SV=1
MQYPINEMFQTLQGEGIYTGVPAIFIRLQGCPVGCSWCDTKHTWDKLADRETSLGDILLKTAETDAWGAADAAALIAVVRQHGWTAQHIVITGGEPCIHDLTPLTAELEQQGFSCQIETSGTHEVRCTATTWVTVSPKVNMRGGYDVLHSALVRADEVKHPVARQRDVDALDDLLATLSDSKARIIALQPISQKDDATKLCIDTCIARNWRLSMQTHKYLNIA

SEQ ID NO: 29954 - protein, 223 aa, Erwinia tasmaniensis
  misc_feature (1)..(223): tr|B2VFY6|B2VFY6_ERWT9 7-carboxy-7-deazaguanine synthas e OS=Erwinia tasmaniensis (strain DSM 17950 / CIP 10946 3 / Et1/99) OX=465817 GN=queE PE=3 SV=1
MQYPINEMFQTLQGEGVYTGVPAIFIRLQGCPVGCSWCDTKHTWDKLANRETSLGDILLKTVETDAWGAADAPALLETIRRHGWTAKHIVVTGGEPCIHDLVPLTAALQDAGFSCQIETSGTHEVSCTAQTWVTVSPKVNMRGGYDVLNQALVRADEVKHPVARQRDVEALDELLGTLNDNKARIIALQPISQKADATQLCIDTCIARNWRLSMQTHKYLNIA

SEQ ID NO: 29955 - protein, 223 aa, Erwinia tracheiphila
  misc_feature (1)..(223): tr|A0A345CTG3|A0A345CTG3_9GAMM 7-carboxy-7-deazaguanine synthase OS=Erwinia tracheiphila OX=65700 GN=queE PE=3 SV=1
MQYPINEMFQTLQGEGFYTGVPAIFIRLQGCPVGCSWCDTKHTWDKLASRETSMGDILIKTVESDAWGAADAQTLHAMMVQQGWAARHVVITGGEPCIYDLTPLTEYLEQLGFSCQIETSGTHTVQCSAGTWVTVSPKVNMRGGYDVLDQALVRADEVKHPVARQRDVEALDKLLARLRDEKSRIVALQPISQKDEATRLCIETCIARNWRLSMQTHKYLNIA

SEQ ID NO: 29956 - protein, 223 aa, Erwinia tracheiphila
  misc_feature (1)..(223): tr|A0A0M2K7J9|A0A0M2K7J9_9GAMM 7-carboxy-7-deazaguanine synthase OS=Erwinia tracheiphila OX=65700 GN=queE PE=3 SV=1
MQYPINEMFQTLQGEGFYTGVPAIFIRLQGCPVGCSWCDTKHTWDKLASRETSMGDILIKTVESDAWGAADAQTLHAMMVQQGWAARHVVITGGEPCIYDLTPLTEYLEQLGFSCQIETSGTHTVQCSAGTWVTVSPKVNMRGGYDVLVQALVRADEVKHPVARQRDVEALDKLLARLRDEKSRIVALQPISQKDEATRLCIETCIARNWRLSMQTHKYLNIA

SEQ ID NO: 29957 - protein, 223 aa, Erwinia typographi
  misc_feature (1)..(223): tr|A0A0A3Z6Y9|A0A0A3Z6Y9_9GAMM 7-carboxy-7-deazaguanine synthase OS=Erwinia typographi OX=371042 GN=queE PE=3 SV=1
MQYPINEMFQTLQGEGFYTGVPAIFIRLQGCPVGCSWCDTKHTWDKLADRETSLGDILLKTIESDAWGAADAGALLKVIAAQGWTARHVVITGGEPCIHDLTPLTDTLQQQGFSCQIETSGTHEVRCSAETWVTVSPKVNMRGGYDVLHQALVRADEVKHPVARQRDVEALQALLATLSDEKARIVALQPISQKDDATRLCIETCIKHNWRLSMQTHKYLNIA

SEQ ID NO: 29958 - protein, 223 aa, Erwiniaceae bacterium
  misc_feature (1)..(223): tr|A0A3D5MCB7|A0A3D5MCB7_9GAMM 7-carboxy-7-deazaguanine synthase OS=Erwiniaceae bacterium OX=2053552 GN=queE P E=3 SV=1
MQYPINEMFQTLQGEGFYTGVPAIFIRLQGCPVGCSWCDTKHTWDKLADRETSLGDILIKTVESDAWGAADADALLATIKRQQWTARHVVITGGEPCIHDLTPLTAALQQAGFSCQIETSGTHEVQCSPETWVTVSPKVNMRGGYDVLNQALARADEIKHPVARQRDIDALDELLARLENEKARIVALQPISQKEDATRLCIATCIARNWRLSMQTHKYLNIA

SEQ ID NO: 29959 - protein, 220 aa, Erysipelatoclostridium ramosum
  misc_feature (1)..(220): tr|A0A3E3EH82|A0A3E3EH82_9FIRM 7-carboxy-7-deazaguanine synthase OS=Erysipelatoclostridium ramosum OX=1547 GN= queE PE=3 SV=1
MNNYKVVEKFISINGEGSRAGQLAAFIRFHYCNLNCSYCDTRYANDSNSNYELLSAQNILDYLKANKVVNVTLTGGEPLLQQNIDYLIDLLLKNGFSVEIETNGSIDIKPFIKETRPIFTLDYKVPSSTMENEMCLNNYQYLTKNDVVKFVVSNLSDLNKAKEIIDTYDLVNRTKVYFSPVFGKIEPRMIVDYMVKHHLNGINMQLQMHKFIWDINQRGV

SEQ ID NO: 29960 - protein, 220 aa, Erysipelatoclostridium ramosum
  misc_feature (1)..(220): tr|B0N7X9|B0N7X9_9FIRM 7-carboxy-7-deazaguanine synthas e OS=Erysipelatoclostridium ramosum DSM 1402 OX=445974 GN=queE PE=3 SV=1
MNNYKVVEKFISINGEGSRAGQLAAFIRFHYCNLNCSYCDTRYANDSNSNYELLSAQNILDYLKANKVVNVTLTGGEPLLQQNIDYLIDLLLKNGFSVEIETNGSIDIKPFIKETRPIFTLDYKVPSSTMENEMCLNNYQYLTKNDVVKFVVSNLSDLNKAKEIIDTYDLVNRTKVYFSPVFGKIEPRMIVDYMVKHHLNGINMQLQMHKFIWDVNQRGV

SEQ ID NO: 29961 - protein, 220 aa, Erysipelatoclostridium sp.
  misc_feature (1)..(220): tr|A0A1Y4MWT7|A0A1Y4MWT7_9FIRM 7-carboxy-7-deazaguanine synthase OS=Erysipelatoclostridium sp. An173 OX=196557 1 GN=queE PE=3 SV=1
MNNFKVVEKFISINGEGSKAGQLAAFIRFQGCNLNCSYCDSKYANSDDAKYSLMTEEEIINYLNENKIKNVTLTGGEPLLQKNIKSLIFELLKLNYNVEIETNGSVNIKPFISDLRPIFTLDYKTPSSLMENYMNEKNYNYLTKDDVVKFVVGNQKDLITAKNIIDKYDLINKAQVYFSPIYGQIDPKEIVAFMIENQLNGVNFQLQLHKYIWNPNMRGV

SEQ ID NO: 29962 - protein, 220 aa, Erysipelatoclostridium sp.; identical to SEQ ID NO: 29961
  misc_feature (1)..(220): tr|A0A1Y4QTG4|A0A1Y4QTG4_9FIRM 7-carboxy-7-deazaguanine synthase OS=Erysipelatoclostridium sp. An15 OX=1965566 GN=queE PE=3 SV=1

SEQ ID NO: 29963 - protein, 217 aa, Erysipelotrichaceae bacterium
  misc_feature (1)..(217): tr|A0A3G9J379|A0A3G9J379_9FIRM 7-carboxy-7-deazaguanine synthase OS=Erysipelotrichaceae bacterium SG0102 OX=24 87118 GN=queE PE=3 SV=1
MNYKVVEIFDSINGEGPLAGRLSTFVRFASCNLRCHYCDTRYAYDHPQYTLMSLAEILTRIEEASLDLVTLTGGEPLATPHVDVLIEKLGEMGKHVEIETNGSIDIAPFHRLAHRPSFTLDYKLPGSGMSAFMKTENYQYLKDGDIVKFVCGAKDDLEEALRIIRIYHLNEEDCYFSAVFNQLAPRDIVDFLLAHKLKAKVQLQLHKYIWDPMKRGV

SEQ ID NO: 29964 - protein, 217 aa, Erysipelotrichaceae bacterium
  misc_feature (1)..(217): tr|A0A3C1N0W7|A0A3C1N0W7_9FIRM 7-carboxy-7-deazaguanine synthase OS=Erysipelotrichaceae bacterium OX=2049044 G N=queE PE=3 SV=1
MNYKVVEIFDSINGEGPLAGRLSTFVRFASCNLRCHYCDTRYAYDHPQYTLMSLAEILTRIEEASLDLVTLTGGEPLATPHVDVLIEKLGEMGKHVEIETNGSIDIAPFHRLAHRPSFTLDYKLPSSGMSAFMKTENYQYLKDGDIVKFVCGAKDDLEEALRIIRIYHLNEEDCYFSAVFNQLAPRDIVDFLLAHKLKAKVQLQLHKYIWDPMKRGV

SEQ ID NO: 29965 - protein, 243 aa, Erythrobacter aquimixticola
  misc_feature (1)..(243): tr|A0A419RTG8|A0A419RTG8_9SPHN 7-carboxy-7-deazaguanine synthase OS=Erythrobacter aquimixticola OX=1958945 GN= queE PE=3 SV=1
MLTLATDDTGGPEIFASLQGEGPSVGMPVAFLRLSRCNLACVWCDTAYTWHFEGDERPHRSGETFDRKANQVKLEVEDVAARIAAFGQNRLVITGGEPTLQAGRLADMLEHLPDMQVEIETNGTVEPPARLDVRVDQYNVSPKLAHSGNPADLSLKPEMLDRWEMDPRAWFKFVIAEPGDVEEVLTLAERHRFDSKRVFLMPEGTDSETLRKREKWLAPLALEHGFRMSDRLHIHLYGDTRGT

SEQ ID NO: 29966 - protein, 244 aa, Erythrobacter atlanticus
  misc_feature (1)..(244): tr|A0A0H4VZT8|A0A0H4VZT8_9SPHN 7-carboxy-7-deazaguanine synthase OS=Erythrobacter atlanticus OX=1648404 GN=que E PE=3 SV=1
MSLTLATQAPGEAEIFASLQGEGPSAGAPVAFLRLSRCNLACVWCDTAYTWHFEGDNRPHRDGETYQRRPNQLELEEAEVAKMIAALGQNRLVITGGEPLMQAGKLAAMLELLPDIAVEVETNGTIDPPARFDVRVDQYNVSPKLAHSGNPADLALKPEMLDRWATDERAFFKFVIAEPDDVEEVLTLARTHFIPAKRIFLMPEGTDSAALRQRMDWLAPLCLKHGFRMSDRLHIHLYGDTRGS

SEQ ID NO: 29967 - protein, 244 aa, Erythrobacter citreus
  misc_feature (1)..(244): tr|A0A0L1KC46|A0A0L1KC46_9SPHN 7-carboxy-7-deazaguanine synthase OS=Erythrobacter citreus LAMA 915 OX=1306953 GN=queE PE=3 SV=1
MPLVLATQAPGEPEIFASVQGEGPSAGMPCTFLRLSRCNLACVWCDTAYTWHFAGDERPHRDGVEFDRTANQLTLDEEEVAARITALGQKRLVITGGEPLLQAPALARLLGHLPDVTVEIETNGTTKASPALDIRIDQFNVSPKLAHSGNPAELALIPERLDAYATDPRAWFKFVIAAPADLDEVLALRDRYRFKPDHVFLMPEGTDSATLREREQWLAPLCVEHGFRMSDRLHIHLFGDTRGT

SEQ ID NO: 29968 - protein, 210 aa, Erythrobacter citreus
  misc_feature (1)..(210): tr|A0A0L1KFX6|A0A0L1KFX6_9SPHN 7-carboxy-7-deazaguanine synthase OS=Erythrobacter citreus LAMA 915 OX=1306953 GN=queE PE=3 SV=1
MAYAVKEIFKTLQGEGAHAGRTAVFCRFSGCNLWSGREKDRASAQCSFCDTDFVGVDGTGGGRFADAELLAQTIADEWAGSNESRYVVLTGGEPLLQVDAPLVDALHRHGFEIGVETNGTRPAPEGIDWICVSPKGENELVLRSGNELKLVFPQAGAPPERFEDLEFEHFFLQPMDCAEADQCLDDTIHYCLENPRWRLSLQSHKLVGIR

SEQ ID NO: 29969 - protein, 244 aa, Erythrobacter flavus
  misc_feature (1)..(244): tr|A0A222EYB5|A0A222EYB5_9SPHN 7-carboxy-7-deazaguanine synthase OS=Erythrobacter flavus OX=192812 GN=queE PE= 3 SV=1
MPLVLATQAPGEPEIFASVQGEGPSAGMPCTFLRLSRCNLACVWCDTAYTWHFAGDERPHRDGVEFERKANQLTLDEEEVAARIAALGQKRLVITGGEPLLQAPALARLLELLPDVTVEIETNGTTKASPALDIRIDQFNVSPKLAHSGNPADLALIPERLDAYATDPRAWFKFVIAAPADLDEVLVLRDRYRFKRDHVFLMPEGTDSATLRAREQWLAPLCVEHGFRMSDRLHIHLFGDTRGT

SEQ ID NO: 29970 - protein, 244 aa, Erythrobacter flavus
  misc_feature (1)..(244): tr|A0A3T1CGR0|A0A3T1CGR0_9SPHN 7-carboxy-7-deazaguanine synthase OS=Erythrobacter flavus OX=192812 GN=queE PE= 3 SV=1
MPLVLATQAPGEPEIFASVQGEGPSAGMPCTFLRLSRCNLACVWCDTAYTWHFAGDERPHRDGVEFDRKANQLTLDEAEIAARIAALGQKRLVITGGEPLLQAPALARLLELLPDVTVEIETNGTTKANPPLDIRIDQFNVSPKLAHSGNPADLALIPERLDAYATDPRAWFKFVIAAPADLDEVLALRDRYRFKRDHVFLMPEGTDSATLREREQWLAPLCVEHGFRMSDRLHIHLFGDTRGT

SEQ ID NO: 29971 - protein, 244 aa, Erythrobacter gangjinensis
  misc_feature (1)..(244): tr|A0A0G9MS18|A0A0G9MS18_9SPHN 7-carboxy-7-deazaguanine synthase OS=Erythrobacter gangjinensis OX=502682 GN=qu eE PE=3 SV=1
MTLVLATDETGGPEIFASVQGEGPSAGMPVAFIRLSRCNLACVWCDTAYTWHFDGDERPHRSGETFDRKANQVTLQAADAAQRIAALGQNRLVITGGEPTMQAGKLAEMLEHLPDMRVEIETNGTVKPPARLDVRVDQYNVSPKLAHSGNPAELALKPDMLDHWASEPRAWFKFVIAAPGDVDEVLSLVERHAIPRDRVFLMPEGTDSATLRERMEWLVPLCLKHGFRLSDRAHIHLFGDTRGT

SEQ ID NO: 29972 - protein, 244 aa, Erythrobacter litoralis
  misc_feature (1)..(244): tr|A0A074MKJ9|A0A074MKJ9_9SPHN 7-carboxy-7-deazaguanine synthase OS=Erythrobacter litoralis OX=39960 GN=queE P E=3 SV=1
MSLVLATDNAGAPEIFASLQGEGPSTGRPVAFVRLSRCNLACTWCDTAYTWRFEGDNRPHRDDTVYDRKANQVALSPADAAEQIAALGQDRLVITGGEPLLQGGKLAEMLEHLPDMTVEIETNGTVKAPPRLDVRIDQYNVSPKLSHSGNPAELALVAERLDDYATDSRAFFKFVIASPEDVSEVLALRDRYRLRPCHVFLMAEGRDSRTQRARHEWLAPLCLEHGFRMSDRMHIHLYGDTRGT

SEQ ID NO: 29973 - protein, 245 aa, Erythrobacter litoralis
  misc_feature (1)..(245): tr|Q2ND93|Q2ND93_ERYLH 7-carboxy-7-deazaguanine synthas e OS=Erythrobacter litoralis (strain HTCC2594) OX=31422 5 GN=queE PE=3 SV=1
MAQLTLATDDTGGPEIFASVQGEGLSAGAPVAFVRLSRCNLACVWCDTAYTWHFEGDTRPHRSGETFERKANQVSLDPADVAERIAALGQKRLVITGGEPLMQGGPLAELLELLPDMTVEIETNGTTKAPPRLDIRIDQYNVSPKLAHSGNPAELALITERLDSYALDDRAFFKFVIAEPSDVEEVLTLQRAHAIPAKRIFLMPEGTDSETLREREQWLVPLCLEHGFRMSDRLHIHLFGDTRGT

SEQ ID NO: 29974 - protein, 249 aa, Erythrobacter longus
  misc_feature (1)..(249): tr|A0A074MA54|A0A074MA54_ERYLO 7-carboxy-7-deazaguanine synthase OS=Erythrobacter longus OX=1044 GN=queE PE=3 SV=1
MADLVLATDDAGGAEIFASLQGEGPSMGKPVAFIRLSRCNLACIWCDTAYTWRFANEQGGDNRPHRDGVAYEKAANQVKLSPEKAAAKVAALGQKRLVITGGEPLMQCGPLADMLAILPDIEVEIETNGTVRPSAHVDIRVDQYNVSPKLSHSGNAGELALIPERIDFYASDPRAFFKFVVATPDDVDEVDALQREYRIPKDRLFLMAEGVDSITLRDRQMWLSTLCLEKGYRMSDRMHIHLYGDTRGT

SEQ ID NO: 29975 - protein, 244 aa, Erythrobacter luteus
  misc_feature (1)..(244): tr|A0A0G9MSR2|A0A0G9MSR2_9SPHN 7-carboxy-7-deazaguanine synthase OS=Erythrobacter luteus OX=1581420 GN=queE PE =3 SV=1
MTLVLATQAPGEPEIFASPQGEGPSAGIPVAFVRLSRCNLACLWCDTPYTWHFDGDARPHRSGETFPRHPNQIALDEAEVAARVAAFGRDRLVITGGEPLMQGAQLARMLEHLPGMAVEIETNGTVAPQPALDARVTQYNVSPKLAHSGNAAELALKPHMLARWATDERAFFKFVIARPGDVDEVRALVSAHQIPPDRVYLMPEGTDSETLRDRLDWLAPLAKAEGWRITDRLHIHLFGDTRGT

SEQ ID NO: 29976 - protein, 244 aa, Erythrobacter lutimaris
  misc_feature (1)..(244): tr|A0A395LP27|A0A395LP27_9SPHN 7-carboxy-7-deazaguanine synthase OS=Erythrobacter lutimaris OX=1538146 GN=queE PE=3 SV=1
MNLVLATDDAGGPEIFASVQGEGPSAGEPTAFMRLSRCNLCCVWCDTAYTWHFDGDERPHRGGETYDRKANQVTRAVEDVAARIEALGQRRLVVTGGEPMLQAPALAQLLAALPDLTVEIETNGTALPPPKLDVWVDQFNVSPKLAHSGNARDLAIVPKVLRTYVSDGRAVFKFVVAEPSDVEEVRELVRAHALPRGRVFVMPEGTDSNTLRARQEWLVPLCLEHGFRLSDRLHIHLFGDTRGT

SEQ ID NO: 29977 - protein, 244 aa, Erythrobacter marinus
  misc_feature (1)..(244): tr|A0A0H0XRY8|A0A0H0XRY8_9SPHN 7-carboxy-7-deazaguanine synthase OS=Erythrobacter marinus OX=874156 GN=queE PE =3 SV=1
MPLVLATDDTGGPEIFASIQGEGPSAGMPVTFVRLSRCNLACVWCDTAYTWHFEGDNRPHRSGETFARSANQLSLEVEDVAARIAALGQNRLVITGGEPLMQAGKLAQMLEHLPDMQVEIETNGTVDTPARLDVRVDQYNVSPKLAHSGNPAELALKPEMLDRWATDPRAFFKFVIAEPGDVEEVQALARTHAIPAGRLFLMPEGTTSAALREREKWLVPLCLENGYRMSDRLHIHLFGDTRGT

SEQ ID NO: 29978 - protein, 244 aa, Erythrobacter nanhaisediminis
  misc_feature (1)..(244): tr|A0A1I5NJ84|A0A1I5NJ84_9SPHN 7-carboxy-7-deazaguanine synthase OS=Erythrobacter nanhaisediminis OX=604088 GN =queE PE=3 SV=1
MALVLSTDDTGGPEIFASVQGEGPSMGRPVAFMRLSRCNLACVWCDTAYTWHFEGDNRPHRDDRTFERKANQVTLDEAEVAERILALGQDRLVITGGEPLLQAPALAKLLDHLPDISVEIETNGTTKAPVPLDIRIDQFNVSPKLAHSGNPADLALLPERLDAYATDPRAFFKFVIAEPSDVDEVLALHERYRFRPGHVFLMPEGTDSETLRTREKWLADLCLKHGFRMSDRLHIHLFGDTRGT

SEQ ID NO: 29979 - protein, 244 aa, Erythrobacter sp.
  misc_feature (1)..(244): tr|A0A1E4AVE1|A0A1E4AVE1_9SPHN 7-carboxy-7-deazaguanine synthase OS=Erythrobacter sp. SCN 62-14 OX=1660099 GN= queE PE=3 SV=1
MNLTLATDDSGGPEIFASLQGEGPSAGTPVAFVRLSRCNLACVWCDTAYTWRFEGDNRPHRDCVAFERRANQVTLSPQEAAAQIAALGQKRLVITGGEPLLQAGGLAEMLAHLHDVSVEIETNGTVAAPARLDIRVDQYNVSPKLSHSGNPAELALIPERLDAYAADPRAFFKFVIASPEDVAEVLTLQRRYRIKPSHIFLMAEGTTSAAQRERQAWLSALCLEHGFRMSDRLHIHLYGDTRGT

SEQ ID NO: 29980 - protein, 245 aa, Erythrobacter sp.
  misc_feature (1)..(245): tr|A0A2Z4JYE3|A0A2Z4JYE3_9SPHN 7-carboxy-7-deazaguanine synthase OS=Erythrobacter sp. KY5 OX=2011159 GN=queE P E=3 SV=1
MADLICATDDKGGAEIFASIQGEGPRMGTPVAFIRLSRCNLACVWCDTAYTWRFEGDNRPHRDGIEYERKANQVALSPAKAAAKIAALGQKRLVITGGEPLMQCGPLADMLAILPDIEVEVETNGTTRASAHIDIRVDQYNVSPKLAHSGNDASLALIAERLDDYAADPRAFFKFVIAEPGDVAEVLELQRRHRIPAKRIFLMAEGTTSEALRARQEWLAPLCLEHGFRLSDRLHIHLYGDSRAT

SEQ ID NO: 29981 - protein, 244 aa, Erythrobacter xanthus
  misc_feature (1)..(244): tr|A0A3A1P1U5|A0A3A1P1U5_9SPHN 7-carboxy-7-deazaguanine synthase OS=Erythrobacter xanthus OX=1784712 GN=queE P E=3 SV=1
MALVLATQAPGEPEIFASLQGEGPSTGTPVAFVRLSRCNLACVWCDTPYTWHFADDERPHRDNTTYDRKANQLTLDEADVAARIAALGQKRLVITGGEPMLQGGALATMLEHLPAMTVEIETNGTTKPPARLDVRIDQFNVSPKLAHSGNPASLALKPAMLDFWASEPRAVLKFVIGAREHIDEVLALVRRHMIAPAKVYLMPEGTDSQTLREREKWLAPICLAHGFRMSDRMHIHLFGDTRGT

SEQ ID NO: 29982 - protein, 244 aa, Erythrobacter zhengii
  misc_feature (1)..(244): tr|A0A418NVN3|A0A418NVN3_9SPHN 7-carboxy-7-deazaguanine synthase OS=Erythrobacter zhengii OX=2307003 GN=queE P E=3 SV=1
MSLILATDDTGGPEIFASVQGEGPSAGTPVAFVRLSRCNLACVWCDTAYTWRFEGDERPHRSGEHFDRKANQVELDEAEVAHRIAALGQKRLVITGGEPTMQAGKLAAMLEHLPDMQVEIETNGTVAPPAQLDVRVDQYNVSPKLAHSGNPAHLALKPDMLDRWATDERAFFKFVLAHPDDLDGVLRIVREHMIPPQRVFLMPEGTDSKTLRSRMEWLVPLCLQHGFRLSDRLHIHLFGDTRGS

SEQ ID NO: 29983 - protein, 244 aa, Erythrobacteraceae bacterium
  misc_feature (1)..(244): tr|A0A2E0Q7Y1|A0A2E0Q7Y1_9SPHN 7-carboxy-7-deazaguanine synthase OS=Erythrobacteraceae bacterium OX=2026738 GN =queE PE=3 SV=1
MNLVLATDDTGGPEIFASVQGEGPSSGEPTAFVRLSRCNLACVWCDTAYTWHFEGDERPHRSGETFDRKANQVTLEVEDVAARIAALGQRRLVVTGGEPMLQAAGLAQLLAALPDMTVEIETNGTAFPPPKLEVWVDQFNISPKLTHSGNARELAIVPGVLRRYASDGRAFFKFVVAEPADVEEVREVVRANALPRGRVFLMAEGTDGATLRARQEWLVPLCLEHGFRLSDRLHIHLFGDTRGT

SEQ ID NO: 29984 - protein, 244 aa, Erythrobacteraceae bacterium
  misc_feature (1)..(244): tr|A0A0P7VT12|A0A0P7VT12_9SPHN 7-carboxy-7-deazaguanine synthase OS=Erythrobacteraceae bacterium HL-111 OX=166 6908 GN=queE PE=3 SV=1
MSLVLATDDAGGPEIFASLQGEGPSMGVPVAFVRLSRCNLACTWCDTAYTWRFTGDNRPHRDEAVFDRKANQVTLSPAETAERIAALGQDRLVITGGEPLLQGGRLAEMLEHLPDMAVEIETNGTVKAPPRLDVRVDQYNVSPKLSHSGNPADLALIPERLDDYATDPRAFFKFVIASPGDVEEVLALHRRYRFRPGHVFLMAEGTDSATLRARQEWLAPLCLEHGFRMSDRMHIHLYGDTRGT

SEQ ID NO: 29985 - protein, 223 aa, Escherichia albertii
  misc_feature (1)..(223): tr|A0A1X3JRE0|A0A1X3JRE0_9ESCH 7-carboxy-7-deazaguanine synthase OS=Escherichia albertii B156 OX=550693 GN=que E PE=3 SV=1
MQYPINEMFQTLQGEGYFTGVPAIFIRLQGCPVGCAWCDTKHTWEKLEDREVSLFSILGKTKESDKWGAASSEDLLAVIGRQGYTARHVVITGGEPCIHDLLPLTDLLEKNGFSCQIETSGTHEVRCTPNTWVTVSPKLNMRGGYEVLSQALERANEIKHPVGRVRDIEALDELLATLTDDKPRVIALQPISQKEDATRLCIDTCIARNWRLSMQTHKYLNIA

SEQ ID NO: 29986 - protein, 223 aa, Escherichia albertii
  misc_feature (1)..(223): tr|A0A3T5VEE4|A0A3T5VEE4_9ESCH 7-carboxy-7-deazaguanine synthase OS=Escherichia albertii OX=208962 GN=queE PE= 3 SV=1
MQYPINEMFQTLQGEGYFTGVPAIFIRLQGCPVGCAWCDTKHTWEKLEDREVSLFSILGKTKESDKWGAASSEDLLAVIGRQGYTARHVVITGGEPCIHDLLPLTDLLEKNGFSCQIETSGTHEVRCTPNTWVTVSPKLNMRGGYEVLSQALERANEIKHPVGRVRDIEALDELLATLTDDKPRVIALQPISQKDDATRLCIETCIARNWRLSMQTHKYLNIA

SEQ ID NO: 29987 - protein, 223 aa, Escherichia fergusonii
  misc_feature (1)..(223): tr|F0JRP9|F0JRP9_ESCFE 7-carboxy-7-deazaguanine synthas e OS=Escherichia fergusonii ECD227 OX=981367 GN=ygcF PE =3 SV=1
MQYPINEMFQTLQGEGYFTGVPAIFIRLQGCPVGCAWCDTKHTWEKLEDREVSLFSILAKTKESDKWGAASSEDLLAVIGRQGYTARHVVITGGEPCIHDLLPLTDLLEKNGFSCQIETSGTHEVRCTPNTWVTVSPKLNMRGGYEVLSQALERANEIKHPVGRVRDIEALDELLATLTDDKPRVIALQPISQKDDATRLCIETCIARNWRLSMQTHKYLNIA

SEQ ID NO: 29988 - protein, 223 aa, Escherichia marmotae
  misc_feature (1)..(223): tr|A0A2B7LVP1|A0A2B7LVP1_9ESCH 7-carboxy-7-deazaguanine synthase OS=Escherichia marmotae OX=1499973 GN=queE PE =3 SV=1
MQYPINEMFQTLQGEGYFTGVPAIFIRLQGCPVGCAWCDTKHTWEKLEDREVSLFSILAKTKESDKWGAASSEDLLAVISRQGYTARHVVITGGEPCIHDLLPLTDLLEKNGFSCQIETSGTHEVRCTPNTWVTVSPKLNMRGGYEVLSQALERANEIKHPVGRVRDIEALDELLATLTDDKPRVIALQPISQKEDATRLCIDTCIARNWRLSMQTHKYLNIA

SEQ ID NO: 29989 - protein, 223 aa, Escherichia sp.; identical to SEQ ID NO: 29988
  misc_feature (1)..(223): tr|A0A4V6BGT9|A0A4V6BGT9_9ESCH 7-carboxy-7-deazaguanine synthase OS=Escherichia sp. MR OX=2575922 GN=queE PE=3 SV=1

SEQ ID NO: 29990 - protein, 223 aa, Escherichia sp.
  misc_feature (1)..(223): tr|A0A4Q9JJ14|A0A4Q9JJ14_9ESCH 7-carboxy-7-deazaguanine synthase OS=Escherichia sp. E10V4 OX=2478971 GN=queE P E=3 SV=1
MQYPINEMFQTLQGEGYFTGVPAIFIRLQGCPVGCAWCDTKHTWEKLEDREVSLFSILGKTKESDKWGAASSEDLLAVIGRQGYTARHVVITGGEPCIHDLMPLTDLLEKNGFSCQIETSGTHEVRCTPNTWVTVSPKLNMRGGYEVLSQALERANEIKHPVGRVRDIEALDELLATLTDDKPRIIALQPISQKEDATRLCIETCIARNWRLSMQTHKYLNIA

SEQ ID NO: 29991 - protein, 220 aa, Estrella lausannensis
  misc_feature (1)..(220): tr|A0A0H5DRK1|A0A0H5DRK1_9BACT 7-carboxy-7-deazaguanine synthase OS=Estrella lausannensis OX=483423 GN=queE PE =3 SV=1
MNDVLKQTIRLIEIFPSVQGETSFSGLTSTFIRLASCNLRCTWCDTTYSFGRGEPSTIENILATVDSLGLRWVCVTGGEPLLQKEAIPLMELLSQKGYVVSLETSGSLPIDAVPKSVKIILDIKCPGSGMESKNLYENLRILKEEDEVKFVIKDRADYDFACAISEKWGLFLRREPVLFSPVWGVLSPEELTWWMVKDKLKARLNLQMHKVIFGAERKGV

SEQ ID NO: 29992 - protein, 222 aa, Eubacteriaceae bacterium
  misc_feature (1)..(222): tr|A0A143XZ41|A0A143XZ41_9FIRM 7-carboxy-7-deazaguanine synthase OS=Eubacteriaceae bacterium CHKCI004 OX=17803 80 GN=queE PE=3 SV=1
MNVIYPLAEKFISINGEGPKAGMMAAFLRMKGCNLSCNYCDTSWANESDCPTEPLTAREILHWLKESGTVNVTLTGGEPLLIPHVSELIEALGEAGFAVEIETNGSVPLAPFCELSHRPVFTMDYKCPDSGMEDYMRPDNFSLLTKDDSVKFVVSSENDLARAEEITAGYHLTERCRVYLSAVFGRIEPRTITEYMIHHQWNDVRLQLQMHKFIWPPQQRGV

SEQ ID NO: 29993 - protein, 202 aa, Eubacteriaceae bacterium
  misc_feature (1)..(202): tr|A0A143ZWR9|A0A143ZWR9_9FIRM 7-carboxy-7-deazaguanine synthase OS=Eubacteriaceae bacterium CHKCI005 OX=17803 81 GN=queE PE=4 SV=1
MTISYIFEGSLYINMTNRCTNRCDFCVRTNTDALGDADSLWLEREPTVEEVIADLSTRDLSQFPEIVFCGYGEPTCRLDDVIAVCDWLHAHCDVPIRINTNGLSDLEYGCDTVEKLKGHVDALSISLNCSTPEEYDRICHSQFGLDAHPAMLDFAARAAKVIPSVTLTVVDTIPAEEIEACRKLAQKAGTKFRVRSYIGKGQ

SEQ ID NO: 29994 - protein, 218 aa, [Eubacterium] cellulosolvens
  misc_feature (1)..(218): tr|I5AU65|I5AU65_EUBCE 7-carboxy-7-deazaguanine synthas e OS=[Eubacterium] cellulosolvens 6 OX=633697 GN=queE P E=3 SV=1
MKVVEKFVSINGEGTHAGELAVFVRFRGCNLNCSYCDTMWANEPGCPYAEESPEQIVSYIEETKVKNVTLTGGEPLLQKEMPELLRLLSEKKELRVEIETNGAVDLSGFRNGGGCVFTMDYKLPSSGCENGMRTENFSILEKKDTVKFVVGSRVDLERADQIIQEYGLIDRCHVYFSPVFGKIEPEQIVNYMVEHRLNGVRIQIQIHKVIWDPNRRGV

SEQ ID NO: 29995 - protein, 222 aa, [Eubacterium] eligens
  misc_feature (1)..(222): tr|A0A174YT06|A0A174YT06_9FIRM 7-carboxy-7-deazaguanine synthase OS=[Eubacterium] eligens OX=39485 GN=queE_2 P E=3 SV=1
MSKYEVVEKFVSINGEGTKAGQLAVFIRFKGCNLNCKYCDTKWANEQGTPSQPMTEKEILDYVLSTGVKNVTLTGGEPLLREGIENVITVLAENNLNIEIETNGSVYLDKIRKLHKENVTFTMDYKLSCSGMEAAMNLDNFDILNSNDTVKFVAGCREDLIKAKQIIEKYNLYGKCNLYISPVFGMIEPEEIVNFMKENVMNDVNMQIQLHKIIWSPDKKGV

SEQ ID NO: 29996 - protein, 221 aa, [Eubacterium] eligens
  misc_feature (1)..(221): tr|A0A415M993|A0A415M993_9FIRM 7-carboxy-7-deazaguanine synthase OS=[Eubacterium] eligens OX=39485 GN=queE PE= 3 SV=1
MKVVEKFISINGEGRRAGELAVFIRFKGCNLNCSYCDTKWANEPACDYEELSPDEICEYVSETGIKNVTLTGGEPLLQKDIRSLVEKLLNKSDIRVEIETNGAVDIAPLANAFSKEKLSLTMDYKLPSSGCEEKMLLSNMEALRKQDTVKFVSGSINDLECAEKIIEKFHLTERCQVFISSVFGSIEPVEIVNFMTGKRMNDLRLQIQMHKVIWNPEERGV

SEQ ID NO: 29997 - protein, 221 aa, Eubacterium eligens
  misc_feature (1)..(221): tr|C4Z7K6|C4Z7K6_EUBE2 7-carboxy-7-deazaguanine synthas e OS=Eubacterium eligens (strain ATCC 27750 / VPI C15-4 8) OX=515620 GN=queE PE=3 SV=1
MKVVEKFISINGEGRRTGELAVFIRFKGCNLNCSYCDTKWANEPACDYEELSPDEICEYVSETGIKNVTLTGGEPLLQKDIRSLVEKLLNKSDIRVEIETNGAVDIAPLANAFSKEKLSLTMDYKLPSSGCEEKMLLSNMEVLRKQDTVKFVSGSINDLECAEKIIEKFHLTERCQVFISSVFGSIEPVEIVNFMTSKRMNDVRLQIQMHKVIWNPEERGV

SEQ ID NO: 29998 - protein, 222 aa, Eubacterium eligens; identical to SEQ ID NO: 29995
  misc_feature (1)..(222): tr|R5ZPW5|R5ZPW5_9FIRM 7-carboxy-7-deazaguanine synthas e OS=Eubacterium eligens CAG:72 OX=1263077 GN=queE PE=3 SV=1

SEQ ID NO: 29999 - protein, 221 aa, Eubacterium hallii; identical to SEQ ID NO: 27742
  misc_feature (1)..(221): tr|R6GAF0|R6GAF0_9FIRM 7-carboxy-7-deazaguanine synthas e OS=Eubacterium hallii CAG:12 OX=1263078 GN=queE PE=3 SV=1

SEQ ID NO: 30000 - protein, 218 aa, Eubacterium oxidoreducens
  misc_feature (1)..(218): tr|A0A1G6A5B7|A0A1G6A5B7_EUBOX 7-carboxy-7-deazaguanine synthase OS=Eubacterium oxidoreducens OX=1732 GN=queE PE=3 SV=1
MKVVERFTSINGEGQRAGELAMFVRFKGCNLSCSYCDTMWANEDGCPYTDKSPAELYKEIIDSGVRNVTLTGGEPLLQKEMPQLLALLSENENIRVEVETNGSIDLSAFSGANRPSFTMDYKLPSSGCESKMLLSNFQMLQLEDTVKFVVGSREDLDKARRIIEQYHLTTKCKVYLSPVFGKIEPALIVQFMIAHHMNDVRMQIQMHKVIWDPNERGV

SEQ ID NO: 30001 - protein, 221 aa, Eubacterium pyruvativorans
  misc_feature (1)..(221): tr|A0A1I7FDL7|A0A1I7FDL7_9FIRM 7-carboxy-7-deazaguanine synthase OS=Eubacterium pyruvativorans OX=155865 GN=qu eE PE=3 SV=1
MSVSLTVNEIFGSIDGEGLTAGGLACFIRLAGCNLRCSYCDTGYALEAGDGREMTVPEILAKVRRIGYRHVTLTGGEPLIHPGAEELIDALLEEGRLVNIETNGSVPVRPYQKPGVMITMDWKCPGSGMEEAMLPENPELLREGDVLKFVCEASDFDAVRRVLEEHALRCWVYLSPVFGKVRPEQLVDFLKSLADSGLDTEKIRVQVQLHKVIWDPEERGV

SEQ ID NO: 30002 - protein, 222 aa, Eubacterium ramulus
  misc_feature (1)..(222): tr|A0A2V1JV44|A0A2V1JV44_EUBRA 7-carboxy-7-deazaguanine synthase OS=Eubacterium ramulus OX=39490 GN=queE PE=3 SV=1
MANYKVVEIFSSINGEGTRAGQLAVFIRMQGCNLNCAYCDTKWANEADARFRWTSTEEIVELLRTMEIKNVTITGGEPLLQENVLELLETLAQEKTLRVEIETNGSVDLTPFTEIPNGPSFTMDYKLPGSGMEAQMRTKNFALLGADDTVKFVVKDYTDLCRARDVIREYDLTEKCHVYLSPVYGQIELEDIVNFMKDNRMNDVNMQLQMHKIIWDSEMRGV

SEQ ID NO: 30003 - protein, 222 aa, Eubacterium ramulus
  misc_feature (1)..(222): tr|U2PU07|U2PU07_EUBRA 7-carboxy-7-deazaguanine synthas e OS=Eubacterium ramulus ATCC 29099 OX=1256908 GN=queE PE=3 SV=1
MTNYKVVEIFSSINGEGTRAGQLAVFVRMQGCNLNCTYCDTKWANEADAKFHWTSTEEILELLRSMEIKNVTITGGEPLLQEEIGELLEAMAKEENLRVEIETNGSVPLQPFAEIPNGPSFTMDYKLPGSGMEKYMLPENFAVLRAQDTVKFVVKDYEDLCRARDVIREYDLTEKCHVYLSPVYGQIELENIVNFMKDNRLNDVNMQLQMHKIIWDSEMRGV

SEQ ID NO: 30004 - protein, 223 aa, Eubacterium ruminantium
  misc_feature (1)..(223): tr|A0A1T4Q967|A0A1T4Q967_9FIRM 7-carboxy-7-deazaguanine synthase OS=Eubacterium ruminantium OX=42322 GN=queE P E=3 SV=1
MNKYKIAEKFISINGEARKAGELSVFIRLVGCNLRCNYCDTLWACDNSAPGGMMTEDEIYDYIKKSGVKNVTITGGEPMLADNIKALLLRLSSDKDLSIEVETNGAVSLTEYYKEMPANISFTVDYKCPGSGMEKAMVPENFANIRNNDTVKFVVSDKNDLDKMCEIIETNNLTEKCMVYVSAVFGRIKPDEIVNYMIEHKMNDVRLQLQIHKYIWDPDKKGV

SEQ ID NO: 30005 - protein, 223 aa, Eubacterium ruminantium
  misc_feature (1)..(223): tr|A0A1H5Y9E4|A0A1H5Y9E4_9FIRM 7-carboxy-7-deazaguanine synthase OS=Eubacterium ruminantium OX=42322 GN=queE P E=3 SV=1
MTEFKVVEKFISINGEAVRAGELSVFIRFKGCNLRCNYCDTLWACEDGAEYSLMNTEDIYEYIKASGIKNVTLTGGEPMLQEGIGELLQRLGSDTDLRIEVETNGAVPLTDYYRSVPDNVSFTVDYKCTGSGMEKAMYLPNFEGLRSIDTVKFVVSDIIDLDKAAEVIEKYRLSEKCPVYLSAVFGRITPEEIVEYMKDNKLNDIRLQLQMHKYIWPPEMKGV

SEQ ID NO: 30006 - protein, 222 aa, Eubacterium sp.
  misc_feature (1)..(222): tr|A0A413PAY5|A0A413PAY5_9FIRM 7-carboxy-7-deazaguanine synthase OS=Eubacterium sp. AM49-13BH OX=2292351 GN=qu eE PE=3 SV=1
MSKYEVVEKFVSINGEGTKAGQLAVFIRFKGCNLNCKYCDTKWANEQETPSQPMTEKEILDYVLSTGVKNVTLTGGEPLLREGIENVITVLAENNLNIEIETNGSVYLDKIRKLHKENVTFTMDYKLSCSGMEAAMNVDNFNILSSNDTVKFVAGCREDLIKAKQIIEKYNLYGKCNLYISPVFGMIEPEEIVNFMKENVMNDVNMQIQLHKIIWSPDKKGV

SEQ ID NO: 30007 - protein, 221 aa, Eubacterium sp.; identical to SEQ ID NO: 29996
  misc_feature (1)..(221): tr|A0A351RGW6|A0A351RGW6_9FIRM 7-carboxy-7-deazaguanine synthase OS=Eubacterium sp. OX=142586 GN=queE PE=3 SV= 1

SEQ ID NO: 30008 - protein, 222 aa, Eubacterium ventriosum; identical to SEQ ID NO: 28429
  misc_feature (1)..(222): tr|A0A413S6G0|A0A413S6G0_9FIRM 7-carboxy-7-deazaguanine synthase OS=Eubacterium ventriosum OX=39496 GN=queE PE =3 SV=1

SEQ ID NO: 30009 - protein, 256 aa, Euhalothece natronophila
  misc_feature (1)..(256): tr|A0A5B8NIX5|A0A5B8NIX5_9CHRO 7-carboxy-7-deazaguanine synthase OS=Euhalothece natronophila Z-M001 OX=522448 GN=queE PE=3 SV=1
MTLVTTATANLVEVFSAIQGEGLNVGTRQIFIRFGGCDLRCWFCDSANTWKADSQCRIEETPGQRDFKIYPNPIEEEQLLSWIKQQHQPRLHDSISLTGGEPLLHAKFLQQFLPKLKAITQLPIYLETGGHRPQQLSLILDQLDCIGMDMKLPSVSGEERWLAHKEFLQICIPQKEVFVKLIVSNETTEADLQQARSIIAEVSSEIPVILQPVTPLEGNSPTPPTAEQVLFWQSFFKEALSEVRVIPQTHKMIGQL

SEQ ID NO: 30010 - protein, 256 aa, Euhalothece sp.
  misc_feature (1)..(256): tr|A0A2K3AUJ0|A0A2K3AUJ0_9CHRO 7-carboxy-7-deazaguanine synthase OS=Euhalothece sp. KZN 001 OX=1884791 GN=queE PE=3 SV=1
MATVATATANLVEVFSAIQGEGLNVGTRQIFLRFGGCDLRCDFCDSANTWQANSTFRVEQTPGKRDFQVYNNPVEDTQLLRWIEQQNQFNLHDSISLTGGEPLLHAKFLKQFLPQLKQSTSLPIYLETGGHRPQQLSLILDFLDCIGMDMKLPSVSGEQHWEAHAAFLRLCIPQKHIFVKLIVSDQTSDDDLNQATRIIAKVSPDIPVILQPVTPLVGKTITPPRAEQVLSWQSQMKQLLREVRVIPQTHKMIGQL

SEQ ID NO: 30011 - protein, 213 aa, Euzebya sp.
  misc_feature (1)..(213): tr|A0A346XS56|A0A346XS56_9ACTN 7-carboxy-7-deazaguanine synthase OS=Euzebya sp. DY32-46 OX=1608957 GN=queE PE= 3 SV=1
MTYAVKEAFHTLQGEGAHAGRAAVFLRFAGCNLWSGREDGRASAICKFCDTDFVGTDGEGGGSFADPVELATHVASLWTVDDDPAGRRYVVCTGGEPLLQLDPPLIDALHSEGFTIAVETNGTIEAPPGIDWLTVSPKLGSTLVQTSGSELKLVYPQVAGDPAQFVDLDFDHFYLQPMDGPDAVDNTKRTVEYCRRHPLWTLSLQTHKLLGIP

SEQ ID NO: 30012 - protein, 210 aa, Euzebyella marina
  misc_feature (1)..(210): tr|A0A3G2L9K7|A0A3G2L9K7_9FLAO 7-carboxy-7-deazaguanine synthase OS=Euzebyella marina OX=1761453 GN=queE PE=3 SV=1
MLQEDVLREVDKGTLLPLMEEFYTIQGEGFHKGTAAYFIRVGGCDVGCHWCDVKESWNAGTHPPTAIESIVENAAKYSNTIVVTGGEPLTWNMEPLTNALKANNLTTHIETSGAYPLTGIWDWICLSPKKNKLPEERIYDVAHELKVIVYNKHDLIFAEEQAAKVNGECILYLQPEWSVRDKVVPLIVDYVMKNPKWKVSLQTHKYLNIP

SEQ ID NO: 30013 - protein, 235 aa, Ewingella americana
  misc_feature (1)..(235): tr|A0A085GNV1|A0A085GNV1_9GAMM 7-carboxy-7-deazaguanine synthase OS=Ewingella americana ATCC 33852 OX=910964 G N=queE PE=3 SV=1
MRADFLEMIEKTMQYPINEMFETLQGEGYFTGVPAIFIRLQGCPVGCSWCDTKHTWDKIADREVDVQRILVKTEESDAWGNATAEQLHEIIVQQGYTARHVVITGGEPCIYDLMPLTTLLEKNGFSCQIETSGTHEVRCSVNTWVTVSPKVNMRGGYDILPQALKRADEVKHPVARQRDIDALEELLATLTDEKARIIALQPISQKEEATKLCIATCIAKNWRLSMQTHKYLNIA

SEQ ID NO: 30014 - protein, 291 aa, Ewingella americana
  misc_feature (1)..(291): tr|A0A502GE97|A0A502GE97_9GAMM 7-carboxy-7-deazaguanine synthase OS=Ewingella americana OX=41202 GN=queE PE=3 SV=1
  misc_feature (273)..(273): Xaa can be any naturally occurring amino acid
MDLLAIQVKDVSINDDDVPQSAPEISSEAAVEFANGIIDRALLQGYQFPEGLTREDFLSSELPLNEDFFSFQGEGASSGIPSYFIRTNKCNLRCTWCDSKRTWTAKARVEMADLLYKVHSSKARRIILTGGEPLLHQKNKQLKAFLLICKALGMALEIETSGSMDANVDFLKHFDQINISPKLSNSECGMNINEEEGLKRYVKALRTFTCNDALVTPWLKFVIVEDKDLDEVKLLLKETDMGPENVYLMPEGVTLDKQLLAMKRIALLCLEEXYNFCPRAHVLVWNDKHGV

SEQ ID NO: 30015 - protein, 238 aa, Exiguobacterium antarcticum
  misc_feature (1)..(238): tr|K0AGB8|K0AGB8_EXIAB 7-carboxy-7-deazaguanine synthas e OS=Exiguobacterium antarcticum (strain B7) OX=1087448 GN=queE PE=3 SV=1
MSQLKKTPKMPVLEIFGPTFQGEGRSIGQKTMFVRTGGCDYSCAWCDSAFTWDGSEKPDLLTAEEILTRLDALGSYGHVTISGGNPLLHASIGTLVDALKTRGITMSVETQGSYWQNWVLDIEDVTISPKPPSSGMTVDYDRLDVFFKRLPEQQRAVKIVIFDESDLDFAAAISERYALKTLYLSLGNPDPAEQGTIAPRMLSGLKTLWERVADDERFNHARVLPQLHALVFANDRGV

SEQ ID NO: 30016 - protein, 231 aa, Exiguobacterium aurantiacum
  misc_feature (1)..(231): tr|A0A377FX60|A0A377FX60_9BACL 7-carboxy-7-deazaguanine synthase OS=Exiguobacterium aurantiacum OX=33987 GN=qu eE PE=3 SV=1
MKIPVLEVFGPTFQGEGRAIGQKTMFVRTAGCDYRCSWCDSAFTWDGSEKPDMLSADAIIERLDALGTYDYVTISGGNPLLIAGMKDLVDKLKARGVKLAVETQGSRYQDWLTQIDDVTLSPKPPSSGMSTDWEKLDAIVERLRPEQTTFKVAVFDEVDLAYAKQVQTRYTPDVMYLSAGNPEPGADGDITDAQLRRLKQLWEDVARDPSWQSVRVLPQLHTLLYANERGV

SEQ ID NO: 30017 - protein, 231 aa, Exiguobacterium chiriqhucha
  misc_feature (1)..(231): tr|U1LEG5|U1LEG5_9BACL 7-carboxy-7-deazaguanine synthas e OS=Exiguobacterium chiriqhucha RW-2 OX=1345023 GN=que E PE=3 SV=1
MKIPVLEVFGPTFQGEGRAIGQKTMFVRTAGCDYRCSWCDSAFTWDGSEKPDMLTADEVIERLDALGVYDYVTISGGNPLLIAAMKDLVTKLKARDVKLAVETQGSRYQDWLADIDDVTLSPKPPSSGMTTDWEKLDAIVERLRPEQTTFKVAVFDEIDLAYAKSVQMRYTPDVMYLSAGNPEPGADGDITDAQLRRLKELWEDVARDPSWQSVRVLPQLHTLLYANERGV

SEQ ID NO: 30018 - protein, 238 aa, Exiguobacterium enclense
  misc_feature (1)..(238): tr|A0A0V8GDS8|A0A0V8GDS8_9BACL 7-carboxy-7-deazaguanine synthase OS=Exiguobacterium enclense OX=1017277 GN=que E PE=3 SV=1
MSALIKTPKIPVLEIFGPTFQGEGRSIGQKTMFVRTGGCDYSCSWCDSAFTWDGSEKPELLTAETIIERLDALGSYGHVTISGGNPLLHASIGTLVAALKERNITMSVETQGSYWQNWLLDIDDVTLSPKPPSSGMKIDFDRLDVFFKRLPEQQRAVKIVIFNEEDLDFAAMISERYALKTLYLSLGNPDPHEEGTIAPRMLHDLKTLWERVASDERFNHARVLPQLHALVFANDRGV

SEQ ID NO: 30019 - protein, 236 aa, Exiguobacterium mexicanum
  misc_feature (1)..(236): tr|A0A099DFN3|A0A099DFN3_9BACL 7-carboxy-7-deazaguanine synthase OS=Exiguobacterium mexicanum OX=340146 GN=que E PE=3 SV=1
MVGGLMKIPVLEVFGPTFQGEGRAIGQKTMFVRTAGCDYRCSWCDSAFTWDGSEKPDMLTADEVIERLDALGVYDYVTISGGNPLLIAAMKDLVTKLKARDVKLAVETQGSRYQDWLADIDDVTLSPKPPSSGMTTDWEKLDAIFERLRPEQMTFKVAVFDEIDLAYAKSIQTRYTPDVMYLSAGNPEPGADGDITDAQLRRLKELWEDVARDPSWQSVRVLPQLHTLLYANERGV

SEQ ID NO: 30020 - protein, 238 aa, Exiguobacterium sibiricum
  misc_feature (1)..(238): tr|B1YFM8|B1YFM8_EXIS2 7-carboxy-7-deazaguanine synthas e OS=Exiguobacterium sibiricum (strain DSM 17290 / JCM 13490 / 255-15) OX=262543 GN=queE PE=3 SV=1
MSQLKKTPKIPVLEIFGPTFQGEGRSIGQKTMFVRTGGCDYSCAWCDSAFTWDGSEKPDLLTADEILAQLDALGSYGHVTISGGNPLLHASIGTLVDALKSRGITMSVETQGSYWQNWVLDIEDVTISPKPPSSGMTVDYDRLDVFFKRLPEQQRAVKIVIFDEADLDFAAAISDRYALKTLYLSLGNPDPAEEGTIAPRMLSDLKTLWERVAADERFNHARVLPQLHALVFANDRGV

SEQ ID NO: 30021 - protein, 238 aa, Exiguobacterium sp.
  misc_feature (1)..(238): tr|A0A031IEZ6|A0A031IEZ6_9BACL 7-carboxy-7-deazaguanine synthase OS=Exiguobacterium sp. RIT341 OX=1470592 GN=q ueE PE=3 SV=1
MSALTKTPKIPVLEIFGPTFQGEGRSIGQKTMFVRTGGCDYSCSWCDSAFTWDGSEKPELLTAETIMERLDALGSYGHVTISGGNPLLHASIGTLVEALKERNITMSVETQGSYWQNWLLDIDDVTLSPKPPSSGMNIDFDRLDVFFKRLPEQQRAVKIVIFDEADLDFAAMISERYALKTLYLSLGNPDPHEEGTIAPRMLHDLKTLWERVARDERFNHARVLPQLHALVFANDRGV

SEQ ID NO: 30022 - protein, 236 aa, Exiguobacterium sp.
  misc_feature (1)..(236): tr|A0A069F530|A0A069F530_9BACL 7-carboxy-7-deazaguanine synthase OS=Exiguobacterium sp. AB2 OX=1484479 GN=queE PE=3 SV=1
MVGGLMKIPVLEVFGPTFQGEGRAIGQKTMFVRTAGCDYRCSWCDSAFTWDGSEKPDMLSADAIIERLDALGMYDYVTISGGNPLLIAGMKDLVEKLKARGVKLAVETQGSRYQDWLTQIDDVTLSPKPPSSGMSTDWEKLDAIVERLRPEQTTFKVAVFDEVDLAYAKQVQTRYTPDVMYLSAGNPEPGADGDITDAQLRRLKQLWEDVARDPSWQSVRVLPQLHTLLYANERGV

SEQ ID NO: 30023 - protein, 203 aa, Fabibacter misakiensis
  misc_feature (1)..(203): tr|A0A1E5T2V5|A0A1E5T2V5_9BACT 7-carboxy-7-deazaguanine synthase OS=Fabibacter misakiensis OX=1563681 GN=queE PE=3 SV=1
MVEKQAKLPVMEAFYTIQGEGHFSGNSAYFIRLGGCDVGCVWCDVKESWEAGKWPEQSVEEIVGNVLKSPTRLSVITGGEPLMYDLNELTSALRFSGLQTNVETSGAHPLSGDWDWICFSPKKFMKPRAEFYEVADELKVVVYNKSDFKWAEEHAARVKPDCLLYLQPEWDKSESMLPEIISYVKDNPQWKISLQTHKFMNIP

SEQ ID NO: 30024 - protein, 204 aa, Fabibacter pacificus
  misc_feature (1)..(204): tr|A0A1I0M781|A0A1I0M781_9BACT 7-carboxy-7-deazaguanine synthase OS=Fabibacter pacificus OX=1267423 GN=queE PE =3 SV=1
MTETIQSKLPIMEAFYTIQGEGHFSGTPAYFIRLGGCDVGCVWCDVKDSWDASQWPEQTLDEIVAGAQAYKGRLAVITGGEPLMYNLDELTAELHRNDFKANIETSGAHPLSGSWDWICFSPKKFKQPREEFYEKADELKVVVYNKSDFKWAESHAAKVNPDCLLYLQPEWDKSEKMLPAIIDYVKDNPRWNISLQTHKFMQIP

SEQ ID NO: 30025 - protein, 203 aa, Fabibacter sp.
  misc_feature (1)..(203): tr|A0A1E5SWH6|A0A1E5SWH6_9BACT 7-carboxy-7-deazaguanine synthase OS=Fabibacter sp. 4D4 OX=1889784 GN=queE PE=3 SV=1
MTKETNGLPVMEAFYTIQGEGHFSGNSAYFIRLGGCDVGCVWCDVKDSWDASQWPKQSVDEIVSNAKEYPTRLAVVTGGEPLMYDLAKLTHELKVQGLQTNIETSGAHPLSGDWNWICFSPKKFMKPRDEFYRMADELKVVVYNKSDFEWAEEHAARVNPDCLLYLQPEWDKQEVILPQIIDYVKDNPQWKISLQTHKFMNIP

SEQ ID NO: 30026 - protein, 380 aa, Faecalicoccus pleomorphus
  misc_feature (1)..(380): tr|A0A380LJU0|A0A380LJU0_9FIRM MarR family Transcriptio nal regulator OS=Faecalicoccus pleomorphus OX=1323 GN=q ueE PE=4 SV=1
MNRDFQNSSDLLLDISILYRSTQKYYDQMLQSISLTYAQLPILILIYENEGISQQQIAQDGGYDKGTITKQVQKLEEMGYIRVQPSKKDKRAKELYTTAKARGIMSKVYAIRTSWWRHISSSIPKEDMAAFSNFYKNMAASAKEFAKADLNAISFFEHQKLSFQSVPGKVSTIVATGGCNYRCPFCNESHLVFLKEDSISYSQEEILQYVKSRKDMLDSITITGGEPLMHTELDPFLKKVKQMGFFINLMTNGSYFEHLKSLVEQKLVDRVVMHIKNVPGKYGETIGLKTYEIHEVEKSIRLLNTEKIESVFVITPVHEFHTPEDLVAMAKWLQPAPSLELHIFEEKETVIQKGYHGYTREELNKIKKELEVYIPNVKIR

SEQ ID NO: 30027 - protein, 240 aa, Falsibacillus pallidus
  misc_feature (1)..(240): tr|A0A370GHN1|A0A370GHN1_9BACI 7-carboxy-7-deazaguanine synthase OS=Falsibacillus pallidus OX=493781 GN=queE P E=3 SV=1
MKKFPVIEIFGPTVQGEGMVIGQKTMFVRTAGCDYSCSWCDSAFTWDGSAKEDINMMTAEEIFSQLKETGGSRFSHVTISGGNPALLKDLHQLIDILHENGIKTALETQGSKWQDWFLQIDELTISPKPPSSLMKTDFSILSDIVEKLQTNERDFSLKVVIFNDEDLAYAKDVHTRYPDVPFYLQTGNDSLTETDDEKLLGRLVDQYENLIDKVMESSELNDVRVLPQLHTYVWGNKKGV

SEQ ID NO: 30028 - protein, 240 aa, Falsibacillus sp.
  misc_feature (1)..(240): tr|A0A3L7JYP8|A0A3L7JYP8_9BACI 7-carboxy-7-deazaguanine synthase OS=Falsibacillus sp. GY 10110 OX=2478915 GN=q ueE PE=3 SV=1
MNKFPVLEVFGPTVQGEGMVVGQKTMFVRTAGCDYSCSWCDSAFTWDGSAKDEIKMMTAEEIFHQLKMIGEDRFSHVTISGGNPALLKNLHELVGLLHENGIEVALETQGSKWQDWFLHIDDLTISPKPPSSLMKTDFHILSEIISRLQENRSNFSLKVVIFNEEDFVYAKDVHKRYPDVPFYLQAGNDLLAEDDDGKLLQHLVKRYEWLIEQTMGSSDLNNVRVLPQLHTYVWGNKKGV

SEQ ID NO: 30029 - protein, 249 aa, Falsochrobactrum sp.
  misc_feature (1)..(249): tr|A0A316JDZ2|A0A316JDZ2_9RHIZ 7-carboxy-7-deazaguanine synthase OS=Falsochrobactrum sp. HN4 OX=2201899 GN=que E PE=3 SV=1
MGGIPAMKMASDIRISEIFGPTIQGEGVLIGEPTVFVRTGGCDYRCAWCDSLHAVESRFRHQWKPMSVDAIWDQVTALSGKTPLTVSLSGGNPAIQPLEPLIRRGQGEGYRFALETQGSVAKDWFSSLDTLVLSPKPPSSGMETDWLAFEQCLKAAASKPRTVLKFVIFDEADYAFAKNAAARYPHLSLYLQPGNHTPPPPEAEDAQIDMNGIMQRMQWLLDRVIADRWFNAHVLPQLHVLIWGNKRGV

SEQ ID NO: 30030 - protein, 193 aa, Fermentimonas caenicola
  misc_feature (1)..(193): tr|A0A521J2C9|A0A521J2C9_9PORP 7-carboxy-7-deazaguanine synthase OS=Fermentimonas caenicola OX=1562970 GN=queE PE=3 SV=1
MNLNVNEIFYSLQGEGGRTGQASIFIRLAKCNLACSFCDTDFERGVKMSLEEVFKEIEKYNCKWIIWTGGEPALQLNDKIVAFFKERGYLQAIETNGTKRIPSGIDYITCSPKQNFEIVRELIPEVDELRFPIQKGDPLPDISILPKTNRYLLSPIFDNDKVIQENVDYCISLIKDNPVWALSLQTHKLIGIR

SEQ ID NO: 30031 - protein, 193 aa, Fermentimonas caenicola
  misc_feature (1)..(193): tr|A0A098C3U9|A0A098C3U9_9PORP 7-carboxy-7-deazaguanine synthase OS=Fermentimonas caenicola OX=1562970 GN=queE PE=3 SV=1
MNLNVNEIFYSLQGEGGRTGQASIFIRLAKCNLACSFCDTDFERGVKMSLEEVLKEIEQYNCKWIIWTGGEPALQLNDKIVAFFKERGYLQAIETNGTKRIPSGIDYITCSPKQNFEIVRELIPEVDELRFPIQKGDPLPDISILPKTNRYLLSPIFDNDKVIQENVDYCISLIKDNPVWALSLQTHKLIGIR

SEQ ID NO: 30032 - protein, 213 aa, Ferrimicrobium acidiphilum
  misc_feature (1)..(213): tr|A0A0D8FW57|A0A0D8FW57_9ACTN 7-carboxy-7-deazaguanine synthase OS=Ferrimicrobium acidiphilum DSM 19497 OX=11 21877 GN=queE PE=3 SV=1
MAYIVKEIYYTLQGEGMQVGRPAVFCRFSRCNLWTGKESQRAQAICQFCDTDFVGTDGPGGGRFASAIDLASAIASSWEGSSHTRSKPYVVCTGGEPLLQLDERAVDALHDQGFAVGVETNGTQPAPRGLDWICVSPKAGAPLVLDRGDELKLVYPQALAPPELFEELQFDHLLLQPMDGPKRAENTARAIDYCLAHPQWRLSLQTHKYTGIR

SEQ ID NO: 30033 - protein, 222 aa, Ferrimonas balearica
  misc_feature (1)..(222): tr|E1SMP7|E1SMP7_FERBD 7-carboxy-7-deazaguanine synthas e OS=Ferrimonas balearica (strain DSM 9799 / CCM 4581 / PAT) OX=550540 GN=queE PE=3 SV=1
MQYPVNEIFETIQGEGHFTGVPAVFLRLQGCPVGCAWCDTRHTWEVLAEDQVEPGLVIGAGDGEPRWAQWPLEQLVAHLTGPQYRARHLVITGGEPCMYDLRPLTERMIAAGWRCQIETSGCFEVKTDPQTWVTVSPKVGMKGGLEVQRSALERANEIKHPVAMQKHVDELDALLAGVALEGKEVALQPISQQHRANELCVRVCIERNWRLSVQTHKYLNID

SEQ ID NO: 30034 - protein, 224 aa, Ferrimonas balearica
  misc_feature (1)..(224): tr|E1SVZ5|E1SVZ5_FERBD 7-carboxy-7-deazaguanine synthas e OS=Ferrimonas balearica (strain DSM 9799 / CCM 4581 / PAT) OX=550540 GN=queE PE=3 SV=1
MNNASYPVNELFETIQGEGVHTGVPAIFLRLQGCPVGCSWCDTKHTWDLQENRKVMLSDVLVKTEESVMWCSVGPREILDLCMSRYTATHLVITGGEPCMYDLQPLCEVFEAEGYSIQVETSGTYPVMVSDSAWVTVSPKIKMRGGLSVLASAIDRADEIKHPVATVKDIEQLDELLTGSAGADAKVALQPISQKPKATELAIRTCIKRNWRLSVQTHKYLGIE

SEQ ID NO: 30035 - protein, 223 aa, Ferrimonas marina
  misc_feature (1)..(223): tr|A0A1M5R8N9|A0A1M5R8N9_9GAMM 7-carboxy-7-deazaguanine synthase OS=Ferrimonas marina OX=299255 GN=queE PE=3 S V=1
MQYPVNEIFETLQGEGFYTGVPAVFLRLQGCPVGCAWCDTKHTWHCDPELKVDAEQVIGVSGDKGHWSQWPLSALVAHLTSGQYTARQLVITGGEPCLYDLTPLTEAMSEAGWQCQIETSGCFQVRCDANTWVTVSPKEGMKGGLAIQPQALTRANEIKYPVATEQHIDNLKALLATLPDGATPVVALQPISQRPRATKLCIEQCIANNWRLSAQVHKYLQID

SEQ ID NO: 30036 - protein, 223 aa, Ferrimonas sediminum
  misc_feature (1)..(223): tr|A0A1G8NZQ7|A0A1G8NZQ7_9GAMM 7-carboxy-7-deazaguanine synthase OS=Ferrimonas sediminum OX=718193 GN=queE PE= 3 SV=1
MSLPVNELFETIQGEGQFTGVPAVFVRLQGCPVGCPWCDTRHTWELDEADEVAREGVIGISGDTPRWASYEVEQLVALLTDGRFRARHLVITGGEPCLYDLRALTEQMHRAGWRCQVETSGCAEVKVDDHTWVTVSPKINMKGGLPVLTQALQRADEIKHPVALEKHIEELDQLLQGVALPRKPQICLQPISTQKRATEMAIRVCIERNWRLSVQTHKYLNID

SEQ ID NO: 30037 - protein, 224 aa, Ferrimonas sp.
  misc_feature (1)..(224): tr|A0A4V5NV39|A0A4V5NV39_9GAMM 7-carboxy-7-deazaguanine synthase OS=Ferrimonas sp. IMCC35001 OX=2569538 GN=que E PE=3 SV=1
MSRLPVNEIFETIQGEGQFTGMPAVFLRLQGCPVGCPWCDTRHTWEVEPEHQVDPERIIGVSGDRPIWAYYDEARLVALLTDGRYSARHLVITGGEPCLYDLTELTRLMHAAGWRCQIETSGCVEVRCDEQTWVTVSPKIGMKGGLTVLPQALERADEIKHPIATERHIEELDALLADQPLPRHPQICLQPISTKKRATQLAIDTCIKRNWRLSVQTHKYLEID

SEQ ID NO: 30038 - protein, 222 aa, Ferrimonas sp.
  misc_feature (1)..(222): tr|A0A4U1BN28|A0A4U1BN28_9GAMM 7-carboxy-7-deazaguanine synthase OS=Ferrimonas sp. IMCC35002 OX=2569539 GN=que E PE=3 SV=1
MLAVNEVFETIQGEGGFTGVPAVFVRLQGCPVGCPWCDTRHTWEQLPQDEVAANEVLTISGDTPKWANYSAQQLVDVLTDGRFTARHLVITGGEPCLFDLTELTAKMSDCGWQCQIETSGCAEVRCDERTYVTVSPKINMKGGLPVLTQALERADEIKHPVSMQKHIDELDQLLEPCTLARKPQICLQPISTQKRATELAIATCIARNWRLSVQTHKYLNID

SEQ ID NO: 30039 - protein, 219 aa, Ferriphaselus amnicola
  misc_feature (1)..(219): tr|A0A2Z6GB23|A0A2Z6GB23_9PROT 7-carboxy-7-deazaguanine synthase OS=Ferriphaselus amnicola OX=1188319 GN=queE PE=3 SV=1
MSEPDTRASLRITEIFYSLQGETSRVGLPTVFVRLTGCPLRCTYCDTAYAFTGGRSMLLTETLAEVAQHGARYVTVTGGEPLAQKNCLPLLQALCDAGYQVSLETSGALDVSGVDARVAKVLDIKTPASGESDKNLWGNLISLNPQDEIKFVLCDEIDYLWAKQVLDEHALASRCEVLFSPAQGQLDPTVLADWILRDHLPVRLQVQLHKLLWGNQQGK

SEQ ID NO: 30040 - protein, 215 aa, Ferrovum sp.
  misc_feature (1)..(215): tr|A0A149VXL7|A0A149VXL7_9PROT 7-carboxy-7-deazaguanine synthase OS=Ferrovum sp. Z-31 OX=1789004 GN=queE PE=3 SV=1
MTYSVKEIFLTLQGEGCHTGRAAVFCRFSGCNLWSGRAEDRAQARCRFCDTDFLGTEGAGGGKFDSAPALAHAIERCWQDGMAGEDSMRRWVVLTGGEPLLQVDEDLVGALHERGFGVAVETNGTIPPPPGIDWICVSPKGKEPLQVHRGDELKLVYPQADCPPERFVTLNFHHFLLQPLDEGGDRRHEPATVSYCRSHPRWQLSLQIHKWLGIP

SEQ ID NO: 30041 - protein, 193 aa, Ferrovum sp.
  misc_feature (1)..(193): tr|A0A149VST2|A0A149VST2_9PROT 7-carboxy-7-deazaguanine synthase OS=Ferrovum sp. PN-J185 OX=1356306 GN=queE PE =3 SV=1
MGRVAVFCRFTGCNLWSGREEDREIARCNFCDTDFVGTDGVGGGRFASAQLLAQAIQRCWGESRPGQAWVVLTGGEPLLQVDELLINALHEIGFLVALETNGTIVAPPGIDWICVSPKGQEILKQTVGHELKLVFPQNHVDPERFEKLAFDHFLIQPMDGPQQADNLRQAINYCLSHPQWQLSLQTHKLMGIP

SEQ ID NO: 30042 - protein, 193 aa, Ferruginibacter sp.
  misc_feature (1)..(193): tr|A0A3M9NJN8|A0A3M9NJN8_9BACT 7-carboxy-7-deazaguanine synthase OS=Ferruginibacter sp. BO-59 OX=2294116 GN=qu eE PE=3 SV=1
MESFYTLQGEGFHQGKAAYFIRLAGCDVGCVWCDVKESWDEEKYPLQSIEEIVAKAKQYPAKLAVITGGEPTLYNLEYLTSALQAEGFATNIETSGSSPLTGTWDWICLSPKKFKPPLPGILEKANELKIIVFNKSDFDWAEKYGAEVSDSCKLYLQPEWGKSEKVTPMIIDYIKQNPRWRFSLQMHKYINVP

SEQ ID NO: 30043 - protein, 248 aa, Fervidicella metallireducens
  misc_feature (1)..(248): tr|A0A017RTB2|A0A017RTB2_9CLOT 7-carboxy-7-deazaguanine synthase OS=Fervidicella metallireducens AeB OX=140353 7 GN=queE PE=3 SV=1
MKLNDFMKEKIPVVEIFTSISGEGITAGEVVTFIRTAGCNLRCSYCDTTYSYDEFSDENQLLTPVEILDRITEIGVKEIICTGGEPLEIGKSKRYLPLYLADKGFKVRIETNGSCPVYNKTEIINFTGDNKIPNLFYVLDIKSPSSGMSRFNIFEDNLRKLRKGDELKFVVGDSNDIDYALKVIEKYKNLLANGEVIINFSPVFNRIEAGEIVEMLKRHYSYFIQNGLKVRLSLQIHKFIWPPEKRGV

SEQ ID NO: 30044 - protein, 225 aa, Fervidicola ferrireducens
  misc_feature (1)..(225): tr|A0A140L292|A0A140L292_9THEO 7-carboxy-7-deazaguanine synthase OS=Fervidicola ferrireducens OX=520764 GN=que E PE=4 SV=1
MNIRGFQKVSLVDFPGVICTTVFTGGCNFRCGYCHNRELVLNPGNLPKYDKSEILQYLVKCTGKIDGVCITGGEPTLQKDLTPFIKQIKALGLKVKLDTNGTNPEKLEELIALKLLDYVAMDIKAPLHRYYLVAGVRCEAGKIQKSIEILAGSGIEHEFRTTLVPLLTEGDIFEIREMIPKERYVLQQFRVTNTLIDPALQDMAPWPPEMVKKIAAVVNAVVRGA

SEQ ID NO: 30045 - protein, 211 aa, Fibrella aestuarina
  misc_feature (1)..(211): tr|I0KA41|I0KA41_9BACT 7-carboxy-7-deazaguanine synthas e OS=Fibrella aestuarina BUZ 2 OX=1166018 GN=queE PE=3 SV=1
MLTEQSQQTITTTTLPVMEAFYTLQGEGTFAGRAAYFIRLGGCDVGCHWCDVKESWDVNAHPHQTIDQIVAGALAFPGRLAVITGGEPLMHDLTALTGALQAAGFQTNIETSGVCQAVTGSWDWICFSPKKFKQPNPAIFTRADELKVIIYNASDFAFAESFVPNLRPNCRLLLQPEWGRSDEMLPRIVDYVKANPQWQISLQTHKFMAIP

SEQ ID NO: 30046 - protein, 193 aa, Fibrella sp.
  misc_feature (1)..(193): tr|A0A1W6EBF0|A0A1W6EBF0_9BACT 7-carboxy-7-deazaguanine synthase OS=Fibrella sp. ES10-3-2-2 OX=1834519 GN=queE PE=3 SV=1
MEAFYTLQGEGAHSGKAAYFIRLGGCDVGCHWCDVKESWDVNAHPHFTIDQIVAGALAHPGRMAVITGGEPLMHDLTTLTNALQVAGFQTNIETSGVYAVSGSWDWICFSPKKFKQPNPDIYAKADELKVIIYNASDFAFAESFVAQLRPDCRLLLQPEWSRSDEMLPRIVEYVKANPQWQISLQTHKFMQIP

SEQ ID NO: 30047 - protein, 211 aa, Fibrisoma limi
  misc_feature (1)..(211): tr|I2GFN8|I2GFN8_9BACT 7-carboxy-7-deazaguanine synthas e OS=Fibrisoma limi BUZ 3 OX=1185876 GN=queE PE=3 SV=1
MTTEQKQQVIDQTVLPVMEAFYTLQGEGAHTGRAAYFIRLGGCDVGCHWCDVKESWDADAHPKLTIDTIVNGALAHPGRMAVITGGEPLMHDLTDLTAVLQSAGFQTNIETSGVCEAVTGSWDWICFSPKKFKKPNPAIFELADELKVIIYNQSDFAFAESFVPYLRSDCRLFLQTEWGRSNEMLPRIVDYVKRNPQWQISLQTHKYLDIP

SEQ ID NO: 30048 - protein, 211 aa, Fibrisoma sp.
  misc_feature (1)..(211): tr|A0A418LXM9|A0A418LXM9_9BACT 7-carboxy-7-deazaguanine synthase OS=Fibrisoma sp. HYT19 OX=2305895 GN=queE PE= 3 SV=1
MTTEQKQQTINQTVLPVMEAFYTLQGEGAHTGRAAYFIRLGGCDVGCHWCDVKESWDADVHPKRTIDTIVTEALAHPGRMAVVTGGEPLMHDLTNLTAALQSAGFQTNIETSGVCESVTGSWDWICFSPKKFRKPNPAIFERADELKVIIYNQSDFAFAESFVPHLRPDCRLFLQTEWGRSNEMLPRIVDYVKRNPQWQISLQTHKYLDIP

SEQ ID NO: 30049 - protein, 224 aa, Fibrobacter sp.
  misc_feature (1)..(224): tr|A0A285ZYN7|A0A285ZYN7_9BACT 7-carboxy-7-deazaguanine synthase OS=Fibrobacter sp. UWB16 OX=1945874 GN=queE P E=3 SV=1
MKVCEIFKSIEGEGIRMGQAAVFVRLHGCNLRCSYCDSMYAVEGPDFKQMSVGEILAAVEAYRNESGVKCVTLTGGEPLIHENVGELLTAFSDAGFEVNIETNGTVPCKWQLPGLFYTMDWKCKSSGMSARMKMENIISLGKNDVLKFVVGSVEDLQEAEGVVARLSLTSPDNMPHIFISPVWGELTNEQIVNWMVGSKVMTQNNARFQVQLHKIVWNPDMRGV

SEQ ID NO: 30050 - protein, 189 aa, Fibrobacter sp.
  misc_feature (1)..(189): tr|A0A254SZY1|A0A254SZY1_9BACT 7-carboxy-7-deazaguanine synthase OS=Fibrobacter sp. UWB1 OX=1964355 GN=queE PE =3 SV=1
MQKIYRINKIFFSIQGEGKRVGTPQVFVRFSGCNMKCPFCDTNHEPFDEMTAEQIIQTCLSIAGNCRSVSFCGGEPTLQLDDELIKAFDGWYKSIETNGTHKVPQGIDYIVCSPKTSRIEPDNIDELRFVIKAGDPLPTPCKTAKRMCLSPCFDGDNLVKENLYHCIKLVQENPSWLLSLQWHKFIGIE

SEQ ID NO: 30051 - protein, 224 aa, Fibrobacter succinogenes
  misc_feature (1)..(224): tr|C9RPJ9|C9RPJ9_FIBSS 7-carboxy-7-deazaguanine synthas e OS=Fibrobacter succinogenes (strain ATCC 19169 / S85) OX=59374 GN=queE PE=3 SV=1
MKVCEIFKSIEGEGIRMGQAAVFVRLHGCNLRCSYCDSMYAVEGPDFKQMSVGEVLAAVEMYRNESGVKCVTLTGGEPLIHEGVGELLTAFSDAGFEVNIETNGTVPCKWQLPGLFYTMDWKCKSSGMSARMKMENIISLGKNDVLKFVVGSVEDLQEAEGVVARLSLTSPDNMPHIFISPVWGELTNEQIVNWMVGSKVMTQNNARFQVQLHKIVWDPDMRGV

SEQ ID NO: 30052 - protein, 228 aa, Fibrobacter succinogenes
  misc_feature (1)..(228): tr|A0A380RVN3|A0A380RVN3_FIBSU 7-carboxy-7-deazaguanine synthase OS=Fibrobacter succinogenes OX=833 GN=queE PE =3 SV=1
MGVFMKVSEIFKSIEGEGIRMGQSAVFVRLHGCNLRCSYCDSMYAVEGPDFKLMSVGEVLAAVEAYRNESGVKCVTLTGGEPLIHEGVGELLTAFSEAGFEVNVETNGTVPCKWQLPGLFYTMDWKCKSSGMSARMKMENIISLGKNDVLKFVVGSVEDLQEAEGVVARLSLTSPDNMPHIFISPVWGELTNEEIVNWMVGSKVMSQNNARFQVQLHKIVWDPDMRGV

SEQ ID NO: 30053 - protein, 205 aa, Fibrobacteres bacterium
  misc_feature (1)..(205): tr|A0A3C1WGM4|A0A3C1WGM4_9BACT 7-carboxy-7-deazaguanine synthase OS=Fibrobacteres bacterium OX=2052160 GN=queE PE=3 SV=1
MPSDTLRISEIFYSIQGEGFHAGTPAVFVRGAGCNLACVFCDTDFSLKEKLSPEQIVDRIAEYPSRFVVLTGGDPTIQPEAFRKLVELLHDRGYYVTMETNGTSEDDLGVDWITVSPKLSQGGEKRLRTGDELKLVYEGQDLRFFENSNFSHYFLQPKEIRTGSFGKGERDLAATRAEWEKTVAALLANPRWKLSFQLHKELGLR

SEQ ID NO: 30054 - protein, 242 aa, Fictibacillus aquaticus
  misc_feature (1)..(242): tr|A0A235FAP2|A0A235FAP2_9BACI 7-carboxy-7-deazaguanine synthase OS=Fictibacillus aquaticus OX=2021314 GN=queE PE=3 SV=1
MKTFNLPVKNEWMAWKLPMVEIFETVEGEGLAAGYPTVFVRVFHCNLRCTWCDTPYSYAPAKPEYEASIQEILETIKSFKAERICFTGGEPLIHREKSAALLLGMADLEHIVDIHIETNGAIDLAPFEKLRQSHPELKRKMRFVMDYKLPASGEMEKMNHENFKELGMQDEIKFVVGSDEDFSITKKVVNSLYEKGQISLSPVWETMPPRRLVEKLLADPLPNAKISLQLHKIIWDPAERGV

SEQ ID NO: 30055 - protein, 247 aa, Fictibacillus arsenicus
  misc_feature (1)..(247): tr|A0A1V3GAQ0|A0A1V3GAQ0_9BACI 7-carboxy-7-deazaguanine synthase OS=Fictibacillus arsenicus OX=255247 GN=queE PE=3 SV=1
MDGGRMKSFVLPSKDIWKNWKLPMVEIFETVEGEGLQAGYPTVFVRVFHCNLRCTWCDTTYSYAPAKPEFEATIDEIISTINSFRSSRICFTGGEPLIHREKSAALLMAMADLDHIVDIHIETNGAIDLEPFENLRNSHPELQRKMRFVMDYKLPASGEMDKMNLENFKELQNQDEIKFVIGSEEDFEITQQVVENHYRKGQICVSPVWESMPPRRLVELLLESHLPNAKLSLQLHKVIWHPEERGV

SEQ ID NO: 30056 - protein, 242 aa, Fictibacillus arsenicus
  misc_feature (1)..(242): tr|A0A1B1Z701|A0A1B1Z701_9BACI 7-carboxy-7-deazaguanine synthase OS=Fictibacillus arsenicus OX=255247 GN=queE PE=3 SV=1
MKSFDLPSKDIWRHWKLPMVEIFETVEGEGLQAGYPTVFVRVFHCNLRCTWCDTTYSYAPAKPEFEASIDEIISTIKSFRSSRICFTGGEPLIHREKSAALLMAMADLEHIVDIHIETNGAIDLVPFEKLRNSHPELQRKMRFVMDYKLPASGEMDKMNLGNFKELQNQDEIKFVIGSEEDFEITQQVVEHHYRKGQICVSPVWESMPPRRLVELLLESHLPNAKLSLQLHKVIWHPEERGV

SEQ ID NO: 30057 - protein, 243 aa, Fictibacillus enclensis
  misc_feature (1)..(243): tr|A0A0V8J9G3|A0A0V8J9G3_9BACI 7-carboxy-7-deazaguanine synthase OS=Fictibacillus enclensis OX=1017270 GN=queE PE=3 SV=1
MTNHFELPSSDVYSQWKLPMVEIFETIEGEGMAAGFPTIFVRVFHCNLRCTWCDTPYSYAPAKPEFEATIEEIIERINTFASKRICFTGGEPLIHREKSAALLKAMAGIERIEDIHVETNGAIALKPFQLLRESDPVLSSKVRFVMDYKLPASGEMDRMIHENFVVLKPHDEIKFVIGTDEDFDIASSVLEQHHKQGLALFSPVWETMPPEKLVNKVLSARMSDVKVSMQLHKIIWDPEKRGV

SEQ ID NO: 30058 - protein, 243 aa, Fictibacillus macauensis
  misc_feature (1)..(243): tr|I8UF50|I8UF50_9BACI 7-carboxy-7-deazaguanine synthas e OS=Fictibacillus macauensis ZFHKF-1 OX=1196324 GN=que E PE=3 SV=1
MTARFNLPEPERYMQWEVPMVEIFETIEGEGTGAGFPTVFVRVFHCNLRCTWCDTPYSYAPAKPEFHATIAEIIETIQQFSSKRICFTGGEPLIHREKSAALLKAMADLEHIEDIHIETNGAIALAPFEQLRNEDEMIKQKARFVMDYKLPASGEMNRMITDNFLSLRAQDEIKFVIGSDEDFKLACEVVDCHHEAGQVLFSPVWETMPPATLVEKVLAEKRADIRVNIQLHKIIWDPNKRGV

SEQ ID NO: 30059 - protein, 242 aa, Fictibacillus phosphorivorans
  misc_feature (1)..(242): tr|A0A165N4Y6|A0A165N4Y6_9BACI 7-carboxy-7-deazaguanine synthase OS=Fictibacillus phosphorivorans OX=1221500 G N=queE PE=3 SV=1
MKTFDLPSKDVWKHWKVPMVEIFETVEGEGLQAGYPTVFVRVFHCNLRCTWCDTTYSYAPAKPEFEASIEEIVSTIKTFRSQRICFTGGEPLIHREKSAALLMAMADLDHIVDIHIETNGAIDLQPFENLRNAHPDLQKKMRFVMDFKLPASGEMDKMNVENFKQLQNQDEIKFVVGSEEDFEITKQVVSEHYRNGQICVSPVWESMPPRRLVELLLENPLPNAKLSLQLHKVIWHPEERGV

SEQ ID NO: 30060 - protein, 240 aa, Fictibacillus phosphorivorans
  misc_feature (1)..(240): tr|A0A168W6I6|A0A168W6I6_9BACI 7-carboxy-7-deazaguanine synthase OS=Fictibacillus phosphorivorans OX=1221500 G N=queE PE=3 SV=1
MFDLPSKDVWKNWKIPMVEIFETVEGEGLQAGYPTVFVRVFHCNLRCTWCDTTYSYAPAKPEFEATIEEIVNTIKSYRSQRICFTGGEPLIHREKSAALLLAMADLDHIVDIHIETNGAIDLQPFEQLRNSHHDLQKKMRFVMDYKLPASGEMDRMHMDNFKELQHQDEIKFVVGSENDFEITKQVVSEHYRNGQISVSPVWESMPPRRLVELLLKNPLPNAKLSLQLHKVIWHPEERGV

SEQ ID NO: 30061 - protein, 243 aa, Fictibacillus solisalsi
  misc_feature (1)..(243): tr|A0A1G9X264|A0A1G9X264_9BACI 7-carboxy-7-deazaguanine synthase OS=Fictibacillus solisalsi OX=459525 GN=queE PE=3 SV=1
MTNHFELPLSDVYSQWKLPMVEIFETIEGEGMAAGFPTIFVRVFHCNLRCTWCDTPYSYAPAKPEFEATIEEIIERINTFASKRICFTGGEPLIHREKSAALLKAMAGIERIEDIHVETNGAIALKPFQLLRESDPMLSSKVRFVMDYKLPASGEMNRMIHENFDVLKPNDEIKFVIGSDDDFDIASSVLEQHHKQGLALFSPVWETMPPEKLVNKVLTARMPDVKVSMQLHKIIWDPEKRGV

SEQ ID NO: 30062 - protein, 243 aa, Fictibacillus sp.; identical to SEQ ID NO: 30057
  misc_feature (1)..(243): tr|A0A4Q2HYQ4|A0A4Q2HYQ4_9BACI 7-carboxy-7-deazaguanine synthase OS=Fictibacillus sp. S7 OX=2212476 GN=queE PE =3 SV=1

SEQ ID NO: 30063 - protein, 242 aa, Fictibacillus sp.
  misc_feature (1)..(242): tr|A0A4Q7QPU2|A0A4Q7QPU2_9BACI 7-carboxy-7-deazaguanine synthase OS=Fictibacillus sp. BK138 OX=2512121 GN=queE PE=3 SV=1
MKSFVLPSKDIWRNWKLPMVEIFETVEGEGLQAGYPTVFVRVFHCNLRCTWCDTTYSYAPAKPEFEATIDEIISTIKSFRSSRICFTGGEPLIHREKSAALLMAMADLDHIEDIHIETNGAIDLEPFENLRNSHPELQRKMRFVMDYKLPASGEMEKMNLDNFKELQNQDEIKFVIGSEEDFEITKQVVEQHYRKGQICVSPVWESMPPRRLVELLLESHLPNAKLSLQLHKVIWHPEERGV

SEQ ID NO: 30064 - protein, 216 aa, Unknown
  misc_feature (1)..(216): tr|A0A2T1DPF9|A0A2T1DPF9_9CYAN 7-carboxy-7-deazaguanine synthase OS=filamentous cyanobacterium CCP2 OX=2107700 GN=queE PE=3 SV=1
MTRISNSVAKNAVGLNQSEPSLPIVETFHSVQGEGAWTGTSAFFIRLAGCDVGCPWCDTKESWNVRRHADRSIADLVSEAVQVQPAIVVITGGEPLMHDLTDLTRSLHTAKLRVHLETSGAYPLSGTFDWITVSPKRHKPPQPSIYNHANELKIVVAEALDLEWAEQQAVYVSPDTLKLLQPEWNTPDSTALVFDYVLRHPAWRVSLQTHKFLGVR

SEQ ID NO: 30065 - protein, 214 aa, Unknown
  misc_feature (1)..(214): tr|A0A2P8WB21|A0A2P8WB21_9CYAN 7-carboxy-7-deazaguanine synthase OS=filamentous cyanobacterium CCT1 OX=2107702 GN=queE PE=3 SV=1
MISPTTISQATESSALALELPVVETFHSIQGEGMWAGTNAFFIRLAGCDVGCSWCDTKQSWNPKRFPLKTPEELVAEARSANPQIVVITGGEPLMHDLSALTGQLKEAGLQTHLETSGAHPFSGTFDWVTFSPKRFKPPHASIYAHANELKVVIGNETDLEWAEQQATQVSSTVTKLLQPEWETPSSCDKVFAYVLKHPQWRVSLQTHKFLGVQ

SEQ ID NO: 30066 - protein, 378 aa, Filibacter sp.
  misc_feature (1)..(378): tr|A0A3P5X3V4|A0A3P5X3V4_9BACL 7-carboxy-7-deazaguanine synthase OS=Filibacter sp. TB-66 OX=2483811 GN=queE PE =4 SV=1
MKNNLVSVEQMTPVFDPWEAYLDVQEHGKLTLSSIEFTTTYLCNMRCEHCAVGYMLQHKDPDALPIELLLSRLDEIPHLRTISITGGEPIFSKKSVDQYVLPLLKYANERGVRTQINSNLTMPLDRYMAIAPYLDVLHISHNWGTVDDFVDGGFANMERKPSKERRAKQFQRMITNSRALAEAGVMVSAETMLNKRTLPHLEHIHRQVIEEMKCARHEIHPMYPSDFASQLEVLSLDETRKAIHQLLDSRNEDVWMLFGTLPFYPCSDNEEDLALLQRIYSSKNVSVRNDPDGRSRLNVNIFTGDVIVTDFGDTPPMGNIQTESLPIMLDRWLERPLAETIGCHCPAVNCLGPNLLVKDAYYPEMDFQKKKADILLSI

SEQ ID NO: 30067 - protein, 216 aa, Filimonas endophytica
  misc_feature (1)..(216): tr|A0A561IV62|A0A561IV62_9BACT 7-carboxy-7-deazaguanine synthase OS=Filimonas endophytica OX=1500311 GN=queE P E=3 SV=1
MNELAETATAVTLPVMEAFYTLQGEGFHQGKAAYFIRLGGCDVGCFWCDVKESWDASVHPRQTIEQIVATALHEVNCTHGQANNLIAVVTGGEPLMHNLDALTLALKQAGFQTNIETSGASPLSGHWDWICFSPKKFKAPVPEILPAANELKVVIYNKHDFEWAEEWAAQVSPQCKLYLQPEWDKSDTVLPLMIDYIKAHPRWQLSAQVHKYINVP

SEQ ID NO: 30068 - protein, 216 aa, Filimonas lacunae
  misc_feature (1)..(216): tr|A0A173MMY8|A0A173MMY8_9BACT 7-carboxy-7-deazaguanine synthase OS=Filimonas lacunae OX=477680 GN=queE PE=3 S V=1
MNELVETATAVTLPVMEAFYTIQGEGFHQGKAAYFIRLGGCDVGCFWCDVKDSWDASIHPPFSTQQIVATALQEVNRTHGQANHLIAVVTGGEPLMHNLDELTLALQAAGFDTNIETSGSSPLSGHWNWICLSPKKFKAPVPEILPVANELKVVIFNKHDFEWAEQYAAQVSSTCKLYLQPEWDKSAVVLPLIIDYIKANPQWQLSAQVHKYINVP

SEQ ID NO: 30069 - protein, 216 aa, Filimonas sp.
  misc_feature (1)..(216): tr|A0A2U0ZXT9|A0A2U0ZXT9_9BACT 7-carboxy-7-deazaguanine synthase OS=Filimonas sp. YR581 OX=2135469 GN=queE PE= 3 SV=1
MNELVETATVVTLPVMEAFYTLQGEGFHQGKAAYFIRLGGCDVGCFWCDVKDSWDAAMHPQLTIAQIVNRALEDVNRTHGQANHLIAVVTGGEPLMHNLDALTLALQQAGFSTNIETSGSSPLSGHWDWICFSPKKFKAPVPEILPAANELKVVIYNKHDFEWAEQYAAQVSPHCKLYLQPEWDKSDTVLPLIIDYIKANPRWQLSAQVHKYINVP

SEQ ID NO: 30070 - protein, 201 aa, Filimonas sp.
  misc_feature (1)..(201): tr|A0A4Q1D849|A0A4Q1D849_9BACT 7-carboxy-7-deazaguanine synthase OS=Filimonas sp. TTM-71 OX=2508721 GN=queE PE =3 SV=1
MESFYTIQGEGFYQGKAAYFIRLGGCDVGCFWCDVKESWDASAHPLYTIEQITERAVQEVTAVTPDTFPVIAVVTGGEPLMHELYELTEALQTAGFATNIETSGSSPLSGYWDWICLSPKKFKAPLPEVAQAANELKVIIYNKHDLIWAEEQAKLVLPSCKLYLQPEWGKAAEVTPYIVDYIKTHPHWGLSLQIHKYINVP

SEQ ID NO: 30071 - protein, 242 aa, Filobacillus milosensis
  misc_feature (1)..(242): tr|A0A4Y8IFJ6|A0A4Y8IFJ6_9BACI 7-carboxy-7-deazaguanine synthase OS=Filobacillus milosensis OX=94137 GN=queE P E=3 SV=1
MNKFPVLEIFGPTIQGEGMVVGRKTMFVRTAGCDYSCSWCDSAFTWDGSAKDEIERLTAEDIFARLKEIGGNQFDHVTVSGGNPALLKKLHELIDLLHEAGIEVALETQGSRWQEWFTDIDDLTISPKPPSSKMLTDWGILDDIVARLREGDRLSHTSLKVVIFNDEDLAYAEKVHERYPNLPFYLQVGNDELEENQAPNLAQHLLDRYEWLINRVVESSKLNKVRVLPQVHALVWGNKRGV

SEQ ID NO: 30072 - protein, 232 aa, Fimbriiglobus ruber
  misc_feature (1)..(232): tr|A0A225DBR5|A0A225DBR5_9BACT 7-carboxy-7-deazaguanine synthase OS=Fimbriiglobus ruber OX=1908690 GN=queE PE= 3 SV=1
MIALPSTTHRVAPLQSVPPGNLLIHEIYLSVQGESTFAGLPCVFVRTTVCDLRCVWCDTPHAFTRGEQMTRADVLARALAFDCPLVELTGGEPLLQPAVLPLMTDLCDAGKTVLLETSGAHPVGPVDPRVHIIMDLKCPDSGECDRNLWANLDVLKPTDQIKFVIASRRDWDWAADTIRAHNLDKRFHVLVGTVFGDATPRDLVEWLLASGLNIRMQLQMHKYIWDPAARGV

SEQ ID NO: 30073 - protein, 233 aa, Fimbriimonas ginsengisoli
  misc_feature (1)..(233): tr|A0A068NL80|A0A068NL80_9BACT 7-carboxy-7-deazaguanine synthase OS=Fimbriimonas ginsengisoli Gsoil 348 OX=661 478 GN=queE PE=3 SV=1
MSDDARLRIAEIFASVQGEGSWVGIPSVFVRVSGCNLRCAWCDTPYASWRPEGPVMPVGEILERVIATGIDHVVLTGGEPMLFGGVETLAEECHRLGKTITIETAGTIYRELPCDLMSISPKLANSTPQDEAWRERHESTRLQIDVLQRLIDRYRYQLKFVVGPNVEADLVEIEGLLSRLRGVVPQRVLLMPEGTDAETLHRRARALVGPVMRRNWRLTTRLHIDLFGNTKGT

SEQ ID NO: 30074 - protein, 226 aa, Firmicutes bacterium
  misc_feature (1)..(226): tr|A0A373PTL6|A0A373PTL6_9FIRM 7-carboxy-7-deazaguanine synthase OS=Firmicutes bacterium AM55-24TS OX=2292896 GN=queE PE=3 SV=1
MKVIEIFDSIDGEGIRTGQCATFIRLAGCNLRCSYCDTVYSLFGEETPCEYTEMTVDEIISKVNMTYKRVTLTGGEPLVHTDSAELVSKLTELGCDVNIETNGAVDIVDFLGKVQKSDNLFFTIDYKLPSSGMTDKMIWNNFINLRPCDVIKFVIGSDEDMNLTIGIVKKLKQVYTEMPHIYLGAVYGMYDAQKLVNIMLKEPVLCDATFQIQLHKVIWDPEERGV

SEQ ID NO: 30075 - protein, 222 aa, Firmicutes bacterium
  misc_feature (1)..(222): tr|A0A2N2B3K1|A0A2N2B3K1_9FIRM 7-carboxy-7-deazaguanine synthase OS=Firmicutes bacterium HGW-Firmicutes-7 OX=2 013788 GN=queE PE=3 SV=1
MTYSVVEKFISINGEGRLSGQLAVFIRLQGCNLSCSFCDTSWANDEGCSCTFMTKEELDAYIHSIGITNVTLTGGEPLIQEHFIDLVTYLSRDQQRRIEIETNGSVLISSIKEVGNDNICVTMDYKLPVSGMEQFMKLENLRLLSKEDTIKFVVGNEEDLNRAKELIDEYKLVQHTNVYISPVFGQITPEEIVEWMKMHVLNQVTLQLQLHKIIWGNEVKGV

SEQ ID NO: 30076 - protein, 265 aa, Fischerella major
  misc_feature (1)..(265): tr|A0A1U7GW83|A0A1U7GW83_9CYAN 7-carboxy-7-deazaguanine synthase OS=Fischerella major NIES-592 OX=210994 GN=qu eE PE=3 SV=1
MTNKIGITPVARLVEVFSAIQGEGLNVGTRQIFIRFAFCDLRCHFCDSAHTWNAPATCRIERSPGRRDFEIHSNPVPLPILLEWIERQNIPSLHDSISLTGGEPLLHAAFLVEFLPQLRNVTALPIYLETGGHRPEQLAMILPYLDSVGMDLKLPSTSGENRWQEHAKFLQLCYESQVEVFVKIIISKQTDPGELEHSASLVAQVSPSIPVFLQPVTPLPASEQLTENPVLAPSPEQVLMWQALMKRFVKQVRVIPQTHKMLNQL

SEQ ID NO: 30077 - protein, 265 aa, Fischerella muscicola
  misc_feature (1)..(265): tr|A0A2N6JUE6|A0A2N6JUE6_FISMU 7-carboxy-7-deazaguanine synthase OS=Fischerella muscicola CCMEE 5323 OX=201957 2 GN=queE PE=3 SV=1
MTTKIGITPIARLVEVFSAIQGEGLNVGTRQIFIRFAFCDLRCHFCDSAHTWNAPTTCRIERSPGKRDFEIHSNPVPLPILLEWIERQNIPSLHDSISLTGGEPLLHAAFLVEFLPQLRNITALPIYLETSGHRPEQLAMILPYLDSVGMDLKLPSTSGENRWQEHAKFLQLCYESQVEVFVKIIISEQTDPAELERSASLVAQVSPSIPVFLQPVTPLPASEQLTENPVLAPSPDQVLMWQALMKRFVKQVRVIPQTHKMLNQL

SEQ ID NO: 30078 - protein, 296 aa, Fischerella sp.
  misc_feature (1)..(296): tr|A0A1Z4TQ08|A0A1Z4TQ08_9CYAN 7-carboxy-7-deazaguanine synthase OS=Fischerella sp. NIES-4106 OX=2005456 GN=qu eE PE=3 SV=1
METASKVHNRTRSSEISLLYAERAHTPFDHQMTTKIGITPTARLVEVFSAIQGEGLNVGTRQIFIRFALCDLRCQFCDSAHTWNAPTNCRIERSPGKRDFEIYSNPVSLPILLEWIERQNIPSLHDSISLTGGEPLLHAGFLVEFLPQIRAITALPIYLETGGHRPEQLAMILPYLDSVGMDLKLPSTSGENCWQEHSKFLQLCYESQVEIFVKIIISDETNPAELERSALLVAQVSPAIPVFLQPVTPLPASEQFTKNPVLAPSPEQVLMWQALIKRFVKQVRVIPQTHKMLNQL

SEQ ID NO: 30079 - protein, 265 aa, Fischerella sp.
  misc_feature (1)..(265): tr|A0A0S3TV76|A0A0S3TV76_9CYAN 7-carboxy-7-deazaguanine synthase OS=Fischerella sp. NIES-3754 OX=1752063 GN=qu eE PE=3 SV=1
MTNKIGITPVARLVEVFSAIQGEGLNVGTRQIFIRFAFCDLRCHFCDSAHTWNAPATCRIERSPGRRDFEIHSNPVPLPILLEWIERQNIPSLHDSISLTGGEPLLHAAFLVEFLPQLRNVTALPIYLETGGHRPEQLAMILPYLDSVGMDLKLPSTSGENRWQEHAKFLQLCYESQVEVFVKIIISKQTDPGELERSASLVAQVSPSIPVFLQPVTPLPASEQLTENPVLAPSPEEVLMWQALMKRFVKQVRVIPQTHKMLNQL

SEQ ID NO: 30080 - protein, 265 aa, Fischerella thermalis
  misc_feature (1)..(265): tr|A0A2N6MDF2|A0A2N6MDF2_9CYAN 7-carboxy-7-deazaguanine synthase OS=Fischerella thermalis CCMEE 5330 OX=201967 0 GN=queE PE=3 SV=1
MTNKIGITPVARLVEVFSAIQGEGLNVGTRQIFIRFAFCDLRCHFCDSAHTWNAPATCRIERSPGRRDFEIHSNPVPLPILLEWIERQNIPSLHDSISLTGGEPLLHAAFLVEFLPQIRNITALPIYLETGGHRPEQLAMILPYLDSVGMDLKLPSTSGENRWQEHAKFLQLCYESQVEVFVKIIISEKTDPAELERSASLVAQVSPSIPVFLQPVTPLPASEQLTENPVLAPSPEQVLMWQALMKRFVKQVRVIPQTHKMLNQL

SEQ ID NO: 30081 - protein, 265 aa, Fischerella thermalis
  misc_feature (1)..(265): tr|A0A2N6N157|A0A2N6N157_9CYAN 7-carboxy-7-deazaguanine synthase OS=Fischerella thermalis CCMEE 5201 OX=201967 2 GN=queE PE=3 SV=1
MTTKIGITPIARLVEVFSAIQGEGLNVGTRQIFIRFAFCDLRCHFCDSAHTWNAPTTCRIERSPGRRDFEIHSNPVPLPILLEWIERQNIPSLHDSISLTGGEPLLHAAFLVEFLPQIRNITALPIYLETGGHRPEQLAMILPYLDSVGMDLKLPSTSGENRWQEHAKFLQLCYESQVEVFVKIIISEKTDPAELERSASLVAQVSPSIPVFLQPVTPLPASEQLTENPVLAPSPEQVLMWQALMKRFVKQVRVIPQTHKMLNQL

SEQ ID NO: 30082 - protein, 210 aa, Flagellimonas aquimarina
  misc_feature (1)..(210): tr|A0A316KV37|A0A316KV37_9FLAO 7-carboxy-7-deazaguanine synthase OS=Flagellimonas aquimarina OX=2201895 GN=que E PE=3 SV=1
MVTAEVHDLVNKGHMLPLMEEFYTIQGEGYHKGTAAYFIRIGGCDVGCHWCDVKESWNAETHPPTSIDSIVDNAASYSDTIVITGGEPLTWDMGPLTTALKAKNLQTHIETSGAYPLTGTWDWICLSPKKNKLPEEEIYNVANELKVIVYNKHDLIFAEEQAAKVNENCILYLQPEWSVRDKMVPLIVDYVMQNPKWKVSLQTHKYLNIP

SEQ ID NO: 30083 - protein, 210 aa, Flagellimonas eckloniae
  misc_feature (1)..(210): tr|A0A0Q0XQ71|A0A0Q0XQ71_9FLAO 7-carboxy-7-deazaguanine synthase OS=Flagellimonas eckloniae OX=346185 GN=queE PE=3 SV=1
MVSEQVMDLVDKGLMLPLMEEFYTIQGEGYHKGTAAYFIRVGGCDVGCHWCDVKESWNAETHPPTQIASIVDNASNYSDTIVITGGEPLTWDMGPLTAALKEKKLQTHIETSGAYPFTGIWDWICLSPKKNKLPEEEIYAVAHELKVIVYNKHDFIFAEEQAEKVNGKCILYLQPEWSVREKMVPLIVDYVMKNPKWKVSLQTHKYLNIP

SEQ ID NO: 30084 - protein, 215 aa, Flagellimonas flava
  misc_feature (1)..(215): tr|A0A1M5NPX3|A0A1M5NPX3_9FLAO 7-carboxy-7-deazaguanine synthase OS=Flagellimonas flava OX=570519 GN=queE PE=3 SV=1
MYLCRMVTADVMQLVEQGKMLPLMEEFYTIQGEGYHKGTAAYFIRVGGCDVGCHWCDVKESWNAETHPPTAIENIIENANTYSDTIVITGGEPLTWDMGPLTTGLKDKKLQTHIETSGAYTLTGIWDWICLSPKKNKLPVPEIYPLAHELKVIVYNRHDFVFAEEQAQKVSEDCILYLQPEWSVREKMVPLIVDYVMQHPKWKVSLQTHKYLNIP

SEQ ID NO: 30085 - protein, 210 aa, Flagellimonas maritima
  misc_feature (1)..(210): tr|A0A2Z4LPF4|A0A2Z4LPF4_9FLAO 7-carboxy-7-deazaguanine synthase OS=Flagellimonas maritima OX=1383885 GN=queE PE=3 SV=1
MVSEKVMDLVGKGLMLPLMEEFYTIQGEGYHKGTAAYFIRVGGCDVGCHWCDVKESWNAETHPPTAIERIIDNASKYSNIIVITGGEPLTWDMGPLTSGLKNKNLQIHIETSGAYPLTGKWDWICLSPKKNKLPKNKIYALANELKIIVYNKHDFIFAEEQAAQVSEDCILYLQPEWSVRDKMVPEIVDYVMKNPKWKVSLQTHKYLNIP

SEQ ID NO: 30086 - protein, 210 aa, Flagellimonas pacifica
  misc_feature (1)..(210): tr|A0A285N0V4|A0A285N0V4_9FLAO 7-carboxy-7-deazaguanine synthase OS=Flagellimonas pacifica OX=1247520 GN=queE PE=3 SV=1
MVLEQVKDLVEKGQMLPLMEEFYTIQGEGYHKGTAAYFVRIGGCDVGCHWCDVKESWDAETHPPTDIKKIVANAAKYSNTIVITGGEPLMWDMAPLTSGLKTKNLHTHIETSGAYPLTGTWDWICLSPKKNKLPTEEIYDVASELKVIVYNKHDFVFAEEQAAKVNENCILYLQPEWSVREKMIPLIVDYVMQNPKWIVSLQTHKYLNIP

SEQ ID NO: 30087 - protein, 210 aa, Flagellimonas sp.
  misc_feature (1)..(210): tr|A0A5C8V2Z5|A0A5C8V2Z5_9FLAO 7-carboxy-7-deazaguanine synthase OS=Flagellimonas sp. 176CP5-101 OX=2603628 GN =queE PE=3 SV=1
MVTTQVMDLVNKGTMLPLMEEFYTIQGEGYHKGTAAYFIRVGGCDVGCHWCDVKESWDAEIHPPTAIESIIDNASSYSDTIVVTGGEPLTWDMGPLTSGLKTKNLQIHIETSGAYPLTGVWDWICLSPKKNKLPVPEIYDSANELKIIVYNKHDLVFAEEQAAKVGKDCILYLQPEWSVREKMVPIIVDYVMQNPQWKVSLQTHKYLNIP

SEQ ID NO: 30088 - protein, 214 aa, Flammeovirga kamogawensis
  misc_feature (1)..(214): tr|A0A553GK20|A0A553GK20_9BACT 7-carboxy-7-deazaguanine synthase OS=Flammeovirga kamogawensis OX=373891 GN=que E PE=3 SV=1
MVKHLEYSTKERVQLGYALPVMEAFYTIQGEGSFSGHAAYFIRLAGCDVGCVWCDVKESWEQDKHPILDIEEIIQDAKAHPGRLAIITGGEPLMHELGPLTKRLKEEGFQINIETSGTHKFTGEIDYVCLSPKKFKAPVEEAYKKADEFKVVVFHKSDLQWAIDLSEKLNPNCKLYIQPEWSKRNTVTPLLVEFVKENPEWHLSLQTHKYIDIP

SEQ ID NO: 30089 - protein, 214 aa, Flammeovirga pacifica
  misc_feature (1)..(214): tr|A0A1S1YX32|A0A1S1YX32_9BACT 7-carboxy-7-deazaguanine synthase OS=Flammeovirga pacifica OX=915059 GN=queE PE =3 SV=1
MVKKIDYSLKERVKLGNALPVMEAFYTIQGEGAYTGQAAYFIRLAGCDVGCVWCDVKESWEQDAHPVLDIEEIISNAKEHPGRLAIITGGEPLMHNLAPLTKRLKDEGFHINIETSGTHQFTGHLDYITLSPKKFKKPVEEAYQLASEFKVVVYHKSDIQWAINLSEKLNKDCKLYIQPEWSKRQEVTPMLVEFVKNNPEWQLSLQTHKYIDIP

SEQ ID NO: 30090 - protein, 214 aa, Flammeovirga sp.
  misc_feature (1)..(214): tr|A0A1B1FQK4|A0A1B1FQK4_9BACT 7-carboxy-7-deazaguanine synthase OS=Flammeovirga sp. MY04 OX=1191459 GN=queE P E=3 SV=1
MVKKLDYSVKERVKQGHALPVMEAFYTIQGEGAYTGQAAYFIRLAGCDVGCVWCDVKESWEQDAHPVLEIEEIIQNAKKHPGRLAIITGGEPLMHNLEPLTKRLKEEGFHINIETSGTHKFTGHLDYITLSPKKFKKPVEEAYQLASEFKVVVFHKSDIQWAINLSEKLNKDCKLYIQPEWSKRQEITPLLVEFVKNNPEWQLSLQTHKYIDIP

SEQ ID NO: 30091 - protein, 214 aa, Flammeovirga sp.
  misc_feature (1)..(214): tr|A0A150AB01|A0A150AB01_9BACT 7-carboxy-7-deazaguanine synthase OS=Flammeovirga sp. SJP92 OX=1775430 GN=queE PE=3 SV=1
MVKHLEYSTKERVQLGLSLPVMEAFYTIQGEGAYTGQAAYFIRLAGCDVGCVWCDVKESWEQDKHPVLTVEEIVQNAKKYPGRLAIITGGEPLMHDLGPLTEQLKEEGFHINIETSGAHPLSGELDYITLSPKKFKQPVEEVYQRANEFKVVVYHKSDLQWAINLSEKLSDDCKLYIQPEWSKRAQITPLLVEFVKSNPEWQLSLQTHKYIDIP

SEQ ID NO: 30092 - protein, 203 aa, Flammeovirgaceae bacterium
  misc_feature (1)..(203): tr|A0A2D5QJM0|A0A2D5QJM0_9BACT 7-carboxy-7-deazaguanine synthase OS=Flammeovirgaceae bacterium OX=2026740 GN=q ueE PE=3 SV=1
MKRGSVNLPVMESFYSIQGEGYHSGKPAYFVRLAGCDVKCTWCDVKDSWSNTDDQFIHVKKIVNEINKYPTDLIIITGGEPFYHDLGPLTKLLKEEGKLVHVETSGTEKFTGTFDWICLSPKRFKKPLENFYEISDELKVIIYQDSDFRWAERISSKMKKDIQRILQPEWSVEKKANTNILNYIKKNPSWRISLQTHKYLKVD

SEQ ID NO: 30093 - protein, 211 aa, Flammeovirgaceae bacterium
  misc_feature (1)..(211): tr|A0A2D6AKL8|A0A2D6AKL8_9BACT 7-carboxy-7-deazaguanine synthase OS=Flammeovirgaceae bacterium OX=2026740 GN=q ueE PE=3 SV=1
MKTRIQKDNGLIVDELPVMESFLTVQGEGGHTGSAAYFIRLGGCDVGCVWCDVKESWDPKAHPIQKIDDIVNEASQQGVKIIVVTGGEPLMYNLDHFTDNLHATGLKTHIETSGAHSLSGNWDWLCFSPKKFMAPKEEFYSAADELKVVVYNKSDFKWAEEHAAKCANKVNLFLQPEWSKKDQMLPMIVDYVKKNPKWRISLQTHKYMDIP

SEQ ID NO: 30094 - protein, 193 aa, Flaviaesturariibacter sp.
  misc_feature (1)..(193): tr|A0A4R4E7G7|A0A4R4E7G7_9BACT 7-carboxy-7-deazaguanine synthase OS=Flaviaesturariibacter sp. 17J68-15 OX=2545 761 GN=queE PE=3 SV=1
MEHFYTLQGEGLYQGKAAYFIRLGGCDVGCVWCDVKDSWDASMHPQRSIPELTELVTATPAPIVVITGGEPLLHNLDGLTAALRAAGIRTHIETSGSSPLSGQWDWITLSPKKFKAPLPEVVAEADELKVVVFNKSDFAWAEQWAALVKPACRLYLQPEWDKAGLMTPLIIDYVKEHPQWQLSLQIHKYINVP

SEQ ID NO: 30095 - protein, 251 aa, Flaviaesturariibacter sp.
  misc_feature (1)..(251): tr|A0A4R1BBL2|A0A4R1BBL2_9BACT 7-carboxy-7-deazaguanine synthase OS=Flaviaesturariibacter sp. 17J68-12 OX=2502 780 GN=queE PE=3 SV=1
MLKLARLNGQPEIFHSIQGEGKSIGRPSVFIRLSLCNLYCAWCDTDYTWNWEGTAFTHNNDVRPGYRKYRKEEYQQLISNEEIRDRLAVISCSNLIFTGGEPLVQQKDLRSLFRLLKENNPDYHIEFETNGTLKPLPEIDALTDQYNVSVKLANSKVAPEDRLNPEAIRFFAASPKANFKFVVDSRADLDEVLALVQGYGIRPEAVYLMPQGTSAAALREKQAWVAELCKQYNYNYTDRLHIHIWGDKRGV

SEQ ID NO: 30096 - protein, 206 aa, Flavihumibacter petaseus
  misc_feature (1)..(206): tr|A0A0E9N717|A0A0E9N717_9BACT 7-carboxy-7-deazaguanine synthase OS=Flavihumibacter petaseus NBRC 106054 OX=12 20578 GN=queE PE=3 SV=1
MNLASTISTRLPLMEAFYTLQGEGRHQGRAAYFIRLGGCDVGCVWCDVKDSWDADKHPLTAINDMVHGAATYPGRLAVITGGEPLLHQLDELTDALKAAGFETNIETSGSSPLSGQWDWICLSPKKFKAPLPEVVEKADELKVVIFHPSDFKWAEQWAAQVKPGCKLYLQPEWEKREKMMPLIIQYILDNPQWELSIQSHKYIGVP

SEQ ID NO: 30097 - protein, 208 aa, Flavihumibacter solisilvae
  misc_feature (1)..(208): tr|A0A0C1L132|A0A0C1L132_9BACT 7-carboxy-7-deazaguanine synthase OS=Flavihumibacter solisilvae OX=1349421 GN=q ueE PE=3 SV=1
MEVEQIIPDTTTLPVMEAFYTLQGEGYHQGKAAYFIRLGGCDVGCVWCDVKDSWDADRHPQLSITEIITEAQKYPGRLAVVTGGEPLLHNLDNLTAALHAAGFDTNIETSGSSPLSGKWDWICLSPKKFKFPLDEVILAADELKVVIFNKSDFEWAEKYASQVKPSCKLFLQPEWDKKDQMLPLIIDYIKENPQWELSIQAHKYIHVP

SEQ ID NO: 30098 - protein, 205 aa, Flavihumibacter sp.
  misc_feature (1)..(205): tr|A0A162NBS0|A0A162NBS0_9BACT 7-carboxy-7-deazaguanine synthase OS=Flavihumibacter sp. CACIAM 22H1 OX=1812911 GN=queE PE=3 SV=1
MVEITDIPALPVMESFYTLQGEGFHQGRAAYFIRLGGCDVGCVWCDVKESWDASKHPQQSIQTIVKNALEYPGKLAVITGGEPLLYNLDALTLQLRQAGFETNIETSGSSPLSGYWDWICLSPKKFKFPLPEVIAAANELKVVIFNKSDFQWAEKYAAQVQPGCKLYLQPEWDKQTDMLPLIIDYIKAHPQWELSIQSHKYINVP

SEQ ID NO: 30099 - protein, 193 aa, Flavihumibacter sp.
  misc_feature (1)..(193): tr|A0A0C1KPX2|A0A0C1KPX2_9BACT 7-carboxy-7-deazaguanine synthase OS=Flavihumibacter sp. ZG627 OX=1463156 GN=qu eE PE=3 SV=1
MESFYTLQGEGFHQGRAAYFIRLGGCDVGCSWCDVKESWDESLHPKQSVEEIVENAKAYPGRLAVITGGEPLLHNLNNLTSALQEAGFETNIETSGSSDLSGNWDWICLSPKKFKFPLPEVVQTADELKVVVFNKTDFDWAEKWAADVKPACKLYLQPEWGKKEQMLPLIIDYIKAHPRWELSIQSHKYINVP

SEQ ID NO: 30100 - protein, 193 aa, Flavipsychrobacter stenotrophus
  misc_feature (1)..(193): tr|A0A2S7SVF7|A0A2S7SVF7_9BACT 7-carboxy-7-deazaguanine synthase OS=Flavipsychrobacter stenotrophus OX=2077091 GN=queE PE=3 SV=1
MEHFYTLQGEGLHTGRAAYFIRLGGCDVGCVWCDVKESWDASIHPQMTANEITQLAAANPGRIAVITGGEPALHDLTALCNLLHGEGFKTHIETSGSSPIVGAIDWVTLSPKKFKAPIQEALDLANELKVVVYHHSDFKWAEEHAAKVGKDCLLYLQPEWSKRDSVTPLIIDYIQQHPQWQLSLQTHKYINIP

SEQ ID NO: 30101 - protein, 209 aa, Flaviramulus basaltis
  misc_feature (1)..(209): tr|A0A1K2IAE2|A0A1K2IAE2_9FLAO 7-carboxy-7-deazaguanine synthase OS=Flaviramulus basaltis OX=369401 GN=queE PE =3 SV=1
MNKDIQILVDKGEMLPLMEEFYTIQGEGFHKGTAAYFVRIGGCDVGCHWCDVKESWNANLHPPTETSKIVENAKKHSDTIVVTGGEPLTWDMTALTTKLKAEGLQVHIETSGAYKLTGIWDWICLSPKKMKLPTKEVYERADELKMIIYNKDDFRFAEEQAAKVNKNCILYLQPEWSKRDKVVPEIVDYVMKNPKWKVSLQTHKYLNIP

SEQ ID NO: 30102 - protein, 214 aa, Flavisolibacter ginsengisoli
  misc_feature (1)..(214): tr|A0A1M5D5S9|A0A1M5D5S9_9BACT 7-carboxy-7-deazaguanine synthase OS=Flavisolibacter ginsengisoli DSM 18119 OX= 1121884 GN=queE PE=3 SV=1
MNGLSTMSSTIEIVPITALPVMEHFYTLQGEGVHQGKAAYFIRLAGCDVGCVWCDVKDSWDSTRHPLLEIEFLVEKVKQAGSPIAVITGGEPLLHDLQELTRQLQDAGLKTHMETSGSSSLSGSWDWITLSPKKFKPPLTEVVIKANELKVVVFNKSDFEWAEKWADQVSPGCKLYLQPEWDKAALVTPMIIDYIKAHPQWQLSLQIHKYINVP

SEQ ID NO: 30103 - protein, 193 aa, Flavisolibacter ginsenosidimutans
  misc_feature (1)..(193): tr|A0A5B8UPC0|A0A5B8UPC0_9BACT 7-carboxy-7-deazaguanine synthase OS=Flavisolibacter ginsenosidimutans OX=66148 1 GN=queE PE=3 SV=1
MEHFYTLQGEGVHTGKAAYFIRLGGCDVGCVWCDVKDSWDGGKHPLWKIEDLVTTVKQTPAQIVVITGGEPLMHDLAALTKALHDAGLRTHIETSGSSPLSGELDWITLSPKKFKAPLPEVLPQAQELKIVVFNGSDFAWAEDWAAKVSPQCKLFLQPEWSKAEQMTPLIVDYIKAHPQWQLSLQTHKYINVP

SEQ ID NO: 30104 - protein, 238 aa, Flavisolibacter tropicus
  misc_feature (1)..(238): tr|A0A172TVM6|A0A172TVM6_9BACT 7-carboxy-7-deazaguanine synthase OS=Flavisolibacter tropicus OX=1492898 GN=que E PE=3 SV=1
MNQHQESKYRVKAIWKTLQGEGLFAGRPAVFVRLVGCNMWSGYEQTRQRDAERNGGSCPLWCDTDFTKEGSQDYTAEALAAAMQKVGGDVRFCVITGGEPLMQLDYTLVKALHKAGYFIAIETNGTLSLAERCWDPKAEKLEAPDWIVCSPKLAVPQLQLEFFDELKLVVPDYKPEDFDAFVGLQRINKIHNHTLPLLWLQPEDGARLQEARKMAIETALAHPQWRVSVQTHKILNVE

SEQ ID NO: 30105 - protein, 209 aa, Flavivirga eckloniae
  misc_feature (1)..(209): tr|A0A2K9PUC1|A0A2K9PUC1_9FLAO 7-carboxy-7-deazaguanine synthase OS=Flavivirga eckloniae OX=1803846 GN=queE PE =3 SV=1
MKEMIQLQIDRGEMLPLMEEFYTIQGEGYHKGTAAYFIRIGGCDVGCHWCDVKESWNANLHPPTETVNIVENAKKYSDTIVVTGGEPLMWDMTVLTERLKDKGLQVHIETSGAYKFTGTWDWVCLSPKKTKLPTEEAYEKADELKMIIYNKDDFRFAEEQAAKVNKDCILYLQPEWSKRDKVVPEIVDYVMANPKWKVSLQTHKYLNIP

SEQ ID NO: 30106 - protein, 209 aa, Flavivirga sp.
  misc_feature (1)..(209): tr|A0A4V6R460|A0A4V6R460_9FLAO 7-carboxy-7-deazaguanine synthase OS=Flavivirga sp. RZ03 OX=2559571 GN=queE PE= 3 SV=1
MKKSVQLQVDKGEMLPLMEEFYTIQGEGYHKGTAAYFIRIGGCDVGCHWCDVKESWNADLHPPTETVKIVGNAKKYSDTIVVTGGEPLMWDMTVLTDQLKEKGFQVHIETSGAYKLTGTWDWICLSPKKMKLPTKEVYDKANELKVIVYNKDDFRFAEEQAAKVNKDCILYLQPEWSKRDKVVPEIVDYVMANPKWKVSLQTHKYLNIP

SEQ ID NO: 30107 - protein, 210 aa, Flavobacteria bacterium
  misc_feature (1)..(210): tr|A3J285|A3J285_9FLAO 7-carboxy-7-deazaguanine synthas e OS=Flavobacteria bacterium BAL38 OX=391598 GN=queE PE =3 SV=1
MLKKETQLAVEKGEMLPLMEEFYTIQGEGYHTGTAAYFIRIGGCDVGCHWCDVKESWNAELHPPTNTDIIVSNAKKYADTVVVTGGEPLTWDMTLLTSKLKEQNLRVHIETSGAYEVTGTWDWFCLSPKKNKLPVQSAYDIANELKVIIYNKHDFIFAEEQAAKVNPNAILFLQPEWSKKEEMTPLIVDYVMNNPKWRVSLQTHKYLNIP

SEQ ID NO: 30108 - protein, 219 aa, Flavobacteria bacterium
  misc_feature (1)..(219): tr|Q26EL0|Q26EL0_FLABB 7-carboxy-7-deazaguanine synthas e OS=Flavobacteria bacterium (strain BBFL7) OX=156586 G N=queE PE=3 SV=1
MIFKKYLCSMLEKSISQAVEKGMMLPLMEEFYTIQGEGSHTGKAAYFIRVGGCDVGCHWCDVKESWDQEKHPPTAVEAIVANAAKYSKTIVVTGGEPLTWDMGPLTTGLKEEGMQVHIETSGAYPLSGTWDWICLSPKKMKMPLPEVYEAAHELKVIVFNKHDFAFAKAEAEKVSSNCKLYLQPEWSVREKMIPLITEFVMENPEWHVSLQTHKYLNIP

SEQ ID NO: 30109 - protein, 210 aa, Flavobacteriaceae bacterium
  misc_feature (1)..(210): tr|A0A3R7TRQ7|A0A3R7TRQ7_9FLAO 7-carboxy-7-deazaguanine synthase OS=Flavobacteriaceae bacterium TMED206 OX=198 6710 GN=queE PE=3 SV=1
  misc_feature (34)..(34): Xaa can be any naturally occurring amino acid
  misc_feature (51)..(51): Xaa can be any naturally occurring amino acid
  misc_feature (62)..(62): Xaa can be any naturally occurring amino acid
  misc_feature (68)..(68): Xaa can be any naturally occurring amino acid
  misc_feature (72)..(72): Xaa can be any naturally occurring amino acid
  misc_feature (77)..(77): Xaa can be any naturally occurring amino acid
  misc_feature (79)..(79): Xaa can be any naturally occurring amino acid
  misc_feature (94)..(94): Xaa can be any naturally occurring amino acid
  misc_feature (120)..(120): Xaa can be any naturally occurring amino acid
  misc_feature (207)..(208): Xaa can be any naturally occurring amino acid
MNQNLEKIKVNNGKILPLMDTFTTLQGEGFHSGXSAHFLRIGGCDIGCHWXDIKESWNSDLXPLVKVXNILXTIDPXTXLVIISGGEPLIWNMXPLTDALKKMNKKIHLETSGAYELSGXWDWICLSPKKNKLPIPDLFEKANELKVIVYNKHDLIFAKQNAKYVEKDCVLFLQPEWSNKEKVMPLISKFILENPNWRLSLQTHKYXXIK

SEQ ID NO: 30110 - protein, 210 aa, Flavobacteriaceae bacterium
  misc_feature (1)..(210): tr|A0A5B7SQV8|A0A5B7SQV8_9FLAO 7-carboxy-7-deazaguanine synthase OS=Flavobacteriaceae bacterium F202Z8 OX=2583 587 GN=queE PE=3 SV=1
MLKTTSLDKVDAGTMLPLMEEFYTIQGEGFHKGTAAYFIRVGGCDVGCHWCDVKESWNAETHPPTAIEHIVENAAKYSDTIVVTGGEPLTWNMLPLTQALKAKNLKTHIETSGAYTLSGLWDWICLSPKKNKLPEGKIYDEAHELKVIVYNKHDFIFAEEQAAVTNENCILYLQPEWSVREKVTPLIVDYVMQNPKWKVSLQTHKYLNIP

SEQ ID NO: 30111 - protein, 210 aa, Flavobacteriales bacterium
  misc_feature (1)..(210): tr|A0A2M7VPV5|A0A2M7VPV5_9FLAO 7-carboxy-7-deazaguanine synthase OS=Flavobacteriales bacterium CG_4_10_14_0_2_ um_filter_35_18 OX=1973999 GN=queE PE=3 SV=1
MQNLKNTSEVTQGKLLPLMEAFYTIQGEGFYTGKAAYFIRIGGCDVGCHWCDVKESWNAKLHPLTQTDFIVANAKKHSDTAVITGGEPLIWNMDYLTNALNKIGVKTHLETSGSYPMSGNWNWICLSPKKTKLPLAQIYQKANELKMIISNKHDFKFAEEQAQKVNASCELFLQPEWSKRAEFNNLITDYVLANPKWKISLQTHKFLNIP

SEQ ID NO: 30112 - protein, 219 aa, Flavobacteriales bacterium
  misc_feature (1)..(219): tr|A0A2A5HNY0|A0A2A5HNY0_9FLAO 7-carboxy-7-deazaguanine synthase OS=Flavobacteriales bacterium OX=2021391 GN=q ueE PE=3 SV=1
MINILIKNKLSEEQQQRFVEGKMLPIMEEFYSVQGEGYNTGKAAYFIRVGGCDVGCHWCDVKESWNPDLHPLVDVQQIIENIIEIEAKAIVITGGEPLLYNLDYITNQLKAIGVEVFLETSGAHQSSGSWDWYCLSPKKNIPPLDDAYHYADELKVIIHNKNDFKWAEEHAAKVKKHCRLYLQPEWSSQEKMLPLIIEYVKKHTQWSISLQTHKYMHIP

SEQ ID NO: 30113 - protein, 197 aa, Flavobacteriia bacterium
  misc_feature (1)..(197): tr|A0A432IET4|A0A432IET4_9BACT 7-carboxy-7-deazaguanine synthase OS=Flavobacteriia bacterium OX=2044941 GN=que E PE=3 SV=1
MVLPFMEEFYSIQGEGFHTGKAAYFIRIGGCDVGCHWCDVKESWNPDLHPATSTDQVVKNAKKYAKTVVVTGGEPLTWNMDYLTKKLHEEQLKIHIETSGSYDISGEWDWICLSPKRTKLPKKKIYGLADELKIIINTKQDLIFAEEQAKKVTGSCELFLQPEWSKREKMIPVIIDYVLKYPKWKISLQTHKYLHIP

SEQ ID NO: 30114 - protein, 205 aa, Flavobacteriia bacterium
  misc_feature (1)..(205): tr|A0A1Q3ZHB5|A0A1Q3ZHB5_9BACT 7-carboxy-7-deazaguanine synthase OS=Flavobacteriia bacterium 40-80 OX=1895763 GN=queE PE=3 SV=1
MIEKKHPATFPVMEQFYTLQGEGFYSGRAAYFVRLGGCDVGCVWCDVKESWDAAAHPEKSIAEILEDIEACNADFTVITGGEPAMYDLTELTDTLHEKNIEVAIETSGCYVLNGAIDWYCFSPKKFKKPLQDAYDKANELKVVIYHKSDLKWAEEHAALVNSNCFLYLQPEWSKREQLLPLIIEYIKLNPKWKISLQTHKYMDIP

SEQ ID NO: 30115 - protein, 210 aa, Flavobacterium aciduliphilum
  misc_feature (1)..(210): tr|A0A328YFW8|A0A328YFW8_9FLAO 7-carboxy-7-deazaguanine synthase OS=Flavobacterium aciduliphilum OX=1101402 GN =queE PE=3 SV=1
MLTKEIQIAVEKGTFLPLMEEFYTIQGEGYYTGTAAYFIRIGGCDVGCHWCDVKESWNAALHPPTAIETIVDHAKALADTVVVTGGEPLTWDMNPLTDLLKTAGLRVHIETSGCYDVTGTWDWFCLSPKKNKLPVASAYEIADELKMIIYNKHDFIFAEEQAAKVNPNARLYLQPEWSKKEEMTPLIVDYVMKHPKWKVSLQTHKYLNIP

SEQ ID NO: 30116 - protein, 210 aa, Flavobacterium akiainvivens
  misc_feature (1)..(210): tr|A0A0M9VJ96|A0A0M9VJ96_9FLAO 7-carboxy-7-deazaguanine synthase OS=Flavobacterium akiainvivens OX=1202724 GN= queE PE=3 SV=1
MLRKEVQVDVEKGVMLPLMEEFYTIQGEGYHTGTAAYFIRVGGCDVGCHWCDVKESWNADLHPPTHIDTIVQHATQQAKTIVITGGEPLTWDMGPLTGALKDKGMRVHIETSGAYPLSGTWDWICLSPKKTKLPVDDVYAHAHELKCIIHNKHDFIFAEEQAAKVNGNAILFLQPEWSRREEVTPLIVNYVMANPKWRVSLQTHKYLNIP

SEQ ID NO: 30117 - protein, 210 aa, Flavobacterium album
  misc_feature (1)..(210): tr|A0A2S1QU55|A0A2S1QU55_9FLAO 7-carboxy-7-deazaguanine synthase OS=Flavobacterium album OX=2175091 GN=queE PE =3 SV=1
MLNKEIQMEVEKGEMLPLMEEFYTIQGEGYHTGTAAYFIRVGGCDVGCHWCDVKESWNAALHPPTSTDTIVANAKQYAKTIVITGGEPLTWDMGPLTSKLKAEGMKTHIETSGAYSLSGTWDWICLSPKKTKLPTYTVYAHAHELKVIIHNRHDFIFAEEQAAKVNGNAILFLQPEWSKKEEMTPLIVDYVMANPKWRVSLQTHKYLNIP

SEQ ID NO: 30118 - protein, 210 aa, Flavobacterium alvei
  misc_feature (1)..(210): tr|A0A2S5AE36|A0A2S5AE36_9FLAO 7-carboxy-7-deazaguanine synthase OS=Flavobacterium alvei OX=2080416 GN=queE PE =3 SV=1
MLSKEIQLEVNKGAMLPLMEEFYTIQGEGFHTGTAAYFIRIGGCDVGCHWCDVKESWNAELHPPTSTDLIVANASKYADTVVVTGGEPLTWDMTLLTQKLKENNRKVHIETSGAYPLSGTWDWICLSPKKNKLPTQTVYDKAHELKVIIYNKHDFIFAEEQAALVNDNAILFLQPEWSKKEEMTPLIVDYVMNNPKWRVSLQTHKYLNIP

SEQ ID NO: 30119 - protein, 210 aa, Flavobacterium anhuiense
  misc_feature (1)..(210): tr|A0A1G5K8Q5|A0A1G5K8Q5_9FLAO 7-carboxy-7-deazaguanine synthase OS=Flavobacterium anhuiense OX=459526 GN=queE PE=3 SV=1
MLPKEIQLEVNKGAMLPLMEEFYTIQGEGSHTGRAAYFIRIGGCDVGCHWCDVKESWNAEIHPPTKVDLIVENAAKYADTVVVTGGEPLSWDMTLLTERLKEKNLKVHIETSGAFPLSGTWDWICLSPKKNKLPTQTVYDNAHELKVIIYNKHDFIFAEEQAELVNDNAILFLQPEWSKKEEMTPLIVDYVMNNPKWRVSLQTHKYLNIP

SEQ ID NO: 30120 - protein, 210 aa, Flavobacterium aquaticum
  misc_feature (1)..(210): tr|A0A327YS58|A0A327YS58_9FLAO 7-carboxy-7-deazaguanine synthase OS=Flavobacterium aquaticum OX=1236486 GN=que E PE=3 SV=1
MLQKEVQLAVEKGEMLPLMEEFYTIQGEGYHTGTAAYFIRIGGCDVGCHWCDVKESWNAELHPPTNTDVIVANAKKYADTVVVTGGEPLTWDMTLLTSKLKSQNLKVHIETSGAYEVSGTWDWFCLSPKKNKLPVQSAYDIANELKVIIYNKHDFIFAEEQAAKVNPKAILFLQPEWSKKEEMTPLIVDYVMNNPKWRVSLQTHKYLNIP

SEQ ID NO: 30121 - protein, 210 aa, Flavobacterium aquatile
  misc_feature (1)..(210): tr|A0A095STK0|A0A095STK0_9FLAO 7-carboxy-7-deazaguanine synthase OS=Flavobacterium aquatile LMG 4008 = ATCC 11 947 OX=1453498 GN=queE PE=3 SV=1
MLEKNIQIAVDKGEMLPLMEEFYTIQGEGFHTGTAAYFIRIGGCDVGCHWCDVKESWNAELHPPTSTDLIVSNAKKYADTVVITGGEPLTWDMSLLTQKLKNQNLKVHIETSGCYPVTGTWDWFCLSPKKNKLPVDDAYAIAHELKVIIYNKHDFIFAEEQAEKVNKNAILFLQPEWSKKEEMTPLIVDYVMNNPKWRVSLQTHKYLNIP

SEQ ID NO: 30122 - protein, 210 aa, Flavobacterium aquicola
  misc_feature (1)..(210): tr|A0A3E0EDR1|A0A3E0EDR1_9FLAO 7-carboxy-7-deazaguanine synthase OS=Flavobacterium aquicola OX=1682742 GN=queE PE=3 SV=1
MLSKEVQLEVNKGTMLPLMEEFYTIQGEGFHTGTAAYFIRIGGCDVGCHWCDVKESWNAELHPPTQINLIVKNASKYADTIVITGGEPLMWDMDPLTQKLKDNNLKVHIETSGAYPLSGTWDWICLSPKKNKLPTQTVYDSANELKVIIYNKHDFIFAEEQALKVNPGAILFLQPEWSKKEEMTPQIVDYVMNNPKWRVSLQTHKYLNIP

SEQ ID NO: 30123 - protein, 210 aa, Flavobacterium aquidurense
  misc_feature (1)..(210): tr|A0A1H3TI17|A0A1H3TI17_9FLAO 7-carboxy-7-deazaguanine synthase OS=Flavobacterium aquidurense OX=362413 GN=qu eE PE=3 SV=1
MLSKEIQLEVNKGAMLPLMEEFYTIQGEGFHTGTAAYFIRIGGCDVGCHWCDVKESWNAELHPPTSVDLIVENASTYADTVVITGGEPLTWDMSLLTQRLKDKKLKVHIETSGAYPLSGTWDWICLSPKKNKLPTQTVYDNAHELKVIIYNKHDFIFAEEQAELVNDNAILFLQPEWSKKEEMTPLIVDYVMNNPKWRVSLQTHKYLNIP

SEQ ID NO: 30124 - protein, 210 aa, Flavobacterium aquidurense
  misc_feature (1)..(210): tr|A0A0Q0XWI1|A0A0Q0XWI1_9FLAO 7-carboxy-7-deazaguanine synthase OS=Flavobacterium aquidurense OX=362413 GN=qu eE PE=3 SV=1
MLSKEIQLEVNKGAMLPLMEEFYTIQGEGFHTGTAAYFIRIGGCDVGCHWCDVKESWNAELHPPTSVDLIVNNAATYADTVVITGGEPLTWDMSLLTQELKNRNLKVHIETSGAYPLTGTWDWICLSPKKNKLPTQTVYDNAHELKVIIYNKHDFIFAEEQAELVNGNAILFLQPEWSKKEEMTPLIVDYVMNNPKWRVSLQTHKYLNIP

SEQ ID NO: 30125 - protein, 210 aa, Flavobacterium araucananum
  misc_feature (1)..(210): tr|A0A227P5J7|A0A227P5J7_9FLAO 7-carboxy-7-deazaguanine synthase OS=Flavobacterium araucananum OX=946678 GN=qu eE PE=3 SV=1
MLSKEIQLEVNKGAMLPLMEEFYTIQGEGFHTGTAAYFIRIGGCDVGCHWCDVKESWNAELHPPTSVDLIVNNAASSADTVVITGGEPLTWDMSLLTQELKNRNLKVHIETSGAYPLTGTWDWICLSPKKNKLPTQTVYDNAHELKVIIYNKHDFIFAEEQAELVNDKAILFLQPEWSKKEEMTPLIVDYVMNNPKWRVSLQTHKYLNIP

SEQ ID NO: 30126 - protein, 210 aa, Flavobacterium arcticum
  misc_feature (1)..(210): tr|A0A345HCG3|A0A345HCG3_9FLAO 7-carboxy-7-deazaguanine synthase OS=Flavobacterium arcticum OX=1784713 GN=queE PE=3 SV=1
MLKKEEQIAVEKGELLPLMEEFYTIQGEGYHTGTAAYFIRVGGCDVGCHWCDVKESWNAELHPPTATNVIVENAAKYAKTIVITGGEPLTWDMNPLTARLKEKGLNVHIETSGAYPVTGNWDWFCLSPKKNKLPVQGAYDIAHELKVIIYNKHDFLFAEEQAERVNDKAILFLQPEWSKREQMTPLIVDYVMNNPKWRISLQTHKYLNIP

SEQ ID NO: 30127 - protein, 211 aa, Flavobacterium aurantiibacter
  misc_feature (1)..(211): tr|A0A255ZUA2|A0A255ZUA2_9FLAO 7-carboxy-7-deazaguanine synthase OS=Flavobacterium aurantiibacter OX=2023067 G N=queE PE=3 SV=1
MALPSEIQEQVNLGLQLPLMEAFYTVQGEGYHTGTPAYFIRVGGCDVGCHWCDVKESWNADLHPPTSVENIVTEAARFSKTIVVTGGEPLMWDMNPLTQALKNAGMQIHIETSGAYALTGNWDWICLSPKKTKLPVDEVYQKANELKVIVYNKNDFKFAEEQAAKTNPNAILFLQPEWSKRDEMTPQIVDYVMQNPKWRISLQTHKFLNIP

SEQ ID NO: 30128 - protein, 210 aa, Flavobacterium beibuense
  misc_feature (1)..(210): tr|A0A444WCH3|A0A444WCH3_9FLAO 7-carboxy-7-deazaguanine synthase OS=Flavobacterium beibuense OX=657326 GN=queE PE=3 SV=1
MLKKDIQIAVEKGEMLPLMEEFYTIQGEGYHTGTAAYFIRVGGCDVGCHWCDVKESWNADLHPPTHIESIVENANKYAKTIVITGGEPLTWDMGPLTQSLKEKGLRIHIETSGAYPLSGTWDWICLSPKKTKLPVEGVYEKAHELKVIIHNKHDFIFAEEQAAKTNKDAILFLQPEWSKKEEMTPLIVDYVMANPKWRVSLQTHKYLNIP

SEQ ID NO: 30129 - protein, 210 aa, Flavobacterium beibuense
  misc_feature (1)..(210): tr|A0A0A2LW66|A0A0A2LW66_9FLAO 7-carboxy-7-deazaguanine synthase OS=Flavobacterium beibuense F44-8 OX=1406840 GN=queE PE=3 SV=1
MLKKDIQIAVEKGVMLPLMEEFYTIQGEGYHTGTAAYFIRVGGCDVGCHWCDVKESWNADLHPPTQIEAIVENAAKYAKTIVITGGEPLTWDMGPLTAGLKEKGLKIHIETSGAYPLTGTWDWICLSPKKTKLPVDEVYNKAQELKVIIYNKHDFIFAEEQAAKVNKDAILFLQPEWSKKEEMTPLIVDYVMNNPKWRVSLQTHKYLNIP

SEQ ID NO: 30130 - protein, 210 aa, Flavobacterium branchiophilum
  misc_feature (1)..(210): tr|A0A2H3KCE5|A0A2H3KCE5_9FLAO 7-carboxy-7-deazaguanine synthase OS=Flavobacterium branchiophilum OX=55197 GN= queE PE=3 SV=1
MLSKESQTAIQKGELLPLMEAFYTIQGEGAHTGTAAYFIRIGGCDVGCHWCDVKESWNADLHPPTAITTIVEEAKLYSNTIVVTGGEPLMWNMDGLTQKLKSVGMTIHIETSGAYPLTGIWDWICLSPKKNKLPLPEVYEKANELKVIVHNKHDFEFAEAQALLVNSNATLFLQAEWSKKDMITPFIVDYVMNNPKWRISLQTHKYLNIP

SEQ ID NO: 30131 - protein, 210 aa, Flavobacterium branchiophilum
  misc_feature (1)..(210): tr|G2YZU9|G2YZU9_FLABF 7-carboxy-7-deazaguanine synthas e OS=Flavobacterium branchiophilum (strain FL-15) OX=10 34807 GN=ygcF PE=3 SV=1
MLSKESQTAIQKGELLPLMEAFYTIQGEGAHTGTAAYFIRIGGCDVGCHWCDVKESWNADLHPPTAITTIVEEAKLYSNTIVVTGGEPLMWNMDGLTQKLKRVGMTIHIETSGAYPLTGIWDWICLSPKKNKLPLPEVYEKANELKVIVHNKHDFEFAEAQALLVNSNATLFLQAEWSKKDMITPFIVDYVMNNPKWRISLQTHKYLNIP

SEQ ID NO: 30132 - protein, 231 aa, Flavobacterium caeni
  misc_feature (1)..(231): tr|A0A1G5JUL1|A0A1G5JUL1_9FLAO 7-carboxy-7-deazaguanine synthase OS=Flavobacterium caeni OX=490189 GN=queE PE= 3 SV=1
MPQFRSRFIVFVLTRIAYLCGMLTKEIQSAVEKGAMLPLMEEFYTIQGEGFHTGTAAYFIRIGGCDVGCHWCDVKESWNADLHPPTNVDQIVANARQYADTVVITGGEPLTWDMTLLTAKLKEQHMRIHIETSGAYPLTGTWDWICLSPKKTKLPTQTVYDKADELKVIIYNKHDFVFAEEQAQKVNPNAILFLQPEWSKKEEMTPLIVDYVMNNPKWRVSLQTHKYLNIP

SEQ ID NO: 30133 - protein, 210 aa, Flavobacterium cauense
  misc_feature (1)..(210): tr|V6S5L1|V6S5L1_9FLAO 7-carboxy-7-deazaguanine synthas e OS=Flavobacterium cauense R2A-7 OX=1341154 GN=queE PE =3 SV=1
MLKKEIQIAVEKGEMLPLMEEFYTIQGEGYHTGTAAYFIRIGGCDVGCHWCDVKESWNAELHPPTNTDVIVANAKKYAETVVVTGGEPLTWDMSVLTAKLKDQNLRVHIETSGAYPVSGTWDWFCLSPKKTKLPVAEAYEIAHELKVIIHNKHDFQFAEEQAAKVNENAILFLQPEWSKKEEMTPLIVDYVMQNPKWRVSLQTHKYLNIP

SEQ ID NO: 30134 - protein, 210 aa, Flavobacterium cheniae
  misc_feature (1)..(210): tr|A0A562KFH5|A0A562KFH5_9FLAO 7-carboxy-7-deazaguanine synthase OS=Flavobacterium cheniae OX=295428 GN=queE P E=3 SV=1
MLQKETQLAVEKGEMLPLMEEFYTIQGEGYHTGTAAYFIRIGGCDVGCHWCDVKESWNAELHPPTNTDIIVANAKKYADTVVVTGGEPLTWDMTLLTSKLKAQNLKVHIETSGAYEVSGTWDWFCLSPKKNKLPVQSAYDIANELKVIIYNKHDFIFAEEQAAKVNPNAILFLQPEWSKKEEMTPLIVDYVMNNPKWRVSLQTHKYLNIP

SEQ ID NO: 30135 - protein, 210 aa, Flavobacterium chilense
  misc_feature (1)..(210): tr|A0A1M7E5Q7|A0A1M7E5Q7_9FLAO 7-carboxy-7-deazaguanine synthase OS=Flavobacterium chilense OX=946677 GN=queE PE=3 SV=1
MLSKEIQLEVNKGAMLPLMEEFYTIQGEGFHTGTAAYFIRIGGCDVGCHWCDVKESWNAELHPPTSIDLIVDNASSQADTVVITGGEPLTWDMSLLTQELKNKNLKVHIETSGAYPLTGVWDWICLSPKKNKLPTQTVYDNAHELKVIIYNKHDFIFAEEQAELVNDKAILFLQPEWSKKEEMTPLIVDYVMNNPKWRVSLQTHKYLNIP

SEQ ID NO: 30136 - protein, 210 aa, Flavobacterium circumlabens
  misc_feature (1)..(210): tr|A0A4Y7U7P3|A0A4Y7U7P3_9FLAO 7-carboxy-7-deazaguanine synthase OS=Flavobacterium circumlabens OX=2133765 GN= queE PE=3 SV=1
MLAKEIQLEVNKGAMLPLMEEFYTIQGEGFHTGTAAYFIRIGGCDVGCHWCDVKESWNAELHPPTSVDLIVKNASVYADTVVITGGEPLTWDMTLLTQQLKDRNLKVHIETSGAYPLSGTWDWICLSPKKNKLPTQTVYDNAHELKVIIYNKHDFIFAEEQAELVNDNAILFLQPEWSKKEEMTPLIVDYVMNHPKWRVSLQTHKYLNIP

SEQ ID NO: 30137 - protein, 210 aa, Flavobacterium columnare
  misc_feature (1)..(210): tr|A0A2T4HCS5|A0A2T4HCS5_9FLAO 7-carboxy-7-deazaguanine synthase OS=Flavobacterium columnare OX=996 GN=queE PE =3 SV=1
MLSKEIQLAVNKGDMLPLMEEFYTIQGEGAYTGTAAYFVRIGGCDVGCHWCDVKESWNAELHPPTQTSIIVENAKKQANTVVVTGGEPLTWNMEPLTTKLKKAGLRVHIETSGAYPVTGEWDWFCLSPKKTKLPVQEAYNKAHELKIIIYNKHDFLFAEEQALKTNPNAKLYLQPEWSKKDEVLPLIIDYVMKNPKWKISLQTHKYLNIP

SEQ ID NO: 30138 - protein, 210 aa, Flavobacterium columnare
  misc_feature (1)..(210): tr|A0A2N9P9K9|A0A2N9P9K9_9FLAO 7-carboxy-7-deazaguanine synthase OS=Flavobacterium columnare OX=996 GN=queE PE =3 SV=1
MLSKEIQLAVNKGDMLPLMEEFYTIQGEGAYTGTAAYFVRIGGCDVGCHWCDVKESWNAELHPPTKTSVIVENAKKKANTVVVTGGEPLTWNMTPLTTKLKEAGLRVHIETSGAYPVTGEWDWFCLSPKKTKLPVQEAYEKAHELKIIIYNKHDFLFAEEQALKTNSNAKLYLQPEWSKKEEVLDLIINYVMENPKWKISLQTHKYLNIP

SEQ ID NO: 30139 - protein, 210 aa, Flavobacterium commune
  misc_feature (1)..(210): tr|A0A1D9P7Y4|A0A1D9P7Y4_9FLAO 7-carboxy-7-deazaguanine synthase OS=Flavobacterium commune OX=1306519 GN=queE PE=3 SV=1
MLSKEIQLEVNKGAMLPLMEEFYTIQGEGFHTGTAAYFIRIGGCDVGCHWCDVKESWNAELHPPTSIDHIVDNASKYADTVVITGGEPLTWDMSLLTSRLKDKNLKVHIETSGAYPLSGTWDWICLSPKKNKLPTETVYNAAHELKVIIHNKHDFIFAEEQAELVNHKAILFLQPEWSKKEEMTPLIVEYVMNNPKWRVSLQTHKYLNIP

SEQ ID NO: 30140 - protein, 210 aa, Flavobacterium crassostreae
  misc_feature (1)..(210): tr|A0A1B9DZM5|A0A1B9DZM5_9FLAO 7-carboxy-7-deazaguanine synthase OS=Flavobacterium crassostreae OX=1763534 GN= queE PE=3 SV=1
MLSKEIQLEVNKGAMLPLMEEFYTIQGEGYHTGTAAYFIRIGGCDVGCHWCDVKESWNAELHPPTAVDLIVNNASKYAETVVITGGEPLMWDMSLLTSKLKQNNRKVHIETSGAYPLSGTWDWICLSPKKNKLPTETVYQNAQELKVIIHNKHDFIFAEEQAELVQKNAILFLQPEWSKKEEMTPLIVDYVMKHPKWRVSLQTHKYLNIP

SEQ ID NO: 30141 - protein, 210 aa, Flavobacterium croceum
  misc_feature (1)..(210): tr|A0A2S4N553|A0A2S4N553_9FLAO 7-carboxy-7-deazaguanine synthase OS=Flavobacterium croceum DSM 17960 OX=112188 6 GN=queE PE=3 SV=1
MLHKEAQIAVENGTMLPLMEEFYTIQGEGYHTGTAAYFIRIGGCDVGCHWCDVKESWNATLHPPTHIETIVKNAKQYADIVVITGGEPLTWNMQPITHLLQYQNIKTHIETSGCYEVTGTWDWFCLSPKKNKLPVLSAYAIANELKVIIYNKHDFIFAEEQALLVNQDAILFLQPEWSKKDEMTPLIIDYVMKNPKWRISLQTHKYLNIP

SEQ ID NO: 30142 - protein, 210 aa, Flavobacterium crocinum
  misc_feature (1)..(210): tr|A0A2S1YGI7|A0A2S1YGI7_9FLAO 7-carboxy-7-deazaguanine synthase OS=Flavobacterium crocinum OX=2183896 GN=queE PE=3 SV=1
MLAKEIQLEVNKGAMLPLMEEFYTIQGEGSHTGRAAYFIRIGGCDVGCHWCDVKESWNAEIHPPTSIDLIVENAAKYADTVVVTGGEPLSWDMTLLTQRLKDRNLKVHIETSGAFPLSGTWDWICLSPKKNKLPTKTVYDNAHELKVIIYNKHDFIFAEEQAELVNDNAILFLQPEWSKKEEMTPLIVDYVMNNPKWRVSLQTHKYLNIP

SEQ ID NO: 30143 - protein, 210 aa, Flavobacterium cucumis
  misc_feature (1)..(210): tr|A0A1M7ZW54|A0A1M7ZW54_9FLAO 7-carboxy-7-deazaguanine synthase OS=Flavobacterium cucumis OX=416016 GN=queE P E=3 SV=1
MLQKEVQLAVEKGEMLPLMEEFYTIQGEGYHTGTAAYFIRIGGCDVGCHWCDVKESWNAELHPPTNTDLIVANAKKYADTVVVTGGEPLTWDMTLLTSKLKVQNLKVHIETSGAYEVSGTWDWFCLSPKKNKLPVQSAYDIANELKVIIYNKHDFIFAEEQAAKVNPNAILFLQPEWSKKEEMTPLIVDYVMNNPKWRVSLQTHKYLNIP

SEQ ID NO: 30144 - protein, 210 aa, Flavobacterium cupreum
  misc_feature (1)..(210): tr|A0A434A1B9|A0A434A1B9_9FLAO 7-carboxy-7-deazaguanine synthase OS=Flavobacterium cupreum OX=2133766 GN=queE PE=3 SV=1
MLAKEIQLEVNKGAMLPLMEEFYTIQGEGFHTGTAAYFIRIGGCDVGCHWCDVKESWNAELHPPTSVDLIVKNASAYADTVVITGGEPLTWDMTLLTQQLKDRNLKVHIETSGAYPLSGTWDWICLSPKKNKLPTQTVYDNAHELKVIIYNKHDFIFAEEQAELVNDNAILFLQPEWSKKEEMTPLIVDYVMNNPKWRVSLQTHKYLNIP

SEQ ID NO: 30145 - protein, 210 aa, Flavobacterium cutihirudinis
  misc_feature (1)..(210): tr|A0A3D9FUR2|A0A3D9FUR2_9FLAO 7-carboxy-7-deazaguanine synthase OS=Flavobacterium cutihirudinis OX=1265740 GN =queE PE=3 SV=1
MLSKEIQLEVNKGAMLPLMEEFYTIQGEGFHTGTAAYFIRIGGCDVGCHWCDVKESWNAELHPPTSIDLIVKNASTYADTVVVTGGEPLSWDMSLLTQKLKDEKLKVHIETSGAYPLSGTWDWICLSPKKNKLPTQTVYDNAHELKVIIHNKHDFIFAEEQAELVNDKAILFLQPEWSKKEEMTPLIVDYVMNNPKWRVSLQTHKYLNIP

SEQ ID NO: 30146 - protein, 210 aa, Flavobacterium cyanobacteriorum
  misc_feature (1)..(210): tr|A0A255ZDI2|A0A255ZDI2_9FLAO 7-carboxy-7-deazaguanine synthase OS=Flavobacterium cyanobacteriorum OX=2022802 GN=queE PE=3 SV=1
MLKEDIQAAVDRGELLPLMEEFYTIQGEGFHTGTAAYFIRVGGCDVGCHWCDVKESWNAELHPPTAIDAIAGNAARFSKTVVVTGGEPLMWDMAPLTSLLRAQGMKVHIETSGAYPLTGYWDWICLSPKKTKLPVGDIYGHAHELKVIIHNRHDFVFAEEQAAKVNSNAVLFLQPEWSKREQVTPLIVDYVMNNPKWRVSLQTHKYLNIP

SEQ ID NO: 30147 - protein, 210 aa, Flavobacterium daejeonense
  misc_feature (1)..(210): tr|A0A0Q0RZA6|A0A0Q0RZA6_9FLAO 7-carboxy-7-deazaguanine synthase OS=Flavobacterium daejeonense OX=350893 GN=qu eE PE=3 SV=1
MLAKEIQLEVNKGAMLPLMEEFYTIQGEGFHTGTAAYFIRIGGCDVGCHWCDVKESWNAELHPPTKINQIVDNAAKYADTIVITGGEPLMWDMGLLTSSLKEKNLKVHIETSGAYPLSGTWDWICLSPKKNKLPTETVYANADELKVIIYNKHDFIFAEEQAEKVNKNAKLFLQPEWSKKEEMTPLIVDYVMNNPKWRVSLQTHKYLNIP

SEQ ID NO: 30148 - protein, 210 aa, Flavobacterium dankookense
  misc_feature (1)..(210): tr|A0A4R6QA17|A0A4R6QA17_9FLAO 7-carboxy-7-deazaguanine synthase OS=Flavobacterium dankookense OX=706186 GN=qu eE PE=3 SV=1
MIAKEIQLAVDKGEMLPLMEEFYTIQGEGFHTGTAAYFIRIGGCDVGCHWCDVKESWNADLHPPTATDLIVENAAKYADTVVVTGGEPLTWDMTLLTQKLKSKNLRVHIETSGAYPVSGTWDWFCLSPKKNKLPVNSAYEIADELKVIIYNKHDFQFAEEQAAKVNSKAILFLQPEWSKKEEMTPLIVDYVMNNPKWRVSLQTHKYLNIP

SEQ ID NO: 30149 - protein, 210 aa, Flavobacterium defluvii
  misc_feature (1)..(210): tr|A0A1M5M7J1|A0A1M5M7J1_9FLAO 7-carboxy-7-deazaguanine synthase OS=Flavobacterium defluvii OX=370979 GN=queE PE=3 SV=1
MLPKEIQLEVNKGAMLPLMEEFYTIQGEGFHTGTAAYFIRIGGCDVGCHWCDVKESWNAELHPPTNIDVIVNNASSYANTVVVTGGEPLTWDMTLLTQQLKDKNLKVHIETSGAYPLTGTWDWICLSPKKNKLPTKDVYDNADELKVIIYNKHDFIFAEEQAELVNDNAILFLQPEWSKKEEMTPLIVDYVMNNPKWRVSLQTHKYLNIP

SEQ ID NO: 30150 - protein, 210 aa, Flavobacterium degerlachei
  misc_feature (1)..(210): tr|A0A1H2XSV9|A0A1H2XSV9_9FLAO 7-carboxy-7-deazaguanine synthase OS=Flavobacterium degerlachei OX=229203 GN=qu eE PE=3 SV=1
MLSKEVQLEVNKGAMLPLMEEFYTIQGEGFHTGTAAYFVRIGGCDVGCHWCDVKESWNASLHPPTSVDLIVANASKYAETVVVTGGEPLMWDMTLLTQMLKDNQRKVHIETSGAYDLTGTWDWICLSPKKNKLPTKTVYDKAHELKVIIFNKHDFIFAEEQAELVNDDAILFLQPEWSKKEEMTPLIVDYVMNNPKWRVSLQTHKYLNIP

SEQ ID NO: 30151 - protein, 210 aa, Flavobacterium endophyticum
  misc_feature (1)..(210): tr|A0A495MPW1|A0A495MPW1_9FLAO 7-carboxy-7-deazaguanine synthase OS=Flavobacterium endophyticum OX=1540163 GN= queE PE=3 SV=1
MLKKELQTAVEKGEMLPLMEEFYTIQGEGYHTGTAAYFVRIGGCDVGCHWCDVKESWNAEVHPPTAIDAIVENAKKYADTVVVTGGEPLTWDMGPLTQKLKEKNLRIHIETSGAYPLSGDWDWITLSPKKNKLPTQTVYDNASELKVIIYNKHDFIFAEEQAEKVNKNAILFLQPEWSKKEAMTPLIVDYVMNNPKWRVSLQTHKYLNIP

SEQ ID NO: 30152 - protein, 210 aa, Flavobacterium enshiense
  misc_feature (1)..(210): tr|V6S310|V6S310_9FLAO 7-carboxy-7-deazaguanine synthas e OS=Flavobacterium enshiense DK69 OX=1107311 GN=queE P E=3 SV=1
MLKKEIQIAVEKGEMLPLMEEFYTIQGEGYHTGTAAYFIRIGGCDVGCHWCDVKESWNAELHPPTTTEVIVANAKKYAETVVVTGGEPLTWDMTALTSKLKEQNLRVHIESSGAYPVTGTWDWFCLSPKKTKLPVDDAYEIAHELKVIIHNKHDFIFAEEQAAKVNENAILFLQPEWSKKEEMTPLIVDYVMNNPKWRVSLQTHKYLNIP

SEQ ID NO: 30153 - protein, 210 aa, Flavobacterium faecale
  misc_feature (1)..(210): tr|A0A2S1LC19|A0A2S1LC19_9FLAO 7-carboxy-7-deazaguanine synthase OS=Flavobacterium faecale OX=1355330 GN=queE PE=3 SV=1
MLSKEVQLEVNRGGMLPLMEEFYTIQGEGYHTGTAAYFIRIGGCDVGCHWCDVKESWNAELHPPTAVDTIVENASKYSETVVVTGGEPLSWDMSLLTQKLKENNRKTHIETSGAYPLSGTWDWICLSPKKNKLPTETVYAAAHELKVIIHNKHDFIFAEEQAQLVNNNAILFLQPEWSKKEEMTELIVDYVMKNPQWRVSLQTHKYLNIP

SEQ ID NO: 30154 - protein, 210 aa, Flavobacterium flevense
  misc_feature (1)..(210): tr|A0A4Y4AZ59|A0A4Y4AZ59_9FLAO 7-carboxy-7-deazaguanine synthase OS=Flavobacterium flevense OX=983 GN=queE PE= 3 SV=1
MLSKEIQLEVNKGAMLPLMEEFYTIQGEGFHTGTAAYFIRIGGCDVGCHWCDVKESWNAELHPPTSIDQIVDNADKYADTIVITGGEPLMWDMSLLTNKLKNRNLRVHIETSGAYPLSGTWDWICLSPKKNKLPTETVYNAAHELKVIIHNKHDFIFAEEQAEKVNKNAILFLQPEWSKKEEMTPLIVDYVMNNPKWRVSLQTHKYLNIP

SEQ ID NO: 30155 - protein, 210 aa, Flavobacterium fluvii
  misc_feature (1)..(210): tr|A0A1M5DNL2|A0A1M5DNL2_9FLAO 7-carboxy-7-deazaguanine synthase OS=Flavobacterium fluvii OX=468056 GN=queE PE =3 SV=1
MLSKEIQLEVNKGAMLPLMEEFYTIQGEGFHTGTAAYFIRIGGCDVGCHWCDVKESWNAELHPPTSIDLIVANASKYADTVVVTGGEPLTWDMTLLTQKLKDQNLKVHIETSGAYELSGQWDWICLSPKKNKLPTQTVYDKAHELKVIIYNKHDFVFAEEQAEKVNKNAILFLQPEWSKKEEMTPLIVDYVMNNPKWRVSLQTHKYLNIP

SEQ ID NO: 30156 - protein, 210 aa, Flavobacterium fontis
  misc_feature (1)..(210): tr|A0A1M5B606|A0A1M5B606_9FLAO 7-carboxy-7-deazaguanine synthase OS=Flavobacterium fontis OX=1124188 GN=queE P E=3 SV=1
MLTQEVQKAVDRGELLPLMEEFYTIQGEGFHTGTAAYFIRIGGCDVGCHWCDVKESWNADLHPPTAVEHIVANAQKYADTVVVTGGEPLTWDMTLLTASLKEAQLRVHIETSGSYPVTGHWDWFCLSPKKNRLPVPEAYQAADELKVIIHNKHDFIFAEEQAALVNPKAILFLQPEWSKREQMTPLIVEYVMQHPKWRVSLQTHKYLNIP

SEQ ID NO: 30157 - protein, 210 aa, Flavobacterium frigidimaris
  misc_feature (1)..(210): tr|A0A1M5TYG3|A0A1M5TYG3_FLAFR 7-carboxy-7-deazaguanine synthase OS=Flavobacterium frigidimaris OX=262320 GN=q ueE PE=3 SV=1
MLSKEIQLEVNKGAMLPLMEEFYTIQGEGFHTGTAAYFIRIGGCDVGCHWCDVKESWNAELHPPTSVDLIVNNAASSADTVVITGGEPLTWDMSLLTQELKNRNLKVHIETSGAYPLTGIWDWICLSPKKNKLPTQTVYDNAHELKVIIYNKHDFIFAEEQAELVNDNAILFLQPEWSKKEEMTPLIVDYVMNNPKWRVSLQTHKYLNIP

SEQ ID NO: 30158 - protein, 210 aa, Flavobacterium frigoris
  misc_feature (1)..(210): tr|H7FMS0|H7FMS0_FLAFP 7-carboxy-7-deazaguanine synthas e OS=Flavobacterium frigoris (strain PS1) OX=1086011 GN =queE PE=3 SV=1
MLSKEVQLEVNKGAMLPLMEEFYTIQGEGFHTGTAAYFVRIGGCDVGCHWCDVKESWNAALHPPTSVDLIVANASKYAETVVVTGGEPLMWDMTLLTQMLKDNQRKVHVETSGAYDLTGTWDWICLSPKKNKLPTKTVYDKAHELKVIIFNKHDFIFAEEQAELVNDDAILFLQPEWSKKEEMTPLIVDYVMNNPKWRVSLQTHKYLNIP

SEQ ID NO: 30159 - protein, 211 aa, Flavobacterium frigoris
  misc_feature (1)..(211): tr|A0A1H9E2F9|A0A1H9E2F9_FLAFI 7-carboxy-7-deazaguanine synthase OS=Flavobacterium frigoris OX=229204 GN=queE PE=3 SV=1
MMLSKEIQLEVNKGAMLPLMEEFYTIQGEGFHTGTAAYFVRIGGCDVGCHWCDVKESWNAELHPPSSIDQIVANAKKYGETVVVTGGEPLMWDMTLLTQTLKDNGRKVHIETSGAYPLTGMWDWICLSPKKNKLPTQTVYDNAHELKVIIYNKHDFIFAEEQAELVNDDAILFLQPEWSKKEEMTPLIVDYVMNNPKWRVSLQTHKYLNIP

SEQ ID NO: 30160 - protein, 210 aa, Flavobacterium fryxellicola
  misc_feature (1)..(210): tr|A0A167TY20|A0A167TY20_9FLAO 7-carboxy-7-deazaguanine synthase OS=Flavobacterium fryxellicola OX=249352 GN=q ueE PE=3 SV=1
MLSKEIQLEVNKGAMLPLMEEFYTIQGEGFHTGTAAYFIRIGGCDVGCHWCDVKESWNAALHPPTSVDLIVENANNYANTVVVTGGEPLMWDMTLLTQKLKEQNLKVHIETSGAYPLSGTWDWICLSPKKNKLPTETVYDNAHELKVIIFNKHDFIFAEEQAEKVNPKAILFLQPEWSKKEEMTPLIVDYVMKNPKWRVSLQTHKYLNIP

SEQ ID NO: 30161 - protein, 210 aa, Flavobacterium gillisiae
  misc_feature (1)..(210): tr|A0A1H4CF79|A0A1H4CF79_9FLAO 7-carboxy-7-deazaguanine synthase OS=Flavobacterium gillisiae OX=150146 GN=queE PE=3 SV=1
MLSKEIQLEVNKGAMLPLMEEFYTIQGEGFHTGTAAYFVRIGGCDVGCHWCDVKESWNAELHPPSSITQIVDNAKKHAETVVVTGGEPLMWDMTLLTQALKDNGRKVHIETSGAYPLSGAWDWICLSPKKNKLPTETVYDNAHELKVIIHNKHDFIFAEEQAELVNDNAILFLQPEWSKKEEMTPLIVEYVMNNPKWRVSLQTHKYLNIP

SEQ ID NO: 30162 - protein, 210 aa, Flavobacterium gilvum
  misc_feature (1)..(210): tr|A0A085EEE6|A0A085EEE6_9FLAO 7-carboxy-7-deazaguanine synthase OS=Flavobacterium gilvum OX=1492737 GN=queE P E=3 SV=1
MLSKEIQLEVNKGIMLPLMEEFYTIQGEGFHTGTAAYFIRVGGCDVGCHWCDVKESWNAESHPPTNIDLIVDNATKYANTIVVTGGEPLMWDMGPLTQKLKQNNLKVHIETSGAYPLSGTWDWICLSPKKNKLPTQTAYDNADELKVIIYNKHDFIFAEEQAEKVNSKAILFLQPEWSKKEEMTPLIVDYVMNNPKWRVSLQTHKYLNIP

SEQ ID NO: 30163 - protein, 210 aa, Flavobacterium glaciei
  misc_feature (1)..(210): tr|A0A562PLH4|A0A562PLH4_9FLAO 7-carboxy-7-deazaguanine synthase OS=Flavobacterium glaciei OX=386300 GN=queE P E=3 SV=1
MLSKEIQLEVNKGAMLPLMEEFFTIQGEGFHTGTAAYFIRIGGCDVGCHWCDVKESWNAELHPPTGIDLIVSNASKYSETVVVTGGEPLMWDMTLLTQKLKENNRKVHIETSGAYPLTGTWDWICLSPKKNKLPTKTVYDNAHELKVIIYNKHDFIFAEEQAEKVNGEAILFLQPEWSKKEEMTPLIVDYVMNNPKWRVSLQTHKYLNIP

SEQ ID NO: 30164 - protein, 210 aa, Flavobacterium glycines
  misc_feature (1)..(210): tr|A0A1B9DN65|A0A1B9DN65_9FLAO 7-carboxy-7-deazaguanine synthase OS=Flavobacterium glycines OX=551990 GN=queE PE=3 SV=1
MLSKEIQLEVNKGAMLPLMEEFYTIQGEGFHTGTAAYFIRIGGCDVGCHWCDVKESWNAELHPPTAVSQIVDNASKYADTVVVTGGEPLTWDMSLLTSKLKEKNMKVHIETSGAYPLSGTWDWICLSPKKNKLPTDTVYSAANELKVIIYNKHDFIFAEEQAELVNDNAILFLQPEWSKKEEMTPLIVDYVMNNPKWRVSLQTHKYLNIP

SEQ ID NO: 30165 - protein, 210 aa, Flavobacterium granuli
  misc_feature (1)..(210): tr|A0A1M5PSE7|A0A1M5PSE7_9FLAO 7-carboxy-7-deazaguanine synthase OS=Flavobacterium granuli OX=280093 GN=queE P E=3 SV=1
MLSKEIQLEVNKGAMLPLMEEFYTIQGEGFHTGTAAYFIRIGGCDVGCHWCDVKESWNSELHPPTAVDRIVDNASKYSETVVVTGGEPLMWDMNLLTQKLKENNRKVHIETSGAYPLSGTWDWICLSPKKNKLPTQTVYDSAQELKVIIHNKHDFIFAEEQAELVNDNAILFLQPEWSKKEEMTPMIVDYVMNNPKWRVSLQTHKYLNIP

SEQ ID NO: 30166 - protein, 210 aa, Flavobacterium haoranii
  misc_feature (1)..(210): tr|A0A1M6DCE9|A0A1M6DCE9_9FLAO 7-carboxy-7-deazaguanine synthase OS=Flavobacterium haoranii OX=683124 GN=queE PE=3 SV=1
MLKKEIQLAVDKGEMLPLMEEFYTIQGEGYHTGTAAYFIRIGGCDVGCHWCDVKESWNADLHPPTSTEQIVANAKQYAETVVVTGGEPLTWDMEVLTTRLKNAGLRVHIETSGAYKVTGNWDWFCLSPKKTKLPVQEAYDIAHELKVIIYNKHDFQFAEEQAAKINKNAILFLQPEWSKKEEMTPLIIDYVMKNPKWRISLQTHKYLNIP

SEQ ID NO: 30167 - protein, 210 aa, Flavobacterium hercynium
  misc_feature (1)..(210): tr|A0A226GYM4|A0A226GYM4_9FLAO 7-carboxy-7-deazaguanine synthase OS=Flavobacterium hercynium OX=387094 GN=queE PE=3 SV=1
MLAKEIQLEVNKGAMLPLMEEFYTIQGEGFHTGRAAYFIRIGGCDVGCHWCDVKESWNAELHPPTSIDLIVKNASTYADTVVVTGGEPLSWDMTLLTKELKDKNLKVHIETSGAYPLSGTWDWICLSPKKNKLPTQTVYDNAHELKVIIHNKHDFIFAEEQAEQVNKDAILFLQPEWSKKEEMTPLIVDYVMNNPKWRVSLQTHKYLNIP

SEQ ID NO: 30168 - protein, 210 aa, Flavobacterium hibernum
  misc_feature (1)..(210): tr|A0A0D0ETW9|A0A0D0ETW9_9FLAO 7-carboxy-7-deazaguanine synthase OS=Flavobacterium hibernum OX=37752 GN=queE P E=3 SV=1
MLSKEIQLEVNKGAMLPLMEEFYTIQGEGFHTGTAAYFIRIGGCDVGCHWCDVKESWNAELHPPTSVDLIVKNASSQADTVVITGGEPLTWDMSLLTQELKNKNLRVHIETSGAYPLTGIWDWICLSPKKNKLPTQTVYDNAHELKVIIYNKHDFIFAEEQAELVNDNAILFLQPEWSKKEEMTPLIVDYVMNNPKWRVSLQTHKYLNIP

SEQ ID NO: 30169 - protein, 210 aa, Flavobacterium hydatis
  misc_feature (1)..(210): tr|A0A086AU17|A0A086AU17_FLAHY 7-carboxy-7-deazaguanine synthase OS=Flavobacterium hydatis OX=991 GN=queE PE=3 SV=1
MLSKEIQLEVNKGAMLPLMEEFYTIQGEGFHTGTAAYFIRIGGCDVGCHWCDVKESWNAELHPPTSVDLIVENASKYADTVVVTGGEPLTWDMTVLTTELKNKNLKVHIETSGAYPLTGTWDWICLSPKKNKLPTQTVYDNAHELKVIIYNKHDFIFAEEQAELVNGNAILFLQPEWSKKEEMTPLIVEYVMNNPKWRVSLQTHKYLNIP

SEQ ID NO: 30170 - protein, 224 aa, Flavobacterium indicum
  misc_feature (1)..(224): tr|H8XSL4|H8XSL4_FLAIG 7-carboxy-7-deazaguanine synthas e OS=Flavobacterium indicum (strain DSM 17447 / CIP 109 464 / GPTSA100-9) OX=1094466 GN=ygcF PE=3 SV=1
MFNFDVSLQTIFKRMLQKEIQLAVDKGEMLPLMEEFYTIQGEGFYTGTAAYFIRVGGCDVGCHWCDVKESWNADLHPPTEISTIVSNAKQYAETVVVTGGEPLSWNMLPLTNALKEENLRVHIETSGAYEVTGSWDWFCLSPKKTKLPTQSAFELADELKVIIHNKHDFMFAEEQATKVNPKAILFLQPEWSKKEEMTPLIVDYVMNNPKWRVSLQTHKYLNIP

SEQ ID NO: 30171 - protein, 210 aa, Flavobacterium johnsoniae
  misc_feature (1)..(210): tr|A5FMQ1|A5FMQ1_FLAJ1 7-carboxy-7-deazaguanine synthas e OS=Flavobacterium johnsoniae (strain ATCC 17061 / DSM 2064 / UW101) OX=376686 GN=queE PE=3 SV=1
MLPKEIQLEVNKGAMLPLMEEFYTIQGEGFHTGTAAYFIRIGGCDVGCHWCDVKESWNAELHPPTNIDIIVNNASSYANTVVVTGGEPLTWDMTLLTQQLKDKNLKVHIETSGAYPLSGTWDWICLSPKKNKLPTPDVYANAHELKVIIYNKHDFIFAEEQAELVNDNAILFLQPEWSKKEEMTPLIVDYVMNNPKWRVSLQTHKYLNIP

SEQ ID NO: 30172 - protein, 210 aa, Flavobacterium johnsoniae
  misc_feature (1)..(210): tr|A0A1M5T6F4|A0A1M5T6F4_FLAJO 7-carboxy-7-deazaguanine synthase OS=Flavobacterium johnsoniae OX=986 GN=queE P E=3 SV=1
MLPKEIQLEVNKGAMLPLMEEFYTIQGEGFHTGTAAYFIRIGGCDVGCHWCDVKESWNAELHPPTNIDVIVNNASSYANTVVVTGGEPLTWDMTLLTQQLKDKNLKVHIETSGAYPLSGTWDWICLSPKKNKLPTPDVYANAHELKVIIYNKHDFIFAEEQAELVNDNAILFLQPEWSKKEEMTPLIVDYVMNNPKWRVSLQTHKYLNIP

SEQ ID NO: 30173 - protein, 210 aa, Flavobacterium kingsejongi
  misc_feature (1)..(210): tr|A0A2S1LNB9|A0A2S1LNB9_9FLAO 7-carboxy-7-deazaguanine synthase OS=Flavobacterium kingsejongi OX=1678728 GN=q ueE PE=3 SV=1
MIMEDVSQLVDKGEMLPLMEEFYTIQGEGYHTGTAAYFIRLGGCYVGCHWCDVKESWNAELHPPTATSVIVENAKKNADTVVVTGGEPLMWDMTSLTRQLKEKNMRVHIETSGAYVLSGTWDWICLSPKKNKLPTQTVYDNAHELKVIIHNKHDFIFAEEQAALVNDGAILFLQPEWSKKEQMTPLIVEYVMSNPKWRVSLQTHKYLNIP

SEQ ID NO: 30174 - protein, 210 aa, Flavobacterium lacus
  misc_feature (1)..(210): tr|A0A328WU48|A0A328WU48_9FLAO 7-carboxy-7-deazaguanine synthase OS=Flavobacterium lacus OX=1353778 GN=queE PE =3 SV=1
MLQKEIQLAVEKGEMLPLMEEFYTIQGEGYHTGTAAYFIRIGGCDVGCHWCDVKESWNAELHPPTQTDVIVEHAKAYADTVVVTGGEPLTWDMSVLTQKLKEAQLKIHIETSGCYDVTGQWDWFCLSPKKNKLPVQSAYDMANELKVIIYNKHDFIFAEEQAVKVNANAILFLQPEWSKKEEMTPLIVDYVMKNPKWRVSLQTHKYLNIP

SEQ ID NO: 30175 - protein, 210 aa, Flavobacterium limicola
  misc_feature (1)..(210): tr|A0A495S3J7|A0A495S3J7_9FLAO 7-carboxy-7-deazaguanine synthase OS=Flavobacterium limicola OX=180441 GN=queE PE=3 SV=1
MLSKEIQLEVNKGAMLPLMEEFYTIQGEGFHTGTAAYFIRIGGCDVGCHWCDVKESWNAELHPPTGIDLIVENASKYSETVVITGGEPLMWDMNLLTQKLKVNNRRVHIETSGAYPLTGTWDWICLSPKKNKLPTDTVYDNAHELKVIIYNKHDFIFAEEQAEKVNSNAILFLQPEWSKKEEMTPLIVDYVMNNPKWRVSLQTHKYLNIP

SEQ ID NO: 30176 - protein, 217 aa, Flavobacterium limnosediminis
  misc_feature (1)..(217): tr|V6SS59|V6SS59_9FLAO 7-carboxy-7-deazaguanine synthas e OS=Flavobacterium limnosediminis JC2902 OX=1341181 GN =queE PE=3 SV=1
MQTILYKMLKKEIQIAVEKGEMLPLMEEFYTIQGEGYHTGTAAYFIRIGGCDVGCHWCDVKESWNAELHPPTATDVIVANAKKYAETVVVTGGEPLTWDMTVLTTKLKEQNLRVHIETSGAYPVTGTWDWFCLSPKKTKLPVDDAYKTAHELKVIIHNKHDFIFAEEQAAKVNDKAILFLQPEWSKKEEMTPLIVDYVMNNPKWRVSLQTHKYLNIP

SEQ ID NO: 30177 - protein, 210 aa, Flavobacterium lindanitolerans
  misc_feature (1)..(210): tr|A0A497VAW8|A0A497VAW8_9FLAO 7-carboxy-7-deazaguanine synthase OS=Flavobacterium lindanitolerans OX=428988 G N=queE PE=3 SV=1
MLKKELQIAVEKGVMLPLMEEFYTIQGEGYHTGTAAYFIRVGGCDVGCHWCDVKESWNAELHPPTAIEAIVENAKKYANTVVVTGGEPLTWDMGPLTQKLKEKDLKVHIETSGAYPLSGTWDWITLSPKKNKLPTQTVYDNASELKVIVHNKHDFIFAEEQAEKVNKDAILFLQPEWSKKEAMTPLIVDYVMNNPKWRVSLQTHKYLNIP

SEQ ID NO: 30178 - protein, 210 aa, Flavobacterium macacae
  misc_feature (1)..(210): tr|A0A3P3WC05|A0A3P3WC05_9FLAO 7-carboxy-7-deazaguanine synthase OS=Flavobacterium macacae OX=2488993 GN=queE PE=3 SV=1
MLKKELQAAVEKGTMLPLMEEFYTIQGEGYHTGTAAYFIRVGGCDVGCHWCDVKESWNAELHPPTEIEKIVENAKRESNVIVITGGEPLTWDMGPLTAQLKENNLKVHMETSGAYPLSGTWDWITLSPKKTKLPTQTVYDSAHELKVIIFNKHDFIFAEEQAALVNKDAILFLQPEWSKKEEMTPLIVDYVMQNPKWRVSLQTHKYLNIP

SEQ ID NO: 30179 - protein, 210 aa, Flavobacterium magnum
  misc_feature (1)..(210): tr|A0A2S0RG23|A0A2S0RG23_9FLAO 7-carboxy-7-deazaguanine synthase OS=Flavobacterium magnum OX=2162713 GN=queE P E=3 SV=1
MLSKEIQSEVEKGIMLPLMEEFYTIQGEGYHTGTAAYFIRVGGCDVGCHWCDVKESWNADLHPPTHVDEIVAHASLFSETVVVTGGEPLTWDMTALTTRLKAAHRKIHIETSGAYPLSGIWDWICLSPKKTKLPVQQVYDHAHELKMIIHNRHDFIFAEEQAEKVNDQAILFLQPEWSKKEEMTPLIVDYVMKNPKWRVSLQTHKYLNIP

SEQ ID NO: 30180 - protein, 205 aa, Flavobacterium marinum
  misc_feature (1)..(205): tr|A0A1H6KKY1|A0A1H6KKY1_9FLAO 7-carboxy-7-deazaguanine synthase OS=Flavobacterium marinum OX=1159016 GN=queE PE=3 SV=1
MINNSRSNEKLPLMEAFYTIQGEGFYTGHAAYFIRLAGCDVGCHWCDVKESWNENLHPTIAIDEIVAQAEKHGKLVVITGGEPLMWNLDALTSQLKQKGIQTNMETSGAYELSGFWDWICLSPKKTKLPTQSVYDAANELKCIIYNKHDFTFAEEQAARVNKAAKLYLQVEWSKKDEMLPVLIEYVKNNPKWAISTQTHKYLDIP

SEQ ID NO: 30181 - protein, 210 aa, Flavobacterium micromati
  misc_feature (1)..(210): tr|A0A1M5F7W0|A0A1M5F7W0_9FLAO 7-carboxy-7-deazaguanine synthase OS=Flavobacterium micromati OX=229205 GN=queE PE=3 SV=1
MLSKEVQLEVNRGAMLPLMEEFYTIQGEGFHTGKAAYFIRIGGCDVGCHWCDVKESWNAELHPPTAIDLIVNNASKYSETVVVTGGEPLMWDMSLLTQRLKNLNLKVHIETSGAYPLSGSWDWICLSPKKNKLPTETVYNNANELKVIIYNKHDFIFAEEQAEKVNPKAILFLQPEWSKSEEMTPFIVEYVMKNPKWRVSLQTHKYLNIP

SEQ ID NO: 30182 - protein, 210 aa, Flavobacterium nitrogenifigens
  misc_feature (1)..(210): tr|A0A521D7H7|A0A521D7H7_9FLAO 7-carboxy-7-deazaguanine synthase OS=Flavobacterium nitrogenifigens OX=1617283 GN=queE PE=3 SV=1
MLPKEIQLEVNKGAMLPLMEEFYTIQGEGSHTGRAAYFIRIGGCDVGCHWCDVKESWNAELHPPTKVDLIVENAAKYADTVVVTGGEPLSWDMTFLTKRLKEKNLKVHIETSGAFPLSGTWDWICLSPKKNKLPTQTVYDNAHELKVIIYNKHDFIFAEEQAELVNDNAILFLQPEWSKKEEMTPLIVDYVMNNPKWRVSLQTHKYLNIP

SEQ ID NO: 30183 - protein, 210 aa, Flavobacterium noncentrifugens
  misc_feature (1)..(210): tr|A0A1G9B4U7|A0A1G9B4U7_9FLAO 7-carboxy-7-deazaguanine synthase OS=Flavobacterium noncentrifugens OX=1128970 GN=queE PE=3 SV=1
MLPKEIQSAVEKGAMLPLMEEFYTIQGEGFHTGTAAYFIRIGGCDVGCHWCDVKESWNADLHPPTAIEQIVDNANLHANTVVITGGEPLTWDMTLLTNKLKEKNLKVHIETSGAYPLSGTWDWICLSPKKNKLPTQTVYDHAHELKVIIYNKHDFIFAEEQAEKVNKNAILFLQPEWSKKEEMTPLIVDYVMNNPKWRVSLQTHKYLNIP

SEQ ID NO: 30184 - protein, 210 aa, Flavobacterium omnivorum
  misc_feature (1)..(210): tr|A0A1G7Y0A4|A0A1G7Y0A4_9FLAO 7-carboxy-7-deazaguanine synthase OS=Flavobacterium omnivorum OX=178355 GN=queE PE=3 SV=1
MLSKEIQLEVNKGAMLPLMEEFYTIQGEGFHTGTAAYFIRIGGCDVGCHWCDVKESWNAALHPPTVIDLIVENANKYADTVVVTGGEPLMWDMTLLTQKLKEQKLKVHIETSGAYPLSGAWDWICLSPKKNKLPTETVYVNAHELKVIIYNKHDFIFAEEQAERVNPNAILFLQPEWSKKEEMTPLIVDYVMKNPKWRVSLQTHKYLNIP

SEQ ID NO: 30185 - protein, 210 aa, Flavobacterium oncorhynchi
  misc_feature (1)..(210): tr|A0A226HZJ4|A0A226HZJ4_9FLAO 7-carboxy-7-deazaguanine synthase OS=Flavobacterium oncorhynchi OX=728056 GN=qu eE PE=3 SV=1
MLSKEIQLEVNKGAMLPLMEEFYTIQGEGFHTGTAAYFIRIGGCDVGCHWCDVKESWNAELHPPTGIDVIVNNAATYANTVVVTGGEPLTWDMTLLTNKLKEKNLRVHIETSGAYPLSGTWDWICLSPKKNKLPTQDVYENAHELKVIIYNKHDFIFAEEQAELVNDNAILFLQPEWSKKEEMTPLIVDYVMNNPKWRVSLQTHKYLNIP

SEQ ID NO: 30186 - protein, 210 aa, Flavobacterium pallidum
  misc_feature (1)..(210): tr|A0A2S1SGJ4|A0A2S1SGJ4_9FLAO 7-carboxy-7-deazaguanine synthase OS=Flavobacterium pallidum OX=2172098 GN=queE PE=3 SV=1
MLSKEIQSAVEKGIMLPLMEEFYTIQGEGYHTGTAAYFIRVGGCDVGCHWCDVKESWNADLHPPTHVDHIVENASRFSETVVVTGGEPLTWDMSELTTRLKSANRRVHIETSGAYPLSGYWDWICLSPKKSKLPVQEVYDNADELKVIIHNKHDFIFAEEQAQKVNPKAILFLQPEWSKKEEMTPLIVDYVMNNPKWRVSLQTHKYLNIP

SEQ ID NO: 30187 - protein, 210 aa, Flavobacterium pectinovorum
  misc_feature (1)..(210): tr|A0A502ERZ0|A0A502ERZ0_9FLAO 7-carboxy-7-deazaguanine synthase OS=Flavobacterium pectinovorum OX=29533 GN=qu eE PE=3 SV=1
MLSKEIQLEVNKGAMLPLMEEFYTIQGEGFHTGTAAYFIRIGGCDVGCHWCDVKESWNAELHPPTSVDLMVKNASTYANTVVITGGEPLTWDMTFLTQELKNKDLKVHIETSGAYPLTGTWDWICLSPKKNKLPTQTVYDNAHELKVIIYNKHDFIFAEEQAELVNDNAILFLQPEWSKKEEMTPLIVDYVMNNPKWRVSLQTHKYLNIP

SEQ ID NO: 30188 - protein, 210 aa, Flavobacterium pectinovorum
  misc_feature (1)..(210): tr|A0A1M7P5D1|A0A1M7P5D1_9FLAO 7-carboxy-7-deazaguanine synthase OS=Flavobacterium pectinovorum OX=29533 GN=qu eE PE=3 SV=1
MLSKEIQLEVNKGAMLPLMEEFYTIQGEGFHTGTAAYFIRIGGCDVGCHWCDVKESWNAELHPPTSVDLIVKNAATYADTVVITGGEPLTWDMTLLTQELKNKNLKVHIETSGAYPLTGFWDWICLSPKKNKLPTQTVYDNAHELKVIIYNKHDFIFAEEQAELVNDGAILFLQPEWSKKEEMTPLIVDYVMNNPKWRVSLQTHKYLNIP

SEQ ID NO: 30189 - protein, 210 aa, Flavobacterium phragmitis
  misc_feature (1)..(210): tr|A0A1I1SFJ9|A0A1I1SFJ9_9FLAO 7-carboxy-7-deazaguanine synthase OS=Flavobacterium phragmitis OX=739143 GN=que E PE=3 SV=1
MLSKEIQLEVNKGAMLPLMEEFYTIQGEGSHTGRAAYFIRIGGCDVGCHWCDVKESWNAEIHPPTSIDLIVENAAKYADTVVVTGGEPLSWDMTLLTQRLKDKNLKVHIETSGAFPLSGTWDWICLSPKKNKLPTQTVYDNAHELKVIIYNKHDFIFAEEQAELVNDNAILFLQPEWSKKEEMTPLIVDYVMNNPKWRVSLQTHKYLNIP

SEQ ID NO: 30190 - protein, 210 aa, Flavobacterium psychrolimnae
  misc_feature (1)..(210): tr|A0A366AYV4|A0A366AYV4_9FLAO 7-carboxy-7-deazaguanine synthase OS=Flavobacterium psychrolimnae OX=249351 GN= queE PE=3 SV=1
MLSKEIQLEVNKGAMLPLMEEFYTIQGEGFHTGTAAYFIRIGGCDVGCHWCDVKESWNAELHPPTSVEQIVSNASQYSETVVVTGGEPLMWDMTLLTQKLKQNNRKVHIETSGAYPLTGIWDWICLSPKKNKLPTETVYDNAHELKVIIYNKHDFIFAEEQAEKVNPNAILFLQPEWSKKEEMTPLIVDYVMNNPKWRVSLQTHKYLNIP

SEQ ID NO: 30191 - protein, 210 aa, Flavobacterium psychrophilum
  misc_feature (1)..(210): sp|A6H1N2|QUEE_FLAPJ 7-carboxy-7-deazaguanine synthase OS=Flavobacterium psychrophilum (strain JIP02/86 / ATCC 49511) OX=402612 GN=queE PE=3 SV=1
MLTKEIQIAVEKGEMLPLMEEFYTIQGEGYHTGTAAYFIRIGGCDVGCHWCDVKESWNAALHPPTKTDVIVENATKYAKTIVVTGGEPLTWDMTVLTQRLKAENLQVHIETSGAYPVTGAWDWFCLSPKKNKLPVAEAYEIAHELKVIIYNKHDFIFAEEQAAKVNKNAILFLQSEWSKKEEMTPFIVDYVMNNPKWRVSLQTHKYLNIP

SEQ ID NO: 30192 - protein, 210 aa, Flavobacterium psychrophilum; identical to SEQ ID NO: 30191
  misc_feature (1)..(210): tr|A0A076P686|A0A076P686_FLAPS 7-carboxy-7-deazaguanine synthase OS=Flavobacterium psychrophilum OX=96345 GN=q ueE PE=3 SV=1

SEQ ID NO: 30193 - protein, 210 aa, Flavobacterium reichenbachii
  misc_feature (1)..(210): tr|A0A085ZKM4|A0A085ZKM4_9FLAO 7-carboxy-7-deazaguanine synthase OS=Flavobacterium reichenbachii OX=362418 GN= queE PE=3 SV=1
MLSKEIQLEINKGAMLPLMEEFYTIQGEGFHTGRAAYFIRIGGCDVGCHWCDVKESWNAELHPPTSTDVIVKNAASYADTVVVTGGEPLSWDMTLLTQQLKERNLKVHIETSGAYPLSGTWDWICLSPKKNKLPTQTVYDNAHELKVIIYNKHDFIFAEEQAELVNNNAILFLQPEWSKKEEMTPLIVDYVMNNPKWRVSLQTHKYLNIP

SEQ ID NO: 30194 - protein, 210 aa, Flavobacterium resistens
  misc_feature (1)..(210): tr|A0A521EEA4|A0A521EEA4_9FLAO 7-carboxy-7-deazaguanine synthase OS=Flavobacterium resistens OX=443612 GN=queE PE=3 SV=1
MLSKEIQLEVNKGAMLPLMEEFYTIQGEGYHTGTAAYFIRIGGCDVGCHWCDVKESWNAELHPPTSIDLIVKNASTYADTVVITGGEPLTWDMTLLTQQLKNENLKVHIETSGAYPLSGTWDWICLSPKKNKLPTQTVYDNADELKVIIYNKHDFIFAEEQAELVNDNAILFLQPEWSKKEEMTPLIVDYVMNNPKWRVSLQTHKYLNIP

SEQ ID NO: 30195 - protein, 210 aa, Flavobacterium rivuli
  misc_feature (1)..(210): tr|A0A0A2M192|A0A0A2M192_9FLAO 7-carboxy-7-deazaguanine synthase OS=Flavobacterium rivuli WB 3.3-2 = DSM 21788 OX=1121895 GN=queE PE=3 SV=1
MLKKETQIEVEKGEMLPLMEEFYTIQGEGYHTGTAAYFIRVGGCDVGCHWCDVKESWNADLHPPTDTDVIVANAAQWGKTIVITGGEPLMWNMDPITLKLKAAGLKVHIETSGAYPLSGYWDWICLSPKKNKLPTQAVYDNAHELKVIIHNKHDFIFAEEQAAKVNGNAILFLQPEWSKKEQITPLIVDYVMQNPKWRVSLQTHKYLNIP

SEQ ID NO: 30196 - protein, 210 aa, Flavobacterium saccharophilum
  misc_feature (1)..(210): tr|A0A1M6YVA1|A0A1M6YVA1_9FLAO 7-carboxy-7-deazaguanine synthase OS=Flavobacterium saccharophilum OX=29534 GN= queE PE=3 SV=1
MLSKEIQLEVNKGAMLPLMEEFYTIQGEGFHTGTAAYFIRIGGCDVGCHWCDVKESWNAELHPPTSVDLIVKNASSYADTVVITGGEPLTWDMTLLTQQLKDKNLKVHIETSGAYPLSGTWDWICLSPKKNKLPTQTVYDNAHELKVIIYNKHDFIFAEEQAELVNDNAILFLQPEWSKKEEMTPLIVDYVMNNPKWRVSLQTHKYLNIP

SEQ ID NO: 30197 - protein, 210 aa, Flavobacterium saliperosum
  misc_feature (1)..(210): tr|A0A1G4VV05|A0A1G4VV05_9FLAO 7-carboxy-7-deazaguanine synthase OS=Flavobacterium saliperosum OX=329186 GN=qu eE PE=3 SV=1
MLKKEIQIAVEKGEMLPLMEEFYTIQGEGYHTGTAAYFIRIGGCDVGCHWCDVKESWNAELHPPTSIDIIVANAKKYAETVVVTGGEPLTWDMTVLTNKLKEQNLRVHIETSGAYPVTGSWDWFCLSPKKTKLPVEDAYKIAHELKVIIHNKHDFQFAEEQAAKINDNAILFLQPEWSKKEEMTPLIVDYVMNNPKWRVSLQTHKYLNIP

SEQ ID NO: 30198 - protein, 210 aa, Flavobacterium sediminis
  misc_feature (1)..(210): tr|A0A2U8QSQ1|A0A2U8QSQ1_9FLAO 7-carboxy-7-deazaguanine synthase OS=Flavobacterium sediminis OX=2201181 GN=que E PE=3 SV=1
MLSKEIQLAVDKGEMLPLMEEFYTIQGEGFHTGRAAYFIRIGGCDVGCHWCDVKESWNADLHPPTTTDDIVKNAKELAETVVVTGGEPLTWDMSVLTAKLKAEGLRVHIETSGAYPVTGEWDWFCLSPKKTKLPVQQAYECAHELKMIVHNKHDFQFAEEQAAKVNPNAILFLQPEWSRKEEMTPLIIDYVMQHPKWRISLQTHKYLNIP

SEQ ID NO: 30199 - protein, 210 aa, Flavobacterium segetis
  misc_feature (1)..(210): tr|A0A1M5FT77|A0A1M5FT77_9FLAO 7-carboxy-7-deazaguanine synthase OS=Flavobacterium segetis OX=271157 GN=queE P E=3 SV=1
MLSREIQLEVNRGTMLPLMEEFYTIQGEGYHTGTAAYFIRIGGCDVGCHWCDVKESWNAELHPPTAIDLIVNNASKYSETVVVTGGEPLMWDMSALTKSLKSKNLKVHIETSGAYPLSGIWDWICLSPKKNKLPTETVYDNAHELKVIIFNKHDFIFAEEQAEKVNNNAILFLQPEWSKKEEMTPLIVEYVMKNPKWRISLQTHKYLNIP

SEQ ID NO: 30200 - protein, 210 aa, Flavobacterium seoulense
  misc_feature (1)..(210): tr|A0A066WSS4|A0A066WSS4_9FLAO 7-carboxy-7-deazaguanine synthase OS=Flavobacterium seoulense OX=1492738 GN=que E PE=3 SV=1
MLAKEIQLEVNKGAMLPLMEEFYTIQGEGFHTGTAAYFVRIGGCDVGCHWCDVKESWNAELHPPTALDVIVENASKYADTVVVTGGEPLTWDMTLLTQKLKERNRKVHIETSGAYPLSGTWDWICLSPKKNKLPTQTVYDNAHELKVIIHNKHDFIFAEEQAELVNDNAILFLQPEWSKKEEMTPLIVDYVMNHPKWRVSLQTHKYLNIP

SEQ ID NO: 30201 - protein, 210 aa, Flavobacterium sinopsychrotolerans
  misc_feature (1)..(210): tr|A0A1H8QSP4|A0A1H8QSP4_9FLAO 7-carboxy-7-deazaguanine synthase OS=Flavobacterium sinopsychrotolerans OX=6040 89 GN=queE PE=3 SV=1
MLSKEIQLEVNKGAMLPLMEEFYTIQGEGFHTGTAAYFIRIGGCDVGCHWCDVKESWNAELHPPTGIDLIVENASKYSETVVITGGEPLMWDMNLLTQKLKENNRRVHIETSGAYPLTGTWDWICLSPKKNKLPTQTVYDNAHELKVIIYNKHDFVFAEEQAEKVNSNAILFLQPEWSKKEEMTPLIVDYVMNNPKWRVSLQTHKYLNIP

SEQ ID NO: 30202 - protein, 210 aa, Flavobacterium sp.
  misc_feature (1)..(210): tr|A0A2N0HE85|A0A2N0HE85_9FLAO 7-carboxy-7-deazaguanine synthase OS=Flavobacterium sp. 5 OX=2035199 GN=queE PE =3 SV=1
MLSKEVQLEVNKGTMLPLMEEFYTIQGEGFHTGTAAYFIRIGGCDVGCHWCDVKESWNAELHPPTKIDLIVDNATKYADTIVITGGEPLMWDMDPLTQKLKDNNVRVHIETSGAYPLSGTWDWICLSPKKNKLPTKTVYDNADELKVIIYNKHDFIFAEEQAEKVNPNAILFLQPEWSKKEEMTPLIVDYVMNNPKWRVSLQTHKYLNIP

SEQ ID NO: 30203 - protein, 210 aa, Flavobacterium sp.
  misc_feature (1)..(210): tr|A0A243SEN8|A0A243SEN8_9FLAO 7-carboxy-7-deazaguanine synthase OS=Flavobacterium sp. FPG59 OX=1929267 GN=que E PE=3 SV=1
MLSKEIQLEVNKGAMLPLMEEFYTIQGEGSHTGTAAYFIRIGGCDVGCHWCDVKESWNAELHPPTAVDLIVSNASKYAETVVVTGGEPLMWDMTLLTQKLHDNNRKVHIETSGAYPLTGSWDWICLSPKKNKLPTSTVYEAAHELKVIIYNKHDFIFAEEQAEKVSANAILFLQPEWSKKEEMTPLIVDYVMQNPKWRVSLQTHKYLNIP

SEQ ID NO: 30204 - protein, 210 aa, Flavobacterium spartansii
  misc_feature (1)..(210): tr|A0A1S1J8F4|A0A1S1J8F4_9FLAO 7-carboxy-7-deazaguanine synthase OS=Flavobacterium spartansii OX=1278819 GN=qu eE PE=3 SV=1
MLSKEIQLEVNKGAMLPLMEEFYTIQGEGFHTGTAAYFIRIGGCDVGCHWCDVKESWNAELHPPTSIDLIVNNASSQADTVVITGGEPLTWDMSLLTQQLKDKNMKVHIETSGAYPLSGTWDWICLSPKKNKLPTQTVYDNAHELKVIIYNKHDFIFAEEQAELVNDNAILFLQPEWSKKEEMTPLIVDYVMNNPKWRVSLQTHKYLNIP

SEQ ID NO: 30205 - protein, 210 aa, Flavobacterium subsaxonicum
  misc_feature (1)..(210): tr|A0A0A2MUZ3|A0A0A2MUZ3_9FLAO 7-carboxy-7-deazaguanine synthase OS=Flavobacterium subsaxonicum WB 4.1-42 = DS M 21790 OX=1121898 GN=queE PE=3 SV=1
MLKKELQIEVEKGIMLPLMEEFYTIQGEGFHTGTAAYFIRVGGCDVGCHWCDVKESWNADLHPPTSIDTIVNNAKQYGKTIVITGGEPLMWNMSPLTQKLKDEGLRVHIETSGAYPLSGTWDWICLSPKKTKLPTPDVYLFAQELKVIIHNKHDFIFAEEQAAKTNSDAILFLQPEWSKRDEVTPLIVDYVMNNPKWRVSLQTHKYLNIP

SEQ ID NO: 30206 - protein, 210 aa, Flavobacterium succinicans
  misc_feature (1)..(210): tr|A0A199XV23|A0A199XV23_9FLAO 7-carboxy-7-deazaguanine synthase OS=Flavobacterium succinicans OX=29536 GN=que E_1 PE=3 SV=1
MLSKEIQLEVNKGAMLPLMEEFYTIQGEGNHTGTAAYFIRIGGCDVGCHWCDVKESWNAELHPPTPIENIVANAVKYADTVVVTGGEPLTWDMSLLTSKLKEHKLKIHIETSGAYPLSGTWDWICLSPKKNKLPTQTVYDHADELKVIIFNKHDFIFAEEQAAKVNSNALLFLQPEWSNKEDMTPLIVDYVMKNPKWRVSLQTHKYLNIP

SEQ ID NO: 30207 - protein, 229 aa, Flavobacterium succinicans
  misc_feature (1)..(229): tr|A0A199XNG8|A0A199XNG8_9FLAO 7-carboxy-7-deazaguanine synthase OS=Flavobacterium succinicans OX=29536 GN=que E_2 PE=4 SV=1
MNVSASTPLYSITPFTLLDYPHQSACILWFAGCNMRCQYCYNPEIVLGKGKFTFQHALDFIQTRKNLLDAVVFSGGECLLHKNCIEFIATVKKMGFLVKIDTNGSKPKVLQTLLEQQTIDYVALDFKAMPQTFETITQSDLFAPFEQSLELLLKHSVPFEVRTTIHSDLISASDLQKMIQFLEQKGYQGKYFIQYFVNEAPTIEKMGFSHRELDPETLSTANIKIVIRN

SEQ ID NO: 30208 - protein, 210 aa, Flavobacterium suncheonense
  misc_feature (1)..(210): tr|A0A0A2M6J7|A0A0A2M6J7_9FLAO 7-carboxy-7-deazaguanine synthase OS=Flavobacterium suncheonense GH29-5 = DSM 1 7707 OX=1121899 GN=queE PE=3 SV=1
MLQKEIQIAVEKGEMLPLMEEFYTIQGEGYHTGTAAYFIRIGGCDVGCHWCDVKESWNAELHPPTSTDVIVNNAKKYAETVVVTGGEPLTWDMTALTGKLKAADLRVHIETSGAYPVTGHWDWFCLSPKKTKLPVQQAYDMAHELKVIIYNKHDFIFAEEQAAKVNGKAILFLQPEWSKKEEMTPLIIDYVMNNPKWRISLQTHKYLNIP

SEQ ID NO: 30209 - protein, 210 aa, Flavobacterium swingsii
  misc_feature (1)..(210): tr|A0A1I0XWF1|A0A1I0XWF1_9FLAO 7-carboxy-7-deazaguanine synthase OS=Flavobacterium swingsii OX=498292 GN=queE PE=3 SV=1
MLTKEIQIAVEKGEMLPLMEEFYTIQGEGYHTGTAAYFIRIGGCDVGCHWCDVKESWNAALHPPTKTDIIVGNAKKYAKTIVVTGGEPLTWDMTVLTQKLKAENLQVHIETSGAYPVTGNWDWFCLSPKKNKLPVADAYAIAHELKVIIYNKHDFIFAEEQAAKVNKNAILFLQPEWSKKEEMTPLIVDYVMNNPKWRVSLQTHKYLNIP

SEQ ID NO: 30210 - protein, 210 aa, Flavobacterium terrae
  misc_feature (1)..(210): tr|A0A1M6BT79|A0A1M6BT79_9FLAO 7-carboxy-7-deazaguanine synthase OS=Flavobacterium terrae OX=415425 GN=queE PE =3 SV=1
MLEKHTQLAVEKGEMLPLMEEFYTIQGEGYHTGTAAYFVRIGGCDVGCHWCDVKESWNAELHPPTHIEKIVSNAKKYAETVVVTGGEPLTWDMSQLTTKLKEANLRVHIETSGAYSVTGTWDWFCLSPKKTKLPVDDAYAIADELKVIIYNKHDFIFAEEQAEKVNNKAILFLQPEWSKRDEITPLIVDYVMSNPKWRVSLQTHKYLNIP

SEQ ID NO: 30211 - protein, 210 aa, Flavobacterium terrigena
  misc_feature (1)..(210): tr|A0A1H6WNS9|A0A1H6WNS9_9FLAO 7-carboxy-7-deazaguanine synthase OS=Flavobacterium terrigena OX=402734 GN=queE PE=3 SV=1
MLNKETQILVNKGEMLPLMEEFYTIQGEGYHTGTAAYFIRVGGCDVGCHWCDVKESWNADLHPPTSVETIVTNAKKYAKTIVITGGEPLTWDMNPITKQLKNAGLHVHIETSGAYDVTGTWDWFCLSPKKNKLPVESAYAIANELKVIIHNKHDFIFAEEQAEKTNKNAILFLQPEWSKKEEMTPLIVDYVMNNPKWRVSLQTHKYLNIP

SEQ ID NO: 30212 - protein, 244 aa, [Flavobacterium] thermophilum
  misc_feature (1)..(244): tr|A0A377FY99|A0A377FY99_9BACL 7-carboxy-7-deazaguanine synthase OS=[Flavobacterium] thermophilum OX=1414643 G N=queE PE=3 SV=1
MARTIPVLEIFGPTIQGEGMVIGQKTMFVRTAGCDYRCRWCDSAFTWDGSAKDEIEQLTADEIWRRLEAIGGRRFRHVTISGGNPLLIAALGELIALLHEKGMRVAVETQGSRWQDWLLDIDDVTLSPKPPSSGMDTDWAALDQIIERLQADQSRVRRISLKVVVFDDADLAYAKEVHRRYLGVPFYLQVGNADVADSDVDALRTKLLHRLEWLVEQAADSEELADVHILPQLHTLLWGNKRGV

SEQ ID NO: 30213 - protein, 210 aa, Flavobacterium tibetense
  misc_feature (1)..(210): tr|A0A365P1Z4|A0A365P1Z4_9FLAO 7-carboxy-7-deazaguanine synthase OS=Flavobacterium tibetense OX=2233533 GN=que E PE=3 SV=1
MLQKEIQLAVEKGEMLPLMEEFYTIQGEGFHTGTAAYFIRIGGCDVGCHWCDVKESWNAELHPPTKTDIIVANAKKYADTVVVTGGEPLTWDMSLLTSKLKEQNLKVHIETSGAYEVTGTWDWFCLSPKKNKLPVQSAYNIADELKVIIYNKHDFIFAEEQAAKVNPNAILFLQPEWSKKEEMTPLIVDYVMNNPKWRVSLQTHKYLNIP

SEQ ID NO: 30214 - protein, 232 aa, Flavobacterium ummariense
  misc_feature (1)..(232): tr|A0A1I5ETA6|A0A1I5ETA6_9FLAO 7-carboxy-7-deazaguanine synthase OS=Flavobacterium ummariense OX=913024 GN=que E PE=3 SV=1
MKEQLNGCSFFMKNFYDNYCIFAENIKMTTTETIVDKLPLMEAFYTIQGEGFYTGHAAYFIRLAGCDVGCHWCDVKESWDENLHPKILVSDIVSQAEDNGKLVVITGGEPLMWNLDHLTSKLKEKGIQTNIETSGAYELSGFWDWICLSPKKKKLPTQSVYDAANELKCIIYNHHDFKFAEEQAAKVNKNAKLYLQVEWGKKEEMLPLVIDYVKNNPKWAISTQTHKYLDIP

SEQ ID NO: 30215 - protein, 210 aa, Flavobacterium urocaniciphilum
  misc_feature (1)..(210): tr|A0A1H9C1Z2|A0A1H9C1Z2_9FLAO 7-carboxy-7-deazaguanine synthase OS=Flavobacterium urocaniciphilum OX=1299341 GN=queE PE=3 SV=1
MLNKEIQIQVDKGEMLPLMEEFYTIQGEGFYTGTAAYFIRVGGCDVGCHWCDVKESWNADLHPPTAISHIVANAKKYAETVVVTGGEPLTWNMLPLTTELKANNLRVHIETSGAYEVSGEWDWFCLSPKKTKLPVQSAYDMADELKMIIHNKHDFMFAEEQAAKTNSNAILFLQPEWSKKEEMTPLIIDYVMNNPKWRISLQTHKYLNIP

SEQ ID NO: 30216 - protein, 210 aa, Flavobacterium urumqiense
  misc_feature (1)..(210): tr|A0A1H5RSX2|A0A1H5RSX2_9FLAO 7-carboxy-7-deazaguanine synthase OS=Flavobacterium urumqiense OX=935224 GN=que E PE=3 SV=1
MLSKEIQLEVNKGAMLPLMEEFYTIQGEGFHTGTAAYFIRIGGCDVGCHWCDVKESWNAEIHPPTSIDLIVANANKYADTVVITGGEPLMWDMTLLTQRLKDQNLKVHIETSGAYPLSGTWDWICLSPKKNKLPTETVYDNAHELKVIIYNKHDFVFAEEQAEKVNPNAILFLQPEWSKKEEMTPLIVDYVMNNPKWRVSLQTHKYLNIP

SEQ ID NO: 30217 - protein, 210 aa, Flavobacterium weaverense
  misc_feature (1)..(210): tr|A0A3L9ZX05|A0A3L9ZX05_9FLAO 7-carboxy-7-deazaguanine synthase OS=Flavobacterium weaverense OX=271156 GN=que E PE=3 SV=1
MLSKEVQLEVNKGMMLPLMEEFYTIQGEGYHTGTAAYFIRIGGCDVGCHWCDVKESWNAELHPPTGIDLIVANASKYSKTIVITGGEPLMWDMTLLTQKLKDKNLNVHIETSGAYPLSGTWDWICLSPKKNKLPTDTIYDNAHELKVIIHNKHDFIFAEEQAEKVNPNAILFLQPEWSKNDEMTPLIVEYVMKKPKWRVSLQTHKYLNIP

SEQ ID NO: 30218 - protein, 210 aa, Flavobacterium xanthum
  misc_feature (1)..(210): tr|A0A1M7H1J9|A0A1M7H1J9_9FLAO 7-carboxy-7-deazaguanine synthase OS=Flavobacterium xanthum OX=69322 GN=queE PE =3 SV=1
MLSKEIQLEVNKGAMLPLMEEFYTIQGEGFHTGTAAYFIRIGGCDVGCHWCDVKESWNAALHPPTSIDLIVENANKYADTVVVTGGEPLMWDMTLLTQKLKEQNLKVHIETSGAYPLSGAWDWICLSPKKNKLPTETVYDNAHELKVIIYNKHDFVFAEEQAEKVNPNAILFLQPEWSKKEEMTPLIVDYVMKNPKWRVSLQTHKYLNIP

SEQ ID NO: 30219 - protein, 210 aa, Flavobacterium xinjiangense
  misc_feature (1)..(210): tr|A0A1M7G4R6|A0A1M7G4R6_9FLAO 7-carboxy-7-deazaguanine synthase OS=Flavobacterium xinjiangense OX=178356 GN=q ueE PE=3 SV=1
MLSKEIQLEVNKGAMLPLMEEFYTIQGEGFHTGTAAYFIRIGGCDVGCHWCDVKESWNAELHPPTSIDLIVANANKYADTVVVTGGEPLMWDMTLLTQKLKDQNLKVHIETSGAYPLSGSWDWICLSPKKNKLPTETVYDNAHELKVIIYNKHDFIFAEEQAEKVNPNAILFLQPEWSKKEEMTPLIVDYVMNNPKWRVSLQTHKYLNIP

SEQ ID NO: 30220 - protein, 210 aa, Flavobacterium xueshanense
  misc_feature (1)..(210): tr|A0A1I2DZ02|A0A1I2DZ02_9FLAO 7-carboxy-7-deazaguanine synthase OS=Flavobacterium xueshanense OX=935223 GN=qu eE PE=3 SV=1
MLSKEIQLEVNKGAMLPLMEEFYTIQGEGFHTGTAAYFIRIGGCDVGCHWCDVKESWNAELHLPTAIDLIVANASKYSETVVVTGGEPLMWDMSLLTQKLKENNRKVHIETSGAYPLTGYWDWICLSPKKNKLPTQTVYDNAHELKVIIFNKHDFIFAEEQAEKVNNNAILFLQPEWSKKEEMTPLIVDYVMNNPKWRVSLQTHKYLNIP

SEQ ID NO: 30221 - protein, 194 aa, Flectobacillus sp.
  misc_feature (1)..(194): tr|A0A267TG67|A0A267TG67_9BACT 7-carboxy-7-deazaguanine synthase OS=Flectobacillus sp. BAB-3569 OX=1509483 GN= queE PE=3 SV=1
MEAFYTLQGEGYYQGKAAYFIRLGGCDVGCHWCDVKESWDVNAHPQLTLDEIVAEAAKHPGKLAVITGGEPLMHHLDELTNALHNAGIQTNIETSGVCEAVTGYWDWICFSPKKFKAPNPDIFEKAHELKVVIYHPSDFEWAEGYAAKMSPECLLYLQPEWSKSETILPLIIEYIKDNPKWRISLQVHKFMNIP

SEQ ID NO: 30222 - protein, 193 aa, Flexibacter flexilis
  misc_feature (1)..(193): tr|A0A1I1HV95|A0A1I1HV95_9BACT 7-carboxy-7-deazaguanine synthase OS=Flexibacter flexilis DSM 6793 OX=927664 GN =queE PE=3 SV=1
MEAFYTIQGEGRYQGTAAYFIRLGGCDVGCHWCDVKESWDAEAHPQQSIEEIVEQASKYPSRVAVITGGEPLMHNLDALCEALHLQGFRTHLETSGAYPLTGHWDWVCLSPKKFKKPLAEVCQAADELKVVIYNKFDFEWAESYSQQVGKDCTLLLQPEWDRTELMLPLMISYIKQHPQWRMSLQMHKYINVP

SEQ ID NO: 30223 - protein, 210 aa, [Flexibacter] sp.
  misc_feature (1)..(210): tr|A0A1V2CGI9|A0A1V2CGI9_9FLAO 7-carboxy-7-deazaguanine synthase OS=[Flexibacter] sp. ATCC 35103 OX=1937528 GN =queE PE=3 SV=1
MLSKEIQLEVNKGAMLPLMEEFYTIQGEGFHTGTAAYFIRIGGCDVGCHWCDVKESWNAELHPPTSVDLIVNNAATHADTVVITGGEPLTWDMTLLTQELKNRNLKVHIETSGAYPLTGSWDWICLSPKKNKLPTQTVYDNAHELKVIIYNKHDFIFAEEQAELVNGNAILFLQPEWSKKEEMTPLIVDYVMNNPKWRVSLQTHKYLNIP

SEQ ID NO: 30224 - protein, 88 aa, [Flexibacter] sp.
  misc_feature (1)..(88): tr|A0A1V2ATJ6|A0A1V2ATJ6_9BACT 7-carboxy-7-deazaguanine synthase QueE (Fragment) OS=[Flexibacter] sp. ATCC 352 08 OX=1936242 GN=BW716_36140 PE=4 SV=1
SSDLSPKKNKLPTQTVYDNAHELKVIIYNKHDFIFAEEQAELVNGNAILFLQPEWSKKEEMTPLIVDYVMNNPKWRVSLQTHKYLNIP

SEQ ID NO: 30225 - protein, 245 aa, Flexibacter sp.
  misc_feature (1)..(245): tr|A0A2M7NK92|A0A2M7NK92_9BACT 7-carboxy-7-deazaguanine synthase OS=Flexibacter sp. CG_4_10_14_3_um_filter_32_ 15 OX=1975530 GN=queE PE=3 SV=1
MEFAYLRRILFIILNYEIKMPTISSSSFSKLSKPVSKPTRQTKPELTSSLPVMEAFYTLQGEGVFTGHAAYFIRLGGCDVGCFWCDVKESWDKEAHPQQSISQIVKEASSFSARLAVITGGEPLMHDLDELTAALKKEGFRVHIETSGAHPLSGTLDWITLSPKRFKKPLEAIYPKVHELKMVVYALSDLEWAQEEAKKVSDSCKLLIQPEWSKSDKNLPILIEFVKENPRWQVSLQTHKFMNIP

SEQ ID NO: 30226 - protein, 235 aa, Flexistipes sinusarabici
  misc_feature (1)..(235): tr|A0A5D0MXW9|A0A5D0MXW9_FLESI 7-carboxy-7-deazaguanine synthase OS=Flexistipes sinusarabici OX=2352 GN=queE P E=3 SV=1
MNNSFGYIKEIFPSIQGEGKYIGAKQLFVRFAGCSVNCLNCDTDYSAEDSFSINDKKIQNPISPVTLADNISEGFDLNSFHSISLTGGEPLDQFDFLENFIRAVKKISEIRIFLETSGFYSEKLLKLKDVVDIFSVDLKIKSSFGVSNLQNIQKFLRSVDTNKTYVKLIINKNFTETEINSVLKISMDSKIKEIYLQPLNNISYNKNLKSVIDLLQKNKIDTYFIPQVQKFMEIK

SEQ ID NO: 30227 - protein, 242 aa, Flexistipes sinusarabici
  misc_feature (1)..(242): tr|A0A3D5Q9M4|A0A3D5Q9M4_FLESI 7-carboxy-7-deazaguanine synthase OS=Flexistipes sinusarabici OX=2352 GN=queE P E=3 SV=1
MILQRSIMNNSSGYIKEIFPSIQGEGKYVGAKQLFVRLAGCSVNCLNCDTDYSAEDFFIINDKRIQNPVSPVDLAGNITEAFGLNSFHSISITGGEPLDQFGFLKDFIKAVKEMSGIRIFLETSGFYSDKLLALQDIVDIFSIDLKIKSSFGVNNLQSVQKIMRSIDTSKTYVKLIINKNITEIEMNAALKFLMDLKIKEIYLQPLNNISYNNKLEHIIDLLQDNGVNAYFIPQIHKFMEIR

SEQ ID NO: 30228 - protein, 291 aa, Fluoribacter bozemanae
  misc_feature (1)..(291): tr|A0A0W0RF55|A0A0W0RF55_FLUBO 7-carboxy-7-deazaguanine synthase OS=Fluoribacter bozemanae OX=447 GN=queE PE=3 SV=1
MFGLNDRVGKSFFKTAKPDELFITSRFFTLQGEGPFRGHPAYFIRLAKCNLACSFCDTYFDAGEWKSFNSLLEEADSVIAAFFQGRNLPTPSWAKGLAKKMVLVITGGEPSLQQNLSVFLEEAKPYFQYIQIESNGISLLPDLLQSTTLVVSPKCLEKDGKAIRYLKPNSKMLERADCLKFVMSAPEEDRYIPYSEIPTWAHEWAEKTNKQVFVSPMNKYRKEPQRVNAIRDKGHDLTLAERSEINEVVSFWEAGLLDMEKNQRNHEHAAEYCMKYGFILNLQIHLFASLP

SEQ ID NO: 30229 - protein, 291 aa, Fluoribacter dumoffii
  misc_feature (1)..(291): tr|A0A377G791|A0A377G791_9GAMM 7-carboxy-7-deazaguanine synthase OS=Fluoribacter dumoffii OX=463 GN=queE PE=3 SV=1
MFGLNDRVGKSFFNDAKSDELFVTSRFFTLQGEGPFRGHPAYFIRLAKCNLACSFCDTYFDTGEWIDFTSLLEEADTVIHSFFQTRNLTSPSWAQGLGKNMVLVITGGEPSLQRNLSAFLEQAQPYFQYTQIESNGVSILPDLPAKTTLVVSPKCLEKEGKVIRYLEPNSKMLKRADYLKFVMSAPEDGQYTPYSEIPAWAHEWAEKTGKQVFVSPMNRYQKEPQRAQAMREKGRDLTIAERSEINETVSFWEPGLLHLEKNQRNHEYAAEYCMKYGFVLNLQIHLFASLP

SEQ ID NO: 30230 - protein, 291 aa, Fluoribacter gormanii
  misc_feature (1)..(291): tr|A0A377GHI7|A0A377GHI7_9GAMM 7-carboxy-7-deazaguanine synthase OS=Fluoribacter gormanii OX=464 GN=queE PE=3 SV=1
MFGLNEKVGKSFFKTANPGELFVTSRFFTLQGEGPFRGHPAYFIRLAKCNLACSFCDTYFDVGEWRSFSSLLEEADTLIGAFFQNRSLPTPSWAQGRAKKIILVITGGEPSLQQNLSAFLEAAQPYFQQTQIESNGIAILSDLPKSTILVVSPKCLEKNGKTIRYLEPNAKMLERADYLKFVMSAPEEGQYKPYSEIPAWAHEWAEKTKKQVFVSPMNRYQKEPQRVRAIRDKGQDLTLAERSEINEVVSFWEPGLLDLEKNQRNHEYAAEYCMKYGFILNLQIHLFASLP

SEQ ID NO: 30231 - protein, 220 aa, Fluviicoccus keumensis
  misc_feature (1)..(220): tr|A0A4V2G645|A0A4V2G645_9GAMM 7-carboxy-7-deazaguanine synthase OS=Fluviicoccus keumensis OX=1435465 GN=queE PE=3 SV=1
MLTDNLPRELRITEIFHSLQGEARSVGVPTVFVRLTGCPLRCVYCDTTYSFSGGEKFSFDALLQQIRAYRTPVVCVTGGEPLAQPNCIPFLKQLCDEGFRVSLETGGAMDIRDVDTRVSRVVDLKTPDSGEMHRNLYENMALLTRHDQVKFVICSRKDYEWARFKLDEYQLADRAGDVLFSPSHGQLAPRELAEWILDDRLPVRFQLQLHKYLWNNEPGH

SEQ ID NO: 30232 - protein, 206 aa, Fluviicola sp.
  misc_feature (1)..(206): tr|A0A1G0CH74|A0A1G0CH74_9FLAO 7-carboxy-7-deazaguanine synthase OS=Fluviicola sp. RIFCSPHIGHO2_12_FULL_43_24 OX=1798019 GN=queE PE=3 SV=1
MSQQLRLAVTYPVMEHFYTLQGEGRYSGVAAYFIRLGGCDVGCVWCDVKESWDADAHPKMSVAEMVNEVSNHPGNLVVITGGEPAMYDLTPLVEELKVAGKYVAIETSGAHPLIGEVDWYTFSPKKFKEPVAEAYQKASELKVVIYHSSDFAWAEKHARNVSEDCRLYLQPEWSKQERLLPELIEYVKQHPKWTVSLQTHKYLQIP

SEQ ID NO: 30233 - protein, 207 aa, Fluviicola sp.
  misc_feature (1)..(207): tr|A0A2G2FGX5|A0A2G2FGX5_9FLAO 7-carboxy-7-deazaguanine synthase OS=Fluviicola sp. OX=1917219 GN=queE PE=3 SV= 1
MEKAKKEKPKSWPVMESFYTIQGEGYYSGRAAYFIRFGGCDVGCVWCDVKDSWDKEKHPEVHLDTLISAVEATPTNFVVLTGGEPAMYDLTTLVDELKKQGKEIAIETSGCYPLIGNVDWYCFSPKKFKAPDEEAYDLADELKVVIFNKSDFEWAETHAERVNQGCELFLQPEWSKQEQFLPEIIEYVKKNPKWRISQQTHKFMNIP

SEQ ID NO: 30234 - protein, 204 aa, Fluviicola taffensis
  misc_feature (1)..(204): tr|F2IH51|F2IH51_FLUTR 7-carboxy-7-deazaguanine synthas e OS=Fluviicola taffensis (strain DSM 16823 / NCIMB 139 79 / RW262) OX=755732 GN=queE PE=3 SV=1
MTQYSSASYPVMEHFYTIQGEGKYTGTSAYFIRLGGCDVGCVWCDVKESWDADIHPKMTVDELITVVAQYPGELVVITGGEPAMYDLSVLVDALHSIGKYVAIETSGTSPLVGAVDWYTFSPKKFKSPVDEAYNKASELKIVIFHQSDLKWAEEHSLKVNDACVLYLQPEWSKREQLLPTIIEYVKNHPKWKISLQTHKYLEIP

SEQ ID NO: 30235 - protein, 218 aa, Fodinibius salinus
  misc_feature (1)..(218): tr|A0A5D3YQL9|A0A5D3YQL9_9BACT 7-carboxy-7-deazaguanine synthase OS=Fodinibius salinus OX=860790 GN=queE PE=3 SV=1
MFNMLEKNKMDNLIDEDEMKGVKYPLVEDFYTIQGEGAHSGRPAYFIRTAGCDVNCWWCDVKESWDEEKHSKKSVADIVQGAKDSGAKFAVITGGEPLLHDLGPLTYQLKQAGMDVHIETSGSSPVSGYLDWITLSPKRFKEPTDDIFRYVDELKVVVLTNKDLEWAEKNAAKCPDSTQLLLQPEWEKEGAVELIIDYVKSNPEWGISLQTHKFMGVE

SEQ ID NO: 30236 - protein, 244 aa, Fontibacillus panacisegetis
  misc_feature (1)..(244): tr|A0A1G7GVH9|A0A1G7GVH9_9BACL 7-carboxy-7-deazaguanine synthase OS=Fontibacillus panacisegetis OX=670482 GN=q ueE PE=3 SV=1
MTSKEKPIPVLEIFGPTVQGEGLVIGQKTMFVRTAGCDYSCSWCDSSFTWDGSAKNEIKQLSAQMIWDELKILGGNTFEHVTISGGNPALLKNIGYLVNLLHDQGIRVGLETQGSRWQEWMADIDDLTISPKPPSSGMITDWEKLDEVMENLKNSSNEICIKVVVFDEDDLQYAVQAHKRYPHIRLVLQVGNSDVTTLDREGLAFALLEKYEWLINQVMASSDLRQVKVLPQLHTLLWGNKRGV

SEQ ID NO: 30237 - protein, 250 aa, Fontibacillus panacisegetis
  misc_feature (1)..(250): tr|A0A1G7Q0B0|A0A1G7Q0B0_9BACL 7-carboxy-7-deazaguanine synthase OS=Fontibacillus panacisegetis OX=670482 GN=q ueE PE=3 SV=1
MTDHTKKSTSLIPVLEIFGPTVQGEGMVIGQKTMFIRTAGCDYHCTWCDSAFTWDGSAKSLIKMMEPQNIWEELRRIGGNRFSHVTLSGGNPALLPQMSGLVALLHQQGITMAVETQGSRWQDWLKDIDQVTLSPKPPSSGMNTKWEILDEVVERLLHREPCFSMSLKVVIFDEQDLAYAKKIHQRYARIPMFLQVGNPDVHRMDIQHHAADLLSRYEDLIEIVMSSNELNDVRVLPQLHALVWGNKRGV

SEQ ID NO: 30238 - protein, 263 aa, Fontibacillus phaseoli
  misc_feature (1)..(263): tr|A0A369BG16|A0A369BG16_9BACL 7-carboxy-7-deazaguanine synthase OS=Fontibacillus phaseoli OX=1416533 GN=queE PE=3 SV=1
MNSGSGINSSPGNGNTDNPVGTPTIPVLEIFGPTVQGEGMVIGQKTMFVRTAGCDYRCLWCDSAFTWDGSAKDLIIKMTPTEIRDELRRIGDNRFSHVTLSGGNPALLPQLEGLVSLLRGEGITIAVETQGSRWQDWLAEIHQVTLSPKPPSSGMATDWPVLDDIVAKLSARPAPFAVSLKVVVFDEADLSYTRQVHARYPGVAMFLQVGNPDVRRMDIGHHAADLLHRYEGLIDRVMSLSDLNDVRVLPQLHALVWGNRRGV

SEQ ID NO: 30239 - protein, 248 aa, Fonticella tunisiensis
  misc_feature (1)..(248): tr|A0A4R7KVP2|A0A4R7KVP2_9CLOT 7-carboxy-7-deazaguanine synthase OS=Fonticella tunisiensis OX=1096341 GN=queE PE=3 SV=1
MTVDKFKGTVIPVVEIFNSVSGEGISAGTITTFVRVARCNLRCSYCDTTYSYDEFSENNQMMTPDEIVDRVSQFGCKDIICTGGEPLEPQKPKRYLPLYLASKGFKVRIETNGSCPVYSNEELECFLKGDRFQVLYYTLDIKCPGSGMSKYNIFEENLEKLHEGDELKFVVSNQEDIAYAIKVIDKYKDILVLNKVVINFSPAYGLIKPEELVEVLKEKHQYFSNYELRVRLSLQLHKIIWPADARGV

SEQ ID NO: 30240 - protein, 222 aa, Fontimonas thermophila
  misc_feature (1)..(222): tr|A0A1I2HTZ4|A0A1I2HTZ4_9GAMM 7-carboxy-7-deazaguanine synthase OS=Fontimonas thermophila OX=1076937 GN=queE PE=3 SV=1
MITSSVAAVEPRLKITEIFRSLQGESSLVGWPTAFVRLTGCPLRCQYCDTAYAFHGGQWMTLAQVRERVASLDVRHVCVTGGEPLAQKACLGLLAMLCDAGYQVSLETSGALDISAVDPRVVRVMDLKTPDSGESQRNRWENLAHLSARDEVKFVICSRADYEWARDVVRTHALDRRCTVLFSPSAGQLEPVQLADWLLADRLPVRFQVQLHKLLWGNTPGR

SEQ ID NO: 30241 - protein, 216 aa, Formivibrio citricus
  misc_feature (1)..(216): tr|A0A1I4ZHR3|A0A1I4ZHR3_9NEIS 7-carboxy-7-deazaguanine synthase OS=Formivibrio citricus OX=83765 GN=queE PE=3 SV=1
MKKPPSLRVSEIFYSLQGETSRIGLPTVFVRLTGCPLRCGYCDSKHAYNGGTSLSLSEILAAVAGYRAHYVCVTGGEPLVQAATPEFLTALCDAGYSVSLETSGALPVDKVDPRVSRIVDIKTPGSGEAAKMHWENLALLTPHDEIKLVLCGRGDYEWARDLILERELFKLAPVSLSPVWETLPPVDLAQWVLEDHLPVRMQVQLHKVLWGDRPGV

SEQ ID NO: 30242 - protein, 209 aa, Formosa agariphila
  misc_feature (1)..(209): tr|T2KIW0|T2KIW0_FORAG 7-carboxy-7-deazaguanine synthas e OS=Formosa agariphila (strain DSM 15362 / KCTC 12365 / LMG 23005 / KMM 3901) OX=1347342 GN=queE PE=3 SV=1
MKKEIQELVNKGEMLPLMEEFYTIQGEGFYKGTAAYFIRVGGCDVGCHWCDVKESWDAELHPPTETSKIVEKAALHSNTIVVTGGEPLTWDMTALTTQLKAKGLNVHIETSGAYPLTGVWDWICLSPKKMKLPTAEVSAKAHELKVIIFNRDDFKFAEEQAALVNEDCILYMQPEWSKRDKMIPEIVEYVMANPKWKVSLQTHKYLNIP

SEQ ID NO: 30243 - protein, 209 aa, Formosa algae
  misc_feature (1)..(209): tr|A0A2K2ZD63|A0A2K2ZD63_9FLAO 7-carboxy-7-deazaguanine synthase OS=Formosa algae OX=225843 GN=queE PE=3 SV=1
MKKDIQELVNKGEMLPLMEEFYTIQGEGFYKGTAAYFIRVGGCDVGCHWCDVKESWDAELHPPTATTTIVEKAALHSKTIVVTGGEPLTWDMTALTTQLKAKGLQVHIETSGAYPLTGTWDWICLSPKKLKLPTPEVSAKAHELKVIIFNKDDFKFAEEQAALVNKDCILYMQPEWSKRDKMIPEIVEYVMANPQWKVSLQTHKYLNIP

SEQ ID NO: 30244 - protein, 210 aa, Formosa sp.
  misc_feature (1)..(210): tr|A0A2E0I326|A0A2E0I326_9FLAO 7-carboxy-7-deazaguanine synthase OS=Formosa sp. OX=2018467 GN=queE PE=3 SV=1
MPKLETQALVNAGKMLPLMEAFYTIQGEGYHKGTAAYFIRIGGCDVGCHWCDVKDSWNAELHPPTNIEFIAKQAANFSDTIVVTGGEPLMWDMNPLTNLLKEKNLITHIETSGAYPLSGDWDWICLSPKKRKPPVFEIYSKADELKVIVYNKSDFKFAEKHAEKVSNSCILYLQPEWSAREKITPFIVEYVMKHPKWRISLQTHKYLNIP

SEQ ID NO: 30245 - protein, 217 aa, Formosa sp.
  misc_feature (1)..(217): tr|A0A516GQQ4|A0A516GQQ4_9FLAO 7-carboxy-7-deazaguanine synthase OS=Formosa sp. PS13 OX=2594004 GN=queE PE=3 S V=1
MCELSLHVMKKDIQELVNKGEMLPLMEEFYTIQGEGFYKGTAAYFIRVGGCDVGCHWCDVKESWDAELHPPTETSKIVEKAALHSKTIVVTGGEPLTWDMTPLTTQLKAKGLQVHIETSGAYPLTGVWDWICLSPKKMKLPTPEVSAKAHELKVIIFNKDDFKFAEEQAALVNKDCILYMQPEWSKRDKMIPQIVEYVMANPKWKVSLQTHKYLNIP

SEQ ID NO: 30246 - protein, 210 aa, Formosa spongicola
  misc_feature (1)..(210): tr|A0A316DIJ6|A0A316DIJ6_9FLAO 7-carboxy-7-deazaguanine synthase OS=Formosa spongicola OX=570520 GN=queE PE=3 SV=1
MTRSERQELIDKGLLLPLMEEFYTIQGEGFHKGTAAYFVRIGGCDVGCHWCDVKESWLAELHPPTETEKIVENAVKYSDTIVVTGGEPLTWDMTQLTTQLKAKGVQTHIETSGAYKLTGTWDWICLSPKKLKLPTEEIYNKAHELKMIIYNKSDFKFAEEQAAKVNKDCILYLQPEWSKRDKVVPEIVDYVMANPKWKVSLQTHKYLNIP

SEQ ID NO: 30247 - protein, 306 aa, Francisella adeliensis
  misc_feature (1)..(306): tr|A0A2Z4XW15|A0A2Z4XW15_9GAMM 7-carboxy-7-deazaguanine synthase OS=Francisella adeliensis OX=2007306 GN=queE PE=3 SV=1
MYYLLKYLNYLCSKLKDITYSEIFYSPQGEGHYTGVVSAWIRLFSCNLQCDGFGQKDPTDVNIYQLPYKTCDVSNIKRMKDLPVFETGCDSSYSWSKKFKHLAKTQSIEKTVDELENILPTKKFLHKDSKQETHLCITGGEPLINQDQIVAMLQEFERRENLPKFITIETNGTQKLNNEFKKYFKKYIAKGNELFLSVSPKLFSITGEKRAKAIKPETIKEYYELSSKGQLKFVIDNKQPSQIELEELVSIFRTYGIWYNVWCMPLGALKEQQYKIAREVAEYASSKGYYTCARVHTYLFGNEIGT

SEQ ID NO: 30248 - protein, 223 aa, Franconibacter pulveris
  misc_feature (1)..(223): tr|A0A0J8YAF3|A0A0J8YAF3_9ENTR 7-carboxy-7-deazaguanine synthase OS=Franconibacter pulveris OX=435910 GN=queE PE=3 SV=1
MQYPINEMFQTLQGEGYFTGVPAIFIRLQGCPVGCAWCDTKHTWDKLADREVSLYSVIAKTKESDKWGAASSEDLLAVISRQGYTARHVVITGGEPCIHDLLPLTHLLEKNGFSCQIETSGTHEVRCTPTTWVTVSPKVNMRGGYEVLDQALQRADEVKHPVGRMRDIEALDELLARLHDDKQRVIALQPISQKEDATRLCIETCIARNWRLSMQTHKYLNIA

SEQ ID NO: 30249 - protein, 221 aa, Frankia alni
  misc_feature (1)..(221): tr|Q0RM62|Q0RM62_FRAAA 7-carboxy-7-deazaguanine synthas e OS=Frankia alni (strain ACN14a) OX=326424 GN=queE PE= 3 SV=1
MQGEGPAAGRLATFVRLGGCNLSCSWCDTSYTWDGARFDLRTEITSTAVETIAAKVTTDLVVITGGEPLLHQERPGWTALLRTLTQQQRAIHVETNGTVRPTPMSLQHVAMWVVSPKLRNAGTHRGRQRARLATEWPALAAQHDGRAHLKIVCEGADDVQEAARLAERWGWPAGQVWAMPQGASVERLAQTWPAVVEAAAAAGLNASHRLHVLAWGQQRGH

SEQ ID NO: 30250 - protein, 251 aa, Frankia casuarinae
  misc_feature (1)..(251): tr|Q2JC63|Q2JC63_FRACC 7-carboxy-7-deazaguanine synthas e OS=Frankia casuarinae (strain DSM 45818 / CECT 9043 / CcI3) OX=106370 GN=queE PE=3 SV=1
MTAKESCRPNTSPTGHDVLVVNEIFGPTVQGEGPSTGRRCVFLRLGGCNLTCSWCDTPYTWDWWGVSDTGRRFDPGRELHAMSAAQVGDRLRGLGSGLVVISGGEPLSQQRRLLGLVTGLVDDGIEVEIETNGTVAPLEELAESGVAFNVSVKLAHSGVAEPRRLVPEALAAFAGNPSARFKFVCADRDDLDEVGTLVDRFNLAPVWIMPKGATPSAVLTGLAMLTDAAVARGWNVCTRLHVLVWGDERGR

SEQ ID NO: 30251 - protein, 212 aa, Frankia casuarinae
  misc_feature (1)..(212): tr|Q2J7K7|Q2J7K7_FRACC 7-carboxy-7-deazaguanine synthas e OS=Frankia casuarinae (strain DSM 45818 / CECT 9043 / CcI3) OX=106370 GN=queE PE=3 SV=1
MVYRIKEIFYTLQGEGVRSGRPAVFCRFALCNLWTGRERDRHRAVCQFCDTDFVGTDGPDGGVFDTPDDLADAVAARWPSDAPGALPYVVCTGGEPLLQLDTPAVSALHTRGFEVAVETNGTCPAPAGLDWVCVSPKAGAPLRLTTGDELKLVFPQPGAGPELFAGLEFGHHLLQPMDGPHREANTRAALDYCLAHPRWRLSIQTHKILGIR

SEQ ID NO: 30252 - protein, 237 aa, Frankia sp.
  misc_feature (1)..(237): tr|A0A0P7CSQ9|A0A0P7CSQ9_9ACTN 7-carboxy-7-deazaguanine synthase OS=Frankia sp. R43 OX=269536 GN=queE PE=3 SV= 1
MRAGGATLPVSEVFGPTLQGEGPHAGRLATFIRLGGCDLSCAWCDTAYTWDGSRYDLRVELTPTSPEALAAQAGTPIVVITGGEPLLHQDSPAWARLLDLLRDRGHTIHVETNGTRGPNEVSLASVTAWVVSPKLPSAGPHRGHQDPALHPDWPALAWEGTGVHLKVVCADEAEVAQAAALASRTRWPGVRVWVMPRGTTRAELDATWPVVAQAATEHGLNATHRLHVLAWGDERGR

SEQ ID NO: 30253 - protein, 239 aa, Frankia sp.
  misc_feature (1)..(239): tr|A0A062X6K5|A0A062X6K5_9ACTN 7-carboxy-7-deazaguanine synthase OS=Frankia sp. BMG5.23 OX=683305 GN=queE PE=3 SV=1
MIPTVQSAAPPRDILVSECFGPTFQGEGASSGRLALFLRLATCNLCCGWCDTPFTWDWSRFDRSAETRHARAADLVNWATSSAATLVVITGGEPLLQRDSLADLVASLAAAGKRVEIETNGTLVPGPALAASTAQFNVGIKLANSGMQEGRRVRPDVIRTFAETAACVWKFVVRDLADLDEISALEARFGLAPIWVMPEGTDTESTLTVMRSLGDEVLARGWNLTPRLHILLWGDARGR

SEQ ID NO: 30254 - protein, 225 aa, Frateuria aurantia
  misc_feature (1)..(225): tr|H8L144|H8L144_FRAAD 7-carboxy-7-deazaguanine synthas e OS=Frateuria aurantia (strain ATCC 33424 / DSM 6220 / NBRC 3245 / NCIMB 13370) OX=767434 GN=queE PE=3 SV=1
MSDAALPDAADAAQRLRITEIFHSLQGEADAIGWRTVFVRLTGCPLRCVWCDTTYSFHGGEWRDIDAILAEVASYGARHVCVTGGEPLSQKRCLILLERLCDAGYEVSLETSGALDVSQVDARVRKVLDLKAPDSGESARNLWSNLEHLQAADQVKFVLASRADYDWARDVVASHDLAARCMPMFSPVQGTLAPRELADWIVADRLPVRFQMQLHKLLWNDSPGH

SEQ ID NO: 30255 - protein, 229 aa, Frateuria sp.
  misc_feature (1)..(229): tr|A0A0Q9PDI8|A0A0Q9PDI8_9GAMM 7-carboxy-7-deazaguanine synthase OS=Frateuria sp. Soil773 OX=1736407 GN=queE P E=3 SV=1
MSGSEATAAVAAGQAAGERLRITEIFHSIQGEADAIGWRTVFVRLTGCPLRCVWCDTTYSFHGGEWRAIDDILAEVAGHGAHHVCVTGGEPLSQKRCLILLQRLCDAGYEVSLETSGALDVAAVDPRVRKVMDLKAPDSGESARNLWPNLAHLLPHDQVKIVIASRADYEWARGVVAEHGLDRRCMVLFSPVHGAVQPRELAEWIVADKLPVRFQLQLHKLLWNDAPGH

SEQ ID NO: 30256 - protein, 227 aa, Frateuria terrea
  misc_feature (1)..(227): tr|A0A1H6YNH3|A0A1H6YNH3_9GAMM 7-carboxy-7-deazaguanine synthase OS=Frateuria terrea OX=529704 GN=queE PE=3 SV =1
MGSDAGAASVAPMPAERLRITEIFHSIQGEADAIGWPTVFVRLTGCPLRCVWCDTEYSFHGGQWHAIDEILAEVARHGARHVCVTGGEPLAQKRCPILLRKLCDAGYEVSLETSGALDVAAVDPRVRKVMDLKAPDSGESARNLWSNLDHLLPHDQLKIVIASRADYEWARGVVAEHALERRCMVLFSPVHGAVQPRELAEWILADRLPVRFQMQLHKLLWNDAPGH

SEQ ID NO: 30257 - protein, 214 aa, Frederiksenia canicola
  misc_feature (1)..(214): tr|A0A3N4WRX0|A0A3N4WRX0_9PAST 7-carboxy-7-deazaguanine synthase OS=Frederiksenia canicola OX=123824 GN=queE P E=3 SV=1
MMQAVSFSQRFANTEYRIVEIFETLQGEGFNTGMPSIFIRFGKCNLACPWCDTNYNQYTTKTLAEIMAVVRGFSAKNIIITGGEPTIQPNLERLLDVLKAEGYFIAVETNGLKPVPKQIDYIATSPKRIYQKNYLKHHIPFAHEVRIVVDGDMLEFCEQIENTIPAERYYLSPCETDGVMNMLETIAQLGKLNQRSHKPRWQLSIQTHKMAGIE

SEQ ID NO: 30258 - protein, 265 aa, Fremyella diplosiphon
  misc_feature (1)..(265): tr|A0A1Z4M4S0|A0A1Z4M4S0_MICDP 7-carboxy-7-deazaguanine synthase OS=Fremyella diplosiphon NIES-3275 OX=1973485 GN=queE PE=3 SV=1
MTAKTTVKPTARLIEVFSAIQGEGLNVGTRQIFIRFALCDLRCHFCDSAHTWNAPSTCRIERTPGLRDFEEHSNPIPVPILLEWIERQNQPSIHDSISLTGGEPLLHAPFLELFLPQVRSLTNLPIYLETGGHRPEQLAMILPYLDSVGMDLKLPSVSGESYWQEHGQCLKLSYDSHLNIFVKIIISQQTDPTELERSALLVADVSPDIPVFLQPVTPLPVSEKSTAKTILAPTPDQVLQWQALMKQWLKHVRVVPQTHKMLNQL

SEQ ID NO: 30259 - protein, 204 aa, Frischella perrara
  misc_feature (1)..(204): tr|A0A0A7S4C7|A0A0A7S4C7_FRIPE 7-carboxy-7-deazaguanine synthase OS=Frischella perrara OX=1267021 GN=queE PE=3 SV=1
MPNFPIVEIFQSLQGEGYNTGMPAIFIRFGGCNLRCPWCDTNFDNFQKLSLTAILTRVLTYSAKNIIITGGEPTLQKYLPELVTRLKQLGYYVAIETNGLKSVYSEIDYIAVSPKYHYWRRYHDAPLIKADEVRIVVEEAKDIAEFCLAMEQRIEAKRYYLSPCEQNGQMALLPTLELLGKLNQGRQNNKWQLSIQTHKLANIE

SEQ ID NO: 30260 - protein, 204 aa, Frischella perrara
  misc_feature (1)..(204): tr|A0A318MTA0|A0A318MTA0_FRIPE 7-carboxy-7-deazaguanine synthase OS=Frischella perrara OX=1267021 GN=queE PE=3 SV=1
MLNFPIVEIFQSLQGEGYNTGMPAIFIRFGGCNLRCPWCDTNFDNFQKLSLTAILTRVLTYSAKNIIITGGEPTLQKYLPELVTRLKQLGYYVAIETNGLKSVYSEIDYIAVSPKYHYWRRYHDAPLIKADEVRIVVEEAKDIAEFCLAMEKRIEAKRYYLSPCEQNGQMALLPTLELLGKLNQGRQNNKWQLSIQTHKLANIE

SEQ ID NO: 30261 - protein, 225 aa, Fuerstia marisgermanicae
  misc_feature (1)..(225): tr|A0A1P8WNK4|A0A1P8WNK4_9PLAN 7-carboxy-7-deazaguanine synthase OS=Fuerstia marisgermanicae OX=1891926 GN=que E PE=3 SV=1
MFISETYESFQGEGPFAETSSLFIRTSGCNLRCSFCDTPYTSWHPEGDQVSLEELAAQIAASTAPHVVLTGGEPMLAPQLSELTDICRTAEKVITIETAGTVDRSVECDLMAISPKLRNSTPDDAVWSIRHEETRHQPAVIRSLFARYDSILKFVIDVDADVAEVEEYLTEFPQVERSKVWLMPQARTREELSEKTDWVRTAAESHGFQFSSRLHVEKFGNMRGV

SEQ ID NO: 30262 - protein, 234 aa, Fulvimarina sp.
  misc_feature (1)..(234): tr|A0A371WZZ3|A0A371WZZ3_9RHIZ 7-carboxy-7-deazaguanine synthase OS=Fulvimarina sp. 85 OX=2293836 GN=queE PE=3 SV=1
MSLRIAEIFGPTIQGEGPLIGEPTVFVRAGGCDYRCLWCDSLHAVESRYRHEWLPMEADAIMERIEALSGGRPLLVSISGGNPAIQDFGPLIALGRQKGYRFACETQGTIAPLWFADLDMLVLSPKPPSSGMETDWSAFEACIAAKGAVPAAMKIVIFDEADLAFARLAAERYPDLPLFLQPGNGETDPAIPVDLDALAGRLSWLVAQTVGKGWLRPRILPQLHVIVWGNQRGV

SEQ ID NO: 30263 - protein, 230 aa, Fulvimonas soli
  misc_feature (1)..(230): tr|A0A316IEC5|A0A316IEC5_9GAMM 7-carboxy-7-deazaguanine synthase OS=Fulvimonas soli OX=155197 GN=queE PE=3 SV= 1
MGGSDATVAPATSAPAVAGRLRITEIFHSIQGEADAIGWPTVFVRLTGCPLRCVWCDTEYAFHGGEWRAIEDILAEVAGHGARHVCVTGGEPLAQKRCLVLLRRLCDAGYEVSLETSGALDVAAVDPRVRKVVDLKAPGSGEEKRNLWSNLDHLLPHDQVKIVIAGRGDYEWARQVVAEHGLDRRCTVLFSPVHGAVEPRALAEWILEDRLPVRFQLQLHKLLWNDAQGR

SEQ ID NO: 30264 - protein, 250 aa, Fulvivirga imtechensis
  misc_feature (1)..(250): tr|L8JNN4|L8JNN4_9BACT 7-carboxy-7-deazaguanine synthas e OS=Fulvivirga imtechensis AK7 OX=1237149 GN=queE PE=3 SV=1
MKLARLNGKAEIFYSIQGEGKNIGRPSIFIRTSLCNLHCSWCDTDYTWNWKGTPFHHQNEALPGYQKFDKAEYIAELSIEGIACEVVALGCKNIVLTGGEPLLQQTDLLDLIRHLRNIDPGYWFEIETNGTIIPSAKFDVLIDQYNVSPKLANSGNTQRIREKEDAYNFFSSNAKAVFKFVVNTPEDMEEVFRLIRKYEINHNKVYLMPEGTSAETLKQKQQWLIEQCKEHHFHYTDRLHIHIYGNKRGV

SEQ ID NO: 30265 - protein, 250 aa, Fulvivirga sp.
  misc_feature (1)..(250): tr|A0A553F620|A0A553F620_9BACT 7-carboxy-7-deazaguanine synthase OS=Fulvivirga sp. M361 OX=2594266 GN=queE PE= 3 SV=1
MKLACLNDRPEIFHTIQGEGKSLGKPSVFVRLSLCNLHCVWCDTDYTWNWKGTTFKHNYDEIPDYAKYDKKAWIIELNVEEINNIIQSFNCKNVVITGGEPLLQQNELATLCRTLKSSKEGFEIEIETNGTIIPNISLDPWVDQYNVSPKLKNSGNSDHLRIKPKVLDFFGNNSKAYFKYVIESTTDLEEVLSMVKGHTIRTEQVFLMPQGVSAEELKKKRIWLVEACKKYGFNYTDRLHIHIWGNKRGV

SEQ ID NO: 30266 - protein, 222 aa, Fusibacter sp.
  misc_feature (1)..(222): tr|A0A1B6BAI4|A0A1B6BAI4_9FIRM 7-carboxy-7-deazaguanine synthase OS=Fusibacter sp. 3D3 OX=1048380 GN=queE PE=3 SV=1
MKYQVVESFSSINGEGLKAGELAYFIRFAGCNLNCSYCDTKWANAADVDFEWQTKAQIYKKIKAAGIKNVTLTGGEPLLQKGIKDLLSFLDQDEQIEVEIETNGSIDLALFKAQGYKRIAFTMDYKLEGSQMEAHMYLANFTALTKDDVLKFVISSPKELEQVAEIVRDYELIDRCHILLSPVYGKIEPLQIVDFMKAKQLNGVRVQLQLHKIIWNPDERGV

SEQ ID NO: 30267 - protein, 225 aa, Fusibacter sp.
  misc_feature (1)..(225): tr|A0A4Q2A0Z4|A0A4Q2A0Z4_9FIRM 7-carboxy-7-deazaguanine synthase OS=Fusibacter sp. A1 OX=2283630 GN=queE PE=3 SV=1
MSDTLYDVVEIFDSINGEGLNAGKLATFVRLKGCNLRCSYCDTAWAITPDAPSVKMSAEEIKSSILASGLEHVTLTGGEPLLVDKSVELLTALVSDRYKIDIETNGSVPIRPILEHEGLSAVDLIMDYKLPSSGMTESMHLENLELIRKQDTVKFVIGSEADMDEAYSIIKKYSLTGRTNIYFSPVFGSITPEAMVDFMKKHRLNGVTLQLQLHKIIWHPDAKGV

SEQ ID NO: 30268 - protein, 221 aa, Fusobacteriia bacterium
  misc_feature (1)..(221): tr|A0A1W9W0Q2|A0A1W9W0Q2_9BACT 7-carboxy-7-deazaguanine synthase OS=Fusobacteriia bacterium 4572_74 OX=1972457 GN=queE PE=3 SV=1
MKYYNIVEKFVSINGEGQRSGELAVFIRLAKCNLRCNYCDTMWANEENVTVTPMTKEDIYNYILDSKVKNITLTGGEPLLDLKVKDLIEYIVKDRSLFLEIETNGSIDLNLFRVDVKNLSFTMDYKGPSSEMEKFMFIKNFETISKQDTVKFVVGDYNDLLKAKEIIEKYNLMNKCRIYFSSVYKKIELDEIVEFMKEFRLNGVRLQLQMHKFIWGNKQGV

SEQ ID NO: 30269 - protein, 222 aa, Fusobacteriia bacterium
  misc_feature (1)..(222): tr|A0A1W9TLM0|A0A1W9TLM0_9BACT 7-carboxy-7-deazaguanine synthase OS=Fusobacteriia bacterium 4572_132 OX=197164 0 GN=queE PE=3 SV=1
MEYKVVEKFISVNGEGQKSGELSVFIRFAGCNLDCTYCDTKWANQKDVAYELMTENEIYSYIEGTGIKNITLTGGEPLLQENFEKLLEKLSEDENINIEIETNGSIDVSKFIKKTIKRPSFTLDYKSKSSKMEDKMLFENYNYINKNDTVKFVVGTMEDLKKSKLIMDKYELPKKTTVFFSPVFGKIEMSDIVEYMKVNKMNDVKLQIQLHKIIWDVTKKGV

SEQ ID NO: 30270 - protein, 222 aa, Fusobacterium equinum
  misc_feature (1)..(222): tr|A0A133N8D8|A0A133N8D8_9FUSO 7-carboxy-7-deazaguanine synthase OS=Fusobacterium equinum OX=134605 GN=queE PE =3 SV=1
MPKYKVVEIFESINGEGKKAGQLALFIRFQYCNLNCSYCDTKWANSKNSPFTWMSLEEILSLAKEKRIKNITLTGGEPLLQTDIRSLLEAFSKEKQFEIEIETNGSVPLETFRNIENSPSFTIDYKLPESHMEEYMSLENFSSVHRNDTVKFVVSNRKDLEKAKEIIEQYSLIGKCAVYFSPVFGKIALPSIVDFMKEHHLNGVNMQLQMHKFIWDPEEKGV

SEQ ID NO: 30271 - protein, 222 aa, Fusobacterium gonidiaformans; identical to SEQ ID NO: 30270
  misc_feature (1)..(222): tr|E5BED5|E5BED5_9FUSO 7-carboxy-7-deazaguanine synthas e OS=Fusobacterium gonidiaformans 3-1-5R OX=469605 GN=q ueE PE=3 SV=1

SEQ ID NO: 30272 - protein, 201 aa, Fusobacterium hwasookii
  misc_feature (1)..(201): tr|A0A0S2ZD43|A0A0S2ZD43_9FUSO 7-carboxy-7-deazaguanine synthase OS=Fusobacterium hwasookii ChDC F300 OX=13074 44 GN=queE PE=3 SV=1
MKIVEIFKSIQGEGSNFGKQVIFIRLGNCNLKCPWCDTDWKKYKELTIQEIMEEISKYNCKNVIITGGEPTISNLIPLLKELKDKGYWIAIETNGTNNIGYEYIDYIATSPKFIYGPNIVKLKEANEVRIVVDVDNKMDFITFCINVKNKIKAKKYFLSPVEIKGEFKNLALLGEIKQKLKERGAGEWEISIQLHKLMKIQ

SEQ ID NO: 30273 - protein, 222 aa, Fusobacterium mortiferum
  misc_feature (1)..(222): tr|C3WEG2|C3WEG2_FUSMR 7-carboxy-7-deazaguanine synthas e OS=Fusobacterium mortiferum ATCC 9817 OX=469616 GN=qu eE PE=3 SV=1
MANFKVVEIFESINGEGRRVGQLAIFIRLQKCNLNCSYCDTRWANGDDAPYTLMSEDKIYDRILKSGIKNITLTGGEPLLHKDVEILLEKIGENPNLSLEIETNGSIELEKFSKLKNPPLFTMDYKLPSSKMENKMCLDNFKYLTLKDTVKFVVGTIEDLKKAKEIIERYSLIGKCAVYFSPVFNSIDPIEIVKFMKENRLNGVNLQLQIHKFIWDPESKGV

SEQ ID NO: 30274 - protein, 222 aa, Fusobacterium mortiferum
  misc_feature (1)..(222): tr|A0A414PV70|A0A414PV70_FUSMR 7-carboxy-7-deazaguanine synthase OS=Fusobacterium mortiferum OX=850 GN=queE PE =3 SV=1
MANFKVVEIFESINGEGRRVGQLAIFIRLQKCNLNCSYCDTRWANGDDAPYTLMSEDEIYDRILKSGIKNITLTGGEPLLHKDVEILLEKIGENPNLSLEIETNGSIELEKFSKLKNPPLFTMDYKLPSSKMENKMCLDNFKYLTSKDTVKFVVGTIEDLKKAKEIIERYSLIGKCAVYFSPVFNSIDPIEIVKFMKENRLNGVNLQLQIHKFIWDPESKGV

SEQ ID NO: 30275 - protein, 222 aa, Fusobacterium necrogenes
  misc_feature (1)..(222): tr|A0A377GXV5|A0A377GXV5_9FUSO 7-carboxy-7-deazaguanine synthase OS=Fusobacterium necrogenes OX=858 GN=queE PE =3 SV=1
MANFKVVEMFESINGEGRKAGQLAIFIRLQKCNLNCSYCDTKWANGDDAPYTLMNEKEIYNRILESGIKNITLTGGEPLLHKDVEILLEKIGNNLNLSLEIETNGSIELERFSKLKNPPSFTMDYKLPSSKMESKMCLDNFKYLTAKDTVKFVVGTIEDLKKAKEIIERYSLIGKCAVYFSPVFNSIDPVEIVEFMKEKRLNGVNLQLQIHKFIWDPESKGV

SEQ ID NO: 30276 - protein, 222 aa, Fusobacterium necrophorum
  misc_feature (1)..(222): tr|A0A162IL92|A0A162IL92_9FUSO 7-carboxy-7-deazaguanine synthase OS=Fusobacterium necrophorum subsp. fundulifo rme OX=143387 GN=queE PE=3 SV=1
MPKYKVVEMFESINGEGKKAGQLALFIRFQFCNLNCSYCDTKWANTKKSPFTWMSLEEILETARQRGIKNITLTGGEPLLQSHIFALLEAFSKEKMFEVEIETNGSIPLKKFQSIENPPSFTLDYKLPQSNMEEYMCLENFSSVSAKDTIKFVVSDLQDLERSREIMNKYSLIGKCSLYLSPVFGKIPLPSIVDFMKKYHLNGVNMQLQMHKFIWDPETKGV

SEQ ID NO: 30277 - protein, 222 aa, Fusobacterium necrophorum
  misc_feature (1)..(222): tr|A0A017H666|A0A017H666_9FUSO 7-carboxy-7-deazaguanine synthase OS=Fusobacterium necrophorum subsp. fundulifo rme B35 OX=1226633 GN=queE PE=3 SV=1
MPKYKVVEMFESINGEGKKAGQLALFIRFQFCNLNCSYCDTKWANTKKSPFTWMSLEEILETARQRGIKNITLTGGEPLLQSHIFALLEAFSKEKMFEVEIETNGSIPLKKFQSIENPPSFTLDYKLPQSNMEEYMCLENFSSVSAKDTIKFVVSDLQDLERAREIMNKYSLIGKCSLYLSPVFGKIPLPSIVDFMKKYHLNGVNMQLQMHKFIWDPETKGV

SEQ ID NO: 30278 - protein, 201 aa, Fusobacterium nucleatum
  misc_feature (1)..(201): tr|A0A2B7YJ21|A0A2B7YJ21_FUSNP 7-carboxy-7-deazaguanine synthase OS=Fusobacterium nucleatum subsp. polymorphum OX=76857 GN=queE PE=3 SV=1
MKIVEIFKSIQGEGSNFGKQVIFIRLGNCNLKCSWCDTDWKKYKELTIQEIMEEISKYNCKNVIITGGEPTISNLTSLLKELKDKGYWIAIETNGTNNIGYEYIDYIATSPKFIYGSKIIKLKKANEVRIVVDTDNKIDFITFCINIRNKIKAKKYFLSPVEIDGEFKNLVLLGEIKQKLKERGAGEWEISMQLHKLMKIQ

SEQ ID NO: 30279 - protein, 201 aa, Fusobacterium periodonticum
  misc_feature (1)..(201): tr|A0A2D3LVN2|A0A2D3LVN2_9FUSO 7-carboxy-7-deazaguanine synthase OS=Fusobacterium periodonticum OX=860 GN=queE PE=3 SV=1
MKIVEIFKSIQGEGSNFGKQVIFIRLGNCNLKCPWCDTDWKKYKELTIQEIIEEISKYNCKNVVITGGEPTISNLTPLLKELKNRDYWIAIETNGTNNIGYEYIDYIATSPKFIYGPNIVKLKVADEVRIVIDKDNKMDFITFCINIKNKIKAKKYFLSPVEKKGEFKNLSLLGEIKQKLKERGAGEWDISIQLHKLMKIQ

SEQ ID NO: 30280 - protein, 222 aa, Fusobacterium sp.
  misc_feature (1)..(222): tr|R7JFM1|R7JFM1_9FUSO 7-carboxy-7-deazaguanine synthas e OS=Fusobacterium sp. CAG:439 OX=1262899 GN=queE PE=3 SV=1
MNKVKIKEIFESVQGEGPYVGYKQLFVRFCNCNLKCNYCDTEFSSDSDYKEFEPCALADKINTYKTVHSVSLTGGEPLLASEFLKELLPRVSKKIYLETNATLADKFLEVKPFIDIVSADIKLESATGIKNSYKFHDKFFENCKGIETFAKIVFNDKITDDEIETCCALGKKYGIELILQPEMEGVKMKISSNFVAETLDKFLNNYERVRLIPQVHKFLDVR

SEQ ID NO: 30281 - protein, 224 aa, Fusobacterium sp.
  misc_feature (1)..(224): tr|R7LYK8|R7LYK8_9FUSO 7-carboxy-7-deazaguanine synthas e OS=Fusobacterium sp. CAG:815 OX=1262901 GN=queE PE=3 SV=1
MNVKVKEIFSSIQGEGPVVGYKQLFIRFCNCNLKCNYCDTEFDKTNSEEFSPQELYKKITSEYNLKTFHSISLTGGEPLLSAEFLKEFLPLIKRQTKIYLETNATLSNNLEKIKNLIDIISADIKLETSTGLNTFDKHREFFAHCNGIETFAKIVFDKNITEEEIKTCAEIGNEFNIELVLQPKMIEDKMSVNSDFCNELLEKFTALHHNTRLIPQVHKFLDVR

SEQ ID NO: 30282 - protein, 209 aa, Gaetbulibacter sp.
  misc_feature (1)..(209): tr|A0A2G5KNX6|A0A2G5KNX6_9FLAO 7-carboxy-7-deazaguanine synthase OS=Gaetbulibacter sp. 5U11 OX=1889780 GN=queE PE=3 SV=1
MKQETQDLVNKGLMLPLMEEFYTIQGEGYHKGTAAYFIRIGGCDVGCHWCDVKESWNADLHPPTSTDVIVANAKKYSDTVVVTGGEPLTWDMTALTNKLKAEGCKIHIETSGAYELTGQWDWICLSPKKMKLPTQGVYDKAHELKCIIFNKDDFKFAEAQAAKVNKDCILYLQPEWSKRDTMIPLIVDYVMANPKWKVSLQTHKYLNIP

SEQ ID NO: 30283 - protein, 209 aa, Gaetbulibacter sp.
  misc_feature (1)..(209): tr|A0A2G5GK98|A0A2G5GK98_9FLAO 7-carboxy-7-deazaguanine synthase OS=Gaetbulibacter sp. 4G1 OX=1891971 GN=queE PE=3 SV=1
MNKDIQLLVDKGEMLPLMEEFYTIQGEGYHKGTAAYFIRIGGCDVGCHWCDVKESWNADLHPPTDTNKIVENAKKYSDTIVITGGEPLTWDMTLLTNKLKAEGMQTHIETSGAYKLTGTWDWICLSPKKMKLPTKEVYEKAHELKVIVYNKDDFRFAEEQATKVNKDCILYLQPEWSKRDKVVPEIVDYVMANPKWKVSLQTHKYLNIP

SEQ ID NO: 30284 - protein, 210 aa, Galbibacter marinus
  misc_feature (1)..(210): tr|K2PN42|K2PN42_9FLAO 7-carboxy-7-deazaguanine synthas e OS=Galbibacter marinus OX=555500 GN=queE PE=3 SV=1
MIEEGILAKVNAGEMLPLMEEFYTIQGEGFHKGTAAYFIRVGGCDVGCHWCDVKESWNAATHPPTDVKQIVDNAAKYSDTIVITGGEPLTWDMSFITSELKKRGLKIHIETSGAYPLTGQWDWICLSPKKLKLPTEEIYKKAHELKVIVFNQHDLKFAEEQAAKVNENCILYLQPEWSKRDKVIPMIVDYVMQHPKWKVSLQTHKYLNIP

SEQ ID NO: 30285 - protein, 221 aa, Gallaecimonas pentaromativorans
  misc_feature (1)..(221): tr|A0A3N1PTC2|A0A3N1PTC2_9GAMM 7-carboxy-7-deazaguanine synthase OS=Gallaecimonas pentaromativorans OX=584787 GN=queE PE=3 SV=1
MRYPVNEIFETLQGEGRFTGMPAIFVRLQGCPVGCSWCDTKHTWEQNSEDERPLGDILVKTAATSCWAWATPEAMLATFAERGFNAKLVVITGGEPCMFDLVPLCEALHSAGYSTQIETSGTFEINVPQETVITLSPKVGMKGGYAILDSALERADDIKHPVARERDIEELDALLARCSSDKPVYLQPVSQGKRATKLCITTCIKRNWRLSVQLHKYLGIE

SEQ ID NO: 30286 - protein, 220 aa, Gallaecimonas xiamenensis
  misc_feature (1)..(220): tr|K2IFC3|K2IFC3_9GAMM 7-carboxy-7-deazaguanine synthas e OS=Gallaecimonas xiamenensis 3-C-1 OX=745411 GN=queE PE=3 SV=1
MRYPVNEIFETLQGEGRFTGLPAIFVRLQGCPVGCSWCDTKHTWEQQPQDERPLGDILVKTAASSCWAWATPEAMLATFAERGFNAKLVVITGGEPCMFDLVPLCEALHGAGYSTQIETSGTFEIKVPKETVITLSPKVGMKGGYAILDSALERADDIKHPVARERDIEELDALLARCGEKPVYLQPVSQGKRATELCIKTCIERNWRLSVQLHKYLGIE

SEQ ID NO: 30287 - protein, 203 aa, Gallibacterium anatis
  misc_feature (1)..(203): tr|A0A263HKV3|A0A263HKV3_9PAST 7-carboxy-7-deazaguanine synthase OS=Gallibacterium anatis OX=750 GN=queE PE=3 SV=1
MQTEYAIVEIFESLQGEGFNTGMPAIFIRFGKCNLACPWCDTDYQTFSLMTLQQIADQVTAFSAKNIIITGGEPTIQPNLEKLLSYFKTLGYFLAIETNGLKPVPPQIDYIATSPKRLYRHKYQQRGITHADEVRIVNDDKNIQLFCQEIAKKIQAKHYYLSPCEQQGEMNLLDTIRKLGQLNENTDIKWQLSIQTHKLVGIE

SEQ ID NO: 30288 - protein, 203 aa, Gallibacterium anatis
  misc_feature (1)..(203): tr|F4HCW0|F4HCW0_GALAU 7-carboxy-7-deazaguanine synthas e OS=Gallibacterium anatis (strain UMN179) OX=1005058 G N=queE PE=3 SV=1
MQTEYAIVEIFESLQGEGFNTGMPAVFIRFGKCNLACPWCDTDYQTFSLMTLQQIADQVTAFSAKNIIITGGEPTIQPNLEKLLSYFKTLGYFLSIETNGLKPVPPQIDYIATSPKRLYRHKYQQRCITHADEVRIVNDDENILSFCREIAKKIEAKHYFLSPCEQQGEMNLLDTIRKLGQLNENTDIKWQLSIQTHKLVGIE

SEQ ID NO: 30289 - protein, 203 aa, Gallibacterium genomosp.
  misc_feature (1)..(203): tr|A0A0A2Y382|A0A0A2Y382_9PAST 7-carboxy-7-deazaguanine synthase OS=Gallibacterium genomosp. 1 OX=155515 GN=qu eE PE=3 SV=1
MKTEYAIVEIFESLQGEGFNTGMPAIFIRFGKCNLACPWCDTDYQTFSLMTLQQIANQVTSFTAKNIIITGGEPTIQPNLEKLLSHFKKLGYYLAIETNGLKPIPPQIDYIATSPKRLYRHKYQQRGITHADEVRIVNDDKNIQLFCQEIAKKIQAKHYYLSPCEQQGEMNLLDTIRKLGQLNENTDIKWQLSIQTHKLVGIE

SEQ ID NO: 30290 - protein, 203 aa, Gallibacterium genomosp.
  misc_feature (1)..(203): tr|A0A0A2XCK4|A0A0A2XCK4_9PAST 7-carboxy-7-deazaguanine synthase OS=Gallibacterium genomosp. 2 OX=155517 GN=qu eE PE=3 SV=1
MQTEYAIVEIFESLQGGGFNTGMHAIFIRFGKCNLTCPWCDTDYQTFSLMTLQQIANQVTSFTAKNIIITGGEPTIQPNLEKLLSHFKKLGYFLAIETNGLKPIPPQIDYIATSPKRLYRHKYQQRGITHADEVRIVNDDKNIQLFCQEIAKKIQAKHYYLSPCEQQGEMNLLDTIRKLGQLNENTDIKWQLSIQTHKLVGIE

SEQ ID NO: 30291 - protein, 204 aa, Gallibacterium salpingitidis
  misc_feature (1)..(204): tr|A0A1A7P2K1|A0A1A7P2K1_9PAST 7-carboxy-7-deazaguanine synthase OS=Gallibacterium salpingitidis OX=505341 GN= queE PE=3 SV=1
MQTPYQIVEIFESLQGEGFNTGMPAIFIRFGKCNLACPWCDTDYHHFQTMTLQQIAERVATYTAKNIIITGGEPTIQPHLRKLLNYLKQQGYFLAIETNGLKPIPSEIDYIATSPKRLYQDKYWQRSIDFADEVRIVNDCDDILQFCEKIATKIHAKHYYLSPCEQNGEMNILDTIRTIGILNQHSKTIKWQLSLQTHKLVGIE

SEQ ID NO: 30292 - protein, 219 aa, Gallionella capsiferriformans
  misc_feature (1)..(219): tr|D9SCJ7|D9SCJ7_GALCS 7-carboxy-7-deazaguanine synthas e OS=Gallionella capsiferriformans (strain ES-2) OX=395 494 GN=queE PE=3 SV=1
MSEQNSAAQLRITEIFFSLQGETRLIGLPTVFVRLTGCPLRCVYCDTAYAFSGGKNHTLAEILQQVAQYKTRYVTVTGGEPLAQRNCLPLLKALCDAGYQVSLETSGALDIGAVDARVMRVVDIKTPASGEVDKNRWENLAILTPQDEIKFVLCDENDYDWACQILAQYHLADQCPVLFSPAQGDLDPTQLADWILRDGLPVRFQLQLHKILWNNEAGH

SEQ ID NO: 30293 - protein, 219 aa, Gallionella sp.
  misc_feature (1)..(219): tr|A0A3D2NM93|A0A3D2NM93_9PROT 7-carboxy-7-deazaguanine synthase OS=Gallionella sp. OX=2052161 GN=queE PE=3 SV =1
MSESALQAQLRISEIFFSLQGETRRIGLPTVFVRLTGCPLRCGYCDTVYAFTGGQNKSLAEILEQVAQYAPRYVTVTGGEPLAQKNCLPLLTALCDAGYDVSLETSGALDIGGVDARVMRVVDIKTPASGEAARNRWENLPLLTQHDEIKFVLCDEPDYRWAKEILKERQLADSCEVTFSPAQGTLAATQLADWILRDHLPVRFQVQLHKILWNNEAGH

SEQ ID NO: 30294 - protein, 219 aa, Gallionella sp.
  misc_feature (1)..(219): tr|A0A3D2HA02|A0A3D2HA02_9PROT 7-carboxy-7-deazaguanine synthase OS=Gallionella sp. OX=2052161 GN=queE PE=3 SV =1
MPEQNSAAQLRITEIFFSLQGETRLIGLPTVFVRLTGCPLRCVYCDTAYAFTGGKNHTLTDILQQVAQYKTRYVTVTGGEPLAQRNCLPLLKALCDAGYHVSLETSGALDISAVDARVMRVVDIKTPASGEVDKNRWENLNFLTPQDEIKFVLCDENDYEWACQILAQYHLADHCPVLFSPAQGMLDPTQLADWILRDGLPVRFQLQLHKILWNNEAGH

SEQ ID NO: 30295 - protein, 218 aa, Gallionellaceae bacterium
  misc_feature (1)..(218): tr|A0A1J4TAC9|A0A1J4TAC9_9PROT 7-carboxy-7-deazaguanine synthase OS=Gallionellaceae bacterium CG1_02_60_325 OX =1805162 GN=queE PE=3 SV=1
MNQPVADTLRISEIFYSLQGETSRAGLPTVFVRLTGCPLRCSYCDTAYAFSGGQTLPLPAILAAVARHAPRYVTVTGGEPLAQKNSLSLLRALCDSGYAVSLETGGMLDISRVDERVMIVLDIKTPASGEVEKNYWSNLEQLKPQDEIKFVLCGEADYQWAKQVLHEHKLAGRCGVLFSPAQGQLAPSELAQWILRDHLPVRFQLQLHKLLWGNEAGR

SEQ ID NO: 30296 - protein, 218 aa, Gallionellaceae bacterium; identical to SEQ ID NO: 30295
  misc_feature (1)..(218): tr|A0A2H0NLN2|A0A2H0NLN2_9PROT 7-carboxy-7-deazaguanine synthase OS=Gallionellaceae bacterium CG11_big_fil_rev _8_21_14_0_20_60_62 OX=1974012 GN=queE PE=3 SV=1

SEQ ID NO: 30297 - protein, 229 aa, Gallionellales bacterium
  misc_feature (1)..(229): tr|A0A1G0DWB0|A0A1G0DWB0_9PROT 7-carboxy-7-deazaguanine synthase OS=Gallionellales bacterium RIFCSPLOWO2_02_58 _13 OX=1798252 GN=queE PE=3 SV=1
MPPRDGGAELSAAGGATAQLRINEIFFSLQGETSRIGLPTVFIRLTGCPLRCTYCDTTYAFAGGRNLGIADILRHVAEYAPRYVTVTGGEPLAQKNCLPLLCALCDEGYVVSLETSGALDIGEVDARVMRVMDIKTPASGEAGKNRWENLPLLNMHDEIKFVLCDESDYRWAKQILLQHRLNDKCAVALSPAHGMLDATQLAEWILRDRLPVRMLLQLHKLLWNDAPGH

SEQ ID NO: 30298 - protein, 219 aa, Gallionellales bacterium; identical to SEQ ID NO: 30293
  misc_feature (1)..(219): tr|A0A2M8DY63|A0A2M8DY63_9PROT 7-carboxy-7-deazaguanine synthase OS=Gallionellales bacterium CG_4_9_14_0_8_um_ filter_55_61 OX=1974015 GN=queE PE=3 SV=1

SEQ ID NO: 30299 - protein, 218 aa, Unknown
  misc_feature (1)..(218): tr|E1VPX7|E1VPX7_9GAMM 7-carboxy-7-deazaguanine synthas e OS=gamma proteobacterium HdN1 OX=83406 GN=queE PE=3 S V=1
MSLPTASLRITEIFHSLQGETRTLGLPTVFVRLTGCPLRCQYCDTAYAFSGGQQMSLEQILETVAGFRTHYVTVTGGEPLAQPNCIPLLQALCDQGYEVSLETSGALDISEIDARVVRVVDLKTPGSGEMHRNLYENIKYLQPHDQVKFVLCSRQDYDWARAKLLEYDLCNRVSDVLFSPSWGQLDATELAEWILADRLPVRFQMQLHKLLWADAAGH

SEQ ID NO: 30300 - protein, 213 aa, Unknown
  misc_feature (1)..(213): tr|A0A2T9ZUH5|A0A2T9ZUH5_9GAMM 7-carboxy-7-deazaguanine synthase OS=gamma proteobacterium symbiont of Ctena or biculata OX=1968598 GN=queE PE=3 SV=1
MSQLRVTEIFLSLQGEGRSAGYPTVFIRLTGCPLRCDYCDTPYAFSGGELLSLEQILQQVDAFQAEYVCVTGGEPLAQKGCLPLLSALCDAEYRVSLETSGALDIVAVDERVTRVMDLKTPGSGEMERNRLANLDALRTADQVKFVITDRVDYEWSCEQMKRFRIAQKCEVLFSPAQDRIDPTALADWMVEDRIEARLQLQLHKLLWGDQVGR

SEQ ID NO: 30301 - protein, 210 aa, Gammaproteobacteria bacterium
  misc_feature (1)..(210): tr|A0A1G0G7F7|A0A1G0G7F7_9GAMM 7-carboxy-7-deazaguanine synthase OS=Gammaproteobacteria bacterium RIFCSPHIGHO2 _02_FULL_39_13 OX=1798270 GN=queE PE=3 SV=1
MKITEIFFSLQGETKTVGLPTVFVRLTGCPLRCQYCDTEYAFSGGKNYSIDDVIKNIEKYSTKYVTVTGGEPLAQKECLLLLKTLCDLQYYVSLETSGALDISEVDSRVIKIVDIKTLASLESSKNNFDNIKYLLSHDQIKFVICDRNDYEWSKKIMLQFELNKKCEILFSPSYHQIDYATLADWILADQLPVRFQVQLHKVVWGDVEGK

SEQ ID NO: 30302 - protein, 219 aa, Gammaproteobacteria bacterium
  misc_feature (1)..(219): tr|A0A2E0N3C2|A0A2E0N3C2_9GAMM 7-carboxy-7-deazaguanine synthase OS=Gammaproteobacteria bacterium OX=1913989 G N=queE PE=3 SV=1
MPVNPAVTLRITEIFHSLQGEASTVGRPTVFIRLTGCPLRCQYCDTAYAFEGGSMRKLEEILAEVERLDCQLITVTGGEPLAQPNCILLLQLLCDEGYQVSLETSGALSVEKVDPRVSIVLDLKTPGSREADRNDLDNLSLISQKDQVKFVICNNQDYVWAKAKLLEWNLAARAGEVLFSPSFGEQNPAELAEWILEDHLPVRMQMQLHKLLWGEAAGR

SEQ ID NO: 30303 - protein, 203 aa, Geitlerinema sp.
  misc_feature (1)..(203): tr|K9S846|K9S846_9CYAN 7-carboxy-7-deazaguanine synthas e OS=Geitlerinema sp. PCC 7407 OX=1173025 GN=queE PE=3 SV=1
MTKTEVLTYPVVEMFHSVQGEGHWAGTSAFFVRLAGCDVGCWFCDTKESWNAKRHPQHSVEEIASAAIAARPAIAVITGGEPLLHDLGPLTQALRSRGLRVQLETSGAHPFSGHLDWVTLSPKPFKAPHPSVYCHVNELKVVITQAQDFAWAEEQAAQVPASALRLLQPEWSTPESQQLIFDYVLQHPQWRVSLQTHKFLGVR

SEQ ID NO: 30304 - protein, 210 aa, Gelidibacter algens
  misc_feature (1)..(210): tr|A0A1A7QW31|A0A1A7QW31_9FLAO 7-carboxy-7-deazaguanine synthase OS=Gelidibacter algens OX=49280 GN=queE PE=3 SV=1
MTKSEKQELIAQGLLLPLMEEFYTIQGEGFHKGTAAYFIRLGGCDVGCHWCDVKESWNAELHPPTMADVIVDHATKYSKTIVITGGEPLMWNMDPLTSKLKENGLQIHIETSGAYQLTGTWDWICLSPKKLKLPTEEVYEKANELKVIVYNKDDFRFAEEQAAKVNKDCILYLQPEWSKRDKVVPEIVDYVMANPKWKVSLQTHKYLNIP

SEQ ID NO: 30305 - protein, 210 aa, Gelidibacter gilvus
  misc_feature (1)..(210): tr|A0A4Q0XDF8|A0A4Q0XDF8_9FLAO 7-carboxy-7-deazaguanine synthase OS=Gelidibacter gilvus OX=59602 GN=queE PE=3 SV=1
MTKSEKQELIDQGLLLPLMEEFYTIQGEGFHKGTAAYFIRLGGCDVGCHWCDVKESWNAELHPPTMADAIVENAAKFSKTIVITGGEPLMWNMGPLTSKLKDKGLQIHIETSGAYNLTGTWDWICLSPKKLKLPTQAVYDQANELKVIIYNNDDFRFAEEQAAKVNKDCILFLQPEWSKRDKVIPEIVEYVMANPQWKVSLQTHKYLNIP

SEQ ID NO: 30306 - protein, 210 aa, Gelidibacter salicanalis
  misc_feature (1)..(210): tr|A0A5C7AFH9|A0A5C7AFH9_9FLAO 7-carboxy-7-deazaguanine synthase OS=Gelidibacter salicanalis OX=291193 GN=queE PE=3 SV=1
MTKSEKQELIAQGLLLPLMEEFYTIQGEGFHKGTAAYFIRLGGCDVGCHWCDVKESWVAELHPPTMADAIVENAAKYSNTIVITGGEPLMWNMKPLTSKLKEKGLQVHIETSGAYELTGTWDWICLSPKKLKLPTELVYEKANELKVIVYNKDDFKFAEEQAAKVNKDCILYLQPEWSKRDKVVPQIVDYVMANPKWKVSLQTHKYLNIP

SEQ ID NO: 30307 - protein, 210 aa, Gelidibacter sediminis
  misc_feature (1)..(210): tr|A0A4R7PIT3|A0A4R7PIT3_9FLAO 7-carboxy-7-deazaguanine synthase OS=Gelidibacter sediminis OX=1608710 GN=queE PE=3 SV=1
MTKSEKQELIAQGLLLPLMEEFYTIQGEGYHKGTAAYFIRIGGCDVGCHWCDVKESWVAELHPPTMADAIVDNAAKYSNTIVITGGEPLMWNMDPLTSKLKQRGLQVHIETSGAYELTGVWDWICLSPKKLKLPTPRVYERANELKVIVYNKDDFRFAEEQAAKVNKECILYLQPEWSKRDKVVPEIVDYVMANPKWKVSLQTHKYLNIP

SEQ ID NO: 30308 - protein, 212 aa, Geminocystis sp.
  misc_feature (1)..(212): tr|A0A0D6AR17|A0A0D6AR17_9CHRO 7-carboxy-7-deazaguanine synthase OS=Geminocystis sp. NIES-3709 OX=1617448 GN=q ueE PE=3 SV=1
MLLSQNKVDYSLNLDYEYPLVEMFHSIQGEGFWSGVNAFFIRLAGCDVFCPWCDQKETWSMKKYPLFTVQNIVDNLENINTKHIIITGGEPLLHDLLPLTNILKKKGYKTHLETSGSHHFTGDFDWVTFSPKPYKKIHNSIYDRVGELKIIIDNNNDFIFAELEAKKIPNNIPKYLQPQWDNPLSQELIFNYILDHPEWRLSLQTHKFMGVR

SEQ ID NO: 30309 - protein, 208 aa, Geminocystis sp.
  misc_feature (1)..(208): tr|A0A0D6AHS2|A0A0D6AHS2_9CHRO 7-carboxy-7-deazaguanine synthase OS=Geminocystis sp. NIES-3708 OX=1615909 GN=q ueE PE=3 SV=1
MLLINNKTNLEHQYFIVEMFHSIQGEGFWSGENSFFIRLAGCDVYCPWCDQKETWSMKKYPFLTLEKIINNLTNINTQHIIITGGEPLLHDLFPLTKSLKNLGYKTHLETSGSHIFSGEFDWVTFSPKPYKKPHESIYNQVSELKIVINDQNDLMWAESEAQKLPINIPKYLQPQWENPDSQELIFDYILNHPQWRLSLQTHKFLGVR

SEQ ID NO: 30310 - protein, 242 aa, Gemmata obscuriglobus
  misc_feature (1)..(242): tr|A0A2Z3GZR5|A0A2Z3GZR5_9BACT 7-carboxy-7-deazaguanine synthase OS=Gemmata obscuriglobus OX=114 GN=queE PE=3 SV=1
MSEPKRTLLADVPPEARHRVTLLRDLPAGELLVHEIYLSVQGESTFAGLPCVFVRTSVCDSRCRWCDTPHAFTQGTRVPRAEVLGKVLSFGCPLVEITGGEPLLQPDVLPLMSELCAAGKTVLLETSGAHDVSAVDPRVHIIMDVKCPASGESHRNRWANFDALKPTDQIKFVIASRADWDWAVGVIRAHKLDERFACLVSCVFSDLKPVELVGWLLASGLHRVRMQLQMHKYIWEPNARGV

SEQ ID NO: 30311 - protein, 238 aa, Gemmata sp.
  misc_feature (1)..(238): tr|A0A142XGW8|A0A142XGW8_9BACT 7-carboxy-7-deazaguanine synthase OS=Gemmata sp. SH-PL17 OX=1630693 GN=queE PE= 3 SV=1
MRTPLLDVPAEAAHRVVLLRDVPAGELLVHEIYISVQGESTFAGLPCVFVRASVCDSRCRWCDTPHAFNQGTRMTRADVLAKALSYNCPLVEITGGEPLLQSEMFTLMTELCDAGKTVLLETSGAHSVAEVDPRVHVIMDLKCPDSGESHRNRWANLDVLKPTDQIKFVIASRADWDWAANAIRTNKLDERFTCLVSCVFTSVKPVELVGWLLESGLHRVRMQLQMHKYIWEPSTRGV

SEQ ID NO: 30312 - protein, 231 aa, Gemmataceae bacterium
  misc_feature (1)..(231): tr|A0A5C1AC16|A0A5C1AC16_9BACT 7-carboxy-7-deazaguanine synthase OS=Gemmataceae bacterium PX52 OX=2598579 GN=q ueE PE=3 SV=1
MSAEPKVAGRVALLQAVPPGELLIHELYRSLQGESRYAGLPCVFVRTTGCSLRCTWCDTPYAFTRGERMSRTDVVTKALAFDTPLIEITGGEPLEQPEVLPLMAALCDAGKTVLLETSGALDISKVDRRVHVIMDLKCPDSGECGRNLWANLDHLKPSDEIKFVIASERDWRWAEAIIRERRLDLRFGVLASGVFGVNLADLAAWVLASRLTVRMQLQMHKYVWEPNTRGV

SEQ ID NO: 30313 - protein, 246 aa, Gemmataceae bacterium
  misc_feature (1)..(246): tr|A0A4V0I7C4|A0A4V0I7C4_9BACT 7-carboxy-7-deazaguanine synthase OS=Gemmataceae bacterium OX=2052164 GN=queE P E=3 SV=1
MGGMSELKTISLLESVPPEARHRVQLLGRVPAGELLVHEVYRSVQGESTFAGLPCVFVRLSVCDLRCVWCDTPHAFNRGERMSRADVLAEALAFDCPLVEVTGGEPLLQPDVFPLMSELADAGRTVLLETSGAHDVSRVDRRVHVVMDLKCPDSGECDRNLWANLDALKPTDEIKFVISSRRDWDWAAATIREHQLDARFACLVSPVFGNVQPVELVNWLLESGLQRVRFQLQLHKIVWDPATRGV

SEQ ID NO: 30314 - protein, 222 aa, Gemmatimonadaceae bacterium
  misc_feature (1)..(222): tr|A0A2E0DNB1|A0A2E0DNB1_9BACT 7-carboxy-7-deazaguanine synthase OS=Gemmatimonadaceae bacterium OX=2026741 GN= queE PE=3 SV=1
  misc_feature (82)..(82): Xaa can be any naturally occurring amino acid
  misc_feature (90)..(90): Xaa can be any naturally occurring amino acid
MTEQFLRISEIFHSIQGESTWAGTPCTFVRVTGCPLRCSWCDTTYAFQGGTRMSFAQILEAVASFPTRIVEVTGGEPLAHPXSFALTDEXLKEGYTVLVETSGAFDISSLDQRVHKIMDLKCPGSEESEKNRYENLEHLTGRDEIKFVLQDREDYDWAKSAIQQYELEQRVEDGTLRAILVSPVWGKIDLQELSQWILEDGLQVRFQLQVHKLIWGPEATGV

SEQ ID NO: 30315 - protein, 199 aa, Gemmatimonadaceae bacterium; identical to SEQ ID NO: 28844
  misc_feature (1)..(199): tr|A0A1V4R9T4|A0A1V4R9T4_9BACT 7-carboxy-7-deazaguanine synthase OS=Gemmatimonadaceae bacterium 4484_173 OX=19 56166 GN=queE PE=3 SV=1

SEQ ID NO: 30316 - protein, 213 aa, Gemmatimonadales bacterium
  misc_feature (1)..(213): tr|A0A524IPW7|A0A524IPW7_9BACT 7-carboxy-7-deazaguanine synthase OS=Gemmatimonadales bacterium OX=2448054 GN=q ueE PE=3 SV=1
MRVTEIFHSIQGESSFAGQPCVFVRTTGCNLRCTWCDTAYAFHGGTDMAVDEIIKEVERIGGACRLVELTGGEPLLQHDIGDLAAALLAGGYTVLCETSGSVPVDRVPASVVKILDFKCPGSGEVESNDWTNLDRLSPERDEIKFVICDRADYEWAKSQVANRTLDRFTVHFSPEFESMDRRDLATWILSDGLPVRLQLQLHKFVWDPAKRGV

SEQ ID NO: 30317 - protein, 212 aa, Gemmatimonadales bacterium
  misc_feature (1)..(212): tr|A0A524GY93|A0A524GY93_9BACT 7-carboxy-7-deazaguanine synthase OS=Gemmatimonadales bacterium OX=2448054 GN=q ueE PE=3 SV=1
MSYAVKEIFYTLQGEGAQAGRPAVFCRFAGCNLWSGRESDRADATCDFCDTDFVGTDGPGGGRFATAEALAAAVKAAWPTAAGEGVPYVVCTGGEPLLQLDRGAVDALHAAGFEVAVETNGTQPAPAGLDWVCVSPKAGAALLLRRGDELKLVYPQPSALPDAFDDLEFTHRYLQPMDGPRLQEYTAGAAAYCLAHPSWRLSLQMHKLIGLP

SEQ ID NO: 30318 - protein, 259 aa, Gemmatimonadetes bacterium
  misc_feature (1)..(259): tr|A0A2E4MXY3|A0A2E4MXY3_9BACT 7-carboxy-7-deazaguanine synthase OS=Gemmatimonadetes bacterium OX=2026742 GN=q ueE PE=3 SV=1
  misc_feature (212)..(212): Xaa can be any naturally occurring amino acid
  misc_feature (236)..(236): Xaa can be any naturally occurring amino acid
MNGIDGIPDAAENNKPVWNDGQTLQVNEIFYSIEGEGVRVGQPTTFIRLSKCNLRCFFCDTEFDSFTEMSIRKIVEEVRMHSAEWVSLTGGEPIGQNIAPLCERLLGNGYRLHIETSGSLTPQAELFELIEHWTVSPKRRRIVDGFERITELKYVVGKAFREDMIEGDRSDLVYLQPESSKPEYVIKTLEILQRHPGWRLSCRIHKMLHLPXRLPVPKQENRRVSGRKKGGHRSSXVPTDIVRCVYRGGVVFCETKDAR

SEQ ID NO: 30319 - protein, 230 aa, Gemmatimonadetes bacterium
  misc_feature (1)..(230): tr|A0A2V7QPJ6|A0A2V7QPJ6_9BACT 7-carboxy-7-deazaguanine synthase OS=Gemmatimonadetes bacterium OX=2026742 GN=q ueE PE=3 SV=1
MTYTVKEIFYTLQGEGAQTGRAAVFCRFSGCNLWSGREEDRSRAVCQFCDTDFVGTGPEGGRFTSAKELADVIDGCWTGGVSRTDSEAGEAAGTLVDSTPQRGRKYVVCTGGEPLLQVNESLISALHQRGFEVAVETNGTRPAPGSLDWICVSPKAGAPLVQTTGNELKLVYPQENAPPENFEQLDFRHFFLQPMDGPHTERNTALAIEYCLRHPRWRLSIQTHKLVGLR

SEQ ID NO: 30320 - protein, 212 aa, Gemmatimonas aurantiaca
  misc_feature (1)..(212): tr|C1AA82|C1AA82_GEMAT 7-carboxy-7-deazaguanine synthas e OS=Gemmatimonas aurantiaca (strain T-27 / DSM 14586 / JCM 11422 / NBRC 100505) OX=379066 GN=queE PE=3 SV=1
MAYTVKECFYTLQGEGVNAGRAAVFCRFSGCNLWTGREADRHKATCTFCDTDFVGVGPDGGKFATAAALAAFVKSRWPVDAPGSARPFVVCTGGEPLLQLDEAAIDALHAEGFEIAVETNGTQPAPAGLDWICVSPKADAPVVLTRGDELKLVFPQEQARPERFASLEFAHFLLQPMDDPQAAENTRAALAYCLAHPQWRLSVQTHKVLGIR

SEQ ID NO: 30321 - protein, 212 aa, Gemmatimonas aurantiaca; identical to SEQ ID NO: 30320
  misc_feature (1)..(212): tr|A0A3D4VB23|A0A3D4VB23_9BACT 7-carboxy-7-deazaguanine synthase OS=Gemmatimonas aurantiaca OX=173480 GN=queE PE=3 SV=1

SEQ ID NO: 30322 - protein, 212 aa, Gemmatimonas phototrophica
  misc_feature (1)..(212): tr|A0A143BM19|A0A143BM19_9BACT 7-carboxy-7-deazaguanine synthase OS=Gemmatimonas phototrophica OX=1379270 GN=q ueE PE=3 SV=1
MSYTVKECFYTLQGEGVNAGRAAVFCRFSGCNLWTGREVDRASAVCTFCDTDFVGVGPDGGKFATAEALAAFVKSRWPADAPASVRPFVVCTGGEPLLQLDEAAIAALHAEGFEVAVETNGTQPAPAGLDWICVSPKANAPVVLAAGDELKLVYPQPLAMPERFAGLNFAHFLLQPMDGPDQAANTAAALAYCLAHPQWRLSVQTHKTLGIR

SEQ ID NO: 30323 - protein, 212 aa, Gemmatimonas sp.
  misc_feature (1)..(212): tr|A0A0S8GZ06|A0A0S8GZ06_9BACT 7-carboxy-7-deazaguanine synthase OS=Gemmatimonas sp. SM23_52 OX=1703359 GN=que E PE=3 SV=1
MKITEIFFSIQGESSWAGMPCVFVRTTGCNLRCVWCDTDYAFYGGKDMPVEEIMREVERIGRGCKLVAITGGEPLLQKDVRPLAEALLASGYTVLCETSGSLDVGTLPADVIKIVDIKCPGSGEADRNLWSNLEKLGPADEIKFVIRDRADYEWTMGVIAERGLAGRRLLFAPVWGELELKALAEWMLEDNAPARLQTQLHKHIWGPSTSGV

SEQ ID NO: 30324 - protein, 222 aa, Gemmatimonas sp.
  misc_feature (1)..(222): tr|A0A0S7ZAS3|A0A0S7ZAS3_9BACT 7-carboxy-7-deazaguanine synthase OS=Gemmatimonas sp. SG8_23 OX=1703356 GN=queE PE=3 SV=1
MTGDFLRITEIFHSIQGESTWAGMPCTFVRLTGCPLRCVWCDTEYAFQGGTRMSFEEILAEVRRHPANVVEITGGEPLAHPGAVRLAQLLLEEGYTVLVETSGAFDISPLDDRVHTIMDLKCPGSGESARNRWENLDHLGARDEIKFVVRDREDYVWAREVIRERRLDRRLEEGSLRAILMSPVWGETDLEQLAGWILEDGLPVRFQMQLHKLIWGPEATGV

SEQ ID NO: 30325 - protein, 222 aa, Gemmatirosa kalamazoonesis
  misc_feature (1)..(222): tr|W0RM13|W0RM13_9BACT 7-carboxy-7-deazaguanine synthas e OS=Gemmatirosa kalamazoonesis OX=861299 GN=queE PE=3 SV=1
MSYTVKEIFYTLQGEGANAGRAAVFCRFAGCNLWTGREADRHRAVCRFCDTDFVGVGPDGGRFASAEALADAVAERWAAGTGQLPDAAWTGGVAPLVVCTGGEPLLQLDEAAVDALHAAGFEVAVETNGTQPAPAGLDWICVSPKAGTTLAVTAGDELKLVYPQREAEAQPKHFERLSFRHFFLQPMDGPDLAENTRAAIAYCLAHPRWRLSVQTHKVVGLR

SEQ ID NO: 30326 - protein, 253 aa, Geoalkalibacter ferrihydriticus
  misc_feature (1)..(253): tr|A0A1G9QZG7|A0A1G9QZG7_9DELT 7-carboxy-7-deazaguanine synthase OS=Geoalkalibacter ferrihydriticus OX=392333 GN=queE PE=3 SV=1
MPVPAIPPTEAPLLEVFSSIQGEGLLVGCRQVFLRFALCNLDCAYCDTPYAPTPECRIEDAPGSGVFRGLANPVPLEILAGILCRWHQEAPQMHHSLSLTGGEPLLQANVLGEWLPVLRQIMPIYLETNGTLAASLETLIDHLDWISMDLKLASVSGCPTPWAAHREFLSIARRRQCYVKAVIGEETPASEVLRAARLVHETAPEVVLVLQPLTRNGQIGVCASTLLDLQRQASAIHANLRIIPQTHRFVGLL

SEQ ID NO: 30327 - protein, 253 aa, Geoalkalibacter ferrihydriticus; identical to SEQ ID NO: 30326
  misc_feature (1)..(253): tr|A0A0C2DVE6|A0A0C2DVE6_9DELT 7-carboxy-7-deazaguanine synthase OS=Geoalkalibacter ferrihydriticus DSM 17813 OX=1121915 GN=queE PE=3 SV=1

SEQ ID NO: 30328 - protein, 254 aa, Geoalkalibacter subterraneus
  misc_feature (1)..(254): tr|A0A0B5FFE1|A0A0B5FFE1_9DELT 7-carboxy-7-deazaguanine synthase OS=Geoalkalibacter subterraneus OX=483547 GN= queE PE=3 SV=1
MPVQAMSPTEEAKLIEVFSSIQGEGLWVGCRQIFVRFADCNLACRYCDTPHQPQPNCRIEDAPGSGQFRSLPNPVSLEILHGILSQWHRNVPGMHHSLSLTGGEPLAQVEALQLWLPQLRELLPVYLETNGTLPAALEKIICDIDYVSMDFKLESLSGAQTPWDEHREFLRIAAKREGFVKVVVGEQTPVSELVQAAGLIHEIAPQMPLIIQPLTEQGRCAVRGTVLLQLQQEVSRIHSPVRVIPQTHRFIDVV

SEQ ID NO: 30329 - protein, 243 aa, Geobacillus galactosidasius
  misc_feature (1)..(243): tr|A0A226QRT2|A0A226QRT2_9BACI 7-carboxy-7-deazaguanine synthase OS=Geobacillus galactosidasius OX=883812 GN=q ueE PE=3 SV=1
MAKKIPVLEIFGPTIQGEGMVIGQKTMFVRTAGCDYRCRWCDSAFTWDGSAKEEIRQMTAEQIWERLYELGGDRFSHVTISGGNPVLIQALEELVVLLKNKGIRIAVETQGSRWQDWLYHIDDITISPKPPSSGMDTDFAMLDHIVGKLAGAGRASHMSLKVVVFDEIDFDYAKKVHRRYPDIPFYLQVGNADLAEADDAALRTQLLARLEWLVEKVAQSNELNDVRVLPQLHTLLWGNKRGV

SEQ ID NO: 30330 - protein, 244 aa, Geobacillus kaustophilus
  misc_feature (1)..(244): tr|A0A4D7Q981|A0A4D7Q981_GEOKU 7-carboxy-7-deazaguanine synthase OS=Geobacillus kaustophilus NBRC 102445 OX=12 20595 GN=queE PE=3 SV=1
MARTIPVLEIFGPTIQGEGMVIGQKTMFVRTAGCDYRCRWCDSAFTWDGSAKDEIEQLTADDIWRRLEAIGGRRFRHVTISGGNPLLIAALGELIALLHEKGMRVAVETQGSRWQDWLLDIDDVTLSPKPPSSGMDTDWAALDQIIERLQADQSRVRRISLKVVVFDDADLAYAKEVHCRYPSVPFYLQAGNADVADSDVDALRAKLFSRLEWLVEQAADSEELADVHILPQLHTLLWGNKRGV

SEQ ID NO: 30331 - protein, 244 aa, Geobacillus kaustophilus; identical to SEQ ID NO: 28005
  misc_feature (1)..(244): tr|Q5L1B8|Q5L1B8_GEOKA 7-carboxy-7-deazaguanine synthas e OS=Geobacillus kaustophilus (strain HTA426) OX=235909 GN=queE PE=3 SV=1

SEQ ID NO: 30332 - protein, 244 aa, Geobacillus lituanicus
  misc_feature (1)..(244): tr|A0A223DZ12|A0A223DZ12_9BACI 7-carboxy-7-deazaguanine synthase OS=Geobacillus lituanicus OX=169283 GN=queE P E=3 SV=1
MARTIPVLEIFGPTIQGEGMVIGQKTMFVRTAGCDYRCRWCDSAFTWDGSAKDEIEQLTADDIWRRLEAMGGRRFRHVTISGGNPLLIAALGELVALLHEKGVRVAVETQGSRWQDWLLDVDDVTISPKPPSSGMDTDWSALDQIMERLQADQSRGRRISLKVVVFDDTDLAYAKEVHCRYPGVPFYLQTGNADVADSDVDALRAKLLHRLEWLVEQAADSEELADVHILPQLHTLLWGNKRGV

SEQ ID NO: 30333 - protein, 244 aa, Geobacillus proteiniphilus
  misc_feature (1)..(244): tr|A0A1Q5T7M7|A0A1Q5T7M7_9BACI 7-carboxy-7-deazaguanine synthase OS=Geobacillus proteiniphilus OX=860353 GN=qu eE PE=3 SV=1
MARTIPVLEIFGPTIQGEGMVIGQKTMFVRTAGCDYRCRWCDSAFTWDGSAKDEIEQLTADEIWRRLEAIGGRRFRHVTISGGNPLLIAALGELIALLHEKGMRVAVETQGSRWQDWLLDIDDVTLSPKPPSSGMDTDWAALDQIIERLQADQSRVRRISLKVVVFDDADLAYAKEVHCRYPSVPFYLQAGNADVADSDVDALRAKLFSRLEWLVEQAADSEELADVHILPQLHTFLWGNKRGV

SEQ ID NO: 30334 - protein, 244 aa, Geobacillus sp.
  misc_feature (1)..(244): tr|A0A0N1KFJ3|A0A0N1KFJ3_9BACI 7-carboxy-7-deazaguanine synthase OS=Geobacillus sp. BCO2 OX=1547578 GN=queE_2 PE=3 SV=1
MARTIPVLEIFGPTIQGEGMVIGQKTMFVRTAGCDYRCRWCDSAFTWDGSAKDEIEQLTADDIWRRLEAMGGRRFRHVTISGGNPLLIAALGELIALLHEKGMRVAVETQGSRWQDWLLDVDDITISPKPPSSGMDTDWSVLDPIMERLQADRSRVRRISLKVVVFDDADLAYAKEVHRRYPGVPFYLQAGNADVADSDVDALRAKLLSRLEWLVEQAADSEELADVHILPQLHTLLWGNKRGV

SEQ ID NO: 30335 - protein, 243 aa, Geobacillus sp.
  misc_feature (1)..(243): tr|A0A0F6BQ83|A0A0F6BQ83_GEOS0 7-carboxy-7-deazaguanine synthase OS=Geobacillus sp. (strain Y4.1MC1) OX=581103 GN=queE PE=3 SV=1
MAKKIPVLEIFGPTIQGEGMVIGQKTMFVRTAGCDYSCRWCDSAFTWDGSAKGEIRQMTAGQIWERLCELGGDRFRHVTISGGNPVLIQALEELVLLLKNKGVRIAVETQGSRWQDWLYDIDDVTISPKPPSSGMETDFAVLDHIIGKLVGAGRASHVSLKVVVFDDDDFDYAKIIHKRYPEISFYLQAGNDDIMEKDVAALREKLLAKLDWLVEKVAQSNELNDVRVLPQLHALLWGNKRGV

SEQ ID NO: 30336 - protein, 244 aa, Geobacillus stearothermophilus
  misc_feature (1)..(244): tr|A0A150NEP7|A0A150NEP7_GEOSE 7-carboxy-7-deazaguanine synthase OS=Geobacillus stearothermophilus OX=1422 GN= queE PE=3 SV=1
MTRTIPVLEIFGPTIQGEGMVIGQKTMFVRTAGCDYRCRWCDSAFTWDGSAKDEIEQLTADDIWRRLEAMGGRRFRHVTISGGNPLLIAALGELVALLHEKGVRVAVETQGSRWQDWLLDVDDVTISPKPPSSGMDTDWSALDQIMERLQADQSRVRRISLKVVVFDDTDLAYAKEVHCRYPGVPFYLQTGNADVADSDVDALRAKLLHRLEWLVERAADSEELADVHILPQLHTLLWGNKRGV

SEQ ID NO: 30337 - protein, 244 aa, Geobacillus stearothermophilus
  misc_feature (1)..(244): tr|A0A0K9HJB2|A0A0K9HJB2_GEOSE 7-carboxy-7-deazaguanine synthase OS=Geobacillus stearothermophilus OX=1422 GN= queE PE=3 SV=1
MARTIPVLEIFGPTIQGEGMVIGQKTMFVRTAGCDYRCRWCDSAFTWDGSAKDEIEQLTADDIWRRLEAMGGRRFRHVTISGGNPLLIAALGELVALLHEKGVRVAVETQGSRWQDWLLDVDDVTISPKPPSSGMDTDWSALDQIMERLQADQSRVRRISLKVVVFDDTDLAYAKEVHCRYPGVPFYLQTGNADVADSDVDALRAKLLHRLEWLVERAADSEELADVHILPQLHTLLWGNKRGV

SEQ ID NO: 30338 - protein, 244 aa, Geobacillus subterraneus
  misc_feature (1)..(244): tr|A0A143MNH1|A0A143MNH1_9BACI 7-carboxy-7-deazaguanine synthase OS=Geobacillus subterraneus OX=129338 GN=queE PE=3 SV=1
MARTIPVLEIFGPTIQGEGMVIGQKTMFVRTAGCDYRCRWCDSAFTWDGSAKEEIEQLTADDIWRRLEAIGGLRFRHVTISGGNPLLIAALGELVALLHEKGVRVAVETQGSRWQDWLLDVDDVTISPKPPSSGMDTDWAALDAIIGRLQKDQNRTRRVSLKVVVFDEVDLAYAKEAHRRYPGVPFYLQTGNADVGDLDVEALRAKLLGRLEWLVEQAAESEELADVHILPQLHTLLWGNKRGV

SEQ ID NO: 30339 - protein, 244 aa, Geobacillus thermocatenulatus
  misc_feature (1)..(244): tr|A0A226Q4P9|A0A226Q4P9_9BACI 7-carboxy-7-deazaguanine synthase OS=Geobacillus thermocatenulatus OX=33938 GN= queE PE=3 SV=1
MARTIPVLEIFGPTIQGEGMVIGQKTMFVRTAGCDYRCRWCDSAFTWDGSAKDEIEQLTADDIWRRLEAMGGRRFRHVTISGGNPLLIAALGELIALLHEKGMRVAVETQGSRWQDWLLDVDDITISPKPPSSGMDTDWSALDPIMERLQADRSRVRRISLKVVVFDDADLAYAKEVHRRYPGVPFYLQAGNADVADSDVDALRAKLLSRLEWLVEQAADSEELADVHILPQLHTLLWGNKRGV

SEQ ID NO: 30340 - protein, 225 aa, Geobacillus thermodenitrificans
  misc_feature (1)..(225): tr|A4ILN9|A4ILN9_GEOTN 7-carboxy-7-deazaguanine synthas e OS=Geobacillus thermodenitrificans (strain NG80-2) OX =420246 GN=queE PE=3 SV=1
MVIGQKTMFVRTAGCDYRCRWCDSAFTWDGSAKEEIEQLTAEDIWQRLEAIGGRRFRHVTISGGNPLLLAALGELVALLHEKGVQVAVETQGSRWQDWLLDVDDVTISPKPPSSGMDTDWAMLDSIIRKLLADQNRTRRVSLKVVVFDEADLAYAKEVHRRYPGVPFYLQTGNADVEALDTNALRMKLFDQLDWLVERVAQSDELNDVHVLPQLHTLLWGTKRGV

SEQ ID NO: 30341 - protein, 244 aa, Geobacillus thermodenitrificans
  misc_feature (1)..(244): tr|A0A1W6VPK2|A0A1W6VPK2_GEOTD 7-carboxy-7-deazaguanine synthase OS=Geobacillus thermodenitrificans OX=33940 G N=queE PE=3 SV=1
MARTIPVLEIFGPTIQGEGMVIGQKTMFVRTAGCDYRCRWCDSAFTWDGSAKEEIEQLTAEDIWQRLEAIGGRRFRHVTISGGNPLLLAALGELVALLHEKGVQVAVETQGSRWQDWLLDVDDVTISPKPPSSGMDTDWAMLDSIIRKLLADQNRTRRVSLKVVVFDEADLAYAKEVHRRYPGVPFYLQTGNADVEALDTNALRMKLFDQLDWLVERVAQSDELNDVHVLPQLHTLLWGTKRGV

SEQ ID NO: 30342 - protein, 244 aa, Geobacillus thermoleovorans; identical to SEQ ID NO: 28005
  misc_feature (1)..(244): tr|G8MYT0|G8MYT0_GEOTH 7-carboxy-7-deazaguanine synthas e OS=Geobacillus thermoleovorans CCB_US3_UF5 OX=1111068 GN=queE PE=3 SV=1

SEQ ID NO: 30343 - protein, 244 aa, Geobacillus thermoleovorans; identical to SEQ ID NO: 28005
  misc_feature (1)..(244): tr|A0A098L4I5|A0A098L4I5_GEOTH 7-carboxy-7-deazaguanine synthase OS=Geobacillus thermoleovorans B23 OX=1406857 GN=queE PE=3 SV=1

SEQ ID NO: 30344 - protein, 244 aa, Geobacillus zalihae
  misc_feature (1)..(244): tr|A0A1V9CQN5|A0A1V9CQN5_9BACI 7-carboxy-7-deazaguanine synthase OS=Geobacillus zalihae OX=213419 GN=queE PE=3 SV=1
MARTIPVLEIFGPTIQGEGMVIGQKTMFVRTAGCDYRCRWCDSAFTWDGSAKDEIEQLTADDIWRRLEAMGGRRFRHVTISGGNPLLIAALGELIALLHEKGMRVAVETQGSRWQDWLLDIDDVTLSPKPPSSGMDTDWSALDQIMERLQADQSRVRRISLKVVVFDDADLAYAKEVHCRYPGVPFYLQTGNADVADSDVDALRAKLLSRLEWLVEQAADSEELADVHILPQLHTLLWGNKRGV

SEQ ID NO: 30345 - protein, 231 aa, Geobacter argillaceus
  misc_feature (1)..(231): tr|A0A562VNR3|A0A562VNR3_9DELT 7-carboxy-7-deazaguanine synthase OS=Geobacter argillaceus OX=345631 GN=queE PE =3 SV=1
MLVGLRQVFLRLWGCNIACAYCDTCHEELPERCLLENSPGRRDFVDVANPVPFERILTHLERWNRGWPDIHHSLSLTGGEPLMHPETLRVILPDLITCLPVYLETNGLLPQALELVIDNVSMIGMDIKLPSATGCEIRWETHLDFLRIGSRKDIFVKVVVTDTTEEWELQRACTIVAQVRKDIPFIIQPVTSSGGVVAVSPLKLLEFQELASQTLSGVRVIPQTHRFMGQL

SEQ ID NO: 30346 - protein, 251 aa, Geobacter bemidjiensis
  misc_feature (1)..(251): tr|B5EI73|B5EI73_GEOBB 7-carboxy-7-deazaguanine synthas e OS=Geobacter bemidjiensis (strain Bem / ATCC BAA-1014 / DSM 16622) OX=404380 GN=queE PE=3 SV=1
MSNGLRAPLVECFSSIQGEGVLVGLRQVFLRLAGCNLNCSFCDTPGMSETPKECLLELTPGRRDFFKVPNPVGLERVATLLESWTEGWPGIHHSISVTGGEPLLYAKELKEWLPVLRTLLPVYLETNGTLAHQLAPLMPHLDYIGMDFKLPSTSGCVNLWDAHRAFLETASKTSVFVKIVIDQSTEDWEIERSCQMIMAVNPGIPLILQPMTLGSGAVALPALRMLELQELCSGLNEVRVIPQTHKFMGQL

SEQ ID NO: 30347 - protein, 249 aa, Geobacter daltonii
  misc_feature (1)..(249): tr|B9M258|B9M258_GEODF 7-carboxy-7-deazaguanine synthas e OS=Geobacter daltonii (strain DSM 22248 / JCM 15807 / FRC-32) OX=316067 GN=queE PE=3 SV=1
MNKSSADLIEVFSSIQGEGLLVGLRQVFIRFSGCNLTCSYCDTEPDRTQYCQLESTPGRRDFFQVENPVPVDRLVNLVSGWQRGWPGIHHSISITGGEPLLCHQLLQELLPALRHYLPIYLETNGILHGQLAQLLDHVDYVSMDIKLPSTSGYTDLWQAHEEFLRLAASKKTYVKTVIGTDTEDWEIIRTAELVAAIDSRIPLILQPFTDLKGRVNLSAIRMLEMQETANRYLQEVRIIPQTHKFIGQL

SEQ ID NO: 30348 - protein, 254 aa, Geobacter lovleyi
  misc_feature (1)..(254): tr|B3E1R2|B3E1R2_GEOLS 7-carboxy-7-deazaguanine synthas e OS=Geobacter lovleyi (strain ATCC BAA-1151 / DSM 1727 8 / SZ) OX=398767 GN=queE PE=3 SV=1
MPVPNTMNSSAPLVEIFSSLQGEGVLAGYRQIFVRFPGCNLDCSFCDTDFEAQTACRVETTPGSGQFQELAQPVSLETLLGIITRWCKQLPNAHHSISITGGEPMLHADLLARWLPELNILLPIHLETNGTLPEALPRLIEHLDVISMDIKLPGSAATPELWQEHKRFLEIALERDVSVKVIVGELTTEQELLKACKLVAELDDEIPFIIQPVTGRDGRVAVAPERLMQFQAVAAKRLCDVRVLPQMHRFLEVA

SEQ ID NO: 30349 - protein, 250 aa, Geobacter metallireducens
  misc_feature (1)..(250): tr|Q39V35|Q39V35_GEOMG 7-carboxy-7-deazaguanine synthas e OS=Geobacter metallireducens (strain GS-15 / ATCC 537 74 / DSM 7210) OX=269799 GN=queE PE=3 SV=1
MSKPTAELAEVFSSVQGEGMLIGLRQVFVRFRGCNLTCDYCDTPTEITAEPCLVEQTPGRRDFVPTANPVALDRIVSLIDGWQRGWPGVHHSISITGGEPLLSHTVLSAWLPELRNILPVYLETNGIMHSVLGLLIDHIDIIGMDIKIPSTSGCTGLWDDHRSFLQIAARKNVFVKIIVGDETEEWEIIRASELIAAINSHIPLILQPVTEPGGRVGINPVRALEFQEIACRHLDEVRIIPQTHKFMAQL

SEQ ID NO: 30350 - protein, 242 aa, Geobacter pelophilus
  misc_feature (1)..(242): tr|A0A1W7QNR7|A0A1W7QNR7_9DELT 7-carboxy-7-deazaguanine synthase OS=Geobacter pelophilus OX=60036 GN=queE PE=3 SV=1
MECFSSIQGEGVLVGLRQVFLRLAGCNLNCSFCDTPGMSETPDECLLELTPGRRDFFKVPNPVGLERVATLLESWTAGWPGIHHSISVTGGEPLLYAAELKEWLPVLRGLLPVYLETNGTLPDALAPLMPYLDYIGMDFKLPSTSGCADLWDAHRTFLETAAETSVFVKIVVDQSTEDWEIERSCRMILDVNPAIPLILQPMTLGNGTVTLPALRMLELQELCSGLNEVRVIPQTHKFMGQL

SEQ ID NO: 30351 - protein, 250 aa, Geobacter pickeringii
  misc_feature (1)..(250): tr|A0A0B5B9T6|A0A0B5B9T6_9DELT 7-carboxy-7-deazaguanine synthase OS=Geobacter pickeringii OX=345632 GN=queE PE =3 SV=1
MSSSSAELAEVFSSIQGEGGLIGLRQVFVRFRGCNLQCDYCDTPTDFSAEPCLAEQTPGRRDFVPVENPVALHRILSLIEGWHRGWPGVHHSVSITGGEPLVSHEILRSWLPHLRSLLPVYLETNGVMHTALELLIDHIDMIGMDIKIPSTSGCTDLWDDHRRFLRVAATKDVFVKVVVGEQTEEWEVERSAEIVGGEGREIPLILQPITRLDGTIGIAPVRVLELQEIASRYLRAVRVIPQTHKFMGQL

SEQ ID NO: 30352 - protein, 250 aa, Geobacter soli
  misc_feature (1)..(250): tr|A0A0C1U361|A0A0C1U361_9DELT 7-carboxy-7-deazaguanine synthase OS=Geobacter soli OX=1510391 GN=queE PE=3 SV= 1
MSKPGAELEEVFSSVQGEGMLIGLRQVFIRFRGCNLTCDYCDTPAGTPAEPCRIEQTPGRRDFVPVDNPVALDRVAALVEGWQRGWPGVHDSISITGGEPLLRHDILMQWLPVLREHLPVYLETNGVMHAALGLVINHVDIIGMDIKIPSTSGCTDLWDDHRQFLEIANTRRAFIKIVVGEETEDWEITRAGEIIAGVNRDIPLILQPVTRAGDTLGIKPVKALELQELACRYLAEVRIIPQTHRFMGQL

SEQ ID NO: 30353 - protein, 250 aa, Geobacter sp.
  misc_feature (1)..(250): tr|A0A212PFD9|A0A212PFD9_9DELT 7-carboxy-7-deazaguanine synthase OS=Geobacter sp. DSM 9736 OX=1277350 GN=queE PE=3 SV=1
MNNGSASIVELFSSIQGEGVLVGLRQAFLRFHGCNLACEYCDTRSDEPPEEALLEETPGRQDFLRERNPVPLERVARLLQLWESALPGIHHSLSITGGEPLINHRCLQEWLPELRAILPVYLETNGILHHALSEVIPHLDYISMDIKLPSSSGCTGLWEEHRRFLKIAARTTVFVKAVVSAETEDWEILRTAEMIAEVNPRITCILQPVTRADGTPGIAPIRALEMQEMAGRCLTDVRVIPQTHKFMGQL

SEQ ID NO: 30354 - protein, 249 aa, Geobacter sp.
  misc_feature (1)..(249): tr|A0A351VIJ6|A0A351VIJ6_9DELT 7-carboxy-7-deazaguanine synthase OS=Geobacter sp. OX=46610 GN=queE PE=3 SV=1
MSDMIHISELFSSIQGEGLLAGRRQIFVRLTECNLDCCYCDTEFGRTEIGRVESRPGSADLINIPQPMPLHAITDIIAEWQALLPGAHHSVSFTGGEPLLYADLLARLFPDIRRIIPIHLETNGTMHLALGQVKRHLDYISMDMKLPSTAGCTGQLWDLHALFLREAQGCNVSVKVVVGDVTEQHEIFKVCEIIARINIDTPLFLQPLTLPDGTIGIKAAHLLHLQELASGRLPDVRVIPQMHKLLGAL

SEQ ID NO: 30355 - protein, 250 aa, Geobacter sulfurreducens
  misc_feature (1)..(250): sp|Q74CF3|QUEE_GEOSL 7-carboxy-7-deazaguanine synthase OS=Geobacter sulfurreducens (strain ATCC 51573 / DSM 12 127 / PCA) OX=243231 GN=queE PE=3 SV=1
MSKPGAELEEVFSSVQGEGMLIGLRQVFIRFRGCNLTCDYCDTPAGTPAEPCRIEQTPGRRDFVPADNPVSLDRVAALVEGWQRGWPGVHDSISITGGEPLLRHDILMQWLPVLREHLPVYLETNGVMHAALGLVINHVDIIGMDIKIPSTSGCTDLWDDHRQFLEIANTRRAFIKIVVGEETEDWEITRASEIIAGVNRDIPLILQPVTRAGDTLGIKPVKALELQELACRYLAEVRIIPQTHRFMGQL

SEQ ID NO: 30356 - protein, 250 aa, Geobacter sulfurreducens
  misc_feature (1)..(250): tr|A0A2Z5SRP6|A0A2Z5SRP6_GEOSN 7-carboxy-7-deazaguanine synthase OS=Geobacter sulfurreducens OX=35554 GN=queE PE=3 SV=1
MSKPGAELEEVFSSVQGEGMLIGLRQVFIRFRGCNLTCDYCDTPAGTPAEPCRIEQTPGRRDFVPVDNPVSLDRVAALVEGWQRGWPGVHDSISITGGEPLLRHDILMQWLPVLREHLPVYLETNGVMHAALGLVINHVDIIGMDIKIPSTSGCTDLWDDHRQFLEIANTRRAFIKIVVGEETEDWEITRAGEIIAGVNRDIPLILQPVTRAGDTLGIKPVKALELQELACRYLAEVRIIPQTHRFMGQL

SEQ ID NO: 30357 - protein, 248 aa, Geobacter thiogenes
  misc_feature (1)..(248): tr|A0A1T4QNJ9|A0A1T4QNJ9_9DELT 7-carboxy-7-deazaguanine synthase OS=Geobacter thiogenes OX=115783 GN=queE PE=3 SV=1
MNSAVPLIEIFSSLQGEGELAGYRQIFVRFPGCNLDCAFCDTKIEAPAVCSVESAPGSGQFQELAQPVSLETLIGIITRWCKQLPGAHHSISITGGEPMLHADLLARWLPELNILLPIHLETNGTLPEALPQLIEHLDFISMDIKLPTSAATPALWQEHKRFLEIALERDVSVKVIVGELTTEQELLQACKLVAEVDDEISFIIQPVTGRDGRVAVAPERLMKFQAVAAKKLCDVRVLPQMHRFLEVA

SEQ ID NO: 30358 - protein, 250 aa, Geobacter uraniireducens
  misc_feature (1)..(250): tr|A5G3E2|A5G3E2_GEOUR 7-carboxy-7-deazaguanine synthas e OS=Geobacter uraniireducens (strain Rf4) OX=351605 GN =queE PE=3 SV=1
MNNRQAEMIELFSSIQGEGMLVGLRQIFIRLCGCNFTCNYCDTESNVSVEFCQMEGTPGRRDFIQVKNPVALERLTCLISGWQRGWPGIHHSISITGGEPLLHYELLQEWLPVLREFLPIYLETNGVLHKELSQVISHIDHVGMDIKIPSTSGCADLWKDHEAFLRIAAAKNVFVKAVIGNNTEDWEIIKASEIIASIDNAIPLILQPLTNPDGKIDIAPVKMLELQETASIFLKEVRIIPQTHKFIGQL

SEQ ID NO: 30359 - protein, 249 aa, Geobacteraceae bacterium
  misc_feature (1)..(249): tr|A0A1G0LR92|A0A1G0LR92_9DELT 7-carboxy-7-deazaguanine synthase OS=Geobacteraceae bacterium GWC2_48_7 OX=1798 315 GN=queE PE=3 SV=1
MNNTTHLCELFSSIQGEGYLVGRRQIFIRFPGCNMECRYCDTDHSDSGIFRQETAPGSSEFHHLQQPVALDDILVTIEKWIALLPGTHHSISVTGGEPLLHVDILNQWLPKLRRLLPIHLETNGTLPAQLAELLTHLDYISMDMKLPSASGCGEDIWELHRQFLEIAHSSQVSVKIVAGNTATAAEISKAAEIISQVDRNIPLFIQPLTLLDGRIGISVPHLLKLQELASTALHDVRVVPQMHKLLGAL

SEQ ID NO: 30360 - protein, 249 aa, Geobacteraceae bacterium; identical to SEQ ID NO: 30354
  misc_feature (1)..(249): tr|A0A1G0MDQ0|A0A1G0MDQ0_9DELT 7-carboxy-7-deazaguanine synthase OS=Geobacteraceae bacterium GWC2_55_20 OX=179 8317 GN=queE PE=3 SV=1

SEQ ID NO: 30361 - protein, 210 aa, Geodermatophilus aquaeductus
  misc_feature (1)..(210): tr|A0A521EY89|A0A521EY89_9ACTN 7-carboxy-7-deazaguanine synthase OS=Geodermatophilus aquaeductus OX=1564161 GN =queE PE=3 SV=1
MKTYFIKEIFYTLQGEGAHAGRPAVFCRFSRCNLWTGLERDRHRAVCQFCDTDFVGVDGEGGGKYVGADALAEAVARRWPGGGRPFVVCTGGEPLLQLDETAVDALHDRGFEIAVETNGTQRPPRGLDWICVSPKAGAELVVTSGDELKLVFPQPEALPETFELLDFRSFRLQPLDDQRVEENTAQAVAYCLSNPQWSLSLQTHKYLRIP

SEQ ID NO: 30362 - protein, 286 aa, Geofilum rubicundum
  misc_feature (1)..(286): tr|A0A0E9M2R6|A0A0E9M2R6_9BACT 7-carboxy-7-deazaguanine synthase OS=Geofilum rubicundum JCM 15548 OX=1236989 G N=queE PE=3 SV=1
MNQKISLANEGVFPIVKDKEGQVLPKAPATGITVAGTIQGEGKLAGIPSLFIRFSSCNLRCIWQLPDGTYSRCDTPYASFDANGIQQITVDDVLALVKHNLGPIRHIVITGGEPLLQKDALIELAARLKSELQLHLTIETNGSIFNAQVAQQIDLFSISPKLANSTPNPAKLAALGLSPSGPLKFHGERRLNLSALQAYIDVCRSADKAFQLKFVVGQAADEQEITSAYLNRLTGWAVSDIMLMPLGATQEELQQTTPMVLEMAIRNGWRFTPRVHIDLFGSKPGV

SEQ ID NO: 30363 - protein, 237 aa, Geomicrobium sp.
  misc_feature (1)..(237): tr|A0A061NLX7|A0A061NLX7_9BACL 7-carboxy-7-deazaguanine synthase OS=Geomicrobium sp. JCM 19037 OX=1460634 GN=q ueE PE=3 SV=1
MKIPVLEIFGPTVQGEGMVAGQKTMFVRTGGCDYSCSWCDSAFTWDGSQKAEALSAESVLERLDDTGGDRYNHVTISGGNPALHKALVSSNFLQIEEFKLRWKPKGVYWQDWLLSIDDVTISPKPPSSTMVTNFEQLDLFVERLSSRSEGSQSLKVVIFNDGDLAYAKQVHQRYPRMPFYLQVGNDDLHENQPEKLRDHLLHRYEWLVDTVMEDRELNNVRVLPQIHALIWGNKQGV

SEQ ID NO: 30364 - protein, 238 aa, Geomicrobium sp.
  misc_feature (1)..(238): tr|A0A061PEM6|A0A061PEM6_9BACL 7-carboxy-7-deazaguanine synthase OS=Geomicrobium sp. JCM 19039 OX=1460636 GN=q ueE PE=3 SV=1
MKIPVLEIFGPTVQGEGMVAGQKTMFVRTGGCDYSCSWCDSAFTWDGSQKAEALSAENVLERLDDTGGDRYNHVTISGGNPALHKGIGELVELLTDREIQTAVETQGSYWQDWLLSIDDVTISPKPPSSTMVTNFEQLDLFVERLSARSEGSQSLKVVIFNDGDLAYAKQVHQRYPHMPFYLQVGNDDLHENQPEKLRDHLLHRYEWLVDTVMEDRELNNVRMLPQIHALIWGNKQGV

SEQ ID NO: 30365 - protein, 250 aa, Geomonas terrae
  misc_feature (1)..(250): tr|A0A4S1CBT6|A0A4S1CBT6_9DELT 7-carboxy-7-deazaguanine synthase OS=Geomonas terrae OX=2562681 GN=queE PE=3 SV =1
MSKLQAPLVECFSSIQGEGVLVGLRQVFLRFAGCNLNCSFCDTPGMSAVPQECLLELTPGRRDFQQLPNPVTLERVATLLESWGAAWPGIHHSISITGGEPLLYGALLDEWLPELRKLLPIYLETNGTLPEALAPLIPHLDSIGMDIKLPSASGCPELWDQHHAFLELAAMKEVFVKIVVDQSTEEWEIRRSCAMIGAVDPAIPLILQPLTREDGTIGITAQRALELQELCTSLKEVRVIPQTHKFMGQL

SEQ ID NO: 30366 - protein, 246 aa, Geothermobacter ehrlichii
  misc_feature (1)..(246): tr|A0A5D3WP40|A0A5D3WP40_9DELT 7-carboxy-7-deazaguanine synthase OS=Geothermobacter ehrlichii OX=213224 GN=que E PE=3 SV=1
MTELGLKEIFSSLQGEGIYIGCRQIFVRLTGCNLACRYCDTDFRPTSVCRIETEPGCGRFREVESPLAAVQVSALLQRWQASFPGLHQAITLTGGEPLLQATALAQWLPQLGCELPVHLETNGTLPEQAQALRPWIDFFSIDLKLSSVTGEPTPWKAHRRFLEVCRGKAAQVKIVVAPGLDERELRQAAELAAACLPQTPLILQPVTAEGRPLVPGGQLLSWQTALSRTHPDCRVIPQVHPLLAVF

SEQ ID NO: 30367 - protein, 266 aa, Geothermobacter sp.
  misc_feature (1)..(266): tr|A0A1X0YEN8|A0A1X0YEN8_9DELT 7-carboxy-7-deazaguanine synthase OS=Geothermobacter sp. EPR-M OX=1969733 GN=qu eE PE=3 SV=1
MSPSSRSMSGSRTMPVPATASTELPLVECFSSLQGEGLHIGRRQVFLRLGGCNLNCGYCDTDFRICDTCRFETTPGSGRFKAVPNPVSVETLCALLDQWLALAPNLHHALSLTGGEPLLHADALNDWLPVLAERLPIHLETNGTLYQCLPALMPHLTFLSIDLKLEATTGSPTPWNEHRHFLQAARSRPAQVKIVVDTGQDEEELVQGATLVEELLPAAPLFLQPVTRDGGPDVSGEQLLAWQQLLSRHHPDTRVVPQIHPLLRID

SEQ ID NO: 30368 - protein, 253 aa, Geothermobacter sp.
  misc_feature (1)..(253): tr|A0A2K2H6X9|A0A2K2H6X9_9DELT 7-carboxy-7-deazaguanine synthase OS=Geothermobacter sp. HR-1 OX=654845 GN=queE PE=3 SV=1
MPVPATASTELPLVECFSSLQGEGLHIGRRQVFLRLGGCNLNCGYCDTDFRICDTCRFETAPGSGRFKAVPNPVSAETLCALLDQWLVLAPNLHHALSLTGGEPLLHADALNDWLPVLAERLPIHLETNGTLYQCLPALMPHLTFLSIDLKLEATTGTPTPWNEHRHFLQAARSRPAQVKIVVDTGQDEEELVQGATLVEELLPAAPLFLQPVTRDGGPDVSGEQLLAWQQLLSRHHPDTRVVPQIHPLLRVD

SEQ ID NO: 30369 - protein, 238 aa, Geovibrio thiophilus
  misc_feature (1)..(238): tr|A0A410JYJ6|A0A410JYJ6_9BACT 7-carboxy-7-deazaguanine synthase OS=Geovibrio thiophilus OX=139438 GN=queE PE= 3 SV=1
MRLRNTGNKGRINEVFHSVQGEGFYAGARQLFVRLAGCSVGCEYCDTEFGTPESFEVYGKPFKNPVTPEEFFVAVCAGADLSLFHSVSFTGGEPTEQIRFLKGTALLFKQAGCKLFLETSGYRHAELKALKPVFDIFSIDVKLCRADWRENLAKLLPVLKFLGKEKFYLKAVFDDNNTEDELAEAAGVLHSAGVTEVFAQSVDNKADFNRIDTVQVIFSKEGVEMFYRPQIHRFLGIR

SEQ ID NO: 30370 - protein, 223 aa, Gibbsiella quercinecans
  misc_feature (1)..(223): tr|A0A250AZD7|A0A250AZD7_9ENTR 7-carboxy-7-deazaguanine synthase OS=Gibbsiella quercinecans OX=929813 GN=queE PE=3 SV=1
MQYPINEMFQTLQGEGYFTGVPAIFIRLQGCPVGCSWCDTKHTWEKDANREVDLQRILVKTQESAAWGSASAEQLLAVVRQQGYTARHIVITGGEPCIHDLAPLTALFEQHGFSCQIETSGTHTILCSPGTWVTVSPKVNMRGGLKVLPTALARADEIKHPVGRQRDIEALDALLATLHDDKQRVIALQPISRKEEATRLCIETCIARNWRLSMQTHKYLDIA

SEQ ID NO: 30371 - protein, 212 aa, Giesbergeria anulus
  misc_feature (1)..(212): tr|A0A1H9IW70|A0A1H9IW70_9BURK 7-carboxy-7-deazaguanine synthase OS=Giesbergeria anulus OX=180197 GN=queE PE=3 SV=1
MSYSVKEIFYTLQGEGAQAGLPAVFCRFAGCNLWSGRPSDRASALCRFCDTDFVGTDGTLGGKFDSAMALAEQIAALWPAGDKQHRLVVLTGGEPLLQVDTALIDALHAQGFRIALETNGTLLAPPGIDWLCVSPKAGTTWVQQQGQELKVVWPQPGLDLDLLESTGQFAHRFLQPLDNAQQAQHIALCIDTCLQRPAWRLSLQTHKLTGIR

SEQ ID NO: 30372 - protein, 204 aa, Gilliamella apicola
  misc_feature (1)..(204): tr|A0A1B9N0I7|A0A1B9N0I7_9GAMM 7-carboxy-7-deazaguanine synthase OS=Gilliamella apicola OX=1196095 GN=queE PE= 3 SV=1
MIEFRIVEIFESLQGEGYNTGMPAIFIRFAGCNLNCAWCDTNFRQFTRFTLEALIAKVSEYKSKNIIITGGEPTRVKALPQLLLSLKNAGYFIAIESNGLGKVDALIDYIALSPKFCYQSHYQKIVQPTANEVRIVTENHRDFIAFCQYIETQIQAKRYYLSPCEKDGAFNIFDTIKLLGKINENRLDNKWLLNIQSHKLADIE

SEQ ID NO: 30373 - protein, 204 aa, Gilliamella apicola
  misc_feature (1)..(204): tr|A0A066T6N0|A0A066T6N0_9GAMM 7-carboxy-7-deazaguanine synthase OS=Gilliamella apicola OX=1196095 GN=queE PE= 3 SV=1
MIEFRIVEIFESLQGEGYNTGMPAVFIRFAGCNLNCAWCDTNFRKFTRFTLDALMTKVGEYKSKNIIITGGEPTMVKALPELLLPLKKAGYFIAIESNGLGKVDPLIDYIALSPKFCYQSRYQKIAQPIANEVRIVAENHCNFIPFCQYIETHIQAKHYYLSPCEKDGAFNMFETIDLLGKINQNRLNNKWLLSVQSHKFANIE

SEQ ID NO: 30374 - protein, 204 aa, Gilliamella apis
  misc_feature (1)..(204): tr|A0A242NW44|A0A242NW44_9GAMM 7-carboxy-7-deazaguanine synthase OS=Gilliamella apis OX=1970738 GN=queE PE=3 S V=1
MIEYRIVEIFESLQGEGYNTGMPAIFIRFAGCNLNCSWCDTNFRKFQRFTLEQILAKVKQYKSSNIIITGGEPTMVKELSLLLTHLKQAGYYIAIESNGLGKVDPLIDYIALSPKFCYHHRYQKILQSTASEVRIVAEKQTGFIDYCYYIEQHIQAKRYYLSPCEVNGEMNMFDTIELLGKINHNRIDNKWMLSLQTHKFANIE

SEQ ID NO: 30375 - protein, 204 aa, Gilliamella apis
  misc_feature (1)..(204): tr|A0A2V4E885|A0A2V4E885_9GAMM 7-carboxy-7-deazaguanine synthase OS=Gilliamella apis OX=1970738 GN=queE PE=3 S V=1
MIEYRIVEIFESLQGEGYNTGMPAIFIRFAGCNLNCSWCDTNFRKFQRFTLEQIVAKVKQYKSSNIIITGGEPTMVKELSSLLTHLKQAGYYIAIESNGLGKVDPLIDYIALSPKFCYHHRYQKILQPTASEIRIVAEKQTGFIDFCYYIEQHIQAKRYYLSPCEVNGEMNMFDTIELLGKINHKRIDNKWMLSLQTHKFANIE

SEQ ID NO: 30376 - protein, 204 aa, Gilliamella bombicola
  misc_feature (1)..(204): tr|A0A1C4D2M5|A0A1C4D2M5_9GAMM 7-carboxy-7-deazaguanine synthase OS=Gilliamella bombicola OX=1798182 GN=queE P E=3 SV=1
MIEFRIVEIFESLQGEGYNTGMPAVFIRFAGCNLNCAWCDTNFRQFTRFTLDTLLAKVNEYNSKNIIITGGEPTMVKALPQLLVPLKNAGYFIAIESNGLGKVDPLIDYIALSPKFCYQSRYQKIVQPTANEVRIVAENHADFIPFCQYIETQIHAKRYYLSPCEKDGAFNMFETIELLGKINKDRFDNKWLLSVQSHKFANID

SEQ ID NO: 30377 - protein, 204 aa, Gilliamella intestini
  misc_feature (1)..(204): tr|A0A1C4CZ72|A0A1C4CZ72_9GAMM 7-carboxy-7-deazaguanine synthase OS=Gilliamella intestini OX=1798183 GN=queE P E=3 SV=1
MVDFRIVEIFESLQGEGYNTGMPAVFIRFAGCNLNCTWCDTNFRKFTRFTLNDLMTKVSKYKSKNIIITGGEPTMVKALPELLLPLKKAGYFIAIESNGLGKVDPLIDYIALSPKFCYQSRYKKIAQSTANEVRIVAENHPDFIDFCQYIETHIQAKHYYLSPCEKDGVFNMFETIKLLGKINQNRLDNKWFLSVQSHKFANIE

SEQ ID NO: 30378 - protein, 204 aa, Gilliamella sp.
  misc_feature (1)..(204): tr|A0A242PBM0|A0A242PBM0_9GAMM 7-carboxy-7-deazaguanine synthase OS=Gilliamella sp. N-G2 OX=1970471 GN=queE PE =3 SV=1
MIEYRIVEIFESLQGEGYNTGMPAIFIRFAGCNLNCSWCDTNFRKFQRFTLEQILTKVKQYKSSNIIITGGEPTMVKELSLLLTHLKQAGYYIAIESNGLGKVDPLIDYIALSPKFCYHHRYQKILQSTASEVRIVAEKHIGFIDFCFYIEQQIQAKRYYLSPCETNGEMNMFDTIELLGKINHNRIDNKWMLSLQTHKFANIE

SEQ ID NO: 30379 - protein, 204 aa, Gilliamella sp.
  misc_feature (1)..(204): tr|A0A242P030|A0A242P030_9GAMM 7-carboxy-7-deazaguanine synthase OS=Gilliamella sp. A7 OX=1970465 GN=queE PE=3 SV=1
MIEYRIVEIFESLQGEGYNTGMPAIFIRFAGCNLNCSWCDTNFRKFQRFTLEQILTKIKQYKSSNIIITGGEPTMVKELSLLLTHLKQAGYYIAIESNGLGKVDPLIDYIALSPKFCYKSRYHKIVQPTASEVRIVAEKQTGFIDFCYYIEQHIQAKRYYLSPCEVNGEMNMFDTIELLGKINHKRIDNKWMLSLQTHKFANIE

SEQ ID NO: 30380 - protein, 210 aa, Gillisia hiemivivida
  misc_feature (1)..(210): tr|A0A5C6ZQM1|A0A5C6ZQM1_9FLAO 7-carboxy-7-deazaguanine synthase OS=Gillisia hiemivivida OX=291190 GN=queE PE= 3 SV=1
MITEDTKVLVDKGIMLPLMEEFYTIQGEGFYKGTAAYFIRIGGCDVGCHWCDVKESWDASLHPPTHVGKIVENAVSHSDTVVITGGEPLTWDMTILTETLKAQGCKIHIETSGAYKLTGVWDWICLSPKKIKLPTEEIYEVANELKVIVYNLHDLKFAEEQAALVNKDCILYLQPEWSKRDSVIPVIVDYVMKNPKWKVSLQTHKYLNIP

SEQ ID NO: 30381 - protein, 210 aa, Gillisia limnaea
  misc_feature (1)..(210): tr|H2BY95|H2BY95_9FLAO 7-carboxy-7-deazaguanine synthas e OS=Gillisia limnaea DSM 15749 OX=865937 GN=queE PE=3 SV=1
MITKEKQTLVDEGIMLPLMEAFYTIQGEGFHKGTAAYFIRIGGCDVGCHWCDVKESWNADLHPPTAIGEIIENAVEYSKTVVVTGGEPLTWNMDPLTQLLKKQGCQIHIETSGAYKLTGIWDWICLSPKKIKLPTEEIYEVANELKVIVFNAHDLKFAEEQADKVNKDCILYLQPEWSKRDKMIPLIVEYVMKNPRWKVSLQTHKYLNIP

SEQ ID NO: 30382 - protein, 210 aa, Gillisia mitskevichiae
  misc_feature (1)..(210): tr|A0A495P593|A0A495P593_9FLAO 7-carboxy-7-deazaguanine synthase OS=Gillisia mitskevichiae OX=270921 GN=queE P E=3 SV=1
MITEDTKVLVDKGIMLPLMEEFYTIQGEGFYKGTAAYFIRIGGCDVGCHWCDVKESWDATMHPPTHIGKIVENAVSYSDTIVITGGEPLTWDMTILTETLKTQGCKVHIETSGAYKLTGVWDWICLSPKKMKLPTEEICAVANELKVIVYNAHDLIFAEEQAARVNENCILYLQPEWSKRDKVVPMIVDYVMKNPKWKVSLQTHKYLNIP

SEQ ID NO: 30383 - protein, 213 aa, Gillisia sp.
  misc_feature (1)..(213): tr|A0A559PJA4|A0A559PJA4_9FLAO 7-carboxy-7-deazaguanine synthase OS=Gillisia sp. Hel_I_86 OX=1249981 GN=queE P E=3 SV=1
MQAMITEDTKVLVDKGIMLPLMEEFYTIQGEGFYKGTAAYFIRIGGCDVGCHWCDVKESWDASLHPPTHIGKIVENAVSHSDTVVITGGEPLTWDMTILTEALKAKGCKVHIETSGAYKLTGIWDWICLSPKKIKLPTEEIYKVANELKVIVYNQHDLKFAEEQAAKVNKGCILYLQPEWSKRDAVIPMIVDYVMKNPKWKVSLQTHKYLNIP

SEQ ID NO: 30384 - protein, 210 aa, Gillisia sp.
  misc_feature (1)..(210): tr|A0A1H1PB91|A0A1H1PB91_9FLAO 7-carboxy-7-deazaguanine synthase OS=Gillisia sp. Hel1_33_143 OX=1336796 GN=que E PE=3 SV=1
MITEETKALVDKGIMLPLMEEFYTIQGEGFHKGTAAYFIRIGGCDVGCHWCDVKESWDAGLHPPTHVGEIVEKAIAQSKTIVITGGEPLTWDMTALTNNLKANDCQIHIETSGAYKLSGTWDWICLSPKKIKLPTEEIYPLANELKVIIFNKHDLIFAEEQAAKVSEDCILYLQPEWSNRDKVIPLIVDYVMNNPKWKVSLQTHKYLNIP

SEQ ID NO: 30385 - protein, 192 aa, Gilvibacter sp.
  misc_feature (1)..(192): tr|A0A1Y0MVH5|A0A1Y0MVH5_9FLAO 7-carboxy-7-deazaguanine synthase OS=Gilvibacter sp. SZ-19 OX=754429 GN=queE PE =3 SV=1
MEAFYTIQGEGFHKGTAAYFVRIGGCDVGCHWCDVKESWNAELHPPTRTEDIVSEALKHSDTVVVTGGEPLTWNMEPLTSALKERGAKVHIETSGAYNLTGQWDWICLSPKKVKLPLEPIYKEADELKVIVYNKHDLQFAEEQAAKVGEQCILYLQPEWSVRDKVMPLIVDYVMANPKWKVSLQTHKYLNIP

SEQ ID NO: 30386 - protein, 226 aa, Gimesia maris
  misc_feature (1)..(226): tr|A0A3D3RFN2|A0A3D3RFN2_9PLAN 7-carboxy-7-deazaguanine synthase OS=Gimesia maris OX=122 GN=queE PE=3 SV=1
MLISEIFHSPQGEGKWIGVPSIFIRTSGCNLRCWFCDTPYTSWNPEGEKMSVDQILEHITQYDCEHVVVTGGEPMLSHEIESLTQRLHADGKTITIETAGTILSDVHADLMSISPKLSNSIPVKDPEWAHRHDARRDQPTVIHELIKRHPYQIKFVVDRREDIAEIEDYLIRYPEIDRANVYLMPQGITAEMLAERLPWIEEVAARLGCQVTRRMHIELWGNVRGK

SEQ ID NO: 30387 - protein, 226 aa, Gimesia maris
  misc_feature (1)..(226): tr|A6C143|A6C143_9PLAN 7-carboxy-7-deazaguanine synthas e OS=Gimesia maris DSM 8797 OX=344747 GN=queE PE=3 SV=1
MLISEIFHSPQGEGKWIGVPSIFIRTSGCNLRCWFCDTPYTSWNPEGEKMSVDQILEHIAQYDCEHVVVTGGEPMLSHEIESLTQRLHADGKIITIETAGTILSDVHADLMSISPKLSNSIPVDNPEWAHRHDARRDQPTVIHELIKRHPYQIKFVVDRREDIAEIEDYLIRYPEIDRANVYLMPQGITAEMLAERMPWIEEIAAQLGCQVTRRMHIELWGNVRGK

SEQ ID NO: 30388 - protein, 226 aa, Gimesia sp.; identical to SEQ ID NO: 30386
  misc_feature (1)..(226): tr|A0A2D5H2F0|A0A2D5H2F0_9PLAN 7-carboxy-7-deazaguanine synthase OS=Gimesia sp. OX=2024833 GN=queE PE=3 SV=1

SEQ ID NO: 30389 - protein, 215 aa, Gimesia sp.
  misc_feature (1)..(215): tr|A0A2E7KDI8|A0A2E7KDI8_9PLAN 7-carboxy-7-deazaguanine synthase OS=Gimesia sp. OX=2024833 GN=queE PE=3 SV=1
MSYSIKEIYYTLQGEGANAGRPAVFCRFTGCNLWSGREEDRSKAICKFCDTQFVGVDGIRGGFFSSPDALAEEVDSCWPNTYDSRDGRNKLVVCTGGEPLLQLDEPIIEALHDKGFSVAVETNGTKLPPPGVDWICVSPKANAECVLQKGDELKLVFPQVGGEPSKYEVYNFRRFFLQPMDGEAQEENMKMAIQYCLEHPQWELSIQTHKLIGLP

SEQ ID NO: 30390 - protein, 224 aa, Glaciecola nitratireducens
  misc_feature (1)..(224): tr|G4QKN7|G4QKN7_GLANF 7-carboxy-7-deazaguanine synthas e OS=Glaciecola nitratireducens (strain JCM 12485 / KCT C 12276 / FR1064) OX=1085623 GN=queE PE=3 SV=1
MQNLKVNEVFESLQGEGSFTGVPSIFVRLQGCPVGCSWCDTKHTWEISLEEETTVANVMQQNYESSEWFSATTESLFTLFDTQGYVAKHIVLTGGEPCMYDLTDFTRLAHSKGYSTQIETSGTFEILTSEETWVTVSPKINMQGGYKMRNDALARANEIKHPVAMQKHIDELDLLLASMDQRALPLIYLQPISQQKRATDLAVKTCIQRNWRLSLQMHKYIGLE

SEQ ID NO: 30391 - protein, 224 aa, Glaciecola pallidula
  misc_feature (1)..(224): tr|K6YCA9|K6YCA9_9ALTE 7-carboxy-7-deazaguanine synthas e OS=Glaciecola pallidula DSM 14239 = ACAM 615 OX=11219 22 GN=queE PE=3 SV=1
MKNLKVNEVFESLQGEGSFTGVPSIFVRLQGCPVGCSWCDTKHTWEISLERETTPDTIMQQNEESSQWFSANEDSLFALFDKQGYVAKHIVLTGGEPCMYDLTEFTKQAHSKGFSTQIETSGTFEIHTSKDTWVTVSPKINMQGGYKMRDDALARANEIKHPVAMQKHVDELDLLLASMDQNALPLIYLQPISQQKRATDLAVKTCIQRNWRLSLQMHKFIGLE

SEQ ID NO: 30392 - protein, 241 aa, Glaciecola punicea
  misc_feature (1)..(241): tr|H5T8R3|H5T8R3_9ALTE 7-carboxy-7-deazaguanine synthas e OS=Glaciecola punicea ACAM 611 OX=1121923 GN=queE PE= 3 SV=1
MTTLLVNEIFETIQGEGSFTGTPSIFVRLQGCPVGCPWCDTKHTWETLPQHQVNSDIIFLKAGDSPSYFSVQSHDLLPLLEKQGYTAKHIVITGGEPCLFDLNEFTTRAHDKGFSTQIETSGTYEVQCHSDTWVTVSPKINMKAGMPILSQAMQRANEIKHPIAMQKHIDELDALLHKENLVNPLKELNDKSQIKATPFQSPMVYLQPISQQERATALAIKTCIERNWRLSVQLHKYIGVE

SEQ ID NO: 30393 - protein, 224 aa, Glaciecola sp.
  misc_feature (1)..(224): tr|A0A2N1HPY4|A0A2N1HPY4_9ALTE 7-carboxy-7-deazaguanine synthase OS=Glaciecola sp. 33A OX=2057807 GN=queE PE=3 SV=1
MKNLKVNEVFESLQGEGSFTGVPSIFVRLQGCPVGCSWCDTKHTWEISLEAETTPDTIMQQSEDSSQWFSANECSLFALFDKQGYVAKHIVLTGGEPCMYDLTEFTKQAHNKGFSTQIETSGTFEILTSKDTWVTVSPKINMQGGYKMRDDALARANEIKHPIAMQKHIDELDSLLASMDQNMLPLIYLQPISQQKRATDLAVKTCIERNWRLSLQMHKFIGLE

SEQ ID NO: 30394 - protein, 224 aa, Glaciecola sp.
  misc_feature (1)..(224): tr|A0A2Z6U648|A0A2Z6U648_GLASK 7-carboxy-7-deazaguanine synthase OS=Glaciecola sp. (strain KUL10) OX=2161813 G N=queE PE=3 SV=1
MQALKVNEVFQSVQGEGAYTGVPSIFVRLQGCPVGCPWCDTQHTWAIDLAHEKSVQEVMKQDEETQDWFASDAEALFRLFDNCGYTAKHIVITGGEPCMYDLNELTNLAHEKGFSTQIETSGTFEARCHESAWVTLSPKINMPGKFEILDKVLFRANEIKHPIAMQKHVDELDELLTRYTHQPHPLIYLQPISQQKRATDLAVSVCIARNWRLSLQTHKFIGVE

SEQ ID NO: 30395 - protein, 211 aa, Glaciimonas sp.
  misc_feature (1)..(211): tr|A0A2T6F0C5|A0A2T6F0C5_9BURK 7-carboxy-7-deazaguanine synthase OS=Glaciimonas sp. PCH181 OX=2133943 GN=queE PE=3 SV=1
MTYSIKEIFYTLQGEGTHAGRPAVFCRFSGCNLWTGREEDRSKAICQFCDTDFVGTDGEGGGKFKTADALAETINALWPTTYTDSKFVVFTGGEPLLQLDTALIASMHAAGFEIAIETNGTIEVPAGVDWICVSPKMGSVLKVFKGNELKVVIPQLGQSLATYETLDFDHFYLQAMDGPLLADNLARAIETCKRNPKWKLSLQTHKLLQIP

SEQ ID NO: 30396 - protein, 204 aa, Glaesserella parasuis
  misc_feature (1)..(204): tr|U4SGU7|U4SGU7_HAEPR 7-carboxy-7-deazaguanine synthas e OS=Glaesserella parasuis D74 OX=1275971 GN=queE PE=3 SV=1
MKNPEYRIVEIFETLQGEGFNTGMPSIFIRFGKCNLACPWCDTNYNQYETKTLADIMQVVKGFSAKNIIITGGEPTIQPDLTYLLDTLKAEGYFIAIETNGLKPVPPQIDYIATSPKRLYQKNYLKHHIPFANEVRIVVDGDVLAFCEQIESTIKAERYYLSPCEENGVMNMLETITQLGKLNQRPNKPRWQLSIQTHKMAGIE

SEQ ID NO: 30397 - protein, 204 aa, Glaesserella parasuis; identical to SEQ ID NO: 30396
  misc_feature (1)..(204): tr|A0A017QLK6|A0A017QLK6_HAEPR 7-carboxy-7-deazaguanine synthase OS=Glaesserella parasuis str. Nagasaki OX=111 7322 GN=queE PE=3 SV=1

SEQ ID NO: 30398 - protein, 204 aa, Glaesserella sp.
  misc_feature (1)..(204): tr|A0A328C070|A0A328C070_9PAST 7-carboxy-7-deazaguanine synthase OS=Glaesserella sp. HHC-2018 OX=2094024 GN=qu eE PE=3 SV=1
MLNTEYRIVEIFETLQGEGFNTGMPSIFIRFGKCNLACPWCDTNYNQYQSKTLGEIMQIVRGFRARNIIITGGEPTIQPNLERLLDQLKSEGYFIAIETNGLKPVPLQIDYIATSPKRLYQKNYLKHHIPFAHEVRIVVDGDVSAFCEQIEQTIKADRYYLSPCEKNGKINMLETITQLGLLNQRKDKPRWQLSIQTHKIAGIA

SEQ ID NO: 30399 - protein, 214 aa, Gloeobacter kilaueensis
  misc_feature (1)..(214): tr|U5QCB9|U5QCB9_9CYAN 7-carboxy-7-deazaguanine synthas e OS=Gloeobacter kilaueensis JS1 OX=1183438 GN=queE PE= 3 SV=1
MNTSTTPILSTATQSLLVQECFGPTIQGEGYWAGTLVDFIRLYGCPVGCPWCDTGYAGGGSHLPCERRTIGELVAALQSPRTVISGGEPFLHAGIVALVEAIGKSGRAVSIETSGAFYQPVADWAWVTLSPKQHLSPRYPVRPEIWQRANEVKIVISTGEEVEYYRPYLLPGVPVSLQPEWEERERTLPLTLSLLRNYPRYRLSVQLHKYIQVP

SEQ ID NO: 30400 - protein, 214 aa, Gloeobacter violaceus
  misc_feature (1)..(214): sp|Q7NCE3|QUEE_GLOVI 7-carboxy-7-deazaguanine synthase OS=Gloeobacter violaceus (strain ATCC 29082 / PCC 7421) OX=251221 GN=queE PE=3 SV=1
MNAASTVVKPVSAQSIPVQETFGPTIQGEGYWAGAVVDFIRLYGCPVGCPWCDTGYADGGPQLPRAVRTFSDLILELKSPRVVISGGEPFIHAALPALVEAIGRTGRAVAIETSGAFWQPVPDWAWVTLSPKEHVSPRHPVNPQMWRRANEVKIVIAGGAELDVYRRFLPPGVPVSLQPEWEARERTLPLTLELLKAHPRYRLSVQLHKYLQVP

SEQ ID NO: 30401 - protein, 265 aa, Gloeocapsa sp.
  misc_feature (1)..(265): tr|K9XHU6|K9XHU6_9CHRO 7-carboxy-7-deazaguanine synthas e OS=Gloeocapsa sp. PCC 7428 OX=1173026 GN=queE PE=3 SV =1
MSVTTAETTTARLVEVFSAIQGEGLNVGTRQIFIRFALCDLRCHFCDSAHTWRVPRTYRVERSPGSRDFETYDNPVSLDLLLKWVQQLNVPGLHDSISLTGGEPLLHSAFLLQFLPQVQKRTGLPIYLETGGHRPQQLAMVLPHLNSVGMDLKLPSVSGESYWQEHAEFLQRCNKSGVEVFAKVIVSAETDSAELHQAAELVADVNPEIVLFLQPVTLLESAQRHSQANFSAPTPAQVLTWQAEMKRSLKHVRVVPQTHKMLNQL

SEQ ID NO: 30402 - protein, 199 aa, Gloeocapsa sp.
  misc_feature (1)..(199): tr|L8LLT0|L8LLT0_9CHRO 7-carboxy-7-deazaguanine synthas e OS=Gloeocapsa sp. PCC 73106 OX=102232 GN=queE PE=3 SV =1
MIITYPIVETFHSLQGEGYWTGVSAFFIRLGGCDVHCPWCDQKESWSQSNHPRLSCQVLSKQVIETQPSIIIITGGEPLMHDLGPLTQELSATEIPIHLETSGAYPLSGRFDWITFSPKPYKLPDESIYPLVKELKVVISTPEDLEWAEIHAHKVPPGAIKYLQPEWYSKKTQKLVYNHVLKHPQWRVSLQTHKFIGVR

SEQ ID NO: 30403 - protein, 251 aa, Gloeomargarita lithophora
  misc_feature (1)..(251): tr|A0A1J0AFH0|A0A1J0AFH0_9CYAN 7-carboxy-7-deazaguanine synthase OS=Gloeomargarita lithophora Alchichica-D10 O X=1188229 GN=queE PE=3 SV=1
MNQKANLVEIFAAIQGEGSYLGERQIFLRLGGCDLRCRFCDSPHTWQTKPHARVEVTAGERDFQPVTNPVTRAQILAWLHRQAQGGRHQAISITGGEPLLQANFLAALLPELTAQIPLPIYLETGGHRPQELAQVLPWVSIIAMDYKLPSVSGESQHRAHQEFLTQAIGTGVELFVKIILDQHTQTSELAAALAMIQAIAPEILVILQPVTPRPTSPAPTPAQVLGWQKLAQDYMQKVRVIPQTHPFLGQL

SEQ ID NO: 30404 - protein, 210 aa, Gloeothece citriformis
  misc_feature (1)..(210): tr|B7K7J6|B7K7J6_GLOC7 7-carboxy-7-deazaguanine synthas e OS=Gloeothece citriformis (strain PCC 7424) OX=65393 GN=queE PE=3 SV=1
MLTYFMKTVDLTNCTYPIVETFHSVQGEGAWTGVSAFFIRLGGCDVYCPWCDQKESWNAKRHPHQSVDTLAQAAKMANPAIVIITGGEPLMHDLDPLTTELKKLGLQVHLETSGSHPFSGNFDWVTFSPKPYKKPHDSIYNYVNELKVVVANEEDLHMAEVQAAKLSLTVIKYLQPEWNTPNSKELIFDFVLKHPQWRISLQTHKFLNVR

SEQ ID NO: 30405 - protein, 205 aa, Gloeothece verrucosa
  misc_feature (1)..(205): tr|E0UJP9|E0UJP9_GLOV7 7-carboxy-7-deazaguanine synthas e OS=Gloeothece verrucosa (strain PCC 7822) OX=497965 G N=queE PE=3 SV=1
MKTVNLTHCTYPIVETFHSIQGEGAWTGVSAFFIRLGGCDVYCPWCDQKESWNPKRHPHQSVENLLESAKMANPAIVVITGGEPLMHDLIPLTRELQLLGLRVHLETSGSHPFSGNFHWVTFSPKPYKRPHESIYEQVNELKVVIANEEDLHWAQRQAAKLPSTVVKYLQPEWNTPNSGALIFEFVLKHPQWRMSLQTHKFLNVR

SEQ ID NO: 30406 - protein, 211 aa, Gluconacetobacter diazotrophicus
  misc_feature (1)..(211): tr|A9HRF4|A9HRF4_GLUDA 7-carboxy-7-deazaguanine synthas e OS=Gluconacetobacter diazotrophicus (strain ATCC 4903 7 / DSM 5601 / PAl5) OX=272568 GN=queE PE=3 SV=1
MSYAIKEMFATLQGEGAHAGRAAVFCRFAGCNLWSGREADRATAVCRFCDTDFVGTDGTGGGRFADASSLADAIAATWEAPGREHAFVVFTGGEPLLQLDDALIGAVHERGFEIAVETNGTLPVPPGVDWICVSPKAGADLVQRTGHELKLVYPQPDLLPERVAGLDFRQFWLQPMDGPAQAANTAAAVAYCRAHPRWRLSLQTHKLIGIP

SEQ ID NO: 30407 - protein, 211 aa, Gluconacetobacter entanii
  misc_feature (1)..(211): tr|A0A318PTJ7|A0A318PTJ7_9PROT 7-carboxy-7-deazaguanine synthase OS=Gluconacetobacter entanii OX=108528 GN=que E PE=3 SV=1
MSYTVKEIFPTLQGEGGQSGRAAVFCRFAGCNLWSGREEDRSDAACRFCDTDFIGTDGEGGGRFADAAALADAIAAAWPAPSRAGAFVVFTGGEPLLQLDAALIDAMHARGFFIAVETNGTVAAPDGIDWICVSPKAGTTLVQASGQELKLVFPQPGLMPEQVAGLEFTQFWLQPMDGPDRVANTARAVEYCMAHPQWRLSLQTHKLIGIP

SEQ ID NO: 30408 - protein, 211 aa, Gluconacetobacter liquefaciens
  misc_feature (1)..(211): tr|A0A370G2K4|A0A370G2K4_GLULI 7-carboxy-7-deazaguanine synthase OS=Gluconacetobacter liquefaciens OX=89584 GN =queE PE=3 SV=1
MAYMIKEMFATLQGEGAHAGRAAVFCRFAGCNLWSGREADRADATCRFCDTDFVGTDGEGGGRFADADALADAIAATWAAPDMDHAFVVFTGGEPLLQLDAPLIAAVHARGFEIAIETNGTLPAPEGIDWICVSPKADAPLVQRTGHELKLVYPQPERLPETVADLDFQQFWLQPMDGPDQARNTAQAVAYCRTHPRWRLSLQTHKLIGIP

SEQ ID NO: 30409 - protein, 211 aa, Gluconacetobacter sp.
  misc_feature (1)..(211): tr|F3SDH7|F3SDH7_9PROT 7-carboxy-7-deazaguanine synthas e OS=Gluconacetobacter sp. SXCC-1 OX=1004836 GN=queE PE =3 SV=1
MSYTVKEIFPTLQGEGAHAGRTAVFCRFTGCNLWSGLERDRARATCRFCDTDFIGTDGAGGGRFASASLLADAIAAHWPAPDRKAAFVVFTGGEPLLQLDDALITAVHARGFEIAVETNGTLRAPGGIDWICVSPKAGAPLVQTSGHELKLVYPQPDLLPGQVAGLDFSQFWLQPMDNAARDHNTRAAVDYCLHHPQWRLSLQTHKLIGIP

SEQ ID NO: 30410 - protein, 213 aa, Gluconobacter albidus
  misc_feature (1)..(213): tr|A0A1U9KVL9|A0A1U9KVL9_9PROT 7-carboxy-7-deazaguanine synthase OS=Gluconobacter albidus OX=318683 GN=queE PE =3 SV=1
MSYAVKEMFVTLQGEGAQTGRASVFCRFAGCNLWSGREQDRAMAACTFCDTDFIGTNGEGGGRFETAEALAATIAACWTGIADESGRRYVVFTGGEPLLQLDDALIAAVKAQGFEIAVETNGTIAAPAGIDWVCVSPKPSSTLVQTDGAELKLIYPQPDLPPELFEKLSFRHFWLQPMDGPDRIANTQAAVAYCLRHPRWRLSLQTHKLIGIP

SEQ ID NO: 30411 - protein, 213 aa, Gluconobacter albidus
  misc_feature (1)..(213): tr|A0A149TGZ1|A0A149TGZ1_9PROT 7-carboxy-7-deazaguanine synthase OS=Gluconobacter albidus OX=318683 GN=queE PE =3 SV=1
MSYAVKEMFVTLQGEGAQTGRASVFCRFAGCNLWSGREQDRATAACTFCDTDFIGTNGEGGGRFDTAEALAATIAACWTGTADESGRRYVVFTGGEPLLQLDDALIAAVKAQGFEIAVETNGTIAAPAGIDWVCVSPKPSSTLVQTDGAELKLIYPQPDLPPELFEKLSFRHFWLQPMDGPDRIANTQAAVAYCLRHPRWRLSLQTHKLIGIP

SEQ ID NO: 30412 - protein, 213 aa, Gluconobacter cerinus
  misc_feature (1)..(213): tr|A0A1B6VLK7|A0A1B6VLK7_9PROT 7-carboxy-7-deazaguanine synthase OS=Gluconobacter cerinus OX=38307 GN=queE PE= 3 SV=1
MSYAVKEMFVTLQGEGAQTGRASVFCRFAGCNLWSGREQDRETAACRFCDTDFIGTDGEGGGRFQDAATLADTIEQCWQSVADASGHRYVVFTGGEPLLQLNAELIAAVKARGFEIAVETNGTIAAPDGIDWICVSPKPGGALVQKNGSELKLVYPQIELPPELFDTLSFQHFWLQPMDGPNRLENTQAAVAYCLAHPRWRLSLQTHKMIGIP

SEQ ID NO: 30413 - protein, 213 aa, Gluconobacter frateurii
  misc_feature (1)..(213): tr|A0A0D6PLU4|A0A0D6PLU4_9PROT 7-carboxy-7-deazaguanine synthase OS=Gluconobacter frateurii M-2 OX=1231354 GN= queE PE=3 SV=1
MSYAVKEMFVTLQGEGAQTGRASVFCRFAGCNLWSGREQDRETAACRFCDTDFIGVDGEGGGRFKTASELAETIEQCWKNAADESGRRYVVFTGGEPLLQLDAELIAAVKANGFEIAVETNGTITAPAGIDWVCVSPKPGGPLVQTSGAELKLVYPQTELPPEMFDGLSFQHFWLQPMDGLARLENTQAAVAYCLAHPRWRLSLQTHKLIGIP

SEQ ID NO: 30414 - protein, 213 aa, Gluconobacter frateurii
  misc_feature (1)..(213): tr|A0A0K8N494|A0A0K8N494_9PROT 7-carboxy-7-deazaguanine synthase OS=Gluconobacter frateurii NBRC 101659 OX=110 4996 GN=queE PE=3 SV=1
MSYAVKEMFVTLQGEGAQTGRASVFCRFAGCNLWSGREQDRETAACRFCDTDFIGVDGEGGGRFKTAADLAETIEQCWKSAADESGRRYVVFTGGEPLLQLDAELIAAVKANGFEIAVETNGTIAAPDGIDWVCVSPKPGGPLVQTSGAELKLVYPQTELLPEMFDSLSFQHFWLQPMDGPARLENTQAAVAYCLTHPRWRLSLQTHKLIGIP

SEQ ID NO: 30415 - protein, 213 aa, Gluconobacter japonicus
  misc_feature (1)..(213): tr|A0A149TM51|A0A149TM51_GLUJA 7-carboxy-7-deazaguanine synthase OS=Gluconobacter japonicus OX=376620 GN=queE PE=3 SV=1
MSYAVKEMFVTLQGEGAQTGRASVFCRFAGCNLWSGREQDRETAACRFCDTDFIGVDGEGGGRFKTAAELAETIEQCWKSAADESGRRYVVFTGGEPLLQLDAELIAAVKANGFEIAVETNGTIAAPDGIDWVCVSPKPDGPLVQTRGAELKLVYPQTELPPEMFEDLSFQHFWLQPMDGPARLENTQAAVAYCLAHPRWRLSLQTHKLIGIP

SEQ ID NO: 30416 - protein, 213 aa, Gluconobacter japonicus
  misc_feature (1)..(213): tr|A0A149SG22|A0A149SG22_GLUJA 7-carboxy-7-deazaguanine synthase OS=Gluconobacter japonicus OX=376620 GN=queE PE=3 SV=1
MSYAVKEMFVTLQGEGAQTGRASVFCRFAGCNLWSGREQDRETAACRFCDTDFIGVDGEGGGRFKTAADLAETIEQCWKSAADESGRRYVVFTGGEPLLQLDAELIAAVKANGFEIAVETNGTIAAPDGIDWVCVSPKPGGPLVQTSGAELKLVYPQTELPPEMFDSLSFQHFWLQPMDGPARLENTQAAVAYCLAHPRWRLSLQTHKLIGIP

SEQ ID NO: 30417 - protein, 213 aa, Gluconobacter kanchanaburiensis
  misc_feature (1)..(213): tr|A0A511B8L9|A0A511B8L9_9PROT 7-carboxy-7-deazaguanine synthase OS=Gluconobacter kanchanaburiensis NBRC 10358 7 OX=1307948 GN=queE PE=3 SV=1
MSYAVKEMFVTLQGEGAQTGRASVFCRFAGCNLWSGREQDRATAACTFCDTDFIGTNGEGGGRFDTAEALAHTIAACWTDTADESGRRYVVFTGGEPLLQLDDALIAAVKAQGFEIAVETNGTIAAPAGIDWVCVSPKPNSTLVQTEGAELKLVYPQPELPPELFEQFSFRHFWLQPMDGPDRIANTQAAVAYCLRHPRWRLSLQTHKLIGIP

SEQ ID NO: 30418 - protein, 209 aa, Gluconobacter morbifer
  misc_feature (1)..(209): tr|G6XFJ7|G6XFJ7_9PROT 7-carboxy-7-deazaguanine synthas e OS=Gluconobacter morbifer G707 OX=1088869 GN=queE PE= 3 SV=1
MKEMFATLQGEGAQTGRASVFCRFAGCNLWSGREQDRATAACRFCDTDFIGTDGEGGARFGTAEALADAIETCWTDAADESGRRYVVFTGGEPLLQLDAPLIAAVRARRFEIAVETNGTIAAPDGIDWICVSPKPGGPLVQTSGSELKLVHPQTELPPEMFTALDFRHFWLQPMDGPARADNTQAAVAYCLKHPQWRLSLQTHKMIGIP

SEQ ID NO: 30419 - protein, 213 aa, Gluconobacter oxydans; identical to SEQ ID NO: 30413
  misc_feature (1)..(213): tr|K7SJ41|K7SJ41_GLUOY 7-carboxy-7-deazaguanine synthas e OS=Gluconobacter oxydans H24 OX=1224746 GN=queE PE=3 SV=1

SEQ ID NO: 30420 - protein, 213 aa, Gluconobacter oxydans
  misc_feature (1)..(213): tr|Q5FQR1|Q5FQR1_GLUOX 7-carboxy-7-deazaguanine synthas e OS=Gluconobacter oxydans (strain 621H) OX=290633 GN=q ueE PE=3 SV=1
MSYAVKEMFVTLQGEGAQTGRASVFCRFAGCNLWSGREQDRATAACSFCDTDFIGTDGEGGGRFETADALADTIAACWTSTADESGRRYVVFTGGEPLLQLDDALIAAVKARGFEIAVETNGTIAAPAGIDWVCVSPKPGGALVQTEGAELKLVYPQPELPPEMFEKLSFRHFWLQPMDGPDRIANTEAAVAHCLRHPRWRLSLQTHKLIGIP

SEQ ID NO: 30421 - protein, 213 aa, Gluconobacter roseus
  misc_feature (1)..(213): tr|A0A4Y3M5N2|A0A4Y3M5N2_9PROT 7-carboxy-7-deazaguanine synthase OS=Gluconobacter roseus NBRC 3990 OX=1307950 GN=queE PE=3 SV=1
MSYAVKEMFVTLQGEGAQTGRASVFCRFAGCNLWSGREQDRATAACTFCDTDFIGTDGEGGGRFETAEALADTIAACWTGTADDSGRRYVVFTGGEPLLQLDDALIAAVKARGFEIAVETNGTIAAPAGIDWVCVSPKPGGTLVQTEGAELKLVYPQPELPPELFEQLSFRHFWLQPMDGPDRIANTQAAVAYCLRHPRWRLSLQTHKLIGIP

SEQ ID NO: 30422 - protein, 213 aa, Gluconobacter sp.
  misc_feature (1)..(213): tr|A0A252BML8|A0A252BML8_9PROT 7-carboxy-7-deazaguanine synthase OS=Gluconobacter sp. DsW_058 OX=1511210 GN=qu eE PE=3 SV=1
MSYAVKEMFVTLQGEGAQTGRASVFCRFAGCNLWSGREQDRETAACRFCDTDFIGTDGEGGGRFQDAATLADTIEQCWQSVADASGRRYVVFTGGEPLLQLDAELIAAVKARGFEIAVETNGTIVAPDGIDWICVSPKPGGAMVQKNGSELKLVYPQIELPPELFDTLSFQHFWLQPMDGPNRLENTQAAVAYCLAHPRWRLSLQTHKMIGIP

SEQ ID NO: 30423 - protein, 213 aa, Gluconobacter sphaericus
  misc_feature (1)..(213): tr|A0A4Y3Q8D3|A0A4Y3Q8D3_9PROT 7-carboxy-7-deazaguanine synthase OS=Gluconobacter sphaericus NBRC 12467 OX=130 7951 GN=queE PE=3 SV=1
MSYAVKEMFVTLQGEGAQTGRASVFCRFAGCNLWSGREQDRATASCTFCDTDFIGTDGEGGGRFETAEALASTIEFCWTGTADDSGRRYVVFTGGEPLLQLDDALITAVKARGFEIAVETNGTIAAPAGIDWVCVSPKPGGAIVQDEGAELKLVYPQPELPPELFEQLAFRYFWLQPMDGPDRIANTQAAVAYCLRHPRWRLSLQTHKLIGIP

SEQ ID NO: 30424 - protein, 213 aa, Gluconobacter thailandicus; identical to SEQ ID NO: 30413
  misc_feature (1)..(213): tr|M9LWC8|M9LWC8_GLUTH 7-carboxy-7-deazaguanine synthas e OS=Gluconobacter thailandicus NBRC 3255 OX=1291534 GN =queE PE=3 SV=1

SEQ ID NO: 30425 - protein, 213 aa, Gluconobacter thailandicus
  misc_feature (1)..(213): tr|A0A149SLZ6|A0A149SLZ6_GLUTH 7-carboxy-7-deazaguanine synthase OS=Gluconobacter thailandicus OX=257438 GN=qu eE PE=3 SV=1
MSYAVKEMFVTLQGEGAQTGRASVFCRFAGCNLWSGREQDRETAACRFCDTDFIGVDGEGGGRFKTASELAETIEQCWKNAADESGRRYVVFTGGEPLLQLDAELIAAVKATGFEIAVETNGTITAPAGIDWVCVSPKPGGPLVQTSGAELKLVYPQTELPPEMFDGLSFQHFWLQPMDGAARVENTQAAVAYCLAHPRWRLSLQTHKLIGIP

SEQ ID NO: 30426 - protein, 213 aa, Gluconobacter wancherniae
  misc_feature (1)..(213): tr|A0A511B3P3|A0A511B3P3_9PROT 7-carboxy-7-deazaguanine synthase OS=Gluconobacter wancherniae NBRC 103581 OX=6 56744 GN=queE PE=3 SV=1
MSYAVKEMFVTLQGEGAQTGRASVFCRFAGCNLWSGRESDRATAACQFCDTDFIGTDGEGGGRFETATLLAETIEACWNSRADSSGRRYVVFTGGEPLLQLDPALIDAVSKRGFEIAVETNGTIKAPEGIDWICVSPKPGGKLIQNTGSELKLVYPQTELPPEMFKELTFEHFWLQPMDGPERLENTQASVAYCLEHPQWRLSLQTHKMIGIP

SEQ ID NO: 30427 - protein, 213 aa, Glycocaulis alkaliphilus
  misc_feature (1)..(213): tr|A0A3T0E7V3|A0A3T0E7V3_9RHOB 7-carboxy-7-deazaguanine synthase OS=Glycocaulis alkaliphilus OX=1434191 GN=que E PE=3 SV=1
MGRRMSYAVKETFLTVQGEGGQAGRVAVFLRFAGCNLWSGLERDRAKAVCQFCDTDFVGTDGPGGGKFASAESLAAHVKSYWPGGGKPLVVCTGGEPLLQLDEAAIAALKAAGFEIAVETNGTIEAPEGLDWICVSPKSTAPLKQRSGHELKLVYPQADAMPGLFENLDFGAFRLQPMDGPHQMENAKAAFEYCLTHPQWSLSLQTHKWIGVD

SEQ ID NO: 30428 - protein, 209 aa, Glycocaulis sp.
  misc_feature (1)..(209): tr|A0A550JZV3|A0A550JZV3_9RHOB 7-carboxy-7-deazaguanine synthase OS=Glycocaulis sp. ZYF765 OX=2518983 GN=queE PE=3 SV=1
MTYSVKEMFLTVQGEGGQAGHPAVFIRFAGCNLWSGLERDRAAAVCTFCDTDFVGTDGANGGKFREPEALAKAAFALWPGGGEPLAVCTGGEPLLQLDAPLIAALHAAGFRIAVETNGTLQAPEGLDWICVSPKSTAPLKQTSGHELKLVFPQPEAMPELFEHLDFQEFRLQPMDGPDQMANAQAAFEYCLKHPKWRLSLQTHKWIGAP

SEQ ID NO: 30429 - protein, 210 aa, Gordonia paraffinivorans
  misc_feature (1)..(210): tr|M3VGN2|M3VGN2_9ACTN 7-carboxy-7-deazaguanine synthas e OS=Gordonia paraffinivorans NBRC 108238 OX=1223543 GN =queE PE=3 SV=1
MTYKVKEIFYTLQGEGTHAGRPAVFCRFASCNLWTGREKDRARAICQFCDTDFVGTDGPGGGKFATADELADAVLSHWVADGGERMVVCTGGEPLLQLDKELVEAFHAREFYVAVETNGTILPPPGVDWLCVSPKAGAPLAVQGGDELKLVYPQRDLSPTEFESLEFPSLKLQPLDDDNRVANTAAAVKYCLDHPRWQLSLQTHKMLGIP

SEQ ID NO: 30430 - protein, 213 aa, Gordonia polyisoprenivorans
  misc_feature (1)..(213): tr|H0RJ64|H0RJ64_9ACTN 7-carboxy-7-deazaguanine synthas e OS=Gordonia polyisoprenivorans NBRC 16320 = JCM 10675 OX=1077976 GN=queE PE=3 SV=1
MPYQVKEIFYTLQGEGQNTGRPAVFCRFSGCNLWNGREHGRKDAICRFCDTDFVGTNGDGGGVFASADILVDAVAATWQGASHPRAARFVVCTGGEPLLQLDAPLVEGLHAAGFEVAVETNGTRSTVPGLDWVCVSPKGGTDLAITSGNELKLVFPQDGVDPARFESLGFDRLWLQPMDGPDVEQNTALAVRYCLENPQWRLSIQTHKHIGIR

SEQ ID NO: 30431 - protein, 213 aa, Gordonia sp.
  misc_feature (1)..(213): tr|A0A1V4Q3Q0|A0A1V4Q3Q0_9ACTN 7-carboxy-7-deazaguanine synthase OS=Gordonia sp. i37 OX=1961707 GN=queE PE=3 S V=1
MPYQVKEIFYTLQGEGQNTGRPAVFCRFSDCNLWNGREHGRKDAICRFCDTDFVGTDGDGGGVFASADILVDAVAATWQGASHPRAARFVVCTGGEPLLQLDAPLVEGLHAAGFEVAVETNGTRSTVPGLDWVCVSPKGGTDLAITSGNELKLVFPQDGVDPARFESLGFDRLWLQPMDGPDVEQNTALAVRYCLENPQWRLSIQTHKHIGIR

SEQ ID NO: 30432 - protein, 221 aa, Gottschalkia acidurici
  misc_feature (1)..(221): tr|K0B342|K0B342_GOTA9 7-carboxy-7-deazaguanine synthas e OS=Gottschalkia acidurici (strain ATCC 7906 / DSM 604 / BCRC 14475 / CIP 104303 / NCIMB 10678 / 9a) OX=11283 98 GN=queE PE=3 SV=1
MYRVVEKFISINGEGKLSGQLALFIRFAECNLNCRYCDTQWANKSDVKYEIMTKEEIYNYIKQTKVKNVTLTGGEPLIQKDIYELLEYLSKDNDISIEIETNGSISLKRFQDIKINQLRFTMDYKLPYSNMENEMLLENFEYLKEKDVVKFVAGSMEDLEKAKLIIEQFDLTKKTNVYISGVYENIDAKDIVEFIKENNMNDVTFQLQLHKFIWDPNQKGV

SEQ ID NO: 30433 - protein, 254 aa, Gracilibacillus boraciitolerans
  misc_feature (1)..(254): tr|W4VQG6|W4VQG6_9BACI 7-carboxy-7-deazaguanine synthas e OS=Gracilibacillus boraciitolerans JCM 21714 OX=12985 98 GN=queE PE=3 SV=1
MSKIPVLEIFGPTIQGEGMVVGRKTMFVRTAGCDYSCAWCDSAFTWDGSAKDEIVKMESDEIFTKLKEIGGNQFDHVTVSGGNPPALLKHLDGLIHLLHEHNMEVALETQGSRWQEWFLDVDDLTLSPKPPSSKMKTNWTILDEIIDLLIINNRLAHTSLKIVVFDEKDLQYAEKVHQRYPAVPFFLQVGNDDLQENQPSHLAGHLLEKYEWLIDKVMSNSQLNHVRVLPQVHALVWGGNKRGGFDYVNPPLIS

SEQ ID NO: 30434 - protein, 243 aa, Gracilibacillus dipsosauri
  misc_feature (1)..(243): tr|A0A317L1V5|A0A317L1V5_9BACI 7-carboxy-7-deazaguanine synthase OS=Gracilibacillus dipsosauri OX=178340 GN=qu eE PE=3 SV=1
MSKIPVLEIFGPTIQGEGMVVGRKTMFVRTAGCDYQCSWCDSAFTWDGSAKEEIRQMTADEIMDGLHQIGKDCFDHVTISGGNPALLASIGELVALLNQKGIEIALETQGSRWQDWMKDIDDLTISPKPPSSGMKTNFEILDQIIEKLTNSQKSTGLLSLKIVIFEEDDFEYAIGIHERYRNIPLFLQVGNDDTMCQSDQQLALMLLEKYEWLINKTTSSSKLNNVRVLPQLHTLVWGNKRGY

SEQ ID NO: 30435 - protein, 242 aa, Gracilibacillus halophilus
  misc_feature (1)..(242): tr|N4WJJ5|N4WJJ5_9BACI 7-carboxy-7-deazaguanine synthas e OS=Gracilibacillus halophilus YIM-C55.5 OX=1308866 GN =queE PE=3 SV=1
MNKFPILEIFGPTIQGEGMVVGRKTMFVRTAGCDYSCAWCDSAFTWDGSAKDEIVKMTAQDIMEQLYQKGGDRFDHVTISGGNPALLKGLNELIDALHERNIEVALETQGSRWQNWFTAIDDLTISPKPPSSKMKTNWKVLDEIIETLISQQRKHHTSIKVVVFDEEDLAYAEMVHQRYPDISFYVQVGNDDVNEERPSNLASHLLDKYEWLIDQVVASKSLNHVRVLPQVHALVWGNKRGV

SEQ ID NO: 30436 - protein, 242 aa, Gracilibacillus kekensis
  misc_feature (1)..(242): tr|A0A1M7IER1|A0A1M7IER1_9BACI 7-carboxy-7-deazaguanine synthase OS=Gracilibacillus kekensis OX=1027249 GN=que E PE=3 SV=1
MNKIPVLEIFGPTIQGEGMVVGRKTMFVRTAGCDYSCAWCDSPFTWNGSAKDDIVKMSADQIYLRLKEIGGNQFDHVTISGGNPALLKYLGELIDTLHEHKIEVALETQGSRWQDWFVKIDDLTISPKPPSSKMKTNWQVLDDIIDKLITNKRLSNTSLKVVVFNNEDLQFAEKVHQRYPSVPFFLQVGNDDLEEHKPRDLASHLLEKYEWLIDKVMANSALNHVRVLPQVHALVWGNKRGV

SEQ ID NO: 30437 - protein, 242 aa, Gracilibacillus orientalis
  misc_feature (1)..(242): tr|A0A1I4GYK4|A0A1I4GYK4_9BACI 7-carboxy-7-deazaguanine synthase OS=Gracilibacillus orientalis OX=334253 GN=qu eE PE=3 SV=1
MNKLPILEIFGPTIQGEGMVIGRKTMFVRTAGCDYSCAWCDSSFTWDGSAKEDIVKMTSVEIFERLKEAGGDKFDHVTISGGNPALLKHIGELIDILHSNDMEVALETQGSRWQDWFLEVDDLTISPKPPSSKMKTNWMMLDDIIAQLEKHGRLTQTSLKVVIFDDHDLDYAKNVHQRYPGVPFFLQVGNDDLEEVAPNELASHLLTKYEWLIDQVMNSSALNDVRVLPQIHTLVWGNKRGV

SEQ ID NO: 30438 - protein, 239 aa, Gracilibacillus ureilyticus
  misc_feature (1)..(239): tr|A0A1H9P7X8|A0A1H9P7X8_9BACI 7-carboxy-7-deazaguanine synthase OS=Gracilibacillus ureilyticus OX=531814 GN=q ueE PE=3 SV=1
MNNRIPVLEIFGPTIQGEGMVIGRKTMFVRTAGCDYSCTWCDSAFTWDGSTKEEIRQMETEEVLAELKQIGGEYFDHVTISGGNPALFTSVNELIDLLHHHHIEVALETQGSRWQDWFLKVDDLTISPKPPSSGMETDWSVLHNIINRLKENNISLKVVIFSRGDLAYAEKVHQRFPGIPFYLQVGNDDIIEKNPDQLALYLLEKYHWLIDQVVASKTLNQVHVLPQLHALVWGNKRGV

SEQ ID NO: 30439 - protein, 216 aa, Gracilimonas mengyeensis
  misc_feature (1)..(216): tr|A0A521ARL4|A0A521ARL4_9BACT 7-carboxy-7-deazaguanine synthase OS=Gracilimonas mengyeensis OX=1302730 GN=que E PE=3 SV=1
MFKTDEQADLLTDLDQAMETEYPIVEHFYTIQGEGAHTGRASYFIRTAGCDVNCWWCDVKESWEEEGHPKMKVKDLVQLAKESGAPFVVITGGEPLLHDLLPLTLGLKSEGLQVHIETSGSSPLSGQLDWITLSPKRFKKPTEEVFAYVDELKVVVLTNKDLKWAEDNAAKCPDGTRLLLQPEWDTPKSIELIVDYVKENPEWGISLQTHKFLKVP

SEQ ID NO: 30440 - protein, 217 aa, Gracilimonas sp.
  misc_feature (1)..(217): tr|A0A316TR29|A0A316TR29_9BACT 7-carboxy-7-deazaguanine synthase OS=Gracilimonas sp. 8A47 OX=2079485 GN=queE P E=3 SV=1
MYSTEEQTTRTTGEVTELDQVEYPLMEDFYTIQGEGAHTGSAAYFIRLAGCDVKCWWCDVKDSWDESKHPRVKTGDIVKRAKESGTRLAVITGGEPLLHNLEPLTIRLRQEGFSVHIETSGSSPLSGHLDWITLSPKRFKEPLDEVFPYVDELKVVVLKKKDLEWAEKNAVKCPKGTRLLLQPEWETPESVNLIVEYVKKNPRWGISLQTHKFMNVP

SEQ ID NO: 30441 - protein, 210 aa, Gramella flava
  misc_feature (1)..(210): tr|A0A1L7I2L4|A0A1L7I2L4_9FLAO 7-carboxy-7-deazaguanine synthase OS=Gramella flava JLT2011 OX=1229726 GN=queE PE=3 SV=1
MISEETKELVDKGIMLPLMEEFYTIQGEGYHKGTAAYFIRIGGCDVGCHWCDVKESWDAEVHPPTPIGQIVENATKFSKTIVITGGEPLTWDMTALTSALKKQGCQIHIETSGAYDMTGTWDWVCLSPKKIKLPKPEIYAQANELKVIVFNKHDFQFAEEQAAKVHEDCILYLQPEWSNREKMIPQIVDYVMQNPKWKVSLQTHKYLNIP

SEQ ID NO: 30442 - protein, 210 aa, Gramella forsetii
  misc_feature (1)..(210): tr|A0M511|A0M511_GRAFK 7-carboxy-7-deazaguanine synthas e OS=Gramella forsetii (strain KT0803) OX=411154 GN=que E PE=3 SV=1
MISEETKELVDKGVMLPLMEEFYTIQGEGFHKGTAAYFIRIGGCDVGCHWCDVKESWDAEVHPPTRIGQIVENAVKYSKTIVITGGEPLTWDMTELTGSLKKKGCDIHIETSGAYDLTGTWDWICLSPKKIKLPKDKIYPVANELKVIVFNKHDLKFAEEQAAKVGEKCVLYLQPEWSKREEMIPLIVDYVMANPKWKVSLQTHKYLNIP

SEQ ID NO: 30443 - protein, 210 aa, Gramella gaetbulicola
  misc_feature (1)..(210): tr|A0A2T6AE56|A0A2T6AE56_9FLAO 7-carboxy-7-deazaguanine synthase OS=Gramella gaetbulicola OX=703340 GN=queE PE =3 SV=1
MISEETKELVDRGIMLPLMEEFYTIQGEGYHKGTAAYFIRIGGCDVGCHWCDVKESWDAEVHPPTHVGQIVENATKYSKTIVITGGEPLTWDMTELTGNLKNKGCDIHIETSGAYDLTGTWDWICLSPKKIKLPKPEIYPLANELKVIVFNKHDLKFAEEQAALVSDNCILYLQPEWSNREKMIPLIVDYVMKNPKWKVSLQTHKYLNIP

SEQ ID NO: 30444 - protein, 210 aa, Gramella jeungdoensis
  misc_feature (1)..(210): tr|A0A4Y8AUR0|A0A4Y8AUR0_9FLAO 7-carboxy-7-deazaguanine synthase OS=Gramella jeungdoensis OX=708091 GN=queE PE =3 SV=1
MINEAIQQQINKGEMLPLMEEFYTIQGEGFHTGKAAYFIRIGGCDVGCHWCDVKESWNAKLHPPTNTDTIVENAKKYANTVVVTGGEPLMWSLDYITTKLQSLNLKTHIETSGAYPLSGKWNWICLSPKKTKLPLNEIYNEAHELKVIISNNHDFKFAEEQAAKVNTNCELYLQPEWSKREKMTPLIVEFVMKNPHWKISLQTHKYLNIP

SEQ ID NO: 30445 - protein, 210 aa, Gramella salexigens
  misc_feature (1)..(210): tr|A0A1L3J7X8|A0A1L3J7X8_9FLAO 7-carboxy-7-deazaguanine synthase OS=Gramella salexigens OX=1913577 GN=queE PE= 3 SV=1
MISEETKQLVDKGVMLPLMEEFYTIQGEGYHKGTAAYFIRIGGCDVGCHWCDVKESWDAEVHPPTPVGQIVENAVKYSKTIVITGGEPLTWDMTELTGNLKKQGCDIHIETSGAYELTGEWDWICLSPKKIKLPTKEIYPLANELKVIVFNKHDLKFAEEQAAKVSDDCILYLQPEWSNREKMIPLIVDYVMKNPKWKVSLQTHKYLNIP

SEQ ID NO: 30446 - protein, 210 aa, Gramella sp.
  misc_feature (1)..(210): tr|A0A1H1PBK2|A0A1H1PBK2_9FLAO 7-carboxy-7-deazaguanine synthase OS=Gramella sp. MAR_2010_102 OX=1250231 GN=qu eE PE=3 SV=1
MISEETKELVDRGIMLPLMEEFYTIQGEGYHKGTAAYFIRIGGCDVGCHWCDVKESWDAEIHPPTHVGQIVENATKFSKTIVITGGEPLTWDMTELTRNLKHKGCDIHIETSGAYDLTGTWDWICLSPKKIKLPKPEIYPLANELKVIVFNKHDLKFAEEQAEKVSDECILYLQPEWSNREKVIPMIVDYVMENPKWKVSLQTHKYLNIP

SEQ ID NO: 30447 - protein, 210 aa, Gramella sp.
  misc_feature (1)..(210): tr|A0A2R3Z1F3|A0A2R3Z1F3_9FLAO 7-carboxy-7-deazaguanine synthase OS=Gramella sp. SH35 OX=2126553 GN=queE PE=3 SV=1
MISEETKELVEKGVMLPLMEEFYTIQGEGFHKGTAAYFIRIGGCDVGCHWCDVKESWNADLHPPTPVGKIVENAVKYSDTVVVTGGEPLTWDMTVLTNSLKKKGCKIHIETSGAYDITGIWDWICLSPKKIKLPKPEIYPLAHELKVIIFNKHDFKFAEEQAAKVSDHCILYLQPEWSNREKMMPLIVDYVMKNPKWKVSLQTHKYLNIP

SEQ ID NO: 30448 - protein, 220 aa, Granulibacter bethesdensis
  misc_feature (1)..(220): tr|A0A1L3S1D0|A0A1L3S1D0_9PROT 7-carboxy-7-deazaguanine synthase OS=Granulibacter bethesdensis OX=364410 GN=qu eE PE=3 SV=1
MCGAVMTQPARTYTVKEIFLTLQGEGIHAGRPAVFCRFAGCNLWSGREEDRQTARCTFCDTDFIGMDGENGGRYPDAASLARAIAACWQGGAEHRFVVLTGGEPLLQVDAALIDALHEAGFQIAVETNGTQPAPEGLDWICVSPKADNSLALTRGDELKLVFPQPDAPPERFEALDFRHFLLQPLDDSRRADHTRAAIEYCLHHPRWRLSVQTHKTLGIP

SEQ ID NO: 30449 - protein, 220 aa, Granulibacter bethesdensis
  misc_feature (1)..(220): tr|Q0BPP9|Q0BPP9_GRABC 7-carboxy-7-deazaguanine synthas e OS=Granulibacter bethesdensis (strain ATCC BAA-1260 / CGDNIH1) OX=391165 GN=queE PE=3 SV=1
MCGAVMTQPTRNYTVKEIFLTLQGEGIHAGRPAVFCRFAGCNLWSGREEDRQMAGCTFCDTDFIGMDGENGGRYPDAASLARAIAACWQGGAEHRFVVLTGGEPLLQVDAALIDALHEAHFQIAVETNGTQPAPAGLDWICVSPKADNPLVLTGGDELKLVFPQPDAPPERFEALNFRHFLLQPLDDSRRADHTRAAIEYCLHHPRWRLSVQTHKTLGIP

SEQ ID NO: 30450 - protein, 227 aa, Granulicella mallensis
  misc_feature (1)..(227): tr|G8NYM7|G8NYM7_GRAMM 7-carboxy-7-deazaguanine synthas e OS=Granulicella mallensis (strain ATCC BAA-1857 / DSM 23137 / MP5ACTX8) OX=682795 GN=queE PE=3 SV=1
MHLIELYKSVQGESSFAGVPCIFVRLAGCNLRCAWCDSEYTFTGGKPFTTDEIVAQIEALQPCPLIEFTGGEPMLQQKELLPLMQRLLDANYTLMMETSGERPLADVPKAVHKIVDVKCPGAGSAANSFHMANLDALTPHDEVKFVLSNRADYEFARDFIRTHALETTCGSILLSPAFSKAPSELRTTDNATLDPRFVVEWMLADGLPARLSLQIHKYIWEPRKKGV

SEQ ID NO: 30451 - protein, 227 aa, Granulicella pectinivorans
  misc_feature (1)..(227): tr|A0A1I6MZ20|A0A1I6MZ20_9BACT 7-carboxy-7-deazaguanine synthase OS=Granulicella pectinivorans OX=474950 GN=qu eE PE=3 SV=1
MHLIELYKSVQGESSFAGLPCIFVRLAGCNLRCAWCDSEYTFTGGKPFTADEIVAQIEALAPCRLVEFTGGEPMLQARELLPLMRRLIDSGYTLMMETSGERPLEDVPVEVHKIVDVKCPGAGAASNSFRMSNLDVLTKRDEVKFVLTNRADYDFARAFIAEHSLRSRVAGILLSPAFSKDPSPLRTTENATLDPRTLVEWMMADGVDARLSLQIHKFIWEPMKKGV

SEQ ID NO: 30452 - protein, 227 aa, Granulicella rosea
  misc_feature (1)..(227): tr|A0A239JLE3|A0A239JLE3_9BACT 7-carboxy-7-deazaguanine synthase OS=Granulicella rosea OX=474952 GN=queE PE=3 SV=1
MHLIELYKSVQGESSFTGLPCIFVRLAGCNLRCAWCDSEYTFTGGKPFTADEIVAQIEALAPCRLVEFTGGEPMLQARELLPLMERLLAAGYTLMMETSGERALADVPKAVHKIVDVKCPGAGAAAYSFRMENLDALTKGDEVKFVLSHRADYEFARAFIAEHRLNERAGGVLLSPAFSKNPSPLRTVENATLDPRTLVEWMMEDGVDARLSLQIHKFIWEPMKKGV

SEQ ID NO: 30453 - protein, 227 aa, Granulicella sibirica
  misc_feature (1)..(227): tr|A0A4Q0T5E2|A0A4Q0T5E2_9BACT 7-carboxy-7-deazaguanine synthase OS=Granulicella sibirica OX=2479048 GN=queE P E=3 SV=1
MHLIELYKSVQGESSFAGLPCIFVRLAGCNLRCAWCDSEYTFTGGKPFTADEIVREIEALAPCRLVEFTGGEPMLQARELLPLMDRLIHSGYTLMMETSGERPLEDVPVPVHKIVDVKCPGAGSAANSFRMSNLEALTKRDEVKFVLSHREDYEFAKAFIVEHDLNRRVGSILLSPAFSKSPSPIRTTENATLDPRTLVEWMMEDGIDARLSLQIHKFIWEPQKKGV

SEQ ID NO: 30454 - protein, 227 aa, Granulicella sp.
  misc_feature (1)..(227): tr|A0A3N1JKU3|A0A3N1JKU3_9BACT 7-carboxy-7-deazaguanine synthase OS=Granulicella sp. GAS466 OX=2485170 GN=queE PE=3 SV=1
MHLIELYKSVQGESSFAGLPCIFVRLAGCNLRCAWCDSEYTFTGGKPFTLDEVEQQIKALAPCALIEFTGGEPMLQSKELLPLMDRLLAQNFTLMIETSGERPLSEVPKAVHKIVDVKCPGSGSAANTFRLENLAALTKNDEVKFVISHREDYEFARDFIRTHALEQKAGQILLSPAFQKTPSPQRTADNMALDPRKLVDWMLADGLPARLSLQIHKFIWEPQKKGV

SEQ ID NO: 30455 - protein, 227 aa, Granulicella tundricola
  misc_feature (1)..(227): tr|E8X156|E8X156_GRATM 7-carboxy-7-deazaguanine synthas e OS=Granulicella tundricola (strain ATCC BAA-1859 / DS M 23138 / MP5ACTX9) OX=1198114 GN=queE PE=3 SV=1
MHLIELYKSVQGESSFTGLPCIFVRFAGCNLRCAWCDSEYTFTGGNPFTQEEVIAQIEALAPCKLVEFTGGEPMLHAKELLPLMDVLLTQGYTLMMETSGERPLDLVPKAVHKIVDVKCPGAGAAANSFRLSNLETLTKNDEVKFVLTNRADYEFARAFIAEHRLNDLAAGVLLSPAFTKNPSPLRTVENATLDPRTLVEWMMHDGVDARLSLQIHKFIWEPMKKGV

SEQ ID NO: 30456 - protein, 223 aa, Grimontella sp.
  misc_feature (1)..(223): tr|A0A318G296|A0A318G296_9GAMM 7-carboxy-7-deazaguanine synthase OS=Grimontella sp. AG753 OX=2183905 GN=queE P E=3 SV=1
MQYPINEMFQTLQGEGYFTGVPAIFIRLQGCPVGCAWCDTKHTWDKLEDREVSLYSILAKTKESDKWGAASSEDLLAIIERQGWTARHVVITGGEPCIHDLIPLTHLLEKQGFSCQIETSGTHEVRTSHATWVTVSPKVNMRGGYDILQQALERADEIKHPVGRTRDIEALDELLTQLTDDKHRVIALQPISQKDDATRLCIETCIARNWRLSMQTHKYLNIA

SEQ ID NO: 30457 - protein, 220 aa, Grimontia celer
  misc_feature (1)..(220): tr|A0A128EYV1|A0A128EYV1_9GAMM 7-carboxy-7-deazaguanine synthase OS=Grimontia celer OX=1796497 GN=queE_1 PE=3 SV=1
MYNVNEIFETIQGEGTFTGVPSVFVRLQGCPVGCPWCDTRQTWDTLPADERDFGTIITKNGDSPLWTQVTAEEVITHLQASYSAKHVVITGGEPCMFDLLPLTSLLESEGYRCQIETSGTYAVKATPNTWVTVSPKINMRGKLPVLAEALKRANEIKHPVGTETDIEKLDELLKDTDLTGKEVALQPISQKARATNLCIEVCIKRNWRLSIQTHKYLEIA

SEQ ID NO: 30458 - protein, 154 aa, Grimontia celer
  misc_feature (1)..(154): tr|A0A128F665|A0A128F665_9GAMM Anaerobic ribonucleoside -triphosphate reductase-activating protein OS=Grimontia celer OX=1796497 GN=queE_2 PE=3 SV=1
MNFHQYYPVDVVNGEGTRCTLFVSGCEHQCRGCYNQSTWSPSSGEFFDQAMEDRIIADLNDTRIKRRGLSISGGDPLLPVNLQSVLKLVQRVKDECEAKDIWMWTGYSLDDLTEAQREVVSYVDVLVDGKFEKALADPSLPWRGSSNQVVHRLT

SEQ ID NO: 30459 - protein, 220 aa, Grimontia hollisae
  misc_feature (1)..(220): tr|A0A377HLV4|A0A377HLV4_GRIHO 7-carboxy-7-deazaguanine synthase OS=Grimontia hollisae OX=673 GN=queE PE=3 SV= 1
MYNVNEIFETIQGEGTFTGIPSVFIRLQGCPVGCPWCDTRQTWDTLPLDQRDFGTIIAKNDESPLWARVSAEDILSHLQSRYTAKHIVITGGEPCMFDLMPLTSLLDAHGYRCQIETSGTYVVYATENTWVTVSPKINMRGKLPILKEALDRANEIKHPVGTESDIEKLDELLKHVDLKGKEVALQPISQKARATALCIETCIARNWRLSVQTHKYLNIA

SEQ ID NO: 30460 - protein, 220 aa, Grimontia hollisae; identical to SEQ ID NO: 30459
  misc_feature (1)..(220): tr|D0IB18|D0IB18_GRIHO 7-carboxy-7-deazaguanine synthas e OS=Grimontia hollisae CIP 101886 OX=675812 GN=queE PE =3 SV=1

SEQ ID NO: 30461 - protein, 220 aa, Grimontia indica
  misc_feature (1)..(220): tr|R1IMG7|R1IMG7_9GAMM 7-carboxy-7-deazaguanine synthas e OS=Grimontia indica OX=1056512 GN=queE PE=3 SV=1
MYNVNEIFETIQGEGTFTGVPSVFVRLQGCPVGCPWCDTRQTWDTLPADERDFGTIIAKNGDSPLWTKVTAEEILTHLQSSYHAKHVVITGGEPCMFDLLPLTSLLESNGYRCQIETSGTYAVKATSNTWVTVSPKINMRGKLPVLGEALARANEIKHPVGTESDIEKLEELLKDIDLSGKEVALQPISQKERATKLCIETCIKKNWRLSIQTHKYLEIA

SEQ ID NO: 30462 - protein, 220 aa, Grimontia marina
  misc_feature (1)..(220): tr|A0A128FFN3|A0A128FFN3_9GAMM 7-carboxy-7-deazaguanine synthase OS=Grimontia marina OX=646534 GN=queE_1 PE=3 SV=1
MYKVNEIFETIQGEGTFTGVPSVFVRLQGCPVGCPWCDTRQTWDTLPADERDFGTIIAKNGDSPLWTKVSAEEILAHLQASYSAKHVVITGGEPCMFDLIPLTSLLESNNYRCQIETSGTYAVKATTNTWVTVSPKINMRGKLPVLIEALERANEIKHPVGTESDIEKLDNLLKDIDLSGKEVALQPISQKERATKLCIETCIKKNWRLSIQTHKYLEIA

SEQ ID NO: 30463 - protein, 156 aa, Grimontia marina
  misc_feature (1)..(156): tr|A0A128FFZ1|A0A128FFZ1_9GAMM Anaerobic ribonucleoside -triphosphate reductase-activating protein OS=Grimontia marina OX=646534 GN=queE_2 PE=3 SV=1
MNCHQYYPVDVVNGEGTRCTLFVSGCEHQCRGCYNQSTWSPSSGELFDQVMEDRIIADLNDTRIKRRGLSISGGDPLLPVNLQSVLRLVQRVRNECEGRDIWMWTGYTLANLSDAQREVVNYVDVLVDGKFEKALADPSLPWRGSSNQVVHRLTPR

SEQ ID NO: 30464 - protein, 220 aa, Grimontia sp.
  misc_feature (1)..(220): tr|A0A0F5ZWM0|A0A0F5ZWM0_9GAMM 7-carboxy-7-deazaguanine synthase OS=Grimontia sp. AD028 OX=1581149 GN=queE PE= 3 SV=1
MYNVNEIFETIQGEGTFTGVPSVFVRLQGCPVGCPWCDTRQTWDTLPADERDFGTIIAKNGDSPLWTKVTAEEILTHLQSSYHAKHVVITGGEPCMFDLLPLTSLLESNGYHCQIETSGTYAVKATSNTWVTVSPKINMRGKLPVLGEALARANEIKHPVGTESDIEKLEELLKDVDLSNKEVALQPISQKERATKLCIETCIKKNWRLSIQTHKYLEIA

SEQ ID NO: 30465 - protein, 209 aa, Gulbenkiania indica
  misc_feature (1)..(209): tr|A0A0K6GSI5|A0A0K6GSI5_9NEIS 7-carboxy-7-deazaguanine synthase OS=Gulbenkiania indica OX=375574 GN=queE PE=3 SV=1
MYTVKEIFYTLQGEGRQAGRAAVFCRFAGCNLWSGKERHRHKAICQFCDTDFVGTGPDGGKFAEADALADRIAASWPAGSGGTPYVVCTGGEPLLQLDAPLLAALHTRGFEVAVETNGTVAAPAGLDWICVSPKAGAPLVQTRGHELKLVYPQPTLLPEAVAALDFEHFYLQPMDGPDGAANTRAAIAYCMAHPQWRLSVQTHKVVNIR

SEQ ID NO: 30466 - protein, 232 aa, Guyparkeria sp.
  misc_feature (1)..(232): tr|A0A426QEM4|A0A426QEM4_9GAMM 7-carboxy-7-deazaguanine synthase OS=Guyparkeria sp. SCN-R1 OX=2341113 GN=queE PE=3 SV=1
MTVESAQRPESLESIAPKAARSLRITEIFRSLQGESDHIGWPTVFVRLTGCPLRCVYCDTAYAFTGGERMEQEVILSRVAELNTRHVCVTGGEPLAQPGCIELLRQLVDEGHVVSLETSGALDIAHVDPRVHIVMDLKTPSSGEVERNRWANLEALKPQDEVKVVIGSREDFDWAVARVREHDLAGRFAVLFSPVFGGVTPTELADWVLETGLEIRFQMQLHKLIWGDEPGR

SEQ ID NO: 30467 - protein, 216 aa, Gynuella sunshinyii
  misc_feature (1)..(216): tr|A0A0C5V9Z9|A0A0C5V9Z9_9GAMM 7-carboxy-7-deazaguanine synthase OS=Gynuella sunshinyii YC6258 OX=1445510 GN=q ueE PE=3 SV=1
MYSIKEMFYSLQGEGAHTGRPAIFLRFSGCNLWSGLEKHRREAICQFCDTDFIGTDGQNGGKFKDATTLADTVSRLWPSNQQNRYVICTGGEPALQLDTELILAFKDLGFEVGIETNGTLPLPKGIDWICVSPKGRSTVVVKQCHELKLVYPQPDAMPDRFTDIDAGVRYLSPKNPYDSDHLIISEQSSTRACIEYCLAHPQWRLCLQTHKILKID

SEQ ID NO: 30468 - protein, 290 aa, Gynuella sunshinyii
  misc_feature (1)..(290): tr|A0A0C5V0I1|A0A0C5V0I1_9GAMM 7-carboxy-7-deazaguanine synthase OS=Gynuella sunshinyii YC6258 OX=1445510 GN=q ueE PE=3 SV=1
MKYQWSEIFLSIEGEAKWSGHPTVYIRFTRCNFSCKGFNNPDNIEPASERALGFSPQHINTISEIPEISIGCDSIYSWHKDFRHLWHQGDEHVLAAEVTKVLPSYGWKSNTGQEVILSLTGGEPTLHAKTIPHLLSTPEFNQVKHVLIETNCSVPLSETFITALDDWALNRKGRITWSNSPKLKASGEPFDKAIRPEIALMQRRVTQDRCIQYFKFVCRNDDDFQEVQYVMEQYYRAGIPRNVEVYIMPMACTEQQQKKVMQDVAMKCLEYGFIYCHRIQNTVFENAIGK

SEQ ID NO: 30469 - protein, 213 aa, Haematospirillum jordaniae
  misc_feature (1)..(213): tr|A0A143DBT9|A0A143DBT9_9PROT 7-carboxy-7-deazaguanine synthase OS=Haematospirillum jordaniae OX=1549855 GN=q ueE PE=3 SV=1
MTYSIKELFYTLQGEGAQAGRAAVFCRFSGCNLWSGREQDRSTATCSFCDTDFVGTNGTGGGKFASARALAHAVRACWDQNARQGGTPYVVCTGGEPLLQLDTPLVQAFHEAGMEVAVETNGTQDPPHGIDWICVSPKAGSDLVLTQGDELKVVWPQQGLDLVYLAELKFRHFFLQPMDGHAATESLATCIQTCQQFPQWRLGLQIHKLTGIP

SEQ ID NO: 30470 - protein, 209 aa, Haemophilus aegyptius
  misc_feature (1)..(209): tr|A0A3S4UKL9|A0A3S4UKL9_HAEAE 7-carboxy-7-deazaguanine synthase OS=Haemophilus aegyptius OX=197575 GN=queE PE =3 SV=1
MEKYHDFEPNFNIVEIFESLQGEGFNTGMPSVFVRFGKCNLDCPWCDTPYNNFKRWSVSQILEKVRSFSSKNIIITGGEPTIVPKIEYLLEQFKSDGYFLAIETNGLKAIPAQIDYIATSPKSLYAHKYEKRCIPFANEVRIVMDSNMPSFCELIEQKIKAKNYYLSPCEIDGKMNLLETITLLGQLNQRSNKPKWQLSLQTHKLIGIE

SEQ ID NO: 30471 - protein, 209 aa, Haemophilus ducreyi
  misc_feature (1)..(209): tr|Q7VNH8|Q7VNH8_HAEDU 7-carboxy-7-deazaguanine synthas e OS=Haemophilus ducreyi (strain 35000HP / ATCC 700724) OX=233412 GN=queE PE=3 SV=1
MKQTIFTTTTFPIVEIFESLQGEGFNTGLPCIFIRLGKCNLACPWCDTNYNEYQKWTLEMILAKVKSYTAKNIIITGGEPTLYANLTILLEQLKNAGYWLAIETNGLKAVPSQIDYIATSPKKMYQEKYQREYLTQADEVRIVVDDDVTEFCALIEQKIQAHHYYLSPCEIEGKMNLLETITQLGQLNQRVNKPKWQLSIQTHKIIGIE

SEQ ID NO: 30472 - protein, 209 aa, Haemophilus ducreyi
  misc_feature (1)..(209): tr|A0A448KIQ6|A0A448KIQ6_HAEDC 7-carboxy-7-deazaguanine synthase OS=Haemophilus ducreyi OX=730 GN=queE PE=3 SV =1
MKQTIFTTTTFPIVEIFESLQGEGFNTGLPCIFIRLGKCNLACPWCDTNYNEYQKWTLEMILAKVKSYTAKNIIITGGEPTLYANLTILLDQLKNAGYWLAIETNGLKAVPSQIDYISTSPKKMYQEKYQREYLTQADEVRIVVDDDVTEFCAVIEQKIQAHHYYLSPCEIEGKMNLLETITQLGQLNQRVNKPKWQLSIQTHKIIGIE

SEQ ID NO: 30473 - protein, 216 aa, [Haemophilus] felis
  misc_feature (1)..(216): tr|A0A1T0BBJ2|A0A1T0BBJ2_9PAST 7-carboxy-7-deazaguanine synthase OS=[Haemophilus] felis OX=123822 GN=queE PE=3 SV=1
MQRVRFLEKNANVADTEYRIVEIFETLQGEGFNTGMPSIFIRFGKCNLACPWCDTNYNQYETKTLAEIMQTVRQFTARNIIITGGEPTIQPNLERLLDQLKAEGYFIAIETNGLKPVPLQIDYIATSPKRLYQKNYLKHHIPFAHEVRIVVDDDVFAFCEQIEQSIKAERYYLSPCECNGEMNMLETITLLGLLNQRPNRPRWQLSIQTHKMAGIE

SEQ ID NO: 30474 - protein, 211 aa, Haemophilus haemolyticus
  misc_feature (1)..(211): tr|A0A502JKA4|A0A502JKA4_HAEHA 7-carboxy-7-deazaguanine synthase OS=Haemophilus haemolyticus OX=726 GN=queE PE =3 SV=1
MLVEKYHEFEPYFNIVEIFESLQGEGFNTGMPSIFVRFGKCNLDCPWCDTPYNDFKRWSASQILEKVRSFPSRNIIITGGEPTIVPKIEYLLEQFKADGYFLAIETNGLKTVPAQIDYIAASPKSLYAHKYEKRCIPFANEVRIVMDGNVSSFCELIEKKIKAENYYLSPCEIAGEMNLLETITLLGQLNQRPNKPKWLLSLQTHKLIGIE

SEQ ID NO: 30475 - protein, 211 aa, Haemophilus haemolyticus
  misc_feature (1)..(211): tr|A0A502KFU1|A0A502KFU1_HAEHA 7-carboxy-7-deazaguanine synthase OS=Haemophilus haemolyticus OX=726 GN=queE PE =3 SV=1
MSVEKYHNFEPHFNIVEIFESLQGEGFNTGMPSIFVRFGKCNLDCPWCDTPYNDFKRWSASQILEKVRSFSSRNIVITGGEPTIVPKIEYLLEQFKADSYFLAIETNGLKTVPAQIDYIATSPKSFYAHKYEKRCIPFANEVRIVMDGNVSSFCELIEKKIKAENYYLSPCEIAGKRNLLETITLLGQLNQRSNKPKWQLSLQTHKLIGIE

SEQ ID NO: 30476 - protein, 211 aa, Haemophilus influenzae
  misc_feature (1)..(211): sp|P45097|QUEE_HAEIN 7-carboxy-7-deazaguanine synthase OS=Haemophilus influenzae (strain ATCC 51907 / DSM 1112 1 / KW20 / Rd) OX=71421 GN=queE PE=3 SV=1
MLMEKYHDFEPNFNIVEIFESLQGEGFNTGMPSVFVRFGKCNLDCPWCDTPYNNFKRWSVSQILEKVRSFSSKNIIITGGEPTIVPKIEYLLEQFKSDGYFLAIETNGLKAIPAQIDYIATSPKSLYAHKYEKRCIPFANEVRIVMDSNMPSFCELIEQKIKAKNYYLSPCEIDGKMNLLETITLLGQLNQRSNKPKWQLSLQTHKLIGIE

SEQ ID NO: 30477 - protein, 209 aa, Haemophilus influenzae
  misc_feature (1)..(209): tr|A0A2X1PPK2|A0A2X1PPK2_HAEIF 7-carboxy-7-deazaguanine synthase OS=Haemophilus influenzae OX=727 GN=queE PE=3 SV=1
MGKYHDFEPNFNIVEIFESLQGEGFNTGMPSVFVRFGKCNLDCPWCDTPYNNFKRWSVSQILEKVRSFSSKNIIITGGEPTIVPKIEYLLEQFKSDGYFLAIETNGLKAIPAQIDYIATSPKSLYAHKYEKRCIPFANEVRIVMDSNMPSFCELIEQKIKAKNYYLSPCEIDGKMNLLETITLLGQLNQRSNKPKWQLSLQTHKLIGIE

SEQ ID NO: 30478 - protein, 209 aa, Haemophilus paracuniculus
  misc_feature (1)..(209): tr|A0A1T0AQN0|A0A1T0AQN0_9PAST 7-carboxy-7-deazaguanine synthase OS=Haemophilus paracuniculus OX=734 GN=queE P E=3 SV=1
MQNIINPNPEYRIVEIFETLQGEGYNTGMPSIFIRFGKCNLACPWCDTNYNQFETKTLNEIMAVVRGFSARNIIITGGEPTIQPNIEILLDVLKSEGYFIAVETNGLKPVPKQIDYIATSPKRLYQKNYLKHHLDFAHEVRIVVDGDVLDFCEQIENTIKADRYYLSPCEQDGVMNMLDTITQLGKLNQRSNKPHWQLSIQTHKIAGIE

SEQ ID NO: 30479 - protein, 209 aa, Haemophilus parahaemolyticus
  misc_feature (1)..(209): tr|A0A369ZIS5|A0A369ZIS5_HAEPH 7-carboxy-7-deazaguanine synthase OS=Haemophilus parahaemolyticus OX=735 GN=que E PE=3 SV=1
MQNTIFSTITYPIVEIFESLQGEGFNTGMPSIFVRFGKCNLTCPWCDTDYMTFESWTLEQILAKVKSCSARNIIITGGEPTIQPNLGVLLDAFKLEGYFLAIETNGLKEVPKQIDYIATSPKRLYQEKYQRRCIPFAHEVRIVADENVLAFCEQIEQQIQAEHYYLSPCEIDGKMNLLETITQLGQLNQRINKPKWHLSLQTHKIVGIE

SEQ ID NO: 30480 - protein, 213 aa, Haemophilus parahaemolyticus
  misc_feature (1)..(213): tr|A0A377JDW9|A0A377JDW9_HAEPH 7-carboxy-7-deazaguanine synthase OS=Haemophilus parahaemolyticus OX=735 GN=que E PE=3 SV=1
MANKMQNTIFSTISYPIVEIFESLQGEGFNTGMPSIFVRFGKCNLTCPWCDTDYMTFESWTLDQILAKVKSYSARNIIITGGEPTIQPNLDVLLDAFKLEGYFLAIETNGLKEVPKQIDYIATSPKRLYQEKYQRRCIPFAHEVRIVADEDVLAFCEQIEQQIQAEHYYLSPCEIDGKMNLLETITQLGQLNQRENEPKWQLSLQTHKIVGIE

SEQ ID NO: 30481 - protein, 209 aa, Haemophilus parainfluenzae
  misc_feature (1)..(209): tr|A0A3S4ZBD6|A0A3S4ZBD6_HAEPA 7-carboxy-7-deazaguanine synthase OS=Haemophilus parainfluenzae OX=729 GN=queE PE=3 SV=1
MEKQIISEPYYNIVEIFESLQGEGFNTGMPAIFIRFGKCNLACTWCDTNYHQFKRCSLSQILNKVRSFSAKNIIITGGEPTIVPKLEMILNQLKSLGYFLAIETNGLNTVPAQIDFIATSPKRLYAHKYEKRCISFAHEVRIVADDNIIPFCEMIENKIQAKYYYLSPCEVHGKMNLLETITQLGKLNQRTNKPRWLLSLQTHKLIGIE

SEQ ID NO: 30482 - protein, 209 aa, Haemophilus parainfluenzae
  misc_feature (1)..(209): tr|A0A1B8T2J6|A0A1B8T2J6_HAEPA 7-carboxy-7-deazaguanine synthase OS=Haemophilus parainfluenzae OX=729 GN=queE PE=3 SV=1
MEKRPISEPYYNIVEIFESLQGEGFNTGMPAIFIRFGKCNLACPWCDTNYHQFKHWSLSQILNKVRSFSAKNIIITGGEPTIVPKLEIVLNQLKSLGYFLAIETNGLRSVPSQIDFIATSPKRLYAHKYEKRCISFAHEVRIVADDNIIPFCEMIENKIQAKYYYLSPCEVHGNMNLLETITQLGKLNQRTNKPRWLLSLQTHKLIGME

SEQ ID NO: 30483 - protein, 213 aa, Haemophilus paraphrohaemolyticus
  misc_feature (1)..(213): tr|A0A369ZMT6|A0A369ZMT6_9PAST 7-carboxy-7-deazaguanine synthase OS=Haemophilus paraphrohaemolyticus OX=736 GN =queE PE=3 SV=1
MANKTQNTILSTISYPIVEIFESLQGEGFNTGMPSIFVRFGKCNLTCPWCDTDYMTFESWTLEQILAKVKSYSSKNIIITGGEPTIQPNLGVLLDAFKQAGYFLVIETNGLKEVPKQIDYIATSPKRLYQEKYQRRCIPFAHEVRIVADENVLDFCEQIEQQIQAEHYYLSPCEVDGKMNLLETITQLGQLNQRENKPKWQLSLQTHKIVGIE

SEQ ID NO: 30484 - protein, 213 aa, Haemophilus paraphrohaemolyticus; identical to SEQ ID NO: 30480
  misc_feature (1)..(213): tr|I2NFU8|I2NFU8_9PAST 7-carboxy-7-deazaguanine synthas e OS=Haemophilus paraphrohaemolyticus HK411 OX=1095743 GN=queE PE=3 SV=1

SEQ ID NO: 30485 - protein, 204 aa, Haemophilus parasuis; identical to SEQ ID NO: 30396
  misc_feature (1)..(204): tr|A0A084EXS2|A0A084EXS2_HAEPR 7-carboxy-7-deazaguanine synthase OS=Haemophilus parasuis OX=738 GN=queE PE=3 S V=1

SEQ ID NO: 30486 - protein, 204 aa, Haemophilus parasuis
  misc_feature (1)..(204): tr|A0A143CFP7|A0A143CFP7_HAEPR 7-carboxy-7-deazaguanine synthase OS=Haemophilus parasuis OX=738 GN=nrdG_2 PE=3 SV=1
MKNPEYRIVEIFETLQGEGFNTGMPSIFIRFGKCNLACPWCDTNYNQYETKTLADIMQVVKGFSAKNIIITGGEPTIQPDLAYLLDTLKAAGYFIAIETNGLKPVPPQIDYIATSPKRLYQKNYLKHHIPFANEVRIVVDGDVLAFCEQIESTIKAERYYLSPCEENGVMNMLETITQLGKLNQRPNKPRWQLSIQTHKMAGIE

SEQ ID NO: 30487 - protein, 209 aa, Haemophilus pittmaniae
  misc_feature (1)..(209): tr|F9Q7R6|F9Q7R6_9PAST 7-carboxy-7-deazaguanine synthas e OS=Haemophilus pittmaniae HK 85 OX=1035188 GN=queE PE =3 SV=1
MEKQNLLEPQYNIVEIFESLQGEGANTGMPSIFIRFGKCNLACPWCDTHYNQFTRWSMSQILDKVRSFSARNIIITGGEPTIVPKLEILLSQLKTLGYFLAIETNGLKPVPPQIDFIATSPKRLYAHKYAKRCISFAHEVRIVADENILPFCEMIEEKICAQHYYLSPCEIDGQMNLLETITQLGKLNQRAHKPKWQLSLQTHKLIGIE

SEQ ID NO: 30488 - protein, 209 aa, Haemophilus pittmaniae
  misc_feature (1)..(209): tr|A0A377IZ50|A0A377IZ50_9PAST 7-carboxy-7-deazaguanine synthase OS=Haemophilus pittmaniae OX=249188 GN=queE P E=3 SV=1
MERQNLLEPQYNIVEIFESLQGEGANTGMPSIFIRFGKCNLACPWCDTHYNQFTRWSMSQILDKVRSFSARNIIITGGEPTIVPKLEILLSQLKTLGYFLAIETNGLKPVPPQIDFIATSPKRLYAHKYAKRCISFAHEVRIVADENILPFCEMIEEKICAQHYYLSPCEIDGQMNLLETITQLGKLNQRAHKPKWQLSLQTHKLIGIE

SEQ ID NO: 30489 - protein, 209 aa, Haemophilus sp.; identical to SEQ ID NO: 30482
  misc_feature (1)..(209): tr|A0A1S1FKY5|A0A1S1FKY5_9PAST 7-carboxy-7-deazaguanine synthase OS=Haemophilus sp. HMSC61B11 OX=1608882 GN=qu eE PE=3 SV=1

SEQ ID NO: 30490 - protein, 211 aa, Haemophilus sp.
  misc_feature (1)..(211): tr|A0A1B8QPL4|A0A1B8QPL4_9PAST 7-carboxy-7-deazaguanine synthase OS=Haemophilus sp. CCUG 66565 OX=1859694 GN=q ueE PE=3 SV=1
MSVEKYHNFEPHFNIVEIFESLQGEGFNTGMPSIFVRFGKCNLDCPWCDTPYNDFKRWSVSQILEKVRSFPSKNIIITGGEPTIVPKIEYLLEQFKADGYFLAIETNGLKTVPAQIDYIATSPKSLYAHKYEKRCIPFANEVRIVMDGNISSFCELIEKKIKAENYYLSPCEIAGEMNLLETITLLGQLNQRPNKPKWQLSLQTHKLIGIE

SEQ ID NO: 30491 - protein, 209 aa, Haemophilus sputorum
  misc_feature (1)..(209): tr|J5HJ32|J5HJ32_9PAST 7-carboxy-7-deazaguanine synthas e OS=Haemophilus sputorum HK 2154 OX=1078483 GN=queE PE =3 SV=1
MSLPIFTTTRFPIVEIFESLQGEGFNTGMPAIFVRLGKCNLACPWCDTNYEEYEKWTVDTILHQVQSYQAKQVIITGGEPTMYANLNILLDALKAQGYWLAIETNGLKSVPSQIDYIATSPKRMYQEKYLRECIPFANEVRIVVDGDIFDFCEQIESQIQAEHYYLSPCEQDGKMNLLETITQLGQLNLRANKPKWQLSLQTHKIIGIE

SEQ ID NO: 30492 - protein, 209 aa, Haemophilus sputorum
  misc_feature (1)..(209): tr|A0A369YLB3|A0A369YLB3_9PAST 7-carboxy-7-deazaguanine synthase OS=Haemophilus sputorum OX=1078480 GN=queE PE =3 SV=1
MSLPIFTTTRFPIVEIFESLQGEGFNTGMPAIFVRLGKCNLACPWCDTNYEEYEKWTVDAILRQVQSYQAKQVIITGGEPTMYANLNILLDALKAQGYWLAIETNGLKSVPSQIDYIATSPKRMYQEKYLRECIPFANEVRIVVDGDILDFCEQIESQIQAEHYYLSPCEQDGKMNLLETITQLGQLNLRANKPKWQLSFQTHKIIGIE

SEQ ID NO: 30493 - protein, 223 aa, Hafnia alvei
  misc_feature (1)..(223): tr|A0A1C6Z0D1|A0A1C6Z0D1_HAFAL 7-carboxy-7-deazaguanine synthase OS=Hafnia alvei OX=569 GN=queE PE=3 SV=1
MSYPINELFQTLQGEGFYTGVPAIFIRLQGCPVGCSWCDTKHTWEQLPEREIGMNEILIKTEESDAWGSASPEQLLDILRERGYTARHVVITGGEPCIHDLRPLTELLNQNGFSCQIETSGTHEIRCSEATWVTVSPKVNMKGGMKVLESSLVRADEVKHPVARERDIEDLDALLSVLHDDKKRIIALQPISQKESATKLCIETCIARNWRLSMQTHKYLNIA

SEQ ID NO: 30494 - protein, 223 aa, Hafnia alvei
  misc_feature (1)..(223): tr|A0A2J9HFN5|A0A2J9HFN5_HAFAL 7-carboxy-7-deazaguanine synthase OS=Hafnia alvei OX=569 GN=queE PE=3 SV=1
MSYPINELFQTLQGEGFYTGVPAIFIRLQGCPVGCSWCDTKHTWEQLPEREIGMNEILIKTEESDAWGSASPEQLLDILRERGYTARHVVITGGEPCIHDLRPLTELLNQNGFSCQIETSGTHDIRCSEATWVTVSPKVNMKGGMKVLESSLVRADEVKHPVARERDIEDLDALLSVLHDDKKRIIALQPISQKESATKLCIETCIARNWRLSMQTHKYLNIA

SEQ ID NO: 30495 - protein, 223 aa, Hafnia paralvei
  misc_feature (1)..(223): tr|A0A4Q9EHU1|A0A4Q9EHU1_9GAMM 7-carboxy-7-deazaguanine synthase OS=Hafnia paralvei OX=546367 GN=queE PE=3 SV= 1
MSYPINELFQTLQGEGFYTGVPAIFIRLQGCPVGCSWCDTKHTWEQLPEREIGMNEILIKTAESDAWGSATPDQLLAILHERGYTARHVVITGGEPCIHDLRPLTELLNQHGFSCQIETSGTHEIRCSDATWVTVSPKVNMKGGMKVLESALIRADEVKHPVARERDIEDLDTLLAVLHDDKQRIIALQPISQKESATKLCIETCIARNWRLSMQTHKYLNIA

SEQ ID NO: 30496 - protein, 223 aa, Hafnia paralvei
  misc_feature (1)..(223): tr|A0A2A2M944|A0A2A2M944_9GAMM 7-carboxy-7-deazaguanine synthase OS=Hafnia paralvei OX=546367 GN=queE PE=3 SV= 1
MSYPINELFQTLQGEGFYTGVPAIFIRLQGCPVGCSWCDTKHTWEQLPEREIGMNEILIKTAESDAWGSATPDQLLAILQERGYTARHVVITGGEPCIHDLRPLTELLNQHGFSCQIETSGTHEIRCSDATWVTVSPKVNMKGGMKVLESALIRADEVKHPVARERDIEDLDTLLAVLHDDKQRIIALQPISQKESATKLCIETCIARNWRLSMQTHKYLNIA

SEQ ID NO: 30497 - protein, 217 aa, Hahella chejuensis
  misc_feature (1)..(217): tr|Q2S7U8|Q2S7U8_HAHCH 7-carboxy-7-deazaguanine synthas e OS=Hahella chejuensis (strain KCTC 2396) OX=349521 GN =queE PE=3 SV=1
MYRVKEAFYTLQGEGAHQGRPAVFCRFSKCNLWTGREKDRAGAVCNFCDTDFIGVDGQNGGKFATAEELADHILAFWPPEQDNRFVVCTGGEPLLQLDEPLIEAFHARGFEVAVETNGTLPAPAGIDWLCVSPKGRAEVVITECDELKLVYPQPEAPPERFSDIRAGRHYLSPMANPLVREGNDEQKRRNTQLAMEYCMRHPKWRLSVQLHKILGID

SEQ ID NO: 30498 - protein, 217 aa, Hahella sp.
  misc_feature (1)..(217): tr|A0A3T0VUZ4|A0A3T0VUZ4_9GAMM 7-carboxy-7-deazaguanine synthase OS=Hahella sp. KA22 OX=1628392 GN=queE PE=3 S V=1
MYRVKEIFYTLQGEGAHQGRPAVFCRFSKCNLWTGREKDRAGAVCNFCDTDFVGVDGQNGGKFATAEELAERILSFWPQEEAERFVVCTGGEPLLQLDEPLVEAFHARGFEVAVETNGTLPAPAGIDWLCVSPKGRAEVVIKECDELKLVYPQPEAPPERFDDIRAGRYYLSPMANPLALEGEDERKIHNTKLAMDFCMRYPKWRLSVQLHKILGID

SEQ ID NO: 30499 - protein, 217 aa, Hahella sp.
  misc_feature (1)..(217): tr|A0A261GU68|A0A261GU68_9GAMM 7-carboxy-7-deazaguanine synthase OS=Hahella sp. CCB-MM4 OX=1926491 GN=queE PE= 3 SV=1
MYRVKEIFYTLQGEGAQQGRAAVFCRFSKCNLWTGREKDRANAVCNFCDTDFIGTDGQNGGKYASAEELAARIDELWPQGHAGKFVVCTGGEPLLQLDSTMIEALHAKGFEVAVETNGTLPAPPGIDWMCVSPKGTAPVVIESCDELKLVYPQPEALPEQFAHIQASHYYLSPMADPLVRSGDDDVKQSNTQAALEYCMQHPKWKLSVQLHKILGIE

SEQ ID NO: 30500 - protein, 247 aa, Hahellaceae bacterium
  misc_feature (1)..(247): tr|A0A2D8R8I7|A0A2D8R8I7_9GAMM 7-carboxy-7-deazaguanine synthase OS=Hahellaceae bacterium OX=2048971 GN=queE P E=3 SV=1
MTGYRIKEAFYTLQGEGANQGRPAVFCRFSKCNLWNGRESDRASAICNFCDTDFVGVDGQNGGTFADANALADHLISLWPAAFRPAFVVCTGGEPLLQLDDDLIAALHDRGFEIAVETNGTLPAPAGIDWICVSPKGRSTVVIDSCNELKFVYPQDDLDPKDCAHIKADHYYLSPRDDRYLTQSGTPEQVAALRDANLIAVGSADVTSSDALPSPRITNHTADCVQYCMANPPWKLSLQTHKYLGID

SEQ ID NO: 30501 - protein, 211 aa, Haliangium ochraceum
  misc_feature (1)..(211): tr|D0LGT4|D0LGT4_HALO1 7-carboxy-7-deazaguanine synthas e OS=Haliangium ochraceum (strain DSM 14365 / JCM 11303 / SMP-2) OX=502025 GN=queE PE=3 SV=1
MPTKHPHSYRVKEIFGPTLQGEGTHAGRACVFLRFAGCNLQCSWCDTDFSPEGAERLRADEITERLLALDVHGARTVIVTGGEPALQWDQELADALRAAGFRVHMESNGTRPPRAPVDWLTVSPKVQFHGPREALFASAEAAVSECKLVVDDSVSHDTLAALEHHYEGADLLLQPCMDADYEQHLARTLTLIGERPRWRLSLQLHKIVGVP

SEQ ID NO: 30502 - protein, 65 aa, Haliea salexigens
  misc_feature (1)..(65): tr|A0A3C1KQ65|A0A3C1KQ65_9GAMM 7-carboxy-7-deazaguanine synthase QueE (Fragment) OS=Haliea salexigens OX=28748 7 GN=DCP75_14265 PE=4 SV=1
MTSTLSTSAGLAPDAVGDPTLRITEIFYSLQGEARTVGLPTVFVRLTGCPLRCVYCDTAYAFNGG

SEQ ID NO: 30503 - protein, 167 aa, Haliea salexigens
  misc_feature (1)..(167): tr|A0A3C1KQU0|A0A3C1KQU0_9GAMM 7-carboxy-7-deazaguanine synthase QueE (Fragment) OS=Haliea salexigens OX=28748 7 GN=DCP75_14260 PE=4 SV=1
GELRALSGVLAEVAAHRPRYVTVTGGEPLAQKNCLPLLYALCDAGYEVSLETSGALPVGEVDPRVVKVLDLKTPASQEAHRNDYSNVQHLTPHDQVKFVICDRADYEWARFKLNEYNLAQRVSDVLFSPSHGQLHGRELAAWILADNLPVRLQLQLHKLLWNDEPGH

SEQ ID NO: 30504 - protein, 240 aa, Haliea sp.
  misc_feature (1)..(240): tr|A0A2D5F754|A0A2D5F754_9GAMM 7-carboxy-7-deazaguanine synthase OS=Haliea sp. OX=1932666 GN=queE PE=3 SV=1
MRPPVAAPSTWPGTSCVTITETRVDLSASLRITEIFHSLQGETRTVGLPTVFVRLTGCPLRCVYCDTAYAFSGGELRTLEAILEEVRRHGAHFVTVTGGEPLAQPNCLPLLAALCDAGYEVSLETSGALSVAGVDPRVVKVLDLKTPASAESHRNDYANIDQLNPRDQVKFVICDRADYEWARFKLDEYRLAERVDDVLFSPSHHDLPARELAEWILADRLPVRLQLQLHKLLWNDEPGH

SEQ ID NO: 30505 - protein, 211 aa, Haliea sp.
  misc_feature (1)..(211): tr|A0A2D5F8B9|A0A2D5F8B9_9GAMM 7-carboxy-7-deazaguanine synthase OS=Haliea sp. OX=1932666 GN=queE PE=3 SV=1
MTYSVKEMFYTLQGEGAQAGRPAVFLRFAGCNLWNGLERDRADAVCNFCDTDFVGVDGQNGGQFKAADELAARVSSFWPEGKDGKPFVVCTGGEPLLQLDLPLIDALHAQGFEIAVETNGTIKAPAGIDWICVSPKADAPLQQLCGDELKLVYPQAKALPERFETLEFRHFYLQPMDGVAAAENTRAATSYCLSNPHWSLSLQTHKFLGID

SEQ ID NO: 30506 - protein, 222 aa, Halieaceae bacterium
  misc_feature (1)..(222): tr|A0A3C7VZ77|A0A3C7VZ77_9GAMM 7-carboxy-7-deazaguanine synthase OS=Halieaceae bacterium OX=2026743 GN=queE PE =3 SV=1
MTAAVDPSATTLRITEIFHSLQGEARTVGLPTVFVRLTGCPLRCVYCDTAYAFSGGELWTQERVLDTVAGYGARYVTVTGGEPLAQPACLPLLAALCDAGYEVSLETSGAMPVGDVDRRVVKVLDLKTPASGEMARNDYGNIEHLTAQDQVKFVICDRADYDWARFKLDEYRLAERAGDVLFSPSHGQQDARELAEWILADRLPVRLQLQLHKLLWNDEPGH

SEQ ID NO: 30507 - protein, 231 aa, Halieaceae bacterium
  misc_feature (1)..(231): tr|A0A359EJB5|A0A359EJB5_9GAMM 7-carboxy-7-deazaguanine synthase OS=Halieaceae bacterium OX=2026743 GN=queE PE =3 SV=1
MTSTLSTSAGLAPDAVGDPTLRITEIFYSLQGEARTVGLPTVFVRLTGCPLRCVYCDTAYAFNGGELRALSGVLAEVAAHRPRFVTVTGGEPLAQKNCLPLLSALCDAGYEVSLETSGALPVGEVDPRVVKVLDLKTPASQEAHRNDYSNVQHLTPHDQVKFVICDRADYEWARFKLDEYNLAQRVSDVLFSPSHGQLHGRELAAWILADNLPVRLQLQLHKLLWNDEPGH

SEQ ID NO: 30508 - protein, 229 aa, Halioglobus japonicus
  misc_feature (1)..(229): tr|A0A2N5Y896|A0A2N5Y896_9GAMM 7-carboxy-7-deazaguanine synthase OS=Halioglobus japonicus OX=930805 GN=queE PE =3 SV=1
MADHAPQSTDSTLDTTPTLRLTEMFYSLQGETRTVGLPTVFVRLTGCPLRCVYCDTEYAFSGGEIFTLDHIAAKVAEWQPRYVTVTGGEPLAQPNCLPLLIRLCDAGYEVSLETGGAMPLAGVDPRVVTVLDLKTPASGEMSRNDYANIPLLKPHDQVKFVICDRADYEWMRFKLEEYQLATRVAEVLLSPSHGQLSGRELAEWILEDNLPVRMQLQLHKILWNDEPGH

SEQ ID NO: 30509 - protein, 222 aa, Halioglobus lutimaris
  misc_feature (1)..(222): tr|A0A2N5X0G0|A0A2N5X0G0_9GAMM 7-carboxy-7-deazaguanine synthase OS=Halioglobus lutimaris OX=1737061 GN=queE P E=3 SV=1
MSPSLVHSDDALRITEIFYSLQGETRTMGLPTVFVRLTGCPLRCTYCDTEYAFSGGELLALEDILNTVGGYNPRYVTVTGGEPLAQPNCLSLLERLCDAGYEVSLETGGAISLVGVDPRVITVLDLKTPGSGEMQRNDYANIPLLREHDQVKFVICDRQDYEWARFKLDELGLQGRVSELLFSPSHGSLQGRQLAEWILEDNLPVRLQLQLHKILWNDQPGH

SEQ ID NO: 30510 - protein, 222 aa, Halioglobus sp.
  misc_feature (1)..(222): tr|A0A3L7DSC7|A0A3L7DSC7_9GAMM 7-carboxy-7-deazaguanine synthase OS=Halioglobus sp. U0301 OX=2283635 GN=queE P E=3 SV=1
MSTSLVHSDDALRITEIFYSLQGEARTVGLPTVFVRLTGCPLRCVYCDTEYAFSGGELQSLEDVVARVAAYQPRYVTVTGGEPLAQPNCLPLLAALCDAGYEVSLETGGAMPLAGVDPRVVKVVDLKTPASGEMNRNDYDNLALLQSHDQIKFVICDRADYDWARFKLDEFQLASRVSDVLFSPSHGELSGRQLAEWILADKLPVRMQLQLHKILWNDEPGH

SEQ ID NO: 30511 - protein, 221 aa, Halioglobus sp.
  misc_feature (1)..(221): tr|A0A5B0WUK7|A0A5B0WUK7_9GAMM 7-carboxy-7-deazaguanine synthase OS=Halioglobus sp. NY5 OX=2606449 GN=queE PE= 3 SV=1
MSSLVHSEDALRITEIFYSLQGETRTMGLPTVFVRLTGCPLRCTYCDTEYAFTGGELMAIQDILARVAEYQPAYVTVTGGEPLAQPNCLPLLTQLCDAGYEVSLETGGAMSLEGVDSRVVSVLDLKTPASGEMQRNDYDNVPRLRSQDQVKFVICDREDYEWARFKLDELKLADRVADVLFSPSHADLSGRQLAEWILQDRLPVRMQLQLHKILWDDQRGH

SEQ ID NO: 30512 - protein, 228 aa, Haliscomenobacter hydrossis
  misc_feature (1)..(228): tr|F4KX36|F4KX36_HALH1 7-carboxy-7-deazaguanine synthas e OS=Haliscomenobacter hydrossis (strain ATCC 27775 / D SM 1100 / LMG 10767 / O) OX=760192 GN=queE PE=3 SV=1
MTTYKIKEIFYTLQGEGAQSGRPAVFCRFSGCNLWSGREEDRSKAICQFCDTDFWGMDGENGGKYNAEELADKVIGLWPGGSEKRIANSEKQVGEISDLRGKPYVVCTGGEPLLQLDEPLIEAFHRRGLEVAVETNGTIAAPAGLDWICMSPKANTELLIQSGHELKLVYPQAGAEPERYEHLDFEHFYLQPMDGVDAQHNTRLTLAYCLSHPQWSLSLQTHKILGIA

SEQ ID NO: 30513 - protein, 247 aa, Haloactinopolyspora alba
  misc_feature (1)..(247): tr|A0A2P8DF21|A0A2P8DF21_9ACTN 7-carboxy-7-deazaguanine synthase OS=Haloactinopolyspora alba OX=648780 GN=queE PE=3 SV=1
MVSVTDTPTLPTVEVFGPTIQGEGPSTGRPATFIRLGHCNLSCSWCDTPYSWDATRHDLEAEITDRPAGDLLDVVAASGEPVSLTVLTGGEPLMHQRRPGMAALLDGLDELDQDVEVETNGTIPPTDELTQRPRVRFNVSPKLAHAGMDEKRTLRPGALKQFAALARDGRAVFKFVATDRDDLEDVRDIVRRYSVPARAVWIMPEGTQPGQLLASARDLLTDPYLLRMGWNLTPRLHALLWPNERSR

SEQ ID NO: 30514 - protein, 249 aa, Haloarcobacter mediterraneus
  misc_feature (1)..(249): tr|A0A4Q1AV24|A0A4Q1AV24_9PROT 7-carboxy-7-deazaguanine synthase OS=Haloarcobacter mediterraneus OX=2023153 GN =queE PE=3 SV=1
MLEINEIFGPTIQGEGKLVGSPSIFIRVGKCNFRCEGFNVEYETPSGIKKCSCDTYYAVDPAFKDQWQKMSAENIINKISKIEPKYKIDIVITGGEPLLYWKNDEFQKLLRYYIENNYKVTIETNASLDITLDKSYQKEIIFSMSVKLSNSLEPLKKRVNTTTLNTIIDKTKNSYLKFVVDKNFKKQAEEEIKNILLQIPRTEVYLMPMGDTAEQINQNSEAVINLAIKNGFKYCDRLHIRVWDNKRGV

SEQ ID NO: 30515 - protein, 242 aa, Halobacillus aidingensis
  misc_feature (1)..(242): tr|A0A1H0S917|A0A1H0S917_HALAD 7-carboxy-7-deazaguanine synthase OS=Halobacillus aidingensis OX=240303 GN=queE PE=3 SV=1
MNKFPVLEIFGPTIQGEGMVVGRKTMFVRTAGCDYSCSWCDSAFTWDGSAKHDIERLTSEEIVTRLIDTGGEQFDHVTISGGNPALLKNLHELIVPLHERGIEVALETQGSRWQEWFTQIDDLTISPKPPSSGMKTDWNILDDILIRLEGADRLQNTSIKVVIFNKEDLSYAEKVHERYPNVPFFLQVGNDDLEENEAGTLASHLLDQYEWLIDQVVASSKLNKVRVLPQVHALVWGNKRGV

SEQ ID NO: 30516 - protein, 242 aa, Halobacillus alkaliphilus
  misc_feature (1)..(242): tr|A0A1I2TI93|A0A1I2TI93_9BACI 7-carboxy-7-deazaguanine synthase OS=Halobacillus alkaliphilus OX=396056 GN=que E PE=3 SV=1
MSKFPVLEIFGPTIQGEGMVVGRKTMFVRTAGCDYSCAWCDSAFTWDGSAKDEIERLTADEIVNRLLETGGRHFDHVTISGGNPALLAKLDELIEPLHARGIEVALETQGSRWQDWFPEIDDLTISPKPPSSKMNTNWQVLDDIIERLLERGRLANVSLKVVVFNDEDLTYAERVHERYPDVPFFLQVGNDDLEEDAPPALASHLLDQYEWLIDQVVASEKLNHVRVLPQVHALVWGNKRGV

SEQ ID NO: 30517 - protein, 242 aa, Halobacillus dabanensis
  misc_feature (1)..(242): tr|A0A1I3XV21|A0A1I3XV21_HALDA 7-carboxy-7-deazaguanine synthase OS=Halobacillus dabanensis OX=240302 GN=queE PE=3 SV=1
MNKYPVLEIFGPTIQGEGMVVGRKTMFVRTAGCDYSCAWCDSAFTWDGSAKEEIERLTAEEIINRLINTGGNQFDHVTISGGNPALLKNLDELIAPLHEKGIEVALETQGSRWQDWFPEIDDLTISPKPPSSKMTTNWDVLDDIIQRLRTAGRIDNTSLKVVIFNESDLSYAEKVHQRYSDIPFFLQVGNDDLEENESNTLASHLLHQYEWLIDKVVESSKLNRVRVLPQVHALVWGNKRGV

SEQ ID NO: 30518 - protein, 242 aa, Halobacillus faecis
  misc_feature (1)..(242): tr|A0A511WYD8|A0A511WYD8_9BACI 7-carboxy-7-deazaguanine synthase OS=Halobacillus faecis OX=360184 GN=queE PE=3 SV=1
MNKFPVLEIFGPTIQGEGMVVGRKTMFVRTAGCDYSCAWCDSAFTWDGSAKHDIERLTSEEIVARLFNIGGEQFDHVTISGGNPALLKNLHELILPLHEKGIEVALETQGSRWQEWFTEIDDLTISPKPPSSGMKTDWDILDDMISRLEYADRGKHTSLKVVIFNEDDLTYAELVHQRYPNVPFFLQVGNDDLEESEAGTLASHLLDQYEWLIDQVVASSKLNKVRVLPQVHALVWGNKRGV

SEQ ID NO: 30519 - protein, 242 aa, Halobacillus halophilus
  misc_feature (1)..(242): tr|I0JJQ0|I0JJQ0_HALH3 7-carboxy-7-deazaguanine synthas e OS=Halobacillus halophilus (strain ATCC 35676 / DSM 2 266 / JCM 20832 / NBRC 102448/ NCIMB 2269) OX=866895 GN =queE PE=3 SV=1
MNKFPVLEIFGPTIQGEGMVVGRKTMFVRTAGCDYSCAWCDSAFTWDGSAKEEIERLTANEIVDRLLEAGGRHFDHVTISGGNPALLAKLDELIEPLHARGIEVALETQGSRWQDWFPEIDDLTISPKPPSSKMKTNWQVLDQIIERLLEQGRLANVSLKVVVFNHEDLAYAETVHERYPDVPFFLQVGNDDLEEDAPPALASHLLDQYEWLIDQVVASEKLNHVRVLPQVHALVWGNKRGV

SEQ ID NO: 30520 - protein, 242 aa, Halobacillus karajensis
  misc_feature (1)..(242): tr|A0A024P5S4|A0A024P5S4_9BACI 7-carboxy-7-deazaguanine synthase OS=Halobacillus karajensis OX=195088 GN=queE PE=3 SV=1
MNKFPVLEIFGPTIQGEGMVVGRKTMFVRTAGCDYSCAWCDSAFTWDGSAKQDIERLTAHEIVDRLIQTGGDQFDHVTISGGNPALLKNLHDLINLLHEKEIEIALETQGSRWQDWFLEIDDLTISPKPPSSKMETNWEALDGIINHLEKEERLRNTSLKVVIFNNEDLKYAEKVHERYPNVPFFLQVGNDDLEEDESSTLASHLLDQYEWLIDQVVASPKLNKVRVLPQVHALVWGNKRGV

SEQ ID NO: 30521 - protein, 242 aa, Halobacillus litoralis
  misc_feature (1)..(242): tr|A0A410MAV1|A0A410MAV1_9BACI 7-carboxy-7-deazaguanine synthase OS=Halobacillus litoralis OX=45668 GN=queE PE =3 SV=1
MNKFPVLEIFGPTIQGEGMVVGRKTMFVRTAGCDYSCAWCDSAFTWDGSAKEDIERLTSEEIVAHLIEEGGSQFDHVTISGGNPALLKNLHELIEPLHEEGIEVALETQGSRWQDWFLDIDDLTISPKPPSSKMDTNWMVLDDILFRLREGSRLSHTSLKVVIFNQEDLGYAEEVHQRYPEVPFFLQVGNDDLEENESSSLASHLLTQYEWLIDQVVASSRLNRVRVLPQVHALVWGNKRGV

SEQ ID NO: 30522 - protein, 242 aa, Halobacillus mangrovi
  misc_feature (1)..(242): tr|A0A1W5ZYF4|A0A1W5ZYF4_9BACI 7-carboxy-7-deazaguanine synthase OS=Halobacillus mangrovi OX=402384 GN=queE PE =3 SV=1
MNKFPVLEIFGPTIQGEGMVVGRKTMFVRTAGCDYSCAWCDSAFTWDGSAKDEIERLTADEIIARLKDEGGDKFDHVTVSGGNPALLKHLHELIDPLHEQGIEVALETQGSRWQDWFTSIDDLTISPKPPSSKMNTNWIVLDEIVARLKENGRLSNLSLKVVIFNDEDLTYAEEVHERYPDVPFFLQVGNDDLEEEKSSNLASHLLDQYEWLIDQVVDSEKLNHVRVLPQVHALVWGNKRGV

SEQ ID NO: 30523 - protein, 242 aa, Halobacillus salinus
  misc_feature (1)..(242): tr|A0A4Z0H457|A0A4Z0H457_9BACI 7-carboxy-7-deazaguanine synthase OS=Halobacillus salinus OX=192814 GN=queE PE= 3 SV=1
MNKFPVLEVFGPTIQGEGMVVGRKTMFVRTAGCDYSCAWCDSAFTWDGSAKEDIERLTADEIIERLLSIGGQQFDHVTISGGNPALLKNLGELIDPLHQRGIEVALETQGSRWQDWFTDIDDLTISPKPPSSKMNTNWLVLDEIIARLKENGRDRHTSLKVVIFNEEDLGYAEEVHERYPDVPFFLQVGNDDLEENQPANLASHLLDQYEWLIDQVVASEKLNRVRVLPQVHALVWGNKRGV

SEQ ID NO: 30524 - protein, 242 aa, Halobacillus sp.
  misc_feature (1)..(242): tr|A0A0B0D4K8|A0A0B0D4K8_9BACI 7-carboxy-7-deazaguanine synthase OS=Halobacillus sp. BBL2006 OX=1543706 GN=que E PE=3 SV=1
MNKFPVLEIFGPTIQGEGMVVGRKTMFVRTAGCDYSCAWCDSAFTWDGSAKDEIERLTADEIITRLKDEGGNKFDHVTVSGGNPALLNNLHELIEPLHEQGVEVALETQGSRWQDWFTSIDDLTISPKPPSSKMKTNWMVLDEIVTRLKENDRLSNLSLKVVVFNDEDLVYAEEVHERYPDVPFFLQVGNDDLEEDKPANLASHLLDQYEWLIDKVVDSEKLNHVRVLPQVHALVWGNKRGV

SEQ ID NO: 30525 - protein, 242 aa, Halobacillus sp.
  misc_feature (1)..(242): tr|L5NFF4|L5NFF4_9BACI 7-carboxy-7-deazaguanine synthas e OS=Halobacillus sp. BAB-2008 OX=1246484 GN=queE PE=3 SV=1
MNKFPVLEIFGPTIQGEGMVVGRKTMFVRTAGCDYSCAWCDSAFTWDGSAKEDIERLTAEEIITRLKETGGERFDHVTISGGNPALLKHLNELIDGLHDLGIEVALETQGSRYQDWFPDIDDLTISPKPPSSLMKTDWNILDDILHRLERKGRSDSTSLKVVIFNEEDLDYAAQVHERYPAIPFFLQVGNDDLKEGEPANLAGYLLEQYEWLIDQVVASEKLNHVRVLPQVHALVWGNKRGV

SEQ ID NO: 30526 - protein, 242 aa, Halobacillus trueperi
  misc_feature (1)..(242): tr|A0A3E0J753|A0A3E0J753_9BACI 7-carboxy-7-deazaguanine synthase OS=Halobacillus trueperi OX=156205 GN=queE PE =3 SV=1
MNKFPVLEIFGPTIQGEGMVVGRKTMFVRTAGCDYSCSWCDSAFTWDGSAKHDIERLTSEEIVTRLIDTGGEQFDHVTISGGNPALLKNLHELIVPLHERGIEVALETQGSRWQEWFTQIDDLTISPKPPSSGMKTDWNILDDILIRLEGADRLQNTSIKVVIFNKKDLSYAEKVHERYPNVPFFLQVGNDDLEENEAGTLASHLLDQYEWLIDQVVASSKLNKVRVLPQVHALVWGNKRGV

SEQ ID NO: 30527 - protein, 242 aa, Halobacillus trueperi
  misc_feature (1)..(242): tr|A0A3D8VSR5|A0A3D8VSR5_9BACI 7-carboxy-7-deazaguanine synthase OS=Halobacillus trueperi OX=156205 GN=queE PE =3 SV=1
MNKFPVLEIFGPTIQGEGMVVGRKTMFVRTAGCDYSCSWCDSAFTWDGSAKHDIERLTSEEIVTRLIDTGGEQFDHVTISGGNPALLKNLHELIVPLHERGIEVALETQGSRWQEWFTQIDDLTISPKPPSSGMKTDWNILDDILIRLEGADRLQNTSIKVVIFNKEDLSYAEKVHEHYPNVPFFLQVGNDDLEENEAGTLASHLLDQYEWLIDQVVASSKLNKVRVLPQVHALVWGNKRGV

SEQ ID NO: 30528 - protein, 245 aa, Halobacteriovoraceae bacterium
  misc_feature (1)..(245): tr|A0A2E5X024|A0A2E5X024_9PROT 7-carboxy-7-deazaguanine synthase OS=Halobacteriovoraceae bacterium OX=2026745 GN=queE PE=3 SV=1
MCYKLSTMSSKLAINSIYMATEGEGIHIGTPQIFVRFQGCNIGCINCDSKDTWEFTDPEMSFDSAISKVEELAGEYPMRVKRVSITGGDPLHPKHVPAVTAIARELKKRGYFINLEAAGTRIVHEIFDVIDFISFDFKTPSTGVRTNTKLLVKLWEQYKNKAQIKAVVASRHDYEAALDAYKTVSEQTEHQFDIPWVITPCYEPGDELPKTLAQSIVELNHSYGAPFRVILQQHKVIYTADFGDF

SEQ ID NO: 30529 - protein, 237 aa, Halobacteriovoraceae bacterium
  misc_feature (1)..(237): tr|A0A2E2EI90|A0A2E2EI90_9PROT 7-carboxy-7-deazaguanine synthase OS=Halobacteriovoraceae bacterium OX=2026745 GN=queE PE=3 SV=1
MTQLVVNSIYMATEGEGIHIGTPQIFVRFQGCSIGCLNCDSKETWDFDAAGLSLEQVLNEVETQAGKYPYRIKRVSITGGDPLHPKHAPQVEALAMELKKRGYYINLEAAGTRVLDSLFDSIDFISFDFKTPSTGVKTNIKLLEKVFVQYASKAQIKSVIADKKDFEFTYDTYMSLQQKHEYSLTTPWVLTPCYEPGEEFPKERFIEVINFNEAYGSPFRVIGQQHKWIHGPNKQNV

SEQ ID NO: 30530 - protein, 233 aa, Halobacteriovorax marinus
  misc_feature (1)..(233): tr|E1X3S8|E1X3S8_HALMS 7-carboxy-7-deazaguanine synthas e OS=Halobacteriovorax marinus (strain ATCC BAA-682 / D SM 15412 / SJ) OX=862908 GN=queE PE=3 SV=1
MKSFLINSIYPATEGEGVHIGTPQIFVRFQGCAIGCLNCDSKDTWDFTGRNWTLDEVLGAIEDAGGERIKRVSITGGDPLHPSHTEQVSLLVSTLKERGYFINIEAAGTRVVDEIFNKIDFISFDFKTPSTGVKTRVQNLNKLIQNYPNKFQIKAVVETREDFEATLDIYNELLSMNESLSFPWCLTPSYNLNEEFPLERFRNVIKWNEEGGSIFRVIGQQHKWLYGPDEKQV

SEQ ID NO: 30531 - protein, 228 aa, Halobacteriovorax marinus
  misc_feature (1)..(228): tr|A0A1Y5FCW0|A0A1Y5FCW0_9PROT 7-carboxy-7-deazaguanine synthase OS=Halobacteriovorax marinus OX=97084 GN=queE PE=3 SV=1
MNSIYLATEGEGVHIGTPQVFVRFQGCTIGCLNCDSKDTWDFEGNRWTKEEVLSAIEDAGGKNLKRVSITGGDPLHPSHVPNVLELVTELKSRGYYINLEAAGTRIVPEIFEKIDYISMDFKTPSTGVKTRVELLSTLINNYPSKFQIKAVIETHEDMIATTDAYNQLLSMNTTLNFPWNLTPSYNLNEEFPLERFRNVIKWNEEAGGLFRVIGQQHKWLYGPDEKQV

SEQ ID NO: 30532 - protein, 235 aa, Halobacteriovorax sp.
  misc_feature (1)..(235): tr|A0A2E6HB73|A0A2E6HB73_9PROT 7-carboxy-7-deazaguanine synthase OS=Halobacteriovorax sp. OX=2020862 GN=queE P E=3 SV=1
MKDFLINSIYRATEGEGVNIGQSQIFVRFQGCAVGCLNCDSMDTWDFDPSTVMTLKEVMAAVEYQGHIGKIKRVSITGGDPLHPKHTPRVLELVKELKQKGYWINIEAAGTRVVDELFDLIDFISFDFKTPSTGVATNPNLLRRVIEQYGNRAQIKSVVENKADFSSALFAHQWLLENTDLYLTPWVVTPAYNLGEEFPEKRFQDIIAWNEEVGAPFRVIGQQHKWIFGPDKKQV

SEQ ID NO: 30533 - protein, 233 aa, Halobacteriovorax sp.
  misc_feature (1)..(233): tr|A0A2G8HXZ3|A0A2G8HXZ3_9PROT 7-carboxy-7-deazaguanine synthase OS=Halobacteriovorax sp. JY17 OX=2014617 GN=q ueE PE=3 SV=1
MKSFLINSIYPATEGEGVHIGTPQVFVRFQGCAIGCLNCDSKDTWDFTGRNWTLEEVLTGIEDAGGERMKRVSITGGDPLHPSHTDQVLSLVETLKERGYFVNIEAAGTRVVDEIFNKLDFISFDFKTPSTGVKTRVQALNKLIQNYPGKFQIKAVVETEEDYRATVDMYNELLSMNSSLNFPWCLTPSYNLNEEFPLERFRNVIKWNEEGGSLFRVIGQQHKWLFGPDEKQV

SEQ ID NO: 30534 - protein, 212 aa, Halodesulfovibrio marinisediminis
  misc_feature (1)..(212): tr|A0A1N6I871|A0A1N6I871_9DELT 7-carboxy-7-deazaguanine synthase OS=Halodesulfovibrio marinisediminis DSM 1745 6 OX=1121457 GN=queE PE=3 SV=1
MSFRVTEIFYTLQGEGFHAGRAAVFCRFSGCNLWTGREEDREQATCKFCDTNFVQPAESGGTFASASELVSSIMNTFPDIQHAKYTPYVVFTGGEPALQVTPELISLLKEQQVEIGIETNGTLPLPEGLDWITVSPKAGTQLAVTSGHELKLVWPQENVILSDFQALDFEHFYIQPKDGQKRSTSTQLAVKICRENPVWKLSLQTHKYIGIP

SEQ ID NO: 30535 - protein, 216 aa, Halomonadaceae bacterium
  misc_feature (1)..(216): tr|A0A139CD61|A0A139CD61_9GAMM 7-carboxy-7-deazaguanine synthase OS=Halomonadaceae bacterium T82-2 OX=1783518 GN=queE PE=3 SV=1
MYSVKEAFYSLQGEGARTGRPSVFCRFTGCNLWSGRERDRAGSLCRFCDTDFIGTDGQNGGRFADAEQLATHLAELWPDGTERAVPYVVFTGGEPLLQLDPALIAAMHTLGFEIAVETNGTLPAPEGIDWLCVSPKGRAELTITRGDELKLVYPQPDAPPARFADLAFRHFYLQPMDTRPAGMANDESPLAASLAFCLAHPQWHLSLQTHKQLGID

SEQ ID NO: 30536 - protein, 218 aa, Halomonas aestuarii
  misc_feature (1)..(218): tr|A0A1J0VBR9|A0A1J0VBR9_9GAMM 7-carboxy-7-deazaguanine synthase OS=Halomonas aestuarii OX=1897729 GN=queE PE= 3 SV=1
MYSVKEAFYSLQGEGGQAGRASVFCRFTGCNLWSGRERDRATAACRFCDTDFIGTDGQHGGRFSDAAALADHLAALWPDQDGVATPYVVFTGGEPLLQLDEALVSAMHDRGFEVAVETNGTLPAPAGIDWLCVSPKGDAPLVLTGGDELKLVHPQAGVSPEGFARLDFAHFFLQPMDTAPAGIAGDATPDTMAETVAYCLAHPQWRLSLQTHKIAGVD

SEQ ID NO: 30537 - protein, 218 aa, Halomonas alkaliantarctica
  misc_feature (1)..(218): tr|A0A4R7Y7H2|A0A4R7Y7H2_9GAMM 7-carboxy-7-deazaguanine synthase OS=Halomonas alkaliantarctica OX=232346 GN=qu eE PE=3 SV=1
MYQVKEAFYTLQGEGAQAGRASVFCRFSGCNLWSGREIDRATAKCTFCDTDFIGTNGINGGKFATATALAEHIAALWPSHSSDAKSKATPYVVFTGGEPLLQLDTALIATLHSHGFEVAVETNGTLPPPPGIDWLCVSPKGSNPLAVTQGDELKLVYPQAEAPPEQFSSLGFRHFFLQPMDLAPINQDKTTVAEATAYCMANPQWRLSLQMHKLAGFD

SEQ ID NO: 30538 - protein, 214 aa, Halomonas alkaliphila
  misc_feature (1)..(214): tr|A0A386X435|A0A386X435_9GAMM 7-carboxy-7-deazaguanine synthase OS=Halomonas alkaliphila OX=272774 GN=queE PE =3 SV=1
MYHVKEAFYTLQGEGAQAGRASVFCRFSGCNLWSGREIDRASAKCSFCDTDFVGTDGINGGRFNTPRELADHIKALWPVHAGRATPYVVFTGGEPLLQLDTPLITLLHSDGFEVAVETNGTVIPPPGIDWLCVSPKGTNPLVVTHGDELKLVFPQSAAPPTQFANLDFNHFFLQPMDHGIAHRNHETVQATTEYCMANPQWRLSLQTHKIAGFE

SEQ ID NO: 30539 - protein, 214 aa, Halomonas andesensis
  misc_feature (1)..(214): tr|A0A433KT18|A0A433KT18_9GAMM 7-carboxy-7-deazaguanine synthase OS=Halomonas andesensis OX=447567 GN=queE PE= 3 SV=1
MYHVKEAFYTLQGEGAQAGRASVFCRFSGCNLWSGREADRASAKCSFCDTDFIGTDGINGGRFNTPSELAEHIKALWPTPAEKATPYVVFTGGEPLLQLDTPLIALLHSDGFEVAVETNGTVVPPPGIDWLCVSPKSTNPLVVTCGDELKLVFPQSSAPPTQFANLDFKHFFLQPMDHGIAQKNHETVQATTAYCMANPQWRLSLQTHKIAGFE

SEQ ID NO: 30540 - protein, 215 aa, Halomonas anticariensis
  misc_feature (1)..(215): tr|S2KR43|S2KR43_HALAF 7-carboxy-7-deazaguanine synthas e OS=Halomonas anticariensis (strain DSM 16096 / FP35) OX=1121939 GN=queE PE=3 SV=1
MYSVKEAFYTLQGEGARAGRASVFCRFTGCNLWSGREADRASSPCRFCDTDFVGTDGQHGGRFRDATSLADHLAALWPTNTVGKAAPYVVFTGGEPLLQLDASLIEAMHARDFEVAVETNGTIEIPAGIDWLCVSPKGTSRMVVTRGDELKLVYPQRDAPPERFAHLDFQYFYLQPMDLTPLHGEGDTMAEVVAYCLRTPQWQLSLQTHKIVGID

SEQ ID NO: 30541 - protein, 220 aa, Halomonas aquamarina
  misc_feature (1)..(220): tr|A0A1H8INW5|A0A1H8INW5_9GAMM 7-carboxy-7-deazaguanine synthase OS=Halomonas aquamarina OX=77097 GN=queE PE=3 SV=1
MYHVKEAFYTLQGEGAQAGRASVFCRFTGCNLWSGREIDRANAQCTFCDTDFNGTDGVNGGRFNTAQALAEHIKALWPQEANNAVPYVVFTGGEPLLQLDTELIATLHSEGFEVAVETNGTVPAPTGIDWLCVSPKGSNPLAITQGDELKLVFPQADAPPEQFSHLAFSHFFLQPMDLSAVAQKSIATDGAATVQATTAYCMANPQWRLSLQTHKIAGFE

SEQ ID NO: 30542 - protein, 214 aa, Halomonas arcis
  misc_feature (1)..(214): tr|A0A1H0F9Z5|A0A1H0F9Z5_9GAMM 7-carboxy-7-deazaguanine synthase OS=Halomonas arcis OX=416873 GN=queE PE=3 SV= 1
MYHVKEAFYTLQGEGAQAGRASVFCRFSGCNLWSGREQDRATAKCTFCDTDFIGTDGTGGGRFTTPDALADHILGLWPLEADNATPYVVFTGGEPLLQLNPALIAHLHSRGFEVAVETNGTLPPPAGIDWLCVSPKGKNPLVVNQGDELKLVYPQVEAPPEAFAQLDFRHFFLQPMDLSPVQQDADTVARTTAYCLAHPQWRLSLQTHKIAGFD

SEQ ID NO: 30543 - protein, 214 aa, Halomonas beimenensis
  misc_feature (1)..(214): tr|A0A291P801|A0A291P801_9GAMM 7-carboxy-7-deazaguanine synthase OS=Halomonas beimenensis OX=475662 GN=queE PE =3 SV=1
MYSVKEAFYSLQGEGGQAGRASVFCRFSGCNLWSGREAHRAAAACRFCDTDFVGTDGQHGGRFTSTAALADHLVALWPEAPGTATPQVIFTGGEPLLQLDEALIAAMHERGFDVAVETNGTLPAPAGIDWLCVSPKGQAPLVQTRGDELKLIHPQPDAPPERFVDLGFRHFFLQPMDTAPLGGGGDSLAETVAYCLAHPQWRLSLQTHKIAGID

SEQ ID NO: 30544 - protein, 214 aa, Halomonas boliviensis
  misc_feature (1)..(214): tr|A0A265DUY9|A0A265DUY9_9GAMM 7-carboxy-7-deazaguanine synthase OS=Halomonas boliviensis LC1 OX=1072583 GN=qu eE PE=3 SV=1
MYQVKEAFYTLQGEGAQAGRASVFCRFSGCNLWSGREVDRPTAKCTFCDTDFIGTNGINGGKFATATALAEHIAALWPSQNDNATPYVVFTGGEPLLQLDAALIATLHSHGFEVAVETNGTLKPPPGIDWLCVSPKGSNPLAVTRGDELKLVYPQTDAPPEQFSRLGFRHFFLQPMDLTPLDQAKSTVAEATAYCMANPQWRLSLQMHKLAGFD

SEQ ID NO: 30545 - protein, 214 aa, Halomonas campaniensis
  misc_feature (1)..(214): tr|A0A060BAH6|A0A060BAH6_9GAMM 7-carboxy-7-deazaguanine synthase OS=Halomonas campaniensis OX=213554 GN=queE P E=3 SV=1
MYHVKEAFYTLQGEGAQAGRASVFCRFSGCNLWSGREIDRASAKCSFCDTDFVGTDGINGGRFNTARELAEHIKALWPVHAGRATPYVVFTGGEPLLQLDTPLIALLHSDGFEVAVETNGTVIPPPGIDWLCVSPKGTNPLVVTHGDELKLVFPQSAAPPTQFANLDFNHFFLQPMDHGIAQKNHATVQATTEYCMANPQWRLSLQTHKIAGFE

SEQ ID NO: 30546 - protein, 214 aa, Halomonas campaniensis
  misc_feature (1)..(214): tr|A0A3D0KJ22|A0A3D0KJ22_9GAMM 7-carboxy-7-deazaguanine synthase OS=Halomonas campaniensis OX=213554 GN=queE P E=3 SV=1
MYHVKEAFYTLQGEGAQAGRASVFCRFSGCNLWSGREIDRASAKCSFCDTDFIGTDGINGGRFNTPRELADHIKALWPVHAGRATPYVVFTGGEPLLQLDTPLIALLHSDGFEVAVETNGTVIPPPGIDWLCVSPKGTNSLVVTRGDELKLVFPQSAAPPTQFANLDFNHFFLQPMDHGIAQRNHATVQATTEYCMANPQWRLSLQTHKIAGFE

SEQ ID NO: 30547 - protein, 214 aa, Halomonas caseinilytica
  misc_feature (1)..(214): tr|A0A1M6NTB8|A0A1M6NTB8_9GAMM 7-carboxy-7-deazaguanine synthase OS=Halomonas caseinilytica OX=438744 GN=queE PE=3 SV=1
MYSVKEAFYSLQGEGGQAGRASVFCRFAGCNLWSGREADRAAAACRFCDTDFRGTDGQNGGRFADAPALADHLVALWQGTSDGARPQVIFTGGEPLLQLDEALIEAMHEREFDIAVETNGTLAAPAGIDWLCVSPKGDTPLVQTRGDELKLVHPQPDAPPERFTELDFRHFFLQPMDTSPLGEARDTMAATVAYCLAHPRWRLSIQAHKIAGID

SEQ ID NO: 30548 - protein, 214 aa, Halomonas chromatireducens
  misc_feature (1)..(214): tr|A0A0X8HDJ3|A0A0X8HDJ3_9GAMM 7-carboxy-7-deazaguanine synthase OS=Halomonas chromatireducens OX=507626 GN=qu eE PE=3 SV=1
MYSVKEAFYTLQGEGGQAGRASVFCRFTGCNLWSGRERDRATAACTFCDTDFLGTDGQNGGRFRDADALADHLTALWPDQYGVVTPYVVFTGGEPLLQLDEALIAAMHRRGFEVAVETNGTIAPPPGIDWLCVSPKGATELAVTGGDEIKLVYPQQEAPPARFQRLDFHYFFLQPMDSAPLGKHESHMDATVAYCLAHPQWRLSLQTHKIAGFD

SEQ ID NO: 30549 - protein, 221 aa, Halomonas cupida
  misc_feature (1)..(221): tr|A0A1M7AU95|A0A1M7AU95_9GAMM 7-carboxy-7-deazaguanine synthase OS=Halomonas cupida OX=44933 GN=queE PE=3 SV= 1
MYSIKEAFYTLQGEGMQAGRASVFCRFSGCNLWSGREQDRERAQCRFCDTDFVGTDGEGGGRFANAAGLAEHIAGLWPFAAGAQGATPYVVFTGGEPLLQLDEALIEAMHQRGFEVAVETNGTLTAPAGIDWICVSPKGNTPLTQTSGHELKLVYPQQGVSPEHFADLDFDHFLLQPMDVSHMAPSSQPRHDNPLQATLDYCMTHPLWRFSLQTHKIAGIA

SEQ ID NO: 30550 - protein, 214 aa, Halomonas daqingensis
  misc_feature (1)..(214): tr|A0A1H5RRC5|A0A1H5RRC5_9GAMM 7-carboxy-7-deazaguanine synthase OS=Halomonas daqingensis OX=419596 GN=queE PE =3 SV=1
MYHVKEAFYSLQGEGARAGRASVFCRFSGCNLWSGREQDRSSAACSFCDTDFVGTDGQNGGRFASAEALADHLAALWPDTAGVATPYVVFTGGEPLLQLDAALIAAMHAHGFEVAVETNGTLPAPAGIDWLCVSPKGTTPLALTAGDELKLVYPQPEAPPERFAELAFRYHFLQPMDTTALSANEEHVSATVAYCLAHPLWRLSLQTHKITGID

SEQ ID NO: 30551 - protein, 214 aa, Halomonas desiderata
  misc_feature (1)..(214): tr|A0A243T3E7|A0A243T3E7_9GAMM 7-carboxy-7-deazaguanine synthase OS=Halomonas desiderata SP1 OX=1191209 GN=que E PE=3 SV=1
MYHVKEAFYSLQGEGARAGRASVFCRFSGCNLWSGREQDRSSAACSFCDTDFVGTDGQNGGRFASAEALADHLAALWPDTAGVATPYVVFTGGEPLLQLDAALITAMHAHGFEVAVETNGTLPAPAGIDWLCVSPKGTTPLALTAGDELKLVYPQPEAPPERFAELAFRYHFLQPMDTTALSANDEHVSATVAYCLTHPLWRLSLQTHKITGID

SEQ ID NO: 30552 - protein, 214 aa, Halomonas elongata
  misc_feature (1)..(214): tr|E1VC57|E1VC57_HALED 7-carboxy-7-deazaguanine synthas e OS=Halomonas elongata (strain ATCC 33173 / DSM 2581 / NBRC 15536 / NCIMB 2198 / 1H9) OX=768066 GN=queE PE=3 SV=1
MYSVKEAFYSLQGEGGQAGRASVFCRFAGCNLWSGREADRVSAACRFCDTDFRGTDGQNGGRFADAETLAEHLVGLWEGAPDGSRPQVIFTGGEPLLQLDDALIAAMHDREFDVAVETNGTLAAPAGIDWLCVSPKGDVPLVQTRGDELKLVHPQPEAPPERFTGLDFRHFFLQPMDTSPLGETRDTMAATVAYCLANPRWRLSLQTHKIAGID

SEQ ID NO: 30553 - protein, 214 aa, Halomonas elongata
  misc_feature (1)..(214): tr|A0A329Q9F9|A0A329Q9F9_HALEL 7-carboxy-7-deazaguanine synthase OS=Halomonas elongata OX=2746 GN=queE PE=3 SV =1
MYSVKEAFYSLQGEGGQAGRASVFCRFAGCNLWSGREADRVSAACRFCDTDFRGTDGQNGGRFVDAETLAEHLVALWQGAPDGSRPQVIFTGGEPLLQLDDALIAAMHDREFDVAVETNGTLAAPDGIDWLCVSPKGDVPLVQTRGDELKLVHPQPEAPPERFTGLDFRHFFLQPMDTSPLGETRDTMAATVTYCLANPRWRLSLQTHKIAGID

SEQ ID NO: 30554 - protein, 214 aa, Halomonas endophytica
  misc_feature (1)..(214): tr|A0A2N7TXM4|A0A2N7TXM4_9GAMM 7-carboxy-7-deazaguanine synthase OS=Halomonas endophytica OX=2033802 GN=queE P E=3 SV=1
MYHVKEAFYTLQGEGGQAGRASVFCRFTGCNLWSGRERDRATAACRFCDTDFLGTDGQNGGRFTDAETLAGHLTALWPDQDGVVTPYVVFTGGEPLLQLDETLIRAMHRQGFEVAVETNGTIVPPAGIDWLCVSPKGASVLAVTGGDEIKLVYPQRDAPPERFATLDFRYYFLQPMDTGPLGEPGSRMAETVGYCMAHPQWRLSLQTHKIAGFD

SEQ ID NO: 30555 - protein, 214 aa, Halomonas eurihalina
  misc_feature (1)..(214): tr|A0A5D9DB78|A0A5D9DB78_HALER 7-carboxy-7-deazaguanine synthase OS=Halomonas eurihalina OX=42566 GN=queE PE=3 SV=1
MYSVKEAFYSLQGEGGQAGRASVFCRFAGCNLWSGREADRVSAACRFCDTDFRGTDGQNGGRFADAETLAEHLVALWQGASDGSRPQVIFTGGEPLLQLDEALIEAMHDRAFDVAVETNGTLAAPAGIDWLCVSPKGDVPLVQTRGDELKLVHPQPEAPPERFTGLDFRHFFLQPMDTSPLGETRDTMATTVAYCLANPRWRLSLQTHKIAGID

SEQ ID NO: 30556 - protein, 217 aa, Halomonas halmophila
  misc_feature (1)..(217): tr|A0A4Y4F041|A0A4Y4F041_9GAMM 7-carboxy-7-deazaguanine synthase OS=Halomonas halmophila OX=252 GN=queE PE=3 S V=1
MYSVKEAFYSLQGEGGQAGRASVFCRFAGCNLWSGREADRATAACHFCDTDIRGTDGQNGGRFGDADALGAHLESLWPGVPDGAHPQVIFTGGEPLLQLDDALIAAMHERGFDVAVETNGTLAAPAGIDWLCVSPKGRNPLVQTRGDELKLVYPQDEAPPERFTGMGFRHFYLQPMDSAPLASMEHSGDTMASTVAYCLANPRWRLSLQTHKIAGID

SEQ ID NO: 30557 - protein, 213 aa, Halomonas halophila
  misc_feature (1)..(213): tr|A0A510Z7V1|A0A510Z7V1_9GAMM 7-carboxy-7-deazaguanine synthase OS=Halomonas halophila OX=29573 GN=queE PE=3 SV=1
MYSVKEAFYSLQGEGGQAGRASVFCRFSGCNLWSGREADRAAAACRFCDTDIRGTDGQHGGRFHDAEALVDHLTALWPDAPGTATPQVIFTGGEPLLQLDEPLIAAMHERGFDVAVETNGTLPAPPGIDWLCVSPKGESVLAQTSGDELKLVYPQSDAPPERFTDLDFHHFFLQPMDTAAVGGGDVTAETVAYCLSHPQWRLSLQTHKITGID

SEQ ID NO: 30558 - protein, 214 aa, Halomonas heilongjiangensis
  misc_feature (1)..(214): tr|A0A2N7TIE8|A0A2N7TIE8_9GAMM 7-carboxy-7-deazaguanine synthase OS=Halomonas heilongjiangensis OX=1387883 GN= queE PE=3 SV=1
MYSVKEAFYSLQGEGARAGRASVFCRFSGCNLWSGRERDRAGAACHFCDTDFVGTDGQHGGRFADAAALAGHLAALWPAEAGVATPYVVFTGGEPLLQLDEALIDAMHARGFEVAVETNGTLPAPAGIDWLCVSPKGATSLTLTAGDELKLVYPQDAAPPERFAGLDFHHFFLQPMDTAPLGRTDSPMAETVAYCLAHPQWRLALQTHKIAGID

SEQ ID NO: 30559 - protein, 221 aa, Halomonas huangheensis
  misc_feature (1)..(221): tr|W1NCP9|W1NCP9_9GAMM 7-carboxy-7-deazaguanine synthas e OS=Halomonas huangheensis OX=1178482 GN=queE PE=3 SV= 1
MYSVKEAFYTLQGEGIQAGRASVFCRFSGCNLWSGREQDRERAQCRFCDTDFVGTDGQGGGRFSDAASLADHIVELWPFPVGASGSVPYVVFTGGEPLLQLDAALIDAMHQRGFEVAVETNGTLPAPPGIDWICVSPKGDAPLAQTYGNELKLVYPQRDLAPARFSGLEFDHFLLQPMDISHVPEHHIPTTESPMQATLEYCLSNPLWRFSLQTHKIAGIA

SEQ ID NO: 30560 - protein, 224 aa, Halomonas hydrothermalis
  misc_feature (1)..(224): tr|A0A291JWY4|A0A291JWY4_9GAMM 7-carboxy-7-deazaguanine synthase OS=Halomonas hydrothermalis OX=115561 GN=queE PE=3 SV=1
MYHVKEAFYTLQGEGAQAGRASVFCRFAGCNLWSGRDADRATAKCTFCDTDFIGTDGANGGRFESPQQLARHIKQLWPANAGSAVPYVVFTGGEPLLQLDTPLIAMLHSEGFEVAVETNGTLPAPAGIDWLCVSPKGSNPLAIHQGDELKLVYPQHDAPPGQFAALHFRHFYLQPMDHVAQHPDTIHTTVAERNAATVAATTAYCMTHPQWRLSLQTHKIAGFD

SEQ ID NO: 30561 - protein, 214 aa, Halomonas korlensis
  misc_feature (1)..(214): tr|A0A1I7F3C7|A0A1I7F3C7_9GAMM 7-carboxy-7-deazaguanine synthase OS=Halomonas korlensis OX=463301 GN=queE PE=3 SV=1
MYQVKEAFYTLQGEGGQTGRPSVFCRFSGCNLWSGRERDRATAACRFCDTDFVGTDGQNGGRFTDAEALAGHLAALWPDVGGRSRPYVVFTGGEPLLQLDAPLIDALHARHFEVAVETNGTLPAPAGVDWLCVSPKGENSLIVTEGDELKLVYPQPDAPPERFADLGFRLFFLQPMDRTPLGQATTTVDDTLAYCLDNPQWRLSLQTHKIMGID

SEQ ID NO: 30562 - protein, 220 aa, Halomonas meridiana
  misc_feature (1)..(220): tr|A0A0D7V0J0|A0A0D7V0J0_9GAMM 7-carboxy-7-deazaguanine synthase OS=Halomonas meridiana OX=29570 GN=queE PE=3 SV=1
MYHVKEAFYTLQGEGAQAGRASVFCRFTGCNLWSGREIDRANAKCTFCDTDFNGTDGVNGGRFNTAQALAEHIKALWPQEANNAVPYVVFTGGEPLLQLDTELIATLHSEGFEVAVETNGTVPAPAGIDWLCVSPKGSNPLAITQGDELKLVFPQADAPPEQFSHLAFSHFFLQPMDLSAVAQKSIATDGAATVQATTAYCMANPQWRLSLQTHKIAGFE

SEQ ID NO: 30563 - protein, 220 aa, Halomonas meridiana
  misc_feature (1)..(220): tr|A0A1N6CNM5|A0A1N6CNM5_9GAMM 7-carboxy-7-deazaguanine synthase OS=Halomonas meridiana OX=29570 GN=queE PE=3 SV=1
MYHVKEAFYTLQGEGAQAGRASVFCRFTGCNLWSGREIDRANAKCTFCDTDFNGTDGVNGGRFNTAQALAEHIKALWPQEANNAVPYVVFTGGEPLLQLDTELIATLHSEGFEVAVETNGTVPAPAGIDWLCVSPKGSNPLAITQGDELKLVFPQADAPPEQFSHLAFSHFFLQPMDLSAVAQKSIVTDGAATVQATTAYCMANPQWRLSLQTHKIAGFE

SEQ ID NO: 30564 - protein, 219 aa, Halomonas muralis
  misc_feature (1)..(219): tr|A0A1G9FRU6|A0A1G9FRU6_9GAMM 7-carboxy-7-deazaguanine synthase OS=Halomonas muralis OX=119000 GN=queE PE=3 S V=1
MYSVKEAFYSLQGEGARAGRASVFCRFSGCNLWSGRERDRASSACRFCDTDFVGSDGQNGGRFDNADSLADHLAGLWPFDACSEAERRGVPYVVFTGGEPLLQLGSALIEAMRERGFEIALETNGTLPVPSGIDWLCVSPKGLTELVVTQGDELKLVYPQSDNRPERFAALDFRHFYLQPMDRQPLGGNGTTIGDTVAYCLAHPQWQLSLQTHKIAGID

SEQ ID NO: 30565 - protein, 214 aa, Halomonas nigrificans
  misc_feature (1)..(214): tr|A0A2A4HL89|A0A2A4HL89_9GAMM 7-carboxy-7-deazaguanine synthase OS=Halomonas nigrificans OX=2042704 GN=queE P E=3 SV=1
MYHIKEAFYTLQGEGAQAGRASVFCRFTGCNLWSGREIDRANAQCTFCDTDFIGTDGINGGRFTTPNALAEHLNALWPQHNTRATPYVVFTGGEPLLQLDTPLITAMHDYGFEVAVETNGTLPPPPGIDWLCVSPKGANTLAITQGDELKLVYPQSKALPEKFAPLGFKHFFLQPMDRGNPQVNAETVHLTTAYCMANPQWRLSLQTHKIAGFD

SEQ ID NO: 30566 - protein, 214 aa, Halomonas nitroreducens
  misc_feature (1)..(214): tr|A0A431V8B6|A0A431V8B6_9GAMM 7-carboxy-7-deazaguanine synthase OS=Halomonas nitroreducens OX=447425 GN=queE PE=3 SV=1
MYSVKEAFYSLQGEGGQAGRASVFCRFAGCNLWSGREVDRASAACRFCDTDIRGTDGQHGGRFASAAALAEHLTMLWPDAPGTATPQVIFTGGEPLLQLDGALIEAMHDRGFDVAVETNGTLPAPPGIDWLCVSPKGTAPLVQTSGDELKLVYPQDDAPPSRFVDLDFRHFFLQPMDTAPLGGGDAALADTVTYCLGHPQWRLSLQTHKIAGID

SEQ ID NO: 30567 - protein, 214 aa, Halomonas pacifica
  misc_feature (1)..(214): tr|A0A510X6N1|A0A510X6N1_9GAMM 7-carboxy-7-deazaguanine synthase OS=Halomonas pacifica OX=77098 GN=queE PE=3 S V=1
MYHVKEAFYSLQGEGARAGRASVFCRFSGCNLWSGREADRDTSICRFCDTDFIGSDGQNGGRFADAEALAAHLCALWPDSRGVATPYVVFTGGEPLLQLDPPLIQAMQRLGFEVAVETNGTLLPPPGIDWLCVSPKGRAELAVDGGDELKLVYPQAEAPPERFQALDFAHFCLQPMDLTPRGGTGTTLDACVDYCLAHPQWHLSLQTHKIAGID

SEQ ID NO: 30568 - protein, 214 aa, Halomonas pantelleriensis
  misc_feature (1)..(214): tr|A0A1G9MC51|A0A1G9MC51_9GAMM 7-carboxy-7-deazaguanine synthase OS=Halomonas pantelleriensis OX=48727 GN=queE PE=3 SV=1
MYHVKEAFYTLQGEGARAGRASVFCRFSGCNLWSGREQDRATSVCQFCDTDFVGTDGPGGGRFSSADALADHLLGQWPARSHGATPYVVFTGGEPLLQLDTALIEAMHARGFEIAVETNGTLAPPPGIDWLCVSPKGASRLAVTGGDELKLVYPQSAAPPERFAELDFQHFYLQPMDLAPQGRDGTTLEATLAYCLATPRWQLSLQTHKIAGFA

SEQ ID NO: 30569 - protein, 218 aa, Halomonas saccharevitans
  misc_feature (1)..(218): tr|A0A1I6ZPH7|A0A1I6ZPH7_9GAMM 7-carboxy-7-deazaguanine synthase OS=Halomonas saccharevitans OX=416872 GN=queE PE=3 SV=1
MYSVKEAFYSLQGEGGQAGRASVFCRFSGCNLWSGREADRTTAACRFCDTDFIGTDGQNGGRFREAAALADHLTALWPDHGGVATPYVVFTGGEPLLQLDEVLVAAMHESGFEVAVETNGTLPPPAGIDWLCVSPKGDNPLVVTGGDELKLVHPQAGVTPERFARLDFAHFFLQPMDTTPAGLEGDGASNTMAETVAYCLAHPQWRLSLQTHKIAGVD

SEQ ID NO: 30570 - protein, 214 aa, Halomonas songnenensis
  misc_feature (1)..(214): tr|A0A2T0V140|A0A2T0V140_9GAMM 7-carboxy-7-deazaguanine synthase OS=Halomonas songnenensis OX=1176243 GN=queE PE=3 SV=1
MYHVKEAFYTLQGEGAQAGRASVFCRFTGCNLWSGREADRAQAKCTFCDTDFIGTDGVNGGRFASAAELGAHIQALWPENARNATPYVVFTGGEPLLQLDKALIDTLHEAGFEIAVETNGTLLPPSGIDWVCVSPKGSNALAITQGDELKLVYPQADAPPELFSELAFKHFFLQPMDLGFLAQQPDHVANTTEYCMANPQWRLSLQTHKIAGFD

SEQ ID NO: 30571 - protein, 215 aa, Halomonas sp.
  misc_feature (1)..(215): tr|A0A1A0FML6|A0A1A0FML6_9GAMM 7-carboxy-7-deazaguanine synthase OS=Halomonas sp. G11 OX=1684425 GN=queE PE=3 SV=1
MYQVKEAFYTLQGEGAQAGRASVFCRFSGCNLWSGRERDRATARCTFCDTDFVGTDGQGGGRFETPAALADHISTLWPSDSGTAIPYVVFTGGEPLLQLDPALIATLHSVGFEVAVETNGTLTPPAGIDWLCVSPKGKNPLVIDQGDELKLVYPQTEAPPEAFAKLDFRHFFLQPMDLSPSDAQDDDTVARTTAYCLANPQWRLSLQTHKIAGFD

SEQ ID NO: 30572 - protein, 218 aa, Halomonas sp.
  misc_feature (1)..(218): tr|A0A2E4U1X0|A0A2E4U1X0_HALSX 7-carboxy-7-deazaguanine synthase OS=Halomonas sp. OX=1486246 GN=queE PE=3 SV=1
MYQVKEAFYTLQGEGAQAGRASVFCRFSGCNLWSGREIDRATAKCTFCDTDFIGTNGINGGKFATATALAEHIAALWPSHSSDAKSKATPYVVFTGGEPLLQLDTALIATLHSHGFEVAVETNGTLPPPPGIDWLCVSPKGSNPLAVTQGDELKLVYPQAEAPPEQFSSLGFRHFFLQPMDLAPLNQDKTTVAEATAYCMANPQWRLSLQMHKLAGFD

SEQ ID NO: 30573 - protein, 215 aa, Halomonas subterranea
  misc_feature (1)..(215): tr|A0A1H9VJ53|A0A1H9VJ53_9GAMM 7-carboxy-7-deazaguanine synthase OS=Halomonas subterranea OX=416874 GN=queE PE =3 SV=1
MYQVKEAFYTLQGEGAQAGRASVFCRFSGCNLWSGRERDRATARCTFCDTDFVGTDGQGGGRFETPAALAEHISALWPSEAGRAIPYVVFTGGEPLLQLDPALIATLHSVGFEVAVETNGTLTPPAGIDWLCVSPKGKNTLVIDQGDELKLVYPQTEAPPEAFAKLDFRHFFLQPMDVSPLDAHDNDTVARTTAYCLANPQWRLSLQTHKIAGFD

SEQ ID NO: 30574 - protein, 222 aa, Halomonas sulfidaeris
  misc_feature (1)..(222): tr|A0A365TPC6|A0A365TPC6_9GAMM 7-carboxy-7-deazaguanine synthase OS=Halomonas sulfidaeris OX=115553 GN=queE PE =3 SV=1
MYQVKEAFYTLQGEGAQAGRASVFCRFSGCNLWSGREIDRANAKCTFCDTDFIGTNGINGGKFVTANALAQHIASLWPSQSGDAKPDTKNDATPYVVFTGGEPLLQLDATLITALHSHGFEVAVETNGTLAPPPGIDWLCVSPKGSNSLAVTQGDELKLVFPQADAPPEQFSSLDFRHFFLQPMDLTPLNQEKTTVAEATAYCMANPQWRLSLQMHKLAGFD

SEQ ID NO: 30575 - protein, 213 aa, Halomonas taeanensis
  misc_feature (1)..(213): tr|A0A1G7V7P0|A0A1G7V7P0_9GAMM 7-carboxy-7-deazaguanine synthase OS=Halomonas taeanensis OX=284577 GN=queE PE= 3 SV=1
MYSVKEAFYTLQGEGARAGRASVFCRFSGCNLWSGREKDRATSACRFCDTDFVGTDGQNGGRFHDAEALADHLAALWPAVPGGKRYVVFTGGEPLLQLDAALIEALHARDFEIAVETNGTLTPPAGIDWLCVSPKGDTSLAITAGDELKLVYPQQDALPERFAGLDFCHFYLQPMDLGPLGGDGNTMGDVVDYCLNAPQWQMSLQTHKIAGID

SEQ ID NO: 30576 - protein, 213 aa, Halomonas taeanensis
  misc_feature (1)..(213): tr|A0A328XJW5|A0A328XJW5_9GAMM 7-carboxy-7-deazaguanine synthase OS=Halomonas taeanensis OX=284577 GN=queE PE= 3 SV=1
MYSVKEAFYTLQGEGARAGRASVFCRFSGCNLWSGREQDRATSACRFCDTDFVGTDGQNGGRFHDAEGLADHLAALWPAVPGGQRYVVFTGGEPLLQLDSPLIEALHARDFEVAVETNGTLTPPTGIDWLCVSPKGDTSLAIMAGDELKLVYPQQHAPPERFAGLNFRHFYLQPMDLGPLGGDGNTMADVVDYCLSAPQWQLSLQAHKIAGID

SEQ ID NO: 30577 - protein, 214 aa, Halomonas titanicae
  misc_feature (1)..(214): tr|A0A558J5D1|A0A558J5D1_9GAMM 7-carboxy-7-deazaguanine synthase OS=Halomonas titanicae OX=664683 GN=queE PE=3 SV=1
MYQVKEAFYTLQGEGAQAGRASVFCRFSGCNLWSGREVDRATAKCTFCDTDFIGTNGINGGKFATAAALAEHIAALWPSQSDNATPYVVFTGGEPLLQLDAPLIATLHSHGFEVAVETNGTLPPPPGIDWLCVSPKGSNPLVVTQGDELKLVYPQADAPPEQFSRLGFHHFFLQPMDLAPLNQAKTTVAEATAYCMANPQWRLSLQMHKLAGFD

SEQ ID NO: 30578 - protein, 222 aa, Halomonas ventosae
  misc_feature (1)..(222): tr|A0A4R6ZUU6|A0A4R6ZUU6_9GAMM 7-carboxy-7-deazaguanine synthase OS=Halomonas ventosae OX=229007 GN=queE PE=3 SV=1
MYHVKEAFYTLQGEGGQAGRASVFCRFSGCNLWSGREADRTSAACRFCDTDFIGTDGQNGGRFSSAEALANHLAALWPDQDGHDGRAATPYVVFTGGEPLLQLDEALIREMHACGFEVAVETNGTLPAPAGIDWLCISPKGDNALAITAGNELKLVHPQADAPPTRFTRLDFDHFFLQPMATGPAVPSGDALPDTLAETVAYCLAHPRWRLSLQTHKIAGID

SEQ ID NO: 30579 - protein, 222 aa, Halomonas ventosae
  misc_feature (1)..(222): tr|A0A2T0VEQ4|A0A2T0VEQ4_9GAMM 7-carboxy-7-deazaguanine synthase OS=Halomonas ventosae OX=229007 GN=queE PE=3 SV=1
MYHVKEAFYTLQGEGGQAGRASVFCRFSGCNLWSGREADRTSAACRFCDTDFIGTDGQNGGRFSSAEALANHLAALWPDQDGHNGRAATPYVVFTGGEPLLQLDEALIREMHARGFAVAVETNGTLPAPAGIDWLCVSPKGDNALAITAGNELKLVHPQADAPPARFTRLDFDHFFLQPMATGPADTSGDATPDTLAETVAYCLAHPRWRLSLQTHKIAGID

SEQ ID NO: 30580 - protein, 214 aa, Halomonas venusta
  misc_feature (1)..(214): tr|A0A3Q8WF86|A0A3Q8WF86_9GAMM 7-carboxy-7-deazaguanine synthase OS=Halomonas venusta OX=44935 GN=queE PE=3 SV =1
MYHVKEAFYTLQGEGAQAGRASVFCRFSGCNLWSGREIDRASAKCSFCDTDFIGTDGINGGRFNTPHELADHLKALWPVHAGRATPYVVFTGGEPLLQLDTPLIELLHSDGFEVAVERNGTVIPPPGIDWLCVSPKGTNPLVVTRGDELKLVFPQSVAPPDQFANLDFNHFFLQPMDQGIAHKNHATVQATVAYCMANPQWRLSLQTHKIAGFE

SEQ ID NO: 30581 - protein, 215 aa, Halomonas xianhensis
  misc_feature (1)..(215): tr|A0A1I3A601|A0A1I3A601_9GAMM 7-carboxy-7-deazaguanine synthase OS=Halomonas xianhensis OX=442341 GN=queE PE= 3 SV=1
MYSVKEAFYSLQGEGARAGRAGVFCRFSGCNLWSGRERDRASSLCRFCDTDFVGIDGQNGGRFATADALAEHLAALWPSSLGEAATPYVIFTGGEPLLQLDGTLIDVMHDHGFEVAVETNGTLPPPAGIDWLCVSPKGQAPLALHQGNELKLVYPQPDAMPQRFSALDFEHFFLQPMDRQPQGLEGTTLAETVDYCLTHPQWRLSMQLHKLAGID

SEQ ID NO: 30582 - protein, 215 aa, Halomonas xianhensis
  misc_feature (1)..(215): tr|A0A4R8G304|A0A4R8G304_9GAMM 7-carboxy-7-deazaguanine synthase OS=Halomonas xianhensis OX=442341 GN=queE PE= 3 SV=1
MYSVKEAFYSLQGEGARAGRAGVFCRFSGCNLWSGRERDRAASLCRFCDTDFVGTDGQNGGRFATADALAEHLASLWPSSLEKAATPYVIFTGGEPLLQLDNALIDAMHDHGFEVAVETNGTLPPPAGIDWLCVSPKGQAPLALHQGNELKLVYPQPDAMPQRFSALDFEHFFLQPMDRHPQGVEGTTLAETVDYCLTHPQWRLSMQLHKLAGID

SEQ ID NO: 30583 - protein, 219 aa, Halorhodospira halochloris
  misc_feature (1)..(219): tr|A0A0X8X736|A0A0X8X736_HALHR 7-carboxy-7-deazaguanine synthase OS=Halorhodospira halochloris OX=1052 GN=queE PE=3 SV=2
MATHAGTPMPYLTHSIFYSLQGEGAWSGRPAVFVRFAGCNLWSGREQDRAAALCRFCDTDFVSTKDGRGGRFADPQQLVARIVSLWPDANVPPYVIFTGGEPALQLDAELITACHRRGFQVAVETNGTRSLPQGLDWVCVSPKPGTELMIDRGDELKLVYPVPGLHPQAYAGLAFRHFYLQPLDEGGEGGTHIAAALEYCLRHPQWSLSLQLHKWIGIE

SEQ ID NO: 30584 - protein, 209 aa, Halorhodospira halophila
  misc_feature (1)..(209): tr|A1WW29|A1WW29_HALHL 7-carboxy-7-deazaguanine synthas e OS=Halorhodospira halophila (strain DSM 244 / SL1) OX =349124 GN=queE PE=3 SV=1
MSYAVHSLFYTLQGEGARSGRPAVFLRFAGCNLWSGREADRATAVCTFCDTDFVGTGGPGGGRFADAPELAAAVAAWWPGGGEPYVVCTGGEPALQLDAALVAALHARGFEVAVETNGTLPLPAGVDWICVSPKAGTELAITAGDELKLIYPQPGAEPQRFTHLAFRRFYLQPLDDNQRGAHTRAVLDYCRGHPQWWLSVQIHKDLGIP

SEQ ID NO: 30585 - protein, 220 aa, Halospina denitrificans
  misc_feature (1)..(220): tr|A0A4R7K122|A0A4R7K122_9GAMM 7-carboxy-7-deazaguanine synthase OS=Halospina denitrificans OX=332522 GN=queE PE=3 SV=1
MYRVKEVFATLQGEGAQAGRVAVFCRFSKCNLWTGREADRHRAVCQFCDTDFVGTDGQNGGEFETPEALARHVAAFWPGSFSDAENPLVVCTGGEPLLQLDGPMVEAFHAQGLSVAVETNGTLPAPEGIDWLCMSPKAGTTIVIEECDELKLVYPQEGQDPADYDHIRASERFIAPMASPQVISGADAFRDANTRQAIEFCLAHPQWRLSVQMHKMVGID

SEQ ID NO: 30586 - protein, 220 aa, Halospina sp.
  misc_feature (1)..(220): tr|A0A5J5FKN8|A0A5J5FKN8_9GAMM 7-carboxy-7-deazaguanine synthase OS=Halospina sp. K52047b OX=2614160 GN=queE P E=4 SV=1
MYRIKEAFTTLQGEGLQAGRVAVFCRFSKCNLWTGREKDRATAVCQFCDTDFVGTDGPNGGVFETPEGLVDHIASLWPGSGSIEESPMVVCTGGEPLLQLDGALLEAFHQRHFFVAVETNGTLDAPDGIDWLCVSPKAGTGIRIRRCDELKLVYPQQGQDPADYDDIEARARLLSPMSSPDAGAERDLVRDASTREAIRYCMAHPRWRLSVQMHKMVGIE

SEQ ID NO: 30587 - protein, 214 aa, Halotalea alkalilenta
  misc_feature (1)..(214): tr|A0A172YEN5|A0A172YEN5_9GAMM 7-carboxy-7-deazaguanine synthase OS=Halotalea alkalilenta OX=376489 GN=queE PE =3 SV=1
MYAVKEAFYTLQGEGARSGRAAVFCRFTGCNLWSGREKDRERSICRFCDTDFVGTDGQNGGRFRTAQALGEHIDRLWPSRAAGVVPYVVFTGGEPLLQLDTALIEEMHARGFEIAVETNGTLAPPAGIDWLCVSPKGASQLAVSGGDEIKLVYPQLEAPPERFEALGFTHFFLQAMDLAPRGGQGDTLKETLEYCMRHPRWRLSLQMHKIVGID

SEQ ID NO: 30588 - protein, 256 aa, Halothece sp.
  misc_feature (1)..(256): tr|K9Y8W5|K9Y8W5_HALP7 7-carboxy-7-deazaguanine synthas e OS=Halothece sp. (strain PCC 7418) OX=65093 GN=queE P E=3 SV=1
MTAVKTATANLVEVFSAIQGEGLNVGTRQIFVRFGGCDLRCHFCDSEQTWEKISQCRIEKTSGQRDFEVYANPVTQEQLLSWIRQQNQNHLHDSISLTGGEPLLHAKFLQQFLPQLKAEVALPIYLETGGHRPQQVSLLLDYIDCIGMDMKLPSVSGEKHWQAHADFLRVCIPQTNLFVKLIVSDQTSEEDLVQARSIIAKINAEIPVILQPATPISREAIFPPNPEQVLAWQGLLKESLFRVRVIPQTHKMIGQL

SEQ ID NO: 30589 - protein, 218 aa, Halothiobacillaceae bacterium
  misc_feature (1)..(218): tr|A0A545SCG9|A0A545SCG9_9GAMM 7-carboxy-7-deazaguanine synthase OS=Halothiobacillaceae bacterium OX=2268194 G N=queE PE=3 SV=1
MHAEATETLRLTEIFYSLQGESTRVGLPTVFVRLTGCPLRCVYCDTAYAFTGGETWTIASILEEVARHKTRYVCVTGGEPLAQKRCLTLLTALCDAGYSVSLETSGAFDITAVDSRVSRIMDIKTPASGEVERNLYENVQALRAGDEVKFVIADRGDYEWSVDTLREHDIASTSEVLFSAVNGQLSPGQLADWILEDHLPVRMQVQLHKILWEEARGR

SEQ ID NO: 30590 - protein, 227 aa, Halothiobacillus neapolitanus
  misc_feature (1)..(227): tr|D0KY69|D0KY69_HALNC 7-carboxy-7-deazaguanine synthas e OS=Halothiobacillus neapolitanus (strain ATCC 23641 / c2) OX=555778 GN=queE PE=3 SV=1
MISALDDIAIQEKAPLQLRITEIFRSLQGESESAGWPTVFVRLTGCPLRCVYCDTAYAFTGGERLSLLSILDQVAAYHTQDVCVTGGEPLAQPACLPLLTSLCDAGHLVSLETSGALSIEGVDPRVRVVMDLKTPSSGEAEKNRFENIDLLKTSDEIKFVIGSAEDFKWAVQHVRQFQMDKRFNVLISPVFGQVTPLALADWILESGLRLRFQQQLHKLIWGNEPGH

SEQ ID NO: 30591 - protein, 532 aa, Halothiobacillus sp.
  misc_feature (1)..(532): tr|A0A259SBK4|A0A259SBK4_9GAMM Multifunctional fusion p rotein OS=Halothiobacillus sp. 13-55-253 OX=1970379 GN= cpoB PE=3 SV=1
MNRLKMKRNAKKITVLAVFGMVMTQPTWAQTPPGWLNWSDKSDAAPAATGQAPETDAQSATPQPLPSQPLGTGETGTNSASGQTVIIQNLLDNVSRLQEQVRDLRGQNEVQENQIQRLQKAQQSAFSSFDDRLSKLEQTGGSTVAPSAPIPPSVPATKEPAVSVPTAPVPASSASAAPAASPAPATSQDAAATAKQQALYNAAFAQLKDGQYDQAITGFQAAIDADPQGQWTPSALFWQGETYYVEQKRDKSEAAYQKILTQFPNSDRVPDALLKTGYIAYDENKNKQARDIFQQVISKYPQSQAANLALDDIAVQEKAPLQLRITEIFRSLQGESESAGWPTVFVRLTGCPLRCVYCDTAYAFTGGERLSLSSILDQVAAYHTQDVCVTGGEPLAQPACLPLLTSLCDAGHLVSLETSGALSIEGVDPRVRVVMDLKTPSSGEAEKNRFENIDLLKTSDEIKFVIGSAEDFKWAVQHVRQFQMDKRFNVLISPVFGEVTPLALADWILESGLRLRFQQQLHKLIWGNEPGH

SEQ ID NO: 30592 - protein, 228 aa, Halothiobacillus sp.
  misc_feature (1)..(228): tr|A0A191ZIC0|A0A191ZIC0_9GAMM 7-carboxy-7-deazaguanine synthase OS=Halothiobacillus sp. LS2 OX=1860122 GN=que E PE=3 SV=1
MRVDEARVVDAPEAVIPQVRLTEIFRSLQGESGSVGWPTVFVRLTGCPLRCVYCDTAYAFTGGQRYPIDEIMDQVAAHRTRHVCVTGGEPLAQPGCLPLLTALCDQGFSVSLETSGAMAIEDVDSRVRLVMDLKAPSSGESARNLMKNLDYLKPTDEIKIVIGSVEDFRWAEQVIVEYGLDERFDVLVSPVFGAVSPQALAEWVLGSERRMRYQFQLHKLIWGNEPGH

SEQ ID NO: 30593 - protein, 220 aa, Halovibrio sp.
  misc_feature (1)..(220): tr|A0A2A2FBB9|A0A2A2FBB9_9GAMM 7-carboxy-7-deazaguanine synthase OS=Halovibrio sp. YL5-2 OX=2032626 GN=queE PE =3 SV=1
MYRIKEAFTTLQGEGLQAGRVAVFCRFSKCNLWTGREKDRATAVCQFCDTDFVGTDGPNGGVFETPEQLADHIASLWPGSGSGEESPMVVCTGGEPLLQLDGPLLEAFHQRHFFVAVETNGTLDAPDGIDWLCVSPKAGTGIRIRRCDELKLVYPQEGQDPADYDDIAARARLLSPMSSPDAGAERDLVRDANTREAIRYCMAHPRWRLSVQMHKMVGIE

SEQ ID NO: 30594 - protein, 223 aa, Halovibrio variabilis
  misc_feature (1)..(223): tr|A0A511URL8|A0A511URL8_9GAMM 7-carboxy-7-deazaguanine synthase OS=Halovibrio variabilis OX=31910 GN=queE PE= 3 SV=1
MYQVKEAFYTLQGEGAQAGRASVFCRFSGCNLWSGRDVDRATAKCTFCDTDFIGTDGINGGKFASASALAEHIVSLWPEQNTIATQHATPRSATPYVVFTGGEPLLQLDTALIATLHSHGFEVAVETNGTLAPPPGIDWLCVSPKGGNSLVVTKGDELKLVFPQADAPPEQFASLGFRHFFLQPMDLAPLNQDKTTVAETTAYCMANPQWRLSLQMHKLAGFD

SEQ ID NO: 30595 - protein, 223 aa, Hamiltonella defensa
  misc_feature (1)..(223): tr|C4K335|C4K335_HAMD5 7-carboxy-7-deazaguanine synthas e OS=Hamiltonella defensa subsp. Acyrthosiphon pisum (s train 5AT) OX=572265 GN=queE PE=3 SV=1
MLYPINEIFQTLQGEGHFMGTPAIFIRLQGCPVGCSWCDTKHTWEKKNEQQVDLFSILQKKTANDFWSHSGEQNLLAVIRAQGYQASHVVITGGEPCLYDLTPLTQLLEQEGYFCQIETSGTHLVHCTPSCWVTVSPKINMRGGFKIQHQALERADELKHVVARKSDIETLDALIGNLKDRKKRIISLQPVSQKKSATQLCIDTCIERNWRLSVQMHKYLGIE

SEQ ID NO: 30596 - protein, 220 aa, Handelsmanbacteria sp.
  misc_feature (1)..(220): tr|A0A1F6CYQ1|A0A1F6CYQ1_HANXR 7-carboxy-7-deazaguanine synthase OS=Handelsmanbacteria sp. (strain RIFCSPLOWO2 _12_FULL_64_10) OX=1817868 GN=queE PE=3 SV=1
MSHTRKRDTLVVKEIYKSIQGESTWAGLPCVFVRLTGCDLRCVWCDAAHAFTGGDRLTVPEVVAQVETLACPLVEITGGEPLLQPAVHPLMSALLDRGHRVLIETGGHLDISGIDPRAVRIIDVKCPASGESEKVRWENLGLLRQGDQVKFVLSDRADYDWAKDVVLRHDLPGRAEVLFSVAHALLPPAHLAAWLLEDRLPVRLQLQIHKYIWKPDTPRI

SEQ ID NO: 30597 - protein, 210 aa, Hansschlegelia zhihuaiae
  misc_feature (1)..(210): tr|A0A4Q0MM51|A0A4Q0MM51_9RHIZ 7-carboxy-7-deazaguanine synthase OS=Hansschlegelia zhihuaiae OX=405005 GN=queE PE=3 SV=1
MTYAVKELFKTLQGEGAQAGRAAVFCRFAGCNLWSGREQDREAAICRFCDTDFVGTDGAGGGKFKDAETLAEAIEREWGGSPGPRYVVFTGGEPLLQLDRNLVASVHARGFEVAIETNGTEQPPHGVDWICVSPKAGAELRLTRGDELKLVFPQDGIDPAGLAALDFRHFFLQPMDGPARERNTAAAAAYCLANPPWRLSLQTHKLIGLP

SEQ ID NO: 30598 - protein, 210 aa, Hanstruepera neustonica
  misc_feature (1)..(210): tr|A0A2K1DZM4|A0A2K1DZM4_9FLAO 7-carboxy-7-deazaguanine synthase OS=Hanstruepera neustonica OX=1445657 GN=queE PE=3 SV=1
MTRSERQELIDKGLLLPLMEEFYTIQGEGYHKGTAAYFVRIGGCDVGCHWCDVKESWLAELHPPTETHKIVENAVKYSDTIVVTGGEPLTWDMTELTNQLKAKGVQTHIETSGAYKLTGTWDWICLSPKKLKLPTEEIYTKAHELKMIIYNKSDFKFAEEQAAKVNSHCKLFLQPEWSKRDKVVPEIVDYVMANPKWKVSLQTHKYLNIP

SEQ ID NO: 30599 - protein, 265 aa, Hapalosiphon sp.
  misc_feature (1)..(265): tr|A0A0M0SQ24|A0A0M0SQ24_9CYAN 7-carboxy-7-deazaguanine synthase OS=Hapalosiphon sp. MRB220 OX=1704290 GN=queE PE=3 SV=1
MTTKIGITPTARLIEVFSAIQGEGLNVGTRQIFIRFALCDLRCQFCDSAHTWNAPTTCRIERSPGRRDFEFYSNPVSLPTLLEWIERQNIPSLHDSISLTGGEPLLHAGFLVEFLPQIRAITGLSVYLETGGHRPEQLAMILPYLDSVGMDLKLPSTSGENHWQEHSKFLQLCYESQVEVFVKIIISDETNPAELERSALLVAQVSPSIPVFLQPVTPLPASEQFTENPVLAPSPEQVLMWQALIKRFVKQVRVIPQTHKMLNQL

SEQ ID NO: 30600 - protein, 265 aa, Hapalosiphonaceae cyanobacterium
  misc_feature (1)..(265): tr|A0A328IJC1|A0A328IJC1_9CYAN 7-carboxy-7-deazaguanine synthase OS=Hapalosiphonaceae cyanobacterium JJU2 OX=2 109628 GN=queE PE=3 SV=1
MTTKIGITPTARLVEVFSAIQGEGLNVGTRQIFIRFALCDLRCQFCDSAHTWNAPTTCRIERSPGKRDFEIYSNPVSLPILLEWIERQNIPCLHDSISLTGGEPLLHAGFLVEFLPQIRAITGLPIYLETGGHRPEQLAMILPYLDSVGMDLKLPSTSGENRWQEHSKFLQLCYESQIEVFVKIIISDQTNPAELERSALLVAQVSPSIPVFLQPVTPLPASEQLTANPVLAPSPEQVLMWQALIKRFVKQVRVIPQTHKMLNQL

SEQ ID NO: 30601 - protein, 230 aa, Helicobacter acinonychis
  misc_feature (1)..(230): tr|Q17WY6|Q17WY6_HELAH 7-carboxy-7-deazaguanine synthas e OS=Helicobacter acinonychis (strain Sheeba) OX=382638 GN=queE PE=3 SV=1
MKLPVVESFFSLQGEGQRIGKPSLFLRLGGCNLSCKGFGCKTLFNDEILIGCDSLYAVHPKFKKSWDYYNEPKPLIERLVHLTPNHKNFDFILTGGEPSLYFNNPILTSVLEHFHRKKIPLFVESNGSIFFEFSSILKELHFTLSVKLSLSLEKENKRINLKALQNILDNAKSVHFKFVLDSKNAVQSITEIKSLLKQLSLKNNEIFLMPLGTNNNELDNHLYAFLLLDN

SEQ ID NO: 30602 - protein, 251 aa, Helicobacter acinonychis
  misc_feature (1)..(251): tr|Q17WY0|Q17WY0_HELAH 7-carboxy-7-deazaguanine synthas e OS=Helicobacter acinonychis (strain Sheeba) OX=382638 GN=queE PE=3 SV=1
MKLPVVESFFSLQGEGQRIGKPSLFLRLGGCNLSCKGFGCKTLFNDEILIGCDSLYAVHPKFKKSWDYYNEPKPLIERLVHLTPNHKNFDFILTGGEPSLYFNNPILTSVLEHFHRKKIPLFVESNGSIFFEFSSILKELHFTLSVKLSLSLEKENKRINLKALQNILDNAKSVHFKFVLDSKNAVQSITEIKSLLKQLSLKNNEIFLMPLGTNNNELDNHLKIIAPLAIEHGFRLSDRLHIRLWDNKKGF

SEQ ID NO: 30603 - protein, 242 aa, Helicobacter ailurogastricus
  misc_feature (1)..(242): tr|A0A0K2X2L4|A0A0K2X2L4_9HELI 7-carboxy-7-deazaguanine synthase OS=Helicobacter ailurogastricus OX=1578720 GN =queE PE=3 SV=1
MSLPLVETFYSLQGEGSCVGQPSVFIRLGGCNFKCVGFGVRANIEGQEFMGCDSIYAVRPNSKWQYLKSAGELLDKLPAFNPACLPLIVLTGGEPSLHFKNPILLEALQILQERGHVLWVESNGSVLFDFSPPLDSLHFTLSPKLSFSQETTPLKPLQNILDHALEVVLKFVLKNPTDIHEVQNLLKQLCFKTPPLVYLMPLATDKERLQEGLEGLAEVALAHGYSLGQRLHIQLWGNEAGR

SEQ ID NO: 30604 - protein, 250 aa, Helicobacter anseris
  misc_feature (1)..(250): tr|A0A3D8JA84|A0A3D8JA84_9HELI 7-carboxy-7-deazaguanine synthase OS=Helicobacter anseris OX=375926 GN=queE PE= 3 SV=1
MMLKISEIFYSIQGEGRQMGRPSVFVRVGMCNLTCKGFSESVQYEGKKIIGCDSIYAANKAFSKEWIVFEDSKKLISEIEQKGNGNFDIVLTGGEPSLYFGNKVLLETLKYFIKRHHHIYVESNGSVFFDFNEILKSLHFTLGVKLSNTLDLKEKRINIKAIQNILDHAKSVYFKFVLNQEMCKDGSGIAEINEILAQVSGSYEVYLMPQGSDIETLNRNIKFLLPLCLENNFYLSDRLHIRIWGNKRGV

SEQ ID NO: 30605 - protein, 247 aa, Helicobacter bizzozeronii
  misc_feature (1)..(247): tr|F8KRX2|F8KRX2_HELBC 7-carboxy-7-deazaguanine synthas e OS=Helicobacter bizzozeronii (strain CIII-1) OX=10028 04 GN=queE PE=3 SV=1
MLPLVETFYSLQGEGLCIGLPSVFVRLGGCNLRCKGFGVKSVINQQEVIGCDSAYAVYPNAEWQEITQSQTLLERVHALMPKALKPLIILTGGEPSLHFKNPILLEALSVWVQEGFTIWVESNGSVLFAFDSLLESLHFTLSVKLSFIESAPKRLDVRAIQNILDHAPVVFKFVLGMPFVEQGIQEIQAMMETLSFKTPPPIYLMPMGITHAQVQANLKALAPACLQHGYGLSDRLHIHLWDNAKGR

SEQ ID NO: 30606 - protein, 247 aa, Helicobacter bizzozeronii; identical to SEQ ID NO: 30605
  misc_feature (1)..(247): tr|H5V9K0|H5V9K0_HELBI 7-carboxy-7-deazaguanine synthas e OS=Helicobacter bizzozeronii CCUG 35545 OX=1002805 GN =queE PE=3 SV=1

SEQ ID NO: 30607 - protein, 251 aa, Helicobacter cetorum
  misc_feature (1)..(251): tr|I0EN07|I0EN07_HELC0 7-carboxy-7-deazaguanine synthas e OS=Helicobacter cetorum (strain ATCC BAA-429 / MIT 00 -7128) OX=182217 GN=queE PE=3 SV=1
MKLPVVESFFSLQGEGKRIGRPSLFLRLGGCNLSCKGFDCKTPLNDEILIGCDSLYAVHSKFKDFWDYYSRPKALIRHLESLAPNYNNFDFILTGGEPSLHFNNPTLLSVLEYFHQKEIPLFVESNGSIFFEFSPILKELHFTLSVKLSLSLEKENKRINLKALQNILDNAKSVNFKFVLDSINATQSIMEIQNLLKQLSLNNNEVFLMPLGTTKNELDKNLKALAPLALENGYSLSDRLHIRLWDNQKGF

SEQ ID NO: 30608 - protein, 251 aa, Helicobacter cetorum
  misc_feature (1)..(251): tr|I0ETC0|I0ETC0_HELCM 7-carboxy-7-deazaguanine synthas e OS=Helicobacter cetorum (strain ATCC BAA-540 / MIT 99 -5656) OX=1163745 GN=queE PE=3 SV=1
MKLPVVESFFSLQGEGKRIGRPSLFLRLGGCNLSCKGFNCKTTLNDEILVGCDSLYAVHSKFKDSWDYYSEPKSLIKRLETLTPSYHHFDLILTGGEPSLHFNNPILLSVLEYFHHHSIPLYVESNGSIFFEFSPILKELHFTLSVKLSLSLEKENKRINLKALQNILDNAKSVNFKFVLDSMNATQSITEIQNLLKQLTLKNNEIFLMPLGTTSHELDKNLKALAPLALEHGYSLSDRLHIRLWNNEKGF

SEQ ID NO: 30609 - protein, 242 aa, Helicobacter felis
  misc_feature (1)..(242): tr|E7A9W7|E7A9W7_HELFC 7-carboxy-7-deazaguanine synthas e OS=Helicobacter felis (strain ATCC 49179 / NCTC 12436 / CS1) OX=936155 GN=queE PE=3 SV=1
MTLPFVESFYSLQGEGSCVGQPAIFIRLGGCNFKCTGFGVQSDIEGKKVLGCDSAYAIYPNAKWQYLNSTQELLDKLPPFNSNRPPLIVLTGGEPSLHFKNPILLEALEILLKRGHGIWVESNGSVFFDFNPPLDSLHFTLSPKLSFAQEKTPLKPLQHILDHALEVVFKFVLHCPTDVDEVQVLLKQLRFKKPLLIYLMPLATDMQTLQEGLNSLAGVCLEHGYSLGQRLHIQLWGNEAGR

SEQ ID NO: 30610 - protein, 242 aa, Helicobacter heilmannii
  misc_feature (1)..(242): tr|A0A0K2XYU7|A0A0K2XYU7_HELHE 7-carboxy-7-deazaguanine synthase OS=Helicobacter heilmannii OX=35817 GN=queE P E=3 SV=1
MSLPLVEIFYSLQGEGSCVGQPSVFIRLGGCNFKCVGFGVKANIEGQEFMGCDSIYAVRPNSKWQYLRSAVELLDKLPAFNSQCLPLIVLTGGEPSLHFKNPILLEALQILHERGHTLWVESNGSVFFDFSPPLDTLHFTLSPKLSFSGEQTPLKPLQHILEHALEVVFKFVLKTPRDIQEVQDLLQQLRFKTPPLVYLMPLATSKENLQEGLESLAGVCLAHGYSLGQRLHIQLWGNTPGC

SEQ ID NO: 30611 - protein, 242 aa, Helicobacter heilmannii
  misc_feature (1)..(242): tr|A0A0K2XMS8|A0A0K2XMS8_HELHE 7-carboxy-7-deazaguanine synthase OS=Helicobacter heilmannii OX=35817 GN=queE P E=3 SV=1
MSLPLVETFYSLQGEGSCVGQPSVFIRLGGCNFKCVGFGVRANVEGQEFMGCDSIYAVRPNSKWQYLRSAVELLDKLPAFNSQCLPLIVLTGGEPSLHFKNPILLEALQILHERGHTLWVESNGSVFFDFSPPLDTLHFTLSPKLSFSGEQTPLKPLQHILEHALEVVFKFVLKTPRDIQEVQDLLQQLRFKTPPLVYLMPLATSKENLQEGLESLAGVCLAHGYSLGQRLHIQLWGNTPGC

SEQ ID NO: 30612 - protein, 286 aa, Helicobacter mustelae
  misc_feature (1)..(286): tr|D3UHV4|D3UHV4_HELM1 7-carboxy-7-deazaguanine synthas e OS=Helicobacter mustelae (strain ATCC 43772 / LMG 180 44 / NCTC 12198 / 12198) OX=679897 GN=queE PE=3 SV=1
MQILKISEIFYSLQGEGSAIGMPSVFVRVGLCNLRCKGFGERLRYRGEEILGCDSIYAANPKFQEEWREFESSKELISAIFAAVCGNLGSSVDAALRGEAGDFSSAQVGGDALLEAPEPLPPFDIVLTGGEPSLYFQNPALLGAIEFFLARHHRISVESNGSVLFAFTPLLERLHFTLGIKLSNSGEREQKRLNFPAIQNILDHAASVVLKFVLDAKMCQDGSALKEIDAILSQISGSYEVYLMPMGSSIETINQNIKAILPLCLKRGYKLSDRLHIRIWGNQRGF

SEQ ID NO: 30613 - protein, 251 aa, Helicobacter pylori
  misc_feature (1)..(251): tr|J0MVL5|J0MVL5_HELPX 7-carboxy-7-deazaguanine synthas e OS=Helicobacter pylori Hp A-27 OX=992057 GN=nrdG PE=3 SV=1
MKLPVVESFFSLQGEGKRIGKPSLFLRLGGCNLSCKGFNCKTLFNDEILIGCDSLYAVHPKFKTSWDYYNEPKPLIERLEDLAPNYKHFDFILTGGEPSLYFNNPILISVLEHFYRQKIPLCVESNGSIFFEFSPILKELHFTLSVKLSFSLEKESKRINLKALQNILNNAKSAHFKFVLESQNAAQSIIEIQSLLKQLSLKNNEIFLMPLGTNNNELDKNLKTLAPLAIKHGFRLSDRLHIRLWDNQKGF

SEQ ID NO: 30614 - protein, 251 aa, Helicobacter pylori
  misc_feature (1)..(251): tr|J0N682|J0N682_HELPX 7-carboxy-7-deazaguanine synthas e OS=Helicobacter pylori Hp H-6 OX=992061 GN=nrdG PE=3 SV=1
MKLPVVESFFSLQGEGKRIGKPSLFLRLGGCNLSCKGFNCKTLLNDEILTGCDSLYAVHPKFQTSWDYYSEPKPLIERLVNLAPNYKDFDFILTGGEPSLYFNNPILLSVLEHFYHKKIPLCVESNGSIFFEFSPILKELHFTLSVKLSFSLEQESKRINLKALQNILNNAKSAHFKFVLESQNATQSIIEIQSLLKQLSLKNNEIFLMPLGTTNNELDKNLKTLAPLAIKHGFRLSDRLHIRLWDNKKGF

SEQ ID NO: 30615 - protein, 193 aa, Helicobacter sp.
  misc_feature (1)..(193): tr|A0A3D6E3Y3|A0A3D6E3Y3_9HELI 7-carboxy-7-deazaguanine synthase OS=Helicobacter sp. OX=218 GN=queE PE=3 SV=1
MYPVTEIFYSIQGEGHHSGKAALFVRLHGCNLACDFCDEPSHTQGEYENQSQEAILEQLRAYPAHFVVITGGEPTLFDLNPLIKFLQKEGYFVAIETNGYNLAHIQAADWITYSPKNWNTLAKEGYDELKFIIHHASDITPLLALFQEKPLYLQPQSDGSALNAANVARCVELILEHPEWRLSLQTHKILEIP

SEQ ID NO: 30616 - protein, 250 aa, Helicobacter sp.
  misc_feature (1)..(250): tr|A0A268TAP3|A0A268TAP3_9HELI 7-carboxy-7-deazaguanine synthase OS=Helicobacter sp. 11S02596-1 OX=1476194 GN= queE PE=3 SV=1
MLAVSEIFYSLQGEGEFIGTPSVFLRLGGCNLSCAGFGIKSQLDTAEFLGCDSIYAANFSYAKEWESFANSTTLIEKMTSFSPGKFDVIITGGEPSLHFKNPILLEVIAYFLERNHRVCVESNASVPFGFNELLRRLYFTLSVKLSNSGEPLKKRIKPEVIQSIIDNAPHVVFKFVLNAKMCQDGRALEEIRDLLSKLKLKGNKIFLMPQGVNEEELNENIQAILPLCLREGFCLSDRLHIRIWGDKRGF

SEQ ID NO: 30617 - protein, 246 aa, Helicobacter suis
  misc_feature (1)..(246): tr|A0A510HBC7|A0A510HBC7_9HELI 7-carboxy-7-deazaguanine synthase OS=Helicobacter suis OX=104628 GN=queE PE=3 S V=1
MPLPLVETFYSLQGEGSCVGQPSVFIRLGGCNFKCVGFGVKSMIDSKEVVGCDSAYAVYPNAQWSYLKSSQELLARLEPLMQTFTLPHIVLTGGEPSLHFNNPILLEALQVLHTRGHTIWVESNGSVFFEFKAPLNTLHFTLSPKLAFAQTFKDYSKPLQNILNHAKEIVFKFVVKPPFEVCIAQIKALLKPLHFKKSPLIYLMPLGVQAQEILEGLKDLAPLCLQHGYLLSQRLHILLWGNKPGV

SEQ ID NO: 30618 - protein, 246 aa, Helicobacter suis
  misc_feature (1)..(246): tr|E7G4C9|E7G4C9_9HELI 7-carboxy-7-deazaguanine synthas e OS=Helicobacter suis HS5 OX=710394 GN=nrdG PE=3 SV=1
MPLPLVETFYSLQGEGSCVGQPSVFIRLGGCNFKCVGFGVKSMIDSKEVVGCDSAYAVYPNAKWSYLKSAQELLTRLEPLIYPSTLPHIVLTGGEPSLHFNNLILLEALQVLHTRGHTIWVESNGSVFFEFKAPLNTLHFTLSPKLAFAQTFKDYSKPLQNILNHAKEIVFKFVVKPPFEVCIAQIKALLKPLHFKKSPLIYLMPLGVQAQEILEGLKDLAPLCLQHGYLLSQRLHILLWGNKPGV

SEQ ID NO: 30619 - protein, 252 aa, Helicobacteraceae bacterium
  misc_feature (1)..(252): tr|A0A1J5F0R4|A0A1J5F0R4_9HELI 7-carboxy-7-deazaguanine synthase OS=Helicobacteraceae bacterium CG2_30_36_10 O X=1805215 GN=queE PE=3 SV=1
MLYLVEHFYSIQGEGRYTGTPSLFFRFGGCNMKCEGFGCEEKAADGTVVLGCDTVYAVNKEHFSQNWIPITNAKELLNVLELYELPRAVDIVLTGGEPLIYANNAIFIEFLNVLHAKGHQITFETNGSLDVDFEKHPIYKECIFALSVKLSNSNEHFHKRVRGDIIYNIASNAKGAFFKFSIEAESIDLGLEEEIESIIAHSLKTKVYCMPLGGSKEEVERNTEPLIEFCKSKGYNFSDRLHIRIWDQNKGV

SEQ ID NO: 30620 - protein, 252 aa, Helicobacteraceae bacterium
  misc_feature (1)..(252): tr|A0A1J4TXC9|A0A1J4TXC9_9HELI 7-carboxy-7-deazaguanine synthase OS=Helicobacteraceae bacterium CG1_02_36_14 O X=1805214 GN=queE PE=3 SV=1
MLYLVEHFYSIQGEGRYTGVPSLFFRFGGCNLKCEGFACSEKASDGVVVVGCDTVYAVNREHFSHNWIPIKNAKELLNILNLYELPHAVDIVLTGGEPLLYANDEIFVEFLNVLHQNGHQITFETNGSLDVDFERFPVYKECIFALSVKLSNSGEPFSKRVKGDVIYSIASNAKEAFFKFSIDAESINLGLEEEINAITLHSKKTKVYCMPLGGSKEEIELNTEPLIEFCKSKGYNFSDRLHIRIWNQNKGV

SEQ ID NO: 30621 - protein, 246 aa, Heliobacterium modesticaldum
  misc_feature (1)..(246): tr|B0TAY1|B0TAY1_HELMI 7-carboxy-7-deazaguanine synthas e OS=Heliobacterium modesticaldum (strain ATCC 51547 / Ice1) OX=498761 GN=queE PE=3 SV=1
MNNSLPTADLVEIMVSAQGEGPWIGCRQVFLRFFGCNLSCSYCDTPGSRGPRPSACRIEKEPGSSLFDLWENPVTVDRVAEYLCHTVPIHSVSLTGGEPLLHVEFIQQLIPLLGAQRPDLYLETNGTLPEQLALIVDDLDYVSMDLKTPLDNHWDLHRLFLRIASRKKGYVKIVITPTTALDVVQRAAAIIEEEAPHFPLVLQPVTGKTGLPLTVPGHLLNLQGAALAIHRDVRIIPQVHPILGIL

SEQ ID NO: 30622 - protein, 249 aa, Heliophilum fasciatum
  misc_feature (1)..(249): tr|A0A4R2RHG2|A0A4R2RHG2_9FIRM 7-carboxy-7-deazaguanine synthase OS=Heliophilum fasciatum OX=35700 GN=queE PE= 3 SV=1
MSEIKAQIMDIMVSAQGEGPWVGHRQLFLRFFGCNLHCSYCDTPASQSEQPGPCQIERQPGSAVFDYLPNPLSVTHLAAQIRPLLNRSLHSISLTGGEPLLHVPFIRELADVLGAERPLFYLETNGTLVDALKEVLPVIDFISMDLKMPSHCTGLLWEYHSRFLRVAAQKPGYVKTVVLPSTTHDDIEQAARLVKAEASHYPLILQPVSDKRGIPLVPGNRLLEFQDAAMVWHQDVRVIPQTHKWLEIL

SEQ ID NO: 30623 - protein, 223 aa, Henriciella algicola
  misc_feature (1)..(223): tr|A0A399R9E0|A0A399R9E0_9RHOB 7-carboxy-7-deazaguanine synthase OS=Henriciella algicola OX=1608422 GN=queE PE =3 SV=1
MAGAPEVKTYSVKEAYVTLQGEGAQTGRAAVFLRFAGCNLWSGLERDRDSAVCKFCDTDFVGTDGENGGKFKGADALADHVVSVWREKTGESGAQGYVVCTGGEPLLQLDEAAIAALHARGFEVGVETNGTLPAPSSLDWVCVSPKANSDIVQLRGNELKLVYPQPELEAQPERFAALQFEHFFLQPKDDNRQAENIAAAADYCMKHPEWRLSLQTHKLIGLP

SEQ ID NO: 30624 - protein, 217 aa, Henriciella barbarensis
  misc_feature (1)..(217): tr|A0A399R254|A0A399R254_9RHOB 7-carboxy-7-deazaguanine synthase OS=Henriciella barbarensis OX=86342 GN=queE P E=3 SV=1
MKTYSVKEAYVTLQGEGAQTGRTAVFLRFAGCNLWSGLERDRDSAVCKFCDTDFVGTDGENGGKFKGAEALADHVVSVWREKTGETGAKGYVVCTGGEPLLQLDEAAIDALHNRGFEVGVETNGTLPAPSSLDWVCVSPKANSEIVQLKGSELKLVYPQSEEEAQPERYAALQFEHFFLQPKDDNRQAENIAAAADYCMKHPKWRLSLQTHKLIGLP

SEQ ID NO: 30625 - protein, 217 aa, Henriciella sp.
  misc_feature (1)..(217): tr|A0A399RL63|A0A399RL63_9RHOB 7-carboxy-7-deazaguanine synthase OS=Henriciella sp. JN25 OX=2305466 GN=queE PE =3 SV=1
MKIYSVKEAYVTLQGEGAQTGRAAVFLRFAGCNLWSGLERDRHKAVCQFCDTDFVGTNGENGGKFEGADALADHVASLWAAAAGAHADEAYVVCTGGEPLLQLDSPLIEALHARGFEVGVETNGTVAAPAGLDWICISPKANAALVQSRGDELKLVYPQDEPEAQPERFEMLQFQHFFLQPKDDNRQAENIAAAAAYCMKHPKWRLSLQTHKLIGLP

SEQ ID NO: 30626 - protein, 217 aa, Henriciella sp.
  misc_feature (1)..(217): tr|A0A2D8YCT6|A0A2D8YCT6_9RHOB 7-carboxy-7-deazaguanine synthase OS=Henriciella sp. OX=1968823 GN=queE PE=3 SV =1
MKTYSVKEAYVTLQGEGAQTGRAAVFLRFAGCNLWTGLERDRPRAVCQFCDTDFVGTDGENGGKFKGAEALADHVALVWRETSGDTGQKGYVVCTGGEPLLQLDEEAIAALHARGFDVGVETNGTLPAPESLDWVCVSPKANAEVVQTRGNELKLVYPQDEPEAQPERYAALQFDHFFLQPKDDNRQADNIAAAAAYCMKHPEWRLSLQTHKLIGLP

SEQ ID NO: 30627 - protein, 210 aa, Hephaestia caeni
  misc_feature (1)..(210): tr|A0A397NJB3|A0A397NJB3_9SPHN 7-carboxy-7-deazaguanine synthase OS=Hephaestia caeni OX=645617 GN=queE PE=3 SV =1
MTYAVKEMFLTLQGEGVQCGRRAVFVRFAGCNLWSGREQDRATAVCRFCDTDFVGTDGAGGGKFAEAAGLAAAVEGFWGAADAHRFVVLTGGEPMLQVDDALVAALHARGFAIAIETNGTLPVHPAIDWVCVSPKAGSDVVQRVGDELKLVWPQDGIDPAALEGWDFRHFLIQPKDDPHAVANRQAAIALVLDRPRWRLSTQTHKVLGLR

SEQ ID NO: 30628 - protein, 211 aa, Herbaspirillum aquaticum
  misc_feature (1)..(211): tr|A0A225SWV7|A0A225SWV7_9BURK 7-carboxy-7-deazaguanine synthase OS=Herbaspirillum aquaticum OX=568783 GN=queE PE=3 SV=1
MTYSIKEIFYTLQGEGAHAGRPAVFCRFSGCNLWTGREEDRARAICQFCDTDFVGTDGENGGKFKSAAELADKINSFWPARHAASKYVVFTGGEPLLQLDTALIEAMHAVGFEIAIETNGTIEVPEGVDWICVSPKMGSELKVKRGSELKVVVPQPGQPLDEYEKLDFQHFLLQPMDGLQAAANTRLAIEMVKDNPKWKLSIQTHKLLNIP

SEQ ID NO: 30629 - protein, 211 aa, Herbaspirillum hiltneri
  misc_feature (1)..(211): tr|A0A561JT68|A0A561JT68_9BURK 7-carboxy-7-deazaguanine synthase OS=Herbaspirillum hiltneri OX=341045 GN=queE PE=3 SV=1
MTYSIKEIFYTLQGEGTHAGRPAVFCRFSGCNLWTGREEDRSKAICQFCDTDFVGTDGEGGGKFKTSDALAQAINQLWPASYAASKYVVFTGGEPLLQLDEALIASMHAVGFEIAIETNGTIPVPPGIDWICVSPKMGSELKVFKGSELKVVIPQQAQVLADYEKLDFAHFLLQPMDGPDAARNTKMAIELVKNNPRWKLSIQTHKLLQIP

SEQ ID NO: 30630 - protein, 211 aa, Herbaspirillum huttiense
  misc_feature (1)..(211): tr|A0A4V3H6G7|A0A4V3H6G7_9BURK 7-carboxy-7-deazaguanine synthase OS=Herbaspirillum huttiense OX=863372 GN=queE PE=3 SV=1
MTYSIKEIFYTLQGEGAHAGRPAVFCRFSGCNLWTGREEDRARAICQFCDTDFVGTDGENGGKFKSAAELADKINSFWPARHAASKYVVFTGGEPLLQLDTTLIEAMHAVGFEIAIETNGTIEVPEGVDWICVSPKMGSELKVKRGSELKVVVPQPGQPLDEYEKLDFQHFLLQPMDGLQAAANTRLAIEMVKNNPKWKLSIQTHKLLNIP

SEQ ID NO: 30631 - protein, 211 aa, Herbaspirillum huttiense
  misc_feature (1)..(211): tr|A0A4P7A8V7|A0A4P7A8V7_9BURK 7-carboxy-7-deazaguanine synthase OS=Herbaspirillum huttiense OX=863372 GN=queE PE=3 SV=1
MTYSIKEIFYTLQGEGAHAGRPAVFCRFSGCNLWTGREEDRARAICQFCDTDFVGTDGENGGKFKSAAELADKINSFWPARHAASKYVVFTGGEPLLQLDTALIEAMHAVGFEIAIETNGTIEVPQGVDWICVSPKMGSELKVKRGSELKVVVPQPGQPLDEYEKLDFQHFLLQPMDGLQAAANTRLAIEMVKNNPKWKLSIQTHKLLNIP

SEQ ID NO: 30632 - protein, 211 aa, Herbaspirillum robiniae
  misc_feature (1)..(211): tr|A0A246WWN3|A0A246WWN3_9BURK 7-carboxy-7-deazaguanine synthase OS=Herbaspirillum robiniae OX=2014887 GN=queE PE=3 SV=1
MTYSIKEIFYTLQGEGAHAGRPAVFCRFSGCNLWTGREEDRSRAICRFCDTDFVGTDGENGGKFRSPQELAAKIDSLWPATYAPSKYVVFTGGEPLLQLDGPLIDAMHAAGFEIAIETNGTIEVPPGVDWICVSPKMGSELKVKKGSELKVVVPQPGQPLDEYERLDFQNFLLQPMDGPDAAANTKMAIEMVKNNPKWKLSIQTHKLLNIP

SEQ ID NO: 30633 - protein, 229 aa, Herbaspirillum rubrisubalbicans
  misc_feature (1)..(229): tr|A0A0U3LEZ3|A0A0U3LEZ3_9BURK 7-carboxy-7-deazaguanine synthase OS=Herbaspirillum rubrisubalbicans M1 OX=1078 773 GN=queE PE=3 SV=1
MASSDPFCFRLPGRLSLIVTYSIKEIFYTLQGEGAHAGRPAVFCRFSGCNLWTGREEDRARAICQFCDTDFVGTDGENGGKFKSAEALAAKIDSLWPATYAPSKYVVFTGGEPLLQLDAALIAAMHAVGFEIAIETNGTIAVPEGVDWICVSPKMGAELKVTRGSELKVVVPQAGQPLAHYETLDFQHFLLQPMDGPQAAANTRLAIEMVKHNPKWKLSIQTHKLLNIP

SEQ ID NO: 30634 - protein, 211 aa, Herbaspirillum rubrisubalbicans
  misc_feature (1)..(211): tr|A0A328J4G9|A0A328J4G9_9BURK 7-carboxy-7-deazaguanine synthase OS=Herbaspirillum rubrisubalbicans OX=80842 G N=queE PE=3 SV=1
MTYSIKEIFYTLQGEGTHAGRPAVFCRFSGCNLWTGREEDRARAICQFCDTDFVGTDGENGGKFKSAEALAAKIDSLWPATYAPSKYVVFTGGEPLLQLDAALIAAMHAVGFEIAIETNGTIAVPEGVDWICVSPKMGSELKVTRGSELKVVVPQAGQPLAHYETLDFQHFLLQPMDGPQAAANTRLAIEMVKHNPKWKLSIQSHKLLNIP

SEQ ID NO: 30635 - protein, 229 aa, Herbaspirillum seropedicae
  misc_feature (1)..(229): tr|D8IU47|D8IU47_HERSS 7-carboxy-7-deazaguanine synthas e OS=Herbaspirillum seropedicae (strain SmR1) OX=757424 GN=queE PE=3 SV=1
MALSDPFCLWLPGRPFLIVTYSIKEIFYTLQGEGAHAGRPAVFCRFSGCNLWTGREEDRVRAICQFCDTDFVGTDGENGGKFKSPAELAAKIDSLWPARYAPSKYVVFTGGEPLLQLDAALIEAMHAVGFEIAIETNGTIDVPDGVDWICVSPKMGSELKVRRGSELKVVVPQPGQPLDEYEKLDFQHFLLQPMDGLQAAANTRLAIEMVKNNPKWKLSIQTHKLLNIP

SEQ ID NO: 30636 - protein, 211 aa, Herbaspirillum seropedicae; identical to SEQ ID NO: 30630
  misc_feature (1)..(211): tr|A0A4R8NSL6|A0A4R8NSL6_HERSE 7-carboxy-7-deazaguanine synthase OS=Herbaspirillum seropedicae OX=964 GN=queE PE=3 SV=1

SEQ ID NO: 30637 - protein, 228 aa, Herbaspirillum sp.
  misc_feature (1)..(228): tr|I3CVM6|I3CVM6_9BURK 7-carboxy-7-deazaguanine synthas e OS=Herbaspirillum sp. GW103 OX=1175306 GN=queE PE=3 S V=1
MYIHPRAAPRLPFVFPIVTYSIKEIFYTLQGEGAHAGRPAVFCRFSGCNLWTGREEDRARAICQFCDTDFVGTDGENGGKFKSASELADRINSFWPVRHAASKYVVFTGGEPLLQLDAALIEAMHAVGFEIAIETNGTIEVPPGVDWICVSPKMGAELKVRQGSELKVVVPQAGQPLDEYEQLDFRHFLLQPMDGPQAAANTRLAIEMVKNNPKWKLSIQTHKLLNIP

SEQ ID NO: 30638 - protein, 232 aa, Herbaspirillum sp.
  misc_feature (1)..(232): tr|J2VSX9|J2VSX9_9BURK 7-carboxy-7-deazaguanine synthas e OS=Herbaspirillum sp. YR522 OX=1144342 GN=queE PE=3 S V=1
MISAWPTAVFFRARSRRHSTIVTYSIKEIFYTLQGEGAHAGRPAVFCRFSGCNLWTGREQDRASATCRFCDTDFVGTDGENGGKFKSASALAAMIDSLWPASYAPSKYVVFTGGEPLLQLDGPLIEAMHAVGFEIAIETNGTIAVPEGVDWICVSPKMGAELKVTRGSELKVVVPQAGQPLADYEKLDFAHFLLQPMDGPDAAANTTMAIQMVKDNPKWKLSIQTHKLLQIP

SEQ ID NO: 30639 - protein, 211 aa, Herminiimonas arsenicoxydans
  misc_feature (1)..(211): tr|A4G4W4|A4G4W4_HERAR 7-carboxy-7-deazaguanine synthas e OS=Herminiimonas arsenicoxydans OX=204773 GN=queE PE= 3 SV=2
MTYSIKEIFYTLQGEGAHAGRPAVFCRFSGCNLWTGRESDRATAVCQFCDTDFVGTDGEGGGKFADAVKLANTINALWPASYAASKYVVFTGGEPLLQLDTELINAMHAVGFEIAIETNGTLPVPAGVDWICVSPKMGSQLVVRKGSELKVVIPQLAQSLAAYEDLDFQHFFVQPMDGPLAEQNTRLAIEICKKNPKWKLSLQTHKLLQIP

SEQ ID NO: 30640 - protein, 211 aa, Herminiimonas fonticola
  misc_feature (1)..(211): tr|A0A4R6G6X0|A0A4R6G6X0_9BURK 7-carboxy-7-deazaguanine synthase OS=Herminiimonas fonticola OX=303380 GN=queE PE=3 SV=1
MTYSVKEIFYTLQGEGAHAGRPAVFCRFSGCNLWTGRESDRATAVCKFCDTDFVGTDGEGGGKFSDATKLANTINALWPESYTASKYVVFTGGEPLLQLDTELIDAMHAIGFEIAIETNGTLPVPAGVDWICVSPKMGSQLVVRKGSELKVVIPQLAQSLAAYEDLDFEHFFVQPMDGPLVEQNTKLAIDVCKRNPKWKLSIQTHKLLQIP

SEQ ID NO: 30641 - protein, 211 aa, Herminiimonas sp.
  misc_feature (1)..(211): tr|A0A3N7A6L6|A0A3N7A6L6_9BURK 7-carboxy-7-deazaguanine synthase OS=Herminiimonas sp. KBW02 OX=2153363 GN=queE PE=3 SV=1
MTYSVKEIFYTLQGEGAHAGRPAVFCRFSGCNLWTGRESDRATAVCQFCDTDFVGTDGEGGGKFASGTTLANTINALWPESYAASKYVVFTGGEPLLQLDAELIDAMHAVGFEIAIETNGTLPVPTGVDWICVSPKMGSQLVVRKGNELKVVIPQAEQSLAAYEGLDFEHFFVQPMDGPLAEQNTKLAIDVCKRNPKWKLSLQTHKLLQIP

SEQ ID NO: 30642 - protein, 230 aa, Herpetosiphon aurantiacus
  misc_feature (1)..(230): tr|A9AWJ7|A9AWJ7_HERA2 7-carboxy-7-deazaguanine synthas e OS=Herpetosiphon aurantiacus (strain ATCC 23779 / DSM 785 / 114-95) OX=316274 GN=queE PE=3 SV=1
MNVMEVYRSVQGEGTLMGVPTTFVRFFACNLRCSWCDTKYSWSVKEGGKWEDLPIATLAQRIADQGARHVVLTGGEPMLQRELPALAQTLRAAGHHLTVETNSTLFRPELVELINLWSLSPKLAGANTGMLRLEPLRQFMQLPAEQQQWKFVITGESDLAQLHQFVSEHQAFAEAQLPIIWQPEGRWAERDYAHALEWLAERAQLPEWRPFNVRVLPQMHVLIWGQKRLV

SEQ ID NO: 30643 - protein, 211 aa, Hippea maritima
  misc_feature (1)..(211): tr|F2LX28|F2LX28_HIPMA 7-carboxy-7-deazaguanine synthas e OS=Hippea maritima (strain ATCC 700847 / DSM 10411 / MH2) OX=760142 GN=queE PE=3 SV=1
MIVDVSEIFYSIQGEGSKIGYKAIFIRLCGCNLKCPFCDTKYALSCKNPMNAHEIYEKISRFPAKNIIFTGGEPTLKDNFMAYFMKKYNNYSYFLETNGTLFPKKSINLFSHIVVSPKMFAINLDVLKSLIKYSISIEFKFVVDENFTKELELMEELGLKEATFQPVWLNDSMESYIKKTVRIIEKLKDIPYNIRIIPQIHKILYGQKKGV

SEQ ID NO: 30644 - protein, 43 aa, Holophagaceae bacterium
  misc_feature (1)..(43): tr|A0A3D6EI80|A0A3D6EI80_9BACT 7-carboxy-7-deazaguanine synthase QueE (Fragment) OS=Holophagaceae bacterium OX =2052165 GN=DHV93_02665 PE=4 SV=1
MKFKVNEVFHSIQGEGARIGRPCLFIRLTGCPLRCAYCDTEYA

SEQ ID NO: 30645 - protein, 203 aa, Hormoscilla sp.
  misc_feature (1)..(203): tr|A0A533NL70|A0A533NL70_9CYAN 7-carboxy-7-deazaguanine synthase OS=Hormoscilla sp. GUM007 OX=2480854 GN=queE PE=3 SV=1
MTLLTEVTYPVVETFHSIQGEGAWTGVSAFFIRLGGCDVYCSWCDTKESWNPKLHPQRTVPDLVAEAAAASPAIVVVTGGEPLMHDLTPLTDALRKSHLRVHLETSGAYPFSGSFDWVTLSPKTFKPPHPSVYPHADELKVVVASPQDLEWAEQEALKVKDSVVMYLQPEWNTSYSRRLVFAYILQHPSWRFSLQTHKFLEVK

SEQ ID NO: 30646 - protein, 203 aa, Hormoscilla sp.
  misc_feature (1)..(203): tr|A0A533NVW4|A0A533NVW4_9CYAN 7-carboxy-7-deazaguanine synthase OS=Hormoscilla sp. GUM202 OX=2480853 GN=queE PE=3 SV=1
MTLLTQVTYLVVETFHSIQGEGAWTGVSAFFIRLGGCDVHCSWCDTKESWNPKLHPQRTVSDLVAEATAATPAIVVVTGGEPLMHDLTPLTDALRKSHLRVHLETSGAHPFSGSFDWVTLSPKTFQPPHPSVYPHADELKVVVADPQDLEWAEQEALKVKNFVVKYLQPEWNTLSSPSLVFAYILQHPQWRLSLQTHKFLEVK

SEQ ID NO: 30647 - protein, 209 aa, Hungateiclostridium clariflavum
  misc_feature (1)..(209): tr|G8LWS0|G8LWS0_HUNCD 7-carboxy-7-deazaguanine synthas e OS=Hungateiclostridium clariflavum (strain DSM 19732 / NBRC 101661 / EBR45) OX=720554 GN=queE PE=3 SV=1
MLVNEIFLSIQGESLSTGFPTVFVRFTGCNLRCSYCDTTYAYEEGESMSPSEIFERIKALDYKRVCITGGEPLLQKDLKELLELLRGYTVTIETNGAVSIENVKLGEGHTWVMDMKTPSSGCSEKMVLDNLKFLRDEDEIKFVIGDRKDYEWAKEIIRNHYTKGTISFSPVYGKMDYEELVNWILSDRLEVRFQIQLHKVIWGADRTGV

SEQ ID NO: 30648 - protein, 210 aa, Hungateiclostridium saccincola
  misc_feature (1)..(210): tr|A0A2K9E3H8|A0A2K9E3H8_9FIRM 7-carboxy-7-deazaguanine synthase OS=Hungateiclostridium saccincola OX=1677857 GN=queE PE=3 SV=1
MKVNEIFLSVQGEGLSSGFPTIFVRFTGCNLRCSYCDTTYSYNDGVEMPPEDILKEIKKLHYKRVCLTGGEPLLQEDIEKLLKMLYDYTVTIETNGSVRLDSLDLSNRKYSFVMDMKTPSSGCSGEMVLENFKLLESRDEIKFVIGDREDYEWSKNIILNHYKKGTITFSPVYNRIDYAKMVKWILDDRLDVRFQLQLHKFIWGPDVTGV

SEQ ID NO: 30649 - protein, 210 aa, Hungateiclostridium saccincola
  misc_feature (1)..(210): tr|A0A2S8REE3|A0A2S8REE3_9FIRM 7-carboxy-7-deazaguanine synthase OS=Hungateiclostridium saccincola OX=1677857 GN=queE PE=3 SV=1
MKVNEIFLSVQGEGLSSGFPTIFVRFTGCNLRCSYCDTTYSYNDGVEMPPEDILKEIKKLHYKRVCLTGGEPLLQEDIEKLLKMLYDYTVTIETNGSVRLDSLDLSNRKYSFVMDMKTPSSGCSGEMVLENFKLLKSRDEIKFVIGDREDYEWSKNIILNHYKKGTITFSPVYNRIDYAKMVKWILDDRLDVRFQLQLHKFIWGPDVTGV

SEQ ID NO: 30650 - protein, 210 aa, Hungateiclostridium sp.
  misc_feature (1)..(210): tr|A0A4Q0I0J4|A0A4Q0I0J4_9FIRM 7-carboxy-7-deazaguanine synthase OS=Hungateiclostridium sp. N2K1 OX=2487273 GN =queE PE=3 SV=1
MKVNEIFLSIQGESMSAGFPTVFVRFTGCNLRCSYCDTKYAYNEGRDMTPSEIFEEIKKLHYKRVCLTGGEPLLQKEMGELMALLNDYIVTIETNGSVDLESLILKNPKHSYVMDMKVPSSGCSDQMLFDNFDLLREQDEIKFVIGDRVDYEWAKGLISNYHRKGNITFSPIYEKIDYSTMVRWILEDRLDVRFQVQLHKVIWGPDKTGV

SEQ ID NO: 30651 - protein, 180 aa, Hungateiclostridium straminisolvens
  misc_feature (1)..(180): tr|W4V8B6|W4V8B6_9FIRM 7-carboxy-7-deazaguanine synthas e OS=Hungateiclostridium straminisolvens JCM 21531 OX=1 294263 GN=queE PE=3 SV=1
MKVNEIFLSIQGESMSAGFPTVFVRFTGCNLRCSYCDTKYAYNGGEDMTPSEIFEEIKKLHYKRVCLTGGEPLLQKELGELLVLLDDYTVTIETNGSVGLGSVVLKNPRHSYVMDMKVPSSGCSGQMLFENFDLLKEQDEIKFVVGDRTDYEWAKSIISKYHKKGTVTFSPVYGKIDYSA

SEQ ID NO: 30652 - protein, 210 aa, Hungateiclostridium thermocellum
  misc_feature (1)..(210): tr|A0A4S5EX63|A0A4S5EX63_HUNTH 7-carboxy-7-deazaguanine synthase OS=Hungateiclostridium thermocellum OX=1515 G N=queE PE=3 SV=1
MKVNEIFLSIQGESLSAGFPTVFVRFTGCNLRCSYCDTRYAYKEGEDMTPSEVFEEIKKLHYKRVCLTGGEPLLQKELGQLLEFLDDYIVTIETNGSVSLKSVELKNPKHSYVMDMKVPSSGCSDQMLFENFDLLRDNDEIKFVIGSRVDYDWAKNIISKYHKKGTVTFSPVYGKIDYSGIVKWILEDKLDARFQVQLHKVIWGPDKTGV

SEQ ID NO: 30653 - protein, 210 aa, Hungateiclostridium thermocellum; identical to SEQ ID NO: 30652
  misc_feature (1)..(210): tr|A3DK23|A3DK23_HUNT2 7-carboxy-7-deazaguanine synthas e OS=Hungateiclostridium thermocellum (strain ATCC 2740 5 / DSM 1237 / JCM 9322 / NBRC 103400 / NCIMB 10682 / N RRL B-4536 / VPI 7372) OX=203119 GN=queE PE=3 SV

SEQ ID NO: 30654 - protein, 213 aa, Hyalangium minutum
  misc_feature (1)..(213): tr|A0A085WRD5|A0A085WRD5_9DELT 7-carboxy-7-deazaguanine synthase OS=Hyalangium minutum OX=394096 GN=queE PE=3 SV=1
MAYAVKEIFYTLQGEGGQAGRAAVFLRFAGCNLWSGREADRPHGAGGCSRWCDTDFVGTNGAGGGSFRNAEELAAAVEATWRGRHGKRLVVCTGGEPLLQLDVSLLEELHRRSFEIAIETNGTLLPPPGIDWICVSPKANTQLALRAGQELKLVYPQAGMPPENFESLEFSHFFLQPLDGPDRERHTQSCVEYCLAHPRWRLSLQTHKLLGIP

SEQ ID NO: 30655 - protein, 211 aa, Hyalangium minutum
  misc_feature (1)..(211): tr|A0A085WJZ4|A0A085WJZ4_9DELT 7-carboxy-7-deazaguanine synthase OS=Hyalangium minutum OX=394096 GN=queE PE=3 SV=1
MVKEIYLSVQGESSHAGLLCSFVRLTGCHLRCTYCDSEFAFRGGTRMKNAEVVEQVKALRAPLVEVTGGEPLLQPGVYPLMEALLAEGLTVLLETSGAIDVRLVPPAVHKIVDMKTPSSGECDRNDFGNFTSMNANDELKFVIGSRADYDWARALITEHRLLDKPFGLLFSTVFGKLHPRELSEWIIEDRLPVRFQLQLHKYVWDPAARGV

SEQ ID NO: 30656 - protein, 193 aa, Hydrobacter penzbergensis
  misc_feature (1)..(193): tr|A0A1H2WQD8|A0A1H2WQD8_9BACT 7-carboxy-7-deazaguanine synthase OS=Hydrobacter penzbergensis OX=1235997 GN=qu eE PE=3 SV=1
MESFYTLQGEGFHQGRAAYFIRLGGCDVGCFWCDVKESWDASQHPLLSVEAIVGEAKKYPGRLAVITGGEPLMHSLDELTHALQAAGFETNIETSGSSPLSGNWNWICLSPKKFKAPLPEIVPLAHELKVIIYNKHDFTWAETYAAQVNPTCKLYLQPEWDQSDKVTPLIIDYIKSNPQWELSLQVHKYIHVP

SEQ ID NO: 30657 - protein, 226 aa, Hydrocarboniclastica marina
  misc_feature (1)..(226): tr|A0A4P7XFN5|A0A4P7XFN5_9ALTE 7-carboxy-7-deazaguanine synthase OS=Hydrocarboniclastica marina OX=2259620 GN= queE PE=3 SV=1
MYRVKEMFYTLQGEGAQTGRPAVFCRFSKCNLWNGREKDRANSICSFCDTDFVGTDGQNGGEFADAMSLAKAIADLWPASGGEGRTRHGRVRPYVVCTGGEPLLQLDVPLIDALHGLGFEVGVETNGTLPAPAGVDWLCVSPKAAAVLAVTRCDELKLVYPQAQAMPERFSGFDADYFYLSPMASPDATATSDPLKWENTRRAIEYCLEHPQWRLTLQTHKLVGID

SEQ ID NO: 30658 - protein, 226 aa, Hydrocarboniphaga daqingensis
  misc_feature (1)..(226): tr|A0A1M5RTM4|A0A1M5RTM4_9GAMM 7-carboxy-7-deazaguanine synthase OS=Hydrocarboniphaga daqingensis OX=490188 GN =queE PE=3 SV=1
MTSAVAQPAPAARTSRLKITEIFLSLQGESSTAGWPTVFVRLTGCPLRCVYCDTEYAFYGGQWRDLEAILATVDSYGARHVCVTGGEPLAQKTCLELMTRLCDAGKQVSLETSGALDVTAVDPRVMRVIDIKTPGSGEQSRNLWSNLDHLRPHDELKFVICSREDYDWSCSMVAQHELTQRCSVLFSPSHRQVTPRQLADWIVEDRLPVRFQMQLHKQLWGEEAGR

SEQ ID NO: 30659 - protein, 225 aa, Hydrocarboniphaga effusa
  misc_feature (1)..(225): tr|I8T303|I8T303_9GAMM 7-carboxy-7-deazaguanine synthas e OS=Hydrocarboniphaga effusa AP103 OX=1172194 GN=queE PE=3 SV=1
MGFAVAQPAPARDERLKLTEIFLSLQGESSYSGWPTVFVRLTGCPLRCVYCDTAYAFHGGQWKGFDQILDEVAALGARHVCVTGGEPLAQKNVVELLKRLCDAGYAVSLETSGALDVSAVDTRVMRVVDVKTPDSGEVERNLWSNLAQLTSHDEVKFVICSRSDYDWSKRIIEEHALTGRCTVLFSPSHGQVKARELADWIVEDRLAVRFQTQLHKQLWGEEQGR

SEQ ID NO: 30660 - protein, 205 aa, Hydrococcus rivularis
  misc_feature (1)..(205): tr|A0A1U7H8F6|A0A1U7H8F6_9CYAN 7-carboxy-7-deazaguanine synthase OS=Hydrococcus rivularis NIES-593 OX=1921803 GN=queE PE=3 SV=1
MKTTIIETITYPIVETFHSVQGEGAWTGVSAFFIRLGGCDVYCPWCDQKESWNAKRYPQRSLVELATEAKAANPAIVIITGGEPLMHDLNPLTRQLRKLGLRVHLETSGAHPFSGQFDWVTFSPKQYKPPHNSIYDRVSELKVVVANPKDLQWAEQQATRIPPEALKYLQPEWNTPQSQQIIYDYVLQHPEWRISLQMHKFLGVR

SEQ ID NO: 30661 - protein, 207 aa, Hydrocoleum sp.
  misc_feature (1)..(207): tr|A0A261KKY3|A0A261KKY3_9CYAN 7-carboxy-7-deazaguanine synthase OS=Hydrocoleum sp. CS-953 OX=1671698 GN=queE PE=3 SV=1
MTENLTIPIHETFQKTIQGEGYWTGTPVDFIRLAGCPVGCHYCDTGYADGGVGLPRQMRTFDELINELFSPRVIISGGEPFIHKQLPTLVKRIEATDRKVSIETSGCYWQDISPKTWVTLSPKQHISPKYPVLPQMWKRASEIKLVIETGKELEFYSKILLDNNNIPVYLQPEWYSRNFTLPLVLELLQEYPYYRLSVQLHKYLGLQ

SEQ ID NO: 30662 - protein, 257 aa, Hydrogenimonas sp.
  misc_feature (1)..(257): tr|A0A3G9H0U4|A0A3G9H0U4_9PROT 7-carboxy-7-deazaguanine synthase OS=Hydrogenimonas sp. OX=2231112 GN=queE PE=3 SV=1
MKRESETLYLVEHFFSIQGEGRYSGTPSIFLRFGGCNLRCPGFGCHEADGKRIYGCDTVRAVYSSLYGRSWHRVADLSELEEVILGYEDRLTYRPDIVITGGEPMIYTDHPVFRGLLERLAAGGYRVTVETNATIAPSLERDPFYSEITFAMAVKLSGSGEPECKRVVPEAIEILATKTKESFFKFTLDRGLAREGAADQIARICSGYDNEVYCMPLGSCESELRLNATAVAEFCLKHGYRYSDRLHVRLWNREERR

SEQ ID NO: 30663 - protein, 251 aa, Hydrogenimonas sp.
  misc_feature (1)..(251): tr|A0A432R1H9|A0A432R1H9_9PROT 7-carboxy-7-deazaguanine synthase OS=Hydrogenimonas sp. OX=2231112 GN=queE PE=3 SV=1
MIYLVEDFFSIQGEGPYMGTPSIFLRFGGCNLRCPGFGETWQKGKRILGCDTVRAVYTRLFKEDWQEVEDADRLIEIIQNYVVNLSYRPDIVLTGGEPMLYAENPIFYRAVEWMVENHYRVTVETNATLAPSFEAYPAYRSVTFAMAVKLSNSGEPKERRIVPEAIAHLAKEGKESFFKFTLNSELIERDAYEQISEICDGYENPIYCMPLGESIPQLHEHAKYVVPFCLKHGYHYSDRLHVRLWNREEKR

SEQ ID NO: 30664 - protein, 253 aa, Hydrogenimonas thermophila
  misc_feature (1)..(253): tr|A0A1I5R3H5|A0A1I5R3H5_9PROT 7-carboxy-7-deazaguanine synthase OS=Hydrogenimonas thermophila OX=223786 GN=qu eE PE=3 SV=1
MMKLYLVEHFFSVQGEGRYMGSPSIFLRFGGCNLRCPGFGESWYKGKRILGCDTVRATNQKLFKDCWEEVADYKYLINIIENYLKNISYKPDIVLTGGEPMIYAQNQIFYEMIEWLVENDFRVTIETNSTIAPSFKEFQAYKNVTFAMAVKLSNSGEPKERRIVPDAINRLAKESKNSFFKFTLDQELINKDAQSQIEEICSGFSNEIYCMPLGDNISDLQSNALGVAEFCLKYGYNYSDRLHVRLWNREEKR

SEQ ID NO: 30665 - protein, 218 aa, Hydrogenivirga caldilitoris
  misc_feature (1)..(218): tr|A0A497XT39|A0A497XT39_9AQUI 7-carboxy-7-deazaguanine synthase OS=Hydrogenivirga caldilitoris OX=246264 GN=q ueE PE=3 SV=1
MLRDKVRATHTLSVNEIYETVQGEGLLVGTPSLFIRLQGCNLRCPWCDQPEALEFKRKPILIEELLKKLSTSKTRHVVITGGEPLAHSNVHILVKTLLGEGFSVQIETNGTLWNEGLEDVAERIHITCSPKAVANFFVHPKILMYAKELKFVVDEELSEESLLREEFKSFLEKGVVVLQPEGNKQTYISKALVIQDLLLERGFPVRVIPQIHKFLGIR

SEQ ID NO: 30666 - protein, 218 aa, Hydrogenivirga sp.
  misc_feature (1)..(218): tr|A8UQS0|A8UQS0_9AQUI 7-carboxy-7-deazaguanine synthas e OS=Hydrogenivirga sp. 128-5-R1-1 OX=392423 GN=queE PE =3 SV=1
MLRDKVRTANALSVNEIYESIQGEGLLVGTPSIFIRLQGCNLRCPWCDQPEALSFSNTTIPVEGILQKVQEFPARHVVITGGEPFAHQNLHVLVRALIEEGFSLQIETNGTLWNEGLDSMAEQVHITCSPKAAANFFVNPRVIKHTNELKFVVDEEFSSDVVLREEFRGLLLAEKVVLQPEGNKVSFLRKALDIQRELSLKGFKVRVIPQVHKLLGLP

SEQ ID NO: 30667 - protein, 218 aa, Hydrogenobacter hydrogenophilus
  misc_feature (1)..(218): tr|A0A285NQF2|A0A285NQF2_9AQUI 7-carboxy-7-deazaguanine synthase OS=Hydrogenobacter hydrogenophilus OX=35835 G N=queE PE=3 SV=1
MLRDKVRTSTTLSINEIYPTIQGEGLLVGSPCLMVRFQGCNIRCPWCDQPSALVFKRPNTDLSTLLEEIKRHPHKHIVLTGGEPLAQPNLHLLVYELIQEGYFVQIETNGTLWNENLKVVEDRIHITCSPKWTANWYVHPSVLKNAKELKFVVDDNFSSHILKRSEFLPFLEKGLVVLQPEGNKEKFLQKALKIQTDLLEEGYTVRVLPQLHKLIGLK

SEQ ID NO: 30668 - protein, 218 aa, Hydrogenobacter thermophilus
  misc_feature (1)..(218): tr|D3DIS0|D3DIS0_HYDTT 7-carboxy-7-deazaguanine synthas e OS=Hydrogenobacter thermophilus (strain DSM 6534 / IA M 12695 / TK-6) OX=608538 GN=queE PE=3 SV=1
MLRSEVRTSTALSINEIYPSVQGEGLLIGKPCLFVRFQGCNLRCPWCDEPSALSFKRANTDLKELLQELQKYPQKHVVLTGGEPFAEPNLHLLVQELLCRGYSVQIETNGTLWNENLREVVSQVHITCSPKGVADWYVHPAVLSSAKELKFVVDHELCYNVIKRREFMPFLEEGLVVLQPEGNKTKFLQKALELQNLLLREGYTVRVVPQMHKLIGLK

SEQ ID NO: 30669 - protein, 212 aa, Hydrogenobaculum sp.
  misc_feature (1)..(212): tr|A0A2N7PZE0|A0A2N7PZE0_9AQUI 7-carboxy-7-deazaguanine synthase OS=Hydrogenobaculum sp. OX=2053560 GN=queE PE =3 SV=1
MINEIFYSIQGEGFLIGTPALFVRFQGCNLRCVWCDEKSALDFDKTAKSYAKALEEIETLITLHSPSLIVLTGGEPLLNEDFINIFSYFKSLNKTIQIETNATILKDDVETLLKTYAKTYITLSPKYISNYTIDSKFLDFDKNIELKIVVDEHLNESILEREHIRPFIEKGLLILQPLWENGSVKFLDKAIKLAEKFNARIIPQMHKLLGLK

SEQ ID NO: 30670 - protein, 212 aa, Hydrogenobaculum sp.
  misc_feature (1)..(212): tr|M1RJI2|M1RJI2_9AQUI 7-carboxy-7-deazaguanine synthas e OS=Hydrogenobaculum sp. HO OX=547144 GN=queE PE=3 SV= 1
MINEVFYSIQGEGFLIGTPALFVRFQGCNLRCVWCDEKSALDFDKTAKSYIEALEEIEDILAIHNPSLIVLTGGEPLLNEDFINIFSYFKSLDKTIQIETNATILKDDIETLLKTYAKTYITLSPKYISNYNIHTKFLAFDKNIELKIVVDEHLNEGILEREYIRPFVEKGLLVLQPLWENGSVKFIDKAIKLAEKFNARIIPQMHKLLGLK

SEQ ID NO: 30671 - protein, 210 aa, Hydrogenophaga sp.
  misc_feature (1)..(210): tr|A0A372EKL1|A0A372EKL1_9BURK 7-carboxy-7-deazaguanine synthase OS=Hydrogenophaga sp. LA-38 OX=2294117 GN=que E PE=3 SV=1
MAYSVKEIFYTLQGEGMNAGRPAVFCRFAGCNLWSGREADRAGAVCRFCDTDFVGTDGGGGGRFADAASLAGAVARAWTADAARRLVVLTGGEPLLQVDPALIEALHAQGFFIAVETNGTVAAPAGIDWLCVSPKQGAPLVQREGQEIKVVVPQPGLDLDALAALGFEHRLLQPMDGPSRAANARLAVALCLRDPRWRLSVQTHKALGIR

SEQ ID NO: 30672 - protein, 210 aa, Hydrogenophaga sp.
  misc_feature (1)..(210): tr|A0A1Q3R974|A0A1Q3R974_9BURK 7-carboxy-7-deazaguanine synthase OS=Hydrogenophaga sp. 70-12 OX=1895769 GN=que E PE=3 SV=1
MAYSVKEIFYTLQGEGMNAGRPAVFCRFAGCNLWSGREPDRAGAVCRFCDTDFVGTDGGGGGRFADAASLAGAVARAWTAGAARRLVVLTGGEPLLQVDPALIEALHARGFFVAVETNGTVAAPAGIDWLCVSPKQGAPLVQREGQEIKVVVPQPGLDLDALAALAFEHRLLQPMDGPSRAANARLAVAWCLRDPRWRLSVQTHKALGIR

SEQ ID NO: 30673 - protein, 205 aa, Hydrogenophilaceae bacterium
  misc_feature (1)..(205): tr|A0A1J4YSQ9|A0A1J4YSQ9_9PROT 7-carboxy-7-deazaguanine synthase OS=Hydrogenophilaceae bacterium CG1_02_62_390 OX=1805218 GN=queE PE=3 SV=1
MFFSLQGEGLRAGLPTVFVRLTGCPLRCGYCDTTYAFQGGQWFEIGAILAAVAGHPTRHVCVTGGEPLAQKASLDLMAALCDAGYDVALETSGALAIDAVDLRVSRIVDVKTPGSGEVDRNRWTNLDLLAERDEVKFVLVDEADYRWAAAIVSRYRIAERCPVLFSAAHGQLQPRDLAGWILRDGLPVRLQIQLHKFLWGEERGR

SEQ ID NO: 30674 - protein, 443 aa, Hydrogenophilales bacterium
  misc_feature (1)..(443): tr|A0A259GL51|A0A259GL51_9PROT 7-carboxy-7-deazaguanine synthase OS=Hydrogenophilales bacterium 17-61-76 OX=19 70523 GN=queE PE=3 SV=1
MKQVLSVLVVAGVSLAAPLHLAQAADMADINRTLPVAQQGTGAAQAGLAGEQSPVQQTPSVLNLLQEIETLKAEVARLRGLTEVQAHQLDTLDKRQTDLYADLDQRLTELAKQAQAAPVAAAPAAGSATPADAQAETAAYDAALKQFREDDFSAAIAEFKTFLKTYPDSALAPNAQYWIGYSYYALKDYKTSLAHQQKLLAVYPASAKVPHARGRSGKSPSGRAEVSMSDALTLRLTEVFLSLQGETSRAGLPTVFVRLTGCPLRCRWCDTPYSFQGGETVTLPSLLAQIAALGVSTVCVTGGEPLAQKNCPALLTALCDAGYSVSLETSGALDVSQVDPRVSRIVDIKAPESGEAARNRWENLVHLTPNDEIKFVLANRADYDWAREVIHAQNLTQISPVLLSPVQGELPPAQLADWVLADRLPVRMQLQLHKILWGNAPGK

SEQ ID NO: 30675 - protein, 227 aa, Hydrogenophilales bacterium
  misc_feature (1)..(227): tr|A0A1G0NA55|A0A1G0NA55_9PROT 7-carboxy-7-deazaguanine synthase OS=Hydrogenophilales bacterium RIFOXYD1_FULL_ 62_11 OX=1798415 GN=queE PE=3 SV=1
MNRQQPRTQADESTTTTLRLTEVFLSLQGETSRAGLPTVFVRLTGCPLRCRWCDTPYSFQGGETVTLNALLAQIAAFGVPTVCVTGGEPLAQKSCPALLTALCDAGYSVSLETSGALDVSPVDPRVSRIVDIKAPESGEEARNRWENLAHLTPNDEIKFVLASRADYDWAREVIRAQNLIRICPVLVSPVQGELQPAQLADWVLADRLPVRMQLQLHKILWGNTPGK

SEQ ID NO: 30676 - protein, 215 aa, Hydrogenophilus thermoluteolus
  misc_feature (1)..(215): tr|A0A2Z6E0B1|A0A2Z6E0B1_HYDTE 7-carboxy-7-deazaguanine synthase OS=Hydrogenophilus thermoluteolus OX=297 GN=q ueE PE=3 SV=1
MSEALLRVSEIFTSIQGESSRVGLPTTFVRLTGCPLRCHWCDTAYAFQGGLRQTVSEVVAEVRARGVRTVCVTGGEPLAQPAVHQLLRALADAGYDVSLETSGALPIADVDPRVAVVMDLKAPGSGEHEKNLWQNLVALKPTDEIKIVIADRADYEWAKMVIAEKRFTERCAVLLSPVANALPPHQLAEWIVADKLPVRFQLQLHKVLWGEERGR

SEQ ID NO: 30677 - protein, 214 aa, Hydrogenothermus marinus
  misc_feature (1)..(214): tr|A0A3M0BL16|A0A3M0BL16_9AQUI 7-carboxy-7-deazaguanine synthase OS=Hydrogenothermus marinus OX=133270 GN=queE PE=3 SV=1
MAKIKIIEIFDSIEGEGSLVGYPVSFIRLEGCNLRCSWCDTKYSYDTENYKLMDINEILKVIKFFKNKKVCLTGGEPLYNEGFDLLFKTLLEEGYFVIIETNGTLFRNIISVLYKRYNKNIHIVCSPKPFNNFYINDKLLPYIKELKFVVDNLLKIEDILKFKDIHLNDIPIILQPEDNKKEMFKKSRDLQKKLLEKNIEVRIIPQYHKIFEVK

SEQ ID NO: 30678 - protein, 210 aa, Hydrogenothermus sp.
  misc_feature (1)..(210): tr|A0A432REC8|A0A432REC8_9AQUI 7-carboxy-7-deazaguanine synthase OS=Hydrogenothermus sp. OX=2231113 GN=queE PE =3 SV=1
MEKIKVIEIFSSIEGEGSLIGYPVTFIRLEGCNLRCVWCDTKYSYDTTDYMELTLDEILYTIRNYKNKKVCITGGEPLFNEGFDILLETLLKEEFFVIVETNGTLFRESIENLYTVYNNQIHIVCSPKPFSDYKVDSKLKNYISEIKLIVDEFLTEDIVKNFLSFPVILQPEGNKKRFFQKALDIQKLILEKYQQEVRVIPQIHKIFDLK

SEQ ID NO: 30679 - protein, 218 aa, Hydrogenovibrio crunogenus
  misc_feature (1)..(218): tr|A0A4P7NYF0|A0A4P7NYF0_9GAMM 7-carboxy-7-deazaguanine synthase OS=Hydrogenovibrio crunogenus OX=39765 GN=que E PE=3 SV=1
MGYRIKEAFYSLQGEGFHSGRPAIFCRFTNCNLWTGREADRSDAVCQFCDTDFLGTDGQNGGSFKDADSLAKHLLALWPTDKNDQACPHPFAVLTGGEPLLQVDQTLVDVFHQYGFEIAIETNGTQKAPDNIDWICVSPKANAPLILDSGDELKLVYPQAALPPEQVENLDFKHFYLQAMDDADPDTQAKNLKATLAYCLKHPQWKLSLQTHKILGVD

SEQ ID NO: 30680 - protein, 218 aa, Hydrogenovibrio crunogenus
  misc_feature (1)..(218): tr|Q31HI3|Q31HI3_HYDCU 7-carboxy-7-deazaguanine synthas e OS=Hydrogenovibrio crunogenus (strain XCL-2) OX=31702 5 GN=queE PE=3 SV=1
MGYRIKEAFYSLQGEGFHSGRPAIFCRFTNCNLWTGREADRSNAVCQFCDTDFLGTDGQNGGSFKDADSLAKHLLALWPTDKNDQACPHPFVVLTGGEPLLQVDQTLIDVFHQHGFEIAVETNGTQKAPKNIDWICVSPKANAPLILDSGDELKLVYPQTELRPKQVETLNFKHFYLQAMDDADPDIQEKNLKETLAYCLKHPQWKLSLQTHKILGVD

SEQ ID NO: 30681 - protein, 214 aa, Hydrogenovibrio marinus
  misc_feature (1)..(214): tr|A0A066ZPR5|A0A066ZPR5_HYDMR 7-carboxy-7-deazaguanine synthase OS=Hydrogenovibrio marinus OX=28885 GN=queE P E=3 SV=1
MSYRIKEAFYSLQGEGFHTGRPAIFCRFSHCNLWTGKEADRETAVCQFCDTDFIGENGQNGGRFKDADALLKHLLKLWPTNTDVHPFIVLTGGEPLLQVDKALIDTFHTQQVEIAVETNGTLKAPAGLDWICVSPKANAPIIQDIGHEMKLVYPQKERSPEDVENLDFKFFYLQPMADTDPAVTEKNRRAAVDYCLHHPQWKLSLQTHKILNID

SEQ ID NO: 30682 - protein, 217 aa, Hydrogenovibrio sp.
  misc_feature (1)..(217): tr|A0A2I2A496|A0A2I2A496_9GAMM 7-carboxy-7-deazaguanine synthase OS=Hydrogenovibrio sp. SC-1 OX=2065820 GN=que E PE=3 SV=1
MNYRIKEAFYSLQGEGKHSGRPAIFCRFSHCNLWTGKEADRAMATCQFCDTDFVGTDGQNGGVFATAESLVNHLLQLWPTQNDQAWSNPFVVLTGGEPLLQVDETLINHLHQQHFEVAVETNGTLNPPAGLDWICVSPKANAPLLLTSGDELKLVYPQTDLLPEKVAQLDFKYFYLQPMDETDPVKQKANQQAAIRYCLDHPQWQLSLQTHKLLGID

SEQ ID NO: 30683 - protein, 223 aa, Hydrogenovibrio thermophilus
  misc_feature (1)..(223): tr|A0A410H264|A0A410H264_9GAMM 7-carboxy-7-deazaguanine synthase OS=Hydrogenovibrio thermophilus OX=265883 GN= queE PE=3 SV=1
MGYRIKEAFYSLQGEGFHSGRPAIFCRFSNCNLWTGREADRAQAVCQFCDTDFLGTDGQNGGQFKTADDLAEHLLTLWPKTNPTDKEPAHAHPHPFVVLTGGEPLLQVDQTLVDSFHEHGFEIAIETNGTQKAPQGIDWVCVSPKANAPLILDEGNELKLVYPQADCPPEKVAGLPFDHFYLQAMDDADPTIQARNLKATLDYCLAHPQWKLSLQTHKILGVD

SEQ ID NO: 30684 - protein, 208 aa, Hydromonas duriensis
  misc_feature (1)..(208): tr|A0A4R6YB30|A0A4R6YB30_9BURK 7-carboxy-7-deazaguanine synthase OS=Hydromonas duriensis OX=1527608 GN=queE PE =3 SV=1
MYTVKEIFYTLQGEGAQAGRAAVFCRFSGCNLWNGREDDRLISLCTFCDTDFIGTGQDGGKFATAEALASRIGSTWKGEGGVPYVVFTGGEPLLQLDKALIELMHGMGFEVGVESNGTIAAPTGIDWLCVSPKGSAKLVQTSGQELKLVYPQLNAQPELFENLDFKHFYIQPLDDRAGINNTQVCIEYCMAHPQWQLSLQTHKLTGIR

SEQ ID NO: 30685 - protein, 208 aa, Hydromonas sp.
  misc_feature (1)..(208): tr|A0A345DD82|A0A345DD82_9BURK 7-carboxy-7-deazaguanine synthase OS=Hydromonas sp. F02 OX=2268024 GN=queE PE=3 SV=1
MYTVKEIFYTLQGEGAQAGRSAVFCRFAGCNLWSGREQDRATAQCTFCDTDFIGVNEDGGKFTTAAALAQRISDTWLGTGGVPYVVFTGGEPLLQLDDGLIAAMHAVGFEVGVESNGTLPAPAGIDWLCISPKGSNALVQMCGQELKLVYPQLNALPESFATLDFEHFYLQPMDSAAQQSNTAACIRYCMAHPQWQLSLQTHKLSGIR

SEQ ID NO: 30686 - protein, 207 aa, Hydrotalea sandarakina
  misc_feature (1)..(207): tr|A0A2W7RRK8|A0A2W7RRK8_9BACT 7-carboxy-7-deazaguanine synthase OS=Hydrotalea sandarakina OX=1004304 GN=queE PE=3 SV=1
MQQLPVMESFYTLQGEGYYQGHAAYFIRLGGCDVGCVWCDVKESWDAQKHPLFTIEAIVQKAIETVTEKAGSTKNVLCVITGGEPLLHPLDELTEALQKAGFLTNIETSGSSPLSGHWNWICLSPKKFKAPLPEIVPLANELKVVIFNQHDFKWAEQFAKQTNPNCKLYLQPEWDKAATVTPLIIEYIEQNPQWELSLQIHKYINVP

SEQ ID NO: 30687 - protein, 201 aa, Hydrotalea sp.
  misc_feature (1)..(201): tr|A0A4Q0AWS5|A0A4Q0AWS5_9BACT 7-carboxy-7-deazaguanine synthase OS=Hydrotalea sp. AMD OX=2501297 GN=queE PE=3 SV=1
MESFYTLQGEGYYQGHAAYFIRLGGCDVGCVWCDVKESWDAAKHPLYTIDAIVQKAVEEVTKQAGAVHNALCVVTGGEPLLHPLDALTTALQNVGFVTNIETSGSSPLSGNWNWICLSPKKFKAPLPEIVSLASELKVVIFNQHDFKWAETYARQTNPNCKLYLQPEWDKAATVTPLIIEYIQQHPQWELSLQLHKYIHVP

SEQ ID NO: 30688 - protein, 210 aa, Hyella patelloides
  misc_feature (1)..(210): tr|A0A563VTR1|A0A563VTR1_9CYAN 7-carboxy-7-deazaguanine synthase OS=Hyella patelloides LEGE 07179 OX=945734 GN =queE PE=3 SV=1
MLNEMTNAIAEKITTYPIVETFHSVQGEGNYTGVSAFFLRLGGCDVACPWCDTKESWNAKPHPKRSVLELAEEVKQAQPAIAIITGGEPLLHNLTPLTTAIREQNIPVHLETSGSHPFSGEFDWVTFSPKQFKAPHSSIYPHVNELKVVIVNEYDLKWAEQQSALVPPETVKYLQPEWNTPQSKDLIFKYILKNPQWRISLQTHKLLQVR

SEQ ID NO: 30689 - protein, 212 aa, Hymenobacter actinosclerus
  misc_feature (1)..(212): tr|A0A1I0EBU4|A0A1I0EBU4_9BACT 7-carboxy-7-deazaguanine synthase OS=Hymenobacter actinosclerus OX=82805 GN=que E PE=3 SV=1
MLHQLPLTPATQAATTLPVMEQFYTIQGEGYNTGRAAYFIRLGGCDVGCVWCDVKESWPLDAHPRHALPDLVAAVTAHPGRNVVITGGEPLMHELGPLTAALQQAGCQTWIETSGAYPLSGNWNWICVSPKKFKAPLPAVLAAAHELKIVVFNKSDFAWAEEHAALVGPDCRLYLQPEWSKAAAMTPLIVEYVKNNPRWQVSLQTHKYLDIP

SEQ ID NO: 30690 - protein, 210 aa, Hymenobacter amundsenii
  misc_feature (1)..(210): tr|A0A246FKI7|A0A246FKI7_9BACT 7-carboxy-7-deazaguanine synthase OS=Hymenobacter amundsenii OX=2006685 GN=queE PE=3 SV=1
MSAAAPAEPAAAASLPVMEQFYTIQGEGYNTGRAAYFIRLGGCDVGCVWCDVKESWPIDAHPRHTLPDLVAAVTAHPGRNVVVTGGEPLMHELGPLTAALQAAGCQTWIETSGAYPLSGNWNWICVSPKKFKAPLPTVLAVAHELKIIVFNKSDFAWAEEHAALVGPNCRLYLQPEWSKASAMTPLIVDYVKDHPRWQVSLQTHKYLDIP

SEQ ID NO: 30691 - protein, 193 aa, Hymenobacter aquaticus
  misc_feature (1)..(193): tr|A0A4Z0QAD0|A0A4Z0QAD0_9BACT 7-carboxy-7-deazaguanine synthase OS=Hymenobacter aquaticus OX=1867101 GN=queE PE=3 SV=1
MEQFYTIQGEGYNTGRAAYFLRLGGCDVGCVWCDVKESWDADAHPRVAIADMVAAVTAHPGRNVVITGGEPLMHDLTELTAALHAAGCQNWIETSGAYPLSGQWDWICVSPKKFKAPLPEVVRQAHELKIIIFNKSDFAWAEQHAALVGEHTRLYLQPEWSKAPQMMPLIVDYVKENPRWQVSLQTHKYLDIP

SEQ ID NO: 30692 - protein, 216 aa, Hymenobacter chitinivorans
  misc_feature (1)..(216): tr|A0A2M9BQW5|A0A2M9BQW5_9BACT 7-carboxy-7-deazaguanine synthase OS=Hymenobacter chitinivorans DSM 11115 OX=11 21954 GN=queE PE=3 SV=1
MLHVLPLTSAPLAAEPAVAALPLMEQFYTIQGEGYNTGRAAYFLRLGGCDVGCVWCDVKESWDAEAHPRVTIADMVAAATAHAGRNVVITGGEPLMHDLTQLTAALHAAGCQNWIETSGAYPLTGEWDWICVSPKKFKAPLPSVLQQAHELKIIVFNKSDFQWAEQHAALVGEHTRLYLQPEWSKAPQMMPLIVDYVKENPRWQVSLQTHKYLDIP

SEQ ID NO: 30693 - protein, 218 aa, Hymenobacter coccineus
  misc_feature (1)..(218): tr|A0A1G1TD85|A0A1G1TD85_9BACT 7-carboxy-7-deazaguanine synthase OS=Hymenobacter coccineus OX=1908235 GN=queE PE=3 SV=1
MPAVTDLLVALPIVCQPTAGALLPVMEQFYTIQGEGFNTGRAAYFIRLGGCDVGCVWCDVKESWDANAHPRQAVAALVAAAAAYPGRNVVITGGEPLMHDCAPLTGALQAAGFQTWIETSGAHPLSGRWDWICVSPKKFKAPRPDVLAQADELKIIVFNDSDFAWAEEHAALVPATTRLYLQPEWSRAARMTPALIDYVKAHPRWQVSLQTHKYLDIP

SEQ ID NO: 30694 - protein, 207 aa, Hymenobacter daecheongensis
  misc_feature (1)..(207): tr|A0A1M6JUL9|A0A1M6JUL9_9BACT 7-carboxy-7-deazaguanine synthase OS=Hymenobacter daecheongensis DSM 21074 OX=1 121955 GN=queE PE=3 SV=1
MPLAAEPAVAALPLMEQFYTIQGEGYNTGRAAYFLRLGGCDVGCVWCDVKESWDAAAHPRVAIADMVAAVVQHPGRNVVITGGEPLMHDLTDLTAALHAAGCQNWIETSGAYPLSGAWDWICVSPKKFKAPLPDVLRQAHELKIIVFNQSDFKWAEEHAAQVGGHTRLYLQPEWSRAAQMTPLIVDYVKKNPRWQVSLQTHKYLDIP

SEQ ID NO: 30695 - protein, 193 aa, Hymenobacter elongatus
  misc_feature (1)..(193): tr|A0A4Z0PGX4|A0A4Z0PGX4_9BACT 7-carboxy-7-deazaguanine synthase OS=Hymenobacter elongatus OX=877208 GN=queE P E=3 SV=1
MEQFYTIQGEGYNTGRAAYFLRLGGCDVGCVWCDVKESWDVDAHPRVTIADMVAAVTAYPGRNVVITGGEPLMHDLTQLTAALHEAGCRNWIETSGAYPLSGQWDWICVSPKKFKAPLPSVLQQAHELKIIVFNKSDFTWAEQHAALVGEHTRLYLQPEWSKAAQMTPLIVDYVKQHPRWQVSLQTHKYLDIP

SEQ ID NO: 30696 - protein, 193 aa, Hymenobacter gelipurpurascens
  misc_feature (1)..(193): tr|A0A212TCM2|A0A212TCM2_9BACT 7-carboxy-7-deazaguanine synthase OS=Hymenobacter gelipurpurascens OX=89968 GN= queE PE=3 SV=1
MEQFYTIQGEGYNTGRAAYFVRLGGCDVGCVWCDVKESWDADAHPRVSIPDIVATTTAHAGRNVVITGGEPLMHNLGHLTAALHAAGCQNWIETSGAYPLSGEWDWICVSPKKFKAPLPEVLAAAHELKIIVFNKSDFAWAEQHAALVSPSCRLYLQPEWSKVSQMMPLIVDYVKENPKWQVSLQTHKFLDIP

SEQ ID NO: 30697 - protein, 222 aa, Hymenobacter glacialis
  misc_feature (1)..(222): tr|A0A1G1T7P5|A0A1G1T7P5_9BACT 7-carboxy-7-deazaguanine synthase OS=Hymenobacter glacialis OX=1908236 GN=queE PE=3 SV=1
MISVNILSSEIVAPIGAVPASPAGVMLPVMEQFYTIQGEGYNTGRAAYFIRLGGCDVGCVWCDVKESWDADAHPRQAVAELVAAVLAYPGRDVVITGGEPLMHELGPLTAALHAAGCRTWLETSGAHPLSGTWDWICLSPKKFKAPLPEVLATAHELKVVVFNGHDFVWAEEHAALVPATTRLYLQPEWSRAARMTPELVEYVKQHPRWQVSLQTHKYLDIP

SEQ ID NO: 30698 - protein, 193 aa, Hymenobacter gummosus
  misc_feature (1)..(193): tr|A0A3S0J6S5|A0A3S0J6S5_9BACT 7-carboxy-7-deazaguanine synthase OS=Hymenobacter gummosus OX=1776032 GN=queE P E=3 SV=1
MEQFYTIQGEGANAGRAAYFIRLGGCDVGCHWCDVKESWDAGAHPRLSIASLVEAAAAHPGRNVVITGGEPLMYDLGPLTEALHAAGMQTWMETSGAHPLSGQWDWICVSPKKFKAPLPEVLRNAHELKVVVFNKSDFAWAEQHAAQVGPECRLFLQPEWGKAAQVTPLIIDYVKQHPRWQVSLQTHKYLDIP

SEQ ID NO: 30699 - protein, 222 aa, Hymenobacter lapidarius
  misc_feature (1)..(222): tr|A0A1G1STW5|A0A1G1STW5_9BACT 7-carboxy-7-deazaguanine synthase OS=Hymenobacter lapidarius OX=1908237 GN=queE PE=3 SV=1
MISVNILSSEIVAPNGAVPATAAGVMLPVMEQFYTIQGEGYNTGRAAYFIRLGGCDVGCVWCDVKDSWDADAHPRQSVAQLVAAVLAYPGRDVVITGGEPLMHELGPLTAALHAAGCRTWLETSGAHPLSGTWDWICLSPKKFKAPLPEVLAVAHELKVVVFNGHDFIWAEEHAALVPATTRLYLQPEWSRAARMTPELVEYVKQHPRWQVSLQTHKYLDIP

SEQ ID NO: 30700 - protein, 216 aa, Hymenobacter mucosus
  misc_feature (1)..(216): tr|A0A238V9K8|A0A238V9K8_9BACT 7-carboxy-7-deazaguanine synthase OS=Hymenobacter mucosus OX=1411120 GN=queE PE =3 SV=1
MLHELPVTSAAPTSGAPALALPLMEQFYTIQGEGYNTGRAAYFVRLGGCDVGCVWCDVKESWDVDAHPRVAVADIVTMATAHAGRNVVITGGEPLMHNLRPLTTALQTAGCQTWIETSGAYPLSGQWDWICVSPKKFKAPLPEVLAAAHELKIIIFNKSDFAWAEQHAAQVSPTCRLYLQPEWSKAPQMMPLIVDYVKENPKWQVSLQTHKFLDIP

SEQ ID NO: 30701 - protein, 218 aa, Hymenobacter nivis
  misc_feature (1)..(218): tr|A0A502GUE8|A0A502GUE8_9BACT 7-carboxy-7-deazaguanine synthase OS=Hymenobacter nivis OX=1850093 GN=queE PE=3 SV=1
MSAVTDLLAALPILHQPTTGALLPVMEQFYTIQGEGFNTGRAAYFIRLGGCDVGCVWCDVKESWDADAHPRQAVGALVAAAAAFPGRNVVITGGEPLMHDCAPLTGALQAAGFQTWIETSGAHPLSGSWDWICVSPKKFKAPRPDVLAHADELKIIVFNDSDFAWAEEHAALVPATTRLYLQPEWSRAARMTPALIDYVKAHPRWQVSLQTHKYLDIP

SEQ ID NO: 30702 - protein, 218 aa, Hymenobacter nivis
  misc_feature (1)..(218): tr|A0A2Z3GDT4|A0A2Z3GDT4_9BACT 7-carboxy-7-deazaguanine synthase OS=Hymenobacter nivis OX=1850093 GN=queE PE=3 SV=1
MSAVTDLLAALPILHTPITGVILPVMEQFYTIQGEGFNAGRAAYFIRLGGCDVGCVWCDVKESWDADAHPRQAVAELVAAAAAHPGRNVVITGGEPLMHNCGPLTGALQAAGFQTWIETSGAHPLSGRWDWICVSPKKFRAPRPDVLAHADELKIIVFNDSDFAWAEEHAALVPATTRLYLQPEWSRAARMTPALIDYVKAHPRWQVSLQTHKYLDIP

SEQ ID NO: 30703 - protein, 193 aa, Hymenobacter perfusus
  misc_feature (1)..(193): tr|A0A428K4C6|A0A428K4C6_9BACT 7-carboxy-7-deazaguanine synthase OS=Hymenobacter perfusus OX=1236770 GN=queE P E=3 SV=1
MEQFYTIQGEGYNTGRAAYFIRLGGCDVGCVWCDVKESWPIDAHPRQSIAHLVAAATADAGRNVVITGGEPLMHDLAPLTAALHEAGCRNWIETSGAYPLSGQWDWICVSPKKFKAPLPSVLAAAHELKIIVFNKSDFAWAEQHAALVGPDCRLYLQPEWSKASEMMPLIVDYVKAQPRWQVSLQTHKFLDIP

SEQ ID NO: 30704 - protein, 193 aa, Hymenobacter psychrophilus
  misc_feature (1)..(193): tr|A0A1H3CQJ7|A0A1H3CQJ7_9BACT 7-carboxy-7-deazaguanine synthase OS=Hymenobacter psychrophilus OX=651662 GN=qu eE PE=3 SV=1
MEQFYTIQGEGYNTGRAAYFIRLGGCDVGCVWCDVKESWPLDAHPRHALPDLVAAVTAHPGRNVVVTGGEPLMHELGPLTAALQAAGCQTWIETSGAYPLSGNWNWICVSPKKFKAPLPAVLAAAHELKIVVFNKSDFAWAEEHAALVGPECRLYLQPEWSKASAMTPLIVDYVKAHPHWQVSLQTHKYLDIP

SEQ ID NO: 30705 - protein, 210 aa, Hymenobacter psychrotolerans
  misc_feature (1)..(210): tr|A0A1M6SM05|A0A1M6SM05_9BACT 7-carboxy-7-deazaguanine synthase OS=Hymenobacter psychrotolerans DSM 18569 OX= 1121959 GN=queE PE=3 SV=1
MSAASAAAEVPAPALPLMEHFYTIQGEGYNTGRAAYFIRLGGCDVGCVWCDVKESWDAEKHPRVAVSDLVALATAHIGRNVVITGGEPLMYNLGPLTQALHAAGCQNWIETSGAYPLTGGWDWICVSPKKFKAPLPETLRHAHELKIVVFNKSDFAWAEEHAAQVGPECRLYLQPEWSKAPQMMPLIVEYVKNNPKWQVSLQTHKFLDIP

SEQ ID NO: 30706 - protein, 201 aa, Hymenobacter rigui
  misc_feature (1)..(201): tr|A0A3R9PT21|A0A3R9PT21_9BACT 7-carboxy-7-deazaguanine synthase OS=Hymenobacter rigui OX=334424 GN=queE PE=3 SV=1
MAAPELPVMEQFYTIQGEGYNTGRAAYFIRLGGCDVGCVWCDVKESWPLDAHPRQALSSLVHAVTQHPGRNVVITGGEPLMHDLGPLTAALHEAGCQNWIETSGAYPLSGSWDWICVSPKKFKAPLPSVLAAAHELKIIVFNKSDFAWAEQHAALVGPNCRLYLQPEWSKSADMMPLIVEYVKSHPQWQVSLQTHKFLDIP

SEQ ID NO: 30707 - protein, 209 aa, Hymenobacter roseosalivarius
  misc_feature (1)..(209): tr|A0A1W1W4N8|A0A1W1W4N8_9BACT 7-carboxy-7-deazaguanine synthase OS=Hymenobacter roseosalivarius DSM 11622 OX= 645990 GN=queE PE=3 SV=1
MAGSMPVASSTAALPLMEQFYTIQGEGYNTGRAAYFIRLGGCDVGCHWCDVKESWDASQHPRVALADMVAAVTAHPGRNVVVTGGEPLMHDLTQLTTALKAAGCQSWLETSGAYPLTGDWDWICVSPKKFKAPLPSVLHLAHELKVVVFNKSDFVWAEEHAAQVGAHTRLYLQPEWSRAPQMTPLIVDYVKQNPRWQVSLQTHKYLDIP

SEQ ID NO: 30708 - protein, 193 aa, Hymenobacter rubripertinctus
  misc_feature (1)..(193): tr|A0A418R8H1|A0A418R8H1_9BACT 7-carboxy-7-deazaguanine synthase OS=Hymenobacter rubripertinctus OX=2029981 GN =queE PE=3 SV=1
MEQFYTIQGEGYNTGRAAYFIRLGGCDVGCVWCDVKESWPLDAHPRQAVADLVAAATAHPGRNIVITGGEPLMHDLAPLTVALHAAGCQNWIETSGAYPLSGNWNWICVSPKKFKAPLPSVLAAAHELKIIVFNKSDFAWAEEHAALVGPECRLYLQPEWSKAPAMMPLIVDYVKTHPRWQVSLQTHKFLDIP

SEQ ID NO: 30709 - protein, 197 aa, Hymenobacter sedentarius
  misc_feature (1)..(197): tr|A0A0U3SJ06|A0A0U3SJ06_9BACT 7-carboxy-7-deazaguanine synthase OS=Hymenobacter sedentarius OX=1411621 GN=que E PE=3 SV=1
MLPVMEQFYTIQGEGYNTGRAAYFIRLGGCDVGCHWCDVKESWDADAHPRQSIAQLVEAVLAHPGRDVVITGGEPLMHELGPLTAALQAAGCRTWLETSGAHPLSGTWDWICLSPKKFKAPLPDVLAAAHELKVVVFNGHDFAWAEEHAALVPASTRLYLQPEWSRAARMTPELVEYVKQHPRWQVSLQTHKYLDIP

SEQ ID NO: 30710 - protein, 193 aa, Hymenobacter sp.
  misc_feature (1)..(193): tr|A0A4Z0QIZ9|A0A4Z0QIZ9_9BACT 7-carboxy-7-deazaguanine synthase OS=Hymenobacter sp. 9PBR-1 OX=2563114 GN=queE PE=3 SV=1
MEQFYTIQGEGYNTGRAAYFLRLGGCDVGCVWCDVKESWDADAHPRVTITDMVAAATAHAGRNVVITGGEPLMHDLTQLTAALHAAGCQNWIETSGAYPLTGEWDWICVSPKKFKAPLPSVLAQAHELKIIVFNKSDFQWAEQHAALVGEHTRLYLQPEWSKAPQMMPLIVDYVKENPRWQVSLQTHKYLDIP

SEQ ID NO: 30711 - protein, 206 aa, Hymenobacter sp.
  misc_feature (1)..(206): tr|A0A5B8A5X9|A0A5B8A5X9_9BACT 7-carboxy-7-deazaguanine synthase OS=Hymenobacter sp. 17J68-5 OX=2502781 GN=que E PE=3 SV=1
MLSSGTGALALPLMEQFYTIQGEGYNTGRAAYFVRLGGCDVGCHWCDVKESWDADQHPRVAIPEIVEAATSYPGRNVVITGGEPLMHDLTSLTHALHEAGCQTWLETSGAHPLSGQWDWICLSPKKFKAPLSDVLRQAHELKVVIFNKSDFAWAEEHAAQVSSDCRLYLQPEWGRAAQMTPLIVDYVKQNPRWQVSLQTHKYLDIP

SEQ ID NO: 30712 - protein, 193 aa, Hymenobacter swuensis
  misc_feature (1)..(193): tr|W8F7D6|W8F7D6_9BACT 7-carboxy-7-deazaguanine synthas e OS=Hymenobacter swuensis DY53 OX=1227739 GN=queE PE=3 SV=1
MEQFYTIQGEGYNTGRAAYFIRLGGCDVGCVWCDVKESWPIDAHPRQAIARLVAAATADAGRNVVITGGEPLMHDLAPLTAALHEAGCRNWIETSGAYPLSGQWDWICVSPKKFKAPLPSVLAAAHELKIIVFNKSDFAWAEQHAALVRPDCRLYLQPEWSKAPEMMPLIVEYVKNNPQWQVSLQTHKFLDIP

SEQ ID NO: 30713 - protein, 193 aa, Hymenobacter wooponensis
  misc_feature (1)..(193): tr|A0A4Z0MNM6|A0A4Z0MNM6_9BACT 7-carboxy-7-deazaguanine synthase OS=Hymenobacter wooponensis OX=1525360 GN=que E PE=3 SV=1
MEQFYTIQGEGFNTGRAAYFVRLGGCDVGCVWCDVKESWDADAHPKVSIPAIVASATAHAGRNVVITGGEPLMYNLGPLTAALHAAGCQNWIETSGAYPLSGEWDWICVSPKKFKAPLPEVLAAAHELKIIVFNKSDFAWAEQHAALVSPGCRLYLQPEWSKAPQMMPLIVDYVKENPKWQVSLQTHKFLDIP

SEQ ID NO: 30714 - protein, 234 aa, Hyphomicrobiaceae bacterium
  misc_feature (1)..(234): tr|A0A5C7M4Q9|A0A5C7M4Q9_9RHIZ 7-carboxy-7-deazaguanine synthase OS=Hyphomicrobiaceae bacterium OX=2015799 GN= queE PE=3 SV=1
MNQQPIEKRISRDDGILSVHSIFYTIQGEGPFCGTPAVFIRLAGCNLQCPACDTDYTSSRWESGPLGILDKVREQSAYGLVVITGGEPFRQDLAKLLNVLTDAGYYVQIETNGTLEPADVPYSLVTDIRTGVYVVCSPKAGKVHPRIAEVACCYKYVLSQDSIHADGLPLRALEHTASPFVARPPKNWHRPIYVQPVDSKDETTNGQHLKAAIDSCMKNGYILQLQIHKLIDME

SEQ ID NO: 30715 - protein, 209 aa, Hyphomicrobiaceae bacterium
  misc_feature (1)..(209): tr|A0A5C7M0H8|A0A5C7M0H8_9RHIZ 7-carboxy-7-deazaguanine synthase OS=Hyphomicrobiaceae bacterium OX=2015799 GN= queE PE=3 SV=1
MTYAVKEIFYTLQGEGANAGRPAVFCRFSGCNLWSGREEDRYTAVCQFCDTDFVGINGVRGGNYRAEALAAVATGLWPVGKCGRFIVLTGGEPLLQVDKALLDILHANSFTVAVETNGTKIPPEGIDWLCVSPKAGTNLVITVGDELKLVFPQPTAPPAKFANLQFKHFFLQPMAGPAQTAHTNAAVRYCLAHPQWHLSVQTHKILGIP

SEQ ID NO: 30716 - protein, 208 aa, Hyphomicrobium denitrificans
  misc_feature (1)..(208): tr|D8JYX5|D8JYX5_HYPDA 7-carboxy-7-deazaguanine synthas e OS=Hyphomicrobium denitrificans (strain ATCC 51888 / DSM 1869 / NCIB 11706 / TK 0415) OX=582899 GN=queE PE=3 SV=1
MYAVKEIFYTLQGEGTNAGRPAVFCRFAGCNLWTGREVDRAKAVCQFCDTDFVGTDGEGGGRFRTADDLARACRAACGSDGDMLVVLTGGEPMLQVDQELVDALHARGFTIAIETNGTLPVLETIDWICVSPKAGSQLQQKHGHELKLVYPQEGVDPADYADLAFQTRFLQPMDGATREANTQAAVAYCKANPGWRLSLQTHKLLGIP

SEQ ID NO: 30717 - protein, 208 aa, Hyphomicrobium denitrificans
  misc_feature (1)..(208): tr|N0BB95|N0BB95_9RHIZ 7-carboxy-7-deazaguanine synthas e OS=Hyphomicrobium denitrificans 1NES1 OX=670307 GN=qu eE PE=3 SV=1
MYSVKEIFYTLQGEGANAGRPAVFCRFAGCNLWTGREADRAKAICQFCDTDFVGTDGDGGGRFQAADAVARACRAACLSDGEMLVVLTGGEPMLQVDQELVDALHASGFTVAIETNGTLPVLDTIDWICVSPKAGSELKQRHGQELKLVYPQDGIDPAQYLDLAFEQRFLQPMDGPQREANTQAAVAYCKANPAWRLSLQTHKLLGIP

SEQ ID NO: 30718 - protein, 209 aa, Hyphomicrobium facile
  misc_feature (1)..(209): tr|A0A1I7NUW9|A0A1I7NUW9_9RHIZ 7-carboxy-7-deazaguanine synthase OS=Hyphomicrobium facile OX=51670 GN=queE PE= 3 SV=1
MYAIKEIFYTLQGEGANAGTPAVFCRFAGCNLWTGREQDRAKAVCQFCDTDFVGMDGEGGGRFETADALADACRQAAPASNHSILVVLTGGEPMLQVDQELVDALHARGFRIAIETNGTLPVLETIDWICVSPKVGSDLKQLHGHELKLVFPQEGGDPARYLELDFEERFLQPMDGPDQRANTLAAIAYCKANPAWRLSVQTHKILGIP

SEQ ID NO: 30719 - protein, 209 aa, Hyphomicrobium nitrativorans
  misc_feature (1)..(209): tr|V5SFI5|V5SFI5_9RHIZ 7-carboxy-7-deazaguanine synthas e OS=Hyphomicrobium nitrativorans NL23 OX=1029756 GN=qu eE PE=3 SV=1
MYAVKEIFYTLQGEGANAGRAAVFCRFAGCNLWSGREKDRLSAACDFCDTDFVGTDGEGGGKYAHAHLLVEAVAAAWQGGDAERFVVLTGGEPALQVDDALIDGLHRQGFVIAVETNGTLPLPAGIDWICVSPKAGNDLAQTSGDELKLVYPQEGLVPESLLGLDFPRRYLSPMDGPRLAENTAAAVAYVKAHPIWRLSVQTHKRIGIP

SEQ ID NO: 30720 - protein, 209 aa, Hyphomicrobium sp.
  misc_feature (1)..(209): tr|A0A258KYF9|A0A258KYF9_9RHIZ 7-carboxy-7-deazaguanine synthase OS=Hyphomicrobium sp. 32-62-53 OX=1970390 GN= queE PE=3 SV=1
MYQVKEIFYTLQGEGANAGTPAVFCRFSGCNLWSGREEDRAGAKCRFCDTDFVGTDGPGGGKFETADALARACRAAVTASYGPAMVVLTGGEPMLQVDQDLIDALHGRGFSIAIETNGTLAVPDAIDWVCVSPKAGQPLVQLWGDELKLVYPQVGIDPAQYQLLEFEHRFLQPMDGPDQAANTLAAIAYCKANPPWRLSVQTHKVLGIP

SEQ ID NO: 30721 - protein, 210 aa, Hyphomicrobium sp.
  misc_feature (1)..(210): tr|F8J6L3|F8J6L3_HYPSM 7-carboxy-7-deazaguanine synthas e OS=Hyphomicrobium sp. (strain MC1) OX=717785 GN=queE PE=3 SV=1
MYAVKEIFYTLQGEGANAGTPAVFCRFAGCNLWSGREQDRAKATCQFCDTDFVGTDGPGGGRFDTAEVLARACRDAAMPTTDSPKFVVLTGGEPMLQVDQDLVDALHAEGFRIAMETNGTLPALDTIDWICVSPKAGADLKQRHGHELKLVFPQTGIDPAGYLDLAFEQRFLQPMDGPDQVANTQAAIAYCKANPAWRLSVQTHKLLGIP

SEQ ID NO: 30722 - protein, 208 aa, Hyphomicrobium sulfonivorans
  misc_feature (1)..(208): tr|A0A109BCD2|A0A109BCD2_HYPSL 7-carboxy-7-deazaguanine synthase OS=Hyphomicrobium sulfonivorans OX=121290 GN= queE PE=3 SV=1
MYAVKEIFYTLQGEGANAGRPAVFCRFAGCNLWSGRERDRHKADCQFCDTDFVGTDGPGGGKFATAEALAAACVASTGDAGASFIVLTGGEPMLQVDAELIDALHKAEFTIAIETNGTLPVPRAIDWICVSPKAGTDLRQRTGDELKLVYPQAGLDPAALDGVDFSHCYLQPMDGPQQAANTARAIAYCKANPRWRLSVQTHKLLGIP

SEQ ID NO: 30723 - protein, 251 aa, Hyphomonadaceae bacterium
  misc_feature (1)..(251): tr|A0A424KKN4|A0A424KKN4_9RHOB 7-carboxy-7-deazaguanine synthase OS=Hyphomonadaceae bacterium TMED125 OX=19867 75 GN=queE PE=3 SV=1
MSQETLWLAVDDHGNPEIFSSIQGEGASLGAPRTFIRLSGCNLHCKWCDTAYTWNFEGTPFFHEDNVKFVPEAERLSRSFGDVAAEVAKSEPSGIVITGGEPMLQKGKLEGLITAIKNACGPVWVEIEANGSIAPPAGLIPLVNQFNVSPKLAHSGNDAAIALNEASLSAYAALPQSWFKFVIGSPEDLEEVLSLTRTFRIPHERVYLMPLGRSSGEVRTRSKWLTEECLRHGMNFTDRLHIHLYGDTRGT

SEQ ID NO: 30724 - protein, 251 aa, Hyphomonadaceae bacterium; identical to SEQ ID NO: 30723
  misc_feature (1)..(251): tr|A0A354CEQ9|A0A354CEQ9_9RHOB 7-carboxy-7-deazaguanine synthase OS=Hyphomonadaceae bacterium OX=2026748 GN=qu eE PE=3 SV=1

SEQ ID NO: 30725 - protein, 215 aa, Hyphomonas adhaerens
  misc_feature (1)..(215): tr|A0A069E6I7|A0A069E6I7_9RHOB 7-carboxy-7-deazaguanine synthase OS=Hyphomonas adhaerens MHS-3 OX=1280949 GN=q ueE PE=3 SV=1
MTYSVKEAFYTLQGEGAQTGRAAVFLRFAGCNLWNGLERDRASAVCQFCDTDFVGTDGENGGKYKTPEEVAALVASIWKANADTAGRPYVVCTGGEPLLQLDPPLIGALHGEGFEIAVETNGTIAAPEGLDWICVSPKANAALVLKKGNELKLVYPQDEAEAQPERFTELDFQHFFLQPKDNSEAARNVQAAAAYCLKNPQWRLSLQTHKLTGLP

SEQ ID NO: 30726 - protein, 251 aa, Hyphomonas atlantica
  misc_feature (1)..(251): tr|A0A059DZC1|A0A059DZC1_9RHOB 7-carboxy-7-deazaguanine synthase OS=Hyphomonas atlantica OX=1280948 GN=queE PE =3 SV=1
MRLAVTEPGVPEIFHSLQGEGISAGKPSVFVRFSQCNLHCVWCDTAYTWNFQGTEFIHRDDAPGAPRKFDRAAETVDVSVETLAARLIEQSCRRIIFTGGEPLLQQRDLGVLIQQLKATDPDFYIEIETNGSIKPAGLAAELIDQFNVSPKLAHSGNAAAIRLKPDVLAFYAADPRANFKIVVAEPSDLEEVHELVSSSGMPPARVWLMPEGRTPQELRSRERWLAEACLRAGYNFTDRLHIHLYGDTRGT

SEQ ID NO: 30727 - protein, 253 aa, Hyphomonas atlantica
  misc_feature (1)..(253): tr|A0A3B9KYL3|A0A3B9KYL3_9RHOB 7-carboxy-7-deazaguanine synthase OS=Hyphomonas atlantica OX=1280948 GN=queE PE =3 SV=1
MVMRLAVTEPGVPEIFHSLQGEGISAGKPSVFVRFSQCNLHCVWCDTAYTWNFQGTEFIHRDDAPGAPRKFDRAAETVDVSVETLAARLIEQSCRRIIFTGGEPLLQQRDLGVLIQQLKATDPDFYIEIETNGSIKPAGLAAELIDQFNVSPKLAHSGNAAAIRLKPDVLAFYAADPRANFKIVVAEPSDLEEVHELVSSSGMPPARVWLMPEGRTPQELRSRERWLAEACLRAGYNFTDRLHIHLYGDTRGT

SEQ ID NO: 30728 - protein, 251 aa, Hyphomonas beringensis
  misc_feature (1)..(251): tr|A0A062UG33|A0A062UG33_9RHOB 7-carboxy-7-deazaguanine synthase OS=Hyphomonas beringensis OX=1280946 GN=queE PE=3 SV=1
MRLAVTDPGVPEIFHSLQGEGVSAGKPSVFVRLSQCNLHCVWCDTAYTWNFQDTEFQHRDDAPSAPRKYDRAQETVDRTVEELTAHLLALPCRRIIFTGGEPLLQQRELGELIQRLKEVDPSFYIEIETNGTIKPLGLAAELIDQFNVSPKLAHSGNDLAIRFKLETLRFYANDARANFKIVIETPSDLEEVKALVAEAGMPASRVWLMPEGRTPQELHQREHWLAEACLKAGYNFTGRLHIHLYGDTRGT

SEQ ID NO: 30729 - protein, 215 aa, Hyphomonas chukchiensis
  misc_feature (1)..(215): tr|A0A062UKT8|A0A062UKT8_9RHOB 7-carboxy-7-deazaguanine synthase OS=Hyphomonas chukchiensis OX=1280947 GN=queE PE=3 SV=1
MTWTVKEAYYTLQGEGAQTGRAAVFLRFAGCNLWSGLERDRDKAVCRFCDTDFVGTNGVNGGKFRAAEDLAAHVKAIWEAEAGDEGPRYVVCTGGEPLLQLDAPLIAALKAEGFEIGVETNGTIAAPDGLDWICVSPKANAPLVQTSGSELKLVYPQDEAEAQPERFSKLDFSHFFLQPKDDPDQARNIQAATTYCMKNPQWRLSLQTHKLIGLP

SEQ ID NO: 30730 - protein, 215 aa, Hyphomonas hirschiana
  misc_feature (1)..(215): tr|A0A059G1C1|A0A059G1C1_9RHOB 7-carboxy-7-deazaguanine synthase OS=Hyphomonas hirschiana VP5 OX=1280951 GN=qu eE PE=3 SV=1
MTYSVKEAFYTLQGEGAHTGRAAVFLRFAGCNLWSGLERDREKAVCRFCDTDFVGTNGEGGGKFREPGLLAAHIESIWQANASPGGRPYVVCTGGEPLMQLDEPLIGALHEAGFEIAIETNGTLPAPASIDWICVSPKANAPLAQKSGNELKLVYPQTEPEAQPECFETLDFEHFFLQPRDDGPSVSHVAAVANYCLKNPKWRLSLQTHKLTGLP

SEQ ID NO: 30731 - protein, 215 aa, Hyphomonas jannaschiana
  misc_feature (1)..(215): tr|A0A059FF28|A0A059FF28_9RHOB 7-carboxy-7-deazaguanine synthase OS=Hyphomonas jannaschiana VP2 OX=1280952 GN= queE PE=3 SV=1
MTYSVKEAFYTLQGEGAQTGRAAVFLRFAGCNLWSGLERDRAKAVCQFCDTDFVGTDGENGGKYKTPEEVAALVASIWASNADTAGKPYVVCTGGEPLLQLNPPLIEALHGEGFEIAVETNGTIEAPEGLDWICVSPKANAALVLKKGNELKLVYPQDEAEAQPERFTELDFQHFFLQPKDNSEVARNVQAAAAYCLKNPQWRLSLQTHKLTGLP

SEQ ID NO: 30732 - protein, 215 aa, Hyphomonas johnsonii
  misc_feature (1)..(215): tr|A0A059FQR5|A0A059FQR5_9RHOB 7-carboxy-7-deazaguanine synthase OS=Hyphomonas johnsonii MHS-2 OX=1280950 GN=q ueE PE=3 SV=1
MTWAVKEAYYTLQGEGAQTGRAAVFLRFAGCNLWSGLERDRLTAVCRFCDTDFVGTDGVNGGKFRAAADLAAHVAGIWKAEAGDAGPRYVVCTGGEPLLQLDPPLIAALKAEGFEIGVETNGTLAAPEGLDWICVSPKANAPLVQTRGNELKLVYPQDEPEAQPERFSQLDFVHFFLQPKDDPDAARNVQAATNYCMKNPQWRLSLQTHKLIGLP

SEQ ID NO: 30733 - protein, 215 aa, Hyphomonas neptunium; identical to SEQ ID NO: 30730
  misc_feature (1)..(215): tr|Q0C4T1|Q0C4T1_HYPNA 7-carboxy-7-deazaguanine synthas e OS=Hyphomonas neptunium (strain ATCC 15444) OX=228405 GN=queE PE=3 SV=1

SEQ ID NO: 30734 - protein, 215 aa, Hyphomonas oceanitis
  misc_feature (1)..(215): tr|A0A059GAQ0|A0A059GAQ0_9RHOB 7-carboxy-7-deazaguanine synthase OS=Hyphomonas oceanitis SCH89 OX=1280953 GN=q ueE PE=3 SV=1
MTWTVKEAYYTLQGEGAQTGRAAVFLRFAGCNLWSGLERDRDKAVCRFCDTDFVGTNGVNGGKFRAAEDLATHVKAIWEAEAGEAGPRYVVCTGGEPLLQLDAPLIAALKAEGFEIGVETNGTIAAPEGLDWICVSPKANAPLVQTRGSELKLVYPQDEAEAQPERFSKLDFSHFFLQPKDDPDQARNIQAATTYCMKNPQWRLSLQTHKLIGLP

SEQ ID NO: 30735 - protein, 215 aa, Hyphomonas polymorpha
  misc_feature (1)..(215): tr|A0A062VI92|A0A062VI92_9RHOB 7-carboxy-7-deazaguanine synthase OS=Hyphomonas polymorpha PS728 OX=1280954 GN= queE PE=3 SV=1
MTYSVKEAFYTLQGEGAHTGRAAVFLRFAGCNLWSGLERDREKAVCRFCDTDFVGTNGEGGGKFREPGLLAAHVKAIWEANASAGGRPYVVCTGGEPLMQLDEPLIDALHAAGFEIAIETNGTLPAPASIDWICVSPKANAPLAQTSGSELKLVYPQTEPEAQPECFETLDFEHFFLQPRDDGPGVSHVAAVAAYCLKNPKWRLSLQTHKLTGLP

SEQ ID NO: 30736 - protein, 216 aa, Hyphomonas sp.
  misc_feature (1)..(216): tr|A0A1Z9Y0Y2|A0A1Z9Y0Y2_9RHOB 7-carboxy-7-deazaguanine synthase OS=Hyphomonas sp. TMED17 OX=1986605 GN=queE P E=3 SV=1
MKVYSVKEAYVTLQGEGAQTGRAAVFLRFSGCNLWNGREEDRAKSVCQFCDTDFIGTDGQNGGRFEGADELAAHVNRVWHETSRSGGRPYVICTGGEPLLQLDRAAIAALKNAGFEVGVETNGTIKAPDGLDWICVSPKGTAPLKQLSGDELKLVFPQAEEAAQPAQFESLHFQHFFLQPKDDTATRDNIAAAAAYCMKQPKWRLSLQTHKLIGLP

SEQ ID NO: 30737 - protein, 251 aa, Hyphomonas sp.
  misc_feature (1)..(251): tr|A0A059E9G0|A0A059E9G0_9RHOB 7-carboxy-7-deazaguanine synthase OS=Hyphomonas sp. L-53-1-40 OX=1207058 GN=que E PE=3 SV=1
MRLAVTEPGVPEIFHSLQGEGVSAGKPSVFVRLSQCNLHCVWCDTAYTWNFQGTEFVHRDDLPGAPNKFDRTAETVDVSVDALTERLLGQNCRRIIFTGGEPLLQQRDLGELVQNLKAADPAFYIEIETNGTIKPIGLAAELIDQFNVSPKLAHSGNSASIRFRPEVLDFYASDPRANFKIVVANPSDLTEVYALVAQSGMPAHRVWLMPEGRTPAELRARETWLAEACLEAGYNFTDRLHIHLYGDTRGT

SEQ ID NO: 30738 - protein, 222 aa, Hypnocyclicus thermotrophus
  misc_feature (1)..(222): tr|A0A4R7L394|A0A4R7L394_9FUSO 7-carboxy-7-deazaguanine synthase OS=Hypnocyclicus thermotrophus OX=1627895 GN= queE PE=3 SV=1
MKQYKIVEKFISINGEGQRAGEISLFIRFPSCNLKCTYCDTMWANEKNVNTIYITIEDIKNDINMYNIKNITLTGGEPLLQDDISVVIQEILSINNKINIEIETNGSIDLSKLEKINRERVYITMDYKLPTSKMEGLMKIENFDKLTHKDTIKFVIGSNYDLIRAKNIIKNYIKEGKVYFSPVFKEIEPKYIVEFMKEHKLTDVRLQLQMHKIIWNPDERGV

SEQ ID NO: 30739 - protein, 217 aa, Hyunsoonleella jejuensis
  misc_feature (1)..(217): tr|A0A1H9DG54|A0A1H9DG54_9FLAO 7-carboxy-7-deazaguanine synthase OS=Hyunsoonleella jejuensis OX=419940 GN=queE PE=3 SV=1
MNLYLCALMNKEIQQLVEKGLMLPLMEEFYTIQGEGYHKGTAAYFIRIGGCDVGCHWCDVKESWNADLHPPTETKKIVENAKKYSDTIVVTGGEPLTWDMTELTKQLKAKGLQTHIETSGAYKLTGTWDWICLSPKKLKLPTKEVYAKADELKVIIYNKDDFRFAEEQAAKVNKDCILYLQPEWSKREKVVPEIVDYVMANPKWKVSLQTHKYLNIP

SEQ ID NO: 30740 - protein, 209 aa, Hyunsoonleella pacifica
  misc_feature (1)..(209): tr|A0A4Q9FN53|A0A4Q9FN53_9FLAO 7-carboxy-7-deazaguanine synthase OS=Hyunsoonleella pacifica OX=1080224 GN=queE PE=3 SV=1
MNKDIEILVEKGLMLPLMEEFYTIQGEGYHKGTAAYFIRIGGCDVGCHWCDVKESWNAALHPPTETTKIVENAKKYSDTIVVTGGEPLTWDMTELTAQLKANGLQTHIETSGAYKLTGKWDWICLSPKKMKLPTNEVYKEADELKVIVYNKDDLRFAEEQAAKVNKDCILYLQPEWSKRDKVVPLIVDYVMKHPKWKVSLQTHKYLNIP

SEQ ID NO: 30741 - protein, 209 aa, Hyunsoonleella sp.
  misc_feature (1)..(209): tr|A0A4Q9FF27|A0A4Q9FF27_9FLAO 7-carboxy-7-deazaguanine synthase OS=Hyunsoonleella sp. T58 OX=2527939 GN=queE PE=3 SV=1
MNKEIEKLVEKGLMLPLMEEFYTIQGEGYHKGTAAYFIRIGGCDVGCHWCDVKESWNADLHPPTETSHIVKNAKKYSDTIVVTGGEPLTWDMTELTAQLKAEGLQIHIETSGAYKLTGTWDWICLSPKKIKLPTKEIYEKADELKVIVYNKDDFRFAEEQAAKVNKDCILYLQPEWSKRDKVVPEIVDYVMQHPKWKVSLQTHKYLNIP

SEQ ID NO: 30742 - protein, 210 aa, Ichthyenterobacterium magnum
  misc_feature (1)..(210): tr|A0A420DFH5|A0A420DFH5_9FLAO 7-carboxy-7-deazaguanine synthase OS=Ichthyenterobacterium magnum OX=1230530 GN =queE PE=3 SV=1
MTRSERQELLDKGLLLPLMEEFYTIQGEGFHKGTAAYFVRIGGCDVGCHWCDVKESWLAELHPPTETEKIVENAVRYSHTIVVTGGEPLTWDMGPLTEQLKAKGVQTHIETSGAYSLSGTWDWICLSPKKMKLPKEDVYAEAHELKCIIYNKDDFRFAEEQAAKVNKDCILYLQPEWSKRDKVVPEIVDYVMANPKWKVSLQTHKYLNIP

SEQ ID NO: 30743 - protein, 210 aa, Ideonella sp.
  misc_feature (1)..(210): tr|A0A437RRT7|A0A437RRT7_9BURK 7-carboxy-7-deazaguanine synthase OS=Ideonella sp. KYPY4 OX=1862385 GN=queE PE= 3 SV=1
MTYSVKEIFYTLQGEGLRAGRPAVFCRFAGCNLWTGREPDRAQAVCQFCDTDFVGTDGTLGGKYGSAPALSAQIAALWPAGHGHRYVVLTGGEPLLQVDGALVAALHAEGFEIAVETNGTVAAPPGIDWICVSPKAGAAWVQRTGHELKLVYPQPGLMPEAVDTEGFEHCLLQPMDGLLQRANTRAAIAHCQAHPRWRLSVQTHKILDIR

SEQ ID NO: 30744 - protein, 211 aa, Ideonella sp.
  misc_feature (1)..(211): tr|A0A523Q3H8|A0A523Q3H8_9BURK 7-carboxy-7-deazaguanine synthase OS=Ideonella sp. MAG2 OX=2083017 GN=queE PE=3 SV=1
MTYSVKEMFYTLQGEGAQAGRAAVFCRFAGCNLWSGREEDRATATCSFCDTDFVGTNGQGGGKFSSAEALASAVAALWPEATGGQRYVVCTGGEPLLQLDDAAIAALHAQGFEVAVETNGTQPAPTGLDWICVSPKADAELVLTQGDELKLVYPQPLAPPERFAHLDFKHFFLQPMDSVLKRQHTQDTVAYCMAHPQWRLGVQMHKVVGIE

SEQ ID NO: 30745 - protein, 233 aa, Idiomarina abyssalis
  misc_feature (1)..(233): tr|A0A370QDA6|A0A370QDA6_9GAMM 7-carboxy-7-deazaguanine synthase OS=Idiomarina abyssalis OX=86102 GN=queE PE=3 SV=1
MLTKAILTEAMSYRINEIFETLQGEGTFTGVPSIFLRLQGCPVGCPWCDTQHTWETNPSDQVSIDALMAKTEASEKWSEMTAEDIIARFEQEGYSAKHVVITGGEPAMFDLLPLGEALEAKGYQLQIETSGTFELKVTDSTWVTVSPKLDMPGGYLVRPDCMARANEIKHPIAMQKHIDALDSLLERCPPKADAIICLQPISQRPRATELAMKTCIARNWRLSVQMHKYLNIE

SEQ ID NO: 30746 - protein, 255 aa, Idiomarina aestuarii
  misc_feature (1)..(255): tr|A0A2T4D155|A0A2T4D155_9GAMM 7-carboxy-7-deazaguanine synthase OS=Idiomarina aestuarii OX=624146 GN=queE PE= 3 SV=1
MSGTELALAPDKIRISEIFGPTVQGEGALIGMPTVFVRTGGCDFRCSWCDTLYAVDPAFRADWKPNTAAEVMDRVRTLSGGKPILVTLSGGNPVIQPLGGLIALGKRNGFTFAIETQGSIARDWFADLDYLTLSPKPPSSSTDFDPDALAACIEAARANGVFDGPAITLKFPVRDDADLMFADHVRKRHPDIPVCLQPVNTTPAEPHPDGLNGVDIDGLTERYRWLVDQVSERGWFNIRVLPQWHVHVWGNLRGV

SEQ ID NO: 30747 - protein, 213 aa, Idiomarina aestuarii
  misc_feature (1)..(213): tr|A0A2T4CXH4|A0A2T4CXH4_9GAMM 7-carboxy-7-deazaguanine synthase OS=Idiomarina aestuarii OX=624146 GN=queE PE= 3 SV=1
MAQCRITEIFYSLQGETRTVGLPTVFVRLTGCPLRCGYCDTAYAFHGGQKMEISDIVAEVKSYNPRYVTVTGGEPLAQNTCRELLTALCELDVEVSLETSGAMDISNIDPRVVRVMDLKTPTSGEVSKNRYSNIDLLNPQDQIKFVICNREDYDWAREQLFSLELIDRCEILFSPVHGDLNPTDLAEWIIADNLPVRMQIQLHKYLWNDAQGR

SEQ ID NO: 30748 - protein, 223 aa, Idiomarina aquatica
  misc_feature (1)..(223): tr|A0A4R6PLH4|A0A4R6PLH4_9GAMM 7-carboxy-7-deazaguanine synthase OS=Idiomarina aquatica OX=1327752 GN=queE PE= 3 SV=1
MTYRINEIFETLQGEGTFTGVPSIFIRLQGCPVGCPWCDTQHTWETRAEDEVSVATMMAKTDATSQWAAMSASDILAEISKQGYQAKHVVITGGEPAMFDLLPLANALEAQGLQLQIETSGTFELKVIEGTWVTVSPKLDMPGGYLVRADAMARANEIKHPIAMQKHIDALDALLAHNPVREDVQICLQPISQRPRATELAMQTCIARNWRLSVQLHKYLNIE

SEQ ID NO: 30749 - protein, 228 aa, Idiomarina aquimaris
  misc_feature (1)..(228): tr|A0A432XB81|A0A432XB81_9GAMM 7-carboxy-7-deazaguanine synthase OS=Idiomarina aquimaris OX=641841 GN=queE PE= 3 SV=1
MNPISTRYPINELFETIQGEGFYTGTPAIFLRLQGCPVGCPWCDTQHTWDKAAEDQVELETVLNKSSATSQWAELSATEVLAAFKQQGFHAKHVVITGGEPAMYDLRELAQVLEAAGYALQIETSGTYELKVSAGTWVTVSPKLDMPGGFLVRPDCMKRANEIKHPVAMQKHIDALDNLLEKCPPAAGTIISLQPISQRPRATELAIKTCIERNWRLSVQLHKYLHIE

SEQ ID NO: 30750 - protein, 228 aa, Idiomarina atlantica
  misc_feature (1)..(228): tr|A0A094IJK4|A0A094IJK4_9GAMM 7-carboxy-7-deazaguanine synthase OS=Idiomarina atlantica OX=1517416 GN=queE PE =3 SV=1
MNPITTSYPVNEIFETIQGEGFYTGTPAIFLRLQGCPVGCPWCDTQHTWEQRAEDQVPVAQVVGKPSASPLWAALDAEAILATFQAQGFNAKHVVITGGEPAMFDLRELGETLEAAGYQLQIETSGTFALQVTAQTWVTVSPKLDMPGGYLVRPDCLQRADEIKHPVAMEKHIEALDKLLKSCPPNPAAIICLQPISQRPRATELAIKTCIERNWRLSVQLHKYLHIE

SEQ ID NO: 30751 - protein, 223 aa, Idiomarina baltica
  misc_feature (1)..(223): tr|A0A348WLS0|A0A348WLS0_9GAMM 7-carboxy-7-deazaguanine synthase OS=Idiomarina baltica OX=190892 GN=queE PE=3 SV=1
MTYRINEIFETLQGEGTFTGVPSIFIRLQGCPVGCPWCDTQHTWDVKQEDQVSVATMMAKPEATSEWAEMSSADIVELIKQRGYRAKHVVITGGEPAMYDLRELGEALEAQGMRLQIETSGTYALLITAGTWVTVSPKLDMPGGYLVRSDCLSRADEIKHPVAMQKHIDALDRLLQGQKLKSDVVICLQPISQRPRATELAMKTCIERNWRLSVQMHKYLNIE

SEQ ID NO: 30752 - protein, 222 aa, Idiomarina donghaiensis
  misc_feature (1)..(222): tr|A0A432XBG3|A0A432XBG3_9GAMM 7-carboxy-7-deazaguanine synthase OS=Idiomarina donghaiensis OX=519452 GN=queE PE=3 SV=1
MYPINEVFQTIQGEGVFTGAPALFIRLQGCPVGCPWCDTQHTWEHKPEDEVSITAVVEKQAASSTWANVTPQQILKLFEQRGYTARHVVITGGEPAMYDLRPLGQVLEQAGYQLQIETSGTFEIRTTNKTWVTVSPKLDMPGGYLVRPDCMKRANEIKYPVAMQKHIDQFDKLLRSCPPSPEAIIALQPISQRPRATALAMRVCIERNWRLSVQLHKYLNIE

SEQ ID NO: 30753 - protein, 223 aa, Idiomarina fontislapidosi
  misc_feature (1)..(223): tr|A0A432YBB6|A0A432YBB6_9GAMM 7-carboxy-7-deazaguanine synthase OS=Idiomarina fontislapidosi OX=263723 GN=que E PE=3 SV=1
MTYRINEIFETLQGEGTFTGVPSIFIRLQGCPVGCPWCDTQHTWEINSADEVSVARMMDKSEASPHWATMSSDDIVELIKQRGYRAKHVVITGGEPAMYDLRALGEALEAQGMRLQIETSGTYELLITPATWVTVSPKLDMPGGYLVRSDCLSRADEIKHPVAMQKHVDALDQLLKGQRLNADVVICLQPISQRPRATELAMKVCIERNWRLSVQMHKYLNIE

SEQ ID NO: 30754 - protein, 250 aa, Idiomarina halophila
  misc_feature (1)..(250): tr|A0A432XRL5|A0A432XRL5_9GAMM 7-carboxy-7-deazaguanine synthase OS=Idiomarina halophila OX=1449799 GN=queE PE =3 SV=1
MITTFFANNLRYNKTNSLPQNRTNPITTLYPVNELFETIQGEGVYTGTPAIFLRLQGCPVGCPWCDTQHTWVKSADAEVDAQTMLSKTEPSSAWAELNAQQLLQLFTEQGFQAKHVVITGGEPAMYDLRELGEVLEQAGYQLQIETSGTFALQLTAATWVTVSPKLDMPGGYLVRPDCMQRANEIKHPIAMQKHIDALDNLLQRCPPRSEAIISLQPISQRPRATQLAIETCIARNWRLSVQLHKYLNIE

SEQ ID NO: 30755 - protein, 228 aa, Idiomarina homiensis
  misc_feature (1)..(228): tr|A0A432XT69|A0A432XT69_9GAMM 7-carboxy-7-deazaguanine synthase OS=Idiomarina homiensis OX=364198 GN=queE PE= 3 SV=1
MNPISTRYPINELFETIQGEGFYTGTPAIFLRLQGCPVGCPWCDTQHTWEKSAADKVDLATLLAKSSASAQWAELTAAEILAAFKQQGFQAKHVVITGGEPAMYDLRELAQVLEAAGYRLQIETSGTFALQVSAATWVTVSPKLDMPGGFLVRPDCMKRANEIKHPVAMQKHIDALDNLLAQCPPAENVIIALQPISQRSRATELAIKTCIERNWRLSVQLHKYLHIE

SEQ ID NO: 30756 - protein, 230 aa, Idiomarina indica
  misc_feature (1)..(230): tr|A0A1G6E184|A0A1G6E184_9GAMM 7-carboxy-7-deazaguanine synthase OS=Idiomarina indica OX=1159017 GN=queE PE=3 SV=1
MLENPINTLYPLNEVFQTIQGEGTYTGVPAIFIRLQGCPVGCPWCDTQHTWEQRAEDQVPLTAIVEKPAASSTWAQATATEIVALLQDKKYTAKHVVLTGGEPAMYDLLELCEVLESAGYRLQIETSGTFPLRVSPQTWVTLSPKVDMPGGLLVRADCMNRADEIKYPVAMEKHIDELDNLLKVCPPRAGVTIALQPISQRPRATELAIQTCIERNWRLSVQLHKYLHIE

SEQ ID NO: 30757 - protein, 228 aa, Idiomarina insulisalsae
  misc_feature (1)..(228): tr|A0A432Y8V0|A0A432Y8V0_9GAMM 7-carboxy-7-deazaguanine synthase OS=Idiomarina insulisalsae OX=575789 GN=queE PE=3 SV=1
MNPITTHYPVNELFETIQGEGSFTGTPAIFLRLQGCPVGCPWCDTQHTWEKSAADQVDAARMLNKSSPSPEWAELTAAQLLELFQQQGFQARHVVITGGEPAMYDLRELGEVLEGAGYRLQIETSGTFELKVSAATWVTVSPKLDMPGGFLVRPDSMKRADEIKHPVAMQKHIDALDKLLQRCPPRDDTIIALQPISQRPRATELAIATCIARNWRLSVQLHKYLNIE

SEQ ID NO: 30758 - protein, 233 aa, Idiomarina loihiensis
  misc_feature (1)..(233): tr|Q5QUZ0|Q5QUZ0_IDILO 7-carboxy-7-deazaguanine synthas e OS=Idiomarina loihiensis (strain ATCC BAA-735 / DSM 1 5497 / L2-TR) OX=283942 GN=queE PE=3 SV=1
MLTKAILTEAMSYRINEIFETLQGEGTFTGVPSIFLRLQGCPVGCPWCDTQHTWETNPTDQVSIDALMAKTEASAKWSEMTAEDIIARFEQEGYSAKHVVITGGEPAMFDLLPLGKALEAKGYQLQIETSGTFELKVTDSTWVTVSPKLDMPGGYLVRPDCMARANEIKHPIAMQKHIDALDSLLERCPPKADAIICLQPISQRPRATELAMKTCIARNWRLSVQMHKYLNIE

SEQ ID NO: 30759 - protein, 168 aa, Idiomarina loihiensis
  misc_feature (1)..(168): tr|A0A349C3F4|A0A349C3F4_9GAMM 7-carboxy-7-deazaguanine synthase QueE (Fragment) OS=Idiomarina loihiensis OX=1 35577 GN=DCR51_05385 PE=3 SV=1
YRINEIFETLQGEGTFTGVPSIFLRLQGCPVGCPWCDTQHTWETNPSDQVSIDALMAKTEASAKWSEMTAEDIIARFEQEGYSAKHVVITGGEPAMFDLLPLGKALEAKGYQLQIETSGTFELKVTDSTWVTVSPKLDMPGGYLVRPDCMARANEIKHPIAMQKHIDA

SEQ ID NO: 30760 - protein, 230 aa, Idiomarina marina
  misc_feature (1)..(230): tr|A0A432YAP6|A0A432YAP6_9GAMM 7-carboxy-7-deazaguanine synthase OS=Idiomarina marina OX=502366 GN=queE PE=3 S V=1
MLENPINTLYPINEVFQTIQGEGIFTGVPAVFIRLQGCPVGCPWCDTQHTWEQHVSDEVALSRVTEKTQPTAQWANATAEQLVELMRQKGYSARHIVITGGEPAMYDLTQLGEALEQAGFKLQIETSGTFPLKVTDATWVTVSPKLDMPGGYMVRPDCMKRADEIKYPVAMQKHIDQLDKLLASCPPREGVSIGLQPISQRPRATELAMKVCIERNWRLSVQLHKYLNIE

SEQ ID NO: 30761 - protein, 229 aa, Idiomarina maritima
  misc_feature (1)..(229): tr|A0A317Q1S4|A0A317Q1S4_9GAMM 7-carboxy-7-deazaguanine synthase OS=Idiomarina maritima OX=519453 GN=queE PE=3 SV=1
MENPINNIYPINEIFQTIQGEGVFTGVPAIFIRLQGCPVGCPWCDTQHTWYQHQERQVALSEVVEKAAPSDTWAGVTAASIVAELQQRGYQAKHVVITGGEPAMYDLRELATALEHNGYQLQIETSGTFAIQTSADTWVTVSPKLNMPGGYLVRPDCMQRANEIKYPVAMQKHIDEFDKLLQVCPPAATAVIALQPISQRPRATQLAMQVCIERNWRLSVQMHKYLNIE

SEQ ID NO: 30762 - protein, 230 aa, Idiomarina maritima
  misc_feature (1)..(230): tr|A0A1I6I230|A0A1I6I230_9GAMM 7-carboxy-7-deazaguanine synthase OS=Idiomarina maritima OX=519453 GN=queE PE=3 SV=1
MLENPINTLYPINEVFQTIQGEGIYTGVPAIFVRLQGCPVGCPWCDTQHTWEQHAKDEVALSEITEKTAPTAQWANASANELVMLLKRKGYTATHIVITGGEPAMYDLTELGIALEQAGFKLQIETSGTFPLRVTDGTWVTVSPKLDMPGGYLVRPDCMKRADEIKYPVAMQKHIDQLDKLLASCPPRDGVSIGLQPISQRPRATELAMKVCIERNWRLSVQLHKYLNIE

SEQ ID NO: 30763 - protein, 223 aa, Idiomarina piscisalsi
  misc_feature (1)..(223): tr|A0A432YVN2|A0A432YVN2_9GAMM 7-carboxy-7-deazaguanine synthase OS=Idiomarina piscisalsi OX=1096243 GN=queE P E=3 SV=1
MSYRINEIFETLQGEGTFTGVPSIFVRLQGCPVGCPWCDTQHTWETNDSDKVSPDAMMAKTEASSKWTEMTAEDIVKRFEQEGYAAKHVVITGGEPAMFDLQPLGEALEAKGYQLQIETSGTFELKVTDNTWVTVSPKLDMPGGYLVRPDCMARANEIKHPIAMQKHIDALDSLLKRCPPKADAIICLQPISQRPRATELAMQTCIERNWRLSVQMHKYLNIE

SEQ ID NO: 30764 - protein, 223 aa, Idiomarina planktonica
  misc_feature (1)..(223): tr|A0A1Y6EU61|A0A1Y6EU61_9GAMM 7-carboxy-7-deazaguanine synthase OS=Idiomarina planktonica OX=1323738 GN=queE PE=3 SV=1
MLYPINEIFQTIQGEGLFTGAPAIFIRLQGCPVGCPWCDTQHTWELEPQNKVAVKQVINKGAAAPTWAELSAEQIVQALIDAGYTAKHIVLTGGEPAMYDLRPLGEALEAAGYRLQIETSGTFELLLTANTWVTVSPKLDMPGGYLVRPDCMQRADEIKHPVAMQKHIDALDNLLKRCPPKASTSISLQPISQRPRATELAIETCIARNWRLSVQLHKYLAIE

SEQ ID NO: 30765 - protein, 223 aa, Idiomarina ramblicola
  misc_feature (1)..(223): tr|A0A432YZ38|A0A432YZ38_9GAMM 7-carboxy-7-deazaguanine synthase OS=Idiomarina ramblicola OX=263724 GN=queE PE =3 SV=1
MSYRINEIFETLQGEGTFTGVPSIFLRLQGCPVGCPWCDTQHTWETNPSDEVSIDALMAKNEASSKWSEMTAEDIIVRFEQEGYAAKHVVITGGEPAMFDLLPLGKALEAKGYQLQIETSGTFELKVTDSTWVTVSPKLDMPGGYLVRPDCMARANEIKHPIAMQKHIDALDSLLKRSPPKADAIICLQPISQRPRATELAMKTCIARNWRLSVQMHKYLNIE

SEQ ID NO: 30766 - protein, 225 aa, Idiomarina salinarum
  misc_feature (1)..(225): tr|A0A094L5X0|A0A094L5X0_9GAMM 7-carboxy-7-deazaguanine synthase OS=Idiomarina salinarum OX=435908 GN=queE PE= 3 SV=1
MSTAYPINEIFETIQGEGQFTGVPSIFVRLQGCPVGCPWCDTQHTWELKEAARVGASGVVNKAGPSEQWAELSAADIVALFREQGYQAKHVVITGGEPAMYDLRPLAAELEPLGYRLQIETSGTFTLLVSADTWVTVSPKLDMPGGYLVRPDCMQRADEIKYPVAMQKHIDALDNLLSRCPPRPEVSISLQPISQRPRATELAIKTCIARNWRLSVQLHKYLNIE

SEQ ID NO: 30767 - protein, 229 aa, Idiomarina sediminum
  misc_feature (1)..(229): tr|A0A432YZK3|A0A432YZK3_9GAMM 7-carboxy-7-deazaguanine synthase OS=Idiomarina sediminum OX=431675 GN=queE PE= 3 SV=1
MIPITTVKYPVNEFFQTIQGEGLYTGTPALFLRLQGCPVGCPWCDTKHTWEKSDNARVSAEAMLAKTAPSEAWAEMSAVEILNVIEAQGFTAKHIVITGGEPAMYDLMPLGQELEQHGYQLQIETSGTFPLHVTENTWVTVSPKLDMPGGYLVRPDCMQRADEVKYPVAMEKHIDALDLLLKNCPPRQDTIIALQPISQRPRATELAMQVCIERNWRLSVQMHKYLNIE

SEQ ID NO: 30768 - protein, 223 aa, Idiomarina seosinensis
  misc_feature (1)..(223): tr|A0A432ZGW9|A0A432ZGW9_9GAMM 7-carboxy-7-deazaguanine synthase OS=Idiomarina seosinensis OX=281739 GN=queE P E=3 SV=1
MTYRINEIFETLQGEGTFTGVPSIFIRLQGCPVGCPWCDTQHTWETNAEDQVSIASMLSKDSASSAWAEMTAEDIVDTFRTQGYQAKHVVITGGEPAMFDLLPMAEALEANGLQLQIETSGTFELLVSERTWVTVSPKLDMPGGYLVRPDCMSRANEIKHPVAMQKHIDALDALLARSQLRDDVQICLQPISQRPRATELAMKTCIARNWRLSVQLHKYLNIE

SEQ ID NO: 30769 - protein, 223 aa, Idiomarina sp.
  misc_feature (1)..(223): tr|A0A2D8HT45|A0A2D8HT45_9GAMM 7-carboxy-7-deazaguanine synthase OS=Idiomarina sp. OX=1874361 GN=queE PE=3 SV= 1
MPYRINEIFETLQGEGTFTGVPSIFLRLQGCPVGCPWCDTQHTWETNPSDQVSVERLMAKTEATAEWAEMTAEDIISRFEEEGYTAKHVVITGGEPAMFDLLPLGSALEAKGYQLQIETSGTFELKVTDNTWVTVSPKLDMPGGYLVRPDCMARANEIKHPIAMQKHIDALDSLLKRCPPKADAVICLQPISQRPRATELAMKTCIARNWRLSVQMHKYLNIE

SEQ ID NO: 30770 - protein, 223 aa, Idiomarina sp.
  misc_feature (1)..(223): tr|A0A139C4F8|A0A139C4F8_9GAMM 7-carboxy-7-deazaguanine synthase OS=Idiomarina sp. T82-3 OX=1794809 GN=queE PE =3 SV=1
MTYRINEIFETLQGEGTFTGVPSIFIRLQGCPVGCPWCDTQHTWDVKQEDQVSVATMMAKSEATSEWAEMSSADIVELIKQRGYRAKHVVITGGEPAMYDLRELGEVLEAQGMRLQIETSGTYELLITAGTWVTVSPKLDMPGGYLVRSDCLSRADEIKHPVAMQKHIDALDRLLQGQKLKSDVVICLQPISQRPRATELAMKTCIERNWRLSVQMHKYLNIE

SEQ ID NO: 30771 - protein, 229 aa, Idiomarina tainanensis; identical to SEQ ID NO: 30761
  misc_feature (1)..(229): tr|A0A368USE4|A0A368USE4_9GAMM 7-carboxy-7-deazaguanine synthase OS=Idiomarina tainanensis OX=502365 GN=queE P E=3 SV=1

SEQ ID NO: 30772 - protein, 223 aa, Idiomarina taiwanensis
  misc_feature (1)..(223): tr|A0A432ZC73|A0A432ZC73_9GAMM 7-carboxy-7-deazaguanine synthase OS=Idiomarina taiwanensis OX=337250 GN=queE P E=3 SV=1
MQYPLNEVFETIQGEGVYTGVPAIFVRLQGCPVGCPWCDTQHTWDLDPEQQVAPSGIIGKLTASATWAEFSASQLLALFKAQNYHAKHVVITGGEPAMFDLRPLAAELESAGYRLQIETSGTFELRVSPQTWVTVSPKLDMPGGYLVRPDCMKRANEIKYPVAMQKHIDAFDHLLKTCPPRADAIIALQPISQRPRATELAIKTCIERNWRLSVQLHKYLNIE

SEQ ID NO: 30773 - protein, 223 aa, Idiomarina tyrosinivorans
  misc_feature (1)..(223): tr|A0A432ZRK8|A0A432ZRK8_9GAMM 7-carboxy-7-deazaguanine synthase OS=Idiomarina tyrosinivorans OX=1445662 GN=qu eE PE=3 SV=1
MNYRINEIFETLQGEGVFTGVPAIFVRLQGCPVGCPWCDTQHTWNTDADKQVAVAELAKKTAADDRWAELSADDIVAWFERNGYRAKHVVITGGEPAMFDLQPLAEVLEKRGYRLQIETSGTFPLQVSAATWVTLSPKLDMPGGYLVQPENMRRANEIKHPIAMQKHIDALDQLLQQYPVADDVVISLQPISQRPRATELAIATCIERGWRLSVQMHKYLNIE

SEQ ID NO: 30774 - protein, 229 aa, Idiomarina woesei
  misc_feature (1)..(229): tr|A0A0K6HBK3|A0A0K6HBK3_9GAMM 7-carboxy-7-deazaguanine synthase OS=Idiomarina woesei OX=1381080 GN=queE PE=3 SV=1
MEKIINTLYPINEVFQTIQGEGIFTGVPALFIRLQGCPVGCPWCDTQHTWEHKPEDEVSITAVVEKQGPSSTWANVTPQQMLNLFEQQGYTARHVVITGGEPAMYDLRPLGQALEQAGYQLQIETSGTFEIRTTDNTWVTVSPKLDMPGGYLVRPDCMKRANEIKYPVAMQKHIDQFDKLLRSCPPNSKAIIALQPISQRPRATELAMRVCIERNWRLSVQLHKYLNIE

SEQ ID NO: 30775 - protein, 223 aa, Idiomarina xiamenensis
  misc_feature (1)..(223): tr|K2KJL0|K2KJL0_9GAMM 7-carboxy-7-deazaguanine synthas e OS=Idiomarina xiamenensis 10-D-4 OX=740709 GN=queE PE =3 SV=1
MIYRINEIFQTIQGEGVFTGSPSIFVRLQGCPVGCPWCDTQHTWDIDPAQQVSVERMLSKSTASAEWAELSAQAIVDCFQQQGYSAKHVVITGGEPAMVDWRPLAELLEARGYQLQIETSGTFALQVSAQTWVTLSPKLDMPGGYLVRADCMARANEIKHPVAMQKHIDALDALLAQYPPAANVVISLQPISQRPRATELAMQVCIERNWRLSVQLHKYLHIE

SEQ ID NO: 30776 - protein, 223 aa, Idiomarina zobellii
  misc_feature (1)..(223): tr|A0A1G7LI72|A0A1G7LI72_9GAMM 7-carboxy-7-deazaguanine synthase OS=Idiomarina zobellii OX=86103 GN=queE PE=3 SV=1
MSYRINEIFETLQGEGTFTGVPSIFVRLQGCPVGCPWCDTQHTWETNDSDKVSTNEMMAKTEASSKWAEMAAEDIVKRFEQEGYAAKHVVITGGEPAMFDLLPLGEALEAKGYQLQIETSGTFELKVTNNTWVTVSPKLDMPGGYLVRPDCMARANEIKHPVAMQKHIDALDSLLKRCPPKADAIICLQPISQRPRATELAMQTCIERNWRLSVQMHKYLNIE

SEQ ID NO: 30777 - protein, 223 aa, Idiomarinaceae bacterium
  misc_feature (1)..(223): tr|A0A2D7YP45|A0A2D7YP45_9GAMM 7-carboxy-7-deazaguanine synthase OS=Idiomarinaceae bacterium OX=1898113 GN=que E PE=3 SV=1
MTYRINEIFETLQGEGTFTGVPSIFIRLQGCPVGCPWCDTQHTWETRAEDEVSVATMMAKADATSQWAAMSASDILAEIRKQGYQAKHVVITGGEPAMFDLLPLANALEAQGLQLQIETSGTFELKVTEGTWVTVSPKLDMPGGYLVRADAMARANEIKHPIAMQKHIDALDALLAHNPVRDDVQICLQPISQRPRATELAMQTCIARNWRLSVQLHKYLNIE

SEQ ID NO: 30778 - protein, 233 aa, Idiomarinaceae bacterium
  misc_feature (1)..(233): tr|A0A0N8KBS5|A0A0N8KBS5_9GAMM 7-carboxy-7-deazaguanine synthase OS=Idiomarinaceae bacterium HL-53 OX=1298881 GN=queE PE=3 SV=1
MKQVHSPLAQKALPINELFETIQGEGLYTGTPAIFLRLQGCPVGCPWCDTQHTWEHRKEDEIAIVDVLKKEVAAPSWGALSPVEFLAVIQSQGWHAKHVVITGGEPCMYDLSELTEVLYDAGYQCQIETSGTFEVNVHADTWVTVSPKVDMPGGYPILPQAVARANEIKFPVAMQKHVDELDALLANFATREDVIIALQPISQRPRATELAMKTCIERNWRLSVQLHKYLAIA

SEQ ID NO: 30779 - protein, 235 aa, Ignatzschineria cameli
  misc_feature (1)..(235): tr|A0A2U2ATV7|A0A2U2ATV7_9GAMM 7-carboxy-7-deazaguanine synthase OS=Ignatzschineria cameli OX=2182793 GN=queE PE=3 SV=1
MNFPVLEIFGPTIQGEGMVIGRKTCFIRLAACDYQCVWCDSKFTWDGSMKPELMSTEAIVSAVTKIADQRADHITISGGNPALYKGLSELVLQLQNKGYQVAIETQGSKWNDALLFIDEVTLSPKPPSSQMETDFTILSEMIAKLSGRNISLKVVIFDEKDLQYAKEIYQRYPNIPLFLQVGNDQTDLEDEAVTAEYLMKRYGELVGAVMNSTTLKNVRVLPQLHALLWGNRRGV

SEQ ID NO: 30780 - protein, 235 aa, Ignatzschineria indica
  misc_feature (1)..(235): tr|A0A2U2ALP8|A0A2U2ALP8_9GAMM 7-carboxy-7-deazaguanine synthase OS=Ignatzschineria indica OX=472583 GN=queE P E=3 SV=1
MNLPILEIFGPTIQGEGMVIGRKTCFVRLAACDYQCVWCDSKFTWDGSIKPDLMSIEEIVAAVIKLANNRADHITISGGNPALYKGLSELVLQLQDAGYQVAIETQGSKWNEALLLIDEVTLSPKPPSSEMMTDFTLLSEIITRLSGRNISLKVVVFDERDLQYAEEIHQCYPEIPLFLQVGNDQTTLEDEATTARYLLTRYSELVEVVMASTILKNVRVLPQLHALLWGNRRGV

SEQ ID NO: 30781 - protein, 235 aa, Ignatzschineria sp.
  misc_feature (1)..(235): tr|A0A256CJ32|A0A256CJ32_9GAMM 7-carboxy-7-deazaguanine synthase OS=Ignatzschineria sp. F8392 OX=1980117 GN=qu eE PE=3 SV=1
MNFPVLEIFGPTIQGEGMVIGRKTCFIRLAACDYQCVWCDSKFTWDGSMKPELMSTEAIVSAVTKIADQRADHITISGGNPALYKGLSELVLQLQNKGYQVAIETQGSKWNDALLFIDEVTLSPKPPSSQMETDFMILSEMIAKLSGRNISLKVVIFDEKDLQYAKEIYQRYPNIPLFLQVGNDQTDLEDEAATAEYLMRRYRELVEVVMASTILKNVRVLPQLHALLWGNRRGV

SEQ ID NO: 30782 - protein, 240 aa, Ignatzschineria ureiclastica
  misc_feature (1)..(240): tr|A0A2U2ACY0|A0A2U2ACY0_9GAMM 7-carboxy-7-deazaguanine synthase OS=Ignatzschineria ureiclastica OX=472582 GN= queE PE=3 SV=1
MNFPVLEIFGPTVQGEGMVIGRKTCFVRFAACDYQCVWCDSKFTWDGSVKPTLMNSEEILAALIALQQDHLQHNRVDHITISGGNPALFKGLDQLVNLLHQAGFKVAIETQGSHWNEALLEIDEVTLSPKPPSSEMITNFPLLTEIIQQLRGRNISLKVVIFNDEDLRYAEEIYQLYPDIPLYLQVGNDQLEDEDETATAYYLLQKYRQLVDQVMQSTTLKNVRVLPQLHALLWGNRRGV

SEQ ID NO: 30783 - protein, 212 aa, Ignavibacteria bacterium
  misc_feature (1)..(212): tr|A0A2H0D308|A0A2H0D308_9BACT 7-carboxy-7-deazaguanine synthase OS=Ignavibacteria bacterium CG22_combo_CG10-1 3_8_21_14_all_37_15 OX=1974042 GN=queE PE=3 SV=1
MLKVNEIYYSIQGESTKAGLPCVFIRLTYCNLRCSYCDTEYAFYEGKNLSLEEILTEVKKYRCKLVEVTGGEPLVQSESLELMKLLCDNNYEVLLETGGSLPIEKIDHRVKIIMDLKCPSSNMEKKNLYENIQFLKKSDEVKFVLGSREDYEWTKANILQYDLQNKCDVLFSVVFGKLQPVTVVEWILEDNLQIRFQLQMHKFIWHPEQKGV

SEQ ID NO: 30784 - protein, 212 aa, Ignavibacteria bacterium
  misc_feature (1)..(212): tr|A0A1G0VDI7|A0A1G0VDI7_9BACT 7-carboxy-7-deazaguanine synthase OS=Ignavibacteria bacterium RIFOXYB2_FULL_37_ 11 OX=1798448 GN=queE PE=3 SV=1
MLKINEIYKSIQGESSKAGLPCTFVRLTYCNLRCTYCDSEYAFYDGKDMEIDEILSEIKKLGCNLVEVTGGEPLFQKESLDLMKRLCDEGYEVMLETGGSLPIEEIDKRVMIILDLKCPSSGMLKKNLYKNLEHLKIIDEVKFVIGTREDYEWAKEKIFEHNISEKCSVLLSTVFGALNPQTLVDWILEDNLNVRFQLQMHKYIWDPKTKGV

SEQ ID NO: 30785 - protein, 223 aa, Ignavibacteriae bacterium
  misc_feature (1)..(223): tr|A0A2N1VLX9|A0A2N1VLX9_9BACT 7-carboxy-7-deazaguanine synthase OS=Ignavibacteriae bacterium HGW-Ignavibacter iae-1 OX=2013808 GN=queE PE=3 SV=1
MIDLSKYNFNISEIFYSIQGEGTRAGLPCVFVRLQGCRLRCSWCDTPYALEINQPEMLMNGAEIIEIIKSYGCNFVEFTGGEPFEQANIHHVMQHLADEGFVVAVETSGYIDLAFADNRIIKILDVKCPGSGMSKKNRYENFEYLTNHDEVKFVIADRADYDFAKDICNKYSLSSKCDSILFSPVFGKVENLELAEWILADRLNVRMQVQMHKYIWHPDKRGV

SEQ ID NO: 30786 - protein, 222 aa, Ignavibacteriae bacterium
  misc_feature (1)..(222): tr|A0A2N1V8K3|A0A2N1V8K3_9BACT 7-carboxy-7-deazaguanine synthase OS=Ignavibacteriae bacterium HGW-Ignavibacter iae-4 OX=2013811 GN=queE PE=3 SV=1
MNKDEIKYNVNEIFYSIQGEGSRSGKPCVFVRMQGCLLRCTWCDTPYALERKQTEKLMSIAEILAEVEKHNCKFLMLTGGEPLEQKEIGVLVEEALDQGYEVVIETNGQQDIGKVPKEAVKILDLKCPGSAMHKKNDYSNMPKLDAKDEVKFVIKDRADYDWAIEKCREYYLFNRVSEVLFSPVFGEIEPIELANWILEDKLPARMQMQMHKFIWEPNTRGV

SEQ ID NO: 30787 - protein, 212 aa, Ignavibacteriales bacterium
  misc_feature (1)..(212): tr|A0A2M7ZDF3|A0A2M7ZDF3_9BACT 7-carboxy-7-deazaguanine synthase OS=Ignavibacteriales bacterium CG_4_9_14_3_um _filter_34_10 OX=1974044 GN=queE PE=3 SV=1
MLKVNEIYLSVQGESSKAGLPCVFVRLTYCNLRCTYCDSEYSFYEGTEFSNEQILDEIKKFDCNLVEITGGEPLFQKESLELMKNLCDSGFSVMLETSGSLPIKDVDSRIMIIMDLKCPSSKMTKKNLYENIEFLKPTDELKFVIGDYEDYQWAKKIISKYNIENRCQILFSPVFGKIEPKEIVNWILKDKLKVRFQLQMHKHIWEPTAKGV

SEQ ID NO: 30788 - protein, 213 aa, Ignavibacteriales bacterium
  misc_feature (1)..(213): tr|A0A3D6B8N4|A0A3D6B8N4_9BACT 7-carboxy-7-deazaguanine synthase OS=Ignavibacteriales bacterium OX=2049428 GN= queE PE=3 SV=1
MLKVNEIYYSVQGESTAAGLPCIFVRLTYCNLRCTYCDTEYAFYDGKDMAIPAIIDEVKKYNCKLVEITGGEPLVQMEECLGLMRQLCDEGFEVLIETGGSLSIRNIDPRVKIIMDLKCPSSGMEKKNFYENIDYLKPADELKFVIGSREDYDWTKEIISKYSLDKKCEILFSVVFGKLEPVQLVNWILEDKLKVRFQLQMHKFIWHPETKGV

SEQ ID NO: 30789 - protein, 213 aa, Ignavibacterium album
  misc_feature (1)..(213): tr|I0AGG2|I0AGG2_IGNAJ 7-carboxy-7-deazaguanine synthas e OS=Ignavibacterium album (strain DSM 19864 / JCM 1651 1 / NBRC 101810 / Mat9-16) OX=945713 GN=queE PE=3 SV=1
MAKINEIYYSIQGESSFAGLPCVFVRFTYCNLRCTYCDTAYAFYEGRDASVDEIISEIQEYKCNLVEITGGEPLVQREECIELMRRLCHLDYQVMIETGGSLPINGIDPRVKIIMDLKCPSSGMMKKNLYDNIYFLKPTDEVKFVIGTREDYDWAKEIIAQYDLTNRSTVLFSPVFGQIEPSDIVHWILEDNLQVRFQLQMHKYIWHPESRGV

SEQ ID NO: 30790 - protein, 211 aa, Ilumatobacter fluminis
  misc_feature (1)..(211): tr|A0A4R7HUX2|A0A4R7HUX2_9ACTN 7-carboxy-7-deazaguanine synthase OS=Ilumatobacter fluminis OX=467091 GN=queE P E=3 SV=1
MSYRVKEIFYTLQGEGARAGRAAVFCRFAGCNLWSGQERHRPTAICQFCDTDFVGTDGPGGGKFSTADELAAAVETAWAGNSTDRRYVVCTGGEPLLQLDEQACAALRERGFEIAIETNGTIEVPSGVDWICVSPKDGAALVVHSGDELKLVFPQAGLQPAEVSELDFEHFYLQPMDGEHRAEATEQAVAYCLEHPSWQLSLQTHKLIGIP

SEQ ID NO: 30791 - protein, 222 aa, Ilyobacter polytropus
  misc_feature (1)..(222): tr|E3HCY2|E3HCY2_ILYPC 7-carboxy-7-deazaguanine synthas e OS=Ilyobacter polytropus (strain DSM 2926 / CuHBu1) O X=572544 GN=queE PE=3 SV=1
MNYKVVETFVSINGEGKKSGELAVFIRLAGCNLRCSYCDTMWANQDDVVFKSMSKEEIYDYIKSTGVTNVTLTGGEPLIQEGVGELIDYLLTDEKLCIEVETNGSVAIQKFRKNHGRRLSFTMDYKGSSSLMEEKMLLKNFETLTEHDTVKFVVGNEYDLSKAKDLIDKYHLTEVCHVFFSPIYKEIEGETIVEFMKTNKLNKVRLQIQLHKIIWSPEERGV

SEQ ID NO: 30792 - protein, 210 aa, Imhoffiella purpurea
  misc_feature (1)..(210): tr|W9VGX2|W9VGX2_9GAMM 7-carboxy-7-deazaguanine synthas e OS=Imhoffiella purpurea OX=1249627 GN=queE PE=3 SV=1
MSYSVKEIFYTLQGEGAQAGRPAVFCRFAGCNLWSGREQDRATAVCRFCDTDFRGTDGEGGGRFEDADALADAVRSLWPDGAVAPYVVCTGGEPLLQLDRELIDALHARGCEIAVETNGTISAPPGIDWICVSPKANSELRITAGNELKLVYPQPEAMPERFAGLAFEHRFLQPMDGPAMTENTATAIAYCKAHPGWRLSVQMHKLVGIP

SEQ ID NO: 30793 - protein, 226 aa, Immundisolibacter cernigliae
  misc_feature (1)..(226): tr|A0A1B1YVA1|A0A1B1YVA1_9GAMM 7-carboxy-7-deazaguanine synthase OS=Immundisolibacter cernigliae OX=1810504 GN =queE PE=3 SV=1
MTVHAQAAPAKVPAVRLKITEIFHSIQGEGLTAGVPTVFVRLTGCPLRCSYCDTAYAFTGGEYVELPAILSRVAAFATSHVTVTGGEPLAQAGCLELLSALCDAGHQVSLETSGALDVAPVDRRVVRVLDLKTPSSGECARNLYANLDLLQSGDQVKFVLTDRADYDWAVETARRYDIASRACVLFSPAFGLLDAATLADWMLADRLPFRLQLQLHKLLWGEVPGR

SEQ ID NO: 30794 - protein, 193 aa, Imperialibacter sp.
  misc_feature (1)..(193): tr|A0A5E7ZWT5|A0A5E7ZWT5_9BACT 7-carboxy-7-deazaguanine synthase OS=Imperialibacter sp. EC-SDR9 OX=2038371 GN= queE PE=3 SV=1
MEAFYTIQGEGAFQGHAAYFIRLGGCDVGCVWCDVKESWEAAAHPDTEVARIVKEALQFPARVAVVTGGEPLMYNLEELTSQLKDKGFRTHIETSGAYPLSGSWDWVCFSPKKFKEPLPEVALAADELKVIVYNKSDFKWAEKYEALVGKNCRLFLQPEWSQQEKVTPLIIDYIKANPQWQVSLQVHKYLNIP

SEQ ID NO: 30795 - protein, 210 aa, Imtechella halotolerans
  misc_feature (1)..(210): tr|I0WDS5|I0WDS5_9FLAO 7-carboxy-7-deazaguanine synthas e OS=Imtechella halotolerans K1 OX=946077 GN=queE PE=3 SV=1
MTKEEVLALVDKGEMLPLMEEFYTIQGEGFYKGTAAYFIRVGGCDVGCHWCDVKESWNADLHPPTGIDKIVDNAAQYSQTIVVTGGEPLTWNMEPLTKALKAKGLKTHIETSGAYPLTGSWDWVCLSPKKVKLPVEGVYPHANELKMIVYNHHDFAFAEEQAAKVSDSCILYLQPEWSRRDKMIPEIVDFVMKNPRWKVSLQTHKYLNIP

SEQ ID NO: 30796 - protein, 208 aa, Indibacter alkaliphilus
  misc_feature (1)..(208): tr|S2DL25|S2DL25_9BACT 7-carboxy-7-deazaguanine synthas e OS=Indibacter alkaliphilus LW1 OX=1189612 GN=queE PE= 3 SV=1
MDKKQAIDQGIMLPVMEAFYTIQGEGVHTGTPAYFIRLGGCDVGCVWCDVKESWEAEKWPILSVEDIVNQALEYPGRLVVITGGEPLMYELGPLTGLLKKNGFTINIETSGAHPFSGTFDWVCFSPKKFKKPHPSIYEHANELKVVIFHKSDFDFAEKHAVLVNKNCHKLLQPEWSKSSVHLGSIIDYVKSRPEWKISLQTHKFMDIP

SEQ ID NO: 30797 - protein, 211 aa, Inhella sp.
  misc_feature (1)..(211): tr|A0A3S2UG70|A0A3S2UG70_9BURK 7-carboxy-7-deazaguanine synthase OS=Inhella sp. CCP-18 OX=2499851 GN=queE PE=3 SV=1
MTYAVKECFYTLQGEGAQAGRPAVFLRFAGCNLWSGREQDRATAVCNFCDTDFVGTDGEGGGKFTTAQDLAAHVAARWPDLTQGKPYVVCTGGEPLLQLDEAAIDALHAQGFEVAVETNGTQPAPQGLDWICVSPKADAPVVLTAGHELKLVFPQPLARPERFEHLDFQHFYLQPMDGLLQKQHTQAAIAHCLAHPQWRLSVQTHKVLGIP

SEQ ID NO: 30798 - protein, 214 aa, Inmirania thermothiophila
  misc_feature (1)..(214): tr|A0A3N1XX52|A0A3N1XX52_9GAMM 7-carboxy-7-deazaguanine synthase OS=Inmirania thermothiophila OX=1750597 GN=qu eE PE=3 SV=1
MAQLRVTEIFRSLQGEGLAAGLPTVFVRLTGCPLRCRYCDTAYAFSGGETMSVAAVVEAVRALPPAPAACVTGGEPLAQAGCRELLSRLCDAGYAVSLETSGALDIGGIDPRVTVVMDLKTPGSGESGRNRWANLGRLRPQDQVKLVLTDRADYEWAREVVVRHRLDARCTVLLAPAWGELEAATLAEWILADALPVRLQLQLHKLLWGEVRGR

SEQ ID NO: 30799 - protein, 210 aa, Inquilinus limosus
  misc_feature (1)..(210): tr|A0A0A0D148|A0A0A0D148_9PROT 7-carboxy-7-deazaguanine synthase OS=Inquilinus limosus MP06 OX=1398085 GN=queE PE=3 SV=1
MGYVVKEIFKTLQGEGRHAGRASVFCRFVGCNLWTGREQDRAEAVCRFCDTDFLGTDGPGGGRFDTAEALAATIEACWDGPAAERFVVFTGGEPLLQLDQALLDAIHARGFTAAVETNGTIEPPAELDWVCVSPKAGAPLAARRGDELKLVYPQPDLLPEAVAGLDFAHFWLQPMDGPDRIANTEAAVAYCLAHPQWRLSLQTHKLIGIP

SEQ ID NO: 30800 - protein, 210 aa, Inquilinus limosus
  misc_feature (1)..(210): tr|A0A211ZNM8|A0A211ZNM8_9PROT 7-carboxy-7-deazaguanine synthase OS=Inquilinus limosus OX=171674 GN=queE PE=3 SV=1
MGYVVKEIFKTLQGEGRHAGRASVFCRFVGCNLWTGREQDRAEAVCRFCDTDFLGTDGPGGGRFDSAEALAAAIEACWDGPAAERFVVFTGGEPLLQLDRALLDAIHARGFTAAIETNGTIEPPAELDWVCVSPKAGAPLAARRGDELKLVYPQPELMPEAVAGLDFTHFWLQPMDGPDRIANTEAAVAYCLSHPQWRLSLQTHKLIGIP

SEQ ID NO: 30801 - protein, 207 aa, Inquilinus sp.
  misc_feature (1)..(207): tr|A0A554SKK9|A0A554SKK9_9PROT 7-carboxy-7-deazaguanine synthase OS=Inquilinus sp. KBS0705 OX=2578108 GN=queE PE=3 SV=1
MAHQVPEDGTLLPLMEEFYTIQGEGFNTGKAAYFIRLGGCDVGCHWCDVKESWDAELHALTSADLIADNASQFPSKAVVVTGGEPLIYNLDYLTTKLQQKGIKTFIETSGAYPLSGSWDWICLSPKKFKAPMQNVADKADELKVIIFNKSDFEFAEHHSKLVGPNCKLYLQPEWSKNKEMTPLIVDYVMNNPKWEISLQTHKYLNIP

SEQ ID NO: 30802 - protein, 229 aa, Insolitispirillum peregrinum
  misc_feature (1)..(229): tr|A0A1N7MVR7|A0A1N7MVR7_9PROT 7-carboxy-7-deazaguanine synthase OS=Insolitispirillum peregrinum OX=80876 GN=q ueE PE=3 SV=1
MTLPDADPAAAGRTYTVKELFYTLQGEGLRAGRPAVFCRFTGCNLWTGRAEDRASADCTFCDTDFLGTDGPGGGRFAGPQALAEAIAACWPSMAGIPASEHGLPYVVFTGGEPTLQVDEALCRAVHQKGFEIAIETNGTRPVSPGVDWICVSPKAGTTLVQTTGDELKVVYPQSGQDLVALAALPFSHHLLQPLDDPQRADHTAAALRYCLSHPRWRLSLQTHKMLGIP

SEQ ID NO: 30803 - protein, 220 aa, Intestinibacter bartlettii
  misc_feature (1)..(220): tr|B0A669|B0A669_9FIRM 7-carboxy-7-deazaguanine synthas e OS=Intestinibacter bartlettii DSM 16795 OX=445973 GN= queE PE=3 SV=1
MFNIIEKFVSIDGEGPTAGELATFIRFQGCNLRCSWCDTTYSFDKSEITEVLSAQEIYDYIKSTGVSNVTLTGGEPLFQENINEVLSLLNDDKNLVVHIETNGAIDILPFKEKYPNIIFILDYKLASSNMTHLMKLDNLNYVTNKDVYKFVLGSDEDLQEAYELITKFNLTNKCLVYFSPVFSAIKLEDIVEFMKEKNLNKVRLQVQLHKVIWDPNMKGV

SEQ ID NO: 30804 - protein, 214 aa, Iodobacter fluviatilis
  misc_feature (1)..(214): tr|A0A377STP0|A0A377STP0_9NEIS 7-carboxy-7-deazaguanine synthase OS=Iodobacter fluviatilis OX=537 GN=queE PE=3 SV=1
MKDALRITEIFCSLQGETTRMGLPTVFVRLTGCPLRCGYCDSAYAFTGGETQSFQTILDKIASFNTHHICVTGGEPLAQKGVHELMRLLCDAGYSLSLETSGALSIAEVDPRVSRILDIKTPGSGELSKMHWENLDYLSNTDEIKFVLCDRNDYEWARNLIRERRLETLAPVLMSPVWETLPPANLAAWVLEDHLPVRMQVQLHKILWGERPGV

SEQ ID NO: 30805 - protein, 214 aa, Iodobacter sp.
  misc_feature (1)..(214): tr|A0A3S8ZV59|A0A3S8ZV59_9NEIS 7-carboxy-7-deazaguanine synthase OS=Iodobacter sp. H11R3 OX=2496266 GN=queE PE =3 SV=1
MKDALRITEIFCSLQGETTRMGLPTVFVRLTGCPLRCGYCDSTYAFTGGETQSFQTILDKIASFNTHHICVTGGEPLAQKGVHELMRLLCDAGYSLSLETSGALSIADVDPRVSRILDIKTPGSGELSKMHWKNLDYLSKQDEIKFVLCDRNDYEWARDLIRERRLETLAPVLMSPVWETLPPANLAAWVLEDHLPVRMQVQLHKILWGERPGV

SEQ ID NO: 30806 - protein, 214 aa, Iodobacter sp.
  misc_feature (1)..(214): tr|A0A2G3JFD1|A0A2G3JFD1_9NEIS 7-carboxy-7-deazaguanine synthase OS=Iodobacter sp. BJB302 OX=1506510 GN=queE P E=3 SV=1
MKDALRITEIFCSLQGETTRMGLPTVFVRLTGCPLRCGYCDSAYAFTGGETQSFQTILDKIASFNTHHICVTGGEPLAQKGVHELMRLLCDAGYSLSLETSGALSIADVDPRVSRILDIKTPGSGELSKMHWENLDYVNKADEIKFVICDRSDYEWARDLIRERRLETLAPVLMSPVWETLPPANLAAWVLEDHLPVRMQVQLHKILWGERPGV

SEQ ID NO: 30807 - protein, 293 aa, Isosphaera pallida
  misc_feature (1)..(293): tr|E8R001|E8R001_ISOPI 7-carboxy-7-deazaguanine synthas e OS=Isosphaera pallida (strain ATCC 43644 / DSM 9630 / IS1B) OX=575540 GN=queE PE=3 SV=1
MALGQHNVGLLDECRRRARMRSGGEDLTEGGVANDVDGEGLGLERELAETAGGSPIESAGPAARTRRLAPLRDKTPGQVRLHEVYRSIQGEGTWAGLPCVFVRLTACHLRCVYCDTPHAFVFREGGDFTIEAIVARVAELAEPGGLVEVTGGEPLLQPEALPLMTALADAGFEVLLETSGSLDIAPVDRRVHIIMDLKTPGSGEEAANLWTNLDHLKPTDNLKFVVTNRADFDWTLEIVRRHDLTARCPVLVSPAFDAVSPRDLAEWILKSRLPLRMQLQLHKLIWHPKARGV

SEQ ID NO: 30808 - protein, 248 aa, Isosphaeraceae bacterium
  misc_feature (1)..(248): tr|A0A432MH62|A0A432MH62_9BACT 7-carboxy-7-deazaguanine synthase OS=Isosphaeraceae bacterium GM2012 OX=2080755 GN=queE PE=3 SV=1
MPCPERPLSAPILPPVAPGRRDHRLKSILGRPSGVLVVHELYRSLQGEGTFAGLPCVFVRLTACHLRCSYCDTPHAFNHGEPIALRALLERILAIAAPGDLIEVTGGEPLLQDEALPLMSGLADAGRVVLLETSGACDIGPVDPRVRIILDLKTPGSGEEQANLWDNLAKLKPTDEVKVVVCDRPDFDWALERIREHRLVERCPVLVSPAHGRVDAAELAAWILESGLPLRLQVQLHKQLWGPDARGV

SEQ ID NO: 30809 - protein, 223 aa, Izhakiella australiensis
  misc_feature (1)..(223): tr|A0A1S8YKR1|A0A1S8YKR1_9ENTR 7-carboxy-7-deazaguanine synthase OS=Izhakiella australiensis OX=1926881 GN=que E PE=3 SV=1
MYYPINEMFQTLQGEGFYTGVPAIFIRLQGCPVGCSWCDTKHTWDKLADRETSLQQIVTKDAESDAWGNADETMLLKAIADKGWTARHVVITGGEPCIHDLHALTQALAQHGFGCQIETSGTHEVKCSEQCWVTVSPKVNMRGGYDVLDQALSRADEIKHPVARQRDVDALDALLARLQDDKKRIIALQPISQKAEATALCIETCIARNWRLSMQTHKYLNIA

SEQ ID NO: 30810 - protein, 223 aa, Izhakiella capsodis
  misc_feature (1)..(223): tr|A0A1I4W8V7|A0A1I4W8V7_9ENTR 7-carboxy-7-deazaguanine synthase OS=Izhakiella capsodis OX=1367852 GN=queE PE= 3 SV=1
MDYPINEMFQTLQGEGFYTGVPAIFIRLQGCPVGCSWCDTKHTWDKLADRECSLQQILIKDAESDAWGNADETMLLNAIANKSWTAHHVVITGGEPCIHDLRGLTYALEQRDFSCQIETSGTHEIKCSEQSWVTVSPKVNMRGGYDVLDQALRRADEIKHPVARQRDIDALDALLATLDDDKKRIVALQPISQKAEATALCIETCIVRNWRLSMQTHKYLNIA

SEQ ID NO: 30811 - protein, 223 aa, Izhakiella sp.
  misc_feature (1)..(223): tr|A0A4V1G726|A0A4V1G726_9ENTR 7-carboxy-7-deazaguanine synthase OS=Izhakiella sp. KSNA2 OX=2579935 GN=queE PE =3 SV=1
MQYPINEMFQTLQGEGYFTGVPAVFIRLQGCPVGCPWCDTKHTWEKLADREVSMFSIMAKTRESDKWGAAGVEDLLAIIQRQGYSARHVVITGGEPCIHDLTALTEGLKSQGFSCQIETSGTHEVRCSPGTWVTVSPKVNMRGGYDVLSQALQRADEIKHPVGRVRDIEALDELLETLDDEKARIIALQPISQKEEATRLCIETCIARNWRLSMQTHKYLNIA

SEQ ID NO: 30812 - protein, 211 aa, Janthinobacterium agaricidamnosum
  misc_feature (1)..(211): tr|A0A3G2E908|A0A3G2E908_9BURK 7-carboxy-7-deazaguanine synthase OS=Janthinobacterium agaricidamnosum OX=55508 GN=queE PE=3 SV=1
MTYSIKEIFYTLQGEGAHAGRPAVFCRFSGCNLWTGRESDRATAVCQFCDTDFVGTDGELGGKFKTPEELAALIDSLWPASYAPSKYVVFTGGEPLLQLDTALIDAMHAVGFTIAIETNGTLPVPAGVDWICVSPKMGSTLVVHKGNEIKVVIPQFQQDLAAYEGLDFENFFVQAMDGPLAAHNMKLAIETCKSNPKWKLSLQTHKLLQIP

SEQ ID NO: 30813 - protein, 211 aa, Janthinobacterium agaricidamnosum
  misc_feature (1)..(211): tr|W0V7R4|W0V7R4_9BURK 7-carboxy-7-deazaguanine synthas e OS=Janthinobacterium agaricidamnosum NBRC 102515 = DS M 9628 OX=1349767 GN=nrdG PE=3 SV=1
MTYSIKEIFYTLQGEGAQAGRPAVFCRFSGCNLWTGRESDRAGAVCTFCDTDFVGTDGDGGGKFKTAEALAAAIDGLWPASYPASKYVVFTGGEPLLQLDTPLIDAMHRAGFTIAIETNGTLPVPPGVDWICVSPKMGSQLVVSKGSELKVVIPQTGQDLAAYEALDFDNFYVQAMDGPLAEFNTRLAIETCKRNPKWKLSLQTHKLLQIP

SEQ ID NO: 30814 - protein, 211 aa, Janthinobacterium lividum
  misc_feature (1)..(211): tr|A0A1E8PJU4|A0A1E8PJU4_9BURK 7-carboxy-7-deazaguanine synthase OS=Janthinobacterium lividum OX=29581 GN=queE PE=3 SV=1
MTYSIKEIFYTLQGEGAHAGRPAVFCRFSGCNLWSGRESERATAVCQFCDTDFVGTDGELGGKFKTPQELAALIDSLWPASYAPSKYVVFTGGEPLLQLDTALIDAMHAVGFTIAIETNGTLPVPAGVDWICVSPKMGSTLVVHKGNEIKVVIPQFQQDLAAYAGLDFENFFVQAMDGPLAAHNLQLAIETCKSNPQWKLSLQTHKLLQIP

SEQ ID NO: 30815 - protein, 211 aa, Janthinobacterium lividum
  misc_feature (1)..(211): tr|A0A377RX96|A0A377RX96_9BURK 7-carboxy-7-deazaguanine synthase OS=Janthinobacterium lividum OX=29581 GN=queE PE=3 SV=1
MTYSIKEIFYTLQGEGAHAGRPAVFCRFSGCNLWTGRESDRATAVCQFCDTDFVGTDGELGGKFKTPQELAALIDSLWPASYAPSKYVVFTGGEPLLQLDTALIDAMHAVGFTIAIETNGTLPVPAGVDWICVSPKMGSTLVVHKGNEIKVVIPQFQQDLAAYEQLDFENFFVQAMDGPLAAHNMKLAIETCKSNPKWKLSLQTHKLLQIP

SEQ ID NO: 30816 - protein, 211 aa, Janthinobacterium sp.
  misc_feature (1)..(211): tr|A0A1N6XS23|A0A1N6XS23_9BURK 7-carboxy-7-deazaguanine synthase OS=Janthinobacterium sp. TND4EL3 OX=1907311 G N=queE PE=3 SV=1
MTYSIKEIFYTLQGEGAHAGRPAVFCRFSGCNLWTGRESDRATAVCQFCDTDFVGTDGELGGKFKTPQELAALIDSLWPASYTASKYVVFTGGEPLLQLDTALIDAMHAVGFTIAIETNGTLPVPAGVDWICVSPKMGSTLVVHKGNEIKVVIPQFQQDLAAYEGLDFENFFVQAMDGPLAAHNMQLAIETCKSNPKWKLSLQTHKLLQIP

SEQ ID NO: 30817 - protein, 211 aa, Janthinobacterium sp.
  misc_feature (1)..(211): tr|A0A349KYF0|A0A349KYF0_9BURK 7-carboxy-7-deazaguanine synthase OS=Janthinobacterium sp. OX=1871054 GN=queE P E=3 SV=1
MTYSIKEIFYTLQGEGAHAGRPAVFCRFSGCNLWSGRESDRASAVCGFCDTDFVGTDGERGGKFSAAADLAGVIDSLWPASYPASKYVVFTGGEPLLQLDAALIDAMHAAGFEIAIETNGTLAVPPGVDWICVSPKMGSKLVVRKGNEIKVVIPQTGQDLAAYEGLEFDNFFVQAMDGPLAEHNTRLAIETCKRMPKWKLSLQTHKLLQIP

SEQ ID NO: 30818 - protein, 211 aa, Janthinobacterium svalbardensis
  misc_feature (1)..(211): tr|A0A290WXI7|A0A290WXI7_9BURK 7-carboxy-7-deazaguanine synthase OS=Janthinobacterium svalbardensis OX=368607 GN=queE PE=3 SV=1
MTYSIKEIFYTLQGEGAHAGRPAVFCRFSGCNLWTGRESDRATAVCQFCDTDFVGTDGELGGKFKTPEELAALIDSLWPVSYAPSKYVVFTGGEPLLQLDTALIAAMHAVGFTIAIETNGTLPVPAGVDWICVSPKMGSTLVVHKGNEIKVVIPQFQQDLAAYEQLDFENFFVQAMDGPLAARNMQLAIETCKSNPKWKLSLQTHKLLQIP

SEQ ID NO: 30819 - protein, 215 aa, Jejuia pallidilutea
  misc_feature (1)..(215): tr|A0A362X9T5|A0A362X9T5_9FLAO 7-carboxy-7-deazaguanine synthase OS=Jejuia pallidilutea OX=504487 GN=queE PE=3 SV=1
MYLCMLMKKEIQQLVDAGLMLPLMEEFYTIQGEGYHKGTAAYFVRIGGCDVGCHWCDVKESWNANLHPPTEIAKIVENAKKYSDTIVITGGEPLTWDMTALTSQLKAEGLQIHIETSGAYKLTGIWDWVCLSPKKMKLPTKEVYDKADELKVIVYNKDDFRFAEEQASKVNKNCILYLQPEWSKRDKVIPEIVDYVMKHPKWKVSLQTHKYLNIP

SEQ ID NO: 30820 - protein, 215 aa, Jejuia pallidilutea
  misc_feature (1)..(215): tr|A0A090WGA6|A0A090WGA6_9FLAO 7-carboxy-7-deazaguanine synthase OS=Jejuia pallidilutea OX=504487 GN=queE PE=3 SV=1
MYLCMLMKKEIQQLVDAGLMLPLMEEFYTIQGEGYHKGTAAYFVRIGGCDVGCHWCDVKESWNANLHPPTEIAKIVENAKKYSDTIVITGGEPLTWDMTALTSQLKAEGLQIHIETSGAYKLTGIWDWVCLSPKKMKLPTKEVYNKADELKVIVYNKDDFRFAEEQAAKVNKNCILYLQPEWSKRDKVIPEIVDYVMKHPKWKVSLQTHKYLNIP

SEQ ID NO: 30821 - protein, 215 aa, Jeongeupia sp.
  misc_feature (1)..(215): tr|A0A1D9BFC3|A0A1D9BFC3_9NEIS 7-carboxy-7-deazaguanine synthase OS=Jeongeupia sp. USM3 OX=1906741 GN=queE PE= 3 SV=1
MNPATLRITEIFYSLQGETSRLGLPTVFVRLTGCPLRCGYCDSAYAFHGGKTMGFDDILFEIARHGASTVCVTGGEPLAQKHSLAFLTALCDAGYSVSLETSGALPIENVDPRVSRILDIKTPGSGELARMHWANLDALRPGDEVKFVLCDRSDYEWARDLVRERKVNDLAPVLFSPVWETLPPADLAAWVLEDRLPVRMQVQLHKILWGEKPGV

SEQ ID NO: 30822 - protein, 244 aa, Jeotgalibacillus alimentarius
  misc_feature (1)..(244): tr|A0A0C2S441|A0A0C2S441_9BACL 7-carboxy-7-deazaguanine synthase OS=Jeotgalibacillus alimentarius OX=135826 GN =queE PE=3 SV=1
MEKANKKFPVLEIFGPTVQGEGMVIGQKTMFVRTAGCDYSCSWCDSAFTWDGSAKDEIRRLTAEEILDELKAAGGNLFEHVTISGGNPALLKNLSELVDLLHSEGIKVALETQGSIWQDWFMDIDDLTLSPKPPSSGMKPNMGILDDIIEKLSKSQYDHSLKVVIFDKEDLKFAEDLHTRYPKVPFYLQTGNDQVHEEKDERLIPNLIARYEWLIDQVMENSRLNQVRVLPQLHTYVWGNKRGV

SEQ ID NO: 30823 - protein, 247 aa, Jeotgalibacillus campisalis
  misc_feature (1)..(247): tr|A0A0C2RC50|A0A0C2RC50_9BACL 7-carboxy-7-deazaguanine synthase OS=Jeotgalibacillus campisalis OX=220754 GN=q ueE PE=3 SV=1
MMQQTKEKKIPVLEIFGPTVQGEGMVIGQKTMFIRTAGCDYSCAWCDSAFTWDGSAKDEIRQMSSSSIIEELFKTGGNAFSHVTISGGNPALIKHMGVLVTALQELGIDVALETQGSIWQDWFMSIDDLTISPKPPSSKMKPNLGILDDILDRLKSRPNSTYSLKVVVFDENDLDFAEMLHSRYPTVPFYIQTGNEQVTETNDTRLVSDLISKYEWLIDCVMKREALNRVRVLPQLHTYVWGNKRGV

SEQ ID NO: 30824 - protein, 244 aa, Jeotgalibacillus malaysiensis
  misc_feature (1)..(244): tr|A0A0B5ALL1|A0A0B5ALL1_9BACL 7-carboxy-7-deazaguanine synthase OS=Jeotgalibacillus malaysiensis OX=1508404 G N=queE PE=3 SV=1
MEQTKKKFPVLEIFGPTVQGEGMVIGQKTMFVRTAGCDYSCSWCDSAFTWDGSAKDEINKMTAEEIYHELKATGGNLFNHVTISGGNPALLKNLSELVDLLHENDIQVALETQGSIWQDWFWNIDDLTLSPKPPSSGMKPNMGILDDIIEKLRKGSHDYSLKVVIFDELDLTFAEELHQRYPGVPFYLQVGNDQVHEEKDEKLIPNLISRYEWLIDQVMESSSLNQVRVLPQLHTYVWGNKRGV

SEQ ID NO: 30825 - protein, 243 aa, Jeotgalibacillus marinus
  misc_feature (1)..(243): tr|A0A0M0L2E4|A0A0M0L2E4_9BACL 7-carboxy-7-deazaguanine synthase OS=Jeotgalibacillus marinus OX=86667 GN=queE PE=3 SV=1
MAKGIPVLEIFGPTIQGEGMVIGQKTMFVRTAGCDYSCSWCDSAFTWDGSAKKDIRWLTAEEIFAELKDIGGDAFSHVTISGGNPALLKQLDAFIELLKENNIRAALETQGTVYQDWFTLIDDLTISPKPPSSKMVTNFQKLDHILTSLKENNRQHACSLKVVIFNDEDLEFAKTVHKRYPGIPFYLQVGNDDVHTTDDQSLIAHLLGKYEALVDKVAVDAELNLVRVLPQLHTLLWGNKRGV

SEQ ID NO: 30826 - protein, 246 aa, Jeotgalibacillus proteolyticus
  misc_feature (1)..(246): tr|A0A2S5GFX9|A0A2S5GFX9_9BACL 7-carboxy-7-deazaguanine synthase OS=Jeotgalibacillus proteolyticus OX=2082395 GN=queE PE=3 SV=1
MQQVKEKKFPVLEIFGPTVQGEGMVIGQKTMFVRTAGCDYSCAWCDSAFTWDGSAKEDIRQMTAEDIVNELRHTGGASFSHVTISGGNPALLKNLGALVEALHNQQVEVALETQGSIWQEWFLEIDDLTISPKPPSSKMKPNLHVLDDILERLQNRPKSAYSLKVVIFDEGDLEFAEKLHHRYPNVAFYVQTGNDQVQEENNERLVSDLIGRYEWLIEKVMERDTLNRVRVLPQLHTYVWGNKRGV

SEQ ID NO: 30827 - protein, 244 aa, Jeotgalibacillus salarius
  misc_feature (1)..(244): tr|A0A4Y8LND4|A0A4Y8LND4_9BACL 7-carboxy-7-deazaguanine synthase OS=Jeotgalibacillus salarius OX=546023 GN=que E PE=3 SV=1
MEKREKKFPVLEIFGPTVQGEGMVIGQKTMFVRTAGCDYSCSWCDSAFTWDGSAKDEINRMTAEEILEELRETGGDLFEHVTISGGNPALLKHLSELVDLLHQEGIKVALETQGSIWQDWFMDIDDLTLSPKPPSSGMKPNMGILDDIMKKLSESHHAYSLKIVIFDDNDLNFAEDLHHRYPDVPFYLQTGNDQVHEEKDEQLIPNLISRYEWLIDKVMENNRLNHVRVLPQLHTYVWGNKRGV

SEQ ID NO: 30828 - protein, 246 aa, Jeotgalibacillus soli
  misc_feature (1)..(246): tr|A0A0C2VLK9|A0A0C2VLK9_9BACL 7-carboxy-7-deazaguanine synthase OS=Jeotgalibacillus soli OX=889306 GN=queE PE =3 SV=1
MNTKKEKMIPVMEIFGPTVQGEGMVIGQKTMFVRTAGCDYQCAWCDSAFTWDGSAKDEIRRLTAREIVNELKATGGDAFSHVTISGGNPALIRHMGELVEHLHEQNIDVALETQGSIWQDWFLSIDDLTLSPKPPSSKMKPNLQILDDIISRLKDQPSNNYSLKVVVFNDEDLDFAESIHKRYPNVLFFVQTGNNQVHEENDKRLVSDLISRYEWLIDRVMERAALNRVRVLPQLHTYVWGNKRGV

SEQ ID NO: 30829 - protein, 244 aa, Jeotgalibacillus sp.
  misc_feature (1)..(244): tr|A0A4Y8LK29|A0A4Y8LK29_9BACL 7-carboxy-7-deazaguanine synthase OS=Jeotgalibacillus sp. R-1-5s-1 OX=2555897 G N=queE PE=3 SV=1
MTQRERKFPVLEIFGPTVQGEGMVIGQKTMFVRTAGCDYSCSWCDSAFTWDGSAKDEIRQLTALDIFNELKKTGGDHFNHVTISGGNPALLKHLSELVQLLHENNMQVALETQGSIWQDWFLSIDDLTLSPKPPSSGMKPNLPILDDIVSKLIAGKSDFSLKVVIFDDEDLAFAEMLHQRYPDVPFYLQTGNDQVHEQKDEKLIPNLIARYEWLIDKVMVNSKLNQVRVLPQLHTYVWGNKRGV

SEQ ID NO: 30830 - protein, 246 aa, Jeotgalibacillus sp.
  misc_feature (1)..(246): tr|A0A4R5XTA6|A0A4R5XTA6_9BACL 7-carboxy-7-deazaguanine synthase OS=Jeotgalibacillus sp. S-D1 OX=2552189 GN=qu eE PE=3 SV=1
MKQVTREKKIPVMEIFGPTVQGEGMVIGQKTMFIRTAGCDYSCAWCDSAFTWDGTAKDEIRQLTVSAILQELIETGGESFSHVTISGGNPALIRHIGLLIDALHDKKIDVALETQGSLWQDWFLNIDELTLSPKPPSSKMKPNMGILDDIIDRLSEASSNFSLKVVIFDEEDLNFAQMLHERYPQAPFYIQTGNDQVQEADNQRLVTDLINRYEWLIDRVMERPALNRVRVLPQLHTFVWGNKRGV

SEQ ID NO: 30831 - protein, 206 aa, Jiulongibacter sediminis
  misc_feature (1)..(206): tr|A0A0N8HA88|A0A0N8HA88_9BACT 7-carboxy-7-deazaguanine synthase OS=Jiulongibacter sediminis OX=1605367 GN=que E PE=3 SV=1
MTVKTTKNTDLPIMESFYTIQGEGFHSGKAAYFIRLGGCDVGCVWCDVKESWNAEDHPFQTLEEIVAGAEEQTGKMVVITGGEPLMYDMRPLTSALKSRGFQTNIETSGAYPMTGEWDWVCFSPKKFKEAHESIFPVADELKVIIFNKSDFKFAEKYAALVSENCQLMLQPEWDKQEQMLPLIIDYVKENPQWKISLQTHKWMGVP

SEQ ID NO: 30832 - protein, 210 aa, Joostella marina
  misc_feature (1)..(210): tr|I3C7L9|I3C7L9_9FLAO 7-carboxy-7-deazaguanine synthas e OS=Joostella marina DSM 19592 OX=926559 GN=queE PE=3 SV=1
MTKEAILAKVNAGEMLPLMEEFYTIQGEGFYKGTAAYFIRIGGCDVGCHWCDVKESWNAETHPPTAVATIVENAAKYSDTIVITGGEPLTWDMTFITSELKKRGLKTHIETSGAYELTGEWDWICLSPKKMKLPTAKVYEKANELKCIVYNKNDFEFAEAQAEKVGKDCILYLQPEWSKRDKMIPEIVEYVMKNPKWKVSLQTHKYLNIP

SEQ ID NO: 30833 - protein, 223 aa, Kalamiella piersonii
  misc_feature (1)..(223): tr|A0A3A9IV03|A0A3A9IV03_9GAMM 7-carboxy-7-deazaguanine synthase OS=Kalamiella piersonii OX=2364647 GN=queE PE =3 SV=1
MQYPINEMFQTLQGEGFYTGVPAIFIRLQGCPVGCSWCDTKHTWEKRADRETALGDILVKTVESDAWGNADATLLLETIQRQGWTARHVVITGGEPSIYDLRPLTTALEAQGFQCQIETSGTHEVRCSERTWVTVSPKVNMRGGYDVLAQALQRADEIKHPVARERDVEALDELLATLSDSKQRIIALQPISRKEAATKLCIETCIARNWRLSMQTHKYLNIA

SEQ ID NO: 30834 - protein, 219 aa, Kandleria vitulina
  misc_feature (1)..(219): tr|A0A0R2HC16|A0A0R2HC16_9FIRM 7-carboxy-7-deazaguanine synthase OS=Kandleria vitulina DSM 20405 OX=1410657 GN =queE PE=3 SV=1
MFKVVEMFESINGEGYKAGQLAYFVRFQGCNMNCVYCDTKWANKKDAPYQLMSAQDIVSKVNEAHIKNVTLTGGEPMLQEEIEELIRLLYENGHEVEIETNGSIDISSYDHCDYRPSFTLDYKCPDSGMEKFVDVMNYDHIQEKDTIKFVCSSRIDLKKAYEIIEKYALNKKAHVYLSPVFGKIDPQEMVAFMLEKNMNDVNLQLQMHKFIWDPEERGV

SEQ ID NO: 30835 - protein, 219 aa, Kandleria vitulina; identical to SEQ ID NO: 30834
  misc_feature (1)..(219): tr|A0A1H2QAC0|A0A1H2QAC0_9FIRM 7-carboxy-7-deazaguanine synthase OS=Kandleria vitulina OX=1630 GN=queE PE=3 SV =1

SEQ ID NO: 30836 - protein, 213 aa, Kangiella geojedonensis
  misc_feature (1)..(213): tr|A0A0F6RCK0|A0A0F6RCK0_9GAMM 7-carboxy-7-deazaguanine synthase OS=Kangiella geojedonensis OX=914150 GN=queE PE=3 SV=1
MSKLRITEIFHSLQGESLTVGLPTVFVRLTGCPLRCTYCDTDYAFGGGEWMTYEEILADIEQYNCQHICMTGGEPLAQKRAYEFYQLLCEKGYKVSTETGGAHDISVLDKRVMVVMDLKTPDSGEMSRNLYENIEHLKPTDQVKFVICSRKDYDWCKMTVDKYNLTDKCEVLFSPSYGQVEYADLAEWILKDRLKVRMQVQLHKIIWGEKQGV

SEQ ID NO: 30837 - protein, 213 aa, Kangiella koreensis
  misc_feature (1)..(213): tr|C7R5T3|C7R5T3_KANKD 7-carboxy-7-deazaguanine synthas e OS=Kangiella koreensis (strain DSM 16069 / KCTC 12182 / SW-125) OX=523791 GN=queE PE=3 SV=1
MSKLRITEIFHSLQGESLTVGVPTVFVRLTGCPLRCVYCDTDYAFGGGEWMRFEEILAEIKQYGCEHVCITGGEPLAQKRVFEFFKLLGDEGYKVSTETGGAHDISPVDKRVMVVMDLKTPDSQEMARNLYSNIELLKPTDQVKFVICSRKDYEWCKMTVEQYDITSKCEVLFSPSYGQVEYADLAEWILKDRLKVRMQVQLHKIIWGEKTGV

SEQ ID NO: 30838 - protein, 213 aa, Kangiella profundi
  misc_feature (1)..(213): tr|A0A2K9AW16|A0A2K9AW16_9GAMM 7-carboxy-7-deazaguanine synthase OS=Kangiella profundi OX=1561924 GN=queE PE=3 SV=1
MSKLRITEIFHSLQGESLTVGVPTVFVRLTGCPLRCVYCDTDYAFGGGKWMTFEEILAEVKQYGCEHVCVTGGEPLAQKRVFEFFKLLCDEGFKVSTETGGAHDISELDSRVMIVMDLKTPDSQEMARNLYSNIEHLKPTDQVKFVICSRKDYEWCKMTVEQYDITSKCEVLFSPSYGQVEYADLAEWILKDRLKVRMQVQLHKLIWGERTGV

SEQ ID NO: 30839 - protein, 213 aa, Kangiella sediminilitoris
  misc_feature (1)..(213): tr|A0A1B3BBY5|A0A1B3BBY5_9GAMM 7-carboxy-7-deazaguanine synthase OS=Kangiella sediminilitoris OX=1144748 GN=qu eE PE=3 SV=1
MSKLRITEIFHSLQGESLTVGLPTVFVRLTGCPLRCTYCDTDYAFGGGEWMSFEEILAQIESYNCPNICMTGGEPLAQKRAYDFYKLLCDKGYQVSTETGGAHDISVLDKRVMVVMDLKTPDSGEMSRNLYENIDHLKPTDQVKFVICSRKDYDWCKMTLDKYDLTNKCEVLFSPSYGQVEYADLAEWILKDRLRVRMQVQLHKIIWGERTGV

SEQ ID NO: 30840 - protein, 213 aa, Kangiella sp.
  misc_feature (1)..(213): tr|A0A3D8UPT7|A0A3D8UPT7_9GAMM 7-carboxy-7-deazaguanine synthase OS=Kangiella sp. HD9-110m-PIT-SAG07 OX=228359 5 GN=queE PE=3 SV=1
MSKLRITEIFHSLQGESLTVGLPTVFVRLTGCPLRCTYCDTDYAFGGGEWMTFEEILVDIEQYNCQHICMTGGEPLAQKRAYEFYELLCEKGYNVSTETGGAHDISVLDKRVMVVMDLKTPDSGEMARNLYENIDHLKPTDQVKFVICSRKDYDWCKMTVDKYNITDKCEVLFSPSYGQVEYETLAGWILKDRLRVRMQVQLHKVIWGERTGV

SEQ ID NO: 30841 - protein, 214 aa, Kangiella sp.
  misc_feature (1)..(214): tr|A0A2G2KXT5|A0A2G2KXT5_9GAMM 7-carboxy-7-deazaguanine synthase OS=Kangiella sp. OX=1920245 GN=queE PE=3 SV=1
MTRLRISEIFYSLQGESSSIGKPTLFVRLTGCPLRCVWCDTEYAFTGGDYWAFDDLIEKIVSYSPQNICITGGEPMAQKDPCQKLMFRLCELGYSVSLETSGSIDLKEVDSRVTKVMDLKAPDSGEMAKNHYKNIQYLDKTDEVKFVVMSRKDYDWTKMQIDQYQLSVKTNVIISPCFGEIDERQLAEWIIEDNLPVRFQIQMHKILWNDAKGH

SEQ ID NO: 30842 - protein, 213 aa, Kangiella spongicola
  misc_feature (1)..(213): tr|A0A318D8G8|A0A318D8G8_9GAMM 7-carboxy-7-deazaguanine synthase OS=Kangiella spongicola OX=796379 GN=queE PE= 3 SV=1
MSKLRITEIFHSLQGESLTVGLPTVFVRLTGCPLRCTYCDTDYAFGGGEWMSYDEILAEIEQYNCQHICMTGGEPLAQKRAYEFYHLLCEKGYKVSTETGGAHDISVLDKRVMVVMDLKTPDSGEMSRNLYENIDRLKPTDQVKFVICSRKDYDWCKMTIDKYNLTEKCEVLFSPSYGQVEYADLAEWILKDRLRVRMQVQLHKVIWGERTGV

SEQ ID NO: 30843 - protein, 214 aa, Ketobacter alkanivorans
  misc_feature (1)..(214): tr|A0A2K9LQQ5|A0A2K9LQQ5_9GAMM 7-carboxy-7-deazaguanine synthase OS=Ketobacter alkanivorans OX=1917421 GN=queE PE=3 SV=1
MTQLRITEIFYSLQGEARTIGLPTVFVRLTGCPLRCQYCDTAYAFSGGEMRSIDQILAEVASYQPRYITVTGGEPLAQPNCQQLLTALCDAGYQVSLETSGALDIAGVDPRVSVVMDLKTPDSGESHRNLMANIPHLKPDDQIKFVICSRQDYQWARLKLDELQLAERVGDVLFSPSFNQIRPSELADWIVEDRLPVRFQLQLHKLLWADEPGH

SEQ ID NO: 30844 - protein, 214 aa, Ketobacter sp.
  misc_feature (1)..(214): tr|A0A3L8BYM5|A0A3L8BYM5_9GAMM 7-carboxy-7-deazaguanine synthase OS=Ketobacter sp. OX=2083498 GN=queE PE=3 SV= 1
MTQLRITEIFNSLQGEARTIGRPTVFVRLTGCPLRCQYCDTTYAFSGGDMWALEDILQEVASYSPRYVTVTGGEPLAQPGCRTLLTALCDAGYQVSLETSGALDIAGLDSRVSVVLDLKTPDSGESHRNLMENIPHLKPLDQVKFVICSRQDYQWARMKVDELGLAQRVDDVLFSPSHGQISVVELADWIVEDRLPVRFQLQLHKVLWADEPGR

SEQ ID NO: 30845 - protein, 216 aa, Ketobacter sp.
  misc_feature (1)..(216): tr|A0A3F2V9Q8|A0A3F2V9Q8_9GAMM 7-carboxy-7-deazaguanine synthase OS=Ketobacter sp. OX=2083498 GN=queE PE=3 SV= 1
MSVSQLRITEIFYSLQGEARTIGLPTVFVRLTGCPLRCQYCDTEYAFSGGEMRSLQQILDQVNSYSPRYVTVTGGEPLAQPNCIPLLSQLCDLGLEVSLETSGALDVSEVDSRVSIVLDLKTPGSGEMHRNLYSNLEHLKPKDQIKFVICGRQDYQWAKMQLSQLKLDLLVGDVLFSPSHQAIEPADLANWIVEDNLPVRFQLQLHKILWADQPGY

SEQ ID NO: 30846 - protein, 255 aa, Kibdelosporangium phytohabitans
  misc_feature (1)..(255): tr|A0A0N9I2J1|A0A0N9I2J1_9PSEU 7-carboxy-7-deazaguanine synthase OS=Kibdelosporangium phytohabitans OX=860235 GN=queE PE=3 SV=1
MITDTPVAAGRARRGQTLPLSEVFGPTFQGEGPFTGYRARFVRLGGCNLSCGAGAAPMVCDTEYTWNSAKFDLAVECPETRTTAILEHAGRISAPITVLTGGEPMTHQRKPAFTELLTGLRDLGQVHVETNGTIPPAADAHDLVDHFTVSPKLTNTGDPAGKRLKPRALAAFAAEAPGKAVFKFVVATPDELTEVDRLVDEYSIPHPAVWIMPEGRTAARVLACHRSLADAILTRGYNTTTRLHMLLWPEEDRGR

SEQ ID NO: 30847 - protein, 248 aa, Kiloniella litopenaei
  misc_feature (1)..(248): tr|A0A0M2RCC2|A0A0M2RCC2_9PROT 7-carboxy-7-deazaguanine synthase OS=Kiloniella litopenaei OX=1549748 GN=queE P E=3 SV=1
MFADAPPNARTIKVSEIFGPTIQGEGALTGLPTVFVRMGGCDYRCSWCDTLYAVDSSFRDQWKPMSPAAIMSEVASLSGGKPLLVSLSGGNPAIQPLGALIDLGHEQGYRFALETQGSVVKDWFSKLDNLTLSPKPPSSDMETDWDLLANCVATAGSDTETIMKVVVFDDRDYAYAKEVHRRFPGLRMYLQPGNHTPGTVEETEPTIDMSGVMDRMRWLIDKVVDDEWYDATVLPQLHVLIWGNERGV

SEQ ID NO: 30848 - protein, 250 aa, Kiloniella spongiae
  misc_feature (1)..(250): tr|A0A0H2MJR3|A0A0H2MJR3_9PROT 7-carboxy-7-deazaguanine synthase OS=Kiloniella spongiae OX=1489064 GN=queE PE= 3 SV=1
MKVFSDVPPNARTIKVSEIFGPTIQGEGALTGLPTVFVRMGGCDYRCSWCDTLYAVDSSFRDQWKPMSPTAIMTEVASLSGGKPLLVSLSGGNPAIQPLGALIDLGHEQGYRFALETQGSVVKDWFSKLDNLTLSPKPPSSEMETDWDLLAGCVAAAGSDTETIMKVVVFDDRDYAYAKEVHRRFPGLRMYLQPGNHTPGTVEETEPTIDLSGVMNRMRWLIDKVVEDEWYDATVLPQLHVLIWGNERGV

SEQ ID NO: 30849 - protein, 237 aa, Kineococcus radiotolerans
  misc_feature (1)..(237): tr|A6WGA5|A6WGA5_KINRD 7-carboxy-7-deazaguanine synthas e OS=Kineococcus radiotolerans (strain ATCC BAA-149 / D SM 14245 / SRS30216) OX=266940 GN=queE PE=3 SV=1
MTYLLKEIFYTLQGEGTHAGRPAVFCRFSRCNLWTGREKDRARAICTFCDTDFVGTDGVGGGRFATADDLAAAVDASWPAAGLTDDFTDGSAITAESDSSAHSHAPHGAQRKFVVCTGGEPLLQLDDAAVQALHQRGFEVAVETNGTRTPPPGIDWLCVSPKIGADLVVSRGDELKLVYPQAGGDPAQFAELDFTSFRLQPMDGPDVQAHTRAAIDYCLTHPQWSLSMQTHKYLGIA

SEQ ID NO: 30850 - protein, 206 aa, Kingella kingae
  misc_feature (1)..(206): tr|F5S5X1|F5S5X1_9NEIS 7-carboxy-7-deazaguanine synthas e OS=Kingella kingae ATCC 23330 OX=887327 GN=nrdG PE=3 SV=1
MTNEPTFRIVEIFETLQGEGYNTGMPSVFIRFGKCNLACHWCDTNYNEFGMMTLSQIMVKVHEFLAKNIIITGGEPTIQPHLVALLDCLKSEGYFLAMETNGLKDVPKQIDFVATSPKRLYTEAYEKRCLKRADEVRIVVDNVDVFDFCELIEQKIESPRYYLSPCEQQGEMNILQTITLLGKLNARVGKPHWQLSIQTHKLCGIE

SEQ ID NO: 30851 - protein, 206 aa, Kingella negevensis
  misc_feature (1)..(206): tr|A0A238HHT0|A0A238HHT0_9NEIS 7-carboxy-7-deazaguanine synthase OS=Kingella negevensis OX=1522312 GN=queE PE= 3 SV=1
MTHQPTYRIVEIFETLQGEGYNTGMPSIFIRFGKCNLACHWCDTNYNEFGTMSLSHILDKVHGFTAKNIIITGGEPTIQPQIETLLDQLKAENYYIAIETNGLKDVPPQIDYIATSPKRLYAQAYEKNCIKKAHEVRIVVDSEETETFCHQVEQKIQADRYYLSPCEINGKMNLLETITLLGKLNERSNTPHWQLSIQTHKLCGIE

SEQ ID NO: 30852 - protein, 212 aa, Kingella potus
  misc_feature (1)..(212): tr|A0A377QYX8|A0A377QYX8_9NEIS 7-carboxy-7-deazaguanine synthase OS=Kingella potus OX=265175 GN=queE PE=3 SV=1
MTEIKFAPADPQYRIVEIFESLQGEGWNTGMPAIFVRLGKCNLACSWCDTDYLKFGMMSLSDILGRLKTYTARNVIITGGEPTIQPHLDTLLDALKAEGYFLCIETNGLKPAPPQIDYVAASPKACYAAKYEKSCIETADEVRIVADGDVTAFCETMEQKIRARRYYLSPCEQNGVMNIYDTIRQIGILNSRPDAPVHWQLSVQTHKWAGIE

SEQ ID NO: 30853 - protein, 212 aa, Kinneretia asaccharophila
  misc_feature (1)..(212): tr|A0A4R6NB07|A0A4R6NB07_9BURK 7-carboxy-7-deazaguanine synthase OS=Kinneretia asaccharophila OX=582607 GN=que E PE=3 SV=1
MTYAVKEMFYTLQGEGAQAGRPAVFCRFAGCNLWSGREQDRAEAVCSFCDTDFVGTDGQGGGKFATAAELAAAVAAKWAGGPGGKPYVVCTGGEPLLQLDEPLIEALHAQGFEVAVETNGTQPAPAGLDWICVSPKADAEIVLTRGHELKLVWPQPLARPERFAGLDFQHFYLQPMDTPLLQKQHAREAIEYCLAHPQWKLSVQMHKVVGID

SEQ ID NO: 30854 - protein, 259 aa, Kiritimatiella glycovorans
  misc_feature (1)..(259): tr|A0A0G3EG43|A0A0G3EG43_9BACT 7-carboxy-7-deazaguanine synthase OS=Kiritimatiella glycovorans OX=1307763 GN=q ueE_1 PE=3 SV=1
MNETDAVAPRGAAPTAELIEIFSSIQGEGLCVGERHLFVRFAGCHRRCAYCDTPVKAGSTFRVESPAGSGHFRTVANPVEPQRLIDEIDTLKRPSGLHAAVALTGGEPLLQTDFLSLLLPLLKSEGLRVLLETAGDHPDELERIAPWVDSVALDAKLPQATDESTDWERVGRCVKLCAEKIETAFVKAVIAASTDETELAELAEAVGDRLPLVLQPVTRVKHGPEPPSARRLLELQAFLAQNALEVRIIPQCHHTLGMI

SEQ ID NO: 30855 - protein, 234 aa, Kiritimatiella glycovorans
  misc_feature (1)..(234): tr|A0A0G3EK70|A0A0G3EK70_9BACT 7-carboxy-7-deazaguanine synthase OS=Kiritimatiella glycovorans OX=1307763 GN=q ueE_2 PE=4 SV=1
MAASPVYAFRRQPTMVDYPGRIAAIFFTSGCNFSCGFCHNATLMGAPRPGLSWERMDEVCADFRRNWTDAAVISGGEPTLAAGLPELIRFYKRHGFAVKLDTNGSNPEMLEACLPDLDYVAMDVKTALEDYPSLTGWSRPDRLRRSVELLRSGGVRHEFRTTVIPGHHNADRMRRIGIELNGSNRLVLQPFVPDESLPGETFRTLPRTPPEQLEELRSTVTEFVHEVVVRGGGG

SEQ ID NO: 30856 - protein, 249 aa, Kiritimatiellaceae bacterium
  misc_feature (1)..(249): tr|A0A2E1U3J0|A0A2E1U3J0_9BACT 7-carboxy-7-deazaguanine synthase OS=Kiritimatiellaceae bacterium OX=2026752 GN =queE PE=3 SV=1
  misc_feature (149)..(149): Xaa can be any naturally occurring amino acid
  misc_feature (175)..(175): Xaa can be any naturally occurring amino acid
MKSYLSELFSSIQGEGPYVGERQLFMRFCGCHRDCVYCDTNTQRTEAVVVERIAGSGIFESIPNPLSVDDLLEWVRILDHKKNNRHISLTGGAPLLQVKFLGELLPRLENEGHRNYLETAGDLPQQLEAIIEYLDVVAMDVKLSSVTHXKNTFPAHWQFLSCLRTYNVDSFVKLXVSDETDEAELMEAVKGIHKSGGKNTIVILQALSATERVSNVPSVQQLMRWQEKISGVLPQVRVIPQTHKMMGML

SEQ ID NO: 30857 - protein, 249 aa, Kiritimatiellaceae bacterium
  misc_feature (1)..(249): tr|A0A2D7D696|A0A2D7D696_9BACT 7-carboxy-7-deazaguanine synthase OS=Kiritimatiellaceae bacterium OX=2026752 GN =queE PE=3 SV=1
  misc_feature (84)..(84): Xaa can be any naturally occurring amino acid
  misc_feature (123)..(123): Xaa can be any naturally occurring amino acid
  misc_feature (158)..(158): Xaa can be any naturally occurring amino acid
  misc_feature (242)..(242): Xaa can be any naturally occurring amino acid
MKSYLSELFSSIQGEGPMVGERHLFMRFCGCHRDCVYCDTNTQRTETVMVERVAGSGEVESVPNPLSVDDLLEWVRVLDVGRVXDRISVTGGAPLLQAKFFGALFPRLVDAEHRIYLETAGDXPQQLEMVIEYLDVVAMDVKLASVTHEKSSFPAHWXFLSCLRKYEVESFVKLVVSDETHEGELMEAVKGIRKTGGVDTRVILQPLSPTERVSNVPTVAQLLYWQEKVGKLLPDVRVIPQXHKMMGML

SEQ ID NO: 30858 - protein, 244 aa, Kitasatospora aureofaciens
  misc_feature (1)..(244): tr|A0A0L8PKY9|A0A0L8PKY9_KITAU 7-carboxy-7-deazaguanine synthase OS=Kitasatospora aureofaciens OX=1894 GN=queE PE=3 SV=1
MRARGTGSDRKIVVNEIFGPTIQGEGPSMGRSCSFVRLGGCNLTCTWCDTPYTWDWAGRSDAGTAYDPKAELHAMNVAEVAERLLVTDVRLVVVSGGEPLQQQRTVARLCRLLGESGVSVEIETNGTLSPSPELVAARPRFNVSPTLRHSGMGPEQTVVPEALRALNATRGAAFTFVCRDPGDLDEVADIVARYGLESVWIMPEGQDQETLSDRLALLADAVVARRWNISTRIHVHAWGNRRGV

SEQ ID NO: 30859 - protein, 244 aa, Kitasatospora aureofaciens
  misc_feature (1)..(244): tr|A0A0L8P6U7|A0A0L8P6U7_KITAU 7-carboxy-7-deazaguanine synthase OS=Kitasatospora aureofaciens OX=1894 GN=queE PE=3 SV=1
MSRQETTRGRKIVVNEIFGPTIQGEGPSMGRICSFVRLGGCNLTCTWCDTPYTWDWTGQSNEGTAYDPKAELHAMHVVDVADRLRAMDVRLVVISGGEPLQQQQTVTLLCHMLKESGVSVEIETNGTIAPSPALTATQARFNVSPKLRHSGMGPERTVVPVALRALNATGGAAFKFVCRGPADLEEVDAIVARHGLESVWIMPEGQDQETLTRHMSSLADAVVARRWNMSTRIHVQAWGNRRGV

SEQ ID NO: 30860 - protein, 243 aa, Kitasatospora cineracea
  misc_feature (1)..(243): tr|A0A3N1YW51|A0A3N1YW51_9ACTN 7-carboxy-7-deazaguanine synthase OS=Kitasatospora cineracea OX=88074 GN=queE P E=3 SV=1
MSALVAPASLPVAEVFGPTIQGEGPSVGQNALFIRLGACNLACTWCDTPYTWDGKRFDLREEIRRVPVVDLAETTAEHPHALVVITGGEPLLHQSTDAWRSLMAVLRHTTRRVEIETNGTLAPQPVTLGVPRLVFNVSPKLANSGMPQDRRIKPEALEAFTALASTGRARFKFVAASSDDLEEIAALTDRFRIPPHATWVMPEGVTPEQTIAVGRALAEDVIGRHWNLTLRQHVLLWPGERER

SEQ ID NO: 30861 - protein, 211 aa, Kitasatospora niigatensis
  misc_feature (1)..(211): tr|A0A3N4RKU9|A0A3N4RKU9_9ACTN 7-carboxy-7-deazaguanine synthase OS=Kitasatospora niigatensis OX=88075 GN=queE PE=3 SV=1
MAYLVKEIFYTLQGEGSHAGRPAVFCRFSRCNLWTGLEKDRERAICKFCDTDFVGTDGEGGGRFTTPEALAAAVEQAWPSAAADHRFVVCTGGEPLLQLDEAALEALHARGFEVAVETNGTRIPPKGIDWLCVSPKIGSELVVTRGDELKLVYPQLGGDPSQFEHLDYKHFRLQPMDGLEREANTQAAISYCMKNPRWTLSLQTHKYLGIQ

SEQ ID NO: 30862 - protein, 223 aa, Kitasatospora sp.
  misc_feature (1)..(223): tr|A0A540WF51|A0A540WF51_9ACTN 7-carboxy-7-deazaguanine synthase OS=Kitasatospora sp. MMS16-CNU292 OX=2567942 GN=queE PE=3 SV=1
MIAETFGPTFQGEGPTAGRQALFIRLSRCNLHCPRCDTPYTWDWTRFDPSEVSTRHSVEDVAAWVTDRLTARVVVTGGEPLIQQRELLRLVQLLPDRRVEIETNGTIVPLPELVGLVEGFNVSPKLAGFAALDDQAVNGAALRVLAASGKARFKFVVRQVAELEEIAALVDEFDLTEVWVMPEGTSSGAVLAGMRALADAVLARGWNLSNRLHVLLWEDERGR

SEQ ID NO: 30863 - protein, 223 aa, Kitasatospora xanthocidica
  misc_feature (1)..(223): tr|A0A373A528|A0A373A528_9ACTN 7-carboxy-7-deazaguanine synthase OS=Kitasatospora xanthocidica OX=83382 GN=que E PE=3 SV=1
MVAECFGPTFQGEGPSVGQQSLFVRLSRCNLSCPGCDTPETWDWSRFDPREVSTRHGVEDLAAWVMARSPRLVVVTGGEPLLQQPQLVDLVQVLSGRRVEVETNGTVVPMPELVESVSGFNVSPKLAAFAAPGDRRIVPEALEALAACGKARFKFVVHEAGQLDEVASLVEEFSLPDVWVMPEGANSAVVLRTMRELADQVLGRGWNLTPRLHTLLWEAERGR

SEQ ID NO: 30864 - protein, 244 aa, Kitasatospora xanthocidica
  misc_feature (1)..(244): tr|A0A373A309|A0A373A309_9ACTN 7-carboxy-7-deazaguanine synthase OS=Kitasatospora xanthocidica OX=83382 GN=que E PE=3 SV=1
MSALVLPDAGLPVAETFGPTIQGEGPTAGQRALFLRLGGCNLACDWCDTPYTWDGKRYDLRKEIGRVPVVELAEWAAGHPHAIIVITGGEPLLHQRTDAWRSLMAVLRYTTRRVEIETNGTLAPQPVSLGVPRLTFNVSAKLANSNMPEERRIKSDTLEVFADLAHRGRARFKFVAAGPDDLEEIAALVERFRLPPHATWVMPEGTTAERTIEVARALADDVIARNWNLTMRQHVLLWPGERNR

SEQ ID NO: 30865 - protein, 223 aa, Klebsiella aerogenes
  misc_feature (1)..(223): tr|A0A447W648|A0A447W648_KLEAE 7-carboxy-7-deazaguanine synthase OS=Klebsiella aerogenes OX=548 GN=ygcF PE=3 S V=1
MQYPINEMFQTLQGEGYFTGVPAIFIRLQGCPVGCAWCDTKHTWDKLADREVSLFSILAKTKESDKWGPASSEDLLAIIGRQGWTARHVVITGGEPCIHDLTPLTSLLEQNGFSCQIETSGTHEVRCSPNTWVTVSPKVNMRGGYDVLSQALQRADEIKHPVGRVRDIEALDELLETLSDDKPRIIALQPISQKEDATRLCIDTCIARNWRLSMQTHKYLNIA

SEQ ID NO: 30866 - protein, 223 aa, Klebsiella aerogenes; identical to SEQ ID NO: 29897
  misc_feature (1)..(223): tr|A0A155IHG9|A0A155IHG9_KLEAE 7-carboxy-7-deazaguanine synthase OS=Klebsiella aerogenes OX=548 GN=ygcF PE=3 S V=1

SEQ ID NO: 30867 - protein, 223 aa, Klebsiella grimontii
  misc_feature (1)..(223): tr|A0A285AXR2|A0A285AXR2_9ENTR 7-carboxy-7-deazaguanine synthase OS=Klebsiella grimontii OX=2058152 GN=ygcF PE =3 SV=1
MQYPINEMFQTLQGEGYFTGVPAIFIRLQGCPVGCAWCDTKHTWDKLADREVSLFSILAKTKESDKWGPASSEDLLAIIGRQGWTARHVVITGGEPCIHDLTPLTSLLEQNGFSCQIETSGTHEVRCTPHTWVTVSPKVNMRGGYDVLSQALQRADEIKHPVGRVRDIEALDELLATLADEKPRIIALQPISQKDDATRLCIETCIARNWRLSMQTHKYLNIA

SEQ ID NO: 30868 - protein, 223 aa, Klebsiella michiganensis
  misc_feature (1)..(223): tr|A0A564LTL8|A0A564LTL8_9ENTR 7-carboxy-7-deazaguanine synthase OS=Klebsiella michiganensis OX=1134687 GN=que E PE=3 SV=1
MQYPINEMFQTLQGEGYFTGVPAIFIRLQGCPVGCAWCDTKHTWDKLADREVSLFSILAKTKESDKWGPASSEDLLAIIGRQGWTARHVVITGGEPCIHDLTPLTSLLEQNGFSCQIETSGTHEVRCTPHTWVTVSPKVNMRGGYDVLSQALERANEIKHPVGRVRDIEALDELLATLSDDKPRIIALQPISQKDDATRLCIDTCIARNWRLSMQTHKYLNIA

SEQ ID NO: 30869 - protein, 223 aa, Klebsiella michiganensis; identical to SEQ ID NO: 30867
  misc_feature (1)..(223): tr|H3N1X3|H3N1X3_9ENTR 7-carboxy-7-deazaguanine synthas e OS=Klebsiella michiganensis OX=1134687 GN=queE PE=3 S V=1

SEQ ID NO: 30870 - protein, 223 aa, Klebsiella oxytoca
  misc_feature (1)..(223): tr|A0A5F2FF55|A0A5F2FF55_KLEOX 7-carboxy-7-deazaguanine synthase OS=Klebsiella oxytoca OX=571 GN=queE PE=3 SV= 1
MQYPINEMFQTLQGEGYFTGVPAIFIRLQGCPVGCAWCDTKHTWDKLADREVSLFSILAKTKESDKWGPASSEDLLAIIGRQGWTARHVVITGGEPCIHDLTPLTSLLEQNGFSCQIETSGTHEVRCTPHTWVTVSPKVNMRGGYDVLSQALQRADEIKHPVGRVRDIEALEELLETLADDKPRIIALQPISQKEDATRLCIETCIARNWRLSMQTHKYLNIA

SEQ ID NO: 30871 - protein, 223 aa, Klebsiella oxytoca
  misc_feature (1)..(223): tr|A0A2U4EBM9|A0A2U4EBM9_KLEOX 7-carboxy-7-deazaguanine synthase OS=Klebsiella oxytoca OX=571 GN=queE PE=3 SV= 1
MQYPINEMFQTLQGEGYFTGVPAIFIRLQGCPVGCAWCDTKHTWDKLADREVSLFSILAKTKESDKWGPASSEDLLAIIGRQGWTARHVVITGGEPCIHDLTPLTLLLEQNGFSCQIETSGTHEVRCTPHTWVTVSPKVNMRGGYDVLSQALQRADEIKHPVGRVRDIEALDELLETLADDKPRIIALQPISQKEDATRLCIETCIARNWRLSMQTHKYLNIA

SEQ ID NO: 30872 - protein, 223 aa, Klebsiella pneumoniae; identical to SEQ ID NO: 29939
  misc_feature (1)..(223): tr|A0A4V0G2M5|A0A4V0G2M5_KLEPN 7-carboxy-7-deazaguanine synthase OS=Klebsiella pneumoniae OX=573 GN=queE_1 PE= 3 SV=1

SEQ ID NO: 30873 - protein, 223 aa, Klebsiella pneumoniae
  misc_feature (1)..(223): tr|A0A5E1CER6|A0A5E1CER6_KLEPN 7-carboxy-7-deazaguanine synthase OS=Klebsiella pneumoniae OX=573 GN=queE PE=3 SV=1
MQYPINEMFQTLQGEGYFTGVPAIFIRLQGCPVGCAWCDTKHTWDKLADREVSLFSILAKTKESDKWGPASSEDLLAIIGRQGWTARHVVITGGEPCIHDLTPLTSLLEQNGFSCQIETSGTHEVRCSPNTWVTVSPKVNMRGGYDVLSQALQRADEIKHPVGRVRDIEALDELLETLSDDKQRIIALQPISQKEDATRLCIDTCIARNWRLSMQTHKYLNIA

SEQ ID NO: 30874 - protein, 223 aa, Klebsiella quasipneumoniae; identical to SEQ ID NO: 29918
  misc_feature (1)..(223): tr|A0A2A5MNH0|A0A2A5MNH0_9ENTR 7-carboxy-7-deazaguanine synthase OS=Klebsiella quasipneumoniae OX=1463165 GN=q ueE PE=3 SV=1

SEQ ID NO: 30875 - protein, 223 aa, Klebsiella quasipneumoniae; identical to SEQ ID NO: 29918
  misc_feature (1)..(223): tr|A0A5C6IIV8|A0A5C6IIV8_9ENTR 7-carboxy-7-deazaguanine synthase OS=Klebsiella quasipneumoniae subsp. similipn eumoniae OX=1463164 GN=queE PE=3 SV=1

SEQ ID NO: 30876 - protein, 223 aa, Klebsiella quasivariicola; identical to SEQ ID NO: 29918
  misc_feature (1)..(223): tr|A0A223U763|A0A223U763_9ENTR 7-carboxy-7-deazaguanine synthase OS=Klebsiella quasivariicola OX=2026240 GN=qu eE PE=3 SV=1

SEQ ID NO: 30877 - protein, 223 aa, Klebsiella sp.
  misc_feature (1)..(223): tr|A0A3G5CYL1|A0A3G5CYL1_9ENTR 7-carboxy-7-deazaguanine synthase OS=Klebsiella sp. P1CD1 OX=2267618 GN=queE PE =3 SV=1
MQYPINEMFQTLQGEGYFTGVPAIFIRLQGCPVGCAWCDTKHTWDKLADREVSLFSILAKTKESDKWGPASSEDLLAIIGRQGWTARHVVITGGEPCIHDLTPLTSLLEQNGFSCQIETSGTHEVRCSHNTWVTVSPKVNMRGGYDVLSQALQRADEIKHPVGRVRDIEALDELLETLSDDKPRIIALQPISQKEDATRLCIDTCIARNWRLSMQTHKYLNIA

SEQ ID NO: 30878 - protein, 225 aa, Klebsiella sp.
  misc_feature (1)..(225): tr|J8VYC7|J8VYC7_9ENTR 7-carboxy-7-deazaguanine synthas e OS=Klebsiella sp. OBRC7 OX=936565 GN=queE PE=3 SV=1
MIMQYPINEMFQTLQGEGYFTGVPAIFIRLQGCPVGCAWCDTKHTWDKLADREVSLFSILAKTKESDKWGPANSEDLLAIIGRQGWTARHVVITGGEPCIHDLTPLTSLLEQNGFSCQIETSGTHEVRCTPHTWVTVSPKVNMRGGYDVLSQALQRADEIKHPVGRVRDIEALDELLATLADEKPRIIALQPISQKDDATRLCIETCIARNWRLSMQTHKYLNIA

SEQ ID NO: 30879 - protein, 215 aa, Klebsiella variicola
  misc_feature (1)..(215): tr|A0A2N4Z1P1|A0A2N4Z1P1_KLEVA 7-carboxy-7-deazaguanine synthase QueE (Fragment) OS=Klebsiella variicola OX=24 4366 GN=CWN47_13625 PE=3 SV=1
MQYPINEMFQTLQGEGYFTGVPAIFIRLQGCPVGCAWCDTKHTWDKLADREVSLFSILAKTKESDKWGPASSEDLLAIIGRQGWTARHVVITGGEPCIHDLTPLTSLLEQNGFSCQIETSGTHEVRCSHNTWVTVSPKVNMRGGYDVLSQALQRADEIKHPVGRVRDIEALDELLETLSDDKPRIIALQPISQKEDATRLCIDTCIARNWRLSMQ

SEQ ID NO: 30880 - protein, 223 aa, Klebsiella variicola; identical to SEQ ID NO: 30877
  misc_feature (1)..(223): tr|A0A087FV52|A0A087FV52_KLEVA 7-carboxy-7-deazaguanine synthase OS=Klebsiella variicola OX=244366 GN=ygcF PE= 3 SV=1

SEQ ID NO: 30881 - protein, 223 aa, Kluyvera ascorbata
  misc_feature (1)..(223): tr|A0A2T2Y400|A0A2T2Y400_9ENTR 7-carboxy-7-deazaguanine synthase OS=Kluyvera ascorbata OX=51288 GN=queE PE=3 S V=1
MQYPINEMFQTLQGEGYFTGVPAIFIRLQGCPVGCAWCDTKHTWEKLEDREVSLFSILAKTKESDKWGAASSEDLLAIIGRQGWTARHVVITGGEPCIHDLTPLTTMLEQNGFSCQIETSGTHEVRCSHSTWVTVSPKVNMRGGFDVLSQALARADEIKHPVGRVRDIEALDELLETLSDDKPRIIALQPISQKEDATRLCIETCIARNWRLSMQTHKYLNIA

SEQ ID NO: 30882 - protein, 223 aa, Kluyvera ascorbata
  misc_feature (1)..(223): tr|A0A378GM09|A0A378GM09_9ENTR 7-carboxy-7-deazaguanine synthase OS=Kluyvera ascorbata OX=51288 GN=queE PE=3 S V=1
MQYPINEMFQTLQGEGYFTGVPAIFIRLQGCPVGCAWCDTKHTWEKLSDREVSLFSILAKTKESDKWGAASSEDLLAIIGRQGWTARHVVITGGEPCIHDLTPLTALLEQNGYSCQIETSGTHEVRCTPGTWVTVSPKVNMRGGYDVLSQALERADEIKHPVGRVRDIEALDELLETLSDDKPRIIALQPISQKDDATRLCIETCIARNWRLSMQTHKYLNIA

SEQ ID NO: 30883 - protein, 223 aa, Kluyvera cryocrescens
  misc_feature (1)..(223): tr|A0A2X3ECP1|A0A2X3ECP1_KLUCR 7-carboxy-7-deazaguanine synthase OS=Kluyvera cryocrescens OX=580 GN=queE PE=3 SV=1
MQYPINEMFQTLQGEGYFTGVPAIFIRLQGCPVGCAWCDTKHTWEKLSDREVSLFSILAKTKESDKWGAASSEDLLAIIGRQGWTARHVVITGGEPCIHDLIPLTELLEQNGYSCQIETSGTHEVRCSHNTWVTVSPKVNMRGGYDVLSQALLRADEIKHPVGRVRDIEALDELLETLSDDKPRIIALQPISQKDDATRLCIETCIARNWRLSMQTHKYLNIA

SEQ ID NO: 30884 - protein, 65 aa, Kluyvera cryocrescens
  misc_feature (1)..(65): tr|A0A485B3Z3|A0A485B3Z3_KLUCR 7-carboxy-7-deazaguanine synthase OS=Kluyvera cryocrescens OX=580 GN=queE_1 PE= 4 SV=1
MFQTLQGEGYFTGVPAIFIRLQGCPVGCAWCDTKHTWEKLSDREVSLFSILAKTKESDKWGAASK

SEQ ID NO: 30885 - protein, 224 aa, Kluyvera georgiana
  misc_feature (1)..(224): tr|A0A1B7K5E4|A0A1B7K5E4_9ENTR 7-carboxy-7-deazaguanine synthase OS=Kluyvera georgiana ATCC 51603 OX=1354264 G N=queE PE=3 SV=1
MMQYPINEMFQTLQGEGYFTGVPAIFIRLQGCPVGCAWCDTKHTWDKLEDREVSLFSILAKTKESDKWGAASSDDLLAIIGRQGWTARHVVITGGEPCIHDLTALTALLEQNGFSCQIETSGTHEVRCTPNTWVTVSPKVNMRGGYDVLSQALERADEIKHPVGRVRDIEALDELLETLSDDKQRIIALQPISQKDDATRLCIETCIARNWRLSMQTHKYLNIA

SEQ ID NO: 30886 - protein, 223 aa, Kluyvera intermedia; identical to SEQ ID NO: 30456
  misc_feature (1)..(223): tr|A0A1X0X784|A0A1X0X784_KLUIN 7-carboxy-7-deazaguanine synthase OS=Kluyvera intermedia OX=61648 GN=queE PE=3 SV=1

SEQ ID NO: 30887 - protein, 223 aa, Kluyvera intermedia
  misc_feature (1)..(223): tr|A0A3S4F8B7|A0A3S4F8B7_KLUIN 7-carboxy-7-deazaguanine synthase OS=Kluyvera intermedia OX=61648 GN=queE PE=3 SV=1
MQYPINEMFQTLQGEGYFTGVPAIFIRLQGCPVGCAWCDTKHTWEKLEDREISLFSILAKTKESDKWGAASSEDLLAIIGRQGWTARHVVITGGEPCIHDLTPLTTLLEQNGYSCQIETSGTHEVLCSHNTWVTVSPKVNMRGGYDVLSQALVRADEIKHPVGRMRDIEALDELLETLSDDKPRIIALQPISQKEDATRLCIETCIARNWRLSMQTHKYLNIA

SEQ ID NO: 30888 - protein, 223 aa, Kluyvera sp.; identical to SEQ ID NO: 30456
  misc_feature (1)..(223): tr|A0A2T3XA53|A0A2T3XA53_9ENTR 7-carboxy-7-deazaguanine synthase OS=Kluyvera sp. Nf5 OX=2116543 GN=queE PE=3 S V=1

SEQ ID NO: 30889 - protein, 211 aa, Komagataeibacter cocois
  misc_feature (1)..(211): tr|A0A365YZS0|A0A365YZS0_9PROT 7-carboxy-7-deazaguanine synthase OS=Komagataeibacter cocois OX=1747507 GN=queE PE=3 SV=1
MSYTVKEIFLTLQGEGGQAGRAAVFCRFAGCNLWSGREEDRDGAICRFCDTDFIGTDGPGGGRFASADALADAVAAAWTATSRDEAFVVFTGGEPLLQLDSALIAAMHERGFSIAVETNGTVRAPDGIDWICVSPKAGAPLVQTSGQELKLVFPQDDLMPEQVAGLDFRQYWLQPMDGPARVANTARAVEYCMAHPRWRLSLQTHKLIGIP

SEQ ID NO: 30890 - protein, 225 aa, Komagataeibacter europaeus
  misc_feature (1)..(225): tr|A0A0M0ELL6|A0A0M0ELL6_KOMEU 7-carboxy-7-deazaguanine synthase OS=Komagataeibacter europaeus OX=33995 GN=que E PE=3 SV=1
MVPFSGRVHYEIWNMSYTVKEIFPTLQGEGAQAGRTAVFCRFAGCNLWSGLERDRDRATCRFCDTDFIGTDGPGGGRFADADQLADTIAAQWPTADRTGAFVVLTGGEPLLQLDDALIAALHARGFEIAVETNGTVAAPDGIDWICVSPKAGAALVQTRGHELKLVYPQPDLLPDQVAGLDFQQFWLQPMDNANRVRNTTDAVTYCMQHPQWRLSLQTHKLIGIP

SEQ ID NO: 30891 - protein, 225 aa, Komagataeibacter europaeus
  misc_feature (1)..(225): tr|A0A0D6PVV1|A0A0D6PVV1_KOMEU 7-carboxy-7-deazaguanine synthase OS=Komagataeibacter europaeus NBRC 3261 OX=12 34669 GN=queE PE=3 SV=1
MVPFSGRVHYEIWNMSYTVKEIFPTLQGEGAQAGRTAVFCRFAGCNLWSGLERDRDRATCRFCDTDFIGTDGPGGGRFADADQLADTIAAQWPAADRTGAFVVLTGGEPLLQLDDALIAALHARGFEIAVETNGTVAAPDGIDWICVSPKAGAALVQTRGHELKLVYPQPDLLPDQVAGLDFQQFWLQPMDNADRVRNTTDAVTYCMQHPQWRLSLQTHKLIGIP

SEQ ID NO: 30892 - protein, 211 aa, Komagataeibacter hansenii
  misc_feature (1)..(211): tr|D5QDE3|D5QDE3_KOMHA 7-carboxy-7-deazaguanine synthas e OS=Komagataeibacter hansenii ATCC 23769 OX=714995 GN= queE PE=3 SV=1
MSYTVKEIFPTLQGEGSQAGRAAVFCRFAGCNLWSGREIDRDDATCRFCDTDFIGTDGMGGGRFADAASLADAIAAAWPAASRRDAFVVFTGGEPLLQLDAALVAAMHARGFFIAVETNGTIRAPDGIDWICMSPKAGAPLVQTSGHELKLVFPQPDLMPEQVAGLDFAQFWLQPMDGPERVSNTSHAVEYCMAHPQWRLSLQTHKLIGIP

SEQ ID NO: 30893 - protein, 211 aa, Komagataeibacter hansenii
  misc_feature (1)..(211): tr|A0A318PY97|A0A318PY97_KOMHA 7-carboxy-7-deazaguanine synthase OS=Komagataeibacter hansenii OX=436 GN=queE P E=3 SV=1
MSYTVKEIFPTLQGEGSQAGRAAVFCRFAGCNLWSGREIDRDDATCRFCDTDFIGTDGMGGGRFADAASLADAIAAAWPAASRKDAFVVFTGGEPLLQLDAALVAAMHARGFFIAVETNGTIRAPDGIDWICMSPKAGAPLVQTSGHELKLVFPQPDLMPEQVAGLDFAQFWLQPMDGPERVSNTSRAVEYCMAHPQWRLSLQTHKLIGIP

SEQ ID NO: 30894 - protein, 250 aa, Komagataeibacter intermedius
  misc_feature (1)..(250): tr|A0A0N1N4F3|A0A0N1N4F3_9PROT 7-carboxy-7-deazaguanine synthase OS=Komagataeibacter intermedius AF2 OX=145846 4 GN=queE PE=3 SV=1
MACIHHTDRAEPDAAGRGTGWGSSHARPAAGRVQYEIWNMSYTVKEIFPTLQGEGAQAGRTAVFCRFTGCNLWSGLERDRDRATCRFCDTDFIGTDGAGGGRFASPDDLADAIAQQWPTPDRNAAFVVFTGGEPLLQLDDALIAALHARGFEIAVETNGTLPAPDGIDWICVSPKAGAPLVQTRGHELKLVFPQPDLMPDQVAGLDFRQFWLQPMDNARRAQNTDDAVTYCMHHPQWRLSLQTHKLIGIP

SEQ ID NO: 30895 - protein, 211 aa, Komagataeibacter maltaceti
  misc_feature (1)..(211): tr|A0A2S3W553|A0A2S3W553_9PROT 7-carboxy-7-deazaguanine synthase OS=Komagataeibacter maltaceti OX=1203393 GN=q ueE PE=3 SV=1
MSYTVKEIFPTLQGEGGQAGRAAVFCRFAGCNLWSGREEDRSGAACRFCDTDFIGTDGEGGGRFADAASLADAIAAAWPASSRARAFVVFTGGEPLLQLDAALIDAMHARGFFIAVETNGTVPAPAGIDWVCVSPKAGTALVQESGQELKLVFPQPDLMPEQVAGLAFSQFWLQPMDGPDRVANTARAVEYCMAHPQWRLSLQTHKLIGIP

SEQ ID NO: 30896 - protein, 211 aa, Komagataeibacter medellinensis
  misc_feature (1)..(211): tr|G2I226|G2I226_KOMMN 7-carboxy-7-deazaguanine synthas e OS=Komagataeibacter medellinensis (strain NBRC 3288 / BCRC 11682 / LMG 1693 / Kondo 51) OX=634177 GN=queE PE =3 SV=1
MSYTVKEIFPTLQGEGAHAGRTAVFCRFAGCNLWSGLERDRAQAACRFCDTDFIGTDGPGGGRFTTADTLADAIATHWPAPDRKAAFVVFTGGEPLLQLDGALVAAMHARGFEIAVETNGTLPAPAGIDWICVSPKAGTPLVQTHGHELKLVYPQPDLLPEQVAGLDFRQFWLQPMDNAARDYNTRATVDYCLHHPQWRLSLQTHKLIGIP

SEQ ID NO: 30897 - protein, 211 aa, Komagataeibacter nataicola
  misc_feature (1)..(211): tr|A0A1U9RNK5|A0A1U9RNK5_9PROT 7-carboxy-7-deazaguanine synthase OS=Komagataeibacter nataicola OX=265960 GN=qu eE PE=3 SV=1
MSYTVKEIFPTLQGEGAQTGRTAVFCRFAGCNLWSGLERDRAQATCQFCDTDFIGTDGTGGGRFADAGALADAIAAQWPGPDAARAFVVFTGGEPLLQLDATLIAAVQARGFEVAVETNGTLPAPAGIDWLCVSPKAGAKLVQKSGHELKLVYPQPDLQPADVAGLDFEQFWLQPMDDARRNQNTAAAVDYCMRHPQWRLSLQTHKLIGIP

SEQ ID NO: 30898 - protein, 211 aa, Komagataeibacter oboediens
  misc_feature (1)..(211): tr|A0A318QWN2|A0A318QWN2_9PROT 7-carboxy-7-deazaguanine synthase OS=Komagataeibacter oboediens OX=65958 GN=que E PE=3 SV=1
MSYTVKEIFPTLQGEGAQAGRTAVFCRFTGCNLWSGLERDRERATCRFCDTDFIGTDGAGGGRFATPDDLADAIAQQWPAPDRDAAFVVFTGGEPLLQLDDALVAAVHARGFEIAVETNGTLPAPDGIDWICVSPKSGAPLVQTRGHELKLVFPQPDLMPDLVAGLDFRQFWLQPMDNARSTQNTVDAVTYCMHHPQWRLSLQTHKLIGIP

SEQ ID NO: 30899 - protein, 211 aa, Komagataeibacter pomaceti
  misc_feature (1)..(211): tr|A0A318QAJ8|A0A318QAJ8_9PROT 7-carboxy-7-deazaguanine synthase OS=Komagataeibacter pomaceti OX=2021998 GN=qu eE PE=3 SV=1
MSYTVKEIFPTLQGEGGQAGRAAVFCRFAGCNLWSGREEDRDGATCRFCDTDFIGTDGTGGGRFASADALADAIAAAWTATSRDEAFVVFTGGEPLLQLDAALIAAMHERGFSIAVETNGTVPAPDGIDWICVSPKAGAPLVQTSGHELKLVFPQDGLMPEQVAGLDFRQYWLQPMDGPARVENTARAVEYCMAHPRWRLSLQTHKLIGIP

SEQ ID NO: 30900 - protein, 211 aa, Komagataeibacter rhaeticus; identical to SEQ ID NO: 30409
  misc_feature (1)..(211): tr|A0A181C965|A0A181C965_9PROT 7-carboxy-7-deazaguanine synthase OS=Komagataeibacter rhaeticus OX=215221 GN=qu eE PE=3 SV=1

SEQ ID NO: 30901 - protein, 211 aa, Komagataeibacter rhaeticus
  misc_feature (1)..(211): tr|A0A070AA30|A0A070AA30_9PROT 7-carboxy-7-deazaguanine synthase OS=Komagataeibacter rhaeticus AF1 OX=1432055 GN=queE PE=3 SV=1
MSYTVKEIFPTLQGEGAHAGRTAVFCRFTGCNLWSGLERDRARATCRFCDTDFIGTDGAGGGRFASAGLLADAIAAHWPTPDRKAAFVVFTGGEPLLQLDDALITAVHARGFEIAVETNGTLRAPGGIDWICVSPKAGAPLVQTSGHELKLVYPQPDLLPGQVAGLDFSQFWLQPMDNAARDHNTRAAVDYCLHHPQWRLSLQTHKLIGIP

SEQ ID NO: 30902 - protein, 211 aa, Komagataeibacter saccharivorans
  misc_feature (1)..(211): tr|A0A347W802|A0A347W802_9PROT 7-carboxy-7-deazaguanine synthase OS=Komagataeibacter saccharivorans OX=265959 GN=queE PE=3 SV=1
MSYTVKEIFPTLQGEGAQAGRTAVFCRFAGCNLWSGLERDRAQATCRFCDTDFIGTDGVNGGRFADAAQLADAISRAWPVPDTGPAFVVFTGGEPLLQLDDALIAAMHARGFEIAVETNGTLPAPTGIDWVCVSPKAGAPLVQKSGDELKLVYPQPDLLPEQVADLNFRQFWLQPMDNAERNHNTAAAVDYCMHHPQWRLSLQTHKLIGIP

SEQ ID NO: 30903 - protein, 211 aa, Komagataeibacter sp.
  misc_feature (1)..(211): tr|A0A4P5NUS5|A0A4P5NUS5_9PROT 7-carboxy-7-deazaguanine synthase OS=Komagataeibacter sp. MSKU15 OX=1932664 GN= queE PE=3 SV=1
MSYTVKEIFPTLQGEGAQAGRTAVFCRFTGCNLWSGLERDRDRATCRFCDTDFIGTDGPGGGRFADADHLADAIAAQWPARDRKGAFVVLTGGEPLLQLDDALIAALHARGFEIAVETNGTMAAPDGIDWICVSPKAGADLVQTHGHELKLVYPQPDLLPDQVAGLDFQQFWLQPMDNANRARNTTDAVTYCMYHPQWRLSLQTHKLIGIP

SEQ ID NO: 30904 - protein, 211 aa, Komagataeibacter sp.; identical to SEQ ID NO: 30903
  misc_feature (1)..(211): tr|A0A4P5NKB1|A0A4P5NKB1_9PROT 7-carboxy-7-deazaguanine synthase OS=Komagataeibacter sp. MSKU9 OX=1932662 GN=q ueE PE=3 SV=1

SEQ ID NO: 30905 - protein, 211 aa, Komagataeibacter sucrofermentans
  misc_feature (1)..(211): tr|A0A318QHY8|A0A318QHY8_9PROT 7-carboxy-7-deazaguanine synthase OS=Komagataeibacter sucrofermentans OX=105355 1 GN=queE PE=3 SV=1
MSYTVKEIFPTLQGEGAQAGRTAVFCRFAGCNLWSGLERDRAKAICQFCDTDFIGTDGTGGGRFADADALADAIAAQWPGPDAARAFVVFTGGEPLLQLDAALIAAVQARGFEVAVETNGTLPAPAGIDWLCVSPKAGAVLVQKSGHELKLVYPQPDLHPADVAGLDFRQFWLQPMDDARRNHNTAAAVDYCMRHPQWRLSLQTHKLIGIP

SEQ ID NO: 30906 - protein, 211 aa, Komagataeibacter swingsii
  misc_feature (1)..(211): tr|A0A2V4RLM3|A0A2V4RLM3_9PROT 7-carboxy-7-deazaguanine synthase OS=Komagataeibacter swingsii OX=215220 GN=que E PE=3 SV=1
MSYTVKEIFPTLQGEGAQAGRTAVFCRFAGCNLWSGLERDRERATCRFCDTDFIGTDGPGGGRFADADQLADAIAARWPGPDRKAAFVVLTGGEPLLQLDDALVAALHARGFEIAVETNGTVAAPEGIDWICVSPKAGADLVQTRGHELKLVYPQPDLPPDQVAGLDFQQFWLQPMDNADRARNTADAVTYCMRHPQWRLSLQTHKLIGIP

SEQ ID NO: 30907 - protein, 211 aa, Komagataeibacter xylinus; identical to SEQ ID NO: 30409
  misc_feature (1)..(211): tr|A0A2D3HCI4|A0A2D3HCI4_KOMXY 7-carboxy-7-deazaguanine synthase OS=Komagataeibacter xylinus OX=28448 GN=queE PE=3 SV=1

SEQ ID NO: 30908 - protein, 211 aa, Komagataeibacter xylinus
  misc_feature (1)..(211): tr|A0A143WGN8|A0A143WGN8_KOMXY 7-carboxy-7-deazaguanine synthase OS=Komagataeibacter xylinus OX=28448 GN=queE PE=3 SV=1
MSYTVKEIFPTLQGEGSQAGRAAVFCRFAGCNLWSGREIDRDDATCRFCDTDFIGTDGMGGGRFADAASLADAIAAAWPAASRRDAFVVFTGGEPLLQLDAALVAAMHARGFFIAVETNGTIRAPDGIDWICMSPKAGAPLVQTSGHELKLVFPQPDLMPEQVAGLDFAQFWLQPMDGPERVSNTSRAVEYCMAHPQWRLSLQTHKLIGIP

SEQ ID NO: 30909 - protein, 253 aa, Kordia algicida
  misc_feature (1)..(253): tr|A9DMX1|A9DMX1_9FLAO 7-carboxy-7-deazaguanine synthas e OS=Kordia algicida OT-1 OX=391587 GN=obgE PE=3 SV=1
MTKLKIANLNGKPEIFHSIQGEGKNLGQPSVFIRTSLCNLHCIWCDTDYTWNWEKTRFAHVKDSDPLYEKYKMDEMIISLTLEEIYNEVAKSGCKNIVLTGGEPMMQLQELSALMKFFNTKATDYFFEIETNGTLLPDATFDALIDQYNVSPKLANSNNPKKLREKPEAYQYFSKNEKAVFKFVISSENDLTEVLEICKNYNIPKQKVYLMPEGTNPEALQKKQQWLIEICKKYQFNYTDRLHVHIYGDKRGV

SEQ ID NO: 30910 - protein, 253 aa, Kordia periserrulae
  misc_feature (1)..(253): tr|A0A2T6C5L6|A0A2T6C5L6_9FLAO 7-carboxy-7-deazaguanine synthase OS=Kordia periserrulae OX=701523 GN=queE PE=3 SV=1
MVKLKIANLDGKPEIFHSIQGEGKNMGQPSVFIRTSLCNLHCIWCDTDYTWNWEKTRFTHVKDADPTYTKYKMDDMIISLTLEEIYAEVAKTGCKNIVLTGGEPMMQLQGISALMEYFNTKADDYFFEIETNGTLLPDATFEALIDQYNVSPKLENSNNPKKLREKPEVYQYFATNEKAVFKFVIASENDLTEVLTICKNYQIPNEKVYLMPEGTNPEALKQKQQWLIEVCKKYQFHYTDRLHVHIYGDKRGV

SEQ ID NO: 30911 - protein, 209 aa, Kordia sp.
  misc_feature (1)..(209): tr|A0A2G2KGX6|A0A2G2KGX6_9FLAO 7-carboxy-7-deazaguanine synthase OS=Kordia sp. OX=1965332 GN=queE PE=3 SV=1
MQKEIKELVGKGEMLPLMEEFYTIQGEGFYKGTAAYFIRIGGCDVGCHWCDVKESWDANLHPPTDTIQIANKAAEYSDTIVVTGGEPLMWNMKPLTDALKANGLKTHIETSGAYKLSGEWDWICLSPKKTKLPTQEVHDAAHELKVIIYNKSDFKFAEEQAAKVNDNCMLFMQPEWSKKDEMIPLMVDYVMKNPKWKMSLQTHKYMNIP

SEQ ID NO: 30912 - protein, 253 aa, Kordia sp.
  misc_feature (1)..(253): tr|A0A501I8Y5|A0A501I8Y5_9FLAO 7-carboxy-7-deazaguanine synthase OS=Kordia sp. TARA_039_SRF OX=2530203 GN=queE PE=3 SV=1
MVKLKIANLDGKPEIFHSIQGEGKNMGQPSVFIRTSLCNLHCIWCDTDYTWNWEKTRFAHVKDADPTYTKYKMDEMIISLTLEEIYVEVAKTGCKNIVLTGGEPMMQLQELSALIEYFNTKADDYFFEIETNGTLLPDTTFEALIDQYNVSPKLENSNNPKKLREKPEVYRYFAANEKAVFKFVIASENDLTEVLTICKNYQIPNEKVYLMPEGTNPEALQQKQQWLIEVCKKHQFNYTDRLHVHIYGDKRGV

SEQ ID NO: 30913 - protein, 213 aa, Kordiimonadales bacterium
  misc_feature (1)..(213): tr|A0A5A7NCG4|A0A5A7NCG4_9PROT 7-carboxy-7-deazaguanine synthase OS=Kordiimonadales bacterium JCM 17846 OX=123 6968 GN=queE PE=3 SV=1
MTYSVKEIFYTLQGEGANAGRAAVFCRFAGCNLWSGREADRDAAICRFCDTDFVGTDGPGGGKFKNAQDLAQQVALHWPHGVLPGVRPLVVCTGGEPLLQMDPPLIDALHQAGFEIAVETNGTLLPPDGIDWVCVSPKADAELLLRRGDELKLVYPQKGGMPDRYADLDFRHFFLQPMDCPQQAAHMKAAADYCMGHPQWRISLQTHKLIGIA

SEQ ID NO: 30914 - protein, 213 aa, Kordiimonadales bacterium
  misc_feature (1)..(213): tr|A0A5A7MRJ5|A0A5A7MRJ5_9PROT 7-carboxy-7-deazaguanine synthase OS=Kordiimonadales bacterium JCM 17844 OX=123 6966 GN=queE PE=3 SV=1
MTYSVKEIFYTLQGEGANSGRAAVFCRFSGCNLWTGREKDRTNAICQFCDTDFVGTDGSGGGKFKTAQDLADAVAKTWPHQEQPNARPLVVCTGGEPLLQLDASLIDALHQAGFEIAVETNGTQAAPEGLDWICVSPKAGAELVLTTGDELKLVYPQSGAEPERYAGLSFQHFFLQPMDNPQREANTSAAVDYCMRHPQWRLCLQTHKYVGID

SEQ ID NO: 30915 - protein, 210 aa, Kordiimonas lacus
  misc_feature (1)..(210): tr|A0A1G6VPK1|A0A1G6VPK1_9PROT 7-carboxy-7-deazaguanine synthase OS=Kordiimonas lacus OX=637679 GN=queE PE=3 S V=1
MVYTVKEMFYTLQGEGAQAGRPAVFCRFAGCNLWTGLERDRAKAICQFCDTDFVGTDGEGGGKFKTAADLASAVKSLWLGKSGKPLVVCTGGEPLLQLDGAAVEAFHDAGFEIAVESNGTVEPPEGIDWLCISPKIGSEMIVKGGQELKLVYPQEGGDPAQFEGLDFEHFFLQPMDCDVQAENTAKAVDYCKAHPQWRLSLQTHKFIDIP

SEQ ID NO: 30916 - protein, 222 aa, Kordiimonas sp.
  misc_feature (1)..(222): tr|A0A2E1CXS5|A0A2E1CXS5_9PROT 7-carboxy-7-deazaguanine synthase OS=Kordiimonas sp. OX=1970157 GN=queE PE=3 SV =1
MNNHNSYSIKEAFYTLQGEGAQSGRAAVFCRFSGCNLWSGRHEDRKNAICQFCDTDFVGTDGLNGGKYTAERLSQLIQDIWLQHTHNDTGKPYVVFTGGEPLLQLDDTLINQCKKLGFEIAIESNGTCPVPVGVDWVCISPKAGTDLVVFRGDELKLVYPQSDALPELYADLDFKHFFLQPKAPLNDDADIAAPHTKEALEYCLAHPQWRLSLQTHKLLDIP

SEQ ID NO: 30917 - protein, 226 aa, Koribacter versatilis
  misc_feature (1)..(226): sp|Q1IHK7|QUEE_KORVE 7-carboxy-7-deazaguanine synthase OS=Koribacter versatilis (strain Ellin345) OX=204669 GN =queE PE=3 SV=1
MQITEIYRSLQGESSYTGIPCIFVRLTACNLRCAWCDSEYTFKGGRKMSEDEIFAEVQKLAPGGLVEITGGEPLLQERELVPFMERLVASGYKVLIETSGERPLANVPQDVVKIVDVKCPASGEGGSFRIENLDALTPHDEIKFVISDRADYEFAREFTRQHGLENKVSSVIFSPAFRKDARGTRDASHCLVDPQDLANWVLEDQLDVRLGLQTHKFIWTPETKGV

SEQ ID NO: 30918 - protein, 223 aa, Kosakonia arachidis
  misc_feature (1)..(223): tr|A0A1I6XKF4|A0A1I6XKF4_9ENTR 7-carboxy-7-deazaguanine synthase OS=Kosakonia arachidis OX=551989 GN=queE PE=3 SV=1
MQYPINEMFQTLQGEGYFTGVPAIFIRLQGCPVGCAWCDTKHTWDKLADREVSLFSILAKTKESDKWGAASSEDLLAIIARQGWTARHVVITGGEPCIHDLTSLTSLLELNGFSCQIETSGTHEVRASHSTWVTVSPKVNMRGGYDVLLQALERADEIKHPVGRMRDIEALDELLAQLTDDKPRVIALQPISQKEDATRLCIETCIARNWRLSMQTHKYLNIA

SEQ ID NO: 30919 - protein, 223 aa, Kosakonia cowanii
  misc_feature (1)..(223): tr|A0A3R5YT90|A0A3R5YT90_9ENTR 7-carboxy-7-deazaguanine synthase OS=Kosakonia cowanii OX=208223 GN=queE PE=3 S V=1
MQYPINEMFQTLQGEGYFTGVPAIFVRLQGCPVGCAWCDTKHTWDKLADREVSLYSILGKTKESDKWGAASSEDLLAIIERQGWTARHVVITGGEPCIHDLIPLTALLEKHGFSCQIETSGTHEVRTSHSTWVTVSPKVNMRGGYDVLQQALERADEIKHPVGRMRDIEALDELLAQLHDQKQRVIALQPISQKEDATRLCIETCIARNWRLSMQTHKYLNIA

SEQ ID NO: 30920 - protein, 223 aa, Kosakonia oryzae
  misc_feature (1)..(223): tr|A0A1T5G1T6|A0A1T5G1T6_9ENTR 7-carboxy-7-deazaguanine synthase OS=Kosakonia oryzae OX=497725 GN=queE PE=3 SV =1
MQYPINEMFQTLQGEGYFTGVPAIFIRLQGCPVGCAWCDTKHTWDKLADREVSLFSILAKTKESDKWGAASSEDLLAIIARQGWTARHVVITGGEPCIHDLTPLTSLLELNGFSCQIETSGTHEVRASHSTWVTVSPKVNMRGGYDVLLSALERADEIKHPVGRMRDIEALDELLAQLTDDKPRVIALQPISQKEDATRLCIETCIARNWRLSMQTHKYLNIA

SEQ ID NO: 30921 - protein, 223 aa, Kosakonia oryzendophytica
  misc_feature (1)..(223): tr|A0A1C4AVC8|A0A1C4AVC8_9ENTR 7-carboxy-7-deazaguanine synthase OS=Kosakonia oryzendophytica OX=1005665 GN=qu eE PE=3 SV=1
MQYPINEMFQTLQGEGYFTGVPAIFIRLQGCPVGCAWCDTKHTWDKLADREVSLFSILAKTKESDKWGAANSEDLLAIIQRQGWTARHVVITGGEPCIHDLIPLTATLEKNGFSCQIETSGTHEVRASHTTWVTVSPKVNMRGGYEVLQQALERADEIKHPVGRLRDIEALDTLLSQLADDKHRVIALQPISQKEDATRLCIETCIARNWRLSMQTHKYLNIA

SEQ ID NO: 30922 - protein, 223 aa, Kosakonia oryziphila
  misc_feature (1)..(223): tr|A0A1C4DTF4|A0A1C4DTF4_9ENTR 7-carboxy-7-deazaguanine synthase OS=Kosakonia oryziphila OX=1005667 GN=queE PE =3 SV=1
MQYPINEMFQTLQGEGYFTGVPAIFIRLQGCPVGCAWCDTKHTWDKLADREVSLFSILAKTKESDKWGAASSEDLLAIIARQGWTARHVVITGGEPCIHDLTSLTSLLELNGFSCQIETSGTHEVRVSHSAWVTVSPKVNMRGGYDVLLQALERADEIKHPVGRMRDIEALDELLAKLTDDKLRVIALQPISQKEDATRLCIETCIARNWRLSMQTHKYLNIA

SEQ ID NO: 30923 - protein, 223 aa, Kosakonia radicincitans; identical to SEQ ID NO: 30920
  misc_feature (1)..(223): tr|A0A1V0LIL1|A0A1V0LIL1_9ENTR 7-carboxy-7-deazaguanine synthase OS=Kosakonia radicincitans DSM 16656 OX=11771 80 GN=queE PE=3 SV=1

SEQ ID NO: 30924 - protein, 223 aa, Kosakonia radicincitans; identical to SEQ ID NO: 30920
  misc_feature (1)..(223): tr|A0A5E8BFZ9|A0A5E8BFZ9_9ENTR 7-carboxy-7-deazaguanine synthase OS=Kosakonia radicincitans OX=283686 GN=queE PE=3 SV=1

SEQ ID NO: 30925 - protein, 223 aa, Kosakonia sp.
  misc_feature (1)..(223): tr|A0A3G9BXS0|A0A3G9BXS0_9ENTR 7-carboxy-7-deazaguanine synthase OS=Kosakonia sp. CCTCC M2018092 OX=2492396 GN =queE PE=3 SV=1
MQYPINEMFQTLQGEGYFTGVPAIFVRLQGCPVGCAWCDTKHTWDKLADREVSLYSILAKTKESDKWGAASSEDLLAIIERQGWTARHVVITGGEPCIHDLIPLTALLEKHGFSCQIETSGTHEVRTSHSTWVTVSPKVNMRGGYDVLQQALERADEIKHPVGRMRDIEALDELLAQLHDQKQRVIALQPISQKEDATRLCIETCIARNWRLSMQTHKYLNIA

SEQ ID NO: 30926 - protein, 223 aa, Kosakonia sp.
  misc_feature (1)..(223): tr|A0A4R0H796|A0A4R0H796_9ENTR 7-carboxy-7-deazaguanine synthase OS=Kosakonia sp. WCHEs120001 OX=2529380 GN=qu eE PE=3 SV=1
MQYPINEMFQTLQGEGYFTGVPAIFIRLQGCPVGCAWCDTKHTWDKLEDREVSLYSILAKTKESDKWGAASSEDLLAIIQRQGWTARHVVITGGEPCIHDLTPLTMLLEHNGFSCQIETSGTHDVRTSHATWVTVSPKVNMRGGYDVLQQALERADEIKHPVGRLRDIEALDELLAQLHDDKQRVIALQPISQKEDATRLCIETCIARNWRLSMQTHKYLNIA

SEQ ID NO: 30927 - protein, 213 aa, Kozakia baliensis
  misc_feature (1)..(213): tr|A0A1D8UXF1|A0A1D8UXF1_9PROT 7-carboxy-7-deazaguanine synthase OS=Kozakia baliensis OX=153496 GN=queE PE=3 S V=1
MSYAVKEMFATLQGEGAQTGRASVFCRFAGCNLWSGREQDRATASCTFCDTDFVGTDGEGGGKFATAQELADAIAATWRAQAGDAPHRYVVFTGGEPLLQLDETLIDAVHEASFEVAVETNGTVLAPLGVDWVCVSPKPNSEIVQRHGQELKLVYPQPELPPEMFESYDFEHFWLQPMDGPERVSHTQAAVEYCLRHPRWRLSLQTHKLIGIP

SEQ ID NO: 30928 - protein, 216 aa, Kozakia baliensis
  misc_feature (1)..(216): tr|A0A511GP24|A0A511GP24_9PROT 7-carboxy-7-deazaguanine synthase OS=Kozakia baliensis OX=153496 GN=queE PE=3 S V=1
MRGMSYAVKEMFATLQGEGAQTGRASVFCRFAGCNLWSGREQDRATASCTFCDTDFVGTDGEGGGKFATAQELADAIAATWRAQAGDAPHRYVVFTGGEPLLQLDETLIDAVHEASFEVAVETNGTVLAPLGVDWVCVSPKPNSEIVQRHGQELKLVYPQPELPPEMFESYDFEHFWLQPMDGPERVSHTQAAVEYCLRHPRWRLSLQTHKLIGIP

SEQ ID NO: 30929 - protein, 264 aa, Krasilnikovia cinnamomea
  misc_feature (1)..(264): tr|A0A4Q7ZKA6|A0A4Q7ZKA6_9ACTN 7-carboxy-7-deazaguanine synthase OS=Krasilnikovia cinnamomea OX=349313 GN=queE PE=3 SV=1
MMVTTKSELNLAVLDGGPEIFYTVQGEGASVGRPALFVRTSGCNLECSWCDTPYTWVFSSAKAAVHADGQLYSRRASQTRIAPADLAERIGSTGSTRIVLTGGEPMLQQKSLTEMLVNLKSTHPGVIVEVETNGTIEPRMYSILGRRTGMEVLVDQWNVSPKLSGARNSPGRALNPAALSRFGGLPNAVFKFVIAGEKDEADLLRLVGPANLGLQPARIWIMPEGRTPEEIRARLPRLAELCKVHRFNLTTRLHIEIWGDKQGV

SEQ ID NO: 30930 - protein, 211 aa, Krasilnikoviella flava
  misc_feature (1)..(211): tr|A0A1T5KRE3|A0A1T5KRE3_9MICO 7-carboxy-7-deazaguanine synthase OS=Krasilnikoviella flava OX=526729 GN=queE P E=3 SV=1
MSYKVKEIFYTLQGEGTHAGRPAVFCRFASCNLWTGHEKDRARAICQFCDTDFVGTDGPGGGKFVTPAELAAAVADKWPLESRANRMVVCTGGEPLLQLDEAAVDALHAEGFYVAVETNGTQAPPPGIDWLCVSPKIGAPLVIDGGHELKLVYPQDGGDPAQFEHLAFESFRLQPMDSPDVAENTKAAVGYCMAHPNWNLSMQTHKYLGIR

SEQ ID NO: 30931 - protein, 211 aa, Kribbella flavida
  misc_feature (1)..(211): tr|D2PYU3|D2PYU3_KRIFD 7-carboxy-7-deazaguanine synthas e OS=Kribbella flavida (strain DSM 17836 / JCM 10339 / NBRC 14399) OX=479435 GN=queE PE=3 SV=1
MSYKVKEIFYTLQGEGSHAGRPAVFCRFASCNLWTGREKDRARAICSFCDTDFVGTDGPGGGKFASAEDLARAVEDAWPHDGHDQRMVVCTGGEPLLQLDADAVSALHERGFYVAVETNGTQIPPQGLDWLCVSPKIGAELIVTSGDELKLVYPQAGGDPAQFEHLEFEHFRLQPMDSPDRQQNTAAAVEYCLKHPRWQLSLQTHKYLGIP

SEQ ID NO: 30932 - protein, 210 aa, Kribbella sp.
  misc_feature (1)..(210): tr|A0A4R0IRA6|A0A4R0IRA6_9ACTN 7-carboxy-7-deazaguanine synthase OS=Kribbella sp. YM55 OX=1572660 GN=queE PE=3 SV=1
MYRVKEIFYTLQGEGAHAGRPAVFCRFTGCNLWTGHEKDRGRAVCTFCDTDFVGTDGSGGGRFRTAADLAAAVAAFWPPAGGGERYVVCTGGEPLLQLDRAAVDALHDVGFTVAVETNGTRAAPPGIDWICVSPKSTAELVLTSGDELKLVYPQLDAPPERYESLDFRRFSLQPMDGPDTTGNTRLALEYCLTHPRWRLSLQTHKIVGIR

SEQ ID NO: 30933 - protein, 211 aa, Kribbella sp.
  misc_feature (1)..(211): tr|A0A4U3M135|A0A4U3M135_9ACTN 7-carboxy-7-deazaguanine synthase OS=Kribbella sp. NEAU-THZ 27 OX=2575441 GN=qu eE PE=3 SV=1
MTYKVKEIFYTLQGEGTHAGRPAVFCRFSSCNLWTGREKDRDRAICKFCDTDFVGTDGEGGGKFRDADSLAEAISSKWPSVSGGQPMVVFTGGEPLLQLDDVAVEALKTRGFYVAVETNGTINPPNGIDWLCVSPKIGSELVVHRGQELKFVIPQADVDPISFEHLDFTSFRVQPMDGPDLAVNTELAVKFCMENPRWQLSLQTHKYLGIP

SEQ ID NO: 30934 - protein, 232 aa, Kriegella aquimaris
  misc_feature (1)..(232): tr|A0A1G9W228|A0A1G9W228_9FLAO 7-carboxy-7-deazaguanine synthase OS=Kriegella aquimaris OX=192904 GN=queE PE=3 SV=1
MHRIELAGWNLKFVLCTTYLCAMVKEDVLTLVDKGVMLPLMEEFYTIQGEGFHKGTAAYFVRIGGCDVGCHWCDVKESWNAETHPPTAVENIVENAAKYSDTIVITGGEPLTWDMGPLTSALKAKNLKIHIETSGAYALTGIWDWICLSPKKNKLPEGKIYDKAHELKVIVYNKHDLIFAEEQAAKVNGDCILYLQPEWSVRDKVTPLIVDYVMQNPKWKVSLQTHKYLNIP

SEQ ID NO: 30935 - protein, 242 aa, Kroppenstedtia eburnea
  misc_feature (1)..(242): tr|A0A1N7Q3D8|A0A1N7Q3D8_9BACL 7-carboxy-7-deazaguanine synthase OS=Kroppenstedtia eburnea OX=714067 GN=queE P E=3 SV=1
MNNWELPQPAEYRAWKLPMVEIFETVEGEGNGAGYPTVFIRVFHCNLRCTWCDTPYSYAPARPEFEATIEEILEWVRRYPSRRICLTGGEPLMHREKSAALLAALADLNQVEDVHVETNGAIDLAPFDRLRKEGGKQREKIRFIMDYKLPASGEEHRMVRDNFRVLTDRDEVKFVIGDQEDFRAAVRVMQECHREGQILFSPVFETLPPRKLVEWVLAEPLPQVKVSLQLHKWIWDPAERGV

SEQ ID NO: 30936 - protein, 247 aa, Ktedonobacter racemifer
  misc_feature (1)..(247): tr|D6TZN1|D6TZN1_9CHLR 7-carboxy-7-deazaguanine synthas e OS=Ktedonobacter racemifer DSM 44963 OX=485913 GN=que E PE=3 SV=1
MSAKDHIQISELFGCTIQGEGALIGKPTVFVRTGGCDYRCQRCDTLYAVLPEHRGEWQQMTTQEVFAQVRELAHNRPILVTLSGGNPAMQPLEELLDLGHTEGYTFAIETQGSIAQPWFAKLDYLTLSPKAPGMQNPQPTNWERLDRCIAYARTGHNGKQPAICLKIVIFDEEDYQYAKHVAERYSDIPLYLQAGNHTPPHLANEIDINGILSRMDWLIQRVVEDQWYEVTILPQLHTLLWGNKRGV

SEQ ID NO: 30937 - protein, 231 aa, Ktedonobacter sp.
  misc_feature (1)..(231): tr|A0A1Q6YYW7|A0A1Q6YYW7_9CHLR 7-carboxy-7-deazaguanine synthase OS=Ktedonobacter sp. 13_2_20CM_53_11 OX=18052 33 GN=queE PE=3 SV=1
MNVMEIYRSVQGEGTLMGVPTTFVRFFACNLRCSWCDTKYSWSVREGGTWESIPAQKLAERVHVLGAQHVVLTGGEPTLQKDLAQLARLLQEQGHHLTIETNTTIFPEEVVPLINLWSLSPKLPSAGENYLRHPVIERFLATLRPEQQQWKFVIRDDQDEQRLRSLLRRYPLFAEHKLPIILQPEGDTAIIDYPAALERLAERVHDPFWNTYHVRILPQLHVIIWGRRRWV

SEQ ID NO: 30938 - protein, 87 aa, Ktedonobacter sp.
  misc_feature (1)..(87): tr|A0A352XW29|A0A352XW29_9CHLR 7-carboxy-7-deazaguanine synthase QueE (Fragment) OS=Ktedonobacter sp. OX=19327 16 GN=DDW33_11135 PE=4 SV=1
MNVMEIYRSVQGEGTLMGVPTTFVRFFACNLRCSWCDTKYSWSVSEGGTWESIPVQEVTERVQALGARHVVLTGGEPTLQKELAKLA

SEQ ID NO: 30939 - protein, 248 aa, Ktedonobacterales bacterium
  misc_feature (1)..(248): tr|A0A4P6K4N2|A0A4P6K4N2_9CHLR 7-carboxy-7-deazaguanine synthase OS=Ktedonobacterales bacterium SCAWS-G2 OX=25 09675 GN=queE PE=3 SV=1
MKQAAAARLIPISEIFGPTIQGEGALIGRPTVFVRTGGCDYRCSWCDTLYAVLPQYRDEWQPMSSEAILTRVQHLSGGHPLLVTLSGGNPAMQPLAPLLEQGHAQGYTFALETQGSIAQPWFADLEVLTLSPKPPSSGQEMRWERLERCLTAACAGSGNAGPQICLKIVVFDEADYTYAREVAARYPELPLYLQAGNHTPPHLAQEIDTAGILSRLQWLMERVMADQWYEVRVLPQLHTLLWGNRRGV

SEQ ID NO: 30940 - protein, 211 aa, Kuenenia stuttgartiensis
  misc_feature (1)..(211): tr|Q1Q0J9|Q1Q0J9_KUEST 7-carboxy-7-deazaguanine synthas e OS=Kuenenia stuttgartiensis OX=174633 GN=queE PE=3 SV =1
MLINEIFRSIQGETSFTGLPFVFVRLTGCNLRCSYCDTQYAYDEGNEMPISSIIDKIDSFGLKSVCVTGGEPLSNHNTPVLVRELLNRNYTVLVETNGSYDVSVLPEGTIRILDVKCPDSGMSHKMCWHNISHLTKKDEVKFVLSSRNDYEWARSMISKYHLTEIAHILMNPVYGMIQPSLIASWILEDHINVRLQLQMHKYIWGPETRGV

SEQ ID NO: 30941 - protein, 238 aa, Kurthia sp.
  misc_feature (1)..(238): tr|A0A433RYN3|A0A433RYN3_9BACL 7-carboxy-7-deazaguanine synthase OS=Kurthia sp. 3B1D OX=1562256 GN=queE PE=3 S V=1
MAKKVPVMEIFGPTIQGEGIVTGRKTMFVRTGGCDYSCAWCDSAFTWDGSERGQLMTGEMIWSKLMEIGTVDGIRNFNHITITGGNPALYNEPIAELITYAHAAGVEVGLETQGSRWQDWFLDVDDLTISPKPPSSTMRTDWVVLDSIIERLPNYSLKVVVFDEADFDYAEVVNARYKPSELYLSVGNDNSSEAGSIAERLLEKLEWLWQKVIATPSMNNAKPLPQLHALVWANKRGV

SEQ ID NO: 30942 - protein, 214 aa, Kushneria avicenniae
  misc_feature (1)..(214): tr|A0A1I1FQN1|A0A1I1FQN1_9GAMM 7-carboxy-7-deazaguanine synthase OS=Kushneria avicenniae OX=402385 GN=queE PE= 3 SV=1
MYSVKEAFYTLQGEGGQAGRASVFCRFTGCNLWSGREQDRTNSICRFCDTDFIGTDGQNGGKFRQASELATHLEALWPAQAAYARPYVVFTGGEPLLQLDAVLINAMHARGFEIAVETNGTLPAPDGIDWLCVSPKGRADIKQRSGNELKLVYPQEDAMPERFMALEFDHFFLQPMDLAPRGEAGNTTARTVAYCMANPQWRLSLQTHKIAGID

SEQ ID NO: 30943 - protein, 214 aa, Kushneria indalinina
  misc_feature (1)..(214): tr|A0A3D9E0Z7|A0A3D9E0Z7_9GAMM 7-carboxy-7-deazaguanine synthase OS=Kushneria indalinina DSM 14324 OX=1122140 GN=queE PE=3 SV=1
MYSVKEAFYTLQGEGGQAGRASVFCRFTGCNLWSGREKDRANSICRFCDTDFIGTDGQNGGRFRQASDLAEHIKALWPQQTDHARPYVVFTGGEPLLQLDAALIEAVHERGFEIAVETNGTLPAPEGIDWLCVSPKGRAELKQLSGNELKLVYPQEDALPERFKALEFDHFFLQPMDLAPRGETGNTMADTVGYCMANPQWRLSLQTHKIAGID

SEQ ID NO: 30944 - protein, 214 aa, Kushneria konosiri
  misc_feature (1)..(214): tr|A0A2Z2HK24|A0A2Z2HK24_9GAMM 7-carboxy-7-deazaguanine synthase OS=Kushneria konosiri OX=698828 GN=queE PE=3 SV=1
MYSVKEAFYTLQGEGGQAGRASVFCRFTGCNLWSGREKDRDNSICRFCDTDFIGTDGQNGGRFQTAAELAEHIAALWPRQTDSARPYVVFTGGEPLLQLDSHLIDAMHERGFEIAVETNGTLPAPAGIDWLCVSPKGRAELKQLSGNELKLVYPQSEALPERFKALEFDHFFLQPMDLAPRGQTGNTMADTVAYCMENPQWRLSLQTHKIAGID

SEQ ID NO: 30945 - protein, 214 aa, Kushneria marisflavi
  misc_feature (1)..(214): tr|A0A240UL38|A0A240UL38_9GAMM 7-carboxy-7-deazaguanine synthase OS=Kushneria marisflavi OX=157779 GN=queE PE= 3 SV=1
MYSVKEAFYTLQGEGGQAGRASVFCRFTGCNLWSGREKDRDNSICRFCDTDFIGTDGQNGGRFRTAIELAEHIAALWPRQTDSARPYVVFTGGEPLLQLDRRLIDAVHERGFEIAVETNGTLPAPEGIDWLCVSPKGRAELKQLSGNELKLVYPQSDALPERFKTLEFDHFFLQPMDLAPRGQTGNTMADTVAYCMENPQWRLSLQTHKIAGID

SEQ ID NO: 30946 - protein, 214 aa, Kushneria phyllosphaerae
  misc_feature (1)..(214): tr|A0A2R8CP50|A0A2R8CP50_9GAMM 7-carboxy-7-deazaguanine synthase OS=Kushneria phyllosphaerae OX=2100822 GN=que E PE=3 SV=1
MYSVKEAFYTLQGEGGQAGRASVFCRFTGCNLWSGREKDRASSICRFCDTDFIGTDGQNGGRFRTASDLADHIAALWPQSDDHARPYVVFTGGEPLLQLDSALIEVIHERGFEIAVETNGTLPAPEGIDWLCVSPKGRAELKQLSGNELKLVYPQADALPERFRALEFDHFFLQPMDLAPRGETGNTMADTVAYCMTNPQWRLSLQTHKIAGID

SEQ ID NO: 30947 - protein, 217 aa, Kushneria sinocarnis
  misc_feature (1)..(217): tr|A0A420WYH6|A0A420WYH6_9GAMM 7-carboxy-7-deazaguanine synthase OS=Kushneria sinocarnis OX=595502 GN=queE PE= 3 SV=1
MYAIKEAFYTLQGEGAQAGRPSAFCRFAGCNLWSGREKDRERSICRFCDTDFVGTDGQNGGRFDTARALAEHLLALWPEARPDYTGGTPYVVFTGGEPLLQLDPDLIEAMHACGFEIGVETNGTLTAPEGIDWLCVSPKGVAELKQQSGQELKLVYPQEEAHPSRFEHLDFEHFYLQPMDLAPRGEQGNTMAATVDYCMTHPQWRLSLQIHKIAGID

SEQ ID NO: 30948 - protein, 217 aa, Kushneria sp.
  misc_feature (1)..(217): tr|A0A1S1NWV4|A0A1S1NWV4_9GAMM 7-carboxy-7-deazaguanine synthase OS=Kushneria sp. YCWA18 OX=657387 GN=queE PE= 3 SV=1
MYSVKEAFYTLQGEGAQAGRPSVFCRFAGCNLWSGREKDRERSICRFCDTDFVGIDGQNGGRFYSASALAEHLQALWPDDQPDRARGKPYVVFTGGEPLLQLDIDLIEAMHLCGFEIGVETNGTLPAPEGIDWLCVSPKGSARLRQLSGQELKLVYPQSDATPAQFEQLDFEHFYLQPMDLTPRGEQGETMAATVSYCMTHPQWRLSLQMHKIAGID

SEQ ID NO: 30949 - protein, 202 aa, Kutzneria albida
  misc_feature (1)..(202): tr|W5W9J8|W5W9J8_9PSEU 7-carboxy-7-deazaguanine synthas e OS=Kutzneria albida DSM 43870 OX=1449976 GN=queE PE=3 SV=1
MSCRWCDTPYTWDWTGVGDSGIAHSPRAELHPMAWRAVLERLSGYAVPLVVISGGEPLSQQNRLLPLLHALTGTGHRVEIETNGTIEPLSELAALGVRFNVSPKLAHSGDPAARRLVPRALAALAAMPGTAFKFVCRSPEDLAEVADVVEHYGTTPVWIMPEGRTPEELSLRLAALGDAVIARGWNLTTRLHVAVWGDRRGK

SEQ ID NO: 30950 - protein, 235 aa, Kutzneria buriramensis
  misc_feature (1)..(235): tr|A0A3E0HK63|A0A3E0HK63_9PSEU 7-carboxy-7-deazaguanine synthase OS=Kutzneria buriramensis OX=1045776 GN=queE PE=3 SV=1
MDLVVNEIFGPTVQGEGRSLGRRCAFLRLGGCNLSCSWCDTPYTWDWTGAGDSGVAHDPRKELHRRSVEDVLAELVEFDTDLIVISGGEPLGQQERLIPLVTALVGRGKEIEIETNGTHAAHPELVAAGVRFNVSPKLSHSGDTRKRRIVPAALTSLSAVSGSTFKFVCRNTRDLDEVAELVSEFGLRSVWIMPIGRTADDVTKHMTELADAVVERGWNLTTRLHTLLWDDKRAV

SEQ ID NO: 30951 - protein, 218 aa, Kyrpidia spormannii
  misc_feature (1)..(218): tr|A0A2K8N447|A0A2K8N447_9BACL 7-carboxy-7-deazaguanine synthase OS=Kyrpidia spormannii OX=2055160 GN=queE PE= 3 SV=1
MKLNELFFSIQGESSSMGLPTVFVRFTGCNLRCSYCDTTYAYFEGTRTTPEEIFRRIEEYGVRRVCLTGGEPLIQPREELQQLLDLLGGNNYEVSIETDGSIDIERVKLRPKQRFVLDIKVPSSDMHTYMDFDNLKRVVPERDEIKFVVGNEEDYLWSKEIIRRYEISPERGYRLLFSPVYGVLEPRTLAEWILQDEWDVRLQVQLHKWLWEPGKRGV

SEQ ID NO: 30952 - protein, 218 aa, Kyrpidia tusciae
  misc_feature (1)..(218): tr|D5WTQ6|D5WTQ6_KYRT2 7-carboxy-7-deazaguanine synthas e OS=Kyrpidia tusciae (strain DSM 2912 / NBRC 15312 / T 2) OX=562970 GN=queE PE=3 SV=1
MKLNELFFSIQGESSSMGLPTVFVRFTGCNLRCSYCDTTYAYFEGTRTTPEEIFRQIQEYGVRRVCLTGGEPLIQPREELQQLLDLLGGNNYEVSIETDGSIDIERVKLRPKQRFILDIKVPSSDMHTYMDFDNLKRIVPERDEIKFVVGNEEDYLWSKEIIRRYEISPERGYRLLFSPVYGVLEPRTLAEWILQDEWDVRLQVQLHKWLWEPEKRGV

SEQ ID NO: 30953 - protein, 217 aa, Labilibaculum antarcticum
  misc_feature (1)..(217): tr|A0A1Y1CF12|A0A1Y1CF12_9BACT 7-carboxy-7-deazaguanine synthase OS=Labilibaculum antarcticum OX=1717717 GN=qu eE PE=3 SV=1
MVKKNDLKDKYKEIFDKGTDLPLVEDFYTIQGEGYHTGKPAYFIRIGGCDIGCQWCDSKISWNPAEHRLISVEEVVRKAVESPAKAVVVTGGEPSLYNLEPLCTELKKHNIENFLETSGAYEISGEWDWICLSPKRNKLPVPTSYQKANELKVIVFDLEKDFEWAEELSKNVGDDCLLYLQSEWSQYVHNVKPIVEYVKNNPKWNISLQAHKFMRIP

SEQ ID NO: 30954 - protein, 211 aa, Labilibaculum filiforme
  misc_feature (1)..(211): tr|A0A2N3HZ29|A0A2N3HZ29_9BACT 7-carboxy-7-deazaguanine synthase OS=Labilibaculum filiforme OX=1940526 GN=queE PE=3 SV=1
MKDKYKEIFDKGTDLPLVEDFYTIQGEGYHTGKPAYFIRIGGCDIGCQWCDSKISWNPAEHRLISVEEVVRKAVESPAKAVVVTGGEPSLYNLEPLCTELKKHNIENFLETSGAYEITGEWDWICLSPKRNKLPVPSSYQKANELKVIIYDLEKDLEWAEELSKNVGDDCLLYLQSEWSRYVHNIKPVVEYVKNNPKWNISLQAHKFMRIP

SEQ ID NO: 30955 - protein, 211 aa, Labilibaculum manganireducens
  misc_feature (1)..(211): tr|A0A2N3ICM9|A0A2N3ICM9_9BACT 7-carboxy-7-deazaguanine synthase OS=Labilibaculum manganireducens OX=1940525 G N=queE PE=3 SV=1
MKDKYKEIFDKGTDLPLVEDFYTIQGEGYHTGKPAYFIRIGGCDIGCRWCDSKISWNPAEHRLISVEEVVRKAVESPAKAVVVTGGEPSLYNLEPLCTELKKHNIENFLETSGAYEISGEWDWICLSPKRNKLPVPSSYEKANELKVIIFDLEKDFEWAEELSKNVGDDCLLYLQSEWSQYVHNIKPIVEYVKNNPKWNISLQSHKFMRIP

SEQ ID NO: 30956 - protein, 225 aa, Labilithrix luteola
  misc_feature (1)..(225): tr|A0A0K1PUT3|A0A0K1PUT3_9DELT 7-carboxy-7-deazaguanine synthase OS=Labilithrix luteola OX=1391654 GN=queE PE= 3 SV=1
MCYMQRALSKEDTLVIHEIYASIQGESTFAGLPCTFVRTTGCNLRCSWCDTTQAFYGGTRMPRTDVLAKALATGTKLVELTGGEPLLQPAVFRLMTELCDAGRTVLVETSGEADVSQVDPRVHKIMDLKAPGSGESKRNRWSNLEHIGPRDEIKFVLASREDYEWMRDAIRSRELPSRTPNLLASTVFGKLLPKQLVTWVLEDALPVRVQLQMHKYIWAPDTQGV

SEQ ID NO: 30957 - protein, 242 aa, Labrenzia aggregata
  misc_feature (1)..(242): tr|A0NZ71|A0NZ71_LABAI 7-carboxy-7-deazaguanine synthas e OS=Labrenzia aggregata (strain ATCC 25650 / DSM 13394 / JCM 20685 / NBRC 16684 / NCIMB 2208 / IAM 12614) OX= 384765 GN=queE PE=3 SV=1
MSIEQIRVSEIFGPTIQGEGALIGQPTVFVRTGGCDYRCSWCDTLHAVDSAHRDEWCPMTPQAILMQVEILSGGNPLTVSLSGGNPAIQPLGGLITLGRKEGYRFALETQGSLAKDWFADLDVLTLSPKPPSSGMTTDWQRLAECVEAAGPETQTVLKVVVFDEADYAFARDVSDRYPHLSCFLQPGNHTPPAATDTDATIDMTGIMERMRWLVDRVTSDKWYAATVLPQLHTMIWGNLRGV

SEQ ID NO: 30958 - protein, 242 aa, Labrenzia aggregata
  misc_feature (1)..(242): tr|A0A0M6YA63|A0A0M6YA63_9RHOB 7-carboxy-7-deazaguanine synthase OS=Labrenzia aggregata OX=187304 GN=queE PE=3 SV=1
MSIEQIRVSEIFGPTIQGEGALIGQPTVFVRTGGCDYRCSWCDTLHAVDSAHRDEWCPMTPEAILMQVEILSGGNPLTVSLSGGNPAIQPLGGLIELGRKEGYRFALETQGSLAKDWFADLDVLTLSPKPPSSGMTTDWQRLAECVEAAGPETQTVLKVVVFDEADYAFARDVSDRYPHLSCFLQPGNHTPPAAADTDATIDMAGIMERMRWLVDRVTSDKWYAATVLPQLHTMIWGNLRGV

SEQ ID NO: 30959 - protein, 242 aa, Labrenzia alba
  misc_feature (1)..(242): tr|A0A0M6Z7C8|A0A0M6Z7C8_9RHOB 7-carboxy-7-deazaguanine synthase OS=Labrenzia alba OX=311410 GN=queE PE=3 SV=1
MNTQTIRVNEIFGPTIQGEGALIGQPTVFVRTGGCDYRCSWCDTLHAVDSAYRDDWHPMTPAAIMMQVEILSGHCPLTVSLSGGNPAIQPLGGLIDLGRKEGYRFALETQGSIARDWFRDLDVLTLSPKPPSSGMVTDWQKLAECVEAAGPSTQLALKVVIFDENDYAYAREIASRYPQQSLYLQPGNHTPPAPDQEDGVIDMAGIMDRMRWLIDRVTTDRLYSATVLPQLHTLIWGNLRGV

SEQ ID NO: 30960 - protein, 242 aa, Labrenzia alba
  misc_feature (1)..(242): tr|A0A0M6Z3C6|A0A0M6Z3C6_9RHOB 7-carboxy-7-deazaguanine synthase OS=Labrenzia alba OX=311410 GN=queE PE=3 SV=1
MTQNTIRVNEIFGPTIQGEGALIGQPTVFVRTGGCDYRCSWCDTLHAVESAYRDEWQPMTPEAIMMQVEILTGGRPLTVSLSGGNPAIQPLGYLIELGKNEGYRFALETQGSIARDWFEKLDVMTLSPKPPSSGMDMDWQRLADCVEAAGHKTKTVLKVVVFDDLDYVFARDVASRYPELQLFLQPGNHTPPSPEEENSTIDMAGVMDRMRWLVDKVTSDQLYSATVLPQLHTLIWGNLRGV

SEQ ID NO: 30961 - protein, 213 aa, Labrenzia alexandrii
  misc_feature (1)..(213): tr|A0A0M7AHF7|A0A0M7AHF7_9RHOB 7-carboxy-7-deazaguanine synthase OS=Labrenzia alexandrii OX=388408 GN=queE PE= 3 SV=1
MRTGGCDYRCSWCDTLHAVDSAYRDDWHPMTPQAILMQIEILSGGKPLMVSLSGGNPAIQPLGSLIELGKREGYRFALETQGSIAKDWFAALDVLTLSPKPPSSGMDTDWQKLAECVEAAGSETQTVLKTVIFDDADYDYAKDLAARYPELPLYLQPGNHTPPSPATADAPIDMPGIMDRMRWLVDKVAGDRWYTPTVLPQLHTLIWGNLRGV

SEQ ID NO: 30962 - protein, 242 aa, Labrenzia alexandrii
  misc_feature (1)..(242): tr|A0A5E8H492|A0A5E8H492_LABAD 7-carboxy-7-deazaguanine synthase OS=Labrenzia alexandrii (strain DSM 17067 / N CIMB 14079 / DFL-11) OX=244592 GN=queE PE=3 SV=1
MSIGQIRVNEIFGPTIQGEGALIGQPTVFVRTGGCDYRCSWCDTLHAVDSAYRDDWHPMTPQAILMQIEILSGGKPLMVSLSGGNPAIQPLGSLIELGKREGYRFALETQGSIAKDWFAALDVLTLSPKPPSSGMDTDWQKLAECVEAAGSETQTVLKTVIFDDADYDYAKDLAARYPELPLYLQPGNHTPPSPATADAPIDMPGIMDRMRWLVDKVAGDRWYTPTVLPQLHTLIWGNLRGV

SEQ ID NO: 30963 - protein, 211 aa, Labrenzia marina
  misc_feature (1)..(211): tr|A0A2S3UYJ6|A0A2S3UYJ6_9RHOB 7-carboxy-7-deazaguanine synthase OS=Labrenzia marina OX=281252 GN=queE PE=3 SV =1
MTYSVKEIFYTLQGEGSNAGRAAVFCRFAGCNLWSGREADRASAICQFCDTDFVGVDGDGGGRFATANQLAASIAAKWVPTQNCRRFVVLTGGEPLLQVDALLIAALHEEGFEIAVETNGTVNPPEGIDWICVSPKAGTSLTLNYGNELKLVFPQTGVEPELFEALSFENFLLQPMDGPNLSENTQAAIAYCLANPRWQLSLQTHKQIGIP

SEQ ID NO: 30964 - protein, 242 aa, Labrenzia sp.
  misc_feature (1)..(242): tr|A0A222F875|A0A222F875_9RHOB 7-carboxy-7-deazaguanine synthase OS=Labrenzia sp. VG12 OX=2021862 GN=queE PE=3 SV=1
MTQDLIRVNEIFGPTIQGEGALIGQPTVFVRTGGCDYRCAWCDTLHAVDSAYRDEWVPMSPQAILMQVEILSGGKPLMVSLSGGNPAIQPLGPLIEFGRREGYRFALETQGSLAREWFDRLDVLTLSPKPPSSGMATDWQKLAECVEAAGSDTQTVLKVVVFDEADYAFARDVSERYPELSCYLQPGNHTPSEAHETDSTIDMAGIMDRMRWLVDRVTTDKWYAATVLPQLHTMIWGNLRGV

SEQ ID NO: 30965 - protein, 235 aa, Labrenzia sp.
  misc_feature (1)..(235): tr|A0A163TYZ4|A0A163TYZ4_9RHOB 7-carboxy-7-deazaguanine synthase OS=Labrenzia sp. OB1 OX=1561204 GN=queE PE=3 SV=1
MTLRIAEIFGPTIQGEGALIGEPTVFVRAGGCDYRCSWCDSPHAVESQYRHSWAPMEIDTVWAKVGKLSGGRPLTVSLSGGNPAIQNFGPLIAKGQAAGYRFACETQGSVARPWFSDLDTLVLSPKPPSSGELVDWEAFSSCRTMGTGARQQVMKIVIFDEIDYQWAREIHSQHSDLPLYLQPGNPEVDPATPVDLHVLAERLGWLTEKAMADGWFAPRILPQLHVLIWGNKRGV

SEQ ID NO: 30966 - protein, 255 aa, Labrenzia suaedae
  misc_feature (1)..(255): tr|A0A1M7N4M5|A0A1M7N4M5_9RHOB 7-carboxy-7-deazaguanine synthase OS=Labrenzia suaedae OX=735517 GN=queE PE=3 S V=1
MTALVLPAMHPVTLDATTIRISEIFGPTIQGEGALIGKPTVFVRTGGCDYRCSWCDTLHAVDSAYRHDWTPMTPEAIMMQVEILSGGQPITISLSGGNPAIQPLGDLIALGRQMGYRFALETQGSIAKDWFADLDILTLSPKPPSSGMETDLEALDACIAAAGINPRSVLKFVVFDDEDYAYARSIANRYRDLDVYLQPGNHTPPPPSETDALIDMDGIMTRMRWLIDKVGADRWFSATVLPQLHTLIWGNLRGV

SEQ ID NO: 30967 - protein, 211 aa, Labrys neptuniae
  misc_feature (1)..(211): tr|A0A5C1WIH6|A0A5C1WIH6_9RHIZ 7-carboxy-7-deazaguanine synthase OS=Labrys neptuniae OX=376174 GN=queE PE=3 SV =1
MTYAVKEIFYTLQGEGRNAGRAAVFCRFAGCNLWSGREADRATAICQFCDTDFVGMNGTGGGRFASAHDLACAISRTWTGGDDGQRLVVLTGGEPLLQVDADLVAALHEAGFEIAVETNGTLPPPPAIDWLCVSPKAGAPIVVGAGDELKFVYPQAGLEPGQFENLAFRHLLLQPMDGPEREANTAAAVAYCLANPRWRLTLQTHKMLGIP

SEQ ID NO: 30968 - protein, 238 aa, Laceyella sacchari
  misc_feature (1)..(238): tr|A0A4R4AHL1|A0A4R4AHL1_LACSH 7-carboxy-7-deazaguanine synthase OS=Laceyella sacchari OX=37482 GN=queE PE=3 S V=1
MPQAHQTIDEVKLPMVELFETVEGEGTQAGYPTTFVRVFNCNLRCTWCDTPYSYAPAKPEFFATIAEIVAEVKRYGHPRICLTGGEPLIHGEKSLMLIEALAQLEEVADIHIETNGAIHLAPFHAWREANPERGQKVRFVLDYKLPASGEQEKMIEENFTFLRDTDEVKFVIADDTDFDVAVEVVRQRMKRGVPLFSPVWESMPPARLVERMLAERLTQVKLNLQLHKVIWDPNARGV

SEQ ID NO: 30969 - protein, 224 aa, Laceyella sacchari
  misc_feature (1)..(224): tr|A0A2I7SXA6|A0A2I7SXA6_LACSH 7-carboxy-7-deazaguanine synthase OS=Laceyella sacchari OX=37482 GN=queE PE=3 S V=1
MVELFETVEGEGTQAGYPTTFVRVFNCNLRCTWCDTPYSYAPAKPEFFATIAEIVAEVKRYGHPRICLTGGEPLIYGEKSLLLIEALAQLEEVVDIHIETNGAIHLAPFHAWREANPEWGQKVRFVLDYKLPASGEQDKMIEENFTFLRDTDEVKFVIADDTDFDVAVEVVRRRMERGVPLFSPVWESMPPARLVERMLAERLTQVKLNLQLHKVIWDPNARGV

SEQ ID NO: 30970 - protein, 238 aa, Laceyella sediminis
  misc_feature (1)..(238): tr|A0A2T0YHX0|A0A2T0YHX0_9BACL 7-carboxy-7-deazaguanine synthase OS=Laceyella sediminis OX=573074 GN=queE PE=3 SV=1
MPQAHQTIDEVKIPMVELFETVEGEGTQAGYPTTFVRVFNCNLRCTWCDTPYSYAPAKPEFFATIAEIVAEVKRYGHPRICLTGGEPLIHGEKSLLLIEALAQLEEVADIHIETNGAIHLAPFHAWREANPEWGQKVRFVLDYKLPASGEQDKMIEENFTFLRDTDEVKFVIADDTDFDVAVEVVRQRIERGVPLFSPVWESMPPARLVERMLAERLTHVKLNLQLHKVIWDPNARGV

SEQ ID NO: 30971 - protein, 243 aa, Lachnobacterium bovis
  misc_feature (1)..(243): tr|A0A1H3LR26|A0A1H3LR26_9FIRM 7-carboxy-7-deazaguanine synthase OS=Lachnobacterium bovis DSM 14045 OX=1122142 GN=queE PE=3 SV=1
MENISSDIENITKEIKKEKSDTITYKVVEKFVSINGEGQKAGQLAIFIRFQGCNLNCVYCDTKWANQKEAKYHLMTAQQIIDYIKSTNVKNVTLTGGEPLRQENIMYLLEKLSLIENINVEIETNGSVSIAETKKIKNSPSITLDYKLPDSNMEKYMDLSNYDFLESKDTVKFVCSSINDLKKAKDIIEKYSLTSKCKVYLSSVFEKITPAEIVDFMKEHNMNDINLQLQMHKYIWDPNLKGV

SEQ ID NO: 30972 - protein, 234 aa, Lachnobacterium bovis
  misc_feature (1)..(234): tr|A0A1H9UM15|A0A1H9UM15_9FIRM 7-carboxy-7-deazaguanine synthase OS=Lachnobacterium bovis OX=140626 GN=queE PE =3 SV=1
MINNISSDVEVEKIKYKVVEKFVSINGEGQKAGQLAIFIRFQGCNLNCVYCDTKWANTNETKYELMSASQIVDYIKSTKVKNVTLTGGEPLRQENIIYLLKQLSLLENINVEIETNGSVNIAEVKKINNSPSITLDYKLPESTMEKYMDLTNYEYLEKKDTVKFVCSSIGDLNKAKEIIDKYNLTSKCKVYLSSVFEKITPAEIVEFMKENNMNDINLQLQMHKYIWDPNLKGV

SEQ ID NO: 30973 - protein, 218 aa, Lachnoclostridium sp.
  misc_feature (1)..(218): tr|A0A3B9K685|A0A3B9K685_9FIRM 7-carboxy-7-deazaguanine synthase OS=Lachnoclostridium sp. OX=2028282 GN=queE P E=3 SV=1
MRVVEKFVSINGEGQRAGEPAAFVRFQGCNLCCSWCDTKWANVPDCPYEEMSPAEVAAWADETGITNVTLTGGEPLLQKEMGELLPMLLADGKHRVEIETNGSVDIAPFCEKDRPAFTLDYKLPGSGCEARMNTANYGLLRSEDTVKFVIGSREDLERAKEIMEQYGLIGRCQVYLSPVFGQIEPAEMAEFLTEHRMNGVRMQIQIHKVIWDPEKRGV

SEQ ID NO: 30974 - protein, 227 aa, Lachnospira multipara
  misc_feature (1)..(227): tr|A0A1H5UG57|A0A1H5UG57_9FIRM 7-carboxy-7-deazaguanine synthase OS=Lachnospira multipara OX=28051 GN=queE PE= 3 SV=1
MDINYESTFPLVEHFISINGEGRKAGQLALFIRLAGCNLDCSYCDTKWANKADVKFEKKTIREIVDIVKNSNCKNVTLTGGEPLLKKDVDQLIAAILELDDIRLEIETNGSQSIKKYDDWERRPVMTLDYKLASSGCEAAMNTENFNYLHKEDSVKFVSGSRADLERTLEIITKYDLTSKANCIISPVFGQIEPVEIVDFMKEHEMNDVFLQLQMHKIIWDPNKQGV

SEQ ID NO: 30975 - protein, 227 aa, Lachnospira pectinoschiza
  misc_feature (1)..(227): tr|A0A1G9WXS4|A0A1G9WXS4_9FIRM 7-carboxy-7-deazaguanine synthase OS=Lachnospira pectinoschiza OX=28052 GN=queE PE=3 SV=1
MDINYELTFPLVEHFISINGEGRRAGQLALFIRLAGCNLDCSYCDTKWANKADVKFEKKTIREIVDIVKNSNCKNVTLTGGEPLLKKDVDKLIAAILELDDIRLEIETNGSQPIKKYDDWKRRPVMTLDYKLASSGCEAAMDTENFNYLHKEDSVKFVSGSRADLERTLEIITKYDLTSKANCIISPVFGQIEPVEIVDFMKEHEMNDVFLQLQMHKIIWDPNKQGV

SEQ ID NO: 30976 - protein, 247 aa, Lachnospira pectinoschiza
  misc_feature (1)..(247): tr|A0A174G4E9|A0A174G4E9_9FIRM 7-carboxy-7-deazaguanine synthase OS=Lachnospira pectinoschiza OX=28052 GN=queE PE=3 SV=1
MSKQIFNVVEHFASINGEGVRAGELAVFVRFRGCNLDCSYCDTRWANDVNAKAAKMSVSDIVKAVEDAKIDNVTLTGGEPLIQAGIDELIAQLLISGRNVEIETNGSVDINKVRENVKDNLTTAMNGQVINDIYDKVNDEMERLSMTADYKLAGSNMEQYMKLDNFNNLQSQDTVKFVVSSEEDLKRALEIIRQYNLTEKCYVYFSPVFGKIEPVTIVDFMKDNLINGARVQLQLHKFIWSPDKKGV

SEQ ID NO: 30977 - protein, 222 aa, Lachnospiraceae bacterium
  misc_feature (1)..(222): tr|A0A1I2Q5A2|A0A1I2Q5A2_9FIRM 7-carboxy-7-deazaguanine synthase OS=Lachnospiraceae bacterium C7 OX=1792306 GN =queE PE=3 SV=1
MTKYKVVEKFVSINGEGQKAGQLAVFVRFCGCNLNCTYCDTKWANVPDAKFEYETADEIIKNIKDTKIKNVTLTGGEPLAQPGINELLEKLSEEKELSVEIETNGSKNIEELKKLKNTPSVTLDYKLAGSGMEKFMDVSNYEFLEQKDTVKFVCSNRVDLEKAKEIIDKYNLTSKCKVYLSAVFGKITPAEIVDFMKENTMNNVNLQLQMHKFIWDPNERGV

SEQ ID NO: 30978 - protein, 222 aa, Lachnospiraceae bacterium
  misc_feature (1)..(222): tr|A0A356DNG2|A0A356DNG2_9FIRM 7-carboxy-7-deazaguanine synthase OS=Lachnospiraceae bacterium OX=1898203 GN=qu eE PE=3 SV=1
MGKYKVVETFVSINGEATHAGELACFIRFAGCNLACGYCDTKWANEPQVPYKSMSAEEIYAYIKSCGVKNVTLTGGEPLIQPEIEWLITLLSADKALRVEIETNGSVDIAGYDARPENVCMTLDYKLPDSGMEQFMRTENYAWLKPQDAVKFVVSSTRDLETAKKIIETYDLCAKATVYLSSAFSAITPAQIVEYMIQENMKDVRLQLQMHKYIWDPEKKGV

SEQ ID NO: 30979 - protein, 222 aa, Lachnotalea glycerini
  misc_feature (1)..(222): tr|A0A255IRP1|A0A255IRP1_9FIRM 7-carboxy-7-deazaguanine synthase OS=Lachnotalea glycerini OX=1763509 GN=queE P E=3 SV=1
MSKYKVVEKFVSINGEGVLAGQLAVFIRFKGCNLNCSYCDTAWANQKDAAYTLMSDQQIYNYIKETGVKNVTLTGGEPLQNPNIIQLIQMLTKDTDLQVEIETNGSIDLSMFAAIDHAPSFTMDYKLASSMMESEMLVTNFKLLKKKDTVKFVVGNLQDLDRARDIITANQLMNQCHVYISTVYNKIDLVDVVNYMIKHSMNGVTLQLQMHKIIWEPNQRGV

SEQ ID NO: 30980 - protein, 214 aa, Lachnotalea sp.
  misc_feature (1)..(214): tr|A0A416EI84|A0A416EI84_9FIRM Peptidase C39 domain-con taining protein OS=Lachnotalea sp. AF33-28 OX=2292046 G N=DWZ56_12965 PE=4 SV=1
MVDKILYNLDQYPETLLRLLVKDEDTLDFVLGYPAKKGTVSANIDLTEEYKKGKIPLLLQWDQRWGYGEYGDGIIGLDGCGPVCLSMVAVGVLEDVSVTPDRVAQLAEKRGYIEDAGTSWDLMTEGARSLGLVAEELPLSENTVIETLKAGHPIICSMRKGDFTTTGHFIVLTGYEDGRITVNDPNSRKRSEKTWDFDTLQYQIKNLWSYTAGQ

SEQ ID NO: 30981 - protein, 64 aa, Lachnotalea sp.
  misc_feature (1)..(64): tr|A0A416ELS6|A0A416ELS6_9FIRM Uncharacterized protein OS=Lachnotalea sp. AF33-28 OX=2292046 GN=DWZ56_09710 PE =4 SV=1
MNKEPRTMQVADAVTASRAPENTPAMVKKIGKTTYKVHVHFSNTSTETMSDKIKRMLKNEIQQM

SEQ ID NO: 30982 - protein, 223 aa, Lacibacter cauensis
  misc_feature (1)..(223): tr|A0A562SCY8|A0A562SCY8_9BACT 7-carboxy-7-deazaguanine synthase OS=Lacibacter cauensis OX=510947 GN=queE PE=3 SV=1
MNELLIDTTQQVLPVMESFYTLQGEGFHQGRAAYFIRLGGCDVGCVWCDVKDSWDAAKHPKFSVGEIVAKLKEETTTKFQNPNPKFQNSNLPIVVITGGEPLMHNLDALTKAIHAAGFQTNIETSGSSPLSGEWDWICLSPKKFKAPLPEVVPHASELKVVIFNKSDFNWAETYAAQVSPNCKLYLQPEWDKAAQVTPLIIDYIKVNPQWELSLQVHKYINVP

SEQ ID NO: 30983 - protein, 211 aa, Lacibacter sp.
  misc_feature (1)..(211): tr|A0A4Q1CP16|A0A4Q1CP16_9BACT 7-carboxy-7-deazaguanine synthase OS=Lacibacter sp. TTM-7 OX=2508719 GN=queE PE =3 SV=1
MESFYTLQGEGFHQGRAAYFIRLGGCDVGCVWCDVKDSWDATKHPKYSVEEIVEKMEKELGIRNRELGSNLQPLTSNLKPIVVITGGEPLMHNLDALTKAIHTAGYQTNIETSGSSPLSGEWDWICLSPKKFKAPLPEVVPHASELKVVIFNKSDFAWAETYAAQVSSNCKLYLQPEWDKAAQVTPLIIDYIKANPQWELSLQVHKYINVP

SEQ ID NO: 30984 - protein, 224 aa, Lacimicrobium alkaliphilum
  misc_feature (1)..(224): tr|A0A0U2ZFQ9|A0A0U2ZFQ9_9ALTE 7-carboxy-7-deazaguanine synthase OS=Lacimicrobium alkaliphilum OX=1526571 GN=q ueE PE=3 SV=1
MSVLKVNEMFETIQGEGFYTGLPAIFVRLQGCPVGCPWCDTKHTWTLDPAFQTDTQQVLAKTSDSEQYFSADEHKLLSLFEQQKYHARHVVITGGEPAMYDLTSLTSLLIDKGYSVQIETSGTFEIQAHPGTWITLSPKVNMKGGYKVLDQPLQKANEIKHPIAMQKHIDELDALLARTATNPKAMIYLQPISQQQRATDLAVATCIKKNWRLSLQTHKFIGIE

SEQ ID NO: 30985 - protein, 209 aa, Lacinutrix sp.
  misc_feature (1)..(209): tr|A0A4U0EZ57|A0A4U0EZ57_9FLAO 7-carboxy-7-deazaguanine synthase OS=Lacinutrix sp. CAU 1491 OX=2565367 GN=queE PE=3 SV=1
MNKEILELVSKGEMLPLMEEFYTIQGEGYHKGTAAYFVRIGGCDVGCHWCDVKESWNANLHPPTKTASIIENATKYSDTVVVTGGEPLTWNMTNLTEGLKAKGAMVHIETSGAYELTGTWDWICLSPKKMKLPTKEVYEKANELKVIVYNKDDFRFAEEQAAKVNEDCILYLQPEWSKRDKVIPLIVDYVMKHPKWKVSLQTHKYLNIP

SEQ ID NO: 30986 - protein, 209 aa, Lacinutrix sp.
  misc_feature (1)..(209): tr|A0A2K8XH75|A0A2K8XH75_9FLAO 7-carboxy-7-deazaguanine synthase OS=Lacinutrix sp. Bg11-31 OX=2057808 GN=queE PE=3 SV=1
MTQEVQDLVNQGKMLPLMEEFYTIQGEGFHKGTAAYFIRIGGCDVGCHWCDVKESWNAQLHPPTVIEDIVANAKKYSNTIVVTGGEPLMWDMTALTKQLKADGMSIHIETSGAYQLSGQWDWICLSPKKMKLPTQGVYDKANELKCIIFNKDDFRFAEEQAEKVNGDCILYLQPEWSKRDTMVPLIVDYVMANPKWKVSLQTHKYLNIP

SEQ ID NO: 30987 - protein, 209 aa, Lacinutrix venerupis
  misc_feature (1)..(209): tr|A0A420ZFB0|A0A420ZFB0_9FLAO 7-carboxy-7-deazaguanine synthase OS=Lacinutrix venerupis OX=1486034 GN=queE PE =3 SV=1
MTQEVQNLVNQGKMLPLMEEFYTIQGEGFHKGTAAYFVRIGGCDVGCHWCDVKESWIAQLHPPTETEKIVANAKQYSKTIVVTGGEPLTWDMTELTKQLKAEGMSIHIETSGAYELTGEWDWICLSPKKMKLPTQGVYDKANELKCIIYNKDDFRFAEEQAEKVNGDCILYLQPEWSKRDKVVPMIVDYVMANPKWKVSLQTHKYLNIP

SEQ ID NO: 30988 - protein, 286 aa, Lactobacillus animalis
  misc_feature (1)..(286): tr|A0A062X2Z6|A0A062X2Z6_9LACO 7-cyano-7-deazaguanosine (PreQ0) biosynthesis protein QueE, queE OS=Lactobacill us animalis OX=1605 GN=Lani381_0111 PE=4 SV=1
MKINKRGMGITLLVLLILFSLALPSFIWTRQNVKDLARWHNSRLSPVIMIPGSSATENRFDALIKKINSRSQKKHSLLKVKVYNDGTVKYSGKINAKDNEPFIVVGFENNKDGYSNILKQAKMFDKAFKQLSEQYEFNNFKAFGHSNGGLIYTAFLENYLPKYDIQAKVLMTVGTPYNFSETSLQRKTQMLADFIKNRKKLPTDLSVYTVAGTETYDSDGLVPERSVEAGKYIYQGIVKHFTQITVTGKDAQHSDLPQNDQIIELLDRYVLEPDQNQKTKKLKENS

SEQ ID NO: 30989 - protein, 72 aa, Lactobacillus parakefiri
  misc_feature (1)..(72): tr|A0A269XDT9|A0A269XDT9_9LACO 7-carboxy-7-deazaguanine synthase QueE (Fragment) OS=Lactobacillus parakefiri O X=152332 GN=B8W98_13470 PE=4 SV=1
MAKIPVLEVFGPTIQGEGRVIGRKTMFVRTAGCDYRCSWCDSAFTWDGSAKEDIRLLSAEEIYEELREVRGD

SEQ ID NO: 30990 - protein, 130 aa, Lactobacillus reuteri
  misc_feature (1)..(130): tr|A0A1C1ZYZ6|A0A1C1ZYZ6_LACRE 7-cyano-7-deazaguanosine (PreQ0) biosynthesis protein QueE (Fragment) OS=Lactob acillus reuteri OX=1598 GN=BBP13_12570 PE=4 SV=1
MAKIPVLEIFGPTIQGEGRVIGRKTMFVRTAGCDYRCSWCDSAFTWDGRAKEDIKLMTAEEIYEAVLERGGHRFNHVTISGGNPALIKGIQELVDLFEEKHIYTALETQGSRFQSWMTQIDDLTISPKPP

SEQ ID NO: 30991 - protein, 240 aa, Lactococcus lactis
  misc_feature (1)..(240): tr|A0A2A9IAE3|A0A2A9IAE3_9LACT 7-cyano-7-deazaguanosine (PreQ0) biosynthesis protein QueE, queE OS=Lactococcus lactis OX=1358 GN=AMHIJAGA_02728 PE=4 SV=1
MLTKNRNKKFSIFSSHFPNLCSHLDIIVDMTYQVKIIYPKEEAAENNKLTERTFNEFIDGLELEEVITQYEQLLTKGYSISVNFAPPQLDDKGTEPDPFMIAGRLELAGIPYKATLKLKASGDYESMVKIAKMIEQQDYDYDISAKLQIRENSSVDFEKEGSWFDKDYTKYTILPKASSQDIADLKTLYDALVEEHQKVTINIKAKVKKDDDDSFANQLAAYPPETMIIFKLTDADIYGE

SEQ ID NO: 30992 - protein, 211 aa, Lactococcus lactis
  misc_feature (1)..(211): tr|A0A0M2ZRY9|A0A0M2ZRY9_LACLC 7-cyano-7-deazaguanosine (PreQ0) biosynthesis protein QueE, queE OS=Lactococcus lactis subsp. cremoris OX=1359 GN=yxcD PE=4 SV=1
MTYQVKIIYPKEEAAENNKLTERTFNEFIDGLELEEVITQYEQLLTKGYSISVNFAPPQLDDKGTEPDPFMIAGRLELAGIPYKATLKLKASGDYESMVKIAKMIEQQDYDYDISAKLQIRENSSVDFEKEGSWFDKDYTKYTILPKASSQDIADLKTLYDALVEEHQKVTINIKAKVKKDDDDSFANQLAAYPPETMVIFKLTDADIYGE

SEQ ID NO: 30993 - protein, 230 aa, Lacunisphaera limnophila
  misc_feature (1)..(230): tr|A0A1D8ASY2|A0A1D8ASY2_9BACT 7-carboxy-7-deazaguanine synthase OS=Lacunisphaera limnophila OX=1838286 GN=que E_1 PE=3 SV=1
MLISEIFYSLQGEGELMGVPSVFVRTSGCNLRCNWCDTPYASWQPEGTPMEVEAILAEVTRHPAKHVVLTGGEPMVAPGIHELAFQLQERGYHITIETAGTILPRGIACDLASISPKLKHSAPDARLDDTWRRKHEELRWQPAVVTAWMACQDYQLKFVVSSEADVTELEGMLRETDTAIPPSKVLLMPEGVTIEALRSRAGWLGEVCKARGYRYAPRLHIELYGNRRGT

SEQ ID NO: 30994 - protein, 226 aa, Lacunisphaera limnophila
  misc_feature (1)..(226): tr|A0A1D8AYX1|A0A1D8AYX1_9BACT 7-carboxy-7-deazaguanine synthase OS=Lacunisphaera limnophila OX=1838286 GN=que E_2 PE=3 SV=1
MSTLPIYETFYAWQGEGCHMGRAAFFIRTFGCPVKCPWCDSAGTWHPDWVPEKIERFSADELADRAVAHRAEFAVITGGEPTIHDLTELTAALHRRDLPTHLETSGSFPIKGDFDWITVSPKWAKLPLPENLRRANEIKLIIEDGESVEKWRAQVSPLTAGQVVWLHPEWSKREDPAVMNSISVTVKTQGHPFRAGYQLHRVYNVDSLDSGARPIIPLGGNLEIGY

SEQ ID NO: 30995 - protein, 231 aa, Lacunisphaera sp.
  misc_feature (1)..(231): tr|A0A4V1M668|A0A4V1M668_9BACT 7-carboxy-7-deazaguanine synthase OS=Lacunisphaera sp. TWA-58 OX=2508720 GN=que E PE=3 SV=1
MLISEIFYSLQGEGQLAGVPSVFVRTSGCNLRCNWCDTPYASWNPEGTPMEVEAILAEVKKHPTKHVVLTGGEPMVAPGIHELAFQLQERNYHITIETAATVRPRGIACDLASLSPKLAHSAPDTRLDDTWRRKHAELRWQPAVVADWMGSARDYQLKFVVSSEADVTELEDMLRETDCLIPPSKVLLMPEGVTVEALRAKAGWLGELCKARGYRYAPRLHIELYGNKRGT

SEQ ID NO: 30996 - protein, 210 aa, Lampropedia sp.
  misc_feature (1)..(210): tr|A0A4S5BP67|A0A4S5BP67_9BURK 7-carboxy-7-deazaguanine synthase OS=Lampropedia sp. YIM MLB12 OX=2562762 GN=qu eE PE=3 SV=1
MTYSVKEIFYTLQGEGLRAGRPAVFCRFSGCNLWTGREEDRLKATCQFCDTDFVGTDGTLGGKFGQAEALAAHIAALWPTGQAHRYVVLTGGEPLLQVDAALIEALHAQDFEIAVETNGTVAVPAGIDWICVSPKAGADWVQRSGDELKLVYPQPGLLPATITCVDFQFYLLQPMDGPLLRQNTRAAIDYCQNHTQWRLSVQTHKVLEIR

SEQ ID NO: 30997 - protein, 209 aa, Laribacter hongkongensis
  misc_feature (1)..(209): tr|A0A248LHS6|A0A248LHS6_9NEIS 7-carboxy-7-deazaguanine synthase OS=Laribacter hongkongensis OX=168471 GN=queE PE=3 SV=1
MTYTVKEIFHTLQGEGVHSGRAAVFCRFTGCNLWSGRETDRAQATCQFCDTDFVGTGPDGGKFVCAQELAGRIADSWAGTGGTPYVVFTGGEPLLQLDEELIEAMHARGFEVGVETNGTIPAPPRIDWLCVSPKAGSKWVQKQGDELKLVYPQPGLLPETVELTGFSRYWLQPMDGPEQTMHIKAAIGFCLLHPDWHLSLQNHKLAGIR

SEQ ID NO: 30998 - protein, 209 aa, Laribacter hongkongensis
  misc_feature (1)..(209): tr|C1D6K8|C1D6K8_LARHH 7-carboxy-7-deazaguanine synthas e OS=Laribacter hongkongensis (strain HLHK9) OX=557598 GN=queE PE=3 SV=1
MTYTVKEIFHTLQGEGVHSGRAAVFCRFTGCNLWSGRETDRAQATCQFCDTDFVGTGPDGGKFACARELAGRIADSWAGTGGTPYVVFTGGEPLLQLDEELIEAMHARGFEVGVETNGTIPAPPGIDWLCVSPKAGSGWVQKQGDELKLVYPQPGLLPETVELTGFSRYWLQPMDGPEQTMHIKAAIGFCLLHPDWHLSLQNHKLAGIR

SEQ ID NO: 30999 - protein, 193 aa, Larkinella arboricola
  misc_feature (1)..(193): tr|A0A327XA40|A0A327XA40_9BACT 7-carboxy-7-deazaguanine synthase OS=Larkinella arboricola OX=643671 GN=queE PE =3 SV=1
MESFYTLQGEGAHTGRAAYFIRLGGCDVGCHWCDVKESWDADAHPKYPIVEIVEGALQHPGRMAVITGGEPLMHDLTGLTLALKKAGFQTNIETSGVYPVSGVWDWICFSPKKFKQPHPGIFEQANELKVIIYNKSDFAFAESFVPLLQPHCKLFLQPEWSRSNEMLPLIVEYVKQHPQWQVSLQTHKYMDIP

SEQ ID NO: 31000 - protein, 193 aa, Larkinella knui
  misc_feature (1)..(193): tr|A0A3P1CYJ5|A0A3P1CYJ5_9BACT 7-carboxy-7-deazaguanine synthase OS=Larkinella knui OX=2025310 GN=queE PE=3 SV =1
MESFYTLQGEGAHTGRAAYFIRLGGCDVGCHWCDVKESWDVHAHPKYTIDALVEGALQYPGRLAVITGGEPLMHDLTELTLALKKAGFQTNIETSGVYPVNGIWDWICFSPKKFKEPNPDIFQKASELKVIIYNKSDFAFAESFVGSLQPHCKLFLQPEWSRSNEMLPLIVDYVKQHPQWQVSLQTHKFMDIP

SEQ ID NO: 31001 - protein, 193 aa, Larkinella rosea
  misc_feature (1)..(193): tr|A0A3P1C3P2|A0A3P1C3P2_9BACT 7-carboxy-7-deazaguanine synthase OS=Larkinella rosea OX=2025312 GN=queE PE=3 S V=1
MESFYTLQGEGAHTGKAAYFIRLGGCDVGCHWCDVKESWDVTAHPSYSIDDLVEGALQYPGRMAVITGGEPLMHDLSGLTAALKKAGFNTNIETSGVYPVSGSWDWICFSPKKFKEPHPDIFRKADELKAIIYHKSDFAFAESFVASLRSDCKLFLQPEWSRSNEMLPLIVEYVKQHPQWQVSLQTHKFMDIP

SEQ ID NO: 31002 - protein, 210 aa, Larkinella sp.
  misc_feature (1)..(210): tr|A0A4R8CZP2|A0A4R8CZP2_9BACT 7-carboxy-7-deazaguanine synthase OS=Larkinella sp. BK230 OX=2512173 GN=queE PE =3 SV=1
MNQVLEQQTDTVQRLPVMESFYTLQGEGAHTGRAAYFIRLGGCDVGCHWCDVKESWDADAHPKFPIPAIVEGALQHPGRMAVITGGEPLMHDLTGLTLALKKAGFQTNIETSGVYPVSGVWDWICFSPKKFKQPHPGIFGQANELKMIIYNKSDFAFAESFVPLLQLHCKLFLQPEWSRSNEMLPLIVEYVKQHPQWQVSLQTHKYMDIP

SEQ ID NO: 31003 - protein, 193 aa, Larkinella sp.
  misc_feature (1)..(193): tr|A0A368JTM7|A0A368JTM7_9BACT 7-carboxy-7-deazaguanine synthase OS=Larkinella sp. ZZJ9 OX=2315727 GN=queE PE= 3 SV=1
MESFYTLQGEGAHTGKAAYFIRLGGCDVGCHWCDVKESWDVNAHPSYTIDELVDGALQYPGRMAVITGGEPLMHDLSGLTLALQNAGFQTNIETSGVYPVTGRWDWICFSPKKFKEPNPDIFSKANEMKAIIYNKSDFAFAESFVASLQPHCKLFLQPEWSRSNEMLPLIVEYVKQHPQWQVSLQTHKFMDIP

SEQ ID NO: 31004 - protein, 244 aa, Lautropia mirabilis
  misc_feature (1)..(244): tr|E7S060|E7S060_9BURK 7-carboxy-7-deazaguanine synthas e OS=Lautropia mirabilis ATCC 51599 OX=887898 GN=queE P E=3 SV=1
MNSEQHMAAGMPVTPPHPVIPLSVETPVHTAIRRRPEPATGLDTPYRIVEIFETLQGEGFNTGMPSVFIRFGKCNLACPWCDTDYNRFGTMTLGDILAKVRTFSARNVIITGGEPTIQPHLERLLDSLKAEGHFLAIETNGLKPVPPQIDYIATSPKRLYQQAYQKRHIKFAHEVRIVVDGDVRDFCAQIEDSIQADRYYLSPCEVDGRMNMLETITQLGQLNQRPGRPRWQLSIQTHKLAGIE

SEQ ID NO: 31005 - protein, 260 aa, Lautropia sp.
  misc_feature (1)..(260): tr|A0A3R8NR46|A0A3R8NR46_9BURK 7-carboxy-7-deazaguanine synthase OS=Lautropia sp. KCOM 2505 OX=2490857 GN=queE PE=3 SV=1
MKTKHLEPLHARTNRAWAESPAGIRTASHETISTGSDTGKPTTQTPSVRPLHFRNPKQPPSYRIVEIFESLQGEGFNTGMPSIFIRFGKCNLACPWCDTNYNQYESRSLDEVLSVVHGYTARNIIITGGEPTIQPDLDPLLDTLKAEGYFLAIETNGLKPVPRQIDYIATSPKRLYEKAYRKKHIDFAHEVRIVVDGDVRDFCEQMESTIRAEHYYLSPCETDGRMNMLDTITQLGQLNARPGRPHWQLSIQTHKLANIE

SEQ ID NO: 31006 - protein, 212 aa, Lautropia sp.
  misc_feature (1)..(212): tr|A0A1D2TNP9|A0A1D2TNP9_9BURK 7-carboxy-7-deazaguanine synthase OS=Lautropia sp. SCN 70-15 OX=1660105 GN=queE PE=3 SV=1
MTYSIKEMFYTLQGEGAQAGRPAVFCRFSGCNLWSGREEDRADAVCTFCDTDFVGTDGQGGGKFRTAAELARAIAAKWPADDDSGRRYVVCTGGEPLLQLDEPLIDALHAEGFEMAVETNGTQPAPKGLDWICVSPKAGAPVVLTEGDELKLVYPQPLAMPERFESLGFTHFFLQPMDGPDQEANTRAAIAYCLAHPRWRLSLQTHKIVGID

SEQ ID NO: 31007 - protein, 255 aa, Lawsonella clevelandensis
  misc_feature (1)..(255): tr|A0A0M4LZF7|A0A0M4LZF7_9ACTN 7-carboxy-7-deazaguanine synthase OS=Lawsonella clevelandensis OX=1528099 GN=qu eE PE=4 SV=1
MATATTPTRVYLTRRQLASADSLTVAGLVRLSTVDWPGRMVSTIFLQGCPWNCIYCHNPDLIDCRTSGIMAWADVETFLQRRQGLLDGVVFTGGEPTRQRGLMDAMERAHTLGFQVGLHTMGAYPTLLRPLLPLIDWVGFDIKAAPTHYGSIIATDVRSSIGTVGSRHAMESLDMLLDAGIEVQARTTLHPDSVAITDLPAIVELLQCKGVGSYRLQQARAEGARQELPDGRTLSYDRPGWDAEFEALKARYDFG

SEQ ID NO: 31008 - protein, 212 aa, Lawsonia intracellularis
  misc_feature (1)..(212): tr|Q1MQ74|Q1MQ74_LAWIP 7-carboxy-7-deazaguanine synthas e OS=Lawsonia intracellularis (strain PHE/MN1-00) OX=36 3253 GN=queE PE=3 SV=1
MSFYIKELFYTIQGEGVQTGRPAVFCRFSGCNLWSGKEKDRAIAKCQFCDTDFLNADFGILDSEEQLVANILQTFPQNNYTHPSYKPYVVFTGGEPSLQLNQVIINLLHKYHIEIAIETNGTIPLPKHIDWITVSPKEGNELVTTVGNELKLVWPQQNCDPEKYLTLEFDNFILQPKDDKNLSNNIQICIEYCMKHPYWKLGLQSHKWIGIR

SEQ ID NO: 31009 - protein, 202 aa, Leadbetterella byssophila
  misc_feature (1)..(202): tr|E4RTI8|E4RTI8_LEAB4 7-carboxy-7-deazaguanine synthas e OS=Leadbetterella byssophila (strain DSM 17132 / KACC 11308 / 4M15) OX=649349 GN=queE PE=3 SV=1
MNLELGLPVMESFYTLQGEGFHSGKAAYFIRLGGCDVGCVWCDVKESWDAEAHPQFRVEDIVNGALEYPGRLAVITGGEPLMYDLNELTAELKQKGFQTNIETSGAHPLSGDWDWICFSPKKFKAPLEEFYAVANELKVIVYNSSDFDFAEIHAAKVNPDCKLFLQVEWDRRERMMPSIVEYVKANPQWRVSIQTHKYMNIP

SEQ ID NO: 31010 - protein, 235 aa, Lebetimonas natsushimae
  misc_feature (1)..(235): tr|A0A292YF81|A0A292YF81_9PROT 7-carboxy-7-deazaguanine synthase OS=Lebetimonas natsushimae OX=1936991 GN=queE PE=3 SV=1
MKKNLYVVEIFRSIQGEGKYAGRISVFLRLGGCNLRCPGFGEKGCDSYYAVDKKYKNEWEKLNIDEIIKRIESLKQKNEDLVITGGEPTLYYREIYPLIESYSGQITIETNATIDINFKKYPKYKDVIFAMSVKLSNSGEEYKKRVKKEVIKNIAKNAEKSFFKFVINKENLNLQLKEILDITTGIDLDIYCMPMGESPEKLEENAKSVFNFCLENSFCYSDRIHIRIFGKKKGI

SEQ ID NO: 31011 - protein, 234 aa, Lechevalieria deserti
  misc_feature (1)..(234): tr|A0A316HVA8|A0A316HVA8_9PSEU 7-carboxy-7-deazaguanine synthase OS=Lechevalieria deserti OX=531939 GN=queE PE =3 SV=1
MNTPTLAPERVEGSAILTEKFESFQGEGPWTGQRCVFVRFSRCNLRCGFCDTPESWDWSRYNPAEVSDRVPVAELVSWVRERGVDMMVITGGEPMLQQPAMTALARGLANVRVQVETNGTVAPTPELASLVDLWVVSPKLANSGMTYSTRIKPDALSALVATDRAVFKFVVTEPDRDLDEIAQLVEEHRLAPVWVMPEGTTREKVLAGMDALYDRAAERGWNVSTRLHILTGAR

SEQ ID NO: 31012 - protein, 65 aa, Leclercia adecarboxylata
  misc_feature (1)..(65): tr|A0A4V6JL55|A0A4V6JL55_9ENTR 7-carboxy-7-deazaguanine synthase OS=Leclercia adecarboxylata OX=83655 GN=queE_ 3 PE=4 SV=1
MQYPINEMFQTLQGEGYFTGVPAIFIRLQGCPVGCAWCDTKHTWGNAGGSGSVTVQHSGQNERER

SEQ ID NO: 31013 - protein, 52 aa, Leclercia adecarboxylata
  misc_feature (1)..(52): tr|A0A4V6YY76|A0A4V6YY76_9ENTR 7-carboxy-7-deazaguanine synthase OS=Leclercia adecarboxylata OX=83655 GN=queE_ 1 PE=4 SV=1
MISKRWMKLLVTLTDDKQRVIALQPISQKEDATRLCIETCIARNWRLVDANA

SEQ ID NO: 31014 - protein, 223 aa, Leclercia sp.
  misc_feature (1)..(223): tr|A0A3D3PVK8|A0A3D3PVK8_9ENTR 7-carboxy-7-deazaguanine synthase OS=Leclercia sp. OX=1898428 GN=queE PE=3 SV=1
MQYPINEMFQTLQGEGYFTGVPAIFIRLQGCPVGCAWCDTKHTWETLSDREVSLFSILAKTKESDKWGAANPEDLLAIIGRQGWTARHVVITGGEPCIHDLLPLTTLLEKNGFSCQIETSGTHEVRCSHTTWVTVSPKVNMRGGYEVLSQALERADEIKHPVGRVRDIEALDELLATLTDDKQRVIALQPISQKEDATRLCIETCIARNWRLSMQTHKYLNIA

SEQ ID NO: 31015 - protein, 223 aa, Leclercia sp.; identical to SEQ ID NO: 29914
  misc_feature (1)..(223): tr|A0A0J6MHX7|A0A0J6MHX7_9ENTR 7-carboxy-7-deazaguanine synthase OS=Leclercia sp. LK8 OX=1628210 GN=queE PE=3 SV=1

SEQ ID NO: 31016 - protein, 210 aa, Leeuwenhoekiella aequorea
  misc_feature (1)..(210): tr|A0A4Q0P7G7|A0A4Q0P7G7_9FLAO 7-carboxy-7-deazaguanine synthase OS=Leeuwenhoekiella aequorea OX=283736 GN=que E PE=3 SV=1
MTKEATANRVKLGELLPLMEEFYTIQGEGAHTGTPAYFIRVGGCDVGCHWCDVKESWDAAIHPPTEATAIVANAVKYSKTIVITGGEPLMWDMRHLTSLLKAEGLKVHIETSGAYELSGEWDWICLSPKKRMLPKPRIYKEAHELKVIIFNKSDFAFAEEHAAMINEDCELYLQSEWSVRDKMTPLIVDYVMANPKWKISLQTHKYLNIP

SEQ ID NO: 31017 - protein, 213 aa, Leeuwenhoekiella blandensis
  misc_feature (1)..(213): tr|A3XJR9|A3XJR9_LEEBM 7-carboxy-7-deazaguanine synthas e OS=Leeuwenhoekiella blandensis (strain CECT 7118 / CC UG 51940 / MED217) OX=398720 GN=queE PE=3 SV=1
MRPMTKEATATRVELGELLPLMEEFYTIQGEGYHTGTPAYFIRVGGCDVGCHWCDVKESWDAAIHPPTEAAAIVANAKKYSKTIVITGGEPLMWDMNHLTSMLKAEGLQVHIETSGAYELSGHWDWICLSPKKRMLPKPRIYEEAHELKVIIYNKSDFAFAEEHAAKVNGNCQLFLQPEWSVREKMTPLIVDYVMANPKWKVSLQTHKYLNIP

SEQ ID NO: 31018 - protein, 210 aa, Leeuwenhoekiella marinoflava
  misc_feature (1)..(210): tr|A0A4Q0PJN1|A0A4Q0PJN1_9FLAO 7-carboxy-7-deazaguanine synthase OS=Leeuwenhoekiella marinoflava OX=988 GN=que E PE=3 SV=1
MTKEAIANRVELGELLPLMEEFYTIQGEGAHTGTPAYFIRVGGCDVGCHWCDVKESWDAAIHPPTEAAAIVANAKKYSKTIVITGGEPLMWDMNHLTRMLKAEGLNVHIETSGAYELSGHWDWICLSPKKRMLPKPRIYEEAHELKVIIYNKNDFAFAEEHAEKVNGKCELFLQPEWSVREKMTPFIVEYVMANPKWKVSLQTHKYLNIP

SEQ ID NO: 31019 - protein, 210 aa, Leeuwenhoekiella nanhaiensis
  misc_feature (1)..(210): tr|A0A2G1VSU9|A0A2G1VSU9_9FLAO 7-carboxy-7-deazaguanine synthase OS=Leeuwenhoekiella nanhaiensis OX=1655491 GN =queE PE=3 SV=1
MTKEAIASRVELGELLPLMEEFYTIQGEGHHTGTAAYFIRVGGCDVGCHWCDVKESWDAAIHPPTEAAAIVANAKKYSKTIVVTGGEPLMWDMEHLTGLLKAEGMQVHIETSGAYELTGNWDWICLSPKKRMLPKPRIYKEANELKVIIYNKSDFAFAEEHAAKVNEACELYLQPEWSVREKMTPLIVDYVMANPQWKISLQTHKYLNIP

SEQ ID NO: 31020 - protein, 210 aa, Leeuwenhoekiella palythoae
  misc_feature (1)..(210): tr|A0A1M5Z937|A0A1M5Z937_9FLAO 7-carboxy-7-deazaguanine synthase OS=Leeuwenhoekiella palythoae OX=573501 GN=qu eE PE=3 SV=1
MTKEATATRVELGELLPLMEEFYTIQGEGYHTGTPAYFIRVGGCDVGCHWCDVKESWDAAIHPPTEAAAIVANAKKYSKTIVITGGEPLMWDMNHLTGMLKDEGLQVHIETSGAYELTGHWDWICLSPKKRMLPKPRIYEEAHELKVIIYNKSDFAFAEEHAAKVNGNCKLFLQPEWSVREKMTPLIVDYVMANPKWRVSLQTHKYLNIP

SEQ ID NO: 31021 - protein, 238 aa, Leeuwenhoekiella polynyae
  misc_feature (1)..(238): tr|A0A4Q0NTW9|A0A4Q0NTW9_9FLAO 7-carboxy-7-deazaguanine synthase OS=Leeuwenhoekiella polynyae OX=1550906 GN=qu eE PE=3 SV=1
MSCVLVSSIENKVAKLWQRFYCGVSLHLMTKEATASRVELGELLPLMEEFYTIQGEGAHTGTPAYFIRVGGCDVGCHWCDVKESWDAAIHPPTEAAAIVANAKKYSKTIVITGGEPLMWDMNHLTSMLKAEGLNVHIETSGAYELSGHWDWICLSPKKRMLPKPRIYDEAHELKVIIYNKNDFAFAEEHASKVNGKCELFLQPEWSVREKMTPLIVDYVMANPKWKVSLQTHKYLNIP

SEQ ID NO: 31022 - protein, 210 aa, Leeuwenhoekiella sp.; identical to SEQ ID NO: 31020
  misc_feature (1)..(210): tr|A0A2E5GLY0|A0A2E5GLY0_9FLAO 7-carboxy-7-deazaguanine synthase OS=Leeuwenhoekiella sp. OX=1977054 GN=queE PE =3 SV=1

SEQ ID NO: 31023 - protein, 210 aa, Leeuwenhoekiella sp.
  misc_feature (1)..(210): tr|A0A4Q0NRV0|A0A4Q0NRV0_9FLAO 7-carboxy-7-deazaguanine synthase OS=Leeuwenhoekiella sp. R-50232 OX=2249425 GN =queE PE=3 SV=1
MTKEATASRVELGELLPLMEEFYTIQGEGAHTGTPAYFIRVGGCDVGCHWCDVKESWDAAIHPPTEAAAIVANAKKYSKTIVITGGEPLMWDMNHLTSMLKAEGLNVHIETSGAYELSGHWDWICLSPKKRMLPKPRIYDEAHELKVIIYNKNDFAFAEEHAAKVNDKCELFLQPEWSVREKMTPLIVDYVMANPKWKVSLQTHKYLNIP

SEQ ID NO: 31024 - protein, 217 aa, Legionella adelaidensis
  misc_feature (1)..(217): tr|A0A0W0R077|A0A0W0R077_9GAMM 7-carboxy-7-deazaguanine synthase OS=Legionella adelaidensis OX=45056 GN=nrdG P E=3 SV=1
MKSFQNRLRITEIFHSIQGESNTVGWPTVFVRLTGCPLRCQYCDTAYAFSGGEMYSLESILEKVKSFHCPYVCITGGEPLAQPACITLLTMLCDAGCKVSLETSGARDISQVDPRVMIVMDIKTPDSLECEKNMWTNLAYLKSSDQIKFVICSQQDYEWAKQIIIEKNLAEKCDLLFSPSWEQINPTDLANWIVNDRLPVRFQLQLHKILWNDTPGH

SEQ ID NO: 31025 - protein, 291 aa, Legionella anisa
  misc_feature (1)..(291): tr|A0A2Z3KS09|A0A2Z3KS09_9GAMM 7-carboxy-7-deazaguanine synthase OS=Legionella anisa OX=28082 GN=queE PE=3 SV= 1
MFGMNDSVGKAFFKEAKPDELFITSRFFTLQGEGPFRGHPAYFIRLAKCNLACSFCDTYFDAGEWRSFNSLLEEADSVIAAFFQTRNLPTPSWAKGLAKKMVLVITGGEPSLQQNLSSFLEEAKSYFQYTQIESNGISILADLPKSTTLVVSPKCLEKDGHVIRYLKPNAKMLERADCLKFVMSAPEENKYAPYSEIPAWAHKWAEKTKKQVFVSPMNRYRKEPQRVSAIRDKGRDLTLEERSEINEVVSFWETDLLDMEKNQRNHEYAAEYCMKYGFILNLQIHLFASLP

SEQ ID NO: 31026 - protein, 217 aa, Legionella beliardensis
  misc_feature (1)..(217): tr|A0A378I3Q3|A0A378I3Q3_9GAMM 7-carboxy-7-deazaguanine synthase OS=Legionella beliardensis OX=91822 GN=nrdG P E=3 SV=1
MNVRSTKLRITEIFHSIQGESNTVGLPTVFVRLTGCPLRCQYCDTAYAFSGGELIDIETILAQVSAFECPFVCVTGGEPLAQPNCLALLEKLCDAGFNVSLETSGARDIANVDQRVTIVMDLKTPDSKECSKNLISNLAYLKKTDQIKFVLCSRSDYEWACHMLKEYQLPEKAFILFSPSWQELDATSLANWIIKDCLPVRFQLQLHKILWNDAPGH

SEQ ID NO: 31027 - protein, 217 aa, Legionella birminghamensis
  misc_feature (1)..(217): tr|A0A378I7J5|A0A378I7J5_9GAMM 7-carboxy-7-deazaguanine synthase OS=Legionella birminghamensis OX=28083 GN=nrd G PE=3 SV=1
MTKLNNQLRITEIFHSLQGESTTVGLPTVFIRLTGCPLRCQYCDTAYAFSGGELHEISAILEKVASFGCTHVCVTGGEPLAQPGCLPLMQQLCDAGYHVSLETSGARDIKEVDQRVMIVMDLKTPDSGECGKNLLSNLDHLKPSDQIKFVLCSRNDYEWANQLLMEYRLHERTQILYSPSWKELPATTLADWIVADRLPVRFQIQLHKILWNDVPGH

SEQ ID NO: 31028 - protein, 218 aa, Legionella brunensis
  misc_feature (1)..(218): tr|A0A0W0SP87|A0A0W0SP87_9GAMM 7-carboxy-7-deazaguanine synthase OS=Legionella brunensis OX=29422 GN=queE PE=3 SV=1
MKQSSTQQLRITEIFHSLQGESVTVGLPTVFVRLTGCPLRCQYCDTAYAFSGGEILAINAILEKIASYDCNYVCVTGGEPLAQPGCITLLHELCDAGYNVSLETSGARDLSQVDKRVMIVMDLKTPDSGEASKNLFSNLTYLKATDQIKFVLCSREDYEWACQIMTEYNLSQRTQILFSPSWNQLNPTALADWIVVDKLPVRFQLQLHKILWNDTPGH

SEQ ID NO: 31029 - protein, 217 aa, Legionella busanensis
  misc_feature (1)..(217): tr|A0A378JRJ6|A0A378JRJ6_9GAMM 7-carboxy-7-deazaguanine synthase OS=Legionella busanensis OX=190655 GN=nrdG PE =3 SV=1
MMSTNNKLRITEIFHSLQGESNTVGLPTVFVRLTGCPLRCQYCDTAYAFNGGELMEMDTILARTLSFECPYVCVTGGEPLAQPNCFHLLKSLCDAGLYVSLETSGARPIANVDQRVNIVMDLKTPDSGECDKNLLDNLNFLKKTDQIKFVLCSQKDYEWACNLLKEFQLPEKAQILFSPSWQELDATLLANWIIRDRLPVRFQIQLHKVLWNDMPGH

SEQ ID NO: 31030 - protein, 291 aa, Legionella cherrii
  misc_feature (1)..(291): tr|A0A0W0S5M8|A0A0W0S5M8_9GAMM 7-carboxy-7-deazaguanine synthase OS=Legionella cherrii OX=28084 GN=queE PE=3 S V=1
MFGLNDKVGKSFFKDAKSDELFVTSRFFTLQGEGPFRGHPAYFIRLAKCNLACSFCDTYFDAGEWLDFNSLLEEADTVIHAFFQKRNLATPSWAQGLDKKMILVITGGEPSLQQNLSAFLEKAQPYFQHTQIESNGISILPDLPRCTTLVVSPKCLEKEGKIIRYLKPHSKMLERADYLKFVVSAPDDNQYTPYSEIPKWAHEWAEKTKKQVFVSPMNRYLKEPQRAQAIRDKGRDLTLAERSEINEVVSFWEPGLLNLEKNQRNHEYAAEYCMKYGFILNLQIHLFASLP

SEQ ID NO: 31031 - protein, 291 aa, Legionella cincinnatiensis
  misc_feature (1)..(291): tr|A0A378INV6|A0A378INV6_9GAMM 7-carboxy-7-deazaguanine synthase OS=Legionella cincinnatiensis OX=28085 GN=nrd G PE=3 SV=1
MFGFNDKVGKAFFNKAKHDELLVTSRFFTLQGEGPYRGHPAYFIRLAKCNLACSFCDTYFDSGEWRNFTSLLKEAEQVIDDFFKNRSLSTPPWAQGLAKKMVLVITGGEPSLQQNLSAFLEMAQAYFQSTQIESNGIAVLADLPKSTTLVVSPKCLEKEGNVIRYLKPNPKMLARADCLKFVISAPEDNQYAPYSDIPLWAHEWAKQMNKQIFISPMNIYQKEPQRVKVIRDEGRDLTMTERSEINEVISFWEPGLLDLKKNQRNHEYAAEYCMKYGFILNLQIHLYAGLP

SEQ ID NO: 31032 - protein, 217 aa, Legionella clemsonensis
  misc_feature (1)..(217): tr|A0A222P026|A0A222P026_9GAMM 7-carboxy-7-deazaguanine synthase OS=Legionella clemsonensis OX=1867846 GN=queE PE=3 SV=1
MKHSSTQLRITEIFHSLQGESVTVGLPTVFVRLTGCPLRCHYCDTTYAFSGGKMASLSAILEKVASYQCSHVCVTGGEPLAQPGCIPLLKELCDAGYHVSLETSGARDLSQIDKRVMIVMDLKTPDSGEADKNLFDNLAFLKPTDQIKFVLCSHNDYKWACQIMAEYHLPKKVQILFSPSWHQLNPTELANWIVEDKLPVRFQLQLHKILWNDAPGH

SEQ ID NO: 31033 - protein, 217 aa, Legionella donaldsonii
  misc_feature (1)..(217): tr|A0A378IZW4|A0A378IZW4_9GAMM 7-carboxy-7-deazaguanine synthase OS=Legionella donaldsonii OX=45060 GN=nrdG PE =3 SV=1
MKQVSTQLRITEIFYSLQGESVTVGLPTVFIRLTGCPLRCQYCDTAYAFSGGEMQSLTSILEKVTSYNCKQVCVTGGEPLAQPGCIDLLRQLCDAGFNVSLETSGARDIAQVDKRVMVIMDLKTPGSGESKKNLFANLAHLKQSDQIKFVLCSREDYDWACQIIIEHNLSEHVQILFSPSWNQLNSTLLADWIVTDRLPVRFQLQLHKILWNDAPGH

SEQ ID NO: 31034 - protein, 291 aa, Legionella drancourtii
  misc_feature (1)..(291): tr|G9ELS6|G9ELS6_9GAMM 7-carboxy-7-deazaguanine synthas e OS=Legionella drancourtii LLAP12 OX=658187 GN=queE PE =3 SV=1
MFGVNKIVGKAFFKQAKHDELLVTSRFFTLQGEGPYRGHPAYFIRLAKCNLACSFCDTYFDSGEWRSFSSLLVEADVVIAEFFKQRNLPIPAWGQGVAKKIVLVITGGEPSLQNNVSAFLAEAQRYFQYTQIESNGTSVLSDLPPSTTLVVSPKCLEKNGAAVRYLEPNVKMLARADYLKFVMSAPEVEPYLPYSEIPVWAHQWAAQTNKQVFISPMNCYQQEPQRVKMIRNEGRDLTMAERSEINEVISFWEPELLDLQKNQRNHEYAAEYCMKHGFIFNLQIHLFANLP

SEQ ID NO: 31035 - protein, 217 aa, Legionella drozanskii
  misc_feature (1)..(217): tr|A0A0W0SVX2|A0A0W0SVX2_9GAMM 7-carboxy-7-deazaguanine synthase OS=Legionella drozanskii LLAP-1 OX=1212489 GN =queE PE=3 SV=1
MKQVSNSLRITEIFHSLQGESTTVGLPTVFIRLTGCPLRCQYCDTAYAFNGGEITEVRSILDKISAYQCKQVCVTGGEPLAQPGCIFLLQELCDQGYQVSLETSGARDIAQVDKRVMVVMDLKTPDSGESEKNLFSNLEHLKQSDQIKFVLCSREDYDWACQMMQEYRLTERAHILFSPSWNELNPTKLADWIVKDKLAVRFQLQLHKILWNDAPGY

SEQ ID NO: 31036 - protein, 217 aa, Legionella erythra
  misc_feature (1)..(217): tr|A0A0W0TNK7|A0A0W0TNK7_LEGER 7-carboxy-7-deazaguanine synthase OS=Legionella erythra OX=448 GN=queE PE=3 SV= 1
MTRVANQLRITEIFHSLQGESTTVGLPTVFIRLTGCPLRCQYCDTAYAFSGGELKTLEDILGEVSRYRCRHVCVTGGEPLAQPGCIALLTHLCDAGYQVSLETSGARDIAEVDPRVMVVMDLKTPDSRECSKNRFENIPYLKVTDQIKFVICSRKDYLWACEIIEKYQLTEKVHVLFSPSWKEMDPTTLADWIIQDQLPVRFQIQLHKILWNDAPGH

SEQ ID NO: 31037 - protein, 217 aa, Legionella fallonii
  misc_feature (1)..(217): tr|A0A098G6M3|A0A098G6M3_9GAMM 7-carboxy-7-deazaguanine synthase OS=Legionella fallonii LLAP-10 OX=1212491 GN= queE PE=3 SV=1
MKQFNNQLRITEIFHSLQGESVTVGLPTVFVRLTGCPLRCQYCDTAYAFSGGAIQEMDDVLNTVASYQCKYVCVTGGEPLAQPGCIELLKRLCDAGYFVSIETSGARDISAIDKRVMVVMDLKTPDSMESDKNLLANLDYLKPDDQIKFVLCSRSDYEWACNIINDYRLSERVQLLFSPSWNQLAPAELANWIVQDKLSVRFQLQLHKILWNDAPGH

SEQ ID NO: 31038 - protein, 217 aa, Legionella feeleii
  misc_feature (1)..(217): tr|A0A378IWS4|A0A378IWS4_9GAMM 7-carboxy-7-deazaguanine synthase OS=Legionella feeleii OX=453 GN=nrdG PE=3 SV= 1
MKQVSTQLRITEIFYSLQGESVTVGLPTVFIRLTGCPLRCQYCDTAYAFSGGQMQSLTSILEKVTSYNCKQVCVTGGEPLAQPGCIDLLRQLCDAGFNVSLETSGARDIAQVDQRVMVIMDLKTPDSGESKKNLFANLAHLKQSDQIKFVLCSREDYDWACQIIIEHNLSERVQILFSPSWNELNSTTLADWIVTDRLPVRFQLQLHKILWNDAPGH

SEQ ID NO: 31039 - protein, 217 aa, Legionella feeleii
  misc_feature (1)..(217): tr|A0A0W0THJ4|A0A0W0THJ4_9GAMM 7-carboxy-7-deazaguanine synthase OS=Legionella feeleii OX=453 GN=nrdG PE=3 SV= 1
MKQVSSQLRITEIFYSLQGESVTVGLPTVFIRLTGCPLRCQYCDTAYAFSGGEMQSLTSILEKVTSYNCKQVCVTGGEPLAQPGCIDLLRQLCDAGFSVSLETSGARDIAQVDKRVMVIMDLKTPDSGESKKNLFANLAHLKQSDQIKFVLCSREDYDWACQIIIEHNLSERVQILFSPSWNELNSTTLADWIVTDRLPVRFQLQLHKILWNDAPGH

SEQ ID NO: 31040 - protein, 212 aa, Legionella geestiana
  misc_feature (1)..(212): tr|A0A0W0TGM5|A0A0W0TGM5_9GAMM 7-carboxy-7-deazaguanine synthase OS=Legionella geestiana OX=45065 GN=queE PE=3 SV=1
MVLRITEIFHSLQGESTTVGLPTVFVRLTGCPLRCGYCDTAYAFKGGTRLTLQDILDKVRSYGCMRVCVTGGEPLAQPGCIDLLRLLCDEGFAVSLETSGALDIAEVDPRVLVVMDLKTPDSGECAKNRMENLAVLKPSDQIKFVLCSRADYEWARACLKEHTLETRFHVLFSPSWNELNPAMLAEWILEDRLSVRFQLQLHKILWNDAAGR

SEQ ID NO: 31041 - protein, 291 aa, Legionella gratiana
  misc_feature (1)..(291): tr|A0A378JDP7|A0A378JDP7_9GAMM 7-carboxy-7-deazaguanine synthase OS=Legionella gratiana OX=45066 GN=nrdG PE=3 SV=1
MFGLNDRVGKTFFNEALHDELLVTSRFFTLQGEGPYRGHPAYFIRLAKCNLACSFCDTYFDSGEWRNFASLLQETDLIITDFFKKRNLSTPSWAQGFAKKMVLVITGGEPTLQQNLSAFLEIAQPYFQSTQIESNGISVLPKLPKSTTLVVSPKCLEKEGKVIRYLKPNPKTLERADCLKFVISAPENNQYAPYSDIPLWAHEWAKQTNKQVFISPMNIYQKESQRVKAIRDEGRDLTMTERSELNEVISFWEPGLLDLKTNQRNHEYAAEYCMKYGFILNLQIHLYASLP

SEQ ID NO: 31042 - protein, 217 aa, Legionella hackeliae
  misc_feature (1)..(217): tr|A0A0A8USI6|A0A0A8USI6_LEGHA 7-carboxy-7-deazaguanine synthase OS=Legionella hackeliae OX=449 GN=queE PE=3 S V=1
MKHSSTQLRITEIFHSLQGESVTVGLPTVFIRLTGCPLRCQYCDTAYAFSGGNITPVSTILDQVASYECNYVCVTGGEPLAQPGCITLLRELCDAGYNVSLETSGARDLSQVDERVVIVMDLKTPDSKESDKNLFNNLIYLKPNDQIKFVLCSREDYEWACQIMKEYNLSQRVQILFSPSWHQLNPTQLADWIVKDKLPVRFQLQLHKILWNDAPGH

SEQ ID NO: 31043 - protein, 217 aa, Legionella israelensis
  misc_feature (1)..(217): tr|A0A0W0WNG6|A0A0W0WNG6_9GAMM 7-carboxy-7-deazaguanine synthase OS=Legionella israelensis OX=454 GN=queE PE=3 SV=1
MKRLHHQLRITEIFYSLQGESTTTGLPTVFIRLTGCPLRCQYCDTAYAFSGGILQDIEDVLNHVASFDCLYVCVTGGEPLAQPGCLELLKQLCDSGYRVSLETSGARDISKVDKRVMIVMDLKTPDSKEHEKNQMSNLDYLKPDDQIKFVLCSRADYEWACTLIKTFKLNERAHLLFSPSWNQLNATSLAEWIIEDHLPVRFQIQIHKILWNDAPGH

SEQ ID NO: 31044 - protein, 217 aa, Legionella israelensis
  misc_feature (1)..(217): tr|A0A516N2T1|A0A516N2T1_9GAMM 7-carboxy-7-deazaguanine synthase OS=Legionella israelensis OX=454 GN=queE PE=3 SV=1
MKRLHHQLRITEIFYSLQGESTTTGLPTVFIRLTGCPLRCQYCDTAYAFSGGILQDIEDVLNQVASFDCLYVCVTGGEPLAQPGCLELLKQLCDSGYRVSLETSGARDISKVDKRVMIVMDLKTPDSKEHEKNQMSNLDYLKPDDQIKFVLCSRADYEWACTLIKTFKLNERAHLLFSPSWNQLNATSLAEWIIEDHLPVRFQIQIHKILWNDAPGH

SEQ ID NO: 31045 - protein, 217 aa, Legionella jamestowniensis
  misc_feature (1)..(217): tr|A0A0W0UYQ5|A0A0W0UYQ5_9GAMM 7-carboxy-7-deazaguanine synthase OS=Legionella jamestowniensis OX=455 GN=queE PE=3 SV=1
MKHSSTQLRITEIFHSLQGESVTVGLPTVFIRLTGCPLRCQYCDTTYAFSGGKITPISTILEKVASYQCSYVCVTGGEPLAQPGCISLLKELCDAGYNVSLETSGARDLSEVDKRVMIVMDLKTPDSGEADKNLFDNLVFLKPTDQIKFVLCSHDDYQWACQIIDEYNLSKKAQILFSPSWHQLNPTELANWIVEDKLPVRFQLQLHKILWNDAPGY

SEQ ID NO: 31046 - protein, 217 aa, Legionella jordanis
  misc_feature (1)..(217): tr|A0A0W0VBH2|A0A0W0VBH2_9GAMM 7-carboxy-7-deazaguanine synthase OS=Legionella jordanis OX=456 GN=queE PE=3 SV =1
MKQSSNHLRITEIFHSLQGESVTVGLPTVFIRLTGCPLRCHYCDTAYAFSGGKMLSIADILEQLSAYQCEQVCVTGGEPLAQPSCINLLTELCDAGYKVSLETSGARDLSQVDNRVMIVMDLKTPDSGEEQKNLFSNLDWLKPSDQIKFVLCSREDYEWACLIVKEHNLTARLQVLFSPSWNQLNPTTLADWIVEDKLAVRFQLQLHKILWGDIPGH

SEQ ID NO: 31047 - protein, 216 aa, Legionella lansingensis
  misc_feature (1)..(216): tr|A0A0W0VSV4|A0A0W0VSV4_9GAMM 7-carboxy-7-deazaguanine synthase OS=Legionella lansingensis OX=45067 GN=queE P E=3 SV=1
MISSKQLRITEIFHSLQGESTTVGLPTVFIRLTGCPLRCQYCDTAYAFSGGEIHSIDAILSQVATYHSKHVCVTGGEPLAQPGCLTLLNELCNAGYNVSLETSGARDISQVNQRVMIVMDLKTPGSGECEKNLFDNLVHLKSSDQIKFVLCDRKDYEWACQIMAEYHLPKRVQVLFSPSWGELNPTTLAEWIIKDKLAVRFQLQLHKILWGDVPGH

SEQ ID NO: 31048 - protein, 217 aa, Legionella londiniensis
  misc_feature (1)..(217): tr|A0A0W0VP67|A0A0W0VP67_9GAMM 7-carboxy-7-deazaguanine synthase OS=Legionella londiniensis OX=45068 GN=queE P E=3 SV=1
MNKLAKQLRITEIFHSLQGESTSIGLPTVFVRLTGCPLRCQYCDTAYAFNGGQIMALDEILLQIASYHCRYVCVTGGEPLAQPGCFALLTELCNRGYLVSLETSGARDISSVDKRVMIVMDLKTPHSGECDRNRLENLACLKKTDQIKFVICNRQDYDWACAMIAEHHLEKIAHILFSPSWGQLEAPLLADWIVQDNLPVRFQLQLHKILWKDTPGR

SEQ ID NO: 31049 - protein, 218 aa, Legionella longbeachae
  misc_feature (1)..(218): tr|A0A378L5G8|A0A378L5G8_LEGLO 7-carboxy-7-deazaguanine synthase OS=Legionella longbeachae OX=450 GN=nrdG PE=3 SV=1
MKKRLPNQLRITEIFHSLQGESTTIGLPTTFIRLTGCPLRCQYCDTAYAFHGGELIHIEEIISRVVSFECQHVCITGGEPLAQPGCLHLLKQLCDTGYNVSLETSGARDISTVDERVMIVMDLKTPDSGECAKNKLSNLDHLKKTDQIKFVLCSHDDYQWACTMINKHQLTARTQILFSPSWGQLNPTTLANWIVKDRLKVRFQLQLHKILWNDVPGH

SEQ ID NO: 31050 - protein, 291 aa, Legionella longbeachae
  misc_feature (1)..(291): tr|D3HQ97|D3HQ97_LEGLN 7-carboxy-7-deazaguanine synthas e OS=Legionella longbeachae serogroup 1 (strain NSW150) OX=661367 GN=queE PE=3 SV=1
MFGLNDRVGKTFFNAAKHDELLVTSRFFTLQGEGPFRGHPAYFIRLAKCNLACSFCDTYFDSGEWRNFTSLLEEADQVIEDFFKNRNLPPPSWAQGLTKKMVLVITGGEPSLQQNLSAFLDIAQPYFQSTQIESNGICVLSDLPKSTTLVVSPKCLEKEGKVIRYLKPNPKMLERADCLKFVISAPEDNQYAPYSDIPLWAHEWAKKRNKKIFISPMNIYQKEPQRVQVIRDEGRDLTMAERSEINEVVSFWEPGLLDLKRNQRNHEYAAEYCMKYGFILNLQIHLYASLP

SEQ ID NO: 31051 - protein, 217 aa, Legionella maceachernii
  misc_feature (1)..(217): tr|A0A0W0VZI3|A0A0W0VZI3_9GAMM 7-carboxy-7-deazaguanine synthase OS=Legionella maceachernii OX=466 GN=queE PE= 3 SV=1
MKQVSNQLRITEIFHSLQGESTTVGLPTVFIRLTGCPLRCQYCDTAYAFNGGELTQVSDVLTKIAAYECSYVCVTGGEPLAQPGCIPLLQQLCDKGYQVSLETSGARDISQVDKRVMVVMDLKTPDSGESAKNLLSNLDHLKQSDQIKFVLCSRGDYEWACQMMKEYRLSGRAQILFSPSWNELNPTTLADWIVNDKLPVRFQLQLHKILWNDAPGH

SEQ ID NO: 31052 - protein, 217 aa, Legionella massiliensis
  misc_feature (1)..(217): tr|A0A078L1C3|A0A078L1C3_9GAMM 7-carboxy-7-deazaguanine synthase OS=Legionella massiliensis OX=1034943 GN=queE PE=3 SV=1
MKQFSNQLRITEIFHSLQGESITVGLPTVFVRLTGCPLRCQYCDTAYAFSGGEIVDIARVLEQVASYDCQHVCVTGGEPLAQPGCLTLMEQLCDAGYKVSLETSGARDISEVDKRVMIVMDLKTPDSGESTKNLFANLDYLKPSDQIKFVLCSRKDYDWARQIMAEFGLADRTQILFSPSWNELNPTHLADWIVQDKLPVRFQLQLHKILWNDAPGH

SEQ ID NO: 31053 - protein, 217 aa, Legionella moravica
  misc_feature (1)..(217): tr|A0A378JU78|A0A378JU78_9GAMM 7-carboxy-7-deazaguanine synthase OS=Legionella moravica OX=39962 GN=nrdG PE=3 SV=1
MKRLNNQLRITEIFHSLQGESVTVGLPTVFVRLTGCPLRCQYCDTAYAFNGGSVQEMDDILETIASYKCNRVCVTGGEPLAQPGCLSLIERLCEKDYQVSIETSGARDISEVDSRVMIVMDLKTPDSLEVDKNLFANLDYLKPTDQIKFVLCSRKDYEWACDLIKEHRLAERVQLLFSPSWNQLNPTDLANWIVEDNLPVRFQLQLHKILWNDAPGH

SEQ ID NO: 31054 - protein, 217 aa, Legionella nautarum
  misc_feature (1)..(217): tr|A0A0W0WM58|A0A0W0WM58_9GAMM 7-carboxy-7-deazaguanine synthase OS=Legionella nautarum OX=45070 GN=queE PE=3 SV=1
MKQVSNSLRITEIFHSLQGESITVGLPTVFIRLTGCPLRCQYCDTAYAFNGGKMTDIPSILDEISAYQCQQVCVTGGEPLAQPGCISLLQELCDQGYQVSLETSGARDIAQVDKRVMVVMDLKTPASGECEKNLFSNLEHLKQSDQIKFVLCDREDYDWACKMMHEHRLSERAQILFSPSWNELNPTELADWIVKDKLAVRFQLQLHKILWNDAPGH

SEQ ID NO: 31055 - protein, 217 aa, Legionella norrlandica
  misc_feature (1)..(217): tr|A0A0A2SVI9|A0A0A2SVI9_9GAMM 7-carboxy-7-deazaguanine synthase OS=Legionella norrlandica OX=1498499 GN=queE PE=3 SV=1
MKRFNEQLRITEIFHSLQGESVTIGLPTVFIRLTGCPLRCQYCDTAYAFSGGEVREIKDILDTVALYQCQYVCVTGGEPLAQPGCITLLSKLCDAGYFVSLETSGARDIAQVDQRVMIVMDLKTPDSQEVDKNLLSNLAFLKPTDQIKLVLCSRNDYEWACSILNEYQLAERVQLLFSPSWNQLNPTDLANWIIQDKLPVRFQLQLHKILWNDVPGH

SEQ ID NO: 31056 - protein, 218 aa, Legionella oakridgensis; identical to SEQ ID NO: 31049
  misc_feature (1)..(218): tr|A0A0W0X4W5|A0A0W0X4W5_9GAMM 7-carboxy-7-deazaguanine synthase OS=Legionella oakridgensis OX=29423 GN=queE P E=3 SV=1

SEQ ID NO: 31057 - protein, 218 aa, Legionella oakridgensis; identical to SEQ ID NO: 31049
  misc_feature (1)..(218): tr|W0BHS0|W0BHS0_9GAMM 7-carboxy-7-deazaguanine synthas e OS=Legionella oakridgensis ATCC 33761 = DSM 21215 OX= 1268635 GN=queE PE=3 SV=1

SEQ ID NO: 31058 - protein, 291 aa, Legionella parisiensis
  misc_feature (1)..(291): tr|A0A1E5JQ59|A0A1E5JQ59_9GAMM 7-carboxy-7-deazaguanine synthase OS=Legionella parisiensis OX=45071 GN=queE PE =3 SV=1
MFGLNKKVGKSFFKTAKPDELFITSRFFTLQGEGPFRGHPAYFIRLAKCNLACSFCDTYFDTGEWRSFNSLLEEANSVIAAFFQSRNLPTPSWAKGLEKKMILVITGGEPSLQQNLSAFLEEAKPYFQYIQIESNGISLLPDLPQNTTLVVSPKCLEKDAKAIRYLKPNAKMLERADCLKFVMSAPEEDRYVPYSEIPAWAHEWAEKTNKQVFVSPMNKYRKEPQRVNAIRDEGQELTLAERSEINEVVSFWEAGLLDMEKNQRNHEYAAEYCMKYGFILNLQIHLFASLP

SEQ ID NO: 31059 - protein, 217 aa, Legionella pneumophila
  misc_feature (1)..(217): tr|Q5ZTW7|Q5ZTW7_LEGPH 7-carboxy-7-deazaguanine synthas e OS=Legionella pneumophila subsp. pneumophila (strain Philadelphia 1 / ATCC 33152 / DSM 7513) OX=272624 GN=qu eE PE=3 SV=1
MKRFNEQLRITEIFHSLQGESVTVGLPTVFVRLTGCPLRCQYCDTAYAFSGGEVVEIDDILNKVASYQCQHVCVTGGEPLAQPGCILLLSKLCDAGYSVSLETSGARDIASVDQRVMIVMDLKTPDSREADKNLLSNLSFLKPTDQIKFVLCSRTDYEWACSMLSEYQLAERVQLLFSPSWNQLNPTNLANWIIQDKLPVRFQLQLHKILWNDAPGH

SEQ ID NO: 31060 - protein, 217 aa, Legionella pneumophila
  misc_feature (1)..(217): tr|A0A4Q5NBF9|A0A4Q5NBF9_LEGPN 7-carboxy-7-deazaguanine synthase OS=Legionella pneumophila OX=446 GN=queE PE=3 SV=1
MKRFNEQLRITEIFHSLQGESVTVGLPTVFVRLTGCPLRCQYCDTAYAFSGGEVVEIDDILNKVASYQCQHVCVTGGEPLAQPGCIPLLSKLCDAGYSVSLETSGARDIASVDQRVMIVMDLKTPDSREADKNLLSNLSFLKPTDQIKFVLCSRTDYEWACSMLSEYQLAERVQLLFSPSWNQLNPTDLANWIIQDKLPVRFQLQLHKILWNDAPGH

SEQ ID NO: 31061 - protein, 217 aa, Legionella quateirensis
  misc_feature (1)..(217): tr|A0A378KV55|A0A378KV55_9GAMM 7-carboxy-7-deazaguanine synthase OS=Legionella quateirensis OX=45072 GN=nrdG P E=3 SV=1
MKPFNNQLRITEVFHSLQGESVTVGLPTVFVRLTGCPLRCQYCDTAYAFNGGTVQEIDEILETIASFNCKRVCVTGGEPLAQPGCISLLERLCDDHYQVSIETSGARDISEVDSRVMIVMDLKTPDSLEVDKNLFANLECLKPSDQIKFVLCSRSDYEWACALIKEHRLAERVQLLFSPSWNQLNPTDLANWILEDNVPVRFQLQLHKILWNDAPGH

SEQ ID NO: 31062 - protein, 217 aa, Legionella quinlivanii
  misc_feature (1)..(217): tr|A0A0W0Y0E4|A0A0W0Y0E4_9GAMM 7-carboxy-7-deazaguanine synthase OS=Legionella quinlivanii OX=45073 GN=queE PE =3 SV=1
MTKLNNQLRITEIFHSLQGESTTVGLPTVFIRLTGCPLRCQYCDTAYAFSGGENTEIAAILEKVASFECAHVCVTGGEPLAQPGCLPLMQQLCDAGYQVSLETSGARDIENVDKRVMIVMDLKTPDSGECAKNLFSNIDYLKPSDQIKFVLCSRNDYEWANQLLLEHRLHERTQILYSPSWNQLPATTLADWIVADRLPVRFQIQLHKILWNDAPGH

SEQ ID NO: 31063 - protein, 217 aa, Legionella quinlivanii
  misc_feature (1)..(217): tr|A0A364LHA2|A0A364LHA2_9GAMM 7-carboxy-7-deazaguanine synthase OS=Legionella quinlivanii OX=45073 GN=queE PE =3 SV=1
MTKLNNQLRITEIFHSLQGESTTVGLPTVFIRLTGCPLRCQYCDTAYAFNGGENTEIAAILEKVASFECSHVCVTGGEPLAQPGCLTLMQQLCDAGYQVSLETSGARNIENVDKRVMIVMDLKTPDSGECAKNLFSNIDYLKPTDQIKFVLCSRKDYEWANQLLREQRLHERTQILYSPSWNQLPATTLADWIVADRLPVRFQIQLHKILWNDAPGH

SEQ ID NO: 31064 - protein, 217 aa, Legionella rubrilucens
  misc_feature (1)..(217): tr|A0A0W0XZS3|A0A0W0XZS3_9GAMM 7-carboxy-7-deazaguanine synthase OS=Legionella rubrilucens OX=458 GN=queE PE=3 SV=1
MTRAASQLRITEIFHSLQGESTTVGLPTVFIRLTGCPLRCQYCDTAYAFSGGELKPITAIVDEISRFRCRYVCVTGGEPLAQPGCIPLLTNLCDAGYQVSLETSGARDIAEVDPRVMVVMDLKTPDSNECDKNRFDNIPYLKATDQIKFVICSREDYLWACEIIKKYQLIEKVQILFSPSWNQMNPTTLADWIIQDQLPVRFQIQLHKILWNDAKGH

SEQ ID NO: 31065 - protein, 291 aa, Legionella sainthelensi
  misc_feature (1)..(291): tr|A0A0W0YCM7|A0A0W0YCM7_9GAMM 7-carboxy-7-deazaguanine synthase OS=Legionella sainthelensi OX=28087 GN=queE P E=3 SV=1
MFGLNHRVGKAFFNTAKHNELLVTSRFFTLQGEGPYRGHPAYFIRLAKCNLACSFCDTYFDSGEWRNFNSLLEEADQVIEDFFKNRSLSIPSWAQGLTKKMVLVITGGEPSLQQNLSAFLEMAQLYFQSTQIESNGISALPALPESTTLVVSPKCLEKAGKVIRYLKPNPKMLERADCLKFVISAPEDNQYAPYSDIPLWAHEWAKKTHKQIFISPMNIYQKEPQRVKAMRDEGRDLTMAERSEINEVVSFWESGLLDLKRNQRNHEYAAEYCMRYGFILNLQIHLYAGLP

SEQ ID NO: 31066 - protein, 291 aa, Legionella sainthelensi
  misc_feature (1)..(291): tr|A0A2H5FKE7|A0A2H5FKE7_9GAMM 7-carboxy-7-deazaguanine synthase OS=Legionella sainthelensi OX=28087 GN=queE P E=3 SV=1
MFGLNHRVGKAFFNTAEHDELLVTSRFFTLQGEGPYRGHPAYFIRLAKCNLACSFCDTYFDSGEWRNFTSLLEEADQVIEAFFKNRSLSIPSWAQGLTKKMVLVITGGEPSLQQNLSAFLEMAQLYFQSTQIESNGISALSDLPESTTLVVSPKCLEKAGKVIRYLKPNLKMLERADCLKFVISAPEDNQYAPYSDIPLWAHEWAKKTNKQIFISPMNIYQKEPQRVKAMRDEGRDLTMAERSEINEVVSFWESGLLDLKRNQRNHEYAAEYCMRYGFILNLQIHLYAGLP

SEQ ID NO: 31067 - protein, 291 aa, Legionella santicrucis
  misc_feature (1)..(291): tr|A0A0W0YAQ2|A0A0W0YAQ2_9GAMM 7-carboxy-7-deazaguanine synthase OS=Legionella santicrucis OX=45074 GN=queE PE =3 SV=1
MFGFNDKVGKAFFNDAKHNELLVTSRFFTLQGEGPYRGHPAYFIRLAKCNLACSFCDTYFDSGEWRNFTSLLKETDQVIDDFFKNRRLATPSWAQGLAKKMVLVITGGEPSLQQNLSAFLETAQLYFQSTQIESNGISVLSDLPKNTTLVVSPKCLEKAGKVIRYLKPNPKMLERADCLKFVISAPENNQYAPYSDIPLWAHEWAKQTSKQIFISPMNIYQKEPQRVKVMRDEGRYLTMAERSEINEVVSFWEPDLLDLKTNQRNHEYAAEYCMKYGFILNLQIHLYAGLP

SEQ ID NO: 31068 - protein, 291 aa, Legionella shakespearei
  misc_feature (1)..(291): tr|A0A0W0YLB1|A0A0W0YLB1_9GAMM 7-carboxy-7-deazaguanine synthase OS=Legionella shakespearei DSM 23087 OX=11221 69 GN=queE PE=3 SV=1
MFGLNTIVGKSFFKEAKEDELLVTSRFFTLQGEGPYRGQPAYFIRLAKCNLACSFCDTYFDSGDWRSFTSLLDEATQVINDFFTKRDLPIPAWAEKERRNIVLVITGGEPSLQNNVSAFLDKAQHYFRNTQIESNGISVLEDMPAGTTLVVSPKCLEKKGKVVRYLEPNKDMLERADCLKFVMSAPEDDYYSPYSEVPQWAHDWAQKTGKPVFVSPMNIYKKEPQRVKRIRDEGRDLTLEERSDINEVVSFWEPELLDLKKNQRNHEYAAEYCMKHGFTLNLQIHLFASLP

SEQ ID NO: 31069 - protein, 217 aa, Legionella sp.
  misc_feature (1)..(217): tr|A0A433JLE6|A0A433JLE6_9GAMM 7-carboxy-7-deazaguanine synthase OS=Legionella sp. km714 OX=2498110 GN=queE PE =3 SV=1
MNRRANQLRITEIFHSLQGESVTMGLPTVFVRLTGCPLRCQYCDTAYAFHGGQLRNIRDILADVAAFNCSHVCVTGGEPLAQPGCIDLLQQLCDNGYHVSLETSGARELAGVDPRVMIVMDLKTPDSGECEKNKYTNLSYLKATDQIKFVLCSREDYLWACAIISEYKLTERVHILFSPSWGQLHPTELANWIIEDKLSVRFQLQLHKILWNDAPGH

SEQ ID NO: 31070 - protein, 291 aa, Legionella sp.
  misc_feature (1)..(291): tr|A0A1Q3UCG2|A0A1Q3UCG2_9GAMM 7-carboxy-7-deazaguanine synthase OS=Legionella sp. 39-23 OX=1895902 GN=queE PE =3 SV=1
MFGLNDKVGRSFFKDAKSDALFVTSRFFTLQGEGPFRGHPAYFIRLAKCNLACSFCDTYFDTGEWLDFTSLLEEADTVIAAFFQKRNLPTPAWAQGLAKKMVLVITGGEPSLQRNLSAFLEKAQPYFQQTQIESNGSSILPDLPENTTLVVSPKCLEKDGAIIRYLKPNIKMLERADYLKFVMSAPEDNHYTPYSEIPTWAHEWAEKTKKQVFVSPMNRYLREPQRVQKIRDKGRDLTLEERSEINEVVSFWEPGLLDLKKNQRNHEYAAEYCMKHGLILNLQIHLFASLP

SEQ ID NO: 31071 - protein, 217 aa, Legionella spiritensis
  misc_feature (1)..(217): tr|A0A0W0Z5I5|A0A0W0Z5I5_LEGSP 7-carboxy-7-deazaguanine synthase OS=Legionella spiritensis OX=452 GN=queE PE=3 SV=1
MTRILQQLRITEIFHSLQGESTTVGLPTVFIRLTGCPLRCQYCDTAYAFSGGTVLTFEAILTRVAGYECSHVCVTGGEPLAQPGCIPLLEELCNAGYQVSLETSGARDIALVDPRVMIVMDLKTPGSQECDKNLFGNLARLKRTDQIKFVICNREDYDWACQIILTHQLTEITQVLFSPSWTELNPTLLANWIIQDRLQVRFQLQLHKILWNDAPGH

SEQ ID NO: 31072 - protein, 291 aa, Legionella steelei
  misc_feature (1)..(291): tr|A0A0W0ZCU2|A0A0W0ZCU2_9GAMM 7-carboxy-7-deazaguanine synthase OS=Legionella steelei OX=947033 GN=queE PE=3 SV=1
MFGLNDKVGRSFFKDAKSDALFVTSRFFTLQGEGPFRGHPAYFIRLAKCNLACSFCDTYFDTGEWLDFTSLLEEADTVIAAFFQKRNLPTPAWAQGLAKKMVLVITGGEPSLQRNLSAFLEKAQPYFQQTQIESNGSSILPDLPENTTLVVSPKCLEKDGAIIRYLKPNIKMLERADYLKFVMSAPEDNHYTPYSEIPTWAHEWTEKTKKQVFVSPMNRYLREPQRAQTIRDKGRDLTLEERSEINEVVSFWEPGLLDLKKNQRNHEYTAEYCMKHGLILNLQIHLFASLP

SEQ ID NO: 31073 - protein, 291 aa, Legionella steigerwaltii
  misc_feature (1)..(291): tr|A0A378LI69|A0A378LI69_9GAMM 7-carboxy-7-deazaguanine synthase OS=Legionella steigerwaltii OX=460 GN=nrdG PE =3 SV=1
MFGLNDKVGKSFFKEAKSDELFVTSRFFTLQGEGPFRGHPAYFIRLAKCNLACSFCDTYFDTGEWLDFNSLLEEADTVIQAFFQKRNLPTPSWAQGFAKKMVLVITGGEPSLQENLSAFLEKAQPYFQNTQIESNGISILPDLPKNTTLVVSPKCLEKEGKTIRYLEPNTKMLERADYLKFVMSAPEDNQYTPYSEIPTWAHEWAEKTKKHVFVSPMNRYQKEPQRVKAIRDNGRDLNLEERSEINEVVSFWEPGLLNLEKNQRNHEYAAEYCMKYGFILNLQIHLFASLP

SEQ ID NO: 31074 - protein, 217 aa, Legionella taurinensis
  misc_feature (1)..(217): tr|A0A3A5LH85|A0A3A5LH85_9GAMM 7-carboxy-7-deazaguanine synthase OS=Legionella taurinensis OX=70611 GN=queE PE =3 SV=1
MSRTASQLRITEIFHSLQGESTTVGLPTVFIRLTGCPLRCQYCDTAYAFSGGELKPITGILDEISRYRCRHVCVTGGEPLAQPGCIPLLTHLCDAGYQVSLETSGARDIAEVDSRVMVVMDLKTPDSNECTKNRFDNIPYLKATDQIKFVICSREDYLWACEIIKKYQLTEKVQILFSPSWEEMNPTTLADWIIQDQLPVRFQIQLHKILWNDAKGH

SEQ ID NO: 31075 - protein, 217 aa, Legionella taurinensis
  misc_feature (1)..(217): tr|A0A4T0XUG9|A0A4T0XUG9_9GAMM 7-carboxy-7-deazaguanine synthase OS=Legionella taurinensis OX=70611 GN=queE PE =3 SV=1
MSRTASQLRITEIFHSLQGESTTVGLPTVFIRLTGCPLRCQYCDTAYAFSGGELKPITGILDEISRYRCRHVCVTGGEPLAQPGCIPLLTHLCDAGYQVSLETSGARDIAEVDSRVMVVMDLKTPDSNECTKNRFENIPYLKATDQIKFVICSREDYLWACEIIKKYQLTEKVQILFSPSWEEMNPTTLADWIIQDQLPVRFQIQLHKILWNDAKGH

SEQ ID NO: 31076 - protein, 291 aa, Legionella tucsonensis
  misc_feature (1)..(291): tr|A0A0W0ZUS5|A0A0W0ZUS5_9GAMM 7-carboxy-7-deazaguanine synthase OS=Legionella tucsonensis OX=40335 GN=queE PE =3 SV=1
MFGLNDKVGKSFFKKAKPDELFITSRFFTLQGEGPFRGHPAYFIRLAKCNLACSFCDTYFDVGEWRSFNSLLEETDSVIAAFFQRCNLPTPSWAKGLAKKMVLVITGGEPSLQQNLSAFLEKAKPYFQYTQIESNGITLLPNLPQNITLVVSPKCLEKDGKAIRYLKPNTKILERADCLKFVMSAPEEDRYIPYSEIPAWAHEWAEKTNKQVFVSPMNRYQKEPQRVSAIRDKGRDLTLAERSEINEVVSFWEADLLDMEKNQRNHEYAAEYCMKYGFILNLQIHLFASLP

SEQ ID NO: 31077 - protein, 291 aa, Legionella wadsworthii
  misc_feature (1)..(291): tr|A0A378LNK7|A0A378LNK7_9GAMM 7-carboxy-7-deazaguanine synthase OS=Legionella wadsworthii OX=28088 GN=nrdG PE =3 SV=1
MFGLNDKVGQSFFKTANADELFVTSRFFTLQGEGPFRGQPAYFIRLAKCNLACSFCDTYFDAGEWRSFTSLLDESEQVISAFFQSRNLPVPSWAQGFSKKIVLVITGGEPLLQRNLSVFLEKAKPYFQMIQIESNGTSILNDLPQSTTLVVSPKCLEKNGKAIRYLKPHLKMLERADYLKFVLSAPEEHRYTPYSAIPEWAHEWAEKTNKQVFVSPMNRYQKEPQQVLSMREKGNELGLAERSEINEVVSFWEPNLLDLKKNQRNHEYAAEYCMKYGFILNLQIHLFASLP

SEQ ID NO: 31078 - protein, 217 aa, Legionella waltersii
  misc_feature (1)..(217): tr|A0A0W1APB0|A0A0W1APB0_9GAMM 7-carboxy-7-deazaguanine synthase OS=Legionella waltersii OX=66969 GN=queE PE=3 SV=1
MSRFSHQLRITEIFHSLQGESITVGLPTVFIRLTGCPLRCQYCDTAYAFTGGEIKTIDEIVSTVDSYNCQYVCVTGGEPLAQPACINLLQQLCDKGYSVSLETSGARDISQVDRRVMVVMDLKTPDSLELDKNLFANLDYLKSSDQIKFVLCSRQDYEWACRIMQEHRLSERVQLLFSPSWNQLNPTELANWIVEDKLSVRFQIQLHKILWNDAPGH

SEQ ID NO: 31079 - protein, 217 aa, Legionella worsleiensis
  misc_feature (1)..(217): tr|A0A0W1AIS4|A0A0W1AIS4_9GAMM 7-carboxy-7-deazaguanine synthase OS=Legionella worsleiensis OX=45076 GN=queE P E=3 SV=1
MKILGNQLRITEIFHSLQGESVTVGLPTVFVRLTGCPLRCQYCDTAYAFSGGTVRELDEVLATIASFNCKRVCVTGGEPLAQPGCLTLMERLCDENYQVSIETSGARDISKIDSRVMIVMDLKTPDSLEVDKNLFANLDYLKPSDQIKFVLCSRNDYEWACALVKEHGLADRVQLLFSPSWNQLNPTDLANWIVEDNISVRFQLQLHKILWNDAPGH

SEQ ID NO: 31080 - protein, 215 aa, Legionellaceae bacterium
  misc_feature (1)..(215): tr|A0A2E5Y7V1|A0A2E5Y7V1_9GAMM 7-carboxy-7-deazaguanine synthase OS=Legionellaceae bacterium OX=2026753 GN=que E PE=3 SV=1
MIEHTLRITEIFYSLQGESSTVGLPTVFVRLTGCPLRCQYCDTAYAFNGGQLLSISTILTKIASFHPKYVCVTGGEPLAQPKCLNLLTALSDEQYHVSLETSGARDIAPVDARTMIVMDLKTPASGESDKNLWSNLKHLKKTDQIKFVLCDRADYDWAVAMLHQHQLDQLSHVLFSPSWQQLDPSTLADWIIQDNLPVRFQLQLHKILWQDTPGK

SEQ ID NO: 31081 - protein, 215 aa, Legionellales bacterium
  misc_feature (1)..(215): tr|A0A1G0WYR4|A0A1G0WYR4_9GAMM 7-carboxy-7-deazaguanine synthase OS=Legionellales bacterium RIFCSPHIGHO2_12_FU LL_37_14 OX=1798568 GN=queE PE=3 SV=1
MLKQDVRLTEIFYSIQGESLFSGCPTVFVRLTGCPLRCQYCDTAYAFTGGKLHSIAGILSLVDAYQPKYVCVTGGEPLAQKSCLPLLKALCDKYPYVSLETSGALSIENVDSRVNIVMDIKTPGSLESAKNLTANLSYLKPTDQIKFVLCNRADYAFAKDYIALNNLSQKCELLFSPSWHDLDPAHLAEWILQDKLAVRLQMQLHKVLWNDEPGR

SEQ ID NO: 31082 - protein, 226 aa, Legionellales bacterium
  misc_feature (1)..(226): tr|A0A2E0PYP7|A0A2E0PYP7_9GAMM 7-carboxy-7-deazaguanine synthase OS=Legionellales bacterium OX=2026754 GN=queE PE=3 SV=1
MRLVKNPFSSIQEEIEVVVNEIFYSLQGESSRVGLPTIFIRLTGCPLRCQYCDTEYAFTNGEKVSLKAILNKIKKFPTKYITVTGGEPLAQKSCYKLLTKLCDIGYEVSLETSGAINISDVDKRVKKIVDIKTPGSSEVEKNNFKNLQYLTTKDEIKFVICDKADYVWAKKEIIEKNMDGICEICFSPVYKTLMPSKLANWILKDQLNVRMQIQLHKHLWGDTPGK

SEQ ID NO: 31083 - protein, 236 aa, Leifsonia aquatica
  misc_feature (1)..(236): tr|U2RDC0|U2RDC0_LEIAQ 7-carboxy-7-deazaguanine synthas e OS=Leifsonia aquatica ATCC 14665 OX=1358026 GN=queE P E=3 SV=1
MTKTALHLNEMFVSIQGEGPHAGEPALFVRTALCNLSCEWCDTAYTWDWARYDRASEVRTVDVEQASRLVLSELPAHVRLVILTGGEPLLQQLALTELISEVQEERPDVRFEVETNGTRAPSPGLSALVALFVVSPKLAHSGISSGRRIRPAALNAFPPGRSVLKVVIRDGADFAELHTVVEACGFDRDAVWVMPEGTDPALLHARMAELVPLCIEHGYKVTGRLHVTLWGDKRGK

SEQ ID NO: 31084 - protein, 211 aa, Leifsonia flava
  misc_feature (1)..(211): tr|A0A4Y9QTG9|A0A4Y9QTG9_9MICO 7-carboxy-7-deazaguanine synthase OS=Leifsonia flava OX=2561933 GN=queE PE=3 SV =1
MSYKIKEIFYTLQGEGAHAGRPAVFCRFSLCNLWTGRERDRPRAICQFCDTDFVGTDGPGGGKFATADDLADAVEAAWPVGWESNRMVVCTGGEPLLQLDEAVVEALHRRGFYVAVETNGTRLPPPGVDWLCVSPKVGAELVVKRGDELKFVYPQKGVDPASFQHLDFGTFRVQPMDGPDAVANTALAVEYCLNHPTWQLSLQTHKYLGIA

SEQ ID NO: 31085 - protein, 233 aa, Leifsonia xyli
  misc_feature (1)..(233): tr|A0A2W5SWM7|A0A2W5SWM7_9MICO 7-carboxy-7-deazaguanine synthase OS=Leifsonia xyli OX=1575 GN=queE PE=3 SV=1
MKPNSQIPEKKDYQSTLEVHSIFSTIQGEGPFCGRPAVFVRLAGCNLQCPGCDTEYTQGRARMPYLAILKSIHNQLISTNSSANLIVISGGEPFRQKIAPFVDYLIEHDFDVQIETNGSMQIPLELSSMATVVCSPKTAKLHPSALHRANAFKYVMKAGNVRADDGLPLQALDHRATPFIARPHKSFRGKIYLQPMDEQDAGYNADNVAAVLASAMKHNYTVQLQIHKLLNVE

SEQ ID NO: 31086 - protein, 236 aa, Leisingera aquaemixtae
  misc_feature (1)..(236): tr|A0A0P1HPE0|A0A0P1HPE0_9RHOB 7-carboxy-7-deazaguanine synthase OS=Leisingera aquaemixtae OX=1396826 GN=queE PE=3 SV=1
MTTLRIAEIFGPTIQGEGALIGEPTVFVRAGGCDYRCSWCDSMHAVDSAYRHDWAVMSPEDVMAEVRRLSGGKPLTVSISGGNPAIQDFAPVIAYGKAESYRFACETQGSVSKPWFADLDMLVLSPKPPSSGETVDWKAFDRCLEAAEGCGQAVMKIVIFDDKDYAWAKAVAERHPELPLYLQPGNPEVDPEQPVDLNQATDRLLWLIEKVTGDGWFTPRVLPQLHVLVWGNKRGV

SEQ ID NO: 31087 - protein, 235 aa, Leisingera methylohalidivorans
  misc_feature (1)..(235): tr|V9VT23|V9VT23_9RHOB 7-carboxy-7-deazaguanine synthas e OS=Leisingera methylohalidivorans DSM 14336 OX=999552 GN=queE PE=3 SV=1
MTLRIAEIFGPTIQGEGALIGEPTVFVRAGGCDYRCSWCDSLHAVDSAYRHDWAVMAPEQVMAEVRRLSGGRPLTVSISGGNPAIQDFAPVIAYGKAEGYRFACETQGSVSKPWFADLDTLVLSPKPPSSGETVDWKAFDQCLEAARGCGQAVMKIVIFDDEDYAWAKAAAERHPELPLYLQPGNPEVDPALPVDLSQATDRLLWLIEKVTGDGWFTPRVLPQLHVLVWGNKRGV

SEQ ID NO: 31088 - protein, 236 aa, Leisingera sp.
  misc_feature (1)..(236): tr|A0A0C1G9E1|A0A0C1G9E1_9RHOB 7-carboxy-7-deazaguanine synthase OS=Leisingera sp. ANG-M7 OX=1577902 GN=queE P E=3 SV=1
MTTLRIAEIFGPTIQGEGALIGEPTVFVRAGGCDYRCFWCDSMHAVDSANRHDWAVMAPEQVMSEVRRLSGGKPLTVSISGGNPAIQDFAPVIAYGKAEGYRFACETQGSVSKPWFADLDTLVLSPKPPSSGETVDWKAFDQCLKAAKGCGQAVMKIVIFDDKDYAWAKAAAERHPELPLYLQPGNPEVDPELPVDLNQATDRLLWLIEKVTGDGWFTPRVLPQLHVLVWGNKRGV

SEQ ID NO: 31089 - protein, 236 aa, Leisingera sp.
  misc_feature (1)..(236): tr|A0A481PJW1|A0A481PJW1_9RHOB 7-carboxy-7-deazaguanine synthase OS=Leisingera sp. NJS204 OX=2508307 GN=queE P E=3 SV=1
MTSLRIAEIFGPTIQGEGALIGEPTVFVRAGGCDYRCSWCDSMHAVDSANRHDWAVMTPEEVMGEVRRLSGGKPLTVSISGGNPAIQDFAPVIAYGKTEGYRFACETQGSVSKPWFGDLDTLVLSPKPPSSGERVDWKAFDLCLEAAKGCGQTVIKIVIFDDKDYAWAKAAAERHPGLPLYLQPGNPEVDPSLPVDLNQATDRLLWLIEKVTGDRWFTPRVLPQLHVLVWGNKRGV

SEQ ID NO: 31090 - protein, 223 aa, Lelliottia amnigena
  misc_feature (1)..(223): tr|A0A1A9FIF1|A0A1A9FIF1_LELAM 7-carboxy-7-deazaguanine synthase OS=Lelliottia amnigena OX=61646 GN=queE PE=3 SV=1
MQYPINEMFQTLQGEGYFTGVPAIFIRLQGCPVGCAWCDTKHTWDKLADREVSLFSILAKTKESDKWGAGSAEDLLAIIGRQGWTARHVVITGGEPCIHDLMSLTDLLEKNGFSCQIETSGTHEVRCTPSTWVTVSPKVNMRGGYDVLSQALERADEIKHPVGRVRDIEALDELLETLSDEKQRIIALQPISQKEDATRLCIETCIARNWRLSMQTHKYLNIA

SEQ ID NO: 31091 - protein, 223 aa, Lelliottia amnigena
  misc_feature (1)..(223): tr|A0A3S5XSF9|A0A3S5XSF9_LELAM 7-carboxy-7-deazaguanine synthase OS=Lelliottia amnigena OX=61646 GN=queE PE=3 SV=1
MQYPINEMFQTLQGEGYFTGVPAIFIRLQGCPVGCAWCDTKHTWDKLADREVSLFSILAKTKESDKWGAGSAEDLLAIIGRQGWTARHVVITGGEPCIHDLMSLTDLLEKNGYSCQIETSGTHEVRCSHTTWVTVSPKVNMRGGYDVLSQALERADEIKHPVGRVRDIEALDELLATLTDEKQRIIALQPISQKDDATRLCIETCIARNWRLSMQTHKYLNIA

SEQ ID NO: 31092 - protein, 223 aa, Lelliottia nimipressuralis
  misc_feature (1)..(223): tr|A0A4Y8IWY4|A0A4Y8IWY4_9ENTR 7-carboxy-7-deazaguanine synthase OS=Lelliottia nimipressuralis OX=69220 GN=que E PE=3 SV=1
MQYPINEMFQTLQGEGYFTGVPAIFIRLQGCPVGCAWCDTKHTWDKLADREVSLFSILAKTKESDKWGAGSSEDLLAIIGRQGWTARHVVITGGEPCIHDLTPLTELLEKNGYSCQIETSGTHEVRCSHATWVTVSPKVNMRGGYDVLSQALERADEIKHPVGRVRDIEALDELLATLADEKQRVIALQPISQKEDATRLCIETCIARNWRLSMQTHKYLNIA

SEQ ID NO: 31093 - protein, 223 aa, Lelliottia nimipressuralis; identical to SEQ ID NO: 29041
  misc_feature (1)..(223): tr|A0A4Q0WED3|A0A4Q0WED3_9ENTR 7-carboxy-7-deazaguanine synthase OS=Lelliottia nimipressuralis OX=69220 GN=que E PE=3 SV=1

SEQ ID NO: 31094 - protein, 223 aa, Lelliottia sp.
  misc_feature (1)..(223): tr|A0A2S5C9M5|A0A2S5C9M5_9ENTR 7-carboxy-7-deazaguanine synthase OS=Lelliottia sp. 7254-16 OX=2080842 GN=queE PE=3 SV=1
MQYPINEMFQTLQGEGYFTGVPAIFIRLQGCPVGCAWCDTKHTWDKLADREVSLFSILAKTKESDKWGAGSAEDLLAIIGRQGWTARHVVITGGEPCIHDLTSLTELLEKNGYSCQIETSGTHEVRCSHSTWVTVSPKVNMRGGYDVLSQALERADEIKHPVGRVRDIEALDELLATLTDEKQRIIALQPISQKDDATRLCIETCIARNWRLSMQTHKYLNIA

SEQ ID NO: 31095 - protein, 242 aa, Lentibacillus sp.
  misc_feature (1)..(242): tr|A0A4Q3X7Y6|A0A4Q3X7Y6_9BACI 7-carboxy-7-deazaguanine synthase OS=Lentibacillus sp. SSKP1-9 OX=2510307 GN=qu eE PE=3 SV=1
MSKIPVMEIFGPTIQGEGMVIGQKTMFVRTAGCDYSCSWCDSAFTWDGSEKDKIKQMDAEEIWEELRALGGDGFSFVTISGGNPALLKNLRYLIDLLKKNNIRVGLETQGSKWQDWFLDINQLTISPKPPSSGMVTDFDVLDNIIERLKDADPSYNTSLKVVVFDDEDYNYAKKVHFRYPHIPFFLQVGNDDSKTANDQQLVSQLLHKYEKLVDKTIEDNEFKDVKILPQLHTYIWGNKRGV

SEQ ID NO: 31096 - protein, 209 aa, Lentimicrobiaceae bacterium
  misc_feature (1)..(209): tr|A0A2E2XWG0|A0A2E2XWG0_9BACT 7-carboxy-7-deazaguanine synthase OS=Lentimicrobiaceae bacterium OX=2026756 GN= queE PE=3 SV=1
MAKDSDILKGGKILPIMEEFYTLQGEGYNMGRAAYFVRLGGCDVGCSWCDIKESWNEDLFPPKDVASVILNIKANSADTVVVTGGEPSLYPLDYFTNKLKENDILTMIETSGAHPLSGSWDWICLSPKKYSPPKGNIYERAHELKVIIQHKGDLEWAERNAELVNNDALLFLQPEWSVADDIMPILTEYIMNNPQWRMSLQSHKYMGIP

SEQ ID NO: 31097 - protein, 212 aa, Lentisphaera araneosa
  misc_feature (1)..(212): tr|A6DHQ9|A6DHQ9_9BACT 7-carboxy-7-deazaguanine synthas e OS=Lentisphaera araneosa HTCC2155 OX=313628 GN=queE P E=3 SV=1
MLYITEIYKSLQGESTWSGLACIFIRLSGCNLRCSWCDTEYSFTSGDKLSIDNILDRVEQLNCDLVEVTGGEPLAQDKVGELVQKLLDLGKTVLVETGGHMDINLVSKESIRIMDIKCPASKMSHKNDLKNIAKLTPKDEVKFVIQNKEDFLWAEKTIREYKLEKKCTVIMSTVFGLMDREELAGLILQSGLNIRMQIQLHKLIWSEDTKGV

SEQ ID NO: 31098 - protein, 217 aa, Lentisphaerae bacterium
  misc_feature (1)..(217): tr|A0A1G0WFG0|A0A1G0WFG0_9BACT 7-carboxy-7-deazaguanine synthase OS=Lentisphaerae bacterium GWF2_38_69 OX=1798 570 GN=queE PE=3 SV=1
MKTLQICETFTSIQGETTHIGKPCFFIRLSKCNLNCRWCDTKYAFSDLDSKEIKIDELIEMAILSGVKLVNVTGGEPLLQENTIELLNKLIKKGFTVLLETNGSIPIKKVPDKVIIILDFKCPSSGYSEKMFLENYQMLKKMDEVKFVIENEKDYRFALNKIEELNLQTKTQNILFSPVLSKLAPRFLANWMIKDKTPAILQVQLHKFIWPDIERGV

SEQ ID NO: 31099 - protein, 212 aa, Lentisphaerae bacterium
  misc_feature (1)..(212): tr|A0A1V5GUT1|A0A1V5GUT1_9BACT 7-carboxy-7-deazaguanine synthase OS=Lentisphaerae bacterium ADurb.BinA184 OX=1 852901 GN=queE PE=3 SV=1
MLHVSEVFRSIQGESTFAGLPCVFIRLAGCNLNCRYCDTRHARQPDRTVPWRGLVDEALALGGGIVEVTGGEPLLQPRTPQLLDALAESGRTVLLETNGSLGLPGKRRYHVIMDMKCPASGEAAAFYEPNIGRLTGRDELKFVVSSRDDFDWACQQIERHGLAGRGFPLLFAPAYGACKPAELAEWVLASGLPLRMQVQLHKVIWPHAKRGV

SEQ ID NO: 31100 - protein, 214 aa, Lentisphaeria bacterium
  misc_feature (1)..(214): tr|A0A355M977|A0A355M977_9BACT 7-carboxy-7-deazaguanine synthase OS=Lentisphaeria bacterium OX=2053569 GN=queE PE=3 SV=1
MQICETFTSIQGETTHIGKPCFFIRLSKCNLNCRWCDTKYAFSDLDSKEIKIDELIEMAILSGVKLVNVTGGEPLLQENTIELLNKLIKKGFTVLLETNGSIPIKKVPDKVIIILDFKCPSSGYSEKMFLENYQMLKKMDEVKFVIENEKDYRFALNKIEELNLQTKTQNILFSPVLSKLAPRFLANWMIKDKTPAILQVQLHKFIWPDIERGV

SEQ ID NO: 31101 - protein, 269 aa, Lentisphaeria bacterium
  misc_feature (1)..(269): tr|A0A348XGS0|A0A348XGS0_9BACT 7-carboxy-7-deazaguanine synthase OS=Lentisphaeria bacterium OX=2053569 GN=queE PE=3 SV=1
MPATAPLVESAKAAKQASVHVSEIFSSIQGEGTELGKAHLFVRLYGCHLQCRFCDTPETVTGLQPPKFRPPSFRFLEADERIENPCSAEQLYTLIQKAEVEHGPHDAVAITGGEPLIQAQFLTRLLPLIREGGQRIYLETSGDLVGALAVVQPWIDIIAMDLKLPSSAGQRPRWRLHRDFLAKALEGTASLTIKVVVNNTTTDADICEARNLVAEFAPDIPFVLQPMTAISGAKDVPEMADLQRWRELVRERLSDVRIIPQMHHFMGLR

SEQ ID NO: 31102 - protein, 211 aa, Lentzea aerocolonigenes
  misc_feature (1)..(211): tr|A0A0F0H9P8|A0A0F0H9P8_LENAE 7-carboxy-7-deazaguanine synthase OS=Lentzea aerocolonigenes OX=68170 GN=queE P E=3 SV=1
MTYFVKEIFYTLQGEGRHAGRPAVFCRFSRCNLWTGLEKDRHRAVCQFCDTDFVGADGINGGKFTTAEELANAVANVWEGDTDEERFVVCTGGEPLLQLDIAAIDALHDRGFEISVETNGTQVPPPGIDWLCVSPKLGSTLVATSGHELKLVFPQVDGEPERFEHLRFESFRLQPMDGPDVAANTAAAIAYCKRNPKWSLSVQTHKYLGIA

SEQ ID NO: 31103 - protein, 229 aa, Lentzea guizhouensis
  misc_feature (1)..(229): tr|A0A1B2HE91|A0A1B2HE91_9PSEU 7-carboxy-7-deazaguanine synthase OS=Lentzea guizhouensis OX=1586287 GN=queE PE =3 SV=1
MPPGRVEGSAILTEKFESFQGEGPWTGQRCVFVRFSRCNLRCSYCDTPESWDWNRYNPAEVSDRVPVTELVSWVRERGVDMMVITGGEPMLQQPAMIALARGLADVRVQVETNGTIAPTPELASVVDLWVVSPKLANSGMTYSTRIKADALSALVATGRAVFKFVVTEPGRDLDEIAQLVEEHRLAPVWVMPEGTTQEKVLAGMDALYGPATERGWNVSTRLHILTGAR

SEQ ID NO: 31104 - protein, 203 aa, Leptolyngbya boryana
  misc_feature (1)..(203): tr|A0A1Z4JPM7|A0A1Z4JPM7_LEPBY 7-carboxy-7-deazaguanine synthase OS=Leptolyngbya boryana NIES-2135 OX=1973484 GN=queE PE=3 SV=1
MIRTEAQTLPIVETFHSVQGEGAWTGTSALFIRLGGCDVGCWFCDTKESWVAKRHPRQSIQELVNLAIEVNSAIVVITGGEPLMHDLTELTKALKDEGLRLHLETSGAHPFSGTFDWVTLSPKQFKPPHESVYAHVDELKVVIAQAADFEWAEQQSQQVSDRAVRYLQPEWSSQESTSLIFEYVKQQPKWRMGLQTHKLLGVN

SEQ ID NO: 31105 - protein, 213 aa, Leptolyngbya foveolarum
  misc_feature (1)..(213): tr|A0A2W4WJY7|A0A2W4WJY7_9CYAN 7-carboxy-7-deazaguanine synthase OS=Leptolyngbya foveolarum OX=47253 GN=queE P E=3 SV=1
MVLLSAQSPVAKIDSKTALPVVETFHSVQGEGFWTGVSAFFIRLAGCDVGCSWCDTKHSWPMQSHPKREILALVAEAIAANPFMVVITGGEPLMHDLTRLTQALKASGLRVHLETSGSHPLSGEFDWISLSPKQFKPPLAEIYPLASELKVVIDGESDLAWAKKNAEKVSAQVVKLLQPQWESPVGQQLVMDYVLTHSEWRVGLQTHKFLGVR

SEQ ID NO: 31106 - protein, 212 aa, Leptolyngbya sp.
  misc_feature (1)..(212): tr|K9F2X0|K9F2X0_9CYAN 7-carboxy-7-deazaguanine synthas e OS=Leptolyngbya sp. PCC 7375 OX=102129 GN=queE PE=3 S V=1
MLSELTLSPTADIAETTYPIVETFHSVQGEGTWTGASAFFIRLAGCDVGCPWCDTKISWSTQPHPQQAMGDLVKQAHTAQPFMVVVTGGEPLMHDLAPLTQALRQAGLRIHLETSGAHPFSGEFDWVSLSPKRFKPPQSSIYAQADELKVVISTEDDLIWAQEQAAQVPVTTIKLLQPEWTSEHSQQLVFDYVKRHSDWRMSLQTHKFLGVR

SEQ ID NO: 31107 - protein, 200 aa, Leptolyngbya sp.
  misc_feature (1)..(200): tr|A0A0S3U9X5|A0A0S3U9X5_9CYAN 7-carboxy-7-deazaguanine synthase OS=Leptolyngbya sp. NIES-3755 OX=1752064 GN=q ueE PE=3 SV=1
MIEQLFPVVETFHSVQGEGAWTGTSAFFIRLALCDVGCWFCDTKESWSAKRHPQKSIDELVKSAIEAKSAIVVITGGEPLMHDLTELTKALHQAGLRLHLETSGAHPYSGEFDWVTLSPKLSKLPHESVYAHADELKIVISEESDLEWAERESEKVSDRVIHYLQPEWSHKQSLDLIFEYVKQHPKWRISLQTHKLLGVE

SEQ ID NO: 31108 - protein, 231 aa, Leptolyngbya valderiana
  misc_feature (1)..(231): tr|A0A166W9N9|A0A166W9N9_9CYAN 7-carboxy-7-deazaguanine synthase OS=Leptolyngbya valderiana BDU 20041 OX=32286 6 GN=queE PE=3 SV=1
MPIAETFVSIQGEGKLTGMPSWFVRVAGCNLRCGWCDTPYASWEPKGDRRTIDELLREARDRRIGHAVLTGGEPMIFEPIADLARGLTDLGVHVTIETAGTVHRPVHCDLLSLSPKLANSTPHDDRRDPSGAIAVRHERQRLDLHALNALLADHPQRQLKFVVASETDLPEIEQLLSQLRGVESGDVLLMPEGVASPDPASLGWLVDACVARGWRYCHRLHIELFGNTRGT

SEQ ID NO: 31109 - protein, 217 aa, Leptonema illini
  misc_feature (1)..(217): tr|H2CLA2|H2CLA2_9LEPT 7-carboxy-7-deazaguanine synthas e OS=Leptonema illini DSM 21528 OX=929563 GN=queE PE=3 SV=1
MAVLTDTLRLTETFLSLQGEGEHAGLLCYFIRTAGCDLRCRWCDTDYSWTGGVKHSLDDIVAGIPEGVTLVQITGGEPLLQKEAVIELIKRLSAEYAVLLETGGHRSIEGLPPATHIVLDIKLPGSNEAHHNFADNLPFLKSSDEIKFVIADRRDYEAARSWINEHRLHQLCKLLVSPVFGEIAPSDLAQWVIEDRLPVRMQLQQHKLIWDPNRRGV

SEQ ID NO: 31110 - protein, 237 aa, Leptospira adleri
  misc_feature (1)..(237): tr|A0A2M9YQ03|A0A2M9YQ03_9LEPT 7-carboxy-7-deazaguanine synthase OS=Leptospira adleri OX=2023186 GN=queE PE=3 SV=1
MNNLKTSVHEIYLSLSGEGISTGLPTVFVRMAGCSLRCGMAVGRKLWCDTPYALSPNAGEESDLEQVLKQIQELSPVDTQILLTGGEPLEGRNRDFSVALGNEIFRARKQSGSYPRPRVETNGAESIEGLDSFVFTLDYKLPGSGMEERMLLKNLEIYKDRKNNLDEIKFVIRDRIDFDRCIEVIQEFRLSGNLLASPVQSELSPDLLSEWIKSSLGSGLRLSLQTHKYIWGDQRGV

SEQ ID NO: 31111 - protein, 259 aa, Leptospira alexanderi
  misc_feature (1)..(259): tr|V6I0C3|V6I0C3_9LEPT 7-carboxy-7-deazaguanine synthas e OS=Leptospira alexanderi serovar Manhao 3 str. L 60 O X=1049759 GN=queE PE=3 SV=1
MPFYFFTILLFTRRKTLYLKEPMDNLKTSVHEIYLSLSGEGISTGIPTVFVRMAGCSLRCGMVTGRKLWCDTPYALSPSAGEEMDLKRVLNRIQELSPVYTQVLLTGGEPLEGRNRDFSLVLGNEIFRTRKSSNIYPRPRVETNGAESIEGLDQFVFTLDYKLPGSGMENRMNLKNLEIYNKRKNELDEIKFVIRDKNDFKRCLEVIETHRLSGNLLASPVQGELSPEILSEWLKSSLSSGLRLSLQTHKYIWGDKRGV

SEQ ID NO: 31112 - protein, 237 aa, Leptospira alstonii
  misc_feature (1)..(237): tr|T0FZ74|T0FZ74_9LEPT 7-carboxy-7-deazaguanine synthas e OS=Leptospira alstonii serovar Pingchang str. 80-412 OX=1218564 GN=queE PE=3 SV=1
MDNLKTSVHEIYLSLSGEGISTGVPTVFVRMAGCSLRCGMVTGRKLWCDTPYALSPNAGEEWNLNRVLDKIQNLSPVNTQVLLTGGEPLEGRNRDFSVALGKEIFRTRKSSGLYPRPRVETNGAESIEGLDQFVFTLDYKLPGSGMEDRMSLRNLEIYNKRKNDLDEIKFVIRDRNDFERCLEVIENHRLSGNLLASPVQGELSPEVLAEWMKSSLGSGLRLSLQTHKYIWGDKRGV

SEQ ID NO: 31113 - protein, 237 aa, Leptospira alstonii; identical to SEQ ID NO: 31112
  misc_feature (1)..(237): tr|M6DGG9|M6DGG9_9LEPT 7-carboxy-7-deazaguanine synthas e OS=Leptospira alstonii serovar Sichuan str. 79601 OX= 1218565 GN=queE PE=3 SV=1

SEQ ID NO: 31114 - protein, 234 aa, Leptospira andrefontaineae
  misc_feature (1)..(234): tr|A0A4R9H428|A0A4R9H428_9LEPT 7-carboxy-7-deazaguanine synthase OS=Leptospira andrefontaineae OX=2484976 GN=q ueE PE=3 SV=1
MKSVVHEIYLSVSGEGISTGLPTIFVRFAGCSLRCGMDGSRKLWCDTPYALSPNAGKEIELEDVISEIGSISSSPTQILLTGGEPLENSNRIFSQTLAQKLKLSRQVSGLYTRVRVETNGAEPIRDLENMVFTLDYKLPGSGMENKMVLDNLEFVRDRNDNLDEIKFVIRDRKDFDRTLEVIDGFKLKGNLLASPVFGELAPEILVDWIKENNRTDLRLSLQTHKYIWGEKRGV

SEQ ID NO: 31115 - protein, 236 aa, Leptospira bandrabouensis
  misc_feature (1)..(236): tr|A0A4Z1AYV6|A0A4Z1AYV6_9LEPT 7-carboxy-7-deazaguanine synthase OS=Leptospira bandrabouensis OX=2484903 GN=qu eE PE=3 SV=1
MFGKIHEIYSSISGEGISQGIPTVFIRFAGCSLRCGKTESRSLWCDTAYALGPNQGEEKSLESIWSELENLDPHHGYQVLLSGGEPLEGKNRDLSISIANKIYKHRTEAGLPYPAARVETNGSERITEDVFFIFTMDYKLPGSGMEDRMDLENFRILEKRHNSLDEIKFVVRDRIDFDRSIEVILEQKIQTNILYSPVHGEVDAKELVEWIKVDNPPKCRLSLQIHKVLWGNQKGV

SEQ ID NO: 31116 - protein, 237 aa, Leptospira barantonii
  misc_feature (1)..(237): tr|A0A2M9Z043|A0A2M9Z043_9LEPT 7-carboxy-7-deazaguanine synthase OS=Leptospira barantonii OX=2023184 GN=queE P E=3 SV=1
MDNLKTSVHEIYLSLSGEGISTGIPTVFVRMAGCSLRCGMAVGRKLWCDTPYALSPNAGEESNLNQVLDKIQELSPVNTQILLTGGEPLEGKNRDFSIALGNEIFRTRNSSGLYPRPRVETNGAESIEGLDRFVFTLDYKLPGSGMEDRMDLKNLEIYKQRNDVLDEIKFVIRDRNDFERCIEVIENHKLSGNLLASPVQGELSPEVLAEWMKSFLGSGLRLSLQTHKYIWGDQRGV

SEQ ID NO: 31117 - protein, 236 aa, Leptospira biflexa
  misc_feature (1)..(236): tr|B0SRW5|B0SRW5_LEPBP 7-carboxy-7-deazaguanine synthas e OS=Leptospira biflexa serovar Patoc (strain Patoc 1 / ATCC 23582 / Paris) OX=456481 GN=queE PE=3 SV=1
MYGKIHEIYSSISGEGISQGIPTVFVRFAGCSLRCGKTDTRSLWCDTPYALGPNQGETKPLSTIMDEIVALDPTHGYQILLTGGEPLEGKNRDLSISIAESIHSFRTHNDKPYPSSRVETNGSEKITLDPFFIFTMDYKLPGSGMEGRMDLENFQILEKRHNSLDEIKFVVRDRIDFERSIEVIREQKIQTNILYSPVHGEVDAKELVEWIKIDNPPKGRLSLQIHKVLWGNQKGV

SEQ ID NO: 31118 - protein, 236 aa, Leptospira biflexa
  misc_feature (1)..(236): tr|A0A5F2CFP2|A0A5F2CFP2_LEPBI 7-carboxy-7-deazaguanine synthase OS=Leptospira biflexa OX=172 GN=queE PE=3 SV= 1
MHGKIHEIYSSISGEGISQGIPTVFVRFAGCSLRCGKTDTRSLWCDTPYALGPNQGETKPLSTIMDEIVALDPTHGYQILLTGGEPLEGKNRDLSISIAQSIHSFRTHNDKPYPSSRVETNGSEKITLDPFFIFTMDYKLPGSGMEGRMDLENFQILEKRHNSLDEIKFVVRDRIDFERSIEVIREQKIQTNILYSPVHGEVDAKELVEWIKIDNPPKCRLSLQIHKVLWGNQKGV

SEQ ID NO: 31119 - protein, 241 aa, Leptospira borgpetersenii
  misc_feature (1)..(241): tr|M6BL64|M6BL64_LEPBO 7-carboxy-7-deazaguanine synthas e OS=Leptospira borgpetersenii serovar Hardjo-bovis str . Sponselee OX=1303729 GN=queE PE=3 SV=1
MKEPMDNLKTSVHEIYLSLSGEGISTGIPTVFVRMAGCSLRCGMAIGKKLWCDTPYALSPSAGEEMDLKRVLNRIQELSPVYTQVLLTGGEPLEGGNRDFSLALGNEIFRTRKFSNSYPRARVETNGAESIEGLDQFVFTLDYKLPGSGMENRMNLENLEIYNKRKNELDEIKFVIRDRNDFERCLEVIKVHELSGNLLASPVQGELSPEILSEWLKSSLGSRLRLSLQTHKYIWGDKRGI

SEQ ID NO: 31120 - protein, 259 aa, Leptospira borgpetersenii
  misc_feature (1)..(259): tr|M6WS77|M6WS77_LEPBO 7-carboxy-7-deazaguanine synthas e OS=Leptospira borgpetersenii serovar Pomona str. 2009 01868 OX=1192866 GN=queE PE=3 SV=1
MPFYFFTVLLFAQRKTLYLKEPMDNLKTSVHEIYLSLSGEGISTGIPTVFVRMAGCSLRCGMAIGKKLWCDTPYALSPSAGEEMDLKRVLNRIQELSPVYTQVLLTGGEPLEGRNRDFSLALGNEIFITRKFSNSYPRARVETNGAESIEGLDQFVFTLDYKLPGSGMENRMNLENLEIYNKRKNELDEIKFVIRDRNDFERCLEVIKVHELSGNLLASPVQGELSPEILSEWLKSSLGSRLRLSLQTHKYIWGDKRGV

SEQ ID NO: 31121 - protein, 236 aa, Leptospira bourretii
  misc_feature (1)..(236): tr|A0A4R9IPB3|A0A4R9IPB3_9LEPT 7-carboxy-7-deazaguanine synthase OS=Leptospira bourretii OX=2484962 GN=queE PE =3 SV=1
MFGKIHEVYSSISGEGISQGIPTVFIRFAGCSLRCGKTDSRALWCDTAYALGPNQGTEKSLDFIWAELENLDPHHGYQVLLTGGEPLEGKNRDLSLLIANKIYQYRTNAGLPYPASRVETNGSERITEDAFFIFTMDYKLPGSGMEDRMDQENFRILEKRHNSLDEIKFVVRDRIDFERSIEVIREKKIHTNILYSPVHGEVDAKELVEWIKVDNPPKCRLSLQIHKVLWGNQKGV

SEQ ID NO: 31122 - protein, 236 aa, Leptospira bouyouniensis
  misc_feature (1)..(236): tr|A0A4R9HL31|A0A4R9HL31_9LEPT 7-carboxy-7-deazaguanine synthase OS=Leptospira bouyouniensis OX=2484911 GN=que E PE=3 SV=1
MFGKIHEIYSSISGEGISQGVPTVFVRFAGCSLRCGKTESKSLWCDTPYALGPNQGETKTVSNIMDEIETLDKNHGYQILLTGGEPLEGKNRDLSITIAQTIFSYRTKHGKPYPTSRVETNGSEKITLDPFFIFTMDYKLPGSGMENRMDSENFQILEKRHNSLDEIKFVVRDRIDFERSIEVIREQKIQTNILYSPVHGEVDAKELVEWIKIDNPPKCRLSLQIHKVLWGNQKGV

SEQ ID NO: 31123 - protein, 236 aa, Leptospira brenneri
  misc_feature (1)..(236): tr|A0A2M9Y5T0|A0A2M9Y5T0_9LEPT 7-carboxy-7-deazaguanine synthase OS=Leptospira brenneri OX=2023182 GN=queE PE= 3 SV=1
MFGKIHEVYSSISGEGISQGIPTVFIRFAGCSLRCGRTETRALWCDTAYALGPNQGEEKSLDSIWKELEKLDPHHGYQVLLTGGEPLEGKNRDLSLAIANKIYNHRISTELPYPASRVETNGSERITEDPFFIFTMDYKLPGSGMEEKMDQENFRILEKRHNSLDEIKFVVRDRIDFERSLEVVREQKIQTNILYSPVHGEVDAKELVEWIKVDNPPKCRLSLQIHKVLWGNQKGV

SEQ ID NO: 31124 - protein, 234 aa, Leptospira broomii
  misc_feature (1)..(234): tr|T0GDU5|T0GDU5_9LEPT 7-carboxy-7-deazaguanine synthas e OS=Leptospira broomii serovar Hurstbridge str. 5399 O X=1049789 GN=queE PE=3 SV=1
MKSVIHEIYLSVSGEGISTGLPTIFVRFAGCSLRCGMTGSKKLWCDTPYALSPNAGREMNIDEVVSEIRNLSATSTQVLLTGGEPLESGNKEFSKILANRLREERKSSGNFLKVRVETNGAESIQDLADMVFTLDYKLPGSGMEDRMRVENFEILRDRNDSLDELKFVVRDREDFERAMHIVDRFQLEGNLLLSPVFNELSPELLVEWIKESGKSNLRLSLQTHKYIWGDKRGV

SEQ ID NO: 31125 - protein, 236 aa, Leptospira congkakensis
  misc_feature (1)..(236): tr|A0A4Z1AAX6|A0A4Z1AAX6_9LEPT 7-carboxy-7-deazaguanine synthase OS=Leptospira congkakensis OX=2484932 GN=queE PE=3 SV=1
MFGKIHEVYSSISGEGISQGIPTVFIRFAGCSLRCGKTDSRALWCDTAYALGPNQGTEKSLDSIWSELESLDPHHGYQILLTGGEPLEGKNRDLSVTIANKVFQHRTSIGLPYPASRVETNGSERITEDPFFIFTMDYKLPGSGMEDRMDPENFRILEKRHNSLDEIKFVVRDRIDFERSIEVIREQKIHTNILYSPVHGEVDAKELVEWIKVDNPPKCRLSLQIHKVLWGNQKGV

SEQ ID NO: 31126 - protein, 237 aa, Leptospira dzianensis
  misc_feature (1)..(237): tr|A0A5F2EAS3|A0A5F2EAS3_9LEPT 7-carboxy-7-deazaguanine synthase OS=Leptospira dzianensis OX=2484905 GN=queE P E=3 SV=1
MDNLKTSVHEIYLSLSGEGISTGIPTVFVRMAGCSLRCGMTIGRRLWCDTPYALSPSAGEEMSLNQVLDRIQELSPVQTQILLTGGEPLEGKNRDFSVALGEEIFRIRNTNGSYPRPRVETNGAESIEGLDHFVFTLDYKLPGSGMEDRMNLKNLEIYKERKNELDEIKFVIRDRIDFERCLEVIENRKLSGNLLASPVQGELSAELLAEWMKSSLGSGLRLSLQTHKYIWGDKRGV

SEQ ID NO: 31127 - protein, 237 aa, Leptospira dzianensis
  misc_feature (1)..(237): tr|A0A5F2AWI4|A0A5F2AWI4_9LEPT 7-carboxy-7-deazaguanine synthase OS=Leptospira dzianensis OX=2484905 GN=queE P E=3 SV=1
MDNLKTSVHEIYLSLSGEGISTGIPTVFVRMAGCSLRCGMTIGRRLWCDTPYALSPSAGEEMSLNQVLDRIQELSPVQTQILLTGGEPLEGKNKDFSVALGEEIFRIRNTNGSYPRPRVETNGAESIEGLDHFVFTLDYKLPGSGMEDRMNLKNLEIYKERKNELDEIKFVIRDRIDFERCLEVIENRKLSGNLLASPVQGELSAELLAEWMKSSLGSGLRLSLQTHKYIWGDKRGV

SEQ ID NO: 31128 - protein, 234 aa, Leptospira dzoumogneensis
  misc_feature (1)..(234): tr|A0A4Z1AB13|A0A4Z1AB13_9LEPT 7-carboxy-7-deazaguanine synthase OS=Leptospira dzoumogneensis OX=2484904 GN=qu eE PE=3 SV=1
MKSVVHEIYLSVSGEGISTGLPTIFVRFAGCSLRCGMDGNRKLWCDTPYALSPNAGKQMELEDVISEIGSISSSPTQILLTGGEPLENSNRIFSQTLAEKLKQSRQVSGMYTRVRVETNGAEPISDLENMVFTLDYKLPGSGMENKMILDNLEFVRDRNDNLDEIKFVIRDRKDFDRTLEVIDGFKLRGNLLASPVFGELSPEILVNWIKENNRTDLRLSLQTHKYIWGEKRGV

SEQ ID NO: 31129 - protein, 236 aa, Leptospira ellinghausenii
  misc_feature (1)..(236): tr|A0A2P2DFP2|A0A2P2DFP2_9LEPT 7-carboxy-7-deazaguanine synthase OS=Leptospira ellinghausenii OX=1917822 GN=qu eE PE=3 SV=1
MHGKIHEIYSSISGEGISQGIPTVFVRFAGCSLRCGKTDSRTLWCDTPYALGPNQGESKPFVSIIEEIEQFDKDHGFQILLTGGEPLEGQNRDLSISIAEHIFTYRTQKGKPYPASRVETNGSERISLDPFFIYTMDYKLPGSGMENRMDSENFKILEKRHNSLDEIKFVVRDRIDFDRSIEVIREQKIQTNILYSPVHGEVDAKELVEWIKIDNPPKCRLSLQIHKVLWGNQKGV

SEQ ID NO: 31130 - protein, 237 aa, Leptospira elllisii
  misc_feature (1)..(237): tr|A0A2N0BNM0|A0A2N0BNM0_9LEPT 7-carboxy-7-deazaguanine synthase OS=Leptospira elllisii OX=2023197 GN=queE PE= 3 SV=1
MDNLKTSVHEIYLSLSGEGISTGIPTVFVRMAGCSLRCGMVTGRKLWCDTPYALSPNAGESMNVEQTLRRIRELSPTDTQILLTGGEPLEGKNREFSVALGNEIFEIRNSSGFFPRARVETNGAESIEGLDRFVFTLDYKLPGSGMEDRMNLRNLEIYRDRKNDLDEIKFVIRDRTDFDRCLEVIETFELRGNLLASPVQGELSAQLLAEWIKSSLKHGLRLSLQTHKYIWGDQRGV

SEQ ID NO: 31131 - protein, 243 aa, Leptospira fainei
  misc_feature (1)..(243): tr|S3V8Y8|S3V8Y8_9LEPT 7-carboxy-7-deazaguanine synthas e OS=Leptospira fainei serovar Hurstbridge str. BUT 6 O X=1193011 GN=queE PE=3 SV=1
MYERAVRYNMKSVIHEIYLSVSGEGISTGLPTIFVRFAGCSLRCGMTGSKKLWCDTAYALSPNAGREMSVEEVVFEIRSLSAVSTQVLLTGGEPLEAGNGKFSKILANRLREERKSSGNFPRARVETNGAELIQDLPDMVFTLDYKLPGSGMEDRMRVENFEIIRDRNDPLDEIKFVVRDRQDFERTIDVVDRFQLEGNLLVSPVFKELSPELLVEWIKEIGKSNLRLSLQTHKYIWGDKRGV

SEQ ID NO: 31132 - protein, 234 aa, Leptospira fletcheri
  misc_feature (1)..(234): tr|A0A4R9GFS2|A0A4R9GFS2_9LEPT 7-carboxy-7-deazaguanine synthase OS=Leptospira fletcheri OX=2484981 GN=queE PE =3 SV=1
MNSVIHEIYLSVSGEGISTGLPTIFVRFAGCSLRCGMDGSRKLWCDTPYALSPNAGEKMDIESVLSEIRKLSADPVQVLFTGGEPLEGGNRNFSRVLAARLKEERRRHGRFLRVRIETNGAEPISDLEDMIFTLDYKLPGSGMEEKMLHENLHFLNERRDPLDELKFVIRDERDFVRCLEIVERFELQGNLLASPVFGELSPETLVDWIQKSGASKLRLSLQTHKYIWGDKRGV

SEQ ID NO: 31133 - protein, 234 aa, Leptospira fluminis
  misc_feature (1)..(234): tr|A0A4V3JEG2|A0A4V3JEG2_9LEPT 7-carboxy-7-deazaguanine synthase OS=Leptospira fluminis OX=2484979 GN=queE PE= 3 SV=1
MNSVIHEIYLSVSGEGISTGLPTIFVRFAGCSLRCGMDGSRKLWCDTPYALSPNAGEKMDIESVLSEIRRLSADPVQVLFTGGEPLEGHNRNFSTVLAARLREDRVRYGRFLRTRIETNGAESIADLEDMVFTLDYKLPGSGMEERMLQENLRFLNERKDPLDEVKFVIRDERDFVRCLEIVEHFELQGNLLASPVFGELSPETLVDWIKERGAGKLRLSLQTHKYIWGDKRGV

SEQ ID NO: 31134 - protein, 237 aa, Leptospira gomenensis
  misc_feature (1)..(237): tr|A0A5F1YAW0|A0A5F1YAW0_9LEPT 7-carboxy-7-deazaguanine synthase OS=Leptospira gomenensis OX=2484974 GN=queE P E=3 SV=1
MDNLKTSVHEIYLSLSGEGISTGIPTVFVRMAGCSLRCGMVSGRKLWCDTPYALSPNAGESMNVQQTLRRIRELSPNDTQILLTGGEPLEGKNRDFSIALGNEIFETRKASGFFPRARVETNGAESIEGLDRFVFTLDYKLPGSGMEDRMNVKNLEIYRERKNDLDEIKFVIRDRADFDRCLEVIETFQLKGNLLASPVQGELSPRLLAEWIKSSLVYGLRLSLQTHKYIWGDQRGV

SEQ ID NO: 31135 - protein, 234 aa, Leptospira haakeii
  misc_feature (1)..(234): tr|A0A2N0C123|A0A2N0C123_9LEPT 7-carboxy-7-deazaguanine synthase OS=Leptospira haakeii OX=2023198 GN=queE PE=3 SV=1
MKSVVHEIYLSVSGEGISTGLPTIFVRFAGCSLRCGMDGSRKLWCDTPYALSPNAGKEMELEDVISEIGSISSSPTQILLTGGEPLENSNRIFSQTLAEKLKQSRHISGLYTRVRVETNGAEPISNLENMVFTLDYKLPGSGMENKMISENLEFVRDRNDNLDEIKFVIRDRKDFDRTLEVVDGFKLKGNLLASPVFGELAPEILVDWIKENNRTDLRLSLQTHKYIWGEKRGV

SEQ ID NO: 31136 - protein, 236 aa, Leptospira harrisiae
  misc_feature (1)..(236): tr|A0A2N0AGR9|A0A2N0AGR9_9LEPT 7-carboxy-7-deazaguanine synthase OS=Leptospira harrisiae OX=2023189 GN=queE PE =3 SV=1
MFGKIHEVYSSISGEGISQGIPTVFIRFAGCSLRCGKTDSRALWCDTAYALGPNQGIEKSLESIWLELENLDPHHGYQVLLTGGEPLEGKNRDLSITIANKIYKHRTSAGLPYPAARVETNGSEKITEDPYFIFTMDYKLPGSGMEDRMDQENFRILEKRHNSLDEIKFVVRDRIDFDRSIEVIREQKIHTNILYSPVHGEVDAKELVEWIKVDNPPKCRLSLQIHKVLWGNQKGV

SEQ ID NO: 31137 - protein, 234 aa, Leptospira hartskeerlii
  misc_feature (1)..(234): tr|A0A2M9X8W9|A0A2M9X8W9_9LEPT 7-carboxy-7-deazaguanine synthase OS=Leptospira hartskeerlii OX=2023177 GN=queE PE=3 SV=1
MKSVVHEIYLSVSGEGISTGLPTIFVRFAGCSLRCGMDGNRKLWCDTPYALSPNAGKQMELEDVISEIGSISSSPTQILLTGGEPLENSNRIFSQTMAEKLKQSRQVSGLYTRVRVETNGAEPISNLENMVFTLDYKLPGSGMENKMITENLEFVRDRNDNLDEIKFVIRDRKDFDRTLEVIDGFKLKGNLLASPVFGELAPEILVDWMKENNRTDLRLSLQTHKYIWGEKRGV

SEQ ID NO: 31138 - protein, 236 aa, Leptospira idonii
  misc_feature (1)..(236): tr|A0A4R9M309|A0A4R9M309_9LEPT 7-carboxy-7-deazaguanine synthase OS=Leptospira idonii OX=1193500 GN=queE PE=3 SV=1
MLGNIHEIYYSVSGEGISQGIPTVFVRFAGCSLRCGKTEDRKLWCDTAYALGPNQGKSISISEIFKEIQALDPKSSAQILLTGGEPLEGKNGEHTDTICRTLFHERSESNHPYPAPRIETNGKETLSLDADRVFTMDYKLPGSGMEEKMNLENFEILKKRHNSLDEIKFVVRDRYDFQRSLEILHEKKPNTNILYSPVHDELDAKELVDWIKIENPPKARLSLQIHKVLWGNKKGV

SEQ ID NO: 31139 - protein, 236 aa, Leptospira ilyithenensis
  misc_feature (1)..(236): tr|A0A4R9LU51|A0A4R9LU51_9LEPT 7-carboxy-7-deazaguanine synthase OS=Leptospira ilyithenensis OX=2484901 GN=que E PE=3 SV=1
MLGNVHEIYHSVSGEGISQGIPTIFIRFAGCSLRCGKTENKKLWCDTPYALGPNQGNSMDLDSIIKEVETIDPFGTSQILLTGGEPLEGKNGEMSSLICKYIFQTRIHTNKPYPAPRIETNGKETITDETDRVYTMDYKLPGSGMEERMEKENFSVLRKRHNILDEIKFVVRDRYDFERSLEVLREFSPDTNILYSPVFGEMDANELVEWIKKENPPKARLSLQIHKVLWGNKKGV

SEQ ID NO: 31140 - protein, 234 aa, Leptospira inadai
  misc_feature (1)..(234): tr|V6HHA0|V6HHA0_9LEPT 7-carboxy-7-deazaguanine synthas e OS=Leptospira inadai serovar Lyme str. 10 OX=1049790 GN=queE PE=3 SV=1
MKSVIHEIYLSVSGEGISTGLPTIFVRFAGCSLRCGMTGSKKLWCDTPYALSPNAGREMSIDEVVFEIRSLSHTSTQVLLTGGEPLENGKKDFSKILANRLREERNSSGNFPRVRVETNGAESIQDLADMVFTLDYKLPGSGMEDKMRVENFEFLRDRNDSLDEIKFVVRDREDFERAIDVVDRFQLKGNLLVSPVFNELSPELLVEWIKESGKRDLRLSLQTHKYIWGDKRGV

SEQ ID NO: 31141 - protein, 237 aa, Leptospira interrogans
  misc_feature (1)..(237): sp|Q8EZ24|QUEE_LEPIN 7-carboxy-7-deazaguanine synthase OS=Leptospira interrogans serogroup Icterohaemorrhagiae serovar Lai (strain 56601) OX=189518 GN=queE PE=3 SV=2
MDNLKTSVHEIYLSLSGEGISTGIPTIFVRMAGCSLRCGMTVGRKLWCDTPYALSPKAGEEMSVNQVLDKIQELSAVNIQILLTGGEPLEGRNREFSITLGNEIFRIRNSSGFYPRPRVETNGAESIEGMDQFVFTLDYKLPGSGMEDRMNLKNLEIYKERKNPLDEIKFVIRDKNDFERCLEIIEKHALVGNLLASPVQGELSPEILAEWIKYSLGSGLRLSIQTHKYIWGDQRGV

SEQ ID NO: 31142 - protein, 237 aa, Leptospira interrogans
  misc_feature (1)..(237): tr|A0A0E2D8B7|A0A0E2D8B7_LEPIR 7-carboxy-7-deazaguanine synthase OS=Leptospira interrogans str. UI 12758 OX=10 49938 GN=queE PE=3 SV=1
MDNLKTSVHEIYLSLSGEGISTGIPTIFVRMAGCSLRCGMTVGRKLWCDTPYALSSKAGEEMSVNQVLDKIQELSAVNIQILLTGGEPLEGRNREFSITLGNEIFRTRNSSGFYPRPRVETNGAESIEGMDQFVFTLDYKLPGSGMEDRMNLKNLEIYKERKNPLDEIKFVIRDKNDFERCLEIIEKHALVGNLLASPVQGELSPEILAEWIKYSLGSGLRLSIQTHKYIWGDQRGV

SEQ ID NO: 31143 - protein, 236 aa, Leptospira jelokensis
  misc_feature (1)..(236): tr|A0A5F2B910|A0A5F2B910_9LEPT 7-carboxy-7-deazaguanine synthase OS=Leptospira jelokensis OX=2484931 GN=queE P E=3 SV=1
MFGKIHEIYSSISGEGISQGIPTVFVRFAGCSLRCGKTETKSLWCDTPYALGPNQGETKTLPAILDEIKALDKDHGFQILLTGGEPLEGENRTLSISIAESIYSFRKEHNQPYPASRVETNGSERITMDPFFIFTMDYKLPGSGMENRMDLENFQILEKRHNSLDEIKFVVRDRIDFERSVEVIREQKIQTNILYSPVHGEVDAKELVEWIKIDNPPKSRLSLQIHKVLWGNQKGV

SEQ ID NO: 31144 - protein, 236 aa, Leptospira jelokensis
  misc_feature (1)..(236): tr|A0A4Z0ZZI3|A0A4Z0ZZI3_9LEPT 7-carboxy-7-deazaguanine synthase OS=Leptospira jelokensis OX=2484931 GN=queE P E=3 SV=1
MFGKIHEIYSSISGEGISQGIPTVFVRFAGCSLRCGKTETKSLWCDTPYALGPNQGETKTLPAILDEIKALDKDHGFQILLTGGEPLEGENRTLSISIAESIYSFRKEHNQPYPASRVETNGSEKITMDPFFIFTMDYKLPGSGMENRMDLENFQILEKRHNSLDEIKFVVRDRIDFERSVEVIREQKIQTNILYSPVHGEVDAKELVEWIKIDNPPKSRLSLQIHKVLWGNQKGV

SEQ ID NO: 31145 - protein, 198 aa, Leptospira johnsonii
  misc_feature (1)..(198): tr|A0A2P2D5T3|A0A2P2D5T3_9LEPT 7-carboxy-7-deazaguanine synthase OS=Leptospira johnsonii OX=1917820 GN=queE PE =3 SV=1
MDGDRKLWCDTPYALSPNAGKQMELEDVISEIGSISSSPTQILLTGGEPLENSNRIFSQTLAEKLKQSRQVSGLYTRVRVETNGAEPIRDLENMVFTLDYKLPGSGMENKMILDNLEFVRDRNDNLDEIKFVIRDRKDFDRTLEVIDGFKLKGNLLASPVFGELAPEILVDWIKENNRTDLRLSLQTHKYIWGEKRGV

SEQ ID NO: 31146 - protein, 236 aa, Leptospira kanakyensis
  misc_feature (1)..(236): tr|A0A4R9HNK3|A0A4R9HNK3_9LEPT 7-carboxy-7-deazaguanine synthase OS=Leptospira kanakyensis OX=2484968 GN=queE PE=3 SV=1
MFGKIHEVYSSISGEGISQGIPTVFIRFAGCSLRCGKTDSRALWCDTAYALGPNQGTEKSLDSLWSELESLDSHHGYQVLLTGGEPLEGKNRDLSTALAKRIYHFRTDQNLPYPASRVETNGSERITEDPFFIFTMDYKLPGSGMEDRMDQENFRILEKRHNSLDEIKFVVRDRIDFERSIEVIREKKIHTNILYSPVHGEVDAKELVEWIKVDNPPKCRLSLQIHKVLWGNQKGV

SEQ ID NO: 31147 - protein, 236 aa, Leptospira kemamanensis
  misc_feature (1)..(236): tr|A0A4R9JMM7|A0A4R9JMM7_9LEPT 7-carboxy-7-deazaguanine synthase OS=Leptospira kemamanensis OX=2484942 GN=queE PE=3 SV=1
MYGKIHEIYSSISGEGISQGIPTVFVRFAGCSLRCGKTETKQLWCDTPYALGPNQGETKPLASIIEEIEALDKDHGFQILLTGGEPLEGQNRDLSKSIAEFLFSYRTKENKPYPASRVETNGSEKITLDPYFIFTMDYKLPGSGMEDRMDLENFQILEKRHNSLDEIKFVVRDRIDFERSIEVIREQKIQTNILYSPVHGEVDAKELVEWIKIDNPPKCRLSLQIHKVLWGNQKGV

SEQ ID NO: 31148 - protein, 237 aa, Leptospira kirschneri
  misc_feature (1)..(237): tr|M6F2D9|M6F2D9_9LEPT 7-carboxy-7-deazaguanine synthas e OS=Leptospira kirschneri serovar Bulgarica str. Nikol aevo OX=1240687 GN=queE PE=3 SV=1
MDNLKTSVHEIYLSLSGEGISTGVPTIFVRMAGCSLRCGMVVGRKLWCDTPYALSSNAGEEMSVNQVLEKIQELSAVNIQILLTGGEPLEGRNREFSIALGNEIFRTRNSSGFYPRPRVETNGAESIEGMNQFVFTMDYKLPGSGMENRMCLKNLEIYKERKNPLDEIKFVIRDRKDFERCLEIIEKHALDGNLLASPVQGELSPEILSEWIKSSLGSGLRLSLQTHKYIWGDQRGV

SEQ ID NO: 31149 - protein, 237 aa, Leptospira kirschneri
  misc_feature (1)..(237): tr|M6IFM7|M6IFM7_9LEPT 7-carboxy-7-deazaguanine synthas e OS=Leptospira kirschneri serovar Bim str. 1051 OX=104 9941 GN=queE PE=3 SV=1
MDNLKTSVHEIYLSLSGEGISTGVPTIFVRMAGCSLRCGMVVGRKLWCDTPYALSSNAGEEMSVNQVLEKIQELSAVNIQILLTGGEPLEGRNREFSITLGNEIFRTRNSSGFYPRPRVETNGAESIEGMNQFVFTMDYKLPGSGMENRMCLKNLEIYKERKNPLDEIKFVIRDRKDFERCLEIIEKHALDGNLLASPVQGELSPEILSEWIKSSLGSGLRLSLQTHKYIWGDQRGV

SEQ ID NO: 31150 - protein, 237 aa, Leptospira kmetyi
  misc_feature (1)..(237): tr|A0A2M9XRN7|A0A2M9XRN7_9LEPT 7-carboxy-7-deazaguanine synthase OS=Leptospira kmetyi OX=408139 GN=queE PE=3 S V=1
MDNLKTSVHEIYLSLSGEGISTGIPTVFVRMAGCSLRCGMAVGRKLWCDTPYALSPNAGEESNLNQVLDKIQELSPVNTQILLTGGEPLEGKNRDFSIALGNEIFRTRNSSGLYPRPRVETNGAESIKGLDRFVFTLDYKLPGSGMEDRMNLKNLEIYKQRNEVLDEIKFVIRDRTDFERCIEVIETYKLSGNLLASPVQGELSPEVLAEWMKSFLGSGLRLSLQTHKYIWGDRRGV

SEQ ID NO: 31151 - protein, 236 aa, Leptospira kobayashii
  misc_feature (1)..(236): tr|A0A2P2DSN5|A0A2P2DSN5_9LEPT 7-carboxy-7-deazaguanine synthase OS=Leptospira kobayashii OX=1917830 GN=queE P E=3 SV=1
MLGNVHEIYHSVSGEGISQGIPTIFIRFAGCSLRCGKTENKKLWCDTPYALGPNQGKSMDLDSIIKEMETIDPFHASQILLTGGEPLEGKNGEMSSLLCKHIYQTRIHANKPYPAPRIETNGKERINDEINRVYTMDYKLPGSGMEDQMEKENFSVLRKRHNILDEIKFVVRDRYDFERSLEVLREFSPDTNILYSPVFGEMDANELVEWIKKENPPKARLSLQIHKVLWGNKKGV

SEQ ID NO: 31152 - protein, 234 aa, Leptospira koniamboensis
  misc_feature (1)..(234): tr|A0A4R9J8L8|A0A4R9J8L8_9LEPT 7-carboxy-7-deazaguanine synthase OS=Leptospira koniamboensis OX=2484950 GN=que E PE=3 SV=1
MKSVVHEIYLSVSGEGISTGLPTIFVRFAGCSLRCGMDGNRKLWCDTPYALSPNAGKELELEDVISEIGSISSSPTQILLTGGEPLENSNRIFSQTLAKKFQQSRQVSGLYTRVRVETNGAEPISNLENMVFTLDYKLPGSGMENKMITENLEFVRDRNDNLDEIKFVIRDRKDFDRTLEVIDGFKLKGNLLASPVFGELAPEILVDWIKENNRTDLRLSLQTHKYIWGEKRGV

SEQ ID NO: 31153 - protein, 234 aa, Leptospira langatensis
  misc_feature (1)..(234): tr|A0A5F1ZTC2|A0A5F1ZTC2_9LEPT 7-carboxy-7-deazaguanine synthase OS=Leptospira langatensis OX=2484983 GN=queE PE=3 SV=1
MKTVVHEIYLSVSGEGISTGLPTIFVRFAGCSLRCGMDGTRRLWCDTPYALSPNAGKEMDLDEALAEIRLISKTPTQILLTGGEPLEDLNRVFSISLAKELRRDRESLGTYTRVRVETNGAQPIRDLEDMVFTLDYKLPGSGMEDRMIADNVKYIRDRKDALDEIKFVIRDRVDFDRTLQVIDTYSLQGNLLASPVFGELHPETLVDWIKEGGRTDLRLSLQTHKYIWGDKRGV

SEQ ID NO: 31154 - protein, 236 aa, Leptospira levettii
  misc_feature (1)..(236): tr|A0A5F2D8K2|A0A5F2D8K2_9LEPT 7-carboxy-7-deazaguanine synthase OS=Leptospira levettii OX=2023178 GN=queE PE= 3 SV=1
MYGKIHEIYSSISGEGISQGIPTVFVRFAGCSLRCGKTDTRTLWCDTPYALGPNQGESKSFVSIMEEIEQYDKDHGFQILLTGGEPLEGQNRDLSINIAEHIFTYRTKNGKPYPASRVETNGSEKITLDPFFIFTMDYKLPGSGMENRMDSENFKILEKRHNSLDEIKFVVRDRIDFDRSIEVIREQKIQTNILYSPVHGEVDAKELVEWIKIDNPPKCRLSLQIHKVLWGNQKGV

SEQ ID NO: 31155 - protein, 236 aa, Leptospira levettii
  misc_feature (1)..(236): tr|A0A5F2AJH1|A0A5F2AJH1_9LEPT 7-carboxy-7-deazaguanine synthase OS=Leptospira levettii OX=2023178 GN=queE PE= 3 SV=1
MYGKIHEIYSSISGEGISQGIPTVFVRFAGCSLRCGKTDTRTLWCDTPYALGPNQGESKSFVSIMEEIEQYDKDHGFQILLTGGEPLEGQNRDLSINIAEHIFTYRTKNGKPYPASRVETNGSEKITLDPYFIFTMDYKLPGSGMENRMDSENFKILEKRHNSLDEIKFVVRDRIDFDRSIEVIREQKIQTNILYSPVHGEVDAKELVEWIKIDNPPKCRLSLQIHKVLWGNQKGV

SEQ ID NO: 31156 - protein, 234 aa, Leptospira licerasiae
  misc_feature (1)..(234): tr|A0A5F2DY09|A0A5F2DY09_9LEPT 7-carboxy-7-deazaguanine synthase OS=Leptospira licerasiae OX=447106 GN=queE PE =3 SV=1
MKSVVHEIYLSVSGEGISTGLPTIFVRFAGCSLRCGMDGNRKLWCDTPYALSPNAGKQMELEEVIAEIGSISSSPTQILLTGGEPLENSNRIFSQTLAEKLKQSRQVSGMYTRVRVETNGAEPISNLENMVFTLDYKLPGSGMENKMILENLEFVRDRNDNLDEIKFVIRDRKDFDRTLEVIDRFKLKGNLLASPVFGELAPEILVDWIKENNRTDLRLSLQTHKYIWGEKRGV

SEQ ID NO: 31157 - protein, 234 aa, Leptospira licerasiae
  misc_feature (1)..(234): tr|I0XTY3|I0XTY3_9LEPT 7-carboxy-7-deazaguanine synthas e OS=Leptospira licerasiae serovar Varillal str. VAR 01 0 OX=1049972 GN=queE PE=3 SV=1
MKSVVHEIYLSVSGEGISTGLPTIFVRFAGCSLRCGMDGNRKLWCDTPYALSPNAGKQMELEEVISKIGSISSSPTQILLTGGEPLENSNRIFSQTLAEKLKQSRQVSGMYTRVRVETNGAEPISNLENMVFTLDYKLPGSGMENKMILENLEFVRDRNDNLDEIKFVIRDRKDFDRTLEVIDRFKLKGNLLASPVFGELAPEILVDWIKENNRTDLRLSLQTHKYIWGEKRGV

SEQ ID NO: 31158 - protein, 236 aa, Leptospira macculloughii; identical to SEQ ID NO: 31154
  misc_feature (1)..(236): tr|A0A2N0CIM9|A0A2N0CIM9_9LEPT 7-carboxy-7-deazaguanine synthase OS=Leptospira macculloughii OX=2023202 GN=que E PE=3 SV=1

SEQ ID NO: 31159 - protein, 236 aa, Leptospira macculloughii
  misc_feature (1)..(236): tr|A0A2N0C993|A0A2N0C993_9LEPT 7-carboxy-7-deazaguanine synthase OS=Leptospira macculloughii OX=2023202 GN=que E PE=3 SV=1
MFGKIHEVYSSISGEGISQGIPTVFIRFAGCSLRCGKTESRALWCDTAYALGPNQGTEKNLDSIWNELESLDPHHGYQVLLTGGEPLEGKNRDLSLSIANKIYQYRTKTGLPYPASRIETNGSERITEDAFFIFTMDYKLPGSGMEDRMDEENFQILEKRHNSLDEIKFVVRDRIDFERSIEVIREKKIHTNILYSPVHGEVDAKELVEWIKVDNPPKCRLSLQIHKVLWGNQKGV

SEQ ID NO: 31160 - protein, 241 aa, Leptospira mayottensis
  misc_feature (1)..(241): tr|A0A3Q9DSK2|A0A3Q9DSK2_9LEPT 7-carboxy-7-deazaguanine synthase OS=Leptospira mayottensis 200901116 OX=119286 4 GN=queE PE=3 SV=1
MKEPMDNLKTSVHEIYLSLSGEGISTGIPTVFVRMAGCSLRCGMATERKLWCDTPYALSARAGEEMDLKRVLNRIQELSPIYTQVLLTGGEPLEGRNRDFSFVLGNEIFKTRQSSNLYPRPRVETNGAESIEGLDQFVFTLDYKLPGSGMENRMNLKNLEIYNKRKNKLDEIKFVIRDRNDFERCLEVIKTHQLSGNLLASPVQGELSPEILSEWLKSSLSSGLRLSLQTHKYIWGDKRGV

SEQ ID NO: 31161 - protein, 241 aa, Leptospira mayottensis; identical to SEQ ID NO: 31160
  misc_feature (1)..(241): tr|A0A5F2EG81|A0A5F2EG81_9LEPT 7-carboxy-7-deazaguanine synthase OS=Leptospira mayottensis OX=1137606 GN=queE PE=3 SV=1

SEQ ID NO: 31162 - protein, 236 aa, Leptospira meyeri
  misc_feature (1)..(236): tr|A0A5F2D7L3|A0A5F2D7L3_LEPME 7-carboxy-7-deazaguanine synthase OS=Leptospira meyeri OX=29508 GN=queE PE=3 SV =1
MFGKIHEVYSSISGEGISQGIPTVFIRFAGCSLRCGKTETRALWCDTAYALGPNQGTEKNLDSIWNELESLDPHHGYQVLLTGGEPLEGKNRDLSLSIANKIYQFRTNAGLPYPASRVETNGSERITEDAFFIFTMDYKLPGSGMEDRMDEENFQILEKRHNSLDEIKFVVRDRIDFERSIEVIREKKIHTNILYSPVHGEVDAKELVEWIKVDNPPKCRLSLQIHKVLWGNQKGV

SEQ ID NO: 31163 - protein, 236 aa, Leptospira meyeri
  misc_feature (1)..(236): tr|A0A5F1ZKZ1|A0A5F1ZKZ1_LEPME 7-carboxy-7-deazaguanine synthase OS=Leptospira meyeri OX=29508 GN=queE PE=3 SV =1
MFGKIHEVYSSISGEGISQGIPTVFIRFAGCSLRCGKTESRALWCDTAYALGPNQGTEKNLDSIWNELESLDPHHGYQVLLTGGEPLEGKNRDLSISIANKIYQYRTNAGLPYPASRVETNGSERITEDTFFIFTMDYKLPGSGMEERMDEENFQILEKRHNSLDEIKFVVRDRIDFERSIEVIREKKIHTNILYSPVHGEVDAKELIEWIKVDNPPKCRLSLQIHKVLWGNQKGV

SEQ ID NO: 31164 - protein, 236 aa, Leptospira montravelensis
  misc_feature (1)..(236): tr|A0A4Z0ZPS2|A0A4Z0ZPS2_9LEPT 7-carboxy-7-deazaguanine synthase OS=Leptospira montravelensis OX=2484961 GN=qu eE PE=3 SV=1
MFGKIHEIYSSISGEGISQGIPTVFIRFAGCSLRCGKTESRSLWCDTAYALGPNQGEEKSLESIWMDLENLDPHHGYQVLLSGGEPLEGKNRDLSISIANKIYKHRTEAGLPYPAARVETNGSERITEDAFFIFTMDYKLPGSGMEDRMDLENFRILEKRHNSLDEIKFVVRDRIDFDRSIEVIREQKIHTNILYSPVHGEVDAKELVEWIKVDNPPKCRLSLQIHKVLWGNQKGV

SEQ ID NO: 31165 - protein, 236 aa, Leptospira mtsangambouensis
  misc_feature (1)..(236): tr|A0A5F2DE37|A0A5F2DE37_9LEPT 7-carboxy-7-deazaguanine synthase OS=Leptospira mtsangambouensis OX=2484912 GN= queE PE=3 SV=1
MFGKIHEVYSSISGEGISQGIPTVFIRFAGCSLRCGKTESRTLWCDTAYALGPNQGSEKSLDSIWAELENLDPHHGYQVLLTGGEPLEGKNRDLSLSIANKIYQYRTNAGLPYPASRVETNGSERITEDPFFIFTMDYKLPGSGMEDRMDEENFQILEKRHNSLDEIKFVVRDRIDFERSIEVIREKKIHTNILYSPVHGEVDAKELVEWIKVDNPPKCRLSLQIHKVLWGNQKGV

SEQ ID NO: 31166 - protein, 234 aa, Leptospira neocaledonica
  misc_feature (1)..(234): tr|A0A2N0A0J6|A0A2N0A0J6_9LEPT 7-carboxy-7-deazaguanine synthase OS=Leptospira neocaledonica OX=2023192 GN=que E PE=3 SV=1
MKSVVHEIYLSVSGEGISTGLPTIFVRFAGCSLRCGMDGNRKLWCDTPYALSPNAGKHMELEDVISEIGSISSSPTQILLTGGEPLENSNRIFSQTLAEKLKQSRQVSGLYTRVRVETNGAEPISGLENMVFTLDYKLPGSGMENKMILDNLKFVRDRNDNLDEIKFVIRDRKDFDRTLEVINDFKLKGNLLASPVFGELAPEILIDWIKENNRTDLRLSLQTHKYIWGEKRGV

SEQ ID NO: 31167 - protein, 237 aa, Leptospira noguchii
  misc_feature (1)..(237): tr|M6YEL0|M6YEL0_9LEPT 7-carboxy-7-deazaguanine synthas e OS=Leptospira noguchii str. 2001034031 OX=1193053 GN= queE PE=3 SV=1
MDNLKTSIHEIYLSLSGEGISTGIPTIFVRMAGCSLRCGMAVGRKLWCDTPYALSPKAGEEMSVNQVLDKIQELSVVNIQILLTGGEPLEGRNREFSITLGNEIFRTRNSSGPYPRPRVETNGAESIEGMDQFVFTMDYKLPGSGMEDRMNLKNLEIYKERKNPLDEIKFVIRDKKDFERCLEIIEKHALVGNLLASPVQGELPPEILSEWMKSSLGSGLRLSLQTHKYIWGDQRGV

SEQ ID NO: 31168 - protein, 237 aa, Leptospira noguchii
  misc_feature (1)..(237): tr|T0FPX3|T0FPX3_9LEPT 7-carboxy-7-deazaguanine synthas e OS=Leptospira noguchii serovar Panama str. CZ214 OX=1 001595 GN=queE PE=3 SV=1
MDNLKTSIHEIYLSLSGEGISTGIPTIFVRMAGCSLRCGMVVGRKLWCDTPYALSPKAGEEMSVNQVLDKIQELSVVNIQILLTGGEPLEGRNREFSITLGNEIFRTRNSSSPYPRPRVETNGAELIEGMDQFVFTMDYKLPGSGMEDRMNLKNLEIYKERKNPLDEIKFVIRDKKDFERCLEIIEKHALVGNLLASPVQGELSPEILSEWMKSSLGSGLRLSLQTHKYIWGDQRGV

SEQ ID NO: 31169 - protein, 236 aa, Leptospira noumeaensis
  misc_feature (1)..(236): tr|A0A4R9I6U3|A0A4R9I6U3_9LEPT 7-carboxy-7-deazaguanine synthase OS=Leptospira noumeaensis OX=2484964 GN=queE PE=3 SV=1
MFGKIHEVYSSISGEGISQGIPTVFIRFAGCSLRCGKTESKALWCDTAYALGPNQGTEKSLDSLWLELESLDPHHGYQVLLTGGEPLEGKNRDLSISLANKIYEHRTKASLPYPAARVETNGSERISEDPFFIFTMDYKLPGSGMEDRMDQENFRILEKRHNSLDEIKFVVRDRIDFERSIEVIREQKIHTNILYSPVHGEVDAKELVEWIKVDNPPKCRLSLQIHKVLWGNQKGV

SEQ ID NO: 31170 - protein, 236 aa, Leptospira ognonensis
  misc_feature (1)..(236): tr|A0A4R9KAR0|A0A4R9KAR0_9LEPT 7-carboxy-7-deazaguanine synthase OS=Leptospira ognonensis OX=2484945 GN=queE P E=3 SV=1
MFGKIHEIYDSISGEGISQGIPTQFIRFAGCSLRCGKVGDKKLWCDTPYALGPEQGEHKSLEEILAQLLQNDPHHQKQIIITGGEPLEGKNGLLTRSLSDHIYRFRIQEQFPYPASRIETNGKEEIDEKPSRVFTMDYKLPGSGMESEMHIENFEILKKRHNSLDEIKFVIRDRIDFQRSLEILHEKKPDTNILFSPVHEDLDAKELVEWLKVANPPKSRLSLQIHKFLWGNKKGV

SEQ ID NO: 31171 - protein, 236 aa, Leptospira perdikensis
  misc_feature (1)..(236): tr|A0A4R9JI89|A0A4R9JI89_9LEPT 7-carboxy-7-deazaguanine synthase OS=Leptospira perdikensis OX=2484948 GN=queE PE=3 SV=1
MFGKIHEVYSSISGEGISQGIPTVFIRFAGCSLRCGKTETRALWCDTAYALGPNQGEEKTLDTIWTELETLDSHHGYQVLLTGGEPLEGKNRDLSTSLANRIYNHRISHNLPYPASRVETNGSERITEDSFFIFTMDYKLPGSGMEERMDQENFRILEKRHNSLDEIKFVVRDRIDFDRSIEVIREQKIQTNILYSPVHGEVDAKELVEWIKVDNPPKCRLSLQIHKVLWGNQKGV

SEQ ID NO: 31172 - protein, 234 aa, Leptospira perolatii
  misc_feature (1)..(234): tr|A0A2M9ZKW5|A0A2M9ZKW5_9LEPT 7-carboxy-7-deazaguanine synthase OS=Leptospira perolatii OX=2023191 GN=queE PE =3 SV=1
MKSSVYEIYLSISGEGISAGIPTVFVRFAGCSLRCGMVGDRKLWCDTPYALSPNSGKEKDLAEVLNEIEGFSEAPTQVLLTGGEPLEGSNRGFSQALATSLSESRKALDLYRRVRVETNGAEALRGLENMVFTMDYKLPGSGMEDRMLLDNLRYLKERNDPLDEIKFVIRDRSDFERTLEVINQYELSGNLLASPVYGELDAETLIDWIKESSKKNLRLSLQVHKFIWGERRGV

SEQ ID NO: 31173 - protein, 237 aa, Leptospira putramalaysiae
  misc_feature (1)..(237): tr|A0A4R9LBB9|A0A4R9LBB9_9LEPT 7-carboxy-7-deazaguanine synthase OS=Leptospira putramalaysiae OX=2484984 GN=qu eE PE=3 SV=1
MDNLKTSVHEIYLSLSGEGISTGLPTVFVRMAGCSLRCGMAMGRKLWCDTPYALSPNAGEELDLQEVLKRIRELSPVDTQILLTGGEPLEGRNRDFSVAFGNEIFRTRNLSGSFPKPRVETNGAESIEGLDSFVFTLDYKLPGSGMEDRMLLKNLEIYKDRKNSLDEIKFVIRDRMDFDRCVEVIQNFGLTGNLLASPVQNELSPELLSEWIKSSLSSGLRLSLQTHKYIWGDQRGV

SEQ ID NO: 31174 - protein, 236 aa, Leptospira ryugenii
  misc_feature (1)..(236): tr|A0A2P2E3H1|A0A2P2E3H1_9LEPT 7-carboxy-7-deazaguanine synthase OS=Leptospira ryugenii OX=1917863 GN=queE PE= 3 SV=1
MLGYVHEIYESISGEGISQGIPTIFVRFAGCSLRCGLTKEKKLWCDTPYALGPKQGKELGIEQILESLSQFPQADKKQILITGGEPLEGENGTKTRALSERIYSYRTSHSLPYPASRIETNGKELIDFSESRVYTLDYKLPGSGMESEMHRENFEILKKRHNILDEIKFVVRDRYDFQRSLEIIGETNTDANILFSAVFEDLDPKELVEWLKIANPPKARLSLQIHKFLWGNQKGV

SEQ ID NO: 31175 - protein, 234 aa, Leptospira saintgironsiae
  misc_feature (1)..(234): tr|A0A2M9YFI2|A0A2M9YFI2_9LEPT 7-carboxy-7-deazaguanine synthase OS=Leptospira saintgironsiae OX=2023183 GN=qu eE PE=3 SV=1
MKSVVHEIYLSVSGEGISTGLPTIFVRFAGCSLRCGMDGNRKLWCDTPYALSPNAGKELELEDVISEIGSISSSPTQILLTGGEPLENSNRIFSQTLAEKLKQSRQVSGLYTRVRVETNGAEPISNLENMVFTLDYKLPGSGMENKMITENLEFVRDRNDNLDEIKFVIRDRKDFDRTLEVIDGFKLKGNLLASPVFGELAPEILVNWIKENNRTDLRLSLQTHKYIWGEKRGV

SEQ ID NO: 31176 - protein, 243 aa, Leptospira santarosai
  misc_feature (1)..(243): tr|M6Z384|M6Z384_9LEPT 7-carboxy-7-deazaguanine synthas e OS=Leptospira santarosai str. 200702252 OX=1049977 GN =queE PE=3 SV=1
MYLKELVDNLKTSVHEIYLSLSGEGISTGIPTVFVRMAGCSLRCGMSAGRKLWCDTPYALSSSAGEEMDLKRVLNRIRELSPIYTQILLTGGEPLEGRNRDFSLALGNEIFRTRQSSGLYPRPRVETNGAESIEGLDRFVFTLDYKLPGSGMEKRMNLENLEIYNKRKNELDEIKFVIRDRDDFERCLEVIKTHRLSGNLLASPVQGELSPEILAEWLKSSLGSGLRLSLQTHKYIWGDKRGV

SEQ ID NO: 31177 - protein, 241 aa, Leptospira santarosai
  misc_feature (1)..(241): tr|A0A1V2ER31|A0A1V2ER31_9LEPT 7-carboxy-7-deazaguanine synthase OS=Leptospira santarosai OX=28183 GN=queE PE= 3 SV=1
MKEPVDNLKTSVHEIYLSLSGEGISTGIPTVFVRMAGCSLRCGMSAGRKLWCDTPYALSSSAGEEMDLKRVLNRIRELSPIYTQILLTGGEPLEGRNRDFSLALGNEIFRTRQSSGLYPRPRVETNGAESIEGLDRFVFTLDYKLPGSGMEKRMNLENLEIYNKRKNELDEIKFVIRDRDDFERCLEVIKTHRLSGNLLASPVQGELSPEILAEWLKSSLGSGLRLSLQTHKYIWGDKRGV

SEQ ID NO: 31178 - protein, 234 aa, Leptospira sarikeiensis
  misc_feature (1)..(234): tr|A0A4V3JRM3|A0A4V3JRM3_9LEPT 7-carboxy-7-deazaguanine synthase OS=Leptospira sarikeiensis OX=2484943 GN=queE PE=3 SV=1
MKSVVHEIYLSVSGEGISTGLPTIFVRFAGCSLRCGMDGNRKLWCDTPYALSSKAGKSMDLEEVISEIGNLSRTPVQILLTGGEPLENSNRIFSLALAEKLKQARETSGIYTRVRVETNGAEPIGDLDNMVFTLDYKLPGSGMEDKMISDNLKFVRDRKEPLDEVKFVIRDRKDFERTLEVVDTFGLKGNLLASPVFGELHPETLVDWIKENNRTDLRLSLQTHKYIWGEKRGV

SEQ ID NO: 31179 - protein, 234 aa, Leptospira selangorensis
  misc_feature (1)..(234): tr|A0A4R9GCC4|A0A4R9GCC4_9LEPT 7-carboxy-7-deazaguanine synthase OS=Leptospira selangorensis OX=2484982 GN=que E PE=3 SV=1
MKSVVHEIYLSVSGEGISTGLPTIFVRFAGCSLRCGMDGSRKLWCDTPYALSPNAGKEMELEDVISEIGSISSTPIQILLTGGEPLENSNRIFSQTLAEKLKQSRQVSGLYTRVRVETNGAEPISNLENMVFTLDYKLPGSGMENKMILENLEFVRDRRDNLDEIKFVIRDRKDFDRTLEVIDGFKLKGNLLASPVFGELTPEILVDWIKENNRTDLRLSLQTHKYIWGEKRGV

SEQ ID NO: 31180 - protein, 234 aa, Leptospira semungkisensis
  misc_feature (1)..(234): tr|A0A4R9G7Y7|A0A4R9G7Y7_9LEPT 7-carboxy-7-deazaguanine synthase OS=Leptospira semungkisensis OX=2484985 GN=qu eE PE=3 SV=1
MKTVVHEIYLSVSGEGISTGLPTIFVRFAGCSLRCGMDGSRKLWCDTPYALSSKAGKEMDLDEVLAEIHLISKTPTQVLLTGGEPLEDLNGVFSQSLAKELKRERENLGIYTRVRVETNGAESIRNLEDMVFTLDYKLPGSGMESRMIADNVEFIRDRKDPLDEIKFVIRDRADFDRTLQIVDRFSLQGNLLASPVFGELHPETLVDWLKEEGRTDLRLSLQTHKYIWGEKRGV

SEQ ID NO: 31181 - protein, 243 aa, Leptospira sp.
  misc_feature (1)..(243): tr|M5V4X2|M5V4X2_9LEPT 7-carboxy-7-deazaguanine synthas e OS=Leptospira sp. Fiocruz LV4135 OX=1193013 GN=queE P E=3 SV=1
MYLKEPVDNLKTSVHEIYLSLSGEGISTGIPTVFVRMAGCSLRCGMSAGRKLWCDTPYALSSSAGGEMDLKRVLNRIRELSPIYTQILLTGGEPLEGRNRDFSLALGNEIFRTRQSSGLYPRPRVETNGAESIEGLDRFVFTLDYKLPGSGMEKRMNLENLEIYNKRKNELDEIKFVIRDRDDFERCLEVIKTHRLSGNLLASPVQGELSPGILAEWLKSSLGSGLRLSLQTHKYIWGDKRGV

SEQ ID NO: 31182 - protein, 259 aa, Leptospira sp.
  misc_feature (1)..(259): tr|M6EE94|M6EE94_9LEPT 7-carboxy-7-deazaguanine synthas e OS=Leptospira sp. serovar Kenya str. Sh9 OX=1242991 G N=queE PE=3 SV=1
MPFYFFTVLLFAQRKTLYLKEPMDNLKTSVHEIYLSLSGEGISTGIPTVFVRMAGCSLRCGMAIGKKLWCDTPYALSPSAGEEMDLKRVLNRIQELSPIYTQVLLTGGEPLEGRNRDFSLALGNEIFRTRKFSNSYPRARVETNGAESIEGLDQFVFTLDYKLPGSGMENRMNLENLEIYNKRKNELDEIKFVIRDRNDFERCLEVIKVHELSGNLLASPVQGELSPEILSEWLKSSLGSRLRLSLQTHKYIWGDKRGI

SEQ ID NO: 31183 - protein, 237 aa, Leptospira stimsonii
  misc_feature (1)..(237): tr|A0A396Z8L6|A0A396Z8L6_9LEPT 7-carboxy-7-deazaguanine synthase OS=Leptospira stimsonii OX=2202203 GN=queE PE =3 SV=1
MNNLKTSVHEIYLSLSGEGISTGLPTVFVRMAGCSLRCGMAVGRKLWCDTPYALSPNAGEELDLEEVLKRIRELSPVDTQILLTGGEPLEGRNRNFSVALGNEILRTRNHSGSYPRPRVETNGAESIEGLDSFVFTLDYKLPGSGMEDRMLLKNLEIYKDRKNSLDEIKFVIRDRMDFDRCVEVIQNFGLTGNLLASPVQSELSPELLSEWIKSSLRSGLRLSLQTHKYIWGDQRGV

SEQ ID NO: 31184 - protein, 237 aa, Leptospira stimsonii; identical to SEQ ID NO: 31173
  misc_feature (1)..(237): tr|A0A5E8TS63|A0A5E8TS63_9LEPT 7-carboxy-7-deazaguanine synthase OS=Leptospira stimsonii OX=2202203 GN=queE PE =3 SV=1

SEQ ID NO: 31185 - protein, 236 aa, Leptospira terpstrae
  misc_feature (1)..(236): tr|N1VS42|N1VS42_9LEPT 7-carboxy-7-deazaguanine synthas e OS=Leptospira terpstrae serovar Hualin str. LT 11-33 = ATCC 700639 OX=1257025 GN=queE PE=3 SV=1
MFGKIHEVYSSISGEGISQGIPTVFIRFAGCSLRCGKTETRALWCDTAYALGPNQGEEKSLETVWNELVTLDSHHGYQVLLTGGEPLEGKNRDLSVAIAKRIYEHRMNFGRPYPAPRVETNGSEQITDDSFFVFTMDYKLPGSGMEDRMNQENFRILEKRHNSLDEIKFVVRDRIDFDRSIEVIREQKIQTNILYSPVHGEVDAKELVEWIKVDNPPKCRLSLQIHKVLWGNQKGV

SEQ ID NO: 31186 - protein, 237 aa, Leptospira tipperaryensis
  misc_feature (1)..(237): tr|A0A1D7USS6|A0A1D7USS6_9LEPT 7-carboxy-7-deazaguanine synthase OS=Leptospira tipperaryensis OX=2564040 GN=qu eE PE=3 SV=1
MNNLKTSVHEIYLSLSGEGISTGLPTVFVRMAGCSLRCGMTTGRKLWCDTPYALSPNAGEELDLEQVLKQVRELSPVDTQILLTGGEPLEGRNRDFSVAFGNEIFRTRNQSGSYPRPRVETNGAESIEGLDSFVFTLDYKLPGSGMEDRMLLKNLEIYKDRKNDLDEIKFVIRDRMDFDRCVEVIQEFRLFGNLLASPVQGELSPELLSEWIKSSLGSGLRLSLQTHKYIWGDQRGV

SEQ ID NO: 31187 - protein, 236 aa, Leptospira vanthielii
  misc_feature (1)..(236): tr|N1WEE4|N1WEE4_9LEPT 7-carboxy-7-deazaguanine synthas e OS=Leptospira vanthielii serovar Holland str. Waz Hol land = ATCC 700522 OX=1218591 GN=queE PE=3 SV=1
MFGKIHEVYSSISGEGISQGIPTVFIRFAGCSLRCGKTETRALWCDTAYALGPNQGEEKTLDSVWNDLEKLDPRHGYQVLLTGGEPLEGKNRDLSVALAKRIYEHRMNFGRPYPASRVETNGSERITEDSFFIFTMDYKLPGSGMENRMDQENFRILEKRHNSLDEIKFVVRDRIDFERSIEVIREQKIQTNILYSPVHGEVDAKELVEWIKVDNPPKCRLSLQIHKVLWGNQKGV

SEQ ID NO: 31188 - protein, 236 aa, Leptospira vanthielii; identical to SEQ ID NO: 31187
  misc_feature (1)..(236): tr|A0A4R9LCW4|A0A4R9LCW4_9LEPT 7-carboxy-7-deazaguanine synthase OS=Leptospira vanthielii OX=293085 GN=queE PE =3 SV=1

SEQ ID NO: 31189 - protein, 243 aa, Leptospira weilii
  misc_feature (1)..(243): tr|M6G187|M6G187_9LEPT 7-carboxy-7-deazaguanine synthas e OS=Leptospira weilii str. 2006001855 OX=996804 GN=que E PE=3 SV=1
MYLKEPMDNLKTSVHEIYLSLSGEGISTGIPTVFVRMAGCSLRCGMVTGKKLWCDTPYALSPSAGEEMDLKRVLNRIQELSPICTQVLLTGGEPLEGRNRDFSLALGDEIFRTRKSSNSYPRPRVETNGAESIEGLDQFVFTLDYKLPGSGMESRMNLRNLEIYNKRKNELDEIKFVIRDRNDFERCLEVIEAHRLSGNLLASPVQGELSPEILSEWLKSSLSSGLRLSLQTHKYIWGDKRGV

SEQ ID NO: 31190 - protein, 259 aa, Leptospira weilii
  misc_feature (1)..(259): tr|M6LIP0|M6LIP0_9LEPT 7-carboxy-7-deazaguanine synthas e OS=Leptospira weilii str. LNT 1234 OX=1088541 GN=queE PE=3 SV=1
MSFYFFTILLFARRKTLYLKEPMDNLKTSVHEIYLSLSGEGISTGIPTVFVRMAGCSLRCGMVTGKKLWCDTPYALSPSAGEEMDLKRVLNRIQELSPICTQVLLTGGEPLEGRNRDFSLALGDEIFRTRKSSNSYPRPRVETNGAESIEGLDQFVFTLDYKLPGSGMESRMNLRNLEIYNKRKNELDEIKFVIRDRNDFERCLEVIEAHRLSGNLLASPVQGELSPEILSEWLKSSLSSGLRLSLQTHKYIWGDKRGV

SEQ ID NO: 31191 - protein, 236 aa, Leptospira wolbachii
  misc_feature (1)..(236): tr|R9A2D7|R9A2D7_9LEPT 7-carboxy-7-deazaguanine synthas e OS=Leptospira wolbachii serovar Codice str. CDC OX=12 18599 GN=queE PE=3 SV=1
MFGKIHEVYSSISGEGISQGIPTVFIRFAGCSLRCGKTETRALWCDTAYALGPNQGEEKTLESVWNDLEKLDPHHGYQVLLTGGEPLEGKNRDLSTALAKQIYEHRMNVGRPYPASRVETNGSERITEDSFFIFTMDYKLPGSGMEDRMDQENFRILEKRHNSLDEIKFVVRDRIDFDRSIEVIREQKIQTNILYSPVHGEVDAKELVEWIKVDNPPKCRLSLQIHKVLWGNQKGV

SEQ ID NO: 31192 - protein, 244 aa, Leptospira wolffii
  misc_feature (1)..(244): tr|S3ULZ2|S3ULZ2_9LEPT 7-carboxy-7-deazaguanine synthas e OS=Leptospira wolffii serovar Khorat str. Khorat-H2 O X=1193069 GN=queE PE=3 SV=1
MYQGDLLPIMKTVVHEIYLSVSGEGISTGLPTVFVRFAGCSLRCGMDGTRKLWCDTPYALSHKAGTEMSLEEVLAQVERLSLAPTQVLLTGGEPLEKSNRDFSQALATELFERRKKIGKFTRVRVETNGAEPIRGLEHMIFTLDYKLPGSGMESKMISENLNDLREKGDDLDEVKFVIRDKNDFDRTLEVVDAFSLSGANLLVSPVFGELSPETLVDWMKESSRMDLRLSLQTHKYVWGEKRGV

SEQ ID NO: 31193 - protein, 235 aa, Leptospira wolffii
  misc_feature (1)..(235): tr|A0A2M9ZFF5|A0A2M9ZFF5_9LEPT 7-carboxy-7-deazaguanine synthase OS=Leptospira wolffii OX=409998 GN=queE PE=3 SV=1
MKTVVHEIYLSVSGEGISTGLPTVFVRFAGCSLRCGMDGTRKLWCDTPYALSHKAGTEMSLEEVLAQVEKLSLAPTQVLLTGGEPLEKSNRDFSQALATELFERRKKIGKFTRVRVETNGAEPIRGLEHMIFTLDYKLPGSGMESKMISENLNDLREKGDDLDEVKFVIRDKKDFDRTLEVVDAFSLSGVNLLVSPVFGELSPETLVDWIKESSRTDLRLSLQTHKYVWGEKRGV

SEQ ID NO: 31194 - protein, 236 aa, Leptospira yanagawae
  misc_feature (1)..(236): tr|A0A4R9IZ55|A0A4R9IZ55_9LEPT 7-carboxy-7-deazaguanine synthase OS=Leptospira yanagawae OX=293069 GN=queE PE= 3 SV=1
MFGKIHEIYSSISGEGISQGIPTVFVRFAGCSLRCGKTETKSLWCDTPYALGPNQGETKTVSAILDEIKALDQGHGFQILLTGGEPLEGENRTLSIAIAESLYSFRTEHNKPYPASRVETNGSEKITLDPFFIFTMDYKLPGSGMENRMDLENFQILEKRHNSLDEIKFVVRDRIDFERSIEVIREQKIQTNILYSPVHGEVDAKELVEWIKIDNPPKSRLSLQIHKVLWGNQKGV

SEQ ID NO: 31195 - protein, 236 aa, Leptospira yanagawae; identical to SEQ ID NO: 31194
  misc_feature (1)..(236): tr|A0A5E8HCW7|A0A5E8HCW7_9LEPT 7-carboxy-7-deazaguanine synthase OS=Leptospira yanagawae serovar Saopaulo str. Sao Paulo = ATCC 700523 OX=1249483 GN=queE PE=3 SV=1

SEQ ID NO: 31196 - protein, 237 aa, Leptospira yasudae; identical to SEQ ID NO: 31126
  misc_feature (1)..(237): tr|A0A418ADE0|A0A418ADE0_9LEPT 7-carboxy-7-deazaguanine synthase OS=Leptospira yasudae OX=2202201 GN=queE PE=3 SV=1

SEQ ID NO: 31197 - protein, 262 aa, Leptospiraceae bacterium
  misc_feature (1)..(262): tr|A0A357J1D5|A0A357J1D5_9LEPT 7-carboxy-7-deazaguanine synthase OS=Leptospiraceae bacterium OX=2026757 GN=que E PE=3 SV=1
MDDIPVAPSWKFLQVQAFFMIEPKKPSDTALADELSRESSGETIDELSTPKFLKISETYSTLQGEGSHSGLPCYFIRLAVCDIRCSWCDTPDSWTGGEWQSLQELLSDVPEHIELVQITGGEPLLQIKRLSVLMDRLNNMGKKILLETGGHRSLENVPSYVHVVMDIKLPSSGETGHDFEANFIHLKKSDEIKFVVAGESDFLAALDWVQRFDLSHRFQILISPVAGLDLKKLAQWMLDSKLTMRLQLQLHKYIWGPDARMV

SEQ ID NO: 31198 - protein, 269 aa, Leptospiraceae bacterium
  misc_feature (1)..(269): tr|A0A2E5S0S7|A0A2E5S0S7_9LEPT 7-carboxy-7-deazaguanine synthase OS=Leptospiraceae bacterium OX=2026757 GN=que E PE=3 SV=1
MDMPVAPSWRFIQVQAFFMIESKKHTDNADSGADQGIEPSVRAKALQQDEPGSAEAGKFLKISETYSTLQGEGSHSGLPCYFIRLAVCDIRCSWCDTPDSWTGGQWNSLEEIMEDVPEHIGLVQITGGEPLLQIKRLSILMHRLHEMGKKILLETGGHRSLESVPAFVHIVMDIKLPSSGETAHDFASNLSYLKPDDEIKFVIADETDFQAALGWIQRYDLTRRFQVLISPLAGLDLKKLAQWVLDSKLTMRLQLQLHKYIWGPDARMV

SEQ ID NO: 31199 - protein, 212 aa, Leptospirillum ferriphilum
  misc_feature (1)..(212): tr|J9Z823|J9Z823_LEPFM 7-carboxy-7-deazaguanine synthas e OS=Leptospirillum ferriphilum (strain ML-04) OX=10482 60 GN=queE PE=3 SV=1
MKITETFRSIQGESRYSGWPCFFIRTTGCPLRCRWCDTTYSFYGGEERTVDSLVGEAVSSGTSLVEITGGEPFVQPELPELCQKLLDLGKTVLIETSGGFPVPSGLNRECRLIVDLKPPGSGMEAWMKAENFAELGTEDEIKAVLTGREDFDWSVQKLEEWGIWGRVPVTFSPVFGECDPRELARWVLDSGLPVRVQIQLHKILFDPQLRGV

SEQ ID NO: 31200 - protein, 212 aa, Leptospirillum ferriphilum
  misc_feature (1)..(212): tr|A0A094YHM7|A0A094YHM7_9BACT 7-carboxy-7-deazaguanine synthase OS=Leptospirillum ferriphilum OX=178606 GN=qu eE PE=3 SV=1
MKITETFRSIQGESRYSGWPCFFIRTTGCPLRCRWCDTTYSFYGGEERTVDSLVGEAVSSGTSLVEITGGEPFVQPELPALCQKLLDRGKTVLIETSGGFSVPSGLNRQCRLIVDLKPPGSGMEAWMKAENFAELGGEDEIKAVLAGRDDFDWSVQKLEEWGVWGRVPVTFSPVFGECDPRELARWVLDSGLPIRIQVQLHKILFDPQLRGV

SEQ ID NO: 31201 - protein, 213 aa, Leptospirillum ferrodiazotrophum
  misc_feature (1)..(213): tr|C6HYH5|C6HYH5_9BACT 7-carboxy-7-deazaguanine synthas e OS=Leptospirillum ferrodiazotrophum OX=412449 GN=queE PE=3 SV=1
MMRINETFFSIQGESTFAGWPCFFIRTTGCPLRCRWCDTTYSFYEGEERTLDSLVDEALSHPAPLVEVTGGEPFSAPELPRLVEKLLDAGKTVLIETSGALPVPQGLDRRCHLVMDIKPPGSGMAHLMAEETFRALRPGDEIKAVIADRGDFDFCLDFLDRLALPREIPVTFSPVFGECSPGELAEWVLSSGREIRVGIQLHKILFDPERRGV

SEQ ID NO: 31202 - protein, 212 aa, Leptospirillum ferrooxidans
  misc_feature (1)..(212): tr|I0IKD8|I0IKD8_LEPFC 7-carboxy-7-deazaguanine synthas e OS=Leptospirillum ferrooxidans (strain C2-3) OX=11626 68 GN=queE PE=3 SV=1
MKITELFRSIQGESLYSGWPCFFIRTSGCPLRCTWCDTTYSFYGGTDMTVDEILLETGKSETNLVEITGGEPFVQTDFVELSNRLRREGYEVLIETSGGFPIPEGLDRSCHVIMDIKPPGSGMSQWMNPDHFRSLTSNDEIKAVCQSREDFDWVVSTLDDWRLPAEIPVTVSPVFDLVDPKELGQWVLESRRRFRIQIQLHKILFDPKAKGV

SEQ ID NO: 31203 - protein, 212 aa, Leptospirillum sp.
  misc_feature (1)..(212): tr|A0A0K0WJN1|A0A0K0WJN1_9BACT 7-carboxy-7-deazaguanine synthase OS=Leptospirillum sp. Group II 'CF-1' OX=1660 083 GN=queE PE=3 SV=1
MKITETFRSIQGESRYSGWPCFFIRTTGCPLRCRWCDTTYSFYGGEERTVDSLVGEAVSSGTSLVEITGGEPFVQPELPELCQKLLDLGKTVLIETSGGFPVPSGLNRECRLIVDLKPPGSGMEDWMKAENFAELGTEDEIKAVLTGREDFDWSVQKLEEWGIWGRVPVTFSPVFGECDPRELARWVLDSGLPVRVQIQLHKILFDPQLRGV

SEQ ID NO: 31204 - protein, 212 aa, Leptospirillum sp.; identical to SEQ ID NO: 31203
  misc_feature (1)..(212): tr|B6AN33|B6AN33_9BACT 7-carboxy-7-deazaguanine synthas e OS=Leptospirillum sp. Group II '5-way CG' OX=419541 G N=queE PE=3 SV=1

SEQ ID NO: 31205 - protein, 232 aa, Leucothrix pacifica
  misc_feature (1)..(232): tr|A0A317C3R8|A0A317C3R8_9GAMM 7-carboxy-7-deazaguanine synthase OS=Leucothrix pacifica OX=1247513 GN=queE PE= 3 SV=1
MSQLIISEVFGPTIQGEGALVGKPTVFVRSGGCDYRCSWCDTLYAVEKKYKNEWHTLSTEEVWSQIQALSPTPILITLSGGNPALQDFAKLIEIGHKAGYTFAMETQGSLSKPWFKQIDYLTLSPKPPSSGMETKWDAFEKSVSLAKSPEAISIKLVVADDIDFKWAHEVQQRYPQFDYYLQPCNLQADEVTLEQGLQSTRELIDQVVAVGWHQATVLPQLHNILWGNQRGV

SEQ ID NO: 31206 - protein, 232 aa, Leucothrix sp.
  misc_feature (1)..(232): tr|A0A317CCY2|A0A317CCY2_9GAMM 7-carboxy-7-deazaguanine synthase OS=Leucothrix sp. IMCC9719 OX=1481894 GN=queE PE=3 SV=1
MSTLIISEVFGPTVQGEGALVGKPTVFVRSGGCDYRCSWCDTLYAVDKKYKNEWHTLSTEEVWGQIQALSPTPILITLSGGNPALQDFAELIRIGHEAGYTFAMETQGSISKPWFNQVDYLTLSPKPPSSEMETRWDNFDKCLDVARNHEAVSIKIVVANDEDFSWAREVQARYPSYPFYLQPCNLDAEEVTLEQGLQSTRELIDRVVSVGWHDATVLPQLHNILWGTQRGV

SEQ ID NO: 31207 - protein, 213 aa, Lewinella agarilytica
  misc_feature (1)..(213): tr|A0A1H9GWC0|A0A1H9GWC0_9BACT 7-carboxy-7-deazaguanine synthase OS=Lewinella agarilytica OX=478744 GN=queE PE =3 SV=1
MSRQRTYKIKECFYTLQGEGAQAGRAAVFLRFTGCNLWSGREEDRHEAVCKFCDTDFIGTDGQNGGRYTQVQCGDLVQSLWPGGGRPYVVCTGGEPLLQLDEPLIGELQSRGFEVAVETNGTVPVPESIDWVCVSPKANADLIVTRGDELKLVFPQSEAEAQPEQFTQLDFEHFFLQPKDEADADHTPATVAYCMAHPQWRISLQTHKLMGID

SEQ ID NO: 31208 - protein, 211 aa, Lewinella marina
  misc_feature (1)..(211): tr|A0A2G0CHH2|A0A2G0CHH2_9BACT 7-carboxy-7-deazaguanine synthase OS=Lewinella marina OX=438751 GN=queE PE=3 SV =1
MSRTYKIKECFYTLQGEGAQAGRAAVFLRFTGCNLWSGREEDRHAAVCKFCDTDFIGTDGTNGGRYTLVQCVELVASLWPGGGRPYVVCTGGEPLLQLDVPLIEAFQAAGFEVAVETNGTLPVPEQIDWVCVSPKADATLAVSVGDELKLVYPQTEPSAHPSRFAELAFSHFFLQPKDEAGQNHLSATVAYCLSHPQWRVSLQTHKIMGIE

SEQ ID NO: 31209 - protein, 209 aa, Lewinella nigricans
  misc_feature (1)..(209): tr|A0A2D0MZL2|A0A2D0MZL2_9BACT 7-carboxy-7-deazaguanine synthase OS=Lewinella nigricans DSM 23189 = NBRC 10266 2 OX=1122177 GN=queE PE=3 SV=1
MYKIKEIYYTLQGEGAHTGRPAVFCRFTGCNLWSGREEDRHKAICQFCDTDFWGTDGVLGGRYTAEELAGLVKSCWPDDEFGQPYVVCTGGEPLLQLDEPLIEAFHRQGLEVGVETNGTIEPPAGLDWICVSPKAGAELVIKAANEIKLVFPQPGAEPERYLDLDFENFFLQPMDGPAAEKNTKLTLEYCLKNPRWRLSLQTHKLLNIP

SEQ ID NO: 31210 - protein, 211 aa, Lewinella sp.
  misc_feature (1)..(211): tr|A0A4S4NIZ4|A0A4S4NIZ4_9BACT 7-carboxy-7-deazaguanine synthase OS=Lewinella sp. HSMS-39 OX=2562452 GN=queE P E=3 SV=1
MPHTYKIKECFYTLQGEGAQAGRAAVFLRFTGCNLWSGREEDRHSAVCKFCDTDFVGTDGTNGGRYTLVQCVELATALWPGGGRPYIVCTGGEPLLQLDVPLIEALQAAGFEVAVETNGTLPVPAQIDWVCVSPKADAQLAVSGGDELKLVYPQSEPTARPERFESLAFTHFFLQPKDEVGQNHLPATVAYCLQHPRWRVSLQTHKIMGIE

SEQ ID NO: 31211 - protein, 211 aa, Lewinella sp.
  misc_feature (1)..(211): tr|A0A180ET38|A0A180ET38_9BACT 7-carboxy-7-deazaguanine synthase OS=Lewinella sp. 4G2 OX=1803372 GN=queE PE=3 SV=1
MARTYKIKESFYTLQGEGAQAGRAAVFLRFTGCNLWSGREEDRTEAVCKFCDTDFIGTDGQNGGRYDLEACANLVASLWPGGGKPYVVCTGGEPLLQLDEPLIEALHLRGFEVAVETNGTVAVPESIDWVCVSPKANAELVVTKGDELKLVYPQPEVGAQPEQFVNLNFTHFFLQPKDERGHDHTPATVAYCMEHPQWRISLQTHKLMGID

SEQ ID NO: 31212 - protein, 211 aa, Lewinella xylanilytica
  misc_feature (1)..(211): tr|A0A2S6I2P3|A0A2S6I2P3_9BACT 7-carboxy-7-deazaguanine synthase OS=Lewinella xylanilytica OX=1514080 GN=queE PE=3 SV=1
MPRSYKIKECFYTLQGEGAQSGRAAVFLRFTGCNLWSGREEDRHAAVCKFCDTDFIGTDGTNGGRYTQEQCVQLVQSQWPGGGQPYVVCTGGEPLLQLDAPLIEAMQEAGFEVAVETNGTQPVPEQIDWVCVSPKADAPLVVTGGDEMKLVYPQSEASAQPERFAALAFRHFFLQPKDEPGHNHTPAAVDYCLRHPQWRISLQTHKIMGIE

SEQ ID NO: 31213 - protein, 215 aa, Lewinellaceae bacterium
  misc_feature (1)..(215): tr|A0A2C6CSS1|A0A2C6CSS1_9BACT 7-carboxy-7-deazaguanine synthase OS=Lewinellaceae bacterium SD302 OX=2014804 G N=queE PE=3 SV=1
MIERTYKVKEVFYTLQGEGGQAGRAAVFLRFTGCNLWSGREEDRPKAICKFCDTDFVGTDGENGGRYSASSLADKVAMLWPSPRSGKPYVVCTGGEPLLQLDESLIKALHEKGFEIAVETNGTIPAPASIDWICVSPKAGSEVVQRSGHELKLVYPQKEVEAQPELFADLDFEHFYLQPLDGPNTAQNTVACVEYCLANPQWKVSLQTHKILDIP

SEQ ID NO: 31214 - protein, 211 aa, Liberibacter asiaticus
  misc_feature (1)..(211): tr|C6XHD2|C6XHD2_LIBAP 7-carboxy-7-deazaguanine synthas e OS=Liberibacter asiaticus (strain psy62) OX=537021 GN =queE PE=3 SV=1
MKLYSIKEIFLTLQGEGGHAGRVAVFCRFSGCNLWSGREQDRLSAQCRFCDTDFVGIQGTKGGRYNVDQLADLIEEQWITGEKEGRYCVLTGGEPLLQVDVPLIQALNKRGFEIAVETNGTIEPPQGIDWICVSPKAGCDLKIKGGQELKLVFPQVNVSPENYIGFDFERFSLQPMDGPFLEENTNLAISYCFQNPKWRLSVQTHKFIGIR

SEQ ID NO: 31215 - protein, 210 aa, Liberibacter crescens
  misc_feature (1)..(210): tr|L0ET36|L0ET36_LIBCB 7-carboxy-7-deazaguanine synthas e OS=Liberibacter crescens (strain BT-1) OX=1215343 GN= queE PE=3 SV=1
MKSYSVKEIFLTLQGEGTYAGRAAVFCRFSGCNLWSGREQDRITAQCYFCDTDFVGIDGSKGGKYSAEGLADAILSEWKGGESERFCVLTGGEPLLQVDVPLIKALNQRNFEIAVETNGTVEAPDGLDWICVSPKGNYDLKIKKGQELKLVFPQKESPPERYLSLDFKRFLLQPMDGPDIHKNTELAIDYCLSHPKWRLSVQTHKFLGIR

SEQ ID NO: 31216 - protein, 211 aa, Liberibacter solanacearum
  misc_feature (1)..(211): tr|E4UDF2|E4UDF2_LIBSC 7-carboxy-7-deazaguanine synthas e OS=Liberibacter solanacearum (strain CLso-ZC1) OX=658 172 GN=queE PE=3 SV=1
MKLYSVKEIFLTLQGEGAQVGRVAVFCRFSGCNLWSGREKDRLFAQCRFCDTDFVGTKGTMGGRYSAEQLADLIASAWIPEEKEERYCVLTGGEPLLQVDSALIKALNKRNFTISVETNGTIKPPEGIDWICVSPKAGCDLKVKNGQELKLVFPQVDAPPENYIDFDFDIFSLQPMDGSFLKENTNLAISYCFKNPKWRVSLQTHKFIGIR

SEQ ID NO: 31217 - protein, 268 aa, Lihuaxuella thermophila
  misc_feature (1)..(268): tr|A0A1H8C1W5|A0A1H8C1W5_9BACL 7-carboxy-7-deazaguanine synthase OS=Lihuaxuella thermophila OX=1173111 GN=queE PE=3 SV=1
MVCSDHQECGSIRNTPTRPAIFQDRKEVKHLQEALEQLDDPKLPMVEVFQTVEGEGTRAGFPTTFVRVFNCNLRCTWCDTPYSYAPAKPEYLAAVSEIVEQVRQYPNKHICLTGGEPLMHGHKSLVLIKALADIDYVEDIHIETNGAIHLGPFHRLRENDERVGKKVRFILDYKLPASGETEKMLPENFAYLRDSDEIKFVIANEEDFHHAVDILGRLVQKGIPLFSPVWETMRPEKLVSLILEHRLTNVKLSLQIHKVIWEPDARGV

SEQ ID NO: 31218 - protein, 239 aa, Limimaricola cinnabarinus
  misc_feature (1)..(239): tr|U3ACP6|U3ACP6_9RHOB 7-carboxy-7-deazaguanine synthas e OS=Limimaricola cinnabarinus LL-001 OX=1337093 GN=que E PE=3 SV=1
MSLLRISEIFGPTIQGEGALIGQATVFVRLGGCDYRCSWCDSLHAVESEYRHTWAAMETEAVWERITALSGGRPLTVTISGGNPAIQDCGPLIERGRASGYRFALETQGSVARNWFSRLEPLVLSPKPPSSGETPDWDRFDDCLKAAGEAEAILKIVVFDETDYLWARDVAACYPALPVYLQPGNHTPPPPEAEDAEIDMDGITDRMDWLVSRTLADGWFEARVLPQLHVLIWGNKRGV

SEQ ID NO: 31219 - protein, 249 aa, Limimaricola cinnabarinus
  misc_feature (1)..(249): tr|A0A2G1MH38|A0A2G1MH38_9RHOB 7-carboxy-7-deazaguanine synthase OS=Limimaricola cinnabarinus OX=1125964 GN=qu eE PE=3 SV=1
MGRIPAPERGMSTLRVSEIFGPTIQGEGALIGQATVFVRLGGCDYRCSWCDSLHSVESEYRHTWAAMETDEVWAKVAELSGGRPLTVTISGGNPAIQDCGPLIEKGRALGYGFALETQGSVARDWFSRLEPLVLSPKPPSSGETPDWDRFDDCLKAAGKAEAILKIVVFDETDYLWARGVAARYPDLPVYLQPGNHTPPPPEAEDAEIDMDGITDRMDWLVSRTLADGWFAARVLPQLHVLIWGNKRGV

SEQ ID NO: 31220 - protein, 239 aa, Limimaricola hongkongensis
  misc_feature (1)..(239): tr|A0A017HDA7|A0A017HDA7_9RHOB 7-carboxy-7-deazaguanine synthase OS=Limimaricola hongkongensis DSM 17492 OX=11 22180 GN=queE PE=3 SV=1
MSMLRVSEIFGPTIQGEGALIGQATVFVRLGGCDYRCSWCDSLHSVDSEYRHTWAPMETEEVWAKVAELSGGRPLTVTISGGNPAIQDCGPLIERGRALGYGFALETQGSVARDWFSRLAPLVLSPKPPSSGETPDWDRFDDCLAAAGQAEAILKIVVFDETDYAWARDVAARYPQLPVYLQPGNHTPPPADAEDAVIDMDGITDRMDWLVNRTLADGWFAARVLPQLHVLIWGNKRGV

SEQ ID NO: 31221 - protein, 239 aa, Limimaricola soesokkakensis
  misc_feature (1)..(239): tr|A0A1X6YYP3|A0A1X6YYP3_9RHOB 7-carboxy-7-deazaguanine synthase OS=Limimaricola soesokkakensis OX=1343159 GN= queE PE=3 SV=1
MTTLRVSEIFGPTIQGEGALIGQATVFVRLGGCDYRCSWCDSLHAVESEYRHTWAAMETGAVWDRIVELSGGRPLTVTISGGNPAIQDCGPLIERGRALGYRFALETQGSVARDWFSRLEPLVLSPKPPSSGETPDWARFDECLAAAGDAEAILKIVVFDETDYLWARDVASRYPQLPVYLQPGNHTPPPPEAEDAEIDMDGITDRMDWLVSRTLADGWFEARVLPQLHVLIWGNKRGV

SEQ ID NO: 31222 - protein, 210 aa, Limimonas halophila
  misc_feature (1)..(210): tr|A0A1G7R6L2|A0A1G7R6L2_9PROT 7-carboxy-7-deazaguanine synthase OS=Limimonas halophila OX=1082479 GN=queE PE= 3 SV=1
MAYSAKEIFYTLQGEGAHAGRPAVFCRFAGCNLWSGLERDRAHAVCQFCDTDFVGTDGPGGGKFRDADALAEAVADKWPNEQGAPFVVCTGGEPLLQLDAAAVAAFHARGFAVAIETNGTRVPPAGVDWVCMSPKAGAPLTLTEGDELKLIYPQHGAPPEAYADLAFRYFYLQPMDGPELQANTEAAVAYCMANPQWRLSLQTHKMLGIR

SEQ ID NO: 31223 - protein, 208 aa, Limnobacter sp.
  misc_feature (1)..(208): tr|A0A151QKQ4|A0A151QKQ4_9BURK 7-carboxy-7-deazaguanine synthase OS=Limnobacter sp. CACIAM 66H1 OX=1813033 GN= queE PE=3 SV=1
MFYTLQGEGAQAGRAAVFCRFSGCNLWTGREEDRATAVCKFCDTDFVGTDGVGGGKFKDAVTLARAIAETYLGGQGTAKPYVVFTGGEPTLQLDTALIDAVHANGFEIAIETNGTLPVPLGVDWICVSPKFGSELVQTSGNELKVVVPQLGQDLNALGRLQFDHYFVQAMDDSDPQKKTRNMQVAIQTCLDKPQWRLSVQTHKVIGMP

SEQ ID NO: 31224 - protein, 208 aa, Limnobacter sp.
  misc_feature (1)..(208): tr|A0A520TCC2|A0A520TCC2_9BURK 7-carboxy-7-deazaguanine synthase OS=Limnobacter sp. OX=2003368 GN=queE PE=3 SV =1
MFYTLQGEGAQAGRAAVFCRFAGCNLWTGREEDRATAVCKFCDTDFVGIDGVGGGKFKDAVALAQAIANTYQGEHGTGKPYVVFTGGEPTLQLDTALIDAVHANGFEIAIETNGTLAVPSGVDWICVSPKFGSELVQTNGHELKVVVPQLGQDLNALGRLQFEHYFVQAMDDSDPVKKSRNLQVAIQTCLNKPQWRLSVQTHKVIGIP

SEQ ID NO: 31225 - protein, 223 aa, Limnobaculum parvum
  misc_feature (1)..(223): tr|A0A2Y9TW70|A0A2Y9TW70_9ENTR 7-carboxy-7-deazaguanine synthase OS=Limnobaculum parvum OX=2172103 GN=queE PE= 3 SV=1
MSYPVNELFQTLQGEGFFTGVPAIFIRLQACPVGCSWCDTKHTWEKIADRQQSMDDILTKTQESDSWAEASAPQLLAILQQPHYTARHVVITGGEPCLYDLLPLTGLLEQHGFQCQIETSGTQPVMCSTETWVTVSPKVDMRGGLNVISQALVRADEIKHPVARERDIEQLDILLATLSDDKKRVIALQPISQNPRATELCIKTCIERNWRLSMQTHKYLGIE

SEQ ID NO: 31226 - protein, 211 aa, Limnohabitans curvus
  misc_feature (1)..(211): tr|A0A315ERC4|A0A315ERC4_9BURK 7-carboxy-7-deazaguanine synthase OS=Limnohabitans curvus OX=323423 GN=queE PE= 3 SV=1
MTYSVKEMFYTLQGEGANAGQPAVFCRFAGCNLWSGREVDRSSAICQFCDTDFVGTDGTHGGKFDSAQALAAAIASFWPATDTAHRFVVLTGGEPLLQVDEALVDALHALHFTIAVETNGTVQPPKGIDWLCMSPKAGSQRVVEAGQELKLVFPQVGAEPALYESLNFENFYLQPMDGPNAAANTAAAVAYCQAHPRWRLSVQTHKLIGIR

SEQ ID NO: 31227 - protein, 212 aa, Limnohabitans sp.
  misc_feature (1)..(212): tr|A0A315BYP7|A0A315BYP7_9BURK 7-carboxy-7-deazaguanine synthase OS=Limnohabitans sp. MMS-10A-160 OX=1835766 G N=queE PE=3 SV=1
MTYSVKEIFYTLQGEGAQTGMPAVFCRFAGCNLWSGREEDRADAVCRFCDTDFVGTDGTLGGKFAQADELAALIAAQWPAGDDAHRLTVLTGGEPLLQVDEALVDALHARGFRIAVETNGTVAAPPGIDWLCVSPKASAPWVQRQGQELKLVWPQPGLDLQAIARTGQFTHRFLQPMDGPAQAANTATCIAACLRDPVWRLSLQTHKISGIR

SEQ ID NO: 31228 - protein, 210 aa, Limnohabitans sp.
  misc_feature (1)..(210): tr|A0A315C0A7|A0A315C0A7_9BURK 7-carboxy-7-deazaguanine synthase OS=Limnohabitans sp. JirII-29 OX=1835756 GN=q ueE PE=3 SV=1
MTYSVKEMFYTLQGEGANAGRPSVFCRFAGCNLWSGREEDRSSAICQFCDTDFVGTDGDGGGKFATAQDLALAIAAFWPKGQAHRLVVLTGGEPLLQVDAALVQALHDQNFTIAVETNGTVLPPDGIDWLCVSPKAGSALVVRSGQELKLVYPQAGNHPEEFEQLHFEHHYLQPMDGPLAAANTAAAIAYCQSHPQWRLSVQTHKLIGIR

SEQ ID NO: 31229 - protein, 204 aa, Limnoraphis robusta
  misc_feature (1)..(204): tr|A0A0F5YFG3|A0A0F5YFG3_9CYAN 7-carboxy-7-deazaguanine synthase OS=Limnoraphis robusta CS-951 OX=1637645 GN=q ueE PE=3 SV=1
MNEIAIHETFQNTIQGEGYWAGTPVDFIRLAGCPVRCHYCDTGYANGGVGLPRNVRSFNELIAELRSPRVVISGGEPFIYPQLPDLVQCIEATDRTVSIETSGSFWQAISSSVWVTLSPKEHISPQYPVVAQMWERASEIKLVIETGLEVKYYAQYLPKKPQIPVFLQPEWTQRDYTLPLVLDLLKQYPYYRLSLQLHKYVGVD

SEQ ID NO: 31230 - protein, 204 aa, Limnospira indica
  misc_feature (1)..(204): tr|H1W9Y1|H1W9Y1_9CYAN 7-carboxy-7-deazaguanine synthas e OS=Limnospira indica PCC 8005 OX=376219 GN=queE PE=3 SV=1
MITIPVHETFQQTIQGEGYWAGTPVDFIRLAGCPVGCPWCDTGYADGGKGLPRNMRSFDELLAELVSPRVVISGGEPFIYPQLPDLVRVLEETGRQVSIETSGAFWQDVSDLCWITLSPKEHISPRYPVVSQMWRRASEIKLVIDVGDELEFYRCRLAENSTIPVFLQPQWTDIDRTLPLVLAKLKQFPGYRLSVQLHKYIGVE

SEQ ID NO: 31231 - protein, 219 aa, Limnothrix rosea
  misc_feature (1)..(219): tr|A0A1Q4QZQ9|A0A1Q4QZQ9_9CYAN 7-carboxy-7-deazaguanine synthase OS=Limnothrix rosea IAM M-220 OX=454133 GN=qu eE PE=3 SV=1
MAIAANAVSSSVLVSPTDLLETKTYPIVETFHSLQGEGQWFGVSAFFIRLAGCDVGCPWCDTKISWNPKRHPPVAIAALVKQVREAKPRIIVVTGGEPLMHDLQPLTDALKPLDIPLHLETSGSHALSGQFDWITLSPKTFKPPLPDIYAHVDELKVVIDNKTDLDWAEAEANKINPTAPKYLQPQWENPASQDLIFQYILQHPDWRLGLQTHKFLGVR

SEQ ID NO: 31232 - protein, 262 aa, Limnothrix sp.
  misc_feature (1)..(262): tr|A0A372DRM6|A0A372DRM6_9CYAN 7-carboxy-7-deazaguanine synthase OS=Limnothrix sp. CACIAM 69d OX=1890733 GN=qu eE PE=3 SV=1
MSDRVATARLIEVFSAIQGEGPIVGTRQLFIRFAQCDLRCDYCDSDRTWVAPDHCDIEQTPGLRDFVTVANPVSQSQLLDWVQQLDRPHLHDSISITGGEPLLHSRFLQDFLPALKTVSSLPVYLETGGHRPQQLTPLLPWLDWIGMDLKLPSVSGETHWEAHGEFLRLAVEAQKWVFVKAIVSEATTLADLTRSAELVAAIDPHLVYVMQPVSPLPAPIKPDRQPPKPPQPEQVLAWQQHLKQWLPQVIVIPQTHKAIGQL

SEQ ID NO: 31233 - protein, 262 aa, Limnothrix sp.
  misc_feature (1)..(262): tr|A0A1C0V7S2|A0A1C0V7S2_9CYAN 7-carboxy-7-deazaguanine synthase OS=Limnothrix sp. P13C2 OX=1880902 GN=queE PE =3 SV=1
MSDRVATARLIEVFSAIQGEGPIVGTRQLFIRFAQCDLRCDYCDSDRTWVAPDHCDIEQTPGLRDFVTVANPVSQSQLLDWVQQLDRPHLHDSISITGGEPLLHSRFLQDFLPALKTVSSLPVYLETGGHRPQQLEPLLPWLDWIGMDLKLPSVSGETHWEAHGEFLRLAVAAQKWVFVKAIVSEATTLADLTRSAELVAAIDPHLVYVMQPVSPLPAPIKPDRQPPQPPQPEQVLAWQQHLKQWLPQVIVIPQTHKAIGQL

SEQ ID NO: 31234 - protein, 202 aa, Lishizhenia tianjinensis
  misc_feature (1)..(202): tr|A0A1I7AGI8|A0A1I7AGI8_9FLAO 7-carboxy-7-deazaguanine synthase OS=Lishizhenia tianjinensis OX=477690 GN=queE PE=3 SV=1
MEVVKSFPVMEEFYTIQGEGSYSGRAAYFVRLGGCDVGCVWCDVKESWDAEKHPETPVAALLEKITATKTDFVVITGGEPAMYDLSYFVDELHKLGIEVAIETSGCYPLKGDIDWYCFSPKKFKAPVEDAYAKAKELKVVIFNKSDFQWAEDHAAKVNDACKLYLQPEWSKEAKMLPLIIDYVKENPQWRISLQTHKYMQIP

SEQ ID NO: 31235 - protein, 204 aa, Listeria booriae
  misc_feature (1)..(204): tr|A0A099WDD7|A0A099WDD7_9LIST 7-carboxy-7-deazaguanine synthase OS=Listeria booriae OX=1552123 GN=queE PE=3 S V=1
MMHREYRIVEIFETMQGEGYNTGMPSVFIRFGRCNLDCPWCDTNYNEFVMMTGEQILAEVHKYEARNIVITGGEPTIQRGIEELLQVLKAEGYYLAIETNGLKDVPVEIDYVATSPKRLYSNMYEKRHLSQADEVRIVVDGDVQAFCAQIEALIPAKRYYLSPCEVDGDFNMLETIRQLGQLNATRGENKWALSIQTHKLAGIE

SEQ ID NO: 31236 - protein, 204 aa, Listeria cornellensis
  misc_feature (1)..(204): tr|W7C3F8|W7C3F8_9LIST 7-carboxy-7-deazaguanine synthas e OS=Listeria cornellensis FSL F6-0969 OX=1265820 GN=qu eE PE=3 SV=1
MMDHEYRIVEIFETMQGEGYNTGMPSVFIRFGRCNLDCPWCDTNYNEFEMMTGQQILDEVHKYTARNIVITGGEPTIQRGIEELLQVLKAEGYYLAIETNGLKEVPAEIDYVATSPKRLYSKMYEKRHLSRADEVRIVVDGDIQEFCAQIEALIPAKRYYLSPCEVDGGFNMLETISQLGKLNAERSENKWSLSIQTHKLAGIE

SEQ ID NO: 31237 - protein, 204 aa, Listeria rocourtiae
  misc_feature (1)..(204): tr|A0A4R6ZL47|A0A4R6ZL47_9LIST 7-carboxy-7-deazaguanine synthase OS=Listeria rocourtiae OX=647910 GN=queE PE=3 SV=1
MTEREYRIVEIFETMQGEGYNTGMPSIFIRFGRCNLDCPWCDTNYNEFEMMTGQQILDEVHKYTARNIVITGGEPTIQRGIEELLQALKIEGYYLAIETNGLKEVPVEIDYVATSPKRLYSEMYEKRHLSRADEVRIVVDGDIQEFCAQIEALIPAKRYYLSPCEEEGAFNMLETISQLGKLNTGRGENKWSLSIQTHKLAGIE

SEQ ID NO: 31238 - protein, 204 aa, Listeria sp.
  misc_feature (1)..(204): tr|A0A3N9TU52|A0A3N9TU52_9LIST 7-carboxy-7-deazaguanine synthase OS=Listeria sp. SHR_NRA_18 OX=2269046 GN=queE PE=3 SV=1
MMDREYRIVEIFETMQGEGYNTGMPSVFIRFGRCNLDCPWCDTNYNEFEMMTGQQILDEVHKYTARNIVITGGEPTIQRGIEELLQVLKAEGYYLAIETNGLKEVPVEIDYVATSPKRLYSKMYEKRHLSRADEVRIVVDGDIQEFCAQIEVLIPAKRYYLSPCEEDGGFNMLETISQLGKLNAERGEDKWSLSIQTHKLAGIE

SEQ ID NO: 31239 - protein, 204 aa, Listeriaceae bacterium; identical to SEQ ID NO: 31238
  misc_feature (1)..(204): tr|A0A099W8A5|A0A099W8A5_9LIST 7-carboxy-7-deazaguanine synthase OS=Listeriaceae bacterium FSL A5-0209 OX=1497 679 GN=queE PE=3 SV=1

SEQ ID NO: 31240 - protein, 92 aa, Litoricolaceae bacterium
  misc_feature (1)..(92): tr|A0A520S806|A0A520S806_9GAMM 7-carboxy-7-deazaguanine synthase QueE (Fragment) OS=Litoricolaceae bacterium O X=2510333 GN=EVA60_05645 PE=4 SV=1
SGESSKNLVSNLTRLQSKDQIKVVVTSADDFRWFELFCDEHPEVVHAGAIWISPSYGEMDLKILADLIVQSRHPFRMQLQLHKQIWGEESGR

SEQ ID NO: 31241 - protein, 225 aa, Litorilituus sediminis
  misc_feature (1)..(225): tr|A0A4V0ZFN5|A0A4V0ZFN5_9GAMM 7-carboxy-7-deazaguanine synthase OS=Litorilituus sediminis OX=718192 GN=queE P E=3 SV=1
MNTVEYKINELFETIQGEGAFTGQPSIFIRLQGCPVACSWCDTKHTWEIELEDKVTKEQIIAKTQETSQWASFSPEQILSLFKVQGFKAKHIVITGGEPCMVDLTPLCQTLEKAGYSCQIETSGTFDVRTTKDCWVTVSPKVNMRGGYEILASAMKRANEIKHPVATEQHVDDLKSLLAKHKVTNTPVYLQPISQKQRATELAIATCIENNWRLSVQVHKYIGIE

SEQ ID NO: 31242 - protein, 225 aa, Litorilituus sp.
  misc_feature (1)..(225): tr|A0A502KMR3|A0A502KMR3_9GAMM 7-carboxy-7-deazaguanine synthase OS=Litorilituus sp. RZ04 OX=2491017 GN=queE P E=3 SV=1
MNLTNYKINEFFQTIQGEGSYTGQPSIFIRLQGCPVACSWCDTKHTWDIEPSLEISADKLLAKSAETEQWSDLSVDQILTLIVQQKFKAKHVVITGGEPCMVDLTPLCQGLEQAGFSTQIETSGTFEIRTTDSCWVTVSPKVNMRGGYEILSSAMKRANEIKHPVATEQHIDDLKSLLLQHKVTTTPVYLQPISQKQRATELAIASCIENDWRLSIQVHKYIGIE

SEQ ID NO: 31243 - protein, 213 aa, Litorimonas taeanensis
  misc_feature (1)..(213): tr|A0A420WJM9|A0A420WJM9_9RHOB 7-carboxy-7-deazaguanine synthase OS=Litorimonas taeanensis OX=568099 GN=queE P E=3 SV=1
MSYAVKECYLTVQGEGAQAGITAVFLRFSGCNLWTGREKDRAKAVCQFCDTDFIGTDGPGGGRFDNAKELARHVASFWPQSDEDKAHAWVICTGGEPALQLDESLIQAFHEAGFKVAIETNGTLKLPQGLDWICVSPKADAPLVQRAGHELKLVYPQIENKPSDFVELDFEVFSLQPLDDSEQAAHSQAAFEYCLAHPKWRLSVQTHKYIGVP

SEQ ID NO: 31244 - protein, 236 aa, Loktanella sp.
  misc_feature (1)..(236): tr|A0A1H9HE15|A0A1H9HE15_9RHOB 7-carboxy-7-deazaguanine synthase OS=Loktanella sp. DSM 29012 OX=1881056 GN=que E PE=3 SV=1
MTRLRIVEIFGPTVQGEGALIGEPTVFVRSGGCDYRCSWCDSMHAVDPAFRASWAAMDTAEVWAKVQRLSGGQPLTVSLSGGNPAIQDFAPLIALGQAQGYRFACETQGSIAKPWFADLDTLVLSPKPPSSGETVDWDAFDTCCQAARGAAAVVMKIVIFDDTDYAWARAAADRYPHLPLYLQPGNPEVDPDRAVDPQRLSDRLLWLVDKTMNDNWFAPRILPQLHVLLWGNKRGV

SEQ ID NO: 31245 - protein, 235 aa, Loktanella sp.
  misc_feature (1)..(235): tr|A0A0F4RKJ0|A0A0F4RKJ0_9RHOB 7-carboxy-7-deazaguanine synthase OS=Loktanella sp. S4079 OX=579483 GN=queE PE= 3 SV=1
MTLRIAEIFGPTIQGEGALIGEPTVFVRAGGCDYRCTWCDSMHAVDSANRHSWDALTTAQVWEQVTDLSGGQPLTVSISGGNPAIQDFGPMIALGQSQGYRFACETQGSIAKPWFADLDTLVLSPKPPSSGETVDWAAFDKCLAAAGTQPNVVMKIVIFDDIDYAWAREAAAKYPDLPLYLQPGNAEVDPELPVDLNAAIDRLHWLIEKVTADRWFTPRVLPQLHVLVWGNKRGV

SEQ ID NO: 31246 - protein, 212 aa, Lonepinella koalarum
  misc_feature (1)..(212): tr|A0A5D1ZR41|A0A5D1ZR41_9PAST 7-carboxy-7-deazaguanine synthase OS=Lonepinella koalarum OX=53417 GN=queE PE=3 SV=1
MVVQLINEPKFPIVEIFESLQGEGANTGMPSIFVRFGKCNLACPWCDTNYNQFEQWSLSQILQKVRSFSVKNIIITGGEPTIQVGIALLLDRLKADGYFLAIETNGLKAIPSQIDYIATSPKAMYAKKYENRCIPFAHEVRIVVDEQDENVQDFCQLIESKIQANDYYLSPCEINGKMNLLQTITHLGLLNQRQNKPKWQLSIQTHKLIGIA

SEQ ID NO: 31247 - protein, 212 aa, Lonepinella koalarum
  misc_feature (1)..(212): tr|A0A5F0NB62|A0A5F0NB62_9PAST 7-carboxy-7-deazaguanine synthase OS=Lonepinella koalarum OX=53417 GN=queE PE=3 SV=1
MVVQLINEPKFPIVEIFESLQGEGANTGMPSIFVRFGKCNLACPWCDTNYNQFEQWSLSQILQKVRSFSVKNIIITGGEPTIQVGIALLLDRLKADGYFLAIETNGLKAIPSQIDYIATSPKAMYAKKYENRCIPFAHEVRIVVDEQDENVQDFCQLIESKIQANGYYLSPCEINGKMNLLQTITHLGLLNQRQNKPKWQLSIQTHKLIGIE

SEQ ID NO: 31248 - protein, 263 aa, Longibacter salinarum
  misc_feature (1)..(263): tr|A0A2A8CZY1|A0A2A8CZY1_9BACT 7-carboxy-7-deazaguanine synthase OS=Longibacter salinarum OX=1850348 GN=queE P E=3 SV=1
MIDSPSSDGSRPSSPASLDERHPNSSSGSQDPVYRVKEIFRTVQGEGFWAGRPAVFVRMVGCNMWTGYEEDRARDAERTGADCPTWCDTDFTKEGSESLEAAEVVDRMKTTGGPIDFCVVTGGEPFLQLDATLVRAMQDAGYEVACETNGTIKIEETFWDDKEQRVVMPDWIVCSPKLPEDELVLERFDELKLVVPDYHPDAYGDFAERATRHEIGPGLRRLLWLQPEDGPRLEEAKDSAINLALQHPAWRVSVQTHKVLGVE

SEQ ID NO: 31249 - protein, 245 aa, Longimonas halophila
  misc_feature (1)..(245): tr|A0A2H3NN65|A0A2H3NN65_9BACT 7-carboxy-7-deazaguanine synthase OS=Longimonas halophila OX=1469170 GN=queE PE =3 SV=1
MPDATRVSSPETESTYRVKNVFPTVQGEGFWAGRPAVFVRLVGCNMWSGYEADRERDAQRTGADCPRWCDTDFTKEGSTSYTAVELTQQMRDLGGPIDFCVLTGGEPFLQADAALIEAMHAAGYTVAIETNGTVALAEAFAGPENDEISAPDWITCSPKLPEEHLTLERFDELKLVVPDYRPAHYERFARRGTRHTIAGETRRCLYVQPEDGPRLQEAQKEAVALAAQHPEWSVSTQTHKVLDVE

SEQ ID NO: 31250 - protein, 223 aa, Lonsdalea britannica
  misc_feature (1)..(223): tr|A0A1X3RM29|A0A1X3RM29_9GAMM 7-carboxy-7-deazaguanine synthase OS=Lonsdalea britannica OX=1082704 GN=queE PE =3 SV=1
MQYPINEMFQTLQGEGYFTGVPAVFIRLQGCPVGCSWCDTKHTWEKRPEREIPLKQIVDKTTESDAWGSASVEDIVGHMTRLGYTARHVVITGGEPCIHDLTTLTQRLEALGFSTQIETSGTHEIRCSTHCWVTVSPKVNMRGGMVVIDQALQRADEIKHPVARERDIETLDTLLNRLDDDKARVIALQPISQKEEATRLCIATCIARNWRLSMQTHKYLNIA

SEQ ID NO: 31251 - protein, 223 aa, Lonsdalea iberica
  misc_feature (1)..(223): tr|A0A1X3S1D3|A0A1X3S1D3_9GAMM 7-carboxy-7-deazaguanine synthase OS=Lonsdalea iberica OX=1082703 GN=queE PE=3 SV=1
MQYPINEMFQTLQGEGYFTGVPAVFIRLQGCPVGCSWCDTKHTWEKRPEREIPLKQIVDKTTESDAWGQASVDDIVGHMTQLGYTARHVVITGGEPCIHDLTALTQRLEALGFSTQIETSGTHEIRCSTDCWVTVSPKVNMRGGMVVIDQALQRSDEIKHPVARERDIETLDALLNRLDDDKARVIALQPISQKEEATRLCIATCIARNWRLSMQTHKYLNIA

SEQ ID NO: 31252 - protein, 223 aa, Lonsdalea populi
  misc_feature (1)..(223): tr|A0A3N0URG3|A0A3N0URG3_9GAMM 7-carboxy-7-deazaguanine synthase OS=Lonsdalea populi OX=1172565 GN=queE PE=3 S V=1
MQYPINEMFQTLQGEGYYTGVPAVFIRLQGCPVGCSWCDTKHTWEKRPEREIPLKQIVEKTAESDAWGAASVEDIVGHMTQLGFTARHVVITGGEPCIHDLTTLTQRLEALGFSTQIETSGTHEIRCSTHSWVTVSPKVNMRGGMVVIDQALQRADEIKHPVARERDIETLDTLLNRLDDDKARVIALQPISQKEEATRLCIATCIARNWRLSMQTHKYLNIA

SEQ ID NO: 31253 - protein, 223 aa, Lonsdalea quercina
  misc_feature (1)..(223): tr|A0A1H4AG80|A0A1H4AG80_9GAMM 7-carboxy-7-deazaguanine synthase OS=Lonsdalea quercina OX=71657 GN=queE PE=3 S V=1
MQYPINEMFQTLQGEGYFTGVPAVFIRLQGCPVGCSWCDTKHTWEKRPEREIPLKQIVDKTTESDAWGSASVEDIVGHMMRLGYTARHVVITGGEPCIHDLTTLTQRLEALGFSTQIETSGTHEIRCSTDCWVTVSPKVNMRGGMVVIDQALQRSDEIKHPVARERDIETLDALLNRLDDDKARVIALQPISQKEEATRLCIATCIARNWRLSMQTHKYLNIA

SEQ ID NO: 31254 - protein, 197 aa, Lucifera butyrica
  misc_feature (1)..(197): tr|A0A498R625|A0A498R625_9FIRM 7-carboxy-7-deazaguanine synthase OS=Lucifera butyrica OX=1351585 GN=queE PE=3 SV=1
MPEVKYPVVQIFTSIQGEGLHMGLPVTFIRLAGCNLRCTWCDTPQAFDSSQARWQTAEEIVAQAIPTRLVVITGGEPTLHDLGSLVEALKKRHKYVAIETNGTNEIPAAWGIDWITASPKPASGYILRCVPNELKYVVDDAFNLEVIAWQAVPKGNILLQVESGRPESAAKAYRLVLERPDWELRLGIQLHKVIAVE

SEQ ID NO: 31255 - protein, 233 aa, Lujinxingia litoralis
  misc_feature (1)..(233): tr|A0A328C0W6|A0A328C0W6_9DELT 7-carboxy-7-deazaguanine synthase OS=Lujinxingia litoralis OX=2211119 GN=queE P E=3 SV=1
MASTTPAERAADHAIERGRPEREERSWLRLTEIFFSIQGESSFAGLPCTFVRLSRCNLRCTWCDTTYSFKGGERTEIDAIIARLDEIGCKVVEITGGEPLLQRPVHTLMTRLCDLGYTVLIETSGSLDISPIDPRVHVIMDLKAPGSGEVDKNLYANIAHLKASDEVKIVLQDRADFDWAIATLEEHDVLNHAHVIFSPVHGELNSHELANWILESGQQIRLGLQIHKFLDVE

SEQ ID NO: 31256 - protein, 217 aa, Luminiphilus syltensis
  misc_feature (1)..(217): tr|B8KS57|B8KS57_9GAMM 7-carboxy-7-deazaguanine synthas e OS=Luminiphilus syltensis NOR5-1B OX=565045 GN=queE P E=3 SV=1
MAVATTLRITEIFHSLQGEARTVGLPTVFVRLTGCPLRCVYCDTAYAFSGGELTTLDDILERVAGFSCTRVCVTGGEPLAQPECLSLLTALCDRGYDVSLETSGAMPIAGADTRVSRVLDLKTPDSGECHRNDWSNIEQLTPHDQIKFVVCSRTDYEWARFKLDEFKLPTRVSDVLFSPSYGVVEPAELAQWLLDDRLAARLQLQLHKLLWNDAPGH

SEQ ID NO: 31257 - protein, 208 aa, Lunatimonas lonarensis
  misc_feature (1)..(208): tr|R7ZTY1|R7ZTY1_9BACT 7-carboxy-7-deazaguanine synthas e OS=Lunatimonas lonarensis OX=1232681 GN=queE PE=3 SV= 1
MQESELLKQGLALPLMEAFYTIQGEGRYTGHSAYFIRLGGCDVGCVWCDVKDSWDVSRWPLVRIEDMVEEALQYPGRLVVITGGEPLMHELGPLTKLLRAKGFQVNLETSGAHPFSGEFDWVCLSPKKFKAPHPDIYQRANELKVVVYHRSDFAFAEQHAARVSENCVKLLQPEWSKSSEILEKIITYAKNHPVWQISLQTHKFMNIP

SEQ ID NO: 31258 - protein, 230 aa, Luteibacter pinisoli
  misc_feature (1)..(230): tr|A0A4Y5Z6I6|A0A4Y5Z6I6_9GAMM 7-carboxy-7-deazaguanine synthase OS=Luteibacter pinisoli OX=2589080 GN=queE PE =3 SV=1
MNGSTAIPADVPPAAPVRERLRLTEIFHSVQGEADAIGWPTVFVRLTGCPLRCVWCDTEYSFHGGQWHDIDAIVEQVASYGARHVCVTGGEPLAQKRCLILLRKLCDAGFEVSLETSGALDVSNVDPRVRKVMDLKAPDSGESARNLWSNLDHLLPHDQVKFVIASRGDFEWSRDAVREHAIDSKAMVLFSPVWGNVEPRELAEWILADRLPVRFQLQLHKLLWNDAVGH

SEQ ID NO: 31259 - protein, 230 aa, Luteibacter rhizovicinus
  misc_feature (1)..(230): tr|A0A4R3YMA3|A0A4R3YMA3_9GAMM 7-carboxy-7-deazaguanine synthase OS=Luteibacter rhizovicinus OX=242606 GN=queE PE=3 SV=1
MSGSTVIPADAAPAAPVAERLRITEIFHSIQGEADAIGWPTVFVRLTGCPLRCVWCDTEYSFHGGQWHDIDAILAEVASHGARHVCVTGGEPLAQKRCLILLRKLCDAGYEVSLETSGALDVAAVDPRVRKVMDLKPPDSGESARNLWSNLDHLLPHDQVKFVIASRADFEWSRDAFAEHRLVSRCMVLFSPVHGKVEPRELAEWILAERLPVRFQMQLHKLLWNDAAGH

SEQ ID NO: 31260 - protein, 230 aa, Luteibacter rhizovicinus
  misc_feature (1)..(230): tr|A0A1L3EPS7|A0A1L3EPS7_9GAMM 7-carboxy-7-deazaguanine synthase OS=Luteibacter rhizovicinus DSM 16549 OX=1440 763 GN=queE PE=3 SV=1
MNGNTATPADVPPVAPVADRLRITEIFHSVQGEADAIGWPTVFVRLTGCPLRCVWCDTEYSFHGGQWHDIDTIVAHVASFVAKHVCVTGGEPLAQKRCLALLRKLCDAGHEVSLETSGALDVSGVDPRVRKVMDLKAPDSGESARNLWSNLDHLLPHDQVKFVIASRGDFEWARDVVREHALDQRVMPLFSPVWSKVQPRELAEWILAERLPVRFQLQLHKLLWNDAAGH

SEQ ID NO: 31261 - protein, 230 aa, Luteibacter sp.
  misc_feature (1)..(230): tr|A0A1K1QAP0|A0A1K1QAP0_9GAMM 7-carboxy-7-deazaguanine synthase OS=Luteibacter sp. UNCMF366Tsu5.1 OX=1502758 GN=queE PE=3 SV=1
MNGNTATPADVSPASPVAERLRITEIFHSVQGEADAIGWPTVFVRLTGCPLRCVWCDTEYSFHGGQWHDIDAILAEVARHGAHHVCVTGGEPLAQKRCLILLRKLCDAGYEVSLETSGALDVSDVDPRVRKVMDLKAPDSGESARNLWSNLDHLLPHDQVKFVIASRADFEWARDVVREHSLDRKTMVLFSPVWSKVEPRDLAEWILAERLPVRFQLQLHKLLWNDAAGH

SEQ ID NO: 31262 - protein, 230 aa, Luteibacter sp.
  misc_feature (1)..(230): tr|A0A1I0NU95|A0A1I0NU95_9GAMM 7-carboxy-7-deazaguanine synthase OS=Luteibacter sp. 329MFSha OX=1798239 GN=que E PE=3 SV=1
MTGNTATPADVSPASPVAERLRITEIFHSVQGEADAIGWPTVFVRLTGCPLRCVWCDTEYSFHGGQWHDIDAILAEVASHGARHVCVTGGEPLSQKRCLILLRKLCDAGYEVSLETSGALDVSAVDPRVRKVMDLKAPDSGESARNRWANLDHLLPHDQVKFVIASRADFEWSRDVVAEHALDRKVMVLFSPVWSKVQPRELAEWILAERLPVRFQLQLHKLLWNDAAGH

SEQ ID NO: 31263 - protein, 230 aa, Luteibacter yeojuensis
  misc_feature (1)..(230): tr|A0A0F3KHL4|A0A0F3KHL4_9GAMM 7-carboxy-7-deazaguanine synthase OS=Luteibacter yeojuensis OX=345309 GN=queE P E=3 SV=1
MNGNTATPADVSPAAPVRERLRITEIFHSVQGEADAIGWPTVFVRLTGCPLRCVWCDTEYSFHGGQWHDIDAIVAEVASHGAKHVCVTGGEPLSQKRCHILLRKLCDAGHEVSLETSGALDVSQVDPRVRKVMDLKAPDSGESARNLWSNLDHLLPHDQVKFVIASRGDFEWSRDVVREHGLAEKSMVLFSPVWGKVEPRALAEWILAERLPVRFQLQLHKLLWNDAQGH

SEQ ID NO: 31264 - protein, 230 aa, Luteibacter yeojuensis
  misc_feature (1)..(230): tr|A0A561GZA9|A0A561GZA9_9GAMM 7-carboxy-7-deazaguanine synthase OS=Luteibacter yeojuensis OX=345309 GN=queE P E=3 SV=1
MNGNTATPADVPPVAPVRERLRITEIFHSVQGEADAIGWPTVFVRLTGCPLRCVWCDTEYSFHGGQWHDIDAIVTQVASYGARHVCVTGGEPLSQKRCLILLRKLCDAGHEVSLETSGAIDVGPVDPRVRKVMDLKAPDSGESARNLWSNLDHLLPHDQVKFVIASRGDFEWSRDVVREHALDTKAMVLFSPVWGKVGPRELAEWILDERLPVRFQLQLHKLLWNDAAGH

SEQ ID NO: 31265 - protein, 196 aa, Luteibaculum oceani
  misc_feature (1)..(196): tr|A0A5C6VC55|A0A5C6VC55_9FLAO 7-carboxy-7-deazaguanine synthase OS=Luteibaculum oceani OX=1294296 GN=queE PE= 3 SV=1
MERFLTLQGEGRYSGYNAYFIRLAGCDVGCVWCDVKESWEVSENQWVSYNTISNWLKEESTGEIVVVTGGEPLMYDLKTLTKTLRERNKRCHIETSGAYKISGDWDWITFSPKKFKAPLPEIYEHCDELKVVVYNKSDLNWAVEHQKKLANPNSVHLLLQPEWSKRDKVTPLIIDFIHKNPEWSLSLQTHKYIGIE

SEQ ID NO: 31266 - protein, 226 aa, Luteimonas aestuarii
  misc_feature (1)..(226): tr|A0A4V3ALA9|A0A4V3ALA9_9GAMM 7-carboxy-7-deazaguanine synthase OS=Luteimonas aestuarii OX=453837 GN=queE PE= 3 SV=1
MTAVSPDAAAASNADRLKLTEIFLSLQGEARDAGWPTVFVRLTGCPLRCQYCDTAYAFHGGEWWSIDAIVEHVRSFGVRHVCVTGGEPLAQKRCLELLSRLCDAGLAVSLETSGAIDVSAVDARVSRVVDIKTPGSQEAHRNRWENLPLLTAHDQVKFVICGRDDYAWARDRVREHRLDARCDVLFSPSKSEVSPTDLADWIVADRLPVRFQLQLHKLLWNDEPGR

SEQ ID NO: 31267 - protein, 227 aa, Luteimonas cucumeris
  misc_feature (1)..(227): tr|A0A562L535|A0A562L535_9GAMM 7-carboxy-7-deazaguanine synthase OS=Luteimonas cucumeris OX=985012 GN=queE PE= 3 SV=1
MNAVSAPPDAAAASADRLRITEIFLSLQGEARDAGWPTVFVRLTGCPLRCQYCDTAYAFHGGEWWTIDAILEEVARHGVRHVCVTGGEPLSQKRCLGLLSRLCDAGYIVSLETSGAIDIAAVDPRVSRVLDIKTPGSAEVARNHWPNLPLLTARDQVKFVLCGREDYEWARDVLVEHRLAERCDVLFSPSKSDLAARDLADWIVADRLPVRFQMQLHKLLWNDEPGR

SEQ ID NO: 31268 - protein, 226 aa, Luteimonas marina
  misc_feature (1)..(226): tr|A0A5C5U3E2|A0A5C5U3E2_9GAMM 7-carboxy-7-deazaguanine synthase OS=Luteimonas marina OX=488485 GN=queE PE=3 S V=1
MHAVAPDATAASTADRLRITEIFLSLQGEARDAGWPTVFVRLTGCPLRCGYCDTTYAFHGGEWWSIDGILAEVARHGVRHVCVTGGEPLAQKRCLGLLSRLCDAGHVVSLETSGAIDIAGVDARVSRVLDVKTPASGEVARNRWENIPLLTPHDQVKFVVCSRADYEWAREVVHARALHARCDVLFSPSKSELSPTDLADWIVADRLPVKFQMQLHKLLWNDEPGR

SEQ ID NO: 31269 - protein, 229 aa, Luteimonas sp.
  misc_feature (1)..(229): tr|A0A1B3W565|A0A1B3W565_9GAMM 7-carboxy-7-deazaguanine synthase OS=Luteimonas sp. JM171 OX=1896164 GN=queE PE =3 SV=1
MNAAVPHAAGTDAASAADRLRITEIFLSLQGEARDAGWPTVFVRLTGCPLRCQYCDTAYAFQGGEWWTIDGILAEVARHGVRHVCVTGGEPLAQKRCAELLRRLCDAGYAVSLETSGAIDIGQADPRVSRVLDIKTPASGEAHRNLWENIALLTPHDQVKFVLCGREDYDWARGVVARHRITTRCDVLFSPSKDQLGARELADWIVADRLPVRFQLQLHKILWNDEPGR

SEQ ID NO: 31270 - protein, 226 aa, Luteimonas sp.
  misc_feature (1)..(226): tr|A0A0H1AN60|A0A0H1AN60_9GAMM 7-carboxy-7-deazaguanine synthase OS=Luteimonas sp. FCS-9 OX=1547516 GN=queE PE =3 SV=1
MTAVAPDAVAASAADRLKLTEIFLSLQGEARDAGWPTVFVRLTGCPLRCSYCDTAYAFHGGDWWTIDAILDEVARHGVRHVCVTGGEPLAQKRCIGLLQRLCDAGYQVSLETSGALDVSAVDPRVSRVVDIKTPGSDEAHRNLWDNLALLTAHDQIKCVICSRADYEWARDLVLERGLHQRCDVLFSPSKGEISARDLADWIVADRLPVKFQMQLHKLLWNDEPGR

SEQ ID NO: 31271 - protein, 226 aa, Luteimonas terrae
  misc_feature (1)..(226): tr|A0A4R5U741|A0A4R5U741_9GAMM 7-carboxy-7-deazaguanine synthase OS=Luteimonas terrae OX=1530191 GN=queE PE=3 SV=1
MTAVAPDAVAASAADRLKLTEVFLSLQGEARDAGWPTVFVRLTGCPLRCTYCDTAYAFHGGQWWTIDDILAEVARHGVRHVCVTGGEPLAQKRCVGLLRRLCDAGYQVSLETSGAIDIAAVDTRVSRVLDIKTPASNEAHRNRWENLALLTPHDQIKFVVCSRADYEWARDIVLTKGLQHLCDVLFSPSKGEITGRELADWIVADRLPVKFQMQLHKLLWNDEPGR

SEQ ID NO: 31272 - protein, 216 aa, Luteitalea pratensis
  misc_feature (1)..(216): tr|A0A143PFY6|A0A143PFY6_9BACT 7-carboxy-7-deazaguanine synthase OS=Luteitalea pratensis OX=1855912 GN=queE PE =3 SV=1
MSLALTITEIYASIQGESSFAGQPCTFVRLTACDLRCTWCDTVYAFTEGRKQLLDDILAEVRQLGVPLVEITGGEPLLQKNVLPLMQRLLDEAHTVLLETGGHVSIADVPVGVHRIVDVKCPGSGESGRMHWANLDLLTPRDEVKFVIADRDDFEYAREVTATHDLAHRCGAVHFSPAWNRVAPADLAAWILESRLPVRLQLQQHKYIWEPAARRV

SEQ ID NO: 31273 - protein, 210 aa, Lutibacter agarilyticus
  misc_feature (1)..(210): tr|A0A238YZT4|A0A238YZT4_9FLAO 7-carboxy-7-deazaguanine synthase OS=Lutibacter agarilyticus OX=1109740 GN=queE PE=3 SV=1
MINEETQQLINKGEMLPLMEEFYTIQGEGFHTGKAAYFIRIGGCDVGCHWCDVKESWNADLHPPTLTDIIIDNAKKEANTVVITGGEPLMWSLDYITTKLQSNNLRTHIETSGAYPLSGIWNWICLSPKKTKLPLEGIYPEAHELKIIISNKHDFKFAEEQAAKVADTCELFLQPEWSKREKMTPSIVEYVMKNPQWKISLQTHKYLNIP

SEQ ID NO: 31274 - protein, 210 aa, Lutibacter flavus
  misc_feature (1)..(210): tr|A0A238W0R1|A0A238W0R1_9FLAO 7-carboxy-7-deazaguanine synthase OS=Lutibacter flavus OX=691689 GN=queE PE=3 S V=1
MINEEIQKQISKGKMLPLMEEFYTIQGEGFHTGKAAYFIRIGGCDVGCHWCDVKESWNANLHPPTNTDNIVNNVIKYANTVVVTGGEPLMWSLDFITSQLKKNNIRTHIETSGAYQLSGEWDWICLSPKKTKLPLEPIYLKTNELKVIIYNKNDFKFAVEQASKVSDTCELYLQPEWSNKEKMTPLIVDFVMKNPQWKISLQTHKYLNIP

SEQ ID NO: 31275 - protein, 215 aa, Lutibacter maritimus
  misc_feature (1)..(215): tr|A0A1I6SM63|A0A1I6SM63_9FLAO 7-carboxy-7-deazaguanine synthase OS=Lutibacter maritimus OX=593133 GN=queE PE= 3 SV=1
MYICSMINKEIQQLINKGEMLPLMEEFYTIQGEGFYTGKAAYFIRIGGCDVGCHWCDVKESWNAKLHPPTKTDLIVKNAAENANTVVVTGGEPLMWSLDYLTKMLQKNNLKTHIETSGAYPLSGFWNWICLSPKKTKLPLAPIYSEAHELKMIIYNKNDFKFAEEQASKVNENCELFLQPEWSNREKMTPLIVDYVMKNPKWKISLQTHKYLNIP

SEQ ID NO: 31276 - protein, 210 aa, Lutibacter oceani
  misc_feature (1)..(210): tr|A0A3D9RXM2|A0A3D9RXM2_9FLAO 7-carboxy-7-deazaguanine synthase OS=Lutibacter oceani OX=1853311 GN=queE PE=3 SV=1
MIEEHIQQQINKGEMLPLMEDFYTIQGEGFHTGKAAYFIRIGGCDVGCHWCDVKESWNADLHPPTSTDVIVENAIKFANTVVITGGEPLMWSLDYITKKLQLNNIKTHIETSGAYKLTGTWDWICLSPKKTKLPLEEIYLKTNELKVIVYNKNDFKFAEEQAKKVSENCELFLQPEWSNKEKMTPLIVDYVMKNPKWKISLQTHKYINIP

SEQ ID NO: 31277 - protein, 210 aa, Lutibacter oricola
  misc_feature (1)..(210): tr|A0A1H3ERY3|A0A1H3ERY3_9FLAO 7-carboxy-7-deazaguanine synthase OS=Lutibacter oricola OX=762486 GN=queE PE=3 SV=1
MIDNKVQQLIDKGEMLPLMEEFYTIQGEGSHTGKAAYFIRIGGCDVGCHWCDVKESWNAKLHPPTKTDLIVENAGKYANTVVITGGEPLMWSLDYITRKLQNSSIKTHIETSGAYPLSGKWDWICLSPKKTKLPLKGIYSEAHELKIIISNKHDFIFAEEQASKVSDTCELYLQPEWSKRDKMTEQIVEYVMNNPKWKISLQTHKYLNIP

SEQ ID NO: 31278 - protein, 209 aa, Lutibacter profundi
  misc_feature (1)..(209): tr|A0A109RPA2|A0A109RPA2_9FLAO 7-carboxy-7-deazaguanine synthase OS=Lutibacter profundi OX=1622118 GN=queE PE= 3 SV=1
MDKNTQQLIDKGEMLPLMEEFYTIQGEGFHSGKAAYFIRIGGCDVGCHWCDVKESWDANLHPPTKTNLIINNATSQANTVVVTGGEPLMWNLDYLTDTLKNNNIKTHIETSGSYKLSGTWDWICLSPKKMKLPLNEIYKITDELKIIIVNKQDFKFAEEQASKVSKNCKLFLQPEWSKRALMTPQIVDYVMKNPKWKISLQIHKYLNIP

SEQ ID NO: 31279 - protein, 209 aa, Lutibacter sp.
  misc_feature (1)..(209): tr|A0A559S4B2|A0A559S4B2_9FLAO 7-carboxy-7-deazaguanine synthase OS=Lutibacter sp. Hel_I_33_5 OX=1566289 GN=qu eE PE=3 SV=1
MDKKTKELVDLGKMLPLMEEFYTIQGEGFHTGTAAYFVRIGGCDVGCHWCDVKESWNADLHPPTSVDSIVESTKKHAKTVVVTGGEPLMWSMDYLTQQLQKQNIKTHIETSGAYSFSGVWDWFCLSPKKTKLPLEEVYKEADELKMIIHNTSDFKFAEEQAEKVGDNCELFLQPEWSKKEKMTEQIVEYVMKNPKWKISLQTHKYLNIP

SEQ ID NO: 31280 - protein, 210 aa, Lutibacter sp.
  misc_feature (1)..(210): tr|A0A1D8P3X1|A0A1D8P3X1_9FLAO 7-carboxy-7-deazaguanine synthase OS=Lutibacter sp. LPB0138 OX=1850246 GN=queE PE=3 SV=1
MVDTKTKQLIKEGKMLPLMEEFYTIQGEGSHTGTASYFIRIGGCDVGCHWCDVKESWNAELHPPTNTDLIVQNAKKYAKTVVITGGEPLMWDMSFLTQRLQEQNLKTHIETSGAYNLTGVWDWICLSPKKNKLPLKEVSDNANELKVIIFNKDDFKFAEAQASKVNSNCQLFLQPEWSNREKMTPMIVDYVMNNPQWKISLQTHKYLNIP

SEQ ID NO: 31281 - protein, 204 aa, Lyngbya aestuarii
  misc_feature (1)..(204): tr|U7QP66|U7QP66_9CYAN 7-carboxy-7-deazaguanine synthas e OS=Lyngbya aestuarii BL J OX=1348334 GN=queE PE=3 SV= 1
MNEIAIHETFQNTIQGEGFWAGTPVDFIRLAGCPVQCHYCDTGYANGGEGLPRNLRSFEALIAELRSPKVVISGGEPFIYPQLPDLVKCIEATNRTVSIETSGSFWQPISSSAWITLSPKEHLNSHYPVVAQMWERASEIKLVIETGSELKYYDQYLSLKPQIPIFLQPEWTQRDYTLPLVLNLLQQYPKYRLSLQLHKYLGVD

SEQ ID NO: 31282 - protein, 204 aa, Lyngbya sp.
  misc_feature (1)..(204): tr|A0YYS9|A0YYS9_LYNSP 7-carboxy-7-deazaguanine synthas e OS=Lyngbya sp. (strain PCC 8106) OX=313612 GN=queE PE =3 SV=1
MNEIAIHETFQNTIQGEGFWAGTPVDFIRLAGCPVQCHYCDTGYANGGEGLPRNVRSFEALIAELRSPKVVISGGEPFIYPQLPDLVKCIEATNRTVFIETSGCFWQPISSSVWITLSPKEHLNPHYPVVDQMWERASEIKLVIETGSELKYYDQYLSLKPQIPVFLQPEWTQRDYTLPLVLELLQQYPDYRLSLQLHKYVGVD

SEQ ID NO: 31283 - protein, 242 aa, Lysinibacillus boronitolerans
  misc_feature (1)..(242): tr|A0A0A3IKG4|A0A0A3IKG4_9BACI 7-carboxy-7-deazaguanine synthase OS=Lysinibacillus boronitolerans JCM 21713 = 10a = NBRC 103108 OX=1294264 GN=queE PE=3 SV=1
MSKIPVIEIFGPTIQGEGMVVGQKTMFVRTAGCDYSCSWCDSAFTWDGSGKHLIVQMTAEEIWAELKQLGGNGFSFVTISGGNPALNPNLAELIAILKENGIKIGVETQGSRWQKWMYEIDELTISPKPPSSGMTTDYSVLSYIFEKLKDRNNNHHVSLKIVVFNQEDYDYAKQIHHRYPMIPFYLQVGNDDLATTDNSQLMMHLLDKYHALIDRVMKDEDLRDVKVLPQLHAFVWGNKRGV

SEQ ID NO: 31284 - protein, 242 aa, Lysinibacillus chungkukjangi
  misc_feature (1)..(242): tr|A0A318TS72|A0A318TS72_9BACI 7-carboxy-7-deazaguanine synthase OS=Lysinibacillus chungkukjangi OX=1202712 GN =queE PE=3 SV=1
MSKIPVMEIFGPTIQGEGMVVGQKTMFVRTAGCDYSCSWCDSAFTWDGSGKHLISQLTAEEIWAELKRLGGNGFSFVTISGGNPVLLRNLEGLVNRLKENNIKIGVETQGSKWQEWLYEVDELTISPKPPSSGMVTNYSMLTEIIEKLNSKNSNQNISLKIVIFSEVDYAYAKDIHLRYPEIPFYLQVGNDDISESDNEKLVSRLLEKYEVLVDKVVADEELRNVRVLPQLHTLIWGNKRGV

SEQ ID NO: 31285 - protein, 242 aa, Lysinibacillus composti
  misc_feature (1)..(242): tr|A0A3N9ULF2|A0A3N9ULF2_9BACI 7-carboxy-7-deazaguanine synthase OS=Lysinibacillus composti OX=720633 GN=queE PE=3 SV=1
MSKIPVMEIFGPTIQGEGMVVGQKTMFVRTAGCDYSCSWCDSAFTWDGSGKNLITQMTAEEIWAELKRLGGDGFSFVTISGGNPVLLRNLDALVAILKENGIQIGVETQGSKWQEWLYEIDELTISPKPPSSGMKTNYSVLTDILEKLKKRNSHQHISLKIVVFNEEDYNYAKQVHLRYPTIPFYLQIGNDDIATTDNSQLVSKLLARYEALIDQVMADEELKDVKVLPQLHTLIWGNKRGV

SEQ ID NO: 31286 - protein, 242 aa, Lysinibacillus fusiformis
  misc_feature (1)..(242): tr|A0A4Y4IL33|A0A4Y4IL33_9BACI 7-carboxy-7-deazaguanine synthase OS=Lysinibacillus fusiformis OX=28031 GN=queE PE=3 SV=1
MSKVPVIEIFGPTIQGEGMVVGQKTMFVRTAGCDYSCSWCDSAFTWDGSGKHLIVQMTAGEIWSELKRLGGHGFSFVTISGGNPALYPNLEALIAILKENGIKIGVETQGSRWQNWMYDIDELTISPKPPSSGMTIDHSVLADILDKLKRGNRNHNISLKIVVFNQEDYDFAKQIHHRFPRIPFYLQVGNDDLTTIDNSRLINDLLEKYHALIGRVMKDDELKDVKVLPQLHALVWGNKRGV

SEQ ID NO: 31287 - protein, 242 aa, Lysinibacillus fusiformis
  misc_feature (1)..(242): tr|D7WZD0|D7WZD0_9BACI 7-carboxy-7-deazaguanine synthas e OS=Lysinibacillus fusiformis ZC1 OX=714961 GN=queE PE =3 SV=1
MSKVPVIEIFGPTIQGEGMVVGQKTMFVRTAGCDYSCSWCDSSFTWDGSGKHLIVQMTAEEIWSELKRLGGNGFSFVTISGGNPALNPNLAELIAILKENDIKIGVETQGSRWQKWMYEIDELTISPKPPSSGMTTDYSVLSYIFEKLKDRNSNHHVSLKIVVFNQEDYDYAKQIHHRYPMIPFYLQVGNDDLTATDNSQLMMNLLDKYRALIDRVMKDEDLRDVKVLPQLHALVWGNKRGV

SEQ ID NO: 31288 - protein, 242 aa, Lysinibacillus halotolerans
  misc_feature (1)..(242): tr|A0A3M8H8Y0|A0A3M8H8Y0_9BACI 7-carboxy-7-deazaguanine synthase OS=Lysinibacillus halotolerans OX=1368476 GN= queE PE=3 SV=1
MSKLPIIEIFGPTIQGEGMVVGQKTMFVRTAGCDYSCSWCDSAFTWDGTGKHLIVQMTAQEVWAELKRLGGNGFSFVTISGGNPALLRNLDALVALLKENNIKIGVETQGSKWQDWLYDIDELTISPKPPSSKMMTDFSMLSTILERLRGRNSNQHISLKVVIFNQEDYDYAKEVHRRYPTIPFYLQVGNDDITSIDNTRLVSHLLEKYQMLINQVMMDEELKNVKVLPQLHTLIWGNKRGV

SEQ ID NO: 31289 - protein, 242 aa, Lysinibacillus odysseyi
  misc_feature (1)..(242): tr|A0A0A3JEI8|A0A0A3JEI8_9BACI 7-carboxy-7-deazaguanine synthase OS=Lysinibacillus odysseyi 34hs-1 = NBRC 1001 72 OX=1220589 GN=queE PE=3 SV=1
MSKVPVIEIFGPTIQGEGMVVGQKTMFVRTAGCDYSCSWCDSSFTWDGSGKHLIVQLTAEEIWAELKRLGGNGFSFVTISGGNPALLRHLDALVVLLKENNIKIGVETQGSKWQDWLYDIDELTISPKPPSSGMSTDFSMPTEILGKLRDRNSNQHISLKIVVFNQEDYAYAKQVHLRYPTIPFYLQVGNDDIASMDNTRLVSHLLEKYQALIDQVMMDEELKNVKVLPQLHTLVWGNKRGV

SEQ ID NO: 31290 - protein, 236 aa, Lysinibacillus saudimassiliensis
  misc_feature (1)..(236): tr|A0A078MHT0|A0A078MHT0_9BACI 7-carboxy-7-deazaguanine synthase OS=Lysinibacillus saudimassiliensis OX=146158 3 GN=queE_1 PE=3 SV=1
MRKVPVLEIFGPTIQGEGMTIGRKTLFVRTAGCDYSCSWCDSAFTWDGSQRPTMMTAPEIMERLMALGLARTMHVTLSGGNPLLHASLGELVEALKAMGVTLTVETQASIWQDWLLRIDDVTLSPKPPSSGMTTDLAVLDCWVERLQTHSFSMKIVVFDDADYAFVKLLYVRYPNVTFYVQPGNADTTAQDEQATAMALLKRYEWLIDKVNTCDVLKKIYVLPQLHTLVWGNRQGV

SEQ ID NO: 31291 - protein, 367 aa, Lysinibacillus saudimassiliensis
  misc_feature (1)..(367): tr|A0A078MI78|A0A078MI78_9BACI 7-carboxy-7-deazaguanine synthase OS=Lysinibacillus saudimassiliensis OX=146158 3 GN=queE_2 PE=4 SV=1
MQTVVRPIDPWEPYADIDKYGKLTLSNIEFTTTNLCNMRCAHCAVGYTLQTKEDDALPVEQMIKALDEVESLRVMSFTGGEPLMTKRGIRDNLLPLLQYAKSRGIRTQINSNLTLPMAHYEMVAPYLDVMHISHNWSDEREFVETGFAMMDKKPSVAQRVTLYRNILDNARVLANGGMFVSAETMLNRNTVPHLAKIHNEVANEMLCRRHEIHPMYPSDFASDLETISLDEYRDVVNELLDIRNEDVWMLFGTLPFYPCSTDERDRAVLARIKAARNTTIRNDVDGRSRMNLNIFTGDVSVSDFADDGAALGNIKTQSLTTIYDEWLATHISDSINCHCPAVKCLGPNILVKNMYYPSHNFVSGTVK

SEQ ID NO: 31292 - protein, 242 aa, Lysinibacillus sp.
  misc_feature (1)..(242): tr|A0A0B1XVV2|A0A0B1XVV2_9BACI 7-carboxy-7-deazaguanine synthase OS=Lysinibacillus sp. A1 OX=1571920 GN=queE P E=3 SV=1
MSKVPVIEIFGPTIQGEGMVVGQKTMFVRTAGCDYSCSWCDSAFTWNGSGKHLIVQMTAEEIWSELKRLGGHGFSFVTISGGNPALYPNLEALIAILKENDIKIGVETQGSRWQNWMSDIDELTISPKPPSSGMTTDHSVLADILDKLKRQNSKHNISLKIVVFNQLDYDFAKQIHHLFPMIPFYLQVGNDNLTTIDNSRLINDLLEKYHALIDKVMKDDELKDVKVLPQLHALVWGNKRGV

SEQ ID NO: 31293 - protein, 242 aa, Lysinibacillus sp.
  misc_feature (1)..(242): tr|A0A4R7U4X4|A0A4R7U4X4_9BACI 7-carboxy-7-deazaguanine synthase OS=Lysinibacillus sp. YR326 OX=1855296 GN=que E PE=3 SV=1
MNKIPVIEIFGPTIQGEGMVVGQKTMFVRTAGCDYSCSWCDSSFTWDGSGKHLIVHMTAEEIWSELKRLGGNGFSFVTISGGNPALIRNLEELIAILKENDIKVGVETQGSRWQKWMYEIDELTISPKPPSSGMKTDYSVLSDIFEKLNNQNSNHHTSLKIVVFNQEDYDYAKQIHHRYPMIPFYLQVGNDDLTTTDNSRLIIDLLDKYHALIDRVIKDEELRDVKVLPQLHALVWGNKRGV

SEQ ID NO: 31294 - protein, 240 aa, Lysinibacillus sphaericus
  misc_feature (1)..(240): tr|A0A1D8JFL3|A0A1D8JFL3_LYSSH 7-carboxy-7-deazaguanine synthase OS=Lysinibacillus sphaericus OX=1421 GN=queE PE=3 SV=1
MTIPVLEIFGPTIQGEGMVIGQKTMFVRTAGCDYSCSWCDSKFTWDGSEKNNIRKMNAKEILDALIEEGGDRFGHVTISGGNPGLLPQLNNLVDLLHLHGVKVALETQGSKWQSWFTKINELTLSPKPPSSGMQTDFSVLDKIIESLSIEQKGTFSLKIVVFDDADLGYARKVHQRYPTVELFIQVGNDDLEKANEAELLAHLLERYEQLIDQVMADKELKHVRVLPQLHTYLWGNKRGV

SEQ ID NO: 31295 - protein, 242 aa, Lysinibacillus sphaericus; identical to SEQ ID NO: 31286
  misc_feature (1)..(242): tr|A0A410MN97|A0A410MN97_LYSSH 7-carboxy-7-deazaguanine synthase OS=Lysinibacillus sphaericus OX=1421 GN=queE PE=3 SV=1

SEQ ID NO: 31296 - protein, 242 aa, Lysinibacillus xylanilyticus
  misc_feature (1)..(242): tr|A0A0K9FCM3|A0A0K9FCM3_9BACI 7-carboxy-7-deazaguanine synthase OS=Lysinibacillus xylanilyticus OX=582475 GN= queE PE=3 SV=1
MSKIPVIEIFGPTIQGEGMVVGQKTMFVRTAGCDYSCSWCDSSFTWDGSGKHLIVQMTAEEIWSELKRLGGNGFSFVTISGGNPALIRNLEELIAILKENDIKVGVETQGSRWQKWMYEIDELTISPKPPSSGMTTDYSVLSDIFEKLKNQNSNYHISLKIVVFNQDDYDYAKQIHHLYPKIPFYLQVGNDDLTTTNNSRLIIDLLDKYHALIDRVIMDEELRDVKVLPQLHALVWGNKRGV

SEQ ID NO: 31297 - protein, 242 aa, Lysinibacillus xylanilyticus
  misc_feature (1)..(242): tr|A0A2M9Q9L4|A0A2M9Q9L4_9BACI 7-carboxy-7-deazaguanine synthase OS=Lysinibacillus xylanilyticus OX=582475 GN= queE PE=3 SV=1
MSKIPVIEIFGPTIQGEGMVVGQKTMFVRTAGCDYSCSWCDSSFTWDGSGKHLIAHMTAEEIWSELKRLGGNGFSFVTISGGNPALIRNLEELIAILKENDIKVGVETQGSRWQNWMYEIDELTISPKPPSSGMTTDYSVLSDIFEKLKNQNRNHNISLKIVVFNQEDYDYAKQIHHRYPMIPFYLQVGNDDMTTTNNSRLIIDLLDKYHALIDRVIKDEELRDVKVLPQLHALVWGNKRGV

SEQ ID NO: 31298 - protein, 225 aa, Lysobacter aestuarii
  misc_feature (1)..(225): tr|A0A508AM60|A0A508AM60_9GAMM 7-carboxy-7-deazaguanine synthase OS=Lysobacter aestuarii OX=1706195 GN=queE PE =3 SV=1
MNAVNADAAAVSPDRLRITEIFLSLQGESRSIGWPTVFVRLTGCPLRCQYCDTAYAFHGGEWWDIDAILAEVARLGARHVCVTGGEPLAQKRCIGLLERLCDAGLEVSLETSGAIDIAAVDPRVSRVLDIKTPDSAEAHRNLWSNLPLLTAHDQVKFVVCSRADYEWAREVVAEHRLVDTCDVLFSPSFTQVKPRDLADWIVEDRLPVRFQLQLHKILWDDAPGR

SEQ ID NO: 31299 - protein, 225 aa, Lysobacter antibioticus
  misc_feature (1)..(225): tr|A0A0S2F786|A0A0S2F786_9GAMM 7-carboxy-7-deazaguanine synthase OS=Lysobacter antibioticus OX=84531 GN=queE P E=3 SV=1
MTAVATETAAASSERLRLTEIFLSLQGESNSIGWPTVFVRLTGCPLRCQYCDTAYAFHGGEWWEFDAILAEVAQHGARHVCVTGGEPLAQKRCIALLQKLCDAGYEVSLETSGAIDIGPVDPRVSRVLDIKTPDSREAHRNLWSNLPLLTARDQIKFVICSREDYEWSKGIVAEHGLTQICDVLFSPSFTQVKPSDLADWIVADRLQVRFQLQLHKILWNDEPGR

SEQ ID NO: 31300 - protein, 225 aa, Lysobacter arseniciresistens
  misc_feature (1)..(225): tr|A0A0A0F214|A0A0A0F214_9GAMM 7-carboxy-7-deazaguanine synthase OS=Lysobacter arseniciresistens ZS79 OX=91332 5 GN=queE PE=3 SV=1
MNAVTPESAATSPDRLRLTEIFLSLQGESRSIGWPTVFVRLTGCPLRCQYCDTAYAFHGGQWWDYDGILAEVAGHGVRHVCVTGGEPLAQKRCIGLLQRLCDAGYEVSLETSGAMDIAEVDPRVSRVLDIKTPGSAEVERNLWSNIALLTAHDQVKFVICSREDYDWAKAMVAEHRLVERCEVLFSPSFSQVRPRELADWIVADRLPVRFQLQLHKILWDDEPGR

SEQ ID NO: 31301 - protein, 225 aa, Lysobacter capsici
  misc_feature (1)..(225): tr|A0A120AHW0|A0A120AHW0_9GAMM 7-carboxy-7-deazaguanine synthase OS=Lysobacter capsici AZ78 OX=1444315 GN=queE PE=3 SV=1
MNAVVTPTADAPSERLRLTEIFLSLQGESNSIGWPTVFVRLTGCPLRCQYCDTAYAFHGGQWWDFDAILAEVAQHGARHVCVTGGEPLSQKRCIQLLEKLCDAGYEVSLETSGAIDIGPVDPRVSRIVDIKTPDSKEVHRNLWSNLPLLTAHDQIKFVICSREDYEWSKAIVAEHGLTAICDVLFSPSFTQIKPSDLADWIVADRLPVRFQLQLHKILWNDEPGR

SEQ ID NO: 31302 - protein, 225 aa, Lysobacter capsici
  misc_feature (1)..(225): tr|A0A291A4R9|A0A291A4R9_9GAMM 7-carboxy-7-deazaguanine synthase OS=Lysobacter capsici OX=435897 GN=queE PE=3 SV=1
MNAVVTPTADAPSERLRLTEIFLSLQGESNSIGWPTVFVRLTGCPLRCQYCDTAYAFHGGQWWDFDAILAEVAQHGARHVCVTGGEPLSQKRCIQLLEKLCDAGYEVSLETSGAIDIGPVDPRVSRIVDIKTPDSKEVHRNLWSNLSLLTAHDQIKFVICSREDYEWSKAIVVEHGLTAICDVLFSPSFTQIKPSDLADWIVADRLPVRFQLQLHKILWNDEPGR

SEQ ID NO: 31303 - protein, 225 aa, Lysobacter concretionis
  misc_feature (1)..(225): tr|A0A0A0ESE5|A0A0A0ESE5_9GAMM 7-carboxy-7-deazaguanine synthase OS=Lysobacter concretionis Ko07 = DSM 16239 O X=1122185 GN=queE PE=3 SV=1
MNVALPEAAPLSPDRLRLTEIFLSLQGESRSIGWPTVFVRLTGCPLRCQYCDTAYAFHGGQWWDVDGILAEVARHGARHVCVTGGEPLAQKRCIGLLERLCDAGYEVSLETSGALDIGEVDPRVSRVLDIKTPGSAEVARNLWSNIALLTPHDQVKFVICSREDYDWARGIVEEHRLTDRCDVMFSPSFSQIRPRELADWIIADHLPVRFQLQLHKILWDDEPGR

SEQ ID NO: 31304 - protein, 225 aa, Lysobacter daejeonensis
  misc_feature (1)..(225): tr|A0A0A0EX47|A0A0A0EX47_9GAMM 7-carboxy-7-deazaguanine synthase OS=Lysobacter daejeonensis GH1-9 OX=1385517 G N=queE PE=3 SV=1
MSTVSPEAAAASPERLRLTEIFLSLQGESRSIGWPTVFVRLTGCPLRCQYCDTAYAFHGGQWWDFDTILAEVAQHGARHVCVTGGEPLAQKRCVELLRRLCDEGYDVSLETSGAIDIGPVDPRVSRVLDIKTPGSGEVARNLWSNLPLLTAHDQVKFVICSRGDYDWAKAIVAEHKLTQTCDVLFSPSFSQVDPSALADWIVADRLPVRFQLQLHKILWNDEPGR

SEQ ID NO: 31305 - protein, 225 aa, Lysobacter defluvii
  misc_feature (1)..(225): tr|A0A0A0M4G2|A0A0A0M4G2_9GAMM 7-carboxy-7-deazaguanine synthase OS=Lysobacter defluvii IMMIB APB-9 = DSM 1848 2 OX=1385515 GN=queE PE=3 SV=1
MNAVDHPAAAASPERLRLTEIFLSLQGESRTIGLPTVFVRLTGCPLRCQYCDTAYAFHGGEWWDYDGILTEVARHGVRHVCVTGGEPLAQKRCPELLRRLCDAGYAVSLETSGAMDIGVVDTRVSRVLDIKTPGSGEVARNLWDNLGKLTAHDQVKFVVCSREDYEWARAVLAEHRLADTCEVLFSPSFGQVDATALADWIVADRLPVRFQVQLHKLLWNDEPGR

SEQ ID NO: 31306 - protein, 231 aa, Lysobacter dokdonensis
  misc_feature (1)..(231): tr|A0A0A2WF29|A0A0A2WF29_9GAMM 7-carboxy-7-deazaguanine synthase OS=Lysobacter dokdonensis DS-58 OX=1300345 GN =queE PE=3 SV=1
MAPMSAVHPATQAAPAATADRLKLTEIFLSLQGEARDAGWPTVFVRLTGCPLRCQYCDTTYAFFGGQWWDIEAILAEVAKHGVRHVCVTGGEPLSQKRVIGLLSKLCDAGYVVSLETSGAIDIADVDTRVSRIVDIKTPGSGEVERNRWDNIPLLTPHDQVKFVVCSRADFEWARDVLFEHKLHERCDVLFSPSANEVPARELADWIVEARLPVRFQTQLHKALWGEEPGR

SEQ ID NO: 31307 - protein, 226 aa, Lysobacter enzymogenes
  misc_feature (1)..(226): tr|A0A3N2RJC5|A0A3N2RJC5_LYSEN 7-carboxy-7-deazaguanine synthase OS=Lysobacter enzymogenes OX=69 GN=queE PE=3 SV=1
MNAVVSETAAAPSSERLRLTEIFLSLQGESDSIGWPTVFVRLTGCPLRCQYCDTAYAFHGGEWWTYESILAEVARHGARHVCVTGGEPLAQKRCIELLKRLCDAGYEVSLETSGAIDIGPVDARVSRVLDIKTPDSKEAHRNLWSNLALLSARDQIKFVICSREDYEWSKVIVAEHGLTAVCAVMFSPSFHQVRPRDLADWIVADRLPVRFQLQLHKILWDDEPGR

SEQ ID NO: 31308 - protein, 227 aa, Lysobacter enzymogenes
  misc_feature (1)..(227): tr|A0A0S2DM67|A0A0S2DM67_LYSEN 7-carboxy-7-deazaguanine synthase OS=Lysobacter enzymogenes OX=69 GN=queE PE=3 SV=1
MNAAVVSETAAAPSSERLRLTEIFLSLQGESDSIGWPTVFVRLTGCPLRCQYCDTAYAFHGGEWWTYESILAEVASHGARHVCVTGGEPLAQKRCIELLKRLCDAGYEVSLETSGAIDIGPVDPRVSRVLDIKTPDSKEAHRNLWSNLALLSARDQIKFVICSREDYEWSKAIVAEHGLTAVCAVMFSPSFHQIRPRDLADWIVADRLPVRFQLQLHKILWDDEPGR

SEQ ID NO: 31309 - protein, 225 aa, Lysobacter gummosus
  misc_feature (1)..(225): tr|A0A0S2GBM6|A0A0S2GBM6_9GAMM 7-carboxy-7-deazaguanine synthase OS=Lysobacter gummosus OX=262324 GN=queE PE=3 SV=1
MNAVVTQTAEAPSERLRLTEIFLSLQGESNSIGWPTVFVRLTGCPLRCQYCDTAYAFHGGEWWEFDAILAEVAKHGARHVCVTGGEPLAQKRCIQLLQKLCDAGYEVSLETSGAIDIGPVDPRVSRVLDIKTPDSLEAHRNLWSNLPLLTAHDQIKFVICSREDYEWSKAIVAEHGLTAICDVLFSPSFTQIKPSDLADWIVADRLPVRFQLQLHKILWNDEPGR

SEQ ID NO: 31310 - protein, 230 aa, Lysobacter lycopersici
  misc_feature (1)..(230): tr|A0A516V7P9|A0A516V7P9_9GAMM 7-carboxy-7-deazaguanine synthase OS=Lysobacter lycopersici OX=1324796 GN=queE PE=3 SV=1
MNVVAPDAAAASAVAKPQDRLKITEVFLSLQGEARDAGWPTVFVRLTGCPLRCQYCDTAYAFHGGQWWEIDAILAEVARHGARHVCVTGGEPLAQKRCIALLSKLCEAGYSVSLETSGAIDIDGVDARVSRVLDIKTPGSGEAGRNLWSNLPLLTARDQVKFVICSRADFDWAKDVVSEHRLHETCDVLFSPSHAQVSPRELADWIVEEKLPVRFQLQLHKILWGEEPGR

SEQ ID NO: 31311 - protein, 225 aa, Lysobacter maris
  misc_feature (1)..(225): tr|A0A2U9TBE7|A0A2U9TBE7_9GAMM 7-carboxy-7-deazaguanine synthase OS=Lysobacter maris OX=1605891 GN=queE PE=3 S V=1
MSTVTADAAAASPDRLRITEIFLSLQGESRSIGWPTVFVRLTGCPLRCQYCDTAYAFHGGEWRTIDAILDEVAGHGARHVCVTGGEPLAQKRCIGLLERLCDAGYEVSLETSGALDIGAVDPRVSRVLDIKTPGSAEVGRNLWSNLALLTAHDQVKFVICSREDYDWARGIVAEHDLSARCDVLFSPSFSQVDASALADWIVADRLPVRFQLQLHKLLWNDEPGR

SEQ ID NO: 31312 - protein, 223 aa, Lysobacter pythonis
  misc_feature (1)..(223): tr|A0A3M2I3G6|A0A3M2I3G6_9GAMM 7-carboxy-7-deazaguanine synthase OS=Lysobacter pythonis OX=2483112 GN=queE PE= 3 SV=1
MNSSTPEPAVADRLRITEIFCSLQGESRSAGCPTVFVRLTGCPLRCGYCDTAYAFHGGEWREINAIVREVEGHGVRHVCVTGGEPLAQKRCIALLAKLCDAGFEVSLETAGALDIAGVDPRVARVVDIKTPGSGEAARNRWTNLALLTPRDQVKLVICSRADYDWAKAMLAEHRLAERCEVLFSPSYTELRPRELAEWIVADRLPVRFQMQLHKQLWGEEQGR

SEQ ID NO: 31313 - protein, 225 aa, Lysobacter ruishenii
  misc_feature (1)..(225): tr|A0A562M2N0|A0A562M2N0_9GAMM 7-carboxy-7-deazaguanine synthase OS=Lysobacter ruishenii OX=686800 GN=queE PE= 3 SV=1
MSTVSPEAAAASPERLRLTEIFLSLQGESRSIGWPTVFVRLTGCPLRCQYCDTAYAFHGGQWWDFDAILDEVARYGARHVCVTGGEPLAQKRCVELLRRLCDEGYEVSLETSGAIDIGAVDLRVSRVLDIKTPGSGEVERNLWSNLPLLTAHDQVKFVICSREDYEWAKGVVASQRLAETCDVLFSPSFSQVDPSALADWIVADRVPVRFQLQLHKILWNDEPGR

SEQ ID NO: 31314 - protein, 229 aa, Lysobacter silvestris
  misc_feature (1)..(229): tr|A0A2K1Q2U0|A0A2K1Q2U0_9GAMM 7-carboxy-7-deazaguanine synthase OS=Lysobacter silvestris OX=1645665 GN=queE P E=3 SV=1
MNAVVATAIEPSSEPTSERLRITEIFLSLQGEARDAGWPTVFVRLTGCPLRCLYCDTAYAFHGGEWVGIDDIVATVAGHGVRHVCVTGGEPLSQKRCIQLLKKLCDEGWIVSLETSGAIDIGDVDARVSRVVDIKTPGSGEVERNRWENIALLTAHDQVKFVICSREDFDWARAVVKEHALDTRCDVLFSPSHGQITPRELADWIVAEHLPVRFQMQLHKQLWGEEPGR

SEQ ID NO: 31315 - protein, 225 aa, Lysobacter soli
  misc_feature (1)..(225): tr|A0A3D8V9P5|A0A3D8V9P5_9GAMM 7-carboxy-7-deazaguanine synthase OS=Lysobacter soli OX=453783 GN=queE PE=3 SV= 1
MNAVPPDAAVASSDRLRITEIFLSLQGEARAIGWPTVFVRLTGCPLRCQYCDTAYAFHGGEWWQIDDILAEVARHGARHVCVTGGEPLSQKRCISLLKRLCDEGYDVSLETSGAIDIADVDPRVSRVLDIKTPGSMEVHRNLWSNLPLLTPHDQVKFVICSREDFDWAKDVVAEHRLTDVCDVLFSPSFAQIKPSDLADWIVAERLPVRFQLQLHKILWNDEPGR

SEQ ID NO: 31316 - protein, 228 aa, Lysobacter sp.
  misc_feature (1)..(228): tr|A0A5C8KQF3|A0A5C8KQF3_9GAMM 7-carboxy-7-deazaguanine synthase OS=Lysobacter sp. Alg18-2.2 OX=2603204 GN=que E PE=3 SV=1
MATDIDTAPEAEADASSRLKLTEIFLSLQGEARDAGWPTVFVRLTGCPLRCVYCDTAYAFHGGQWWDIDAILEEVARHGARHVCVTGGEPLAQKRCAVLLRRLCDAGYVVSLETSGALDISVADTRVSRIVDLKTPDSGECERNLWDNLAQLTAHDQVKFVICSRQDYEWAVQQVRERGLDRLCTVWFSPSFAQVAPRELADWILADHLPVRFQVQLHKQLWGDEPGR

SEQ ID NO: 31317 - protein, 225 aa, Lysobacter sp.
  misc_feature (1)..(225): tr|A0A0D0R7Q6|A0A0D0R7Q6_9GAMM 7-carboxy-7-deazaguanine synthase OS=Lysobacter sp. A03 OX=1199154 GN=queE PE=3 SV=1
MNPVTSEAGALSPDRLRLTEIFLSLQGESRSIGWPTVFVRLTGCPLRCQYCDTAYAFHGGQWWDIDAILAEVARHGVRHVCVTGGEPLAQKRCIGLLERLCDAGYEVSLETSGSIDISPVDTRVSRVLDLKTPGSAEVGRNLWSNIGQLTANDQVKFVICSREDYDWAREIVEQHGLTAICDVMFSPSFKQISARDLADWIVADRLPVRFQLQLHKILWDDEPGR

SEQ ID NO: 31318 - protein, 225 aa, Lysobacter spongiicola
  misc_feature (1)..(225): tr|A0A1T4QXL0|A0A1T4QXL0_9GAMM 7-carboxy-7-deazaguanine synthase OS=Lysobacter spongiicola DSM 21749 OX=112218 8 GN=queE PE=3 SV=1
MNAVTQEAAAASPERLRLTEIFLSLQGESRSIGWPTVFVRLTGCPLRCQYCDTAYAFHGGEWWDFDSILAEVARHGVRHVCVTGGEPLAQRRCVALLERLCDAGYEVSLETSGAIDIGPVDTRVSRVLDIKTPGSAEAHRNLWSNLPLLTAHDQVKFVICSREDYDWAKAVVAEHGLVDTCDVLFSPSFSQIQPRDLADWIVADRLPVRFQLQLHKILWDDAPGR

SEQ ID NO: 31319 - protein, 224 aa, Lysobacter tolerans
  misc_feature (1)..(224): tr|A0A1N6NHY0|A0A1N6NHY0_9GAMM 7-carboxy-7-deazaguanine synthase OS=Lysobacter tolerans OX=1604334 GN=queE PE= 3 SV=1
MNLIDDTSAPVADRLRITEIFCSLQGEARAAGWPTVFVRLTGCPLRCSYCDTAYAFHGGEWRDIDAIVEEVQSHGVRHVCVTGGEPLAQKRCITLLSKLCDAGFEVSLETSGAIDISEVDVRVSRVVDIKTPGSLEVARNRWENLPLLTPHDQVKFVICSREDYDWAKDVVAEHGLAHRCDVLFSPSYTQVAPRELADWIVEDRLPVKFQMQLHKQLWGEEQGR

SEQ ID NO: 31320 - protein, 236 aa, Macrococcus bohemicus
  misc_feature (1)..(236): tr|A0A4R5Y3G2|A0A4R5Y3G2_9STAP 7-carboxy-7-deazaguanine synthase OS=Macrococcus bohemicus OX=1903056 GN=queE P E=3 SV=1
MKIPVLEIFGPTIQGEGAVIGRKTMFVRTAGCDFKCDWCDSKFTWDGSAKDDIEMLTADIIFERLQQLAPNNFNHVTISGGNPALIKNIAALVEFLHIHNIEVSLETQGSKFQPWMTDVDQLTISPKPPSSKMHQDMHQLDFVINQLEYNKVSLKVVIFNDDDYKFAQMIHHRYPNIKFYLQVGNPYLDETVNDHTEKLLARYEAVIDKVMQDNTMNDCYVLPQLHTLLWSNKKGV

SEQ ID NO: 31321 - protein, 236 aa, Macrococcus bohemicus
  misc_feature (1)..(236): tr|A0A328A5A6|A0A328A5A6_9STAP 7-carboxy-7-deazaguanine synthase OS=Macrococcus bohemicus OX=1903056 GN=queE P E=3 SV=1
MKIPVLEIFGPTIQGEGAVIGRKTMFVRTAGCDFKCDWCDSKFTWDGSAKDDIEMLTADIIFERLQQLAPNNFNHVTISGGNPALIKNIAALVDFLHAHNIEVALETQGSKFQPWMTDIDQLTISPKPPSSKMHQDMHQLDFVINQLEYNKVSLKVVIFNDDDYKFAQMIHHRYPNIKFYLQVGNPYLDETVNDHTEKLLARYEALIDKVMQDNTMNDCYVLPQLHTLLWSNKKGV

SEQ ID NO: 31322 - protein, 235 aa, Macrococcus bovicus
  misc_feature (1)..(235): tr|A0A4V3BFK5|A0A4V3BFK5_9STAP 7-carboxy-7-deazaguanine synthase OS=Macrococcus bovicus OX=69968 GN=queE PE=3 SV=1
MIPVMEIFGPTIQGEGKVIGRKTMFVRTAGCDFRCSWCDSKFTWDGSMKEAIRMMTAEAIYAELREIGGPSFNHVTISGGNPALIKAIGTLVDLLHAEGCEVALETQGSKFQTWMRDIDQLTLSPKPPSSNMQQNLTLLDEDISQLDPSKINLKVVVFDEADYQFAKQIHHRYLGLPFYIQVGNPYLEDDVNDHTAKLLERYEELIARVMQDAEMNNVYVTPQLHTLLWSNRKGV

SEQ ID NO: 31323 - protein, 235 aa, Macrococcus brunensis
  misc_feature (1)..(235): tr|A0A4R6BGK7|A0A4R6BGK7_9STAP 7-carboxy-7-deazaguanine synthase OS=Macrococcus brunensis OX=198483 GN=queE PE =3 SV=1
MIPVMEIFGPTIQGEGIVIGRKTMFVRTAGCDFRCSWCDSKFTWDGSMKEDIRMMTTEDIYRELREIGGQSFNHVTISGGNPALIKDIGTLVDLLHAESCQVALETQGSKFQTWMRDIDQLTISPKPPSSGMNQNLTILDDVISQLDATKINLKVVVFDEADYQFAKQMHHRYLNLPFYVQVGNPYLEDEVNAHTSKLLARYEEVIDRVMQDDDMNHVYVTPQLHTLLWSNKKGV

SEQ ID NO: 31324 - protein, 236 aa, Macrococcus canis
  misc_feature (1)..(236): tr|A0A1W7A9L5|A0A1W7A9L5_9STAP 7-carboxy-7-deazaguanine synthase OS=Macrococcus canis OX=1855823 GN=queE_1 PE= 3 SV=1
MKIPVLEIFGPTIQGEGAVIGRKTMFVRTAGCDFSCVWCDSKFTWDGTMKDEIEMLTPETIYERLQAIAPNQFNHVTISGGNPALIKNLAGLVSLLHDNGMEVALETQGTRFQQWMTEIDQLTISPKPPSSTMTHDLEQLDSVIDQLDKDKITLKVVIFNDEDYAFSKMIHKRYPHITLYLQVGNPYLDDSVENHTERLLSHYEALIDKVMPDVEMNDVYVTPQLHTLLWSNKKGV

SEQ ID NO: 31325 - protein, 375 aa, Macrococcus canis
  misc_feature (1)..(375): tr|A0A1W7ADI3|A0A1W7ADI3_9STAP 7-carboxy-7-deazaguanine synthase OS=Macrococcus canis OX=1855823 GN=queE_2 PE= 4 SV=1
MIALKDKISIHNDPWEAYNDVEKFGETKLSNIEFTTTTLCNMRCAHCAVGYTLQLKDPETIDMTTILKRLDEVEHLSTLSITGGEPMFSKKSIKETVTPILEYAKSRGIYTQMNSNLTINYDRYEPLIDLIDVMHISHNWGTIDEFAEVGFHVMDKKPPLKMRYKLYEQIIENARRLSEAGMFVSAETMLNKSTLPYLEKIHKEIVNDMKCARHEVHPMYPSDFASDLNVLTIEETKAAIRQLLSFRDEDTWMLFGTLPILPCSMNADDLSFLDEVHSAKNVTVRNDPDGRSRLNVNVFTGDVIVTDFGDETGTIENIIDTPLQDVYDKWKQSALNQTINCHCPKVKCLGPNLLVKNMYYPEVDFKVNEKRMNNK

SEQ ID NO: 31326 - protein, 235 aa, Macrococcus carouselicus
  misc_feature (1)..(235): tr|A0A4R6BP51|A0A4R6BP51_9STAP 7-carboxy-7-deazaguanine synthase OS=Macrococcus carouselicus OX=69969 GN=queE PE=3 SV=1
MIPVMEIFGPTIQGEGIVIGRKTMFVRTAGCDFRCSWCDSRFTWDGTMKDDIRMMSAAEIYHELREIGGQSFNHVTISGGNPALIKDMGVLVDLLHKENCQVAMETQGSKFQNWMRDIDQLTISPKPPSSHMNQNLDILDTVIAELMPQKINLKVVVFDEADYQFARQIHHRYPAIAFYVQVGNPYLDDTVDKHTEKLLSRYEQLIDRVMTDDTMNNVYVTPQLHTLIWSNKKGV

SEQ ID NO: 31327 - protein, 237 aa, Macrococcus caseolyticus
  misc_feature (1)..(237): tr|A0A3B0EZL4|A0A3B0EZL4_9STAP 7-carboxy-7-deazaguanine synthase OS=Macrococcus caseolyticus OX=69966 GN=queE PE=3 SV=1
MMKIPVLEIFGPTIQGEGAVIGRKTMFVRTAGCDFSCAWCDSKFTWDGTMKDEIEMLTPETIYERLQAIAPNQFNHVTISGGNPALIKNLAGLVSLLHDNGIEVALETQGTRFQQWMTEIDQLTISPKPPSSAMTHNLKQLDRIIDQLDKDKVTLKVVIFNDEDYAFSKLIHKRYPHNTLYLQVGNPYLDDSVENHTERLLSHYEALIDKVMPDVEMNDVYVTPQLHTLLWSNKKGV

SEQ ID NO: 31328 - protein, 236 aa, Macrococcus caseolyticus
  misc_feature (1)..(236): tr|B9EAA9|B9EAA9_MACCJ 7-carboxy-7-deazaguanine synthas e OS=Macrococcus caseolyticus (strain JCSC5402) OX=4582 33 GN=queE PE=3 SV=1
MKIPVLEIFGPTIQGEGAVIGRKTMFVRTAGCDFSCAWCDSKFTWDGTMKDEIEMLLPETIYERLQSIAPNQFNHVTISGGNPALIKNLAGFVSLLQDKGIEVALETQGTKFQSWMTEIDQLTISPKPPSSTMTHDLDQLDAVLHELDSDKVTLKVVIFNDEDYHFSKMIHKRYPHITMYLQVGNPYLDDTVEDHTSRLLSHYETLIDKVMPDSEMNDVYITPQLHTLLWSNKKGV

SEQ ID NO: 31329 - protein, 236 aa, Macrococcus epidermidis
  misc_feature (1)..(236): tr|A0A327ZVJ8|A0A327ZVJ8_9STAP 7-carboxy-7-deazaguanine synthase OS=Macrococcus epidermidis OX=1902580 GN=queE PE=3 SV=1
MKIPVLEIFGPTIQGEGAVIGRKTMFVRTAGCDFKCDWCDSKFTWDGSAKDDIEMLTADIIFERLQQLAPNNFNHVTISGGNPALIKNIAALVELLHAHNIEVALETQGSKFQPWMTEIDQLTLSPKPPSSKMQQDINQLDFVINQLEYNKVSLKIVIFNDDDYKFAQMIHHRYPNIKFYLQVGNPYLDETVNDHTEKLLARYEALIDKVMQDNTMNDCYVLPQLHTLLWSNKKGV

SEQ ID NO: 31330 - protein, 236 aa, Macrococcus goetzii
  misc_feature (1)..(236): tr|A0A4R6CFC1|A0A4R6CFC1_9STAP 7-carboxy-7-deazaguanine synthase OS=Macrococcus goetzii OX=1891097 GN=queE PE= 3 SV=1
MKIPVLEIFGPTIQGEGAVIGRKTMFVRTAGCDFKCDWCDSKFTWDGSAKDDIEMLTADIIFERLQQLAPNNFNHVTISGGNPALIKNIAALVKLLHAHNIEVALETQGSKFQLWMTDIDQLTLSPKPPSSKMKQDMHQLDFVINQLEYNKVSLKIVIFNDDDYKFAQMIHHRYPNIKFYLQVGNPYLDETVNDHTEKLLARYEALIDKVMQDNTMNDCYVLPQLHTLLWSNKKGV

SEQ ID NO: 31331 - protein, 236 aa, Macrococcus goetzii
  misc_feature (1)..(236): tr|A0A395G8Y4|A0A395G8Y4_9STAP 7-carboxy-7-deazaguanine synthase OS=Macrococcus goetzii OX=1891097 GN=queE PE= 3 SV=1
MKIPVLEIFGPTIQGEGAVIGRKTMFVRTAGCDFKCDWCDSKFTWDGSAKDDIEMLTADIIFERLQQLAPNNFNHVTISGGNPALIKNIATLVELLHAHNIEVALETQGSKFQSWMTDIDQLTLSPKPPSSKMKQDMHQLDFVINQLEYNKVSLKIVIFNDDDYKFAQMIHHRYPNIKFYLQVGNPYLDETVNDHTEKLLARYEALIDKVMQDNTMNDCYVLPQLHTLLWSNKKGV

SEQ ID NO: 31332 - protein, 235 aa, Macrococcus hajekii
  misc_feature (1)..(235): tr|A0A4R6BIN9|A0A4R6BIN9_9STAP 7-carboxy-7-deazaguanine synthase OS=Macrococcus hajekii OX=198482 GN=queE PE=3 SV=1
MIPVMEIFGPTIQGEGIVIGRKTMFVRTAGCDFRCSWCDSKFTWDGTMKDEIRMMTAEEIYGELRAAGGQSFNHVTLSGGNPALIKDLGQLIDLLHLEGCQVALETQGSKYQDWMNRIDQLTISPKPPSSTMNQDLDKLDDIISQLDTDKINLKVVVFEETDYQFAKKIHHCYPQLPFYIQVGNPYLDDSVDNHTEKLLHRYEALIDRVMADDEMNNVYVTPQLHTLLWSNQKGV

SEQ ID NO: 31333 - protein, 236 aa, Macrococcus lamae
  misc_feature (1)..(236): tr|A0A4R6BVM0|A0A4R6BVM0_9STAP 7-carboxy-7-deazaguanine synthase OS=Macrococcus lamae OX=198484 GN=queE PE=3 S V=1
MKIPVLEVFGPTIQGEGAVIGRKTMFVRTAGCDFRCSWCDSKFTWDGTAKDDIRMMTAEDIFSELQAVGGNRFNHVTISGGNPALIKGIGSLVSLIHEHGFEVALETQGSKFQNWMTDIDQLTISPKPPSSQMIQDLTILDEVIQQLPQENISLKVVTFDETDYQFAKMIHQRYPDIKFYLQVGNPYLDDTVSHHTEKLLNHYERLIDRVMTDDTMNQVFVTPQLHTLLWSNKKGV

SEQ ID NO: 31334 - protein, 239 aa, Macrococcus sp.
  misc_feature (1)..(239): tr|A0A4Q1AZD9|A0A4Q1AZD9_9STAP 7-carboxy-7-deazaguanine synthase OS=Macrococcus sp. DPC7161 OX=2507060 GN=queE PE=3 SV=1
MSKKIPVLEIFGPTIQGEGMVIGRKTMFVRTAGCDFSCSWCDSKFTWDGSAKEDIRMMEAEAIYDKLIKIGKSFDHVTISGGNPALIKNMNTLIDFLHENNIKVALETQGSRWQDWMINIDDLTISPKPPSSSMKQDLNVLDEVIQNLDLSKQQVSLKVVIFNDEDYQFAKMIHKRYPNIPFYLQVGNPYLDETVENHTILLLERYENLINQVMDDVEMNACYVTPQLHTLIWSNKKGV

SEQ ID NO: 31335 - protein, 204 aa, Magnetococcus marinus
  misc_feature (1)..(204): tr|A0L5B2|A0L5B2_MAGMM 7-carboxy-7-deazaguanine synthas e OS=Magnetococcus marinus (strain ATCC BAA-1437 / JCM 17883 / MC-1) OX=156889 GN=queE PE=3 SV=1
MSDTYAICDIFHSIQGEATHTGLPMVFIRFSGCPLRCSWCDEPLHRQADKAEHLTLTQLRSRILELAPHTTNLLLTGGEPLMAPHLDRLVDYFKDQGYWIAMETCGEGGEIPAEVDWVTLSPKNQLPQSLYERADEVKLVLGADADQSDKERLTQCHHPNLWLQPRALPTGPDPMAVALCYRWALESGGAWRLSLQTHKYIGVP

SEQ ID NO: 31336 - protein, 209 aa, Magnetococcus massalia
  misc_feature (1)..(209): tr|A0A1S7LJF8|A0A1S7LJF8_MAGMO 7-carboxy-7-deazaguanine synthase OS=Magnetococcus massalia (strain MO-1) OX=45 1514 GN=queE PE=3 SV=1
MSVGDPTYAICELFHSVQGEATWMGRPMLFVRFSGCPLSCSWCDEPLHRDPAKAESLTAEQLLARLHALSADTPFVLLTGGEPLAVPQLGELVAFLQQHGYWVAMETSGVGGTIPDSLDWVTLSPKTVLDEALYQRADEIKYVVPAQGQPQLQAELMQRARTHGRVWLQPRAHGDGPDPVATARCFQWVLESAGKLRLSLQTHRYIGVD

SEQ ID NO: 31337 - protein, 179 aa, Magnetofaba australis
  misc_feature (1)..(179): tr|A0A1Y2K2T9|A0A1Y2K2T9_9PROT 7-carboxy-7-deazaguanine synthase OS=Magnetofaba australis IT-1 OX=1434232 GN=q ueE PE=3 SV=1
MRFSGCPLACPWCDEPKHRDPALAEQVTVEELSQRIQALAPLCRNLLLTGGEPLAVANLQTFIDHFKQAGYWIAMESSGVGGPVPEGLDWLTLSPKTALDEELLMRANELKFIGGTDMSDAQWSRIEALGAQHPLVWLQPRAIGDKPDPAAARACIQRIQSSSGNVRLSIQSHKYLGIQ

SEQ ID NO: 31338 - protein, 202 aa, Magnetospirillum caucaseum
  misc_feature (1)..(202): tr|M3AGG4|M3AGG4_9PROT 7-carboxy-7-deazaguanine synthas e OS=Magnetospirillum caucaseum OX=1244869 GN=queE PE=3 SV=1
MPYTVREIFHSLQGEGVQAGRPAVFLRFSGCNLWSGREEDRAAAACRFCDTDFVGGEKYPDAQALAGAVRNVGGATRTVVVTGGEPGLQLDAALVAALHGLGFEVAVETNGTVDLPPGIDWVCVSPKAGTTLKVTRGDELKLVFPQAGAAPETFEHLDFTHFLVQPMDGPERDANTRAAIAHCLTRPRWRLSLQTHKIVGIP

SEQ ID NO: 31339 - protein, 210 aa, Magnetospirillum gryphiswaldense
  misc_feature (1)..(210): tr|V6F8P2|V6F8P2_MAGGM 7-carboxy-7-deazaguanine synthas e OS=Magnetospirillum gryphiswaldense (strain DSM 6361 / JCM 21280 / NBRC 15271 / MSR-1) OX=431944 GN=queE PE= 3 SV=1
MAYKVKELFYTLQGEGGQAGRAAIFLRFAGCNLWSGREADRATAQCPFCDTDFVGGDKYADADALAGAVAALWPKGGGGQPLVVITGGEPGLQLDEALIQALHFWGLEIAVETNGTISLPPGIDWVCVSPKAGQDLETVAGDEIKLVWPQDGIDPTRFEKMPFRHYFLQPKDVPGDSAAQAAHLQACVAYCLTHPRWRLSLQTHKILGIP

SEQ ID NO: 31340 - protein, 210 aa, Magnetospirillum gryphiswaldense
  misc_feature (1)..(210): tr|A4TYV8|A4TYV8_9PROT 7-carboxy-7-deazaguanine synthas e OS=Magnetospirillum gryphiswaldense OX=55518 GN=queE PE=3 SV=1
MAYKVKELFYTLQGEGGQAGRAAIFLRFAGCNLWSGREADRATAQCPFCDTDFVGGDKYADADALAGAVAALWPKGGGGQPLVVITGGEPGLQLDEALIQALHFWGLEIAVETNGTIALPPGIDWVCVSPKAGQDLETIAGDEIKLVWPQDGIDPTRFEKMPFRHYFLQPKDVPGDSAAQAAHLQACVAYCLTHPRWRLSLQTHKILGIP

SEQ ID NO: 31341 - protein, 205 aa, Magnetospirillum kuznetsovii
  misc_feature (1)..(205): tr|A0A364NXE8|A0A364NXE8_9PROT 7-carboxy-7-deazaguanine synthase OS=Magnetospirillum kuznetsovii OX=2053833 GN =queE PE=3 SV=1
MPYTVKEVFLTLQGEGAQAGCAAVFLRFAACNLWNGREEDRATAACRFCDTDFVGGEKFPDAETLTERVAGLWPVGQGSRLVVITGGEPALQLDQVLVDALHDRGFRVAIETNGTLALPDGIDWVCVSPKAGTQLVVTQGDELKLVFPQPGLDPAGFEYLGFSHLLLQPMDGPERDANTQAAIRHCLTHPRWRLSLQTHKIIGIA

SEQ ID NO: 31342 - protein, 202 aa, Magnetospirillum magneticum
  misc_feature (1)..(202): tr|Q2WAS4|Q2WAS4_MAGSA 7-carboxy-7-deazaguanine synthas e OS=Magnetospirillum magneticum (strain AMB-1 / ATCC 7 00264) OX=342108 GN=queE PE=3 SV=1
MSYTVREIFHSLQGEGVQAGRPAVFLRFAGCNLWSGREADRETATCRFCDTDFVGGEKYPDAQGLAEAVKAVGGATRYVVVTGGEPGLQLDGALVEALHGLGFEVAIETNGTVELPSGLDWVCVSPKAGTTLKVTRGDELKLVFPQAGAMPGDFEHLDFAYFLLQPMDGPERDAHTRAAIGHCLTHPRWRLSLQTHKIVGIP

SEQ ID NO: 31343 - protein, 202 aa, Magnetospirillum magnetotacticum
  misc_feature (1)..(202): tr|A0A0C2U9G0|A0A0C2U9G0_MAGMG 7-carboxy-7-deazaguanine synthase OS=Magnetospirillum magnetotacticum MS-1 OX=2 72627 GN=queE PE=3 SV=1
MSYTVREIFHSLQGEGVQAGRAAVFLRFSGCNLWSGRQEDRAKAVCRFCDTDFVGGVKYSDAQSLAEAVKAVGGSTRYVVVTGGEPGLQLDETLIHALHGLGFSVAVETNGTLGLPSGLDWVCVSPKAGTELMVTRGDELKLVFPQDGAAPEAFEHLDFAHFLLQPMDGPDRAANTAAAIAHCLTHPRWRLSLQTHKIVGIP

SEQ ID NO: 31344 - protein, 205 aa, Magnetospirillum marisnigri
  misc_feature (1)..(205): tr|A0A178MS25|A0A178MS25_9PROT 7-carboxy-7-deazaguanine synthase OS=Magnetospirillum marisnigri OX=1285242 GN= queE PE=3 SV=1
MPYTVKEIFPSLQGEGIQAGRAAIFLRFAACNLWNGREEDRAKAACGFCDTDFVGGEKFPDAETLAERVAGLWPVGQGNRYVVVTGGEPALQLDAVLVAALHDRGFQVAIETNGTLALASGIDWVCVSPKAGCDLVVTSGDELKLVYPQAGAPPEAFERLGFTHFLLQPMDGPDREANTREALRHCLTHPRWRLSLQTHKIIGIP

SEQ ID NO: 31345 - protein, 204 aa, Magnetospirillum marisnigri
  misc_feature (1)..(204): tr|A0A178MHE8|A0A178MHE8_9PROT 7-carboxy-7-deazaguanine synthase OS=Magnetospirillum marisnigri OX=1285242 GN= queE PE=3 SV=1
MSYQVKEIFYSLQGEGAHSGRPAIFCRFSNCNLWSGKDEDRASAICKFCDTDFVGGDEYTLDCLVQAIAAKWPGGGKPYVICTGGEPLLQVDIPLVDALHNAGFEVAVETNGTVGKHDVAAKLDWVCVSPKADARVKLDQGHELKLVYPQAENHPSDFERMGFKHFFLQPCDGVEGSMKMAIDYCLAHPHWSLSLQTHKIGGFE

SEQ ID NO: 31346 - protein, 202 aa, Magnetospirillum moscoviense
  misc_feature (1)..(202): tr|A0A178MQV6|A0A178MQV6_9PROT 7-carboxy-7-deazaguanine synthase OS=Magnetospirillum moscoviense OX=1437059 GN =queE PE=3 SV=1
MAYTVKELFYTLQGEGGQAGRAAIFIRLAGCNLWSGREEDRDAAACRFCDTDFVGGERYGDAVALARAAADLWPGGGFPLAVVTGGEPGLQLDDALVRALHDHGFEVAVETNGTIALPAGLDWVCVSPKAGTELKVAAGEEIKLVWPQDGIDPDALLRLPFRHFFLQPRDGVAGSVQECVSYCLTHPGWRLSLQTHKLLGIP

SEQ ID NO: 31347 - protein, 202 aa, Magnetospirillum sp.
  misc_feature (1)..(202): tr|A0A0U5ME91|A0A0U5ME91_9PROT 7-carboxy-7-deazaguanine synthase OS=Magnetospirillum sp. XM-1 OX=1663591 GN=qu eE PE=3 SV=1
MSYTVREIFHTLQGEGVQAGRPAVFLRFAGCNLWSGREEDRADATCRFCDTDFVGGEKFADAAALADAVLAAGGDTRYVVVTGGEPGLQLDTALVRALHARGFQIAIETNGTVDLPGGIDWVCVSPKAGTGLKTTRGDELKLVFPQAGAAPEDFESLDFAHFLLQPMDGPDREANTQAAIAHCLTHPRWRLSLQTHKLLGIP

SEQ ID NO: 31348 - protein, 206 aa, Magnetospirillum sp.
  misc_feature (1)..(206): tr|A0A1M3LJB9|A0A1M3LJB9_9PROT 7-carboxy-7-deazaguanine synthase OS=Magnetospirillum sp. 64-120 OX=1895778 GN= queE PE=3 SV=1
MAYTVKEIFYTLQGEGGQAGRAAVFLRFSGCNLWSGREEDRETAQCRFCDTDFVGGDKFADAESLAQTVASHWPKGAGGHPLVVVTGGEPGLQLDDALVLALHQQGFEIAVESNGTVELPAGIDWVCVSPKAGTTLKVLAGEEIKLVWPQDGVDLGVLERLPFRHYFIQPMDGPDQAAHIQAAISFCLTHPRWRLSLQTHKLLGIP

SEQ ID NO: 31349 - protein, 211 aa, Magnetovibrio blakemorei
  misc_feature (1)..(211): tr|A0A1E5QC00|A0A1E5QC00_9PROT 7-carboxy-7-deazaguanine synthase OS=Magnetovibrio blakemorei OX=28181 GN=queE PE=3 SV=1
MTYQVKELFYSLQGEGANSGRASVFCRFAGCNLWSGREADRSAAACDFCDTDFVGGDKYPDAETLAAAILQLWPTHVEHKGGAEHKFVILTGGEPGLQVDAALIDALHGHGFEIAIESNGTQVLPDGLDWIAISPKAGAALVVTAGDELKVVYPQAGLDLDSFAALDFAHFYVQPKDGPDAAQNVVLAIDYCRAHPQWRLSLQTHKVLNIR

SEQ ID NO: 31350 - protein, 209 aa, Magnetovibrio sp.
  misc_feature (1)..(209): tr|A0A2E3P6H0|A0A2E3P6H0_9PROT 7-carboxy-7-deazaguanine synthase OS=Magnetovibrio sp. OX=2024836 GN=queE PE=3 SV=1
MAYSVKEIYFTLQGEGAQTGRPAVFLRFAGCNLWSGREQDRATAQCRFCDTDFIGTDGPSGGSFKDANALAAAAAESWPGGGAPLVVCTGGEPLLQLDEPLIDALHDVGFRVAVETNGTLNAPDGLDWICVSPKAGTEVVQRRGDELKLVFPQAGAEPDRFEDWDFANFLLQPMDGPDRAANTVAAVAYCLAHPKWRLSLQTHKMLGIP

SEQ ID NO: 31351 - protein, 209 aa, Magnetovibrio sp.
  misc_feature (1)..(209): tr|A0A2D8YU80|A0A2D8YU80_9PROT 7-carboxy-7-deazaguanine synthase OS=Magnetovibrio sp. OX=2024836 GN=queE PE=3 SV=1
MTYSVKEIYFTLQGEGAQTGRPAVFLRFAGCNLWSGREQDRATAQCRFCDTDFVGTDGPGGGAFKDADSLAAAVAAAWPGGGDPLVVCTGGEPLLQVDGTLIAALHDADFRVAVETNGTLSAPDGLDWICVSPKAGTEVVQRRGNELKLVFPQAGAAPEAFADWAFDNFLLQPMDGPERDANTQAAVDYCLAHPKWRLSLQTHKLLGIP

SEQ ID NO: 31352 - protein, 210 aa, Malikia granosa
  misc_feature (1)..(210): tr|A0A2S9K2F9|A0A2S9K2F9_9BURK 7-carboxy-7-deazaguanine synthase OS=Malikia granosa OX=263067 GN=queE PE=3 SV= 1
MTYSVKEIFYTLQGEGLRAGRSAVFCRFAGCNLWSGREQDRSSAICRFCDTDFVGTDGTLGGKFAQAAELAERIAAQWPQGQGQRYVVLTGGEPLLQVDAALIDALHAQGFEVAVETNGSIEAPAGIDWICVSPKAGAPLLQTQGQELKLVWPQPGLDPEQLGQLDFEHFLLQPMDNPAQADNTQACIAYCQAHPQWRLSLQTHKILEIR

SEQ ID NO: 31353 - protein, 210 aa, Malikia spinosa
  misc_feature (1)..(210): tr|A0A2S9KCR7|A0A2S9KCR7_9BURK 7-carboxy-7-deazaguanine synthase OS=Malikia spinosa OX=86180 GN=queE PE=3 SV=1
MTYSVKEIFYTLQGEGLRAGRSAVFCRFAGCNLWSGREQDRASAICRFCDTDFVGTDGTLGGKFAEAAELAARIATLWPEGRGQRYVVLTGGEPLLQVDSALIDALHAQGFEVAVETNGSIEAPTGIDWICVSPKAGAPLLQTSGQELKLVWPQPGLDPAELGRLDFEHFLLQPMDNPAQAANTQACIAYCQAHPQWRLSLQTHKILEIR

SEQ ID NO: 31354 - protein, 251 aa, Malonomonas rubra
  misc_feature (1)..(251): tr|A0A1M6K8T7|A0A1M6K8T7_MALRU 7-carboxy-7-deazaguanine synthase OS=Malonomonas rubra DSM 5091 OX=1122189 GN=q ueE PE=3 SV=1
MPAIPQIDLPLIEAFSSIQGEGLLVGCRQIFLRLPNCNLNCNYCDTPFASTKSCLLENPPGSGTIIELENPVSLPRLMETFSDWCAKAPGVHHSFSLTGGEPLLHADLLQECLPVLRKLLPIYLETNGTLPDQLETLISQIDWVSMDIKLESMSGEKTDWELQRCFLEIANRTQCYVKIVVGRETTDAELQKAAEIVSSVSENISLILQPVTIEAKPGMGTQHLLKMQDVVAAINPNVRIIPQTHVYLGLL

SEQ ID NO: 31355 - protein, 236 aa, Mameliella alba
  misc_feature (1)..(236): tr|A0A0B3REM3|A0A0B3REM3_9RHOB 7-carboxy-7-deazaguanine synthase OS=Mameliella alba OX=561184 GN=queE PE=3 SV= 1
MTTLRIAEIFGPTIQGEGALIGEPTLFVRAGGCDYRCVWCDSMHAVDSAYRHTWTAMKPEAVWAELRRLSGDRPVTVSLSGGNPAIQDFGPLIALGRAAGYRFACETQGSVARPWFSDLDTLVLSPKPPSSGERVDWGTFADCVEAGRGARSTVMKIVVFDGADYAWAKEAHARHPELPLYLQPGNPEVDPQTPVDSQALADRLGWLTETAMADRWFAPRILPQLHVLIWGNRRGV

SEQ ID NO: 31356 - protein, 223 aa, Mangrovibacter phragmitis
  misc_feature (1)..(223): tr|A0A1B7KZB5|A0A1B7KZB5_9ENTR 7-carboxy-7-deazaguanine synthase OS=Mangrovibacter phragmitis OX=1691903 GN=qu eE PE=3 SV=1
MQYPINEIFQTLQGEGYFTGVPAIFIRLQGCPVGCAWCDTKHTWDKLAEREVSLFSVMAKTKESDKWAASTPEELLAVINRQGYTARHVVITGGEPCIHDLTPLTQLLEQHGYQCQIETSGTHEVQATANTWVTVSPKVNMRGGYDVLGQALVRADEIKHPVGRVRDIEALDALLATLTDEKPRIIALQPISQKEDATRLCIETCIARNWRLSMQTHKYLNIA

SEQ ID NO: 31357 - protein, 223 aa, Mangrovibacter plantisponsor
  misc_feature (1)..(223): tr|A0A317QCH9|A0A317QCH9_9ENTR 7-carboxy-7-deazaguanine synthase OS=Mangrovibacter plantisponsor OX=451513 GN= queE PE=3 SV=1
MQYPINEIFQTLQGEGYFTGVPAIFIRLQGCPVGCAWCDTKHTWDKLAEREVSLFSVMAKTKESDKWAASTPEELLAVVNRQGYTARHVVITGGEPCIHDLTPLTQLLEQHGYQCQIETSGTHEVLATANTWVTVSPKVNMRGGYDVLGQALVRADEIKHPVGRVRDIEALDALLATLTDEKPRIIALQPISQKEDATRLCIETCIERNWRLSMQTHKYLNIA

SEQ ID NO: 31358 - protein, 223 aa, Mangrovibacter sp.
  misc_feature (1)..(223): tr|A0A071MD27|A0A071MD27_9ENTR 7-carboxy-7-deazaguanine synthase OS=Mangrovibacter sp. MFB070 OX=1224318 GN=qu eE PE=3 SV=1
MQYPINEIFQTLQGEGYFTGVPAIFIRLQGCPVGCAWCDTKHTWDKLAEREVSLFSVMAKTKESDKWAASTPEELLAVANRQGYTARHVVITGGEPCIHDLTPLTQLLEQHGYQCQIETSGTHEVLATANTWVTVSPKVNMRGGYDVLGQALVRADEIKHPVGRVRDIEALDALLATLSDEKPRIIALQPISQKEDATRLCIETCIERNWRLSMQTHKYLNIA

SEQ ID NO: 31359 - protein, 201 aa, Mangrovibacterium diazotrophicum
  misc_feature (1)..(201): tr|A0A419W460|A0A419W460_9BACT 7-carboxy-7-deazaguanine synthase OS=Mangrovibacterium diazotrophicum OX=126140 3 GN=queE PE=3 SV=1
MSVNLTVNEIFYSLQGEGSRAGIPNIFIRLSKCNLNCWFCDTEFESGESYSLEQLLDEISQFPCKNIIWTGGEPALQLTEEIVGFFKERGYYQAIETNGTKPLPSNLDFVTCSPKQVTAEQLKRNFPNGVSEMKCIFNENPEYAIEELPEAQHYFLSPVFLGKEKERMDMDKNILQRCIDYILANPGWQLSIQQHKVWNIR

SEQ ID NO: 31360 - protein, 201 aa, Mangrovibacterium marinum
  misc_feature (1)..(201): tr|A0A2T5BZU1|A0A2T5BZU1_9BACT 7-carboxy-7-deazaguanine synthase OS=Mangrovibacterium marinum OX=1639118 GN=qu eE PE=3 SV=1
MSVNLTVNEIFYSLQGEGSRAGTPNIFIRLSNCNLNCWFCDTEFESGESYSLQQLLEEISQFPCKNIIWTGGEPALQLTDEIVAFFKEHGYYQAIETNGTKPLPSKLDFISCSPKQVTAARLRENFPDGVSEIKCLFQQAPDYDLHELPKAEHYLLSPIFLGKEKERMELDREILQRCIDYILKNPDWQLSIQQHKVWNIR

SEQ ID NO: 31361 - protein, 209 aa, Mangrovimonas sp.
  misc_feature (1)..(209): tr|A0A1V1ZDY7|A0A1V1ZDY7_9FLAO 7-carboxy-7-deazaguanine synthase OS=Mangrovimonas sp. DI 80 OX=1779330 GN=queE PE=3 SV=1
MKQDVQTLVDKGLMLPLMEEFYTIQGEGFYKGTAAYFIRVGGCDVGCHWCDVKESWNAEIHPPTETSKIVENAAKYSDTIVVTGGEPLTWDMTELTRQLKEKGLKVHIETSGAYELSGTWDWICLSPKKMKLPTQKVYENANELKVIVYNMDDFRFAEEQAAQVNKDCILYLQPEWSKREKMIPEIVDYVMKNPKWKVSLQTHKYLNIP

SEQ ID NO: 31362 - protein, 209 aa, Mangrovimonas sp.
  misc_feature (1)..(209): tr|A0A428K2Y5|A0A428K2Y5_9FLAO 7-carboxy-7-deazaguanine synthase OS=Mangrovimonas sp. HN-E26 OX=2494697 GN=que E PE=3 SV=1
MKEDVQKLVDKGEMLPLMEEFYTIQGEGFHKGTAAYFIRVGGCDVGCHWCDVKESWNAEIHPPTETPKIVENASQYSDTIVVTGGEPLMWDMTPLTNQLKEKGLQIHIETSGAYPLTGTWDWICLSPKKMKLPTDEVYAKANELKVIVYNKDDFRFAEEQAAKVNNDCILYLQPEWSKRDKMMPQIVDYVMKHPKWKVSLQTHKYLNIP

SEQ ID NO: 31363 - protein, 209 aa, Mangrovimonas yunxiaonensis
  misc_feature (1)..(209): tr|A0A084TIV6|A0A084TIV6_9FLAO 7-carboxy-7-deazaguanine synthase OS=Mangrovimonas yunxiaonensis OX=1197477 GN= queE PE=3 SV=1
MKKDVQEMVDRGEMLPLMEEFYTIQGEGFHKGTAAYFIRVGGCDVGCHWCDVKESWNAEIHPPTLTSEIVENARKYSDTIVVTGGEPLTWDMGPLTNRLKANGLNVHIETSGAYPLTGTWDWICLSPKKMKLPTDEVYAKANELKVIVYNKDDFRFAEEQAAKVGDACILYLQPEWSKRDKVVPLIVDYVMANPKWKVSLQTHKYLNIP

SEQ ID NO: 31364 - protein, 208 aa, Mannheimia granulomatis
  misc_feature (1)..(208): tr|A0A011MKT3|A0A011MKT3_9PAST 7-carboxy-7-deazaguanine synthase OS=Mannheimia granulomatis OX=85402 GN=queE P E=3 SV=1
MGMLISNPSFPIVEIFESLQGEGFNTGMPAIFVRFGKCNLTCPWCDTNYNQFELWTLGDILAKVRGHSAKNIIITGGEPTIQPNLSLLLDQLKQEGYFLAIETNGLKEIPPQIDYIATSPKRMYQEKYQRRCIAFANEVRVVVDGEVQEFCEQLENKIKAEHYYLSPCEVEGKMNLLDTITQLGLLNQRPNKPKWQLSIQTHKMVGIE

SEQ ID NO: 31365 - protein, 208 aa, Mannheimia haemolytica
  misc_feature (1)..(208): tr|A0A3S4Z6N8|A0A3S4Z6N8_MANHA 7-carboxy-7-deazaguanine synthase OS=Mannheimia haemolytica OX=75985 GN=queE PE =3 SV=1
MAELISNPRFPIVEIFESLQGEGFNTGMPAIFVRFGKCNLTCPWCDTNYNQFEQWTLSDILAKVRGYSAKNVIITGGEPTIQPNFSLLLNQLKKEGYFLVIETNGLKEVPAQIDYIATSPKRMYQEKYQRRCIEFANEVRIVVDGEVQGFCEQIESQIKAEHYYLSPCEVEGKMNLLETITQLGLLNQRSNKPKWQLSIQTHKIVGIE

SEQ ID NO: 31366 - protein, 208 aa, Mannheimia haemolytica
  misc_feature (1)..(208): tr|A0A248ZYB7|A0A248ZYB7_MANHA 7-carboxy-7-deazaguanine synthase OS=Mannheimia haemolytica OX=75985 GN=queE PE =3 SV=1
MAELISNPRFPIVEIFESLQGEGFNTGMPAIFVRFGKCNLTCPWCDTNYNQFEQWTLSDILAKVRSYSAKNVIITGGEPTIQPNLSLLLEQFKKEGYFLAIETNGLKEVPAQIDYIATSPKRMYQEKYQRRCIEFANEVRIVVDGEVQGFCEQIESQIKAEHYYLSPCEVEGKMNLLETITQIGLLNQRPNKPKWQLSIQTHKIVGIE

SEQ ID NO: 31367 - protein, 208 aa, Mannheimia sp.
  misc_feature (1)..(208): tr|W0Q1E0|W0Q1E0_9PAST 7-carboxy-7-deazaguanine synthas e OS=Mannheimia sp. USDA-ARS-USMARC-1261 OX=1432056 GN= queE PE=3 SV=1
MAELISNPSFPIVEIFESLQGEGFNTGMPSIFVRFGKCNLTCPWCDTNYNQFEQWTLNEILAKVRSYSAKNIIITGGEPTIQPNLSLLLNQLKKEGYFLAIETNGLKEIPPQIDYIATSPKRMYQEKYQRRCIEFANEVRVVVDGEVQTFCEQLENKIKAEHYYLSPCEKEGKMNLLETITQIGLLNQRPNKPKWQLSIQTHKIVGIE

SEQ ID NO: 31368 - protein, 224 aa, Mannheimia succiniciproducens
  misc_feature (1)..(224): tr|Q65RE6|Q65RE6_MANSM 7-carboxy-7-deazaguanine synthas e OS=Mannheimia succiniciproducens (strain MBEL55E) OX= 221988 GN=nrdG PE=3 SV=1
MGNADLFLRISGITAVENLLISNPRYPIVEIFESLQGEGFNTGMPCIFVRFGKCNLACPWCDTDYERFEYRTLQQIVEKVRSFSAKNIIITGGEPTIQPNISLLLAQFKRDGYFLAIETNGLRAVPPQIDYISASPKAMYAEKYRRRCIDFAHEVRIVMDADAENFCQQIEQKIRAERYYLSPCEIEGKMNLLETIALLGKLNQRPNKPKWQLSIQTHKLAGIE

SEQ ID NO: 31369 - protein, 208 aa, Mannheimia varigena
  misc_feature (1)..(208): tr|W0QB13|W0QB13_9PAST 7-carboxy-7-deazaguanine synthas e OS=Mannheimia varigena USDA-ARS-USMARC-1296 OX=143328 7 GN=queE PE=3 SV=1
MVALISNPTFPIVEIFESLQGEGFNTGMPAIFVRFGKCNLTCPWCDTNYNQFEAWTLSEILAKVKSYSAKNVIITGGEPTIQPNLSLLLEQLKQADYFLAIETNGLKEIPSQIDYIATSPKRMYKEKYQHRCIEFANEVRIVVDGEVQEFCEQLETQIKADHYYLSPCEVDGKMNLLETITQLGLLNQRANKPKWQLSIQTHKIVGIE

SEQ ID NO: 31370 - protein, 210 aa, Maribacter aquivivus
  misc_feature (1)..(210): tr|A0A1M6MBN8|A0A1M6MBN8_9FLAO 7-carboxy-7-deazaguanine synthase OS=Maribacter aquivivus OX=228958 GN=queE PE= 3 SV=1
MKNEEVLEKVNKGVYLPLMEEFYTIQGEGFHKGTAAYFIRVGGCDVGCHWCDVKESWNAETHPPTAIEQIVDNAAKYSDTIVITGGEPLMWDMDPITKALKDKGLKTHIETSGAYTLSGDWDWICLSPKKNKLPEGRIYDEAHELKVIVYNKHDLIFAEEQAAKTNTDCILYLQPEWSVRDKVVPMIVDYVMKNPKWKVSLQTHKYLNIP

SEQ ID NO: 31371 - protein, 210 aa, Maribacter arcticus
  misc_feature (1)..(210): tr|A0A1T4ZQM7|A0A1T4ZQM7_9FLAO 7-carboxy-7-deazaguanine synthase OS=Maribacter arcticus OX=561365 GN=queE PE=3 SV=1
MKNVEVLEKVSQGVFLPLMEEFYTIQGEGFHKGTAAYFIRVGGCDVGCHWCDVKESWNAETHPPTDIVKIVTNAAKYSDTIVVTGGEPLMWDMNPLTKALKEKGLKTHIETSGAYALTGDWDWICLSPKKNKLPEGRIYDEAHELKVIVFNKHDLIFAEEQSAKTNANCILYLQPEWSVRDKVVPMIVDYVMKNPKWKVSLQTHKYLNIP

SEQ ID NO: 31372 - protein, 210 aa, Maribacter caenipelagi
  misc_feature (1)..(210): tr|A0A4R7DBW5|A0A4R7DBW5_9FLAO 7-carboxy-7-deazaguanine synthase OS=Maribacter caenipelagi OX=1447781 GN=queE PE=3 SV=1
MKNEEVLEKVNKGVYLPLMEEFYTIQGEGFHKGTAAYFIRVGGCDVGCHWCDVKESWNAETHPPTAIKQIVDNAAKYSDTIVITGGEPLMWDMTPITTALKNKGLKTHIETSGAYTLSGDWDWICLSPKKNKLPEGRIYDEAHELKVIVYNKHDLIFAEEQAAQTNANCILYLQPEWSVRDKVVPMIVDYVMNNPKWKVSLQTHKYLNIP

SEQ ID NO: 31373 - protein, 210 aa, Maribacter cobaltidurans
  misc_feature (1)..(210): tr|A0A223V1T3|A0A223V1T3_9FLAO 7-carboxy-7-deazaguanine synthase OS=Maribacter cobaltidurans OX=1178778 GN=que E PE=3 SV=1
MEKKDTMALVDKGLLLPLMEEFYTIQGEGFHKGTAAYFIRVGGCDVGCHWCDVKESWNAETHPPTNIELIVENAAKYSDTIVVTGGEPLTWDMGPLTDRLKSKNLKTHIETSGAYPLTGDWDWICLSPKKNKLPVGRIYDEAHELKVIVYNKHDLIFAEEQAALTNNNCILYLQPEWSVRDKVTPMIVDYVMKNPKWKVSLQTHKYLNIP

SEQ ID NO: 31374 - protein, 210 aa, Maribacter dokdonensis
  misc_feature (1)..(210): tr|A0A1H4NFS0|A0A1H4NFS0_9FLAO 7-carboxy-7-deazaguanine synthase OS=Maribacter dokdonensis OX=320912 GN=queE P E=3 SV=1
MKNEEVLEKVNKGVYLPLMEEFYTIQGEGFHKGTAAYFIRVGGCDVGCHWCDVKESWNAETHPPTAIEHIVDNAAKYSDTIVITGGEPLMWDMNPITKALREKGLKTHIETSGAYTLSGEWDWICLSPKKNKLPEGRIYDEAHELKVIVYNKHDLIFAEEQAAKTNANCILYLQPEWSVRDKVVPMIVDYVMNNPKWKVSLQTHKYLNIP

SEQ ID NO: 31375 - protein, 210 aa, Maribacter flavus
  misc_feature (1)..(210): tr|A0A5B2TVH1|A0A5B2TVH1_9FLAO 7-carboxy-7-deazaguanine synthase OS=Maribacter flavus OX=1658664 GN=queE PE=3 SV=1
MQENNVLELVDKGFYLPLMEEFYTIQGEGFHKGTAAYFIRVGGCDVGCHWCDVKESWNAETHPPTDIDHIVENAAKYSDTIVVTGGEPLTWDMGPLTEKLKARNLKTHIETSGAYTLTGTWDWICLSPKKNKLPEGRIYDEAHELKVIVYNKHDLIFAEEQAAQTNKECILYLQPEWSVREKVTPLIVEYVMKNPKWKVSLQTHKYLNIP

SEQ ID NO: 31376 - protein, 210 aa, Maribacter orientalis
  misc_feature (1)..(210): tr|A0A1H7N5Q6|A0A1H7N5Q6_9FLAO 7-carboxy-7-deazaguanine synthase OS=Maribacter orientalis OX=228957 GN=queE PE =3 SV=1
MKNVEVLEKVNQGVFLPLMEEFYTIQGEGFHKGTAAYFIRVGGCDVGCHWCDVKESWNAETHPPTDIENIVANAAKYSDTIVVTGGEPLMWNMNPLTSALKEKGLKTHIETSGAYALTGEWDWICLSPKKNKLPEGRIYDEAHELKVIVFNKHDLIFAEEQAAKTNTNCILYLQPEWSVRDKVVPMIVDYVMKNPKWKVSLQTHKYLNIP

SEQ ID NO: 31377 - protein, 210 aa, Maribacter polysiphoniae
  misc_feature (1)..(210): tr|A0A316E643|A0A316E643_9FLAO 7-carboxy-7-deazaguanine synthase OS=Maribacter polysiphoniae OX=429344 GN=queE PE=3 SV=1
MMKDEVLELVNKGLMLPLMEEFYTIQGEGFHKGTAAYFIRVGGCDVGCHWCDVKESWNAETHPPTDITSIVEKAVAHSDTIVVTGGEPLTWDMGPLTKALKAKHVKTHIETSGAHPLSGTWDWICLSPKKNKLPTGIIYEKAHELKVIVFNKHDFIFAEEQAAKVNKDCILYLQPEWSVRDRMMPMIVDFVMKNPKWKVSLQTHKYLNIP

SEQ ID NO: 31378 - protein, 103 aa, Maribacter sp.
  misc_feature (1)..(103): tr|A0A3C0GKY1|A0A3C0GKY1_9FLAO 7-carboxy-7-deazaguanine synthase QueE (Fragment) OS=Maribacter sp. OX=1897614 GN=DCM40_44145 PE=4 SV=1
TVSGEKTEKAIKPENVAEYTECSDRGQLKFVVGSADREWDEMESTVEKFRNAGVNWPVWIMPTGAREEEQTATAGKVAEKAFKKGYNVAARVHVYLFGNAIGT

SEQ ID NO: 31379 - protein, 210 aa, Maribacter sp.
  misc_feature (1)..(210): tr|A0A559NU50|A0A559NU50_9FLAO 7-carboxy-7-deazaguanine synthase OS=Maribacter sp. MAR_2009_72 OX=1250050 GN=q ueE PE=3 SV=1
MKNVEVLEKVNKGVYLPLMEEFYTIQGEGFYKGTAAYFIRVGGCDVGCHWCDVKESWNAETHPPTDIEHIVANAATYSDTIVVTGGEPLMWNMEPLTTALKNKGLKTHIETSGAYTLTGNWDWICLSPKKNKLPEGVIYDKAHELKVIVYNKHDLIFAEEQAAKTNADCILYLQPEWSVRDKVVPMIVDYVMKNPKWKVSLQTHKYLNIP

SEQ ID NO: 31380 - protein, 210 aa, Maribacter spongiicola
  misc_feature (1)..(210): tr|A0A4R7K857|A0A4R7K857_9FLAO 7-carboxy-7-deazaguanine synthase OS=Maribacter spongiicola OX=1206753 GN=queE PE=3 SV=1
MKNEEVLEKVNKGVYLPLMEEFYTIQGEGFHKGTAAYFIRVGGCDVGCHWCDVKESWNAETHPPTAIEQIVDNAAKYSDTIVITGGEPLMWDMNPITKALKEKGLKTHIETSGAYTLSGDWDWICLSPKKNKLPEGRIYEEAHELKVIVYNKHDLIFAEEQAAKTNTNCILYLQPEWSVRDKVVPMIVDYVMNNPKWKVSLQTHKYLNIP

SEQ ID NO: 31381 - protein, 210 aa, Maribacter stanieri
  misc_feature (1)..(210): tr|A0A1I6IDZ8|A0A1I6IDZ8_9FLAO 7-carboxy-7-deazaguanine synthase OS=Maribacter stanieri OX=440514 GN=queE PE=3 SV=1
MKNEEVLEKVNKGLYLPLMEEFYTIQGEGFHKGTAAYFIRVGGCDVGCHWCDVKESWNAETHPPTAIEKIVDNAATYSDTIVITGGEPLMWDMNPITNALKAKGLKTHIETSGAYTLSGDWDWICLSPKKNKLPEGRIYDEAHELKVIVYNKHDLIFAEEQAAKTNANCILYLQPEWSVRDKVVPMIVDYVMKNPKWKVSLQTHKYLNIP

SEQ ID NO: 31382 - protein, 210 aa, Maribacter ulvicola
  misc_feature (1)..(210): tr|A0A1N6RJ13|A0A1N6RJ13_9FLAO 7-carboxy-7-deazaguanine synthase OS=Maribacter ulvicola OX=228959 GN=queE PE=3 SV=1
MKNEEVLEKVNKGTYLPLMEEFYTIQGEGFHKGTAAYFIRVGGCDVGCHWCDVKESWNAETHPPTAIEQIVDNAAKYSDTIVITGGEPLMWDMNPITKALKDKGLKTHIETSGAYTLSGDWDWICLSPKKNKLPEGRIYDEAHELKVIVYNKHDLIFAEEQAAKTNADCILYLQPEWSVSDKVVPMIVDYVMNNPKWKVSLQTHKYLNIP

SEQ ID NO: 31383 - protein, 210 aa, Maribacter vaceletii
  misc_feature (1)..(210): tr|A0A495E690|A0A495E690_9FLAO 7-carboxy-7-deazaguanine synthase OS=Maribacter vaceletii OX=1206816 GN=queE PE =3 SV=1
MVNEDVLALVNKGEMLPLMEEFYTIQGEGFHKGTAAYFIRVGGCDVGCHWCDVKESWNAETHPPTKIDGIAEKAAKYSDTIVVTGGEPLTWDMGPITKALKAKNLQTHIETSGAYKLSGEWDWICLSPKKNKLPFGEIYDKAHELKVIVYNKHDLIFAEEQATLTNKDCILYLQPEWSVKDKVVPLIVDYVMQNPKWKVSLQTHKYLNIP

SEQ ID NO: 31384 - protein, 209 aa, Maricaulis maris
  misc_feature (1)..(209): tr|A0A495DMD8|A0A495DMD8_9RHOB 7-carboxy-7-deazaguanine synthase OS=Maricaulis maris OX=74318 GN=queE PE=3 SV= 1
MTYSVKERFLTVQGEGGQAGRPAVFLRFAGCNLWSGREQDRHKAVCNFCDTDFVGMDGPGGGRFKTAEALVEAVAELWPGGGVPLVVCTGGEPLLQLDTPLIDALHARGFEIAVETNGTVKAPDGIDWITVSPKGKAPVVQTSGHELKLVYPQPELDPATFEAWDFKRFSLQPMDGPQMMENAQAAFDYCLAHPKWSLSLQTHKWIGAP

SEQ ID NO: 31385 - protein, 209 aa, Maricaulis maris
  misc_feature (1)..(209): tr|Q0ARS6|Q0ARS6_MARMM 7-carboxy-7-deazaguanine synthas e OS=Maricaulis maris (strain MCS10) OX=394221 GN=queE PE=3 SV=1
MSYSVKERFLTVQGEGAQAGRPAVFLRFSGCNLWSGREQDRHKAVCNFCDTDFVGMDGPGGGRFKTAVSLVDAVAELWPGGGRPLVVCTGGEPLLQLDTSLIDALHARGFEIAVETNGTVRAPDGIDWITVSPKGTAPVVQTSGHELKLVYPQPELDPTAFEDWDFKRFSLQPMDGPQMMENAQAAFDYCLAHPQWSLSLQTHKWIGAP

SEQ ID NO: 31386 - protein, 209 aa, Maricaulis salignorans
  misc_feature (1)..(209): tr|A0A1G9MWY9|A0A1G9MWY9_9RHOB 7-carboxy-7-deazaguanine synthase OS=Maricaulis salignorans OX=144026 GN=queE P E=3 SV=1
MKYSVKEIFMTVQGEGGQTGRPAVFLRFAGCNLWSGREQDRASAVCNFCDTDFIGMDGPGGGRFETPDDLVAAVAAMWPGGGRPLVVCTGGEPLLQLDARLIDALHAAGFDIAVETNGTLAAPDGIDWITVSPKGKAPVVQRSGHELKLVFPQPGLDPADYLGWDFKRFSLQPMDGPSMMENAQAAFEYCITHPQWTLSLQTHKWIGAP

SEQ ID NO: 31387 - protein, 210 aa, Maricaulis sp.
  misc_feature (1)..(210): tr|A0A2D7Y1E5|A0A2D7Y1E5_9RHOB 7-carboxy-7-deazaguanine synthase OS=Maricaulis sp. OX=1486257 GN=queE PE=3 SV= 1
MSYSVKEAFLTVQGEGAQAGRPAVFLRFAGCNLWNGLERDRDNAVCNFCDTDFVGMDGPGGGRFTTPQDLVEHVQAYWPDAPGRKLVVCTGGEPLLQLDTPLIEALHAAGFEIAVETNGTIAAPDGIDWITVSPKGSAKVVQTSGDELKLVYPQPGLDPEDYTGWNFRRFSLQPMDGPDMMANAQAAFEYCLANPTWALSLQTHKWIGVD

SEQ ID NO: 31388 - protein, 209 aa, Maricaulis sp.
  misc_feature (1)..(209): tr|A0A1Q8FWP2|A0A1Q8FWP2_9RHOB 7-carboxy-7-deazaguanine synthase OS=Maricaulis sp. W15 OX=1772333 GN=queE PE=3 SV=1
MTYSVKERFLTVQGEGAQAGRPAVFLRFAGCNLWSGREQDRHKAVCNFCDTDFVGMDGPGGGRFKTAEALVEAVAELWPGGGAPLVVCTGGEPLLQLDTPLIDALHARGFEIAVETNGTVKAPDGIDWITVSPKGKAPVVQTSGHELKLVYPQPELDPTAFEAWDFKRFSLQPMDGPQMMENAQAAFDYCLAHPKWSLSLQTHKWIGAP

SEQ ID NO: 31389 - protein, 213 aa, Marichromatium gracile
  misc_feature (1)..(213): tr|A0A4R4AGS6|A0A4R4AGS6_MARGR 7-carboxy-7-deazaguanine synthase OS=Marichromatium gracile OX=1048 GN=queE PE= 3 SV=1
MSYAVKEVFYTLQGEGAQAGRAAVFCRFAGCNLWSGLERDRATARCRFCDTDFRGTDGAGGGYFVDAERLAAHIAACWPRDADPQAIPYVVCTGGEPALQLDAALIAALHAHGFEVGVESNGTLALPAGIDWVCISPKAGTELMVRRGDELKLVYPQPGAEPERYVGLAFEHRILQPLDDAERAAHTEAAAAHCLADPRWRLGIQMHKLVGLP

SEQ ID NO: 31390 - protein, 213 aa, Marichromatium purpuratum
  misc_feature (1)..(213): tr|W0E6C0|W0E6C0_MARPU 7-carboxy-7-deazaguanine synthas e OS=Marichromatium purpuratum 984 OX=765910 GN=queE PE =3 SV=1
MSYAVKEVFYTLQGEGAQAGRAAVFCRFAGCNLWSGLERDRATARCRFCDTDFRGTDGEGGGHFADAEQLAAAIVACWPRAAALGATPYVVCTGGEPALQLDDVLVAALHARGFEVGVETNGTLALPGGIDWVCVSPKAGAELVVRRGDELKLIYPQPGAEPERYIALDFDHHVLQPLDDAERAVHTEAAAAYCLADPRWRLGIQMHKLVGLP

SEQ ID NO: 31391 - protein, 250 aa, Unknown
  misc_feature (1)..(250): tr|A0A1Q3GIV1|A0A1Q3GIV1_9BACT 7-carboxy-7-deazaguanine synthase OS=marine bacterium AO1-C OX=1905359 GN=queE PE=3 SV=1
MKIAKFNGKGEIFYTIQGEGKSLGKPTVFVRSSLCNLHCIWCDTDYTWNWDNTPHPHIFDDIPGYQKYRKEEQIIELTTTELIAEVTQYPCKNLVLTGGEPLLQQKEWIALMSQLRKLDANYWFEVETNGTLLPNQDFDKFIDQYNVSPKLENSNNPVKLREKPAVYEFFAQSPKAWFKFVIAEEQDLNEVLGLIDKYHIPAHKIYIMPEGTTPEKLNAKQQWLVEKCKQFGFNYTDRLHIHIYGSKRGV

SEQ ID NO: 31392 - protein, 219 aa, Unknown
  misc_feature (1)..(219): tr|A0Z4X6|A0Z4X6_9GAMM 7-carboxy-7-deazaguanine synthas e OS=marine gamma proteobacterium HTCC2080 OX=247639 GN =queE PE=3 SV=1
MTASTDPELRITEIFHSLQGEARSVGLPTVFVRLTGCPLRCVWCDTEYAFSGGKILALTQILQQIKSFSCPRVCVTGGEPLAQPESLPLLKQLCDEGYEVSLETSGALPIADVDRRVSRVMDLKAPDSGESHRNLWDNIAELTPHDQIKFVISSRRDYDWARFKVDELALAGRVGDILFSPTHGELQPRELAEWLLQDRVPGRFQLQLHKLLWNDAPGH

SEQ ID NO: 31393 - protein, 214 aa, Unknown
  misc_feature (1)..(214): tr|A0YEK3|A0YEK3_9GAMM 7-carboxy-7-deazaguanine synthas e OS=marine gamma proteobacterium HTCC2143 OX=247633 GN =queE PE=3 SV=1
MTDLRLTEIFYSLQGETRTVGLPTVFVRLTGCPLRCAYCDTEYAFHGGEKWSLQAIQEKVASYHPRYVTVTGGEPLAQPNCWPLLTALCDQGYEVSLETSGAISLLGVDSRVVKVMDLKTPASNEMSRNLYENIELLSPQDQIKFVICDRKDYEWARFKLDEHRLVDRVDEVLFSPSFGQIESAELAEWILADNLPVRFQVQLHKLLWNDAAGH

SEQ ID NO: 31394 - protein, 245 aa, Mariniblastus fucicola
  misc_feature (1)..(245): tr|A0A5B9PIA6|A0A5B9PIA6_9PLAN 7-carboxy-7-deazaguanine synthase OS=Mariniblastus fucicola OX=980251 GN=queE P E=3 SV=1
MLISEIYLSRQGEGRLTGTPSVFVRTSGCNLRCDFCDTPFTSWKPEGTQQSVSEVVDSVAQAASGPLPSRSGIEDQFDGPAAHVVLTGGEPMLAKEIESLCAALADATFHITIETAGTLDRMVDCDLMSISPKLSNSKPTEQRAGQWAAKHEATRYRPDVVASLVARHDYQLKFVVACETDVLEIESFLAEVGEIDRTKVLLMPEGIDAATLADRAQWLEPLCNDRGFSFCPRQHIFWYGNKRAT

SEQ ID NO: 31395 - protein, 209 aa, Marinicauda algicola
  misc_feature (1)..(209): tr|A0A4V3RYJ5|A0A4V3RYJ5_9RHOB 7-carboxy-7-deazaguanine synthase OS=Marinicauda algicola OX=2029849 GN=queE PE =3 SV=1
MTYSVKEAFLTVQGEGGQAGRPAVFLRFAGCNLWSGLERDRASAVCNFCDTDFVGTDGQNGGRFRTADALADHVASLWPGGGRPLVVCTGGEPLLQLDRAAIDALHAAGFEIAVETNGTLEAPEGIDWICVSPKSTAPLKQTSGQELKLVYPQPDAPPEAFEHLDFETFRLQPMDGPNRMENAKAAFEYCLRHPRWHLSLQTHKWIGVD

SEQ ID NO: 31396 - protein, 209 aa, Marinicauda pacifica
  misc_feature (1)..(209): tr|A0A4S2HB95|A0A4S2HB95_9RHOB 7-carboxy-7-deazaguanine synthase OS=Marinicauda pacifica OX=1133559 GN=queE PE =3 SV=1
MTYSVKEAFLTVQGEGGQTGRPAVFLRFAGCNLWTGLERDRETAICRFCDTDFVGTDGQNGGKFKTAEALAEHVLSFWPGGGRPLVVCTGGEPLLQLDPALIDALHARGFEVAVETNGTIAAPAGLDWICVSPKSTAPLVQTRGHELKLVFPQADAPPEAFEHLDFETFRLQPMDGPEQMANAKQAFEYCLRHPKWALSLQTHKWIGVD

SEQ ID NO: 31397 - protein, 209 aa, Marinicauda sp.
  misc_feature (1)..(209): tr|A0A2U2BRW6|A0A2U2BRW6_9RHOB 7-carboxy-7-deazaguanine synthase OS=Marinicauda sp. WD6-1 OX=2135793 GN=queE P E=3 SV=1
MTYSVKEMFLTVQGEGGQAGRPAVFLRFAGCNLWSGLERDRASAVCDFCDTDFVGTDGPGGGKFVDAEALANAVAEKWPGGGEPLVVCTGGEPLLQLDPGLIDALHGEGFEIAVETNGTIEAPAGLDWICVSPKSTAPLKQTTGDELKLVYPQADAPPEAFEHLDFRTFRLQPMDGHDRDTNAQAAYEYCLAHPKWRLSLQTHKWIGAP

SEQ ID NO: 31398 - protein, 209 aa, Marinicaulis flavus
  misc_feature (1)..(209): tr|A0A2S7KA11|A0A2S7KA11_9PROT 7-carboxy-7-deazaguanine synthase OS=Marinicaulis flavus OX=2058213 GN=queE PE= 3 SV=1
MSYAVKELFYTLQGEGAQAGRPAVFLRFAGCNLWSGLERDRADAVCTFCDTDFIGVDGPGGGKFADAEALAAAVAKAWPGGGRPYVVCTGGEPLLQLDAALIETLHDEGFEIGVETNGTLAAPGGVDWLCVSPKSTAPLVQTSGNELKLVYRQKDAPPEAFEDLAFDFFFLQPMDGPSRAAETAAAVEYCRRHPQWRLSLQTHKIVGIP

SEQ ID NO: 31399 - protein, 218 aa, Marinicella litoralis
  misc_feature (1)..(218): tr|A0A4R6XUB9|A0A4R6XUB9_9GAMM 7-carboxy-7-deazaguanine synthase OS=Marinicella litoralis OX=644220 GN=queE PE =3 SV=1
MKPNRDQQLKIFEIFHSLQGESHFVGLPTVFVRLTGCPLRCTWCDTEYAFFGGQWMTFDDIIKQVKQHNTPYVCVTGGEPLAQKRVFPLMDRLVAEGLTVSLETAGSLSVEKVNPAVHKVLDLKAPGSGEVSKNLYENLALLTPKDQVKFVIADEADYLWSKQTMDKYKLNEQCQILMSPVADVLPAKQLAEWILADQLNVRFQIQLHKHLWGDIPGT

SEQ ID NO: 31400 - protein, 211 aa, Marinifilaceae bacterium
  misc_feature (1)..(211): tr|A0A434AFA4|A0A434AFA4_9BACT 7-carboxy-7-deazaguanine synthase OS=Marinifilaceae bacterium T3-2 S1-C OX=2487 017 GN=queE PE=3 SV=1
MKDKYKEIFDKGTDLPLVEDFYTIQGEGFHTGKPAYFIRIGGCDIGCRWCDSKISWNPAEHRLISVEEVVRKAVESPAKAVVVTGGEPSLYNLEPLCTELKKHNIENFLETSGAYEISGEWDWICLSPKRNKLPEKSSYQKANELKVIIYDLEKDFEWAEELSKHVSDDCLLYLQSEWSQYVHNVKPIVEYVKNNPKWNISLQAHKFMRIP

SEQ ID NO: 31401 - protein, 211 aa, Marinifilum breve
  misc_feature (1)..(211): tr|A0A2V3ZUJ5|A0A2V3ZUJ5_9BACT 7-carboxy-7-deazaguanine synthase OS=Marinifilum breve OX=2184082 GN=queE PE=3 SV=1
MKDKYKEIFDKGTDLPLVEDFYTIQGEGYHTGKPAYFIRIGGCDIGCRWCDSKISWNPAEHRLISVEEVVRKAVESPAKSVVVTGGEPSLYNLEPLCTELKKHNIENFLETSGAYEISGEWDWICLSPKRNKLPVPSSYQKANELKVIIYDLEKDFEWAEELAKNVGDDCLLYLQSEWSQYVHNVKPIVEYVKNNPKWNISLQSHKFMRIP

SEQ ID NO: 31402 - protein, 228 aa, Marinifilum flexuosum
  misc_feature (1)..(228): tr|A0A419X972|A0A419X972_9BACT 7-carboxy-7-deazaguanine synthase OS=Marinifilum flexuosum OX=1117708 GN=queE P E=3 SV=1
MLNSHSFKIVLQEKKKVLKDKYKEIFDKGTDLPLVEDFYTIQGEGYHTGKPAYFIRIGGCDIGCRWCDSKISWNPAEHRLISVEEVVRKAVESPAKSVVVTGGEPSLYNLEPLCTELKKHNIENFLETSGAYEISGEWDWICLSPKRNKLPVPSSYQKANELKVIIYDLEKDFEWAEELAENVGDDCLLYLQSEWSQYVHNVKPIVEYVKNNPKWNISLQSHKFMRIP

SEQ ID NO: 31403 - protein, 209 aa, Mariniflexile fucanivorans
  misc_feature (1)..(209): tr|A0A4R1RMA7|A0A4R1RMA7_9FLAO 7-carboxy-7-deazaguanine synthase OS=Mariniflexile fucanivorans OX=264023 GN=qu eE PE=3 SV=1
MNKDIQSLVDKGDMLPLMEEFYTIQGEGFHKGTAAYFVRIGGCDVGCHWCDVKESWNANLHPPTDISKIVENAKKYSKTIVITGGEPLTWNMTPLTTKLKAEGLQIHIETSGAYKLTGIWDWICLSPKKMKLPTKEVYEKAHELKVIVYNKDDFRFAEEQSAKVNKDCILYLQPEWSKRDKVIPEIVDYVMANPQWKVSLQTHKYLNIP

SEQ ID NO: 31404 - protein, 209 aa, Mariniflexile sp.
  misc_feature (1)..(209): tr|A0A385BL62|A0A385BL62_9FLAO 7-carboxy-7-deazaguanine synthase OS=Mariniflexile sp. TRM1-10 OX=2027857 GN=qu eE PE=3 SV=1
MNKEIKKLVDTGNMLPLMEEFYTIQGEGFHKGTAAYFVRIGGCDVGCHWCDVKESWNANLHPPTDILKIVENAKKYSNTIVVTGGEPLTWDMTPLTTKLKAEGLQIHIETSGAYKLTGIWDWICLSPKKIKLPTKEVYAKAHELKVIVYNKDDFRFAEEQAAKVNKDCILYLQPEWSKRDKVIPEIVDYVMANPKWKVSLQTHKYLNIP

SEQ ID NO: 31405 - protein, 285 aa, Marinilabilia salmonicolor
  misc_feature (1)..(285): tr|A0A2T0XPT1|A0A2T0XPT1_9BACT 7-carboxy-7-deazaguanine synthase OS=Marinilabilia salmonicolor OX=989 GN=queE PE=3 SV=1
MNKIVLANEGVFPITKDKHGKPLKSIPATGMKTSGTIQGEGKLAGVPSLFIRLAGCNLRCMWSLPDGSFCRCDTPYASFEAEQELQLSQEDIFTLVQHNIGNLNHVVLTGGEPMLQHRHLAMLSARLKEELQLHLSIETNGTIFAEDVAQHIDLFSISPKLKNSNPSAQKLAAYGLKPNGPLTYHAEKRRNIEVLQKYIDFCNASGKELQLKFVVGQPNDYIEIKEEFLAHLNNWNPADILLMPLGATPEELKTTSAMVAEMAISNGWRYAPRLHIDLFGSKAGV

SEQ ID NO: 31406 - protein, 285 aa, Marinilabilia salmonicolor
  misc_feature (1)..(285): tr|A0A368USG9|A0A368USG9_9BACT 7-carboxy-7-deazaguanine synthase OS=Marinilabilia salmonicolor OX=989 GN=queE PE=3 SV=1
MSKIVLANEGVFPITKDKHDNPLKSIPATGMKTSGTIQGEGKLAGVPSLFIRLAGCNLRCMWSLPDGSFCRCDTPYASFEAEQELQLSQEDIFTLVQHNIGNLNHVVLTGGEPMLQHRHLAMLSGRLKEELQLHLSIETNGTIFAEDVAQHIDLFSISPKLKNSNPSAQKLAAYGLKPNGPLTYHAEKRRNIEVLQKYIDFCNASGKELQLKFVVGQPNDYIEIKEEFLAHLNNWNPADILLMPLGATPEELKTTSVMVAEMAISNGWRYAPRLHIDLFGSKAGV

SEQ ID NO: 31407 - protein, 285 aa, Marinilabilia sp.
  misc_feature (1)..(285): tr|A0A2U2BCK1|A0A2U2BCK1_9BACT 7-carboxy-7-deazaguanine synthase OS=Marinilabilia sp. WTE OX=2162893 GN=queE P E=3 SV=1
MSKLVLANEGVFPITKDQNGQALKDCPATGLSISGTIQGEGKLAGVPSLFIRLASCNLRCMWELPDGSLCRCDTPYASFEAEQDLQLDTEAVFNLVKNNIGDLKHVVLTGGEPMLQHKALSTLAGRLKEELRLHLSIETNGTIFAEDVAKYIDLFSISPKLSNSDPNPGKLDHYELKQSGPLNYHPQKRKNIAVLQKFIAYCKDNGKEMQLKFVVGKHDDHQEIKEEFIAPLNDLPPTDVMLMPLGATKEELALTSKMVLEMAIKNGWRYAPRLHIDLFGPKAGV

SEQ ID NO: 31408 - protein, 286 aa, Marinilabiliaceae bacterium
  misc_feature (1)..(286): tr|A0A359FZK1|A0A359FZK1_9BACT 7-carboxy-7-deazaguanine synthase OS=Marinilabiliaceae bacterium OX=2053574 GN= queE PE=3 SV=1
MKNIISLAEEALFPIVKDIEGNTIEQAPATGFSIAGTIQGEGKLAGVPSLFIRFSSCNLRCIWKLPEGGLSRCDTPYASFDNHRVKHLSPEELLMLVKQNLGQIRHIVISGGEPLLQKDALFDLSALLKSELGLHITLETNGTIFNREACEHIDLFSISPKLENSTPDPSKLAALGLNPSGPLNYHGSNRLNLKALQSFLDLCNSSGKELQLKFVVARPEEEKEIIEDYLQKLSGWHASDVLLMPLGATVEELKQTTLMAMEMAVRNGWRYSPRIHIDLFGSKPGV

SEQ ID NO: 31409 - protein, 150 aa, Marinilabiliaceae bacterium
  misc_feature (1)..(150): tr|A0A353U3C2|A0A353U3C2_9BACT 7-carboxy-7-deazaguanine synthase QueE (Fragment) OS=Marinilabiliaceae bacteriu m OX=2053574 GN=DDW62_13290 PE=4 SV=1
NSSGKELLFNREACEHIDLFSISPKLENSTPDPSKLAALGLNPSGPLNYHGSNRLNLKALQSFLDLCNSSGKELQLKFVVARPEEEKEIIEDYLQKLSGWHASDVLLMPLGATVEELKQTTLMAMEMAVRNGWRYSPRIHIDLFGSKPGV

SEQ ID NO: 31410 - protein, 193 aa, Marinilabiliales bacterium
  misc_feature (1)..(193): tr|A0A2J6HKT7|A0A2J6HKT7_9BACT 7-carboxy-7-deazaguanine synthase OS=Marinilabiliales bacterium OX=2053303 GN=q ueE PE=3 SV=1
MEDFYTLQGEGYNMGKAAYFVRIGGCDVGCSWCDTKQSWNARLFPPVAIEDIISKATNMPAKTIVVTGGEPSLYPLDYFTDRLRREGVKTMVETSGAYELTGTWDWVCLSPKKQSPPLQQNLDRADELKVIIQKEEDLRWAEANASKVNPECLLFLQPEWSKRDEIMDTLTNYVMANTQWSISLQAHKYMRIP

SEQ ID NO: 31411 - protein, 210 aa, Marinilabiliales bacterium
  misc_feature (1)..(210): tr|A0A351HJ95|A0A351HJ95_9BACT 7-carboxy-7-deazaguanine synthase OS=Marinilabiliales bacterium OX=2053303 GN=q ueE PE=3 SV=1
MKREELPGRGEGNVLPLVEQFYTLQGEGFHTGKAAYFIRIGGCDIGCRWCDSKVSWSPGIHQLVPVEDIVAKVLETPARAVVVTGGEPSLYNLNPLCDALKKHSIETFLETSGAYPLTGTWDWICLSPKRNMHPKPAIYQAADELKMIIYEPDDYLWAEECAKRIRLNCLRFLQPEWSRFSINIGPIVEYAKTHPDWMVSLQSHKFMRIP

SEQ ID NO: 31412 - protein, 200 aa, Marinimicrobia bacterium
  misc_feature (1)..(200): tr|A0A101IAI2|A0A101IAI2_9BACT 7-carboxy-7-deazaguanine synthase OS=Marinimicrobia bacterium 46_43 OX=1635280 GN=queE PE=3 SV=1
MGNTHKQSCAYPVNDIFSSIQGEGFWTGLPVTFIRFAGCNLACDFCDTDYSMKEILTADEILRRLESWPAPTVVLTGGEPLIHPLKPLLKRLQSAHYRIHLETNGTFSVPEGFFDWIAVSPKTDMPVLRECNELRVLLKKGEVPRDFNIRAEHYFVSPLNPSLNNPQKFDHDNLCYCLEYVLGHPKWRLNVQLHKYLDIP

SEQ ID NO: 31413 - protein, 200 aa, Marinimicrobia bacterium; identical to SEQ ID NO: 31412
  misc_feature (1)..(200): tr|A0A117LL90|A0A117LL90_9BACT 7-carboxy-7-deazaguanine synthase OS=Marinimicrobia bacterium 46_47 OX=1635279 GN=queE PE=3 SV=1

SEQ ID NO: 31414 - protein, 216 aa, Marinimicrobium koreense
  misc_feature (1)..(216): tr|A0A3N1NTK6|A0A3N1NTK6_9GAMM 7-carboxy-7-deazaguanine synthase OS=Marinimicrobium koreense OX=306545 GN=queE PE=3 SV=1
MTDDSLRITEIFYSLQGEARTLGRPTVFVRLTGCPLRCHYCDSEYAFHGGERMTLASILEQVAGYQPQYICVTGGEPLAQPNCLPLLTQLCDAGYSVSLETSGAMPLDEADTRVSRVMDLKTPDSGELDKNRWENIPLLQPHDQVKFVLCSRGDYEWAKFKLDEYRLAERVDDVLFSPSFGQLEPRQLADWIVEDNLPVRFQIQIHKLLWGDAPGY

SEQ ID NO: 31415 - protein, 216 aa, Marinimicrobium sp.
  misc_feature (1)..(216): tr|A0A2D8WNQ7|A0A2D8WNQ7_9GAMM 7-carboxy-7-deazaguanine synthase OS=Marinimicrobium sp. OX=2024837 GN=queE PE= 3 SV=1
MTDDSLRITEIFYSLQGEARTLGRPTVFVRLTGCPLRCHYCDSEYAFHGGERMTLASILEQVAGYQPQYICVTGGEPLAQPNCLPLLTQLCDAGYSVSLETSGAMPLDEVDTRVSRVMDLKTPDSGELDKNRWENIPLLQPHDQVKFVLCSRGDYEWAKFKLDEYRLAERVDDVLFSPSFGQLEPRQLADWIVEDNLPVRFQIQIHKLLWGDAPGY

SEQ ID NO: 31416 - protein, 242 aa, Marininema halotolerans
  misc_feature (1)..(242): tr|A0A1I6SML0|A0A1I6SML0_9BACL 7-carboxy-7-deazaguanine synthase OS=Marininema halotolerans OX=1155944 GN=queE PE=3 SV=1
MSNGWDLSNPDHYEKWKLPMVEVFETVEGEGSGAGFPTIFVRVFHCNLRCTWCDTPYSYAPAKPEYEATVKEIAAFAHRFASRRICFTGGEPLMHREKSAALLKALALPQKIDDVHIETNGAIDLIPFHDLRQQEPWGEKVRFVMDYKLPASGEADKMIHRNFNCLKERDEVKFVIGNQTDFLKAVDVIKSYHKQGQVLFSPVFEKLSPRKLVEWVLAHSLSNVRVSLQLHKFIWDPAERGV

SEQ ID NO: 31417 - protein, 242 aa, Marininema mesophilum
  misc_feature (1)..(242): tr|A0A1H3BA36|A0A1H3BA36_9BACL 7-carboxy-7-deazaguanine synthase OS=Marininema mesophilum OX=1048340 GN=queE P E=3 SV=1
MSKGWDLSKPDIYEQWKLPMVEVFETVEGEGSGAGFPTIFVRVFHCNLRCTWCDTPYSYAPAKPEYEASVKEIAASAHRFASQRICFTGGEPLMHQEKSAALLMALAMPNHIQDVHIETNGAIDLTPYDALRKQQPWGEKVRFVMDYKLPASGEAEKMVQSNFDRLTDRDEIKFVIGNEEDFRIAVDVIRRFHKRGQILFSPVFETLPPRKLVEWVLAHSLSKVRVSLQLHKFIWNPAERGV

SEQ ID NO: 31418 - protein, 209 aa, Mariniradius saccharolyticus
  misc_feature (1)..(209): tr|M7X9C8|M7X9C8_9BACT 7-carboxy-7-deazaguanine synthas e OS=Mariniradius saccharolyticus AK6 OX=1239962 GN=que E PE=3 SV=1
MDELKNKVNEGLALPVMEAFYTIQGEGTHVGTAAYFIRLGGCDVGCVWCDVKESWDAGKWPILAIEEIVKGALEYPGRMVVITGGEPLMYPLGPLTKLLKAQGFRVHLETSGAHPFSGEFDWVCFSPKKFKKPHPSIYEKADELKVVVYHNSDFEFAETHAKNVADTCKKILQPEWGKQDQFLGKIIDYVKSHPIWKISLQTHKFMDIP

SEQ ID NO: 31419 - protein, 209 aa, Marinirhabdus gelatinilytica
  misc_feature (1)..(209): tr|A0A370QLW9|A0A370QLW9_9FLAO 7-carboxy-7-deazaguanine synthase OS=Marinirhabdus gelatinilytica OX=1703343 GN =queE PE=3 SV=1
MKTEVQESVEKGTMLPLMEEFYTIQGEGYHKGTAAYFIRVGGCDVGCHWCDVKESWNPNIHPPTDIVSIAENASKYAKTIVITGGEPLTWDMGPLTSLLKEKGMDTHIETSGAYKLSGTWDWVCLSPKKMKLPTPEVYAAANELKVIIYNNDDFRFAEEQAAKVSNDCKLYLQPEWSKRDKVIPKIVDYVMQHPKWVVSLQTHKYLNIP

SEQ ID NO: 31420 - protein, 220 aa, Marinisporobacter balticus
  misc_feature (1)..(220): tr|A0A4R2KGH7|A0A4R2KGH7_9CLOT 7-carboxy-7-deazaguanine synthase OS=Marinisporobacter balticus OX=2018667 GN=q ueE PE=3 SV=1
MYKVVEKFVSINGEGRRAGQLAVFIRFANCNLDCSYCDTAWANEDDVAYTLMTKEEIVEAIKATDVKNVTLTGGEPLLQDEIFELIDYLSKDQELFIEIETNGSVSIKEFSKITNRPLFTMDYKLPSSNMEEKMLIDNFHHIKKQDIVKFVVGSSSDLERARDIIDQYQLTKKSNVYISPVYGKIDLDAMVEFMKKYKMNEVTMQVQLHKIIWGAEAKGV

SEQ ID NO: 31421 - protein, 247 aa, Marinitenerispora sediminis
  misc_feature (1)..(247): tr|A0A368T2F1|A0A368T2F1_9ACTN 7-carboxy-7-deazaguanine synthase OS=Marinitenerispora sediminis OX=1931232 GN= queE PE=3 SV=1
MSAGSPTAAAAAAGPATLPLAEAFGPTLQGEGPAAGRTAWFVRFGGCNLSCSWCDSAYTWDASRYQLREEIRHTPVADIAAGVPDGALVVLTGGEPLLQQDSAAWLELLSGLRARGCTLHVETNGTIAPNADTRALVATFVVSPKLGNAGRHRGHQNPALHPGWAEAAGDGQAHLKVVCASDADVETAVGIARAHAWPSRQVWVMPEGTTVEALNARWPAVADAAARHGINASHRLHVLAWGDKRGH

SEQ ID NO: 31422 - protein, 199 aa, Marinithermus hydrothermalis
  misc_feature (1)..(199): tr|F2NQ96|F2NQ96_MARHT 7-carboxy-7-deazaguanine synthas e OS=Marinithermus hydrothermalis (strain DSM 14884 / J CM 11576 / T1) OX=869210 GN=queE PE=3 SV=1
MRKGYPVVETFHSVQGEGHWTGTSAFFIRLAGCDVGCWFCDTKESWDMSQHPWRSVDALVAEAQAASPAIVVVTGGEPLMHDLTPLSRALRAAGLRAHLETSGAHPFSGAWDWVTLSPKKFRPPHPSVYPHVHELKVVVVNQSDLAWAETHAARVPPTALKYLQPEWSTEKSRQLILEYVLQHPEWRVSLQTHKVLGVR

SEQ ID NO: 31423 - protein, 218 aa, Marinobacter adhaerens
  misc_feature (1)..(218): tr|E4PIY1|E4PIY1_MARAH 7-carboxy-7-deazaguanine synthas e OS=Marinobacter adhaerens (strain DSM 23420 / HP15) O X=225937 GN=queE PE=3 SV=1
MYRVKEAFYTLQGEGAQAGRAAVFCRFSKCNLWTGREKDRATAVCNFCDTDFVGTDGQNGGRFETPEELARHIRNLWPEAPGKPYVVCTGGEPLLQLDAPLIEALHREGFEVGVETNGTLPAPEGIDWLCVSPKADAPVVLEACDELKLVYPQPLAMPERFLGIRASHYFLSPMASPSIPETAVDEIKQSNTRRATDYCLAHPQWRLTLQMHKIIGID

SEQ ID NO: 31424 - protein, 218 aa, Marinobacter adhaerens; identical to SEQ ID NO: 31423
  misc_feature (1)..(218): tr|A0A353LAF6|A0A353LAF6_9ALTE 7-carboxy-7-deazaguanine synthase OS=Marinobacter adhaerens OX=1033846 GN=queE PE=3 SV=1

SEQ ID NO: 31425 - protein, 218 aa, Marinobacter algicola
  misc_feature (1)..(218): tr|A6F334|A6F334_9ALTE 7-carboxy-7-deazaguanine synthas e OS=Marinobacter algicola DG893 OX=443152 GN=queE PE=3 SV=1
MYRVKEAFYTLQGEGAQAGRAAVFCRFSKCNLWTGREKDRANAVCSFCDTDFVGTDGQNGGQFETADALAAHIRRLWPDAPGRPYVVCTGGEPLLQLDDQLVDAFHRAGFEVGVETNGTLPAPSGIDWLCVSPKADAPVVLRQCDELKVVYPQPLAMPERFTDIQASHYFLSPMASPTVSEGEPDPIKQSNTRKATDYCLTHPRWRLTLQMHKIIGID

SEQ ID NO: 31426 - protein, 218 aa, Marinobacter antarcticus
  misc_feature (1)..(218): tr|A0A1M6PS26|A0A1M6PS26_9ALTE 7-carboxy-7-deazaguanine synthase OS=Marinobacter antarcticus OX=564117 GN=queE PE=3 SV=1
MYRVKEAFYTLQGEGAQAGRAAVFCRFSKCNLWTGREKDRATAVCDFCDTDFLGTDGQNGGAFETAEALSAHIRRLWPDAPGAPYVVCTGGEPLLQLDEKLIDAFHQQGFEVGVETNGTLPAPAGIDWLCVSPKANAPVVIEACDELKLVYPQPKAMPERFTHINARHFFLSPMASPSAPDNDTDPVKQSNTRKATDYCLAHPRWRLTLQMHKIIGID

SEQ ID NO: 31427 - protein, 218 aa, Marinobacter confluentis
  misc_feature (1)..(218): tr|A0A4Z1C8Q2|A0A4Z1C8Q2_9ALTE 7-carboxy-7-deazaguanine synthase OS=Marinobacter confluentis OX=1697557 GN=que E PE=3 SV=1
MYRVKEAFYTLQGEGAQAGRAAVFCRFSKCNLWTGREKDRAGSVCDFCDTDFVGTDGQNGGRFETAALLAAHIRNLWPDQPGAPYVVCTGGEPLLQLDKALIDAFHDSGFEVGVETNGTLPAPPGIDWLCVSPKADAPVVIDQCDELKLVYPQPLAMPERFTDMNARHFFLSPMASPTLVEGDSDPVKQSNTRKATDYCLANPRWRLTLQMHKIIGID

SEQ ID NO: 31428 - protein, 225 aa, Marinobacter daqiaonensis
  misc_feature (1)..(225): tr|A0A1I6IHJ8|A0A1I6IHJ8_9ALTE 7-carboxy-7-deazaguanine synthase OS=Marinobacter daqiaonensis OX=650891 GN=que E PE=3 SV=1
MYRVKEAFYTLQGEGAQAGRAAVFCRFSKCNLWTGREADRASAVCNFCDTDFVGTDGQNGGRFATAAELAGHVAALWPGDPMADVETGIRPYVVCTGGEPLLQLDEALIRAFHEQGFEVGVETNGTLPAPAGIDWLCVSPKADATVVIRECDELKLVYPQPLALPERFLEIQAQHYFLSPMASPSLPEDGRDPVKASNTRKAVDYCLKHPRWRLTLQMHKIVGID

SEQ ID NO: 31429 - protein, 218 aa, Marinobacter excellens
  misc_feature (1)..(218): tr|A0A0P7ZMX5|A0A0P7ZMX5_9ALTE 7-carboxy-7-deazaguanine synthase OS=Marinobacter excellens HL-55 OX=1305731 GN =queE PE=3 SV=1
MYRVKEAFYTLQGEGAQAGRAAVFCRFSKCNLWTGREKDRAGAVCDFCDTDFVGTDGQNGGRFESAAALAAHVRNLWPDKPGTPYVVCTGGEPLLQLDKPLIDALHTAGFEIGVETNGTLAAPDGIDWLCVSPKADAEVVITKCDELKLVYPQPLALPERFLGIRARHYFLSPMASPSAPEQSADPIKQSNTRKATEYCLAHPQWRLTLQMHKILGID

SEQ ID NO: 31430 - protein, 218 aa, Marinobacter excellens
  misc_feature (1)..(218): tr|A0A137SG92|A0A137SG92_9ALTE 7-carboxy-7-deazaguanine synthase OS=Marinobacter excellens LAMA 842 OX=1306954 GN=queE PE=3 SV=1
MYRVKEAFYTLQGEGAQAGRAAVFCRFSKCNLWTGREKDRAGAVCNFCDTDFVGTDGQNGGRFETAVELAEHIRKLWPDAPGRPYVVCTGGEPLLQLDKPLIDAFHASGFEVGVETNGTLPAPEGIDWLCVSPKADAEVVITECDELKLVYPQPLAQPERFLGIRARHYFLSPMASPSVPDQNDDPVKRSNTRKATEYCLAHPQWRLTLQMHKILGID

SEQ ID NO: 31431 - protein, 218 aa, Marinobacter flavimaris; identical to SEQ ID NO: 31423
  misc_feature (1)..(218): tr|A0A3D8H4D2|A0A3D8H4D2_9ALTE 7-carboxy-7-deazaguanine synthase OS=Marinobacter flavimaris OX=262076 GN=queE PE=3 SV=1

SEQ ID NO: 31432 - protein, 218 aa, Marinobacter fuscus
  misc_feature (1)..(218): tr|A0A2T1KTN1|A0A2T1KTN1_9ALTE 7-carboxy-7-deazaguanine synthase OS=Marinobacter fuscus OX=2109942 GN=queE PE= 3 SV=1
MYRVKEAFYTLQGEGAQAGRAAVFCRFSKCNLWNGREKDRASAVCNFCDTDFVGTDGQNGGCFDSPQALAAHILALWPDAPGAPYVVCTGGEPLLQLDEPLIQALHEVGFEVGVETNGTLPAPEGIDWLCVSPKADAPVVITDCDELKLVYPQPLAPPERFLSVRAKHYFLSPMASPAVPDHEPDAIKQSNTRKATDYCLAHPQWRLTLQMHKILGID

SEQ ID NO: 31433 - protein, 218 aa, Marinobacter gudaonensis
  misc_feature (1)..(218): tr|A0A1I6H2Y8|A0A1I6H2Y8_9ALTE 7-carboxy-7-deazaguanine synthase OS=Marinobacter gudaonensis OX=375760 GN=queE PE=3 SV=1
MYRVKEAFYTLQGEGAQAGRAAVFCRFSKCNLWTGREKDRAGAVCNFCDTDFVGTDGQNGGRFETAEALALHIRGLWPHAGGRPYVVCTGGEPLLQLDGALIDAFHRQGLEVGVETNGTLPAPEGIDWLCVSPKADAEVVIRRCDEVKLVYPQPLALPERFLSISAQHYFLSPMASPSAPASGQDEIKQSNTRLATDYCLAHPQWRLTLQMHKIVGID

SEQ ID NO: 31434 - protein, 218 aa, Marinobacter guineae
  misc_feature (1)..(218): tr|A0A2G1VDN7|A0A2G1VDN7_9ALTE 7-carboxy-7-deazaguanine synthase OS=Marinobacter guineae OX=432303 GN=queE PE= 3 SV=1
MYRVKEAFYTLQGEGAQAGRAAVFCRFSKCNLWTGREKDRASAVCNFCDTDFVGTDGQNGGRFESPEALARHVRSLWPNAPGKPYVVCTGGEPLLQLDTALIEAFHREGFEVGVETNGTLPAPAGIDWLCVSPKADAPVVVEACDELKLVYPQPLAMPERFLHIRASHYFLSPMASPSAPEGSVDGVKQSNTHLATEYCLAHPQWRLTLQMHKIIGID

SEQ ID NO: 31435 - protein, 218 aa, Marinobacter halophilus
  misc_feature (1)..(218): tr|A0A2T1KIU2|A0A2T1KIU2_9ALTE 7-carboxy-7-deazaguanine synthase OS=Marinobacter halophilus OX=1323740 GN=queE PE=3 SV=1
MYRVKEAFYTLQGEGAQAGRAAVFCRFSKCNLWTGREKDRAGAVCDFCDTDFVGTDGQNGGRFETPEALATHIHNLWPAAPGTPYVVCTGGEPLLQLDKLLIDAFHGAGFEIGVETNGTLAAPDGIDWLCVSPKADAEVVITECDELKLVYPQPLAPPEQFLGIRARHYFLSPMASPSVPEQGDDPVKRSNTRKATDYCLAHPQWRLTLQMHKILGID

SEQ ID NO: 31436 - protein, 218 aa, Marinobacter hydrocarbonoclasticus
  misc_feature (1)..(218): tr|A0A506TXI0|A0A506TXI0_MARHY 7-carboxy-7-deazaguanine synthase OS=Marinobacter hydrocarbonoclasticus OX=2743 GN=queE PE=3 SV=1
MYRVKEAFYTLQGEGAQAGRAAVFCRFSKCNLWTGREKDRANAVCNFCDTDFVGTDGQNGGRFATPDALAAHIRSLWPDAPGRPYVVCTGGEPLLQLDEPLITAFHRAGFEVGVETNGTLPAPEGIDWLCVSPKADAEVVIAECDELKLVYPQPLAPPERFLHIRARHYFLSPMASPSVPEGGPDAIKQSNTRKATDYCLSHPQWRLTLQMHKILGID

SEQ ID NO: 31437 - protein, 218 aa, Marinobacter hydrocarbonoclasticus; identical to SEQ ID NO: 31430
  misc_feature (1)..(218): tr|A0A455W7X8|A0A455W7X8_MARHY 7-carboxy-7-deazaguanine synthase OS=Marinobacter hydrocarbonoclasticus OX=2743 GN=queE PE=3 SV=1

SEQ ID NO: 31438 - protein, 218 aa, Marinobacter lipolyticus
  misc_feature (1)..(218): tr|R8B0M2|R8B0M2_9ALTE 7-carboxy-7-deazaguanine synthas e OS=Marinobacter lipolyticus SM19 OX=1318628 GN=queE P E=3 SV=1
MYRVKEAFYTLQGEGAQAGRAAVFCRFSKCNLWTGREKDRAGSVCDFCDTDFVGTDGQNGGTFATAAALASHIRSLWPDAPGRPYVVCTGGEPLLQLDTDLIAAFHDQGFEIGVETNGTLPAPEGIDWLCVSPKADAPVVIERCDELKLVYPQPKAMPERFGHIQAQHYFLSPMASPSAPETGVDPLKQSNTRKATEYCLAHPQWRLTLQMHKIVGID

SEQ ID NO: 31439 - protein, 219 aa, Marinobacter litoralis
  misc_feature (1)..(219): tr|A0A3M2RCS8|A0A3M2RCS8_9ALTE 7-carboxy-7-deazaguanine synthase OS=Marinobacter litoralis OX=187981 GN=queE P E=3 SV=1
MYRVKEAFYTLQGEGAQAGRAAVFCRFSKCNLWNGRERDRANAVCNFCDTDFVGTDGQNGGVFETAEALAAHIRALWPEGLGKPYVVCTGGEPLLQLDTELIAAFHDANFEVGVETNGTLPAPEGIDWLCVSPKADAEVVITRCDELKLVYPQPLAMPERFIGVIQANHYFLSPMASPSLPEQAADPVKQSNTRKATDYCLANPQWRLTLQMHKIIGID

SEQ ID NO: 31440 - protein, 218 aa, Marinobacter lutaoensis
  misc_feature (1)..(218): tr|A0A1V2DVJ9|A0A1V2DVJ9_9ALTE 7-carboxy-7-deazaguanine synthase OS=Marinobacter lutaoensis OX=135739 GN=queE PE=3 SV=1
MYRVKEAFYTLQGEGAQAGRAAVFCRFSKCNLWNGRERDRARAVCSFCDTDFVGTDGQNGGVFETAEALADHLWRLWPSAPGRPYVVCTGGEPLLQLDDALVAALHRRGFEVGVETNGTLSPPAGIDWLCVSPKADAPVVVDRCDELKLVFPQPLAMPERFEHIQARHYFLSPMASPAAPASGEDTVKLANTRKATEYCLAHPRWRLTLQMHKLIGID

SEQ ID NO: 31441 - protein, 218 aa, Marinobacter manganoxydans; identical to SEQ ID NO: 31423
  misc_feature (1)..(218): tr|G6YZ25|G6YZ25_9ALTE 7-carboxy-7-deazaguanine synthas e OS=Marinobacter manganoxydans MnI7-9 OX=1094979 GN=qu eE PE=3 SV=1

SEQ ID NO: 31442 - protein, 218 aa, Marinobacter mobilis
  misc_feature (1)..(218): tr|A0A1H3CDB5|A0A1H3CDB5_9ALTE 7-carboxy-7-deazaguanine synthase OS=Marinobacter mobilis OX=488533 GN=queE PE= 3 SV=1
MYRVKEAFYTLQGEGAQSGRAAVFCRFSKCNLWNGREQDRASAVCNFCDTDFVGTDGQNGGRFESAEALAAHIRRLWPGEQGRPYVVCTGGEPLLQLDEPLIAAFHQAGLEVGVETNGTLPAPAGIDWLCVSPKADAEVVIRRCNELKLVYPQPLALPDRFVDIEADHYFLSPMASPSLPEDGPDPVKQSNTRKATDYCLQHPRWRLTLQMHKIVGID

SEQ ID NO: 31443 - protein, 223 aa, Marinobacter nanhaiticus
  misc_feature (1)..(223): tr|N6X224|N6X224_9ALTE 7-carboxy-7-deazaguanine synthas e OS=Marinobacter nanhaiticus D15-8W OX=626887 GN=queE PE=3 SV=1
MYRVKEAFYTLQGEGAQAGRAAVFCRFSKCNLWNGREADRAWAVCNFCDTDFVGTDGQNGGKFVDADALANHIAGLWPHDPAASGTLKPYVVCTGGEPLLQLDEPLIEAFHARGFEVGVETNGTLPAPVGLDWLCVSPKADAKVVIERCNELKLVYPQPLAMPERFAHIRADHYFLSPMASPSVPDDGADALKKSNTRRATDYCLAHPQWRLTLQMHKIVGID

SEQ ID NO: 31444 - protein, 218 aa, Marinobacter nitratireducens
  misc_feature (1)..(218): tr|A0A072MYR6|A0A072MYR6_9ALTE 7-carboxy-7-deazaguanine synthase OS=Marinobacter nitratireducens OX=1137280 GN =queE PE=3 SV=1
MYRVKEAFYTLQGEGAQAGRAAVFCRFSKCNLWNGREKDRADAVCNFCDTDFVGTDGQNGGQFETADALAAHIRSLWPEASGRPYVVCTGGEPLLQLDERLIEAFHQQGFEVGVETNGTLPAPAGIDWLCVSPKADAEVVIKSCNELKLVFPQPLAPPERFLDIRAEHYFLSPMASPTLPDDGLDSVKQSNTRRATDYCLSHPRWRLTLQMHKIVGID

SEQ ID NO: 31445 - protein, 218 aa, Marinobacter pelagius
  misc_feature (1)..(218): tr|A0A366GQI8|A0A366GQI8_9ALTE 7-carboxy-7-deazaguanine synthase OS=Marinobacter pelagius OX=379482 GN=queE PE =3 SV=1
MYRVKEAFYTLQGEGAQAGRAAVFCRFSKCNLWTGREKDRASAVCDFCDTDFVGTDGQNGGRFETADDLARHIRSLWPEAPGCPYVVCTGGEPLLQLDEALIDALHRAGFEVGVETNGTLPAPAGIDWLCVSPKADAPVVIEACDELKLVYPQPLAMPERFEHIRARHYFLSPMASPSLPATGDDPVKQSNTRKATDYCLAHPRWRLTLQMHKIIGID

SEQ ID NO: 31446 - protein, 218 aa, Marinobacter pelagius
  misc_feature (1)..(218): tr|A0A1I4RU56|A0A1I4RU56_9ALTE 7-carboxy-7-deazaguanine synthase OS=Marinobacter pelagius OX=379482 GN=queE PE =3 SV=1
MYRVKEAFYTLQGEGAQAGRAAVFCRFSKCNLWTGREKDRVSAVCDFCDTDFVGTDGQNGGRFETADELARHIRSLWPEAPGRPYVVCTGGEPLLQLDEALIDAFHRAGFEVGVETNGTLPAPAGIDWLCVSPKADAPVVIEACDELKLVYPQPLAMPERFEHIRARHYFLSPMASPSLPATGDDPVKQSNTRKATDYCLAHPRWRLTLQMHKIIGID

SEQ ID NO: 31447 - protein, 218 aa, Marinobacter persicus
  misc_feature (1)..(218): tr|A0A2S6GAA7|A0A2S6GAA7_9ALTE 7-carboxy-7-deazaguanine synthase OS=Marinobacter persicus OX=930118 GN=queE PE =3 SV=1
MYRVKEAFYTLQGEGAQAGRAAVFCRFSKCNLWTGREKDRASAVCNFCDTDFVGTDGQNGGRFDTPEQLAEHIRKLWPDAPGNPYVVCTGGEPLLQLDEPLIKAFQQAGFEVGVETNGTLPAPAGIDWLCVSPKADAPVVITECDELKLVYPQPLAPPERFEHIHARHYFLSPMAAPSVPEQGDDPVRQSNTRKATDYCLAHPRWRLTLQMHKIIGID

SEQ ID NO: 31448 - protein, 219 aa, Marinobacter persicus
  misc_feature (1)..(219): tr|A0A1I3VB80|A0A1I3VB80_9ALTE 7-carboxy-7-deazaguanine synthase OS=Marinobacter persicus OX=930118 GN=queE PE =3 SV=1
MYRVKEAFYTLQGEGAQAGRAAVFCRFSKCNLWTGREKDRASAVCTFCDTDFVGTDGQNGGQFETARALAEHIRGLWPHAEGKPYVVCTGGEPLLQLDAPLIEALHEAGFEIGVETNGTLPAPAGIDWLCVSPKADAEVVIAECDELKLVYPQSLAPPERFEHIRARHYFLSPMASPSAPDGESTDPVRQSNTAKATAYCLAHPRWRLTLQMHKIIGID

SEQ ID NO: 31449 - protein, 218 aa, Marinobacter psychrophilus
  misc_feature (1)..(218): tr|A0A0H4HWR4|A0A0H4HWR4_9ALTE 7-carboxy-7-deazaguanine synthase OS=Marinobacter psychrophilus OX=330734 GN=qu eE PE=3 SV=1
MYRVKEAFYTLQGEGAQAGRAAVFCRFSKCNLWTGREKDRATSVCDFCDTDFVGTDGQNGGVFATPEALAAHIAGLWPVAPGKPYVVCTGGEPLLQLDSPLINALHQAGFEIGVETNGTLPAPAGIDWLCVSPKADAPVVIERCNELKLVYPQPKATPELFLHIQADHFFLSPMASPSAPETSTDVIKQSNTRKATDYCLANPRWRLTLQMHKIIGID

SEQ ID NO: 31450 - protein, 218 aa, Marinobacter salarius
  misc_feature (1)..(218): tr|W5YNZ3|W5YNZ3_9ALTE 7-carboxy-7-deazaguanine synthas e OS=Marinobacter salarius OX=1420917 GN=queE PE=3 SV=1
MYRVKEAFYTLQGEGAQAGRAAVFCRFSKCNLWTGREKDRANAVCSFCDTDFVGTDGQNGGQFETADALAAHIRRLWPDAPGQPYVVCTGGEPLLQLDDKLVDAFHRAGFEVGVETNGTLPAPSGIDWLCVSPKADAPVVLRQCDELKVVYPQPLAMPERFTDINASHYFLSPMASPTVSEGEPDPVKQSNTRKATDYCLTHPQWRLTLQMHKIIGID

SEQ ID NO: 31451 - protein, 218 aa, Marinobacter salarius
  misc_feature (1)..(218): tr|A0A1W6K487|A0A1W6K487_9ALTE 7-carboxy-7-deazaguanine synthase OS=Marinobacter salarius OX=1420917 GN=queE P E=3 SV=1
MYRVKEAFYTLQGEGAQAGRAAVFCRFSKCNLWTGREKDRANAVCSFCDTDFVGTDGQNGGQFETADALAAHIRRLWPDAPGQPYVVCTGGEPLLQLDDKLVDAFHRAGFEVGVETNGTLPAPSGIDWLCVSPKADAPVVLRQCDELKVVYPQPLAMPERFTDINASHYFLSPMASPTVSEGETDPVKQSNTRKATDYCLTHPQWRLTLQMHKIIGID

SEQ ID NO: 31452 - protein, 218 aa, Marinobacter salinus
  misc_feature (1)..(218): tr|A0A1D9GP87|A0A1D9GP87_9ALTE 7-carboxy-7-deazaguanine synthase OS=Marinobacter salinus OX=1874317 GN=queE PE =3 SV=1
MYRVKEAFYTLQGEGAQAGRAAVFCRFSKCNLWSGREKDRASAVCNFCDTNFVGTDGQNGGRFETPTALAAHIRRLWPDAPGQPYVVCTGGEPLLQLDEPLIEAFHREGFEIGVETNGTLPAPKGIDWLCVSPKADAAVVIETCDELKLVYPQPQAMPERFLAIRARHYFLSPMASPVAEESGGDPVQLSNTRKATDYCLAHPRWRLTLQMHKIIGID

SEQ ID NO: 31453 - protein, 218 aa, Marinobacter santoriniensis
  misc_feature (1)..(218): tr|M7CNB3|M7CNB3_9ALTE 7-carboxy-7-deazaguanine synthas e OS=Marinobacter santoriniensis NKSG1 OX=1288826 GN=qu eE PE=3 SV=1
MYRVKEAFYTLQGEGAQAGRAAVFCRFSKCNLWTGREKDRANAVCNFCDTDFVGTDGQNGGRFETAEAMADHIQRLWPDAAGRPYVVCTGGEPLLQLDEPLIAALHHRGFEVGVETNGTLPAPAGIDWLCVSPKADAEVVIESCDELKLVYPQPLAMPERFEHIHAHHYFLSPMASPSAPAAGDDPVKQSNTRKATDYCLAHPRWRLTLQMHKIIGID

SEQ ID NO: 31454 - protein, 225 aa, Marinobacter segnicrescens
  misc_feature (1)..(225): tr|A0A1I0I2D8|A0A1I0I2D8_9ALTE 7-carboxy-7-deazaguanine synthase OS=Marinobacter segnicrescens OX=430453 GN=qu eE PE=3 SV=1
MYRVKEAFYTLQGEGAQAGRAAVFCRFSKCNLWNGREADRADAVCNFCDTDFVGTDGQNGGQFETAEALVEHVASLWPFDIAEGRQQGVVPYVVCTGGEPLLQLDAPLIAAFHDQGFEVGVETNGTLPAPLGIDWLCVSPKADAKVVIRECDELKLVYPQPLAMPERFLSIRARHYFLSPMASPAMPESGADPVKASNTRKAVDYCLRHPRWRLTIQMHKVVGID

SEQ ID NO: 31455 - protein, 218 aa, Marinobacter shengliensis
  misc_feature (1)..(218): tr|A0A2T1KU89|A0A2T1KU89_9ALTE 7-carboxy-7-deazaguanine synthase OS=Marinobacter shengliensis OX=1389223 GN=qu eE PE=3 SV=1
MYRVKEAFYTLQGEGAQAGRAAVFCRFSKCNLWTGREKDRAAAVCNFCDTDFVGTDGQNGGRFETAVELAEHIRKLWPGAPGQPYVVCTGGEPLLQLDQPLIDAFHAAGFEVGVETNGTLPAPEGIDWLCVSPKADAEVVITQCDELKLVYPQPLAQPERFLGIRARHYFLSPMASPSVPDQGDDPVKRSNTQKATEYCLAHPQWRLTLQMHKILGID

SEQ ID NO: 31456 - protein, 220 aa, Marinobacter sp.
  misc_feature (1)..(220): tr|A0A1E7PWI3|A0A1E7PWI3_9ALTE 7-carboxy-7-deazaguanine synthase OS=Marinobacter sp. X15-166B OX=1897620 GN=qu eE PE=3 SV=1
MYRVKEAFYTLQGEGAQAGRAAVFCRFSKCNLWTGRERDRATAVCNFCDTDFVGTDGQNGGRFASAEALAEHLRALWPASSPGGRPYVVCTGGEPLLQLDEPLIAALHARGFEVGVETNGTLPAPAGIDWLCVSPKAAAEVVIEQCDELKLVYPQPLAMPERFTGIAARHYFLSPMASPSVPDQGEDPVKQSNTRKATEYCLAHPQWRLTLQMHKIIGID

SEQ ID NO: 31457 - protein, 218 aa, Marinobacter sp.; identical to SEQ ID NO: 31423
  misc_feature (1)..(218): tr|A0A3N1R0Y1|A0A3N1R0Y1_9ALTE 7-carboxy-7-deazaguanine synthase OS=Marinobacter sp. 3-2 OX=2485141 GN=queE PE =3 SV=1

SEQ ID NO: 31458 - protein, 218 aa, Marinobacter subterrani
  misc_feature (1)..(218): tr|A0A0J7J3Z7|A0A0J7J3Z7_9ALTE 7-carboxy-7-deazaguanine synthase OS=Marinobacter subterrani OX=1658765 GN=queE PE=3 SV=1
MYRVKEAFYTLQGEGAQAGRAAVFCRFSKCNLWTGREKDRASAICNFCDTDFVGTDGQNGGRFDSPDALARHIRALWPDAPGKPYVVCTGGEPLLQLDTALIEAFHRAGLEVGVETNGTLPAPEGIDWLCVSPKADAPVVIDTCDELKLVYPQPLAMPERFLGIRASHYFLSPMASPAVPETAVDEIKQSNTRRATDYCLAHPQWRLTLQMHKIIGID

SEQ ID NO: 31459 - protein, 218 aa, Marinobacter vinifirmus
  misc_feature (1)..(218): tr|A0A558BI36|A0A558BI36_9ALTE 7-carboxy-7-deazaguanine synthase OS=Marinobacter vinifirmus OX=355591 GN=queE PE=3 SV=1
MYRVKEAFYTLQGEGAQAGRAAVFCRFSKCNLWNGREQDRATAVCNFCDTDFVGTDGQNGGRFETAEALAAHIRSLWPDAPGKPYVVCTGGEPLLQLDEPLLAAFHAEGFEVGVETNGTLPAPDGIDWLCVSPKADAGVVITECDELKLVFPQPLAPPERFLGIRARHYFLSPMASPSVPDQGNDPVKQSNTRKATDYCLAHPQWRLTLQMHKILGID

SEQ ID NO: 31460 - protein, 218 aa, Marinobacter zhejiangensis
  misc_feature (1)..(218): tr|A0A1I4LY38|A0A1I4LY38_9ALTE 7-carboxy-7-deazaguanine synthase OS=Marinobacter zhejiangensis OX=488535 GN=qu eE PE=3 SV=1
MYRVKEAFYTLQGEGAQSGRAAVFCRFSKCNLWNGREQDRAAAVCNFCDTDFVGTDGQNGGRFETADALANHIRQLWPAGEGRPYVVCTGGEPLLQLDEALIAAFHQAGFEVGVETNGTLPAPAGIDWLCVSPKADAEVVIRECNEVKLVYPQPLALPERFTDIQAEHYFLSPMASPSLLEGGLDPVKQSNTRKATDYCLKHPRWRLTLQMHKIVGID

SEQ ID NO: 31461 - protein, 210 aa, Marinobacterium aestuarii
  misc_feature (1)..(210): tr|A0A1A9F0Q0|A0A1A9F0Q0_9GAMM 7-carboxy-7-deazaguanine synthase OS=Marinobacterium aestuarii OX=1821621 GN=qu eE PE=3 SV=1
MYSVKEMFYTLQGEGAQAGRPAVFCRFAGCNLWSGREQDRSSAICDFCDTDFVGTDGQNGGKFATAQALAEATLALWPDPAQGTPYLVCTGGEPALQLDTALIEAFKAVGFEIAVETNGTKPLPEGIDWICLSPKANTDLVLSAGQELKLVYPQLLAPPERFTSLAFEHFYLQPLDGPDAAAHLRLCVQYCLDHPQWKLSLQTHKILGID

SEQ ID NO: 31462 - protein, 210 aa, Marinobacterium georgiense
  misc_feature (1)..(210): tr|A0A1H3ZRN7|A0A1H3ZRN7_9GAMM 7-carboxy-7-deazaguanine synthase OS=Marinobacterium georgiense DSM 11526 OX=11 22198 GN=queE PE=3 SV=1
MYSVKEIFYTLQGEGAQAGRAAVFCRFAGCNLWSGREQDRSKAICDFCDTDFVGVDGQNGGKFASAAKLAQRVRSFWPDAPDGKPYVVCTGGEPALQLDSDLIDALHGEGFEIAIETNGTCPLPEGIDWICVSPKAGSELVVHSGNELKLVYPQPLAQPERFTEMHFDHFYLQPMDGPLQTTNIRRCIDYCMAHPQWKLGLQTHKITGID

SEQ ID NO: 31463 - protein, 210 aa, Marinobacterium halophilum
  misc_feature (1)..(210): tr|A0A2P8EZF4|A0A2P8EZF4_9GAMM 7-carboxy-7-deazaguanine synthase OS=Marinobacterium halophilum OX=267374 GN=qu eE PE=3 SV=1
MYSVKEIFYTLQGEGAQTGRASVFCRFTGCNLWSGREQDRAEAVCDFCDTDFIGTDGQNGGKFKDAEALAERIDSFWPQDAGGRRYVVCTGGEPALQLDAALVNALHARGFEVAIETNGTKPLPAGLDWICVSPKSGSEVIITHGDELKLVYPQSLAPPERFADADFTHFYLQPMDGPLQNDYTRRCIDYCMAHPQWQLSLQTHKMLGID

SEQ ID NO: 31464 - protein, 210 aa, Marinobacterium lutimaris
  misc_feature (1)..(210): tr|A0A1H5UKZ0|A0A1H5UKZ0_9GAMM 7-carboxy-7-deazaguanine synthase OS=Marinobacterium lutimaris OX=568106 GN=que E PE=3 SV=1
MYSVYEMFYTLQGEGAQSGRPAVFCRFSGCNLWSGREKDRASAICDFCDTAFVGTGGQGGGKFADASALAERIASLWPDLGQGNPYVVCTGGEPALQLDRALIDELHRLGFEIAIETNGTRPLPEGIDWICVSPKADTEIVVTQGNELKLVYPQSLAPPERFEELDFEHFYLQPMDGPLQETNTRRCVDYCMAHPRWYLSMQTHKYLGID

SEQ ID NO: 31465 - protein, 210 aa, Marinobacterium mangrovicola
  misc_feature (1)..(210): tr|A0A4R1GQ51|A0A4R1GQ51_9GAMM 7-carboxy-7-deazaguanine synthase OS=Marinobacterium mangrovicola OX=1476959 GN =queE PE=3 SV=1
MYSVYEMFYTLQGEGAQSGRPSVFCRFSGCNLWSGREKDRANAICDFCDTDFVGTGGQGGGKFANAAALAERIASLWPDLEQGRPYVVCTGGEPALQLDSSLIAALHELGFEIAIETNGTRPLPEGIDWICVSPKAGTEILITEGNELKLVYPQSLAPPERFEQLNFEHFYLQPMDGPLQDTNTRRCVEYCLAHPQWHLSMQTHKYLGID

SEQ ID NO: 31466 - protein, 210 aa, Marinobacterium sp.
  misc_feature (1)..(210): tr|A0A081FW70|A0A081FW70_9GAMM 7-carboxy-7-deazaguanine synthase OS=Marinobacterium sp. AK27 OX=1232683 GN=que E PE=3 SV=1
MYTVYEMFYTLQGEGAQTGRAAVFCRFSGCNLWSGREQDRSGAICDFCDTQFVGTDGQRGGKFKDANSLAAVIASLWPAGASGRPYVVCTGGEPALQLDAPLVDALHAHGFEIAIETNGTKPLPEGIDWICVSPKAGTELVVTQGNELKLVYPQPLAPPERFNTLPFDHFFLQPMDGPMQGSYTARCIEYCMAHPQWRLSLQTHKIIGID

SEQ ID NO: 31467 - protein, 210 aa, Marinobacterium stanieri
  misc_feature (1)..(210): tr|A0A1N6PXP9|A0A1N6PXP9_9GAMM 7-carboxy-7-deazaguanine synthase OS=Marinobacterium stanieri OX=49186 GN=queE PE=3 SV=1
MYSVKEIFYTLQGEGAQAGRPSVFCRFTGCNLWSGREQDRSKAVCDFCDTDFIGTDGQNGGKFATAAELAARIASFWPKQDSQRRYVVCTGGEPALQLDEALIDALHEEGFEIAIETNGTKPLPAGIDWICVSPKADAEVIITRGHELKLVYPQSLAPPERFADLEFDNFYLQPMDGPLQGQYTRRCIDYCLQHPRWQLSLQTHKMLGID

SEQ ID NO: 31468 - protein, 239 aa, Marinococcus halophilus
  misc_feature (1)..(239): tr|A0A510Y3V4|A0A510Y3V4_MARHA 7-carboxy-7-deazaguanine synthase OS=Marinococcus halophilus OX=1371 GN=queE PE =3 SV=1
MKATPVLEIFGPTIQGEGMVIGRKTMFVRTGGCDYRCSWCDSAFTWDGSQKAAAMSAEAIYDKLKETGGEAFNHVTISGGNPAMHPGLGDLVELLQQHGIETAIETQGSIWNEWVKEIDEVTVSPKPPSSLMKTDWPRLDRYMEELQPRRDKALSLKVVVFDENDLKYAIDVHERYPDVTMYLQVGNDDTATPQVEKLRDHLLAKYEWLTEKVLQEERLNGVRVLPQLHTLLWGNKQGV

SEQ ID NO: 31469 - protein, 239 aa, Marinococcus luteus
  misc_feature (1)..(239): tr|A0A1H2VFG3|A0A1H2VFG3_9BACI 7-carboxy-7-deazaguanine synthase OS=Marinococcus luteus OX=1122204 GN=queE PE= 3 SV=1
MKPTPVLEIFGPTIQGEGMVIGRKTMFVRTGGCDYRCSWCDSAFTWDGSQKAVAMSAEAIYEKLKEAGGRSFNHVTISGGNPAMHPGLGELVALLQEQGIETAIETQGSIWNDWVKEIDEVTVSPKPPSSLMKTDWSRLDYYMEELRPRKEKEVSLKVVVFDESDLNYAMEVHERYPAVTMYLQVGNDDTVTPQVEKLRDHLLAKYEWLTEKVLQEERLNGVRVLPQLHTLLWGNKQGV

SEQ ID NO: 31470 - protein, 216 aa, Marinomonas alcarazii
  misc_feature (1)..(216): tr|A0A318V9D6|A0A318V9D6_9GAMM 7-carboxy-7-deazaguanine synthase OS=Marinomonas alcarazii OX=491949 GN=queE PE =3 SV=1
MYSIKEAFYSLQGEGAHAGRPALFCRFTGCNLWSGLEKTRAKSECQFCDTDFIGTDGQHGGKFQTAQQLRAHIDALWPAGQGHKYVVFTGGEPALQLDEKLIIEMKQHGYTIAIETNGTLPLPDGIDWVCVSPKTTKPLVVSKGNEIKLVYPQSHLSPDLFEDLDFQHFYLQPMDQSHLTADQIPLIDTQQATLHYCLSHPRWRLSLQTHKMLNID

SEQ ID NO: 31471 - protein, 216 aa, Marinomonas aquimarina
  misc_feature (1)..(216): tr|A0A1A8THG1|A0A1A8THG1_9GAMM 7-carboxy-7-deazaguanine synthase OS=Marinomonas aquimarina OX=295068 GN=queE P E=3 SV=1
MYSIKEAFYSLQGEGAHAGRPAIFCRFTGCNLWSGKEKHRASAQCQFCDTDFIGTDGQNGGKFKSAVDLISHLDNLWPVGTNHKYLIFTGGEPALQLDDELIAAAKASHYTLAIETNGTLPLPDGIDWICVSPKTAEPLVVNRGSELKLIFPQEHLPPNLFTDLEFEHFYLQPMDQSALPEGRERVDDAQAQTIRYCLQNPQWRLSLQTHKMLGID

SEQ ID NO: 31472 - protein, 237 aa, Marinomonas aquiplantarum
  misc_feature (1)..(237): tr|A0A366CYP0|A0A366CYP0_9GAMM 7-carboxy-7-deazaguanine synthase OS=Marinomonas aquiplantarum OX=491951 GN=que E PE=3 SV=1
MPKSLGDNPTSTVFRGAQGKHMYSIKEAFYSLQGEGAHAGRPALFCRFTGCNLWSGLEKTRAQSDCQFCDTDFIGTDGQNGGKFRSADLLLKHLDSLWPAQQGHKYVVFTGGEPALQLDEILINTMKRAGYTIAIETNGTLPLPKGIDWICVSPKTNKPLVVTKGNELKLVYPQHHLQPSLFETLAFDHFYLQPMDQSHLAEGQIPLQDTQAATLNYCLAYPRWRLSLQTHKMLNID

SEQ ID NO: 31473 - protein, 216 aa, Marinomonas balearica
  misc_feature (1)..(216): tr|A0A4R6MGS7|A0A4R6MGS7_9GAMM 7-carboxy-7-deazaguanine synthase OS=Marinomonas balearica OX=491947 GN=queE PE =3 SV=1
MYNIKESFYSLQGEGAHAGRPAIFCRFTGCNLWSGKEKHRLSASCQFCDTDFNGVDGQNGGRFQTADALAEHIAAQWPTNQGNKYVVFTGGEPALQLDEALITSMKNRGFTIAIETNGTLELPNGIDWVCVSPKTTEPLVVNSGNELKFVYPQINLHPKDYEDLEFEHFYLQPMDLSAVPQSNVIVSDTQSSTLKYCLENPLWRLSLQTHKMLNID

SEQ ID NO: 31474 - protein, 216 aa, Marinomonas communis
  misc_feature (1)..(216): tr|A0A4R6X7J5|A0A4R6X7J5_9GAMM 7-carboxy-7-deazaguanine synthase OS=Marinomonas communis OX=28254 GN=queE PE=3 SV=1
MYSIKEAFYSLQGEGAHAGRPAIFCRFTGCNLWTGKEKHRASAKCQFCDTDFIGTDGQNGGKFKTAEALIEHLDTLWPEQTSHKYLIFTGGEPALQLDEALIAAAKASHYTLAIETNGTLPLPDGIDWICVSPKTAEPLVVNQGSELKLIFPQDHLPPNLFSDLEFEHFYLQPMDQSALPEGHERINDAQAQTIRYCLQNPQWRLSLQTHKMLGID

SEQ ID NO: 31475 - protein, 216 aa, Marinomonas foliarum
  misc_feature (1)..(216): tr|A0A368ZK87|A0A368ZK87_9GAMM 7-carboxy-7-deazaguanine synthase OS=Marinomonas foliarum OX=491950 GN=queE PE= 3 SV=1
MYSIKEAFYSLQGEGAHAGRPALFCRFTGCNLWSGLEKTRAKSECQFCDTDFIGTDGQNGGKFKTAQQLRSHIDALWPESQGHKYVVFTGGEPALQLDNELIAEMKRHDYTIAIETNGTMELPQGIDWICVSPKTAKPLIVSEGNELKLVYPQSHLSPELFENLDFQHFYLQPMDQSHLTADQIPLIDTQQATLHYCLSHPRWRLSLQTHKMLNID

SEQ ID NO: 31476 - protein, 216 aa, Marinomonas fungiae
  misc_feature (1)..(216): tr|A0A0K6IK76|A0A0K6IK76_9GAMM 7-carboxy-7-deazaguanine synthase OS=Marinomonas fungiae OX=1137284 GN=queE PE= 3 SV=1
MYSIKEAFYSLQGEGAHAGRPAIFCRFTGCNLWTGKEKHRASAACQFCDTDFIGTDGQNGGKFHSAGALIQHLDKLWPTNTDHKYLIFTGGEPALQLDDALIATAKAANYTLAIETNGTLPLPDGIDWICVSPKTTDPLVVNRGSELKLIFPQDHLPPHLFTDLEFDHFYLQPMDQGALPEGRERIDDAQAQTIRYCLQNPQWRLSLQTHKMLGID

SEQ ID NO: 31477 - protein, 216 aa, Marinomonas gallaica
  misc_feature (1)..(216): tr|A0A1C3JUX8|A0A1C3JUX8_9GAMM 7-carboxy-7-deazaguanine synthase OS=Marinomonas gallaica OX=1806667 GN=queE PE =3 SV=1
MYSIKEAFYSLQGEGAHAGRPAIFCRFTGCNLWTGKEKHRATSQCQFCDTDFVGTDGQNGGKFHDADTLIAHLDTLWPENTQHKYLIFTGGEPALQLDDELIQAAKASSYTLAIETNGTLPLPVGIDWICVSPKTAEPLVVNGGSELKLIFPQQHLPPNLFTDLEFEHFYLQPMDQSALPAGQARIDDAQAQTIRYCLQNPQWRLSLQTHKMLGID

SEQ ID NO: 31478 - protein, 216 aa, Marinomonas hwangdonensis
  misc_feature (1)..(216): tr|A0A3M8Q2W7|A0A3M8Q2W7_9GAMM 7-carboxy-7-deazaguanine synthase OS=Marinomonas hwangdonensis OX=1053647 GN=qu eE PE=3 SV=1
MYSIKEAFYSLQGEGAHAGRPALFCRFTGCNLWSGLEKTRAKSECQFCDTDFIGTDGQHGGKFPTAAQLRAHIDSLWPTGQGHKYVVFTGGEPALQLDEALIVEMKQHGYTIAIETNGTIALPQGIDWVCVSPKTAKPLVVSKGDELKLVFPQSHLSPELFETLDFAHFYLQPMDQSHLTADQIPLIDTQQATLQYCLSHPRWRLSLQTHKMLNID

SEQ ID NO: 31479 - protein, 216 aa, Marinomonas mediterranea
  misc_feature (1)..(216): tr|F2JTJ0|F2JTJ0_MARM1 7-carboxy-7-deazaguanine synthas e OS=Marinomonas mediterranea (strain ATCC 700492 / JCM 21426 / NBRC 103028 / MMB-1) OX=717774 GN=queE PE=3 SV =1
MYNVKESFYSLQGEGAHAGRPAIFCRFTGCNLWSGKEKHRLSADCQFCDTDFNGVNGQNGGRFKSADELAKHIANQWPQGHGNKYVVFTGGEPALQLDQALISAVKSYGFMVAIETNGTLRLPDNIDWICVSPKTTDPLVVNAGNELKFVYPQTNLNPKDYEGLEFEHFYLQPMDLSAVPKQNIIASDTQSATLKYCLENPLWRISLQTHKMLNID

SEQ ID NO: 31480 - protein, 216 aa, Marinomonas polaris
  misc_feature (1)..(216): tr|A0A1M5A0S7|A0A1M5A0S7_9GAMM 7-carboxy-7-deazaguanine synthase OS=Marinomonas polaris DSM 16579 OX=1122206 G N=queE PE=3 SV=1
MYSIKEAFYSLQGEGAHAGRPALFCRFTGCNLWSGSEKTRATSECQFCDTDFIGTNGQHGGKFKTAEQLRTHIDVLWPGGQGHKYVVFTGGEPALQLDDELIVEMKQHGYTIAIETNGTMALPDGIDWICVSPKTAKPLVVTKGDELKLVYPQSHISPDYFETLDFSHFYLQPMDQSHLTTDQIPLLDTQQATLHYCLSHPRWRLSLQTHKMLNID

SEQ ID NO: 31481 - protein, 216 aa, Marinomonas pollencensis
  misc_feature (1)..(216): tr|A0A3E0DS13|A0A3E0DS13_9GAMM 7-carboxy-7-deazaguanine synthase OS=Marinomonas pollencensis OX=491954 GN=queE PE=3 SV=1
MYSIKEAFYSLQGEGAHAGRPALFCRFTGCNLWSGQEKTRATSDCQFCDTDFIGTDGQHGGKFKTAQALRTHIDALWPAEQGHKYVVFTGGEPALQLDDELIAEMKSHGYTIAIETNGTLALPEGIDWICVSPKTTHPLKVTSGNELKLVFPQAHLPPARFESLSFDHFYLQPMDQSHLSKDQIPLTNTQQATLNFCLSHPQWRLSLQTHKMLNID

SEQ ID NO: 31482 - protein, 216 aa, Marinomonas posidonica
  misc_feature (1)..(216): tr|F6CRR7|F6CRR7_MARPP 7-carboxy-7-deazaguanine synthas e OS=Marinomonas posidonica (strain CECT 7376 / NCIMB 1 4433 / IVIA-Po-181) OX=491952 GN=queE PE=3 SV=1
MYSVKEAFYSLQGEGAHAGRPALFCRFTGCNLWSGLEKTRSQSDCQFCDTDFIGTDGQNGGKFRSAELLLKHLDALWPAQQEYKYVVFTGGEPALQLDDALISTMKQAGYTIAIETNGTLPLPQGIDWICVSPKTNKPLVVTKGNELKLVYPQHHLLPNQFETLAFDHFYLQPMDQSHLTANQIPLQDTQAATLNYCLAHPRWRLSLQTHKMLNID

SEQ ID NO: 31483 - protein, 216 aa, Marinomonas primoryensis
  misc_feature (1)..(216): tr|A0A2Z4PV50|A0A2Z4PV50_9GAMM 7-carboxy-7-deazaguanine synthase OS=Marinomonas primoryensis OX=178399 GN=queE PE=3 SV=1
MYSIKEAFYSLQGEGAHAGRPALFCRFTGCNLWSGLEKTRSQSDCQFCDTDFIGTDGQNGGKFKTASQLRSHIDALWPSGHGHKYVVFTGGEPALQLDTSLIKEMKDHGYMIAIETNGTLALPDGIDWICVSPKTPKKLVITKGDELKLVYPQEQLDPEQFETLDFDNFYLQPMDQGHLSVDQIPLINTQEATLHYCLSHPRWRLSLQTHKMLNID

SEQ ID NO: 31484 - protein, 216 aa, Marinomonas profundimaris
  misc_feature (1)..(216): tr|W1RNM3|W1RNM3_9GAMM 7-carboxy-7-deazaguanine synthas e OS=Marinomonas profundimaris OX=1208321 GN=queE PE=3 SV=1
MYSIKEAFYSLQGEGAHAGRPALFCRFTGCNLWSGLEKTRALSDCQFCDTDFIGTDGQNGGKFKTASQLRSHIDALWPFGQGHKYVVFTGGEPALQLDDNLIKEMKEHGYTIAIETNGTLALPEGIDWICVSPKTSKALIITKGDELKLVYPQEHLDPASFETLDFANFYLQPMDQGHLSSDQIPLINTQEATLHYCLSHPRWRLSLQTHKMLNID

SEQ ID NO: 31485 - protein, 216 aa, Marinomonas rhizomae
  misc_feature (1)..(216): tr|A0A366JE90|A0A366JE90_9GAMM 7-carboxy-7-deazaguanine synthase OS=Marinomonas rhizomae OX=491948 GN=queE PE= 3 SV=1
MYSIKEAFYSLQGEGAHAGRPALFCRFTGCNLWSGLEKTRANSECQFCDTDFIGTDGQNGGKFKTAEQLRSHIDALWPDGQEYKYVVFTGGEPALQLDEKLIIEMKLHGYTIAIETNGTMALPQGIDWICVSPKTASPLTVTQGDELKLIYPQSHISPALFEKLDFSHFYLQPMDQSHLTVDQIPLIDTQQATLHYCLSHPRWRLSLQTHKMLNID

SEQ ID NO: 31486 - protein, 216 aa, Marinomonas sp.
  misc_feature (1)..(216): tr|A0A370UE09|A0A370UE09_9GAMM 7-carboxy-7-deazaguanine synthase OS=Marinomonas sp. YLB-05 OX=2213058 GN=queE PE=3 SV=1
MYKIKEAFYSLQGEGAHAGRPALFCRFTGCNLWSGKESQRMEAQCQFCDTDFVGTDGQNGGRFNTAAALMSHLDTLWPEGAAHKYIIFTGGEPALQLDDALIAAAKALQYTIAIETNGTRPLPSGIDWICVSPKVAAPLVVNEGHELKLVFPQEHLPPESFSHLSFDNFFLQPMDQSALPSDRIALEDTQTQTLRYCLQNPQWRLSLQTHKMLGID

SEQ ID NO: 31487 - protein, 216 aa, Marinomonas sp.
  misc_feature (1)..(216): tr|A3YGV0|A3YGV0_9GAMM 7-carboxy-7-deazaguanine synthas e OS=Marinomonas sp. MED121 OX=314277 GN=queE PE=3 SV=1
MYSIKEAFYSLQGEGAQAGRPSIFCRFSGCNLWNGKETHRFDSLCQFCDTDFIGVDGQNGGKFKQAKTLALHLDALWPNDQSDKYVVFTGGEPALQLDAALILAMKEMGYVIGIETNGTKPLPDGIDWICVSPKTADELVIQQGHELKLVYPQSHLNPNKYTHLDFDTFYLQPMDQSHLPKDRISPESTLKQTLNYCLANPKWRLSLQTHKILEID

SEQ ID NO: 31488 - protein, 216 aa, Marinomonas spartinae
  misc_feature (1)..(216): tr|A0A1A8TN52|A0A1A8TN52_9GAMM 7-carboxy-7-deazaguanine synthase OS=Marinomonas spartinae OX=1792290 GN=queE P E=3 SV=1
MYSIKEAFYSLQGEGAHAGRPALFCRFTGCNLWSGQEKTRAQSDCQFCDTDFIGTDGQNGGKFKTAEQLRKHIDALWPAGQAHKYVVFTGGEPALQLDEALITEMKQHGYTIAIETNGTLPLPNGIDWICVSPKTTKPLVVTKGSELKLVYPQSHITPDLFENLDFMHFYLQPMDQSHLTVDQIPLIDTQQATLHYCLAHPLWRLSLQTHKMLNID

SEQ ID NO: 31489 - protein, 208 aa, Marinoscillum furvescens
  misc_feature (1)..(208): tr|A0A3D9KWI2|A0A3D9KWI2_9BACT 7-carboxy-7-deazaguanine synthase OS=Marinoscillum furvescens DSM 4134 OX=11222 08 GN=queE PE=3 SV=1
MKISTPKPFTDSLPVMESFLTVQGEGAFSGAAAYFIRLGGCDVGCVWCDVKESWDAAAHPHFTIEEIVAQAKSHGVEIVVITGGEPLMYDLTTLTKALKKAGLRTHVETSGAHAISGDWDWVCFSPKKFMAPKPDFYPAADELKIIVFNKSDFKWAEAHAAECPEKTRLFLQPEWSKKDQMTPLIVDYVKKNPQWRISLQTHKYLDIP

SEQ ID NO: 31490 - protein, 203 aa, Marinoscillum sp.
  misc_feature (1)..(203): tr|A0A2D7TGV5|A0A2D7TGV5_9BACT 7-carboxy-7-deazaguanine synthase OS=Marinoscillum sp. OX=2024838 GN=queE PE=3 SV=1
MKRGSKNLPVMESFYSIQGEGYHSGKPAYFVRLAGCDVKCSWCDVKDSWSNSADQFVHVQDIVKEINQYSTDLVIITGGEPFFHDLGPLTNLLKENGKMVHVETSGTEKFSGEFDWICLSPKRFKKPLENFYEISDELKVIIYQDSDFRWAERISSRMKKDTKRLLQPEWSVENIVNPKILNFIKENPQWRISLQTHKYLKVD

SEQ ID NO: 31491 - protein, 235 aa, Marinovum algicola
  misc_feature (1)..(235): tr|A0A0H4L3I8|A0A0H4L3I8_9RHOB 7-carboxy-7-deazaguanine synthase OS=Marinovum algicola DG 898 OX=988812 GN=que E PE=3 SV=1
MTLRIAEIFGPTIQGEGALIGEPTVFIRAGGCDYRCSWCDSLHAVESRYRHTWAPLSDVEIWDEVLRLSNGQPLTVSISGGNPAIQDFAPVIARGRAAGYRFACETQGSLARDWFAELDTLVLSPKPPSSGETVDWDAFDGCVSAGKPARQSVMKIVVFDETDYQWAKAAHARHPDLPLYLQPGNAEVDPDTPVDLRALGARLEWLTDTAMADGWFAPRILPQLHVLIWGNKRGV

SEQ ID NO: 31492 - protein, 256 aa, Marinovum sp.
  misc_feature (1)..(256): tr|A0A2E7WI10|A0A2E7WI10_9RHOB 7-carboxy-7-deazaguanine synthase OS=Marinovum sp. OX=2024839 GN=queE PE=3 SV=1
MTPARTHPTHEPTTASDAKIRVSEIFGPTIQGEGVLIGLPTVFVRTGGCDYRCSWCDSLHAVDPEYRHDWAAMTTGAVWDKITNLSGGQPLTVSLSGGNPAIQPFGALIRRGQAEGYRFALETQGSVAKDWFAEIDTLVLSPKPPSSDMDTDWSAFDKCLAAAGQSPQVVLKIVIFDDADYHYAKQTAARYPALAMYLQPGNHTPPPAEDDGVCVDQVGVMDRLHWLVDKVTKDRWFEARVLPQLHVLLWGNKRGV

SEQ ID NO: 31493 - protein, 210 aa, Marinovum sp.
  misc_feature (1)..(210): tr|A0A2D7ZBM8|A0A2D7ZBM8_9RHOB 7-carboxy-7-deazaguanine synthase OS=Marinovum sp. OX=2024839 GN=queE PE=3 SV=1
  misc_feature (59)..(59): Xaa can be any naturally occurring amino acid
  misc_feature (75)..(75): Xaa can be any naturally occurring amino acid
  misc_feature (136)..(136): Xaa can be any naturally occurring amino acid
  misc_feature (160)..(160): Xaa can be any naturally occurring amino acid
MYSIKEIFYTLQGEGANAGRAAIFCRFTGCNLWSGREKDRDRAICKFCDTDFVGTDGTXGGQYKTAEALVEAMQXLWPNNQKKNKFVVLTGGEPLLQVDSSLIKQLHEHDFEVAVETNGTIPLPSGIDWVCVSPKXGAKLRVTKGNEIKIVYPQIGLRLXEFENMSFDHFFLQPMDNVDRVGNTNLCVNACLENPKWRLSVQTHKEIGIR

SEQ ID NO: 31494 - protein, 196 aa, Mariprofundus aestuarium
  misc_feature (1)..(196): tr|A0A2K8KXW4|A0A2K8KXW4_9PROT 7-carboxy-7-deazaguanine synthase OS=Mariprofundus aestuarium OX=1921086 GN=que E PE=3 SV=1
MPCTFIRLAGCPLRCLYCDTTQAIPTDSGAWMDIDQIIDDVQQRGRPLVLVTGGEPLAQRNCIKLLERLLALGVEVQLETSGAYSVAGVPDGVRRIVDIKTPGSGEVERNQLDNLKLLRAGDEIKFVICNRSDYEWSRDFIRSHELGGDDVPPLLSTSWGEVSASDLCAWILEDHLPARMQLQLHKVIWGAEATGV

SEQ ID NO: 31495 - protein, 196 aa, Mariprofundus ferrinatatus
  misc_feature (1)..(196): tr|A0A2K8L7Q0|A0A2K8L7Q0_9PROT 7-carboxy-7-deazaguanine synthase OS=Mariprofundus ferrinatatus OX=1921087 GN=q ueE PE=3 SV=1
MPCTFIRLAGCPLRCLYCDTEQAIPTDSGSWMQIDAIVADVQKRGRPLVLVTGGEPLAQRNCIVLLQRLVELGVEVQLETSGAYSVASVPEGVRRIIDIKTPDSGEVERNQLDNLDLLRSGDELKFVICSRSDYEWSRDFIRAHKLGLGEVPPLLSSAWGSVSAEELCAWMLEDHLPARMQLQLHKVIWGAEAKGV

SEQ ID NO: 31496 - protein, 196 aa, Mariprofundus ferrooxydans
  misc_feature (1)..(196): tr|Q0F2M1|Q0F2M1_9PROT 7-carboxy-7-deazaguanine synthas e OS=Mariprofundus ferrooxydans PV-1 OX=314345 GN=queE PE=3 SV=1
MACTFIRLAGCPLRCTYCDTPQAIPFDSGEWMQIDDIVTDVQKRNRPLVLVTGGEPLAQRHCSELLSELLALGCEVQLETSGAYPLASLPVGVRRIVDLKTPGSGEAERNRLDNLSCLCAGDEIKMVLTSRADYQWAAAMIEQHRLGQGDVPVLLSAAWGSLKAEELCQWMLDDRLPARLQLQLHKVIWGAEATGV

SEQ ID NO: 31497 - protein, 209 aa, Mariprofundus sp.
  misc_feature (1)..(209): tr|A0A498DMT6|A0A498DMT6_9PROT 7-carboxy-7-deazaguanine synthase OS=Mariprofundus sp. EBB-1 OX=2650971 GN=queE PE=3 SV=1
MYDSVQGESTLAGLPCTFIRLAGCPLRCSYCDTPKAIPTDSGQWINIDEIIHQVKQHNRPLVLLTGGEPLAQRHCNTLLKRLSELDCFVQLETSGAYSIASVPAGIRRIVDIKTPGSGEVQRNHLQNLQHLVAGDEIKIVLTDRSDYEWARDFIREHKLGLDDVPVLLSPAWGDISAADLCAWLLEDRLPARMQMQMHKVIWGSEAEGV

SEQ ID NO: 31498 - protein, 225 aa, Marisediminitalea aggregata
  misc_feature (1)..(225): tr|A0A1M5RES5|A0A1M5RES5_9ALTE 7-carboxy-7-deazaguanine synthase OS=Marisediminitalea aggregata OX=634436 GN=q ueE PE=3 SV=1
MTDQVLNINEMFETIQGEGVYTGVPAIFVRLQGCPVGCPWCDTKHTWTLDENLIDSVDAVINKSEESERFFGISDLGLLALFEQQGYNAKHVVITGGEPCMYDLTGITELLHERGFTSQIETSGTFEAKCAQQTWVTVSPKVNMKGGYDVLTSALQRANEIKHPIAMQKHVDELDALLAGIDLTDKVVCLQPISQQARATELAIKTCIDRNWRLSLQTHKYVGIA

SEQ ID NO: 31499 - protein, 235 aa, Maritalea myrionectae
  misc_feature (1)..(235): tr|A0A2R4MHS1|A0A2R4MHS1_9RHIZ 7-carboxy-7-deazaguanine synthase OS=Maritalea myrionectae OX=454601 GN=queE PE =3 SV=1
MTLRIAEIFGPTVQGEGALIGEPTVFIRAGGCDYRCSWCDSLHAVESQYRHDWAAMSDEAVWDEVLRLSDGQPLTVSLSGGNPAIQDFGPVIARGRAAGYRFACETQGSVARPWFAELDTLVLSPKPPSSGEVVNWPNFDECLKAGAAARQMVMKIVIFDQADYDWAKQVHGRYPDLPLYLQPGNPEVDPATPIDPQSLIDRLAWLTDTAMADRWFAPRILPQLHVLLWGNKRGV

SEQ ID NO: 31500 - protein, 245 aa, Maritimibacter sp.
  misc_feature (1)..(245): tr|A0A2U2CLG4|A0A2U2CLG4_9RHOB 7-carboxy-7-deazaguanine synthase OS=Maritimibacter sp. 55A14 OX=2174844 GN=que E PE=3 SV=1
MGRVPAMTRLRIAEIFGPTIQGEGALIGAPTVFVRAGGCDYRCTWCDSLHAVESRFRQDWAAMETGAVWAEVRRLSGGRPLTVTLSGGNPAIQDFGPLIANGKAEGYRFAMETQGSVAQDWFASLDMLVLSPKPPSSGEDVDWARFDDCLARAGDAECVLKIVIFDEADYLWAREAAARYPGLPLYLQPGNHTPPPAGAEDGPLDLDGITDRMTWLMERCLADGWFAPRILPQLHVMLWGNRRGV

SEQ ID NO: 31501 - protein, 207 aa, Marivirga sericea
  misc_feature (1)..(207): tr|A0A1X7JD36|A0A1X7JD36_9BACT 7-carboxy-7-deazaguanine synthase OS=Marivirga sericea OX=1028 GN=queE PE=3 SV= 1
MDKNSFDPNIELPIMEAFYTIQGEGFHNGKPAYFIRLGGCDVGCVWCDVKDSWDADKWPLKKIDDIVDDAYQYESRLAVITGGEPFMYDMHGLTKRLLQKGFHVNVETSGAHPFSGMVDWVCLSPKKFKAPLDHWYERADELKIIVFNKSDFKWAEEHAEKVGTDCKLLLQPEWGKREEMMPLIVDYVKANPKWAISLQTHKYLQIP

SEQ ID NO: 31502 - protein, 207 aa, Marivirga tractuosa
  misc_feature (1)..(207): tr|E4TSD7|E4TSD7_MARTH 7-carboxy-7-deazaguanine synthas e OS=Marivirga tractuosa (strain ATCC 23168 / DSM 4126 / NBRC 15989 / NCIMB 1408 / VKM B-1430 / H-43) OX=64386 7 GN=queE PE=3 SV=1
MDKNSFDPNIELPLMESFYTIQGEGFHSGKAAYFIRLGGCDVGCVWCDVKDSWDADKWPLKKIDDIVDDAYQYESRLAVITGGEPFMYDMHGLTKRLLQKGFHVNVETSGAHPFTGMVDWVCLSPKKFKAPLEHWYDRADELKIIIFNKSDFKWAEEHAEKVGSDCKLMLQPEWSKREEMMPLIVEYVKENPNWGISLQTHKYLQIP

SEQ ID NO: 31503 - protein, 235 aa, Marivivens niveibacter
  misc_feature (1)..(235): tr|A0A251WXW6|A0A251WXW6_9RHOB 7-carboxy-7-deazaguanine synthase OS=Marivivens niveibacter OX=1930667 GN=queE PE=3 SV=1
MTLRIVEIFGPTIQGEGALIGEPTVFIRAGGCDYRCSWCDSLHAVDSEFRHTWKPLSDDQVWDQVTALTGGTPLTISISGGNPAIQDFSGVIARGKSEGYKFACETQGSLAKPWFGDLDTLVLSPKPPSSGETVDWDAFDACVTAGQSAGQTVMKIVIFDDTDYAWAKDAHARYPDMALYLQPGNPEVDPDVPVDPQGLADRLLWLTEKTMGDNWFAPRILPQLHVLIWGNKRGV

SEQ ID NO: 31504 - protein, 209 aa, Marixanthomonas ophiurae
  misc_feature (1)..(209): tr|A0A3E1Q8Z7|A0A3E1Q8Z7_9FLAO 7-carboxy-7-deazaguanine synthase OS=Marixanthomonas ophiurae OX=387659 GN=queE PE=3 SV=1
MQKETQELVNKGEMLPLMEEFYTIQGEGFHKGTAAYFIRIGGCDVGCHWCDVKESWNADIHPPTEINQIVDNADKYSKTIVITGGEPLTWDMGPLTKKLKDKGMQVHIETSGAYKLTGIWDWICLSPKKIKLPTPEIYEKAHELKVIIYNKNDFKFAEEQAEKVNNNCILYLQPEWSKRDKMMSQIVDYVMQNPKWKVSLQTHKYLNIP

SEQ ID NO: 31505 - protein, 209 aa, Marixanthomonas sp.
  misc_feature (1)..(209): tr|A0A2U0I531|A0A2U0I531_9FLAO 7-carboxy-7-deazaguanine synthase OS=Marixanthomonas sp. HN-E44 OX=2174845 GN=q ueE PE=3 SV=1
MQDENQDLVNKGEMLPLMEEFYTIQGEGFHKGTAAYFIRVGGCDVGCHWCDVKESWNADLHPPTAIDQIVENADKYSKTIVVTGGEPLTWNMNPLTQKLKEKGMQIHIETSGAYKLTGTWDWICLSPKKIKLPTPEVYKKADELKVIVYNKNDFKFAEEQAGKVGDNCILYLQPEWSKRDKMMPLIVDYVMQNPKWKVSLQTHKYLNIP

SEQ ID NO: 31506 - protein, 211 aa, Massilia albidiflava
  misc_feature (1)..(211): tr|A0A411WY85|A0A411WY85_9BURK 7-carboxy-7-deazaguanine synthase OS=Massilia albidiflava OX=321983 GN=queE PE= 3 SV=1
MTYSIKEIFYTLQGEGAHAGRPAVFCRFAGCNLWTGRESDRASATCQFCDTDFVGTDGERGGKFATPQALAEVIDSLWPDTYPASKYVVFTGGEPLLQLDGPLIDAMHAAGFTIAIETNGTVAVPPGIDWVCVSPKVGAQLVVAKGNELKVVIPQANQDLRDYEHLDFDNFFVQPMDGPLAAFNTTLAIETCKRHPKWKLSLQTHKLLNIP

SEQ ID NO: 31507 - protein, 211 aa, Massilia armeniaca
  misc_feature (1)..(211): tr|A0A2R4CB67|A0A2R4CB67_9BURK 7-carboxy-7-deazaguanine synthase OS=Massilia armeniaca OX=2072590 GN=queE PE=3 SV=1
MTYSIKEIFYTLQGEGAHAGRPAVFCRFAGCNLWTGRESDRASAVCQFCDTDFVGTDGERGGKFATPAALAAVIDSLWPRSHAASKYVVFTGGEPLLQLDGPLIDAMHAAGFTIAIETNGTIAVPPGVDWICVSPKVGSTLVVSKGNELKVVIPQKDQRLADYEHLEFDNFFVQPMDGPLAAFNTTLAIDTCKANPKWKLSLQTHKLLNIP

SEQ ID NO: 31508 - protein, 211 aa, Massilia aurea
  misc_feature (1)..(211): tr|A0A422QNE2|A0A422QNE2_9BURK 7-carboxy-7-deazaguanine synthase OS=Massilia aurea OX=373040 GN=queE PE=3 SV=1
MTYSIKEIFYTLQGEGAHAGRPAVFCRFSGCNLWTGREADRLTSVCQFCDTDFVGTDGERGGKFKEADLLAAEIDSLWPATHPASKYVVFTGGEPLLQLDRPLIDAMHARGFTIAIETNGTLPVPEGVDWICVSPKMGSTLVVHKGSEIKVVIPQLGQDLAAYEGLDFEHFYLQAMDGPLAARNIQLAIETCRANPKWKLSLQTHKLLQIP

SEQ ID NO: 31509 - protein, 211 aa, Massilia eurypsychrophila
  misc_feature (1)..(211): tr|A0A2G8TGD0|A0A2G8TGD0_9BURK 7-carboxy-7-deazaguanine synthase OS=Massilia eurypsychrophila OX=1485217 GN=qu eE PE=3 SV=1
MTYSIKEIFYTLQGEGAHAGRPAVFCRFAGCNLWTGRESDRASAVCTFCDTDFVGTDGERGGKFPDPALLAAEIDTLWPSAYPASKYVVFTGGEPLLQLDDALIAAMHAVGFEIAIETNGTLPVPAGVDWICVSPKMGSTLVVTKGNEIKVVIPQSGQNLRAYEQLEFDNFFVQPMDGPLAAHNTRLAIETCKLHPHWKLSLQTHKLLQIP

SEQ ID NO: 31510 - protein, 211 aa, Massilia flava
  misc_feature (1)..(211): tr|A0A562PQ53|A0A562PQ53_9BURK 7-carboxy-7-deazaguanine synthase OS=Massilia flava OX=871742 GN=queE PE=3 SV=1
MTYSIKEIFYTLQGEGAHAGRPAVFCRFSGCNLWTGRESDRATATCQFCDTDFVGTDGERGGKFATADALVAVIDSLWPATYPASKYVVFTGGEPLLQLDAPLIDAMHAAGFTIAIETNGTLPVPPGVDWICVSPKVGSQLVVERGNEIKVVIPQANQELAAYEHLDFENFFVQPMDGPLAAFNTTLAIETCKRNPKWKLSLQTHKLLNIP

SEQ ID NO: 31511 - protein, 180 aa, Massilia glaciei
  misc_feature (1)..(180): tr|A0A2U2HJL9|A0A2U2HJL9_9BURK 7-carboxy-7-deazaguanine synthase (Fragment) OS=Massilia glaciei OX=1524097 GN= queE PE=3 SV=1
NLWTGRESDRAGAVCRFCDTDFVGTDGEGGGKFAQAVDLAARIDGLWPAAYPARKYAVFTGGEPLLQLDAALIAAMHAAGFTIAIETNGTLPVPAGVDWICVSPKMGSTLVVHKGDEIKVVIPQTGQDLRAYEHLDFEHFFVQPMDGPLAQFNTRLAIETCKRNPRWNLSLQTHKLLHIP

SEQ ID NO: 31512 - protein, 211 aa, Massilia lurida
  misc_feature (1)..(211): tr|A0A562RKR1|A0A562RKR1_9BURK 7-carboxy-7-deazaguanine synthase OS=Massilia lurida OX=1036180 GN=queE PE=3 SV =1
MTYSIKEIFYTLQGEGAHAGRPAVFCRFSGCNLWTGRESDRASATCQFCDTDFVGTDGERGGKFTTPLALADVIDSLWPDTHAASKYVVFTGGEPLLQLDAPLIDAMHAKGFTIAIETNGTLPVPSGVDWICVSPKVGSTLVVGKGSELKVVIPQAGQDLADYEGLDFDNFFVQPMDGPLAAFNTTLAIETCKRNPKWKLSLQTHKLLNIP

SEQ ID NO: 31513 - protein, 211 aa, Massilia lutea
  misc_feature (1)..(211): tr|A0A4P6L4E5|A0A4P6L4E5_9BURK 7-carboxy-7-deazaguanine synthase OS=Massilia lutea OX=321985 GN=queE PE=3 SV=1
MTYSIKEIFYTLQGEGAHAGRPAVFCRFAGCNLWTGRESDRATATCQFCDTDFVGTDGERGGKFASPEALVAVIDGLWPDTYPASKYVVFTGGEPLLQLDAPLIDAMHAAGFTIAIETNGTVAVPPGIDWVCVSPKVGSQLVVSKGNELKVVIPQANQDLADYEHLDFDNFFVQPMDGPLAAFNTTLAIETCKRNPKWKLSLQTHKLLNIP

SEQ ID NO: 31514 - protein, 211 aa, Massilia namucuonensis
  misc_feature (1)..(211): tr|A0A1I7M5L4|A0A1I7M5L4_9BURK 7-carboxy-7-deazaguanine synthase OS=Massilia namucuonensis OX=1035707 GN=queE PE=3 SV=1
MTYSIKEIFYTLQGEGAHAGRPAVFCRFSGCNLWTGRESDRATAVCQFCDTDFVGTDGERGGKFGTPEALAELIDSLWPQSYPASKYVVFTGGEPLLQLDAPLIAAMHRAGFEIAIETNGTLPVPPGVDWICVSPKMGSTLVVHKGNEIKVVIPQKDQDLAAYEGLDFENFFVQPMDGPLAGFNTTLAIETCKRNPKWKLSLQTHKLLQIP

SEQ ID NO: 31515 - protein, 211 aa, Massilia oculi
  misc_feature (1)..(211): tr|A0A2S2DQ55|A0A2S2DQ55_9BURK 7-carboxy-7-deazaguanine synthase OS=Massilia oculi OX=945844 GN=queE PE=3 SV=1
MTYSIKEIFYTLQGEGAHAGRPAVFCRFSGCNLWTGREADRSSAVCQFCDTDFVGTDGERGGKFKEADLLAAEIDSLWPTSYPASKYVVFTGGEPLLQLDRPLIDAMHARGFTIAIETNGTLPVPEGVDWICVSPKMGSTLVVHKGSEIKVVIPQLGQDLAAYEGLDFAHFYLQAMDGPLAARNLQLAIETCRANPKWKLSLQTHKLLQIP

SEQ ID NO: 31516 - protein, 211 aa, Massilia phosphatilytica
  misc_feature (1)..(211): tr|A0A2S8HB29|A0A2S8HB29_9BURK 7-carboxy-7-deazaguanine synthase OS=Massilia phosphatilytica OX=2026176 GN=que E PE=3 SV=1
MTYSIKEIFYTLQGEGAHAGRPAVFCRFSGCNLWTGRESDRATAVCQFCDTDFVGTDGERGGKFKDAASLAADINSLWPETYPASKYVVFTGGEPLLQLDAALIDAMHAAGFTIAIETNGTLPVPAGVDWICVSPKMGSTLVVDRGNELKVVIPQTGQDLAAYEHLDFDNFFVQPMDGPLAQFNTQLAIDTCRRNPKWKLSLQTHKLLNIP

SEQ ID NO: 31517 - protein, 211 aa, Massilia plicata
  misc_feature (1)..(211): tr|A0A4P7BCJ2|A0A4P7BCJ2_9BURK 7-carboxy-7-deazaguanine synthase OS=Massilia plicata OX=321984 GN=queE PE=3 SV =1
MTYSIKEIFYTLQGEGAHAGRPAVFCRFAGCNLWTGRESDRASAVCQFCDTDFVGTDGERGGKFATPEALAAVIDGLWPTTHTASKYVVFTGGEPLLQLDGALIDAMHAAGFTIAIETNGTIAVPPGVDWICVSPKAGSKLVVHKGSELKVVIPQKDQNLADYEGLDFDHFFVQPMDGPLAAFNTTLAIDTCKANPKWKLSLQTHKLLNIP

SEQ ID NO: 31518 - protein, 211 aa, Massilia psychrophila
  misc_feature (1)..(211): tr|A0A2G8T2D2|A0A2G8T2D2_9BURK 7-carboxy-7-deazaguanine synthase OS=Massilia psychrophila OX=1603353 GN=queE P E=3 SV=1
MTYSIKEIFYTLQGEGAHAGRPAVFCRFSGCNLWTGRESDRASAVCTFCDTDFVGTDGEEGGKFSRPGDLADKINSLWPARYPASKYVVFTGGEPLLQLDGALIDAMHVAGFEIAIETNGTLPVPAGVDWVCVSPKIGATLVVGRGNEIKVVIPQTGQDLAAYEQLGFDHFFVQPMDGPLAEYNTRLAIDTCKRHPQWKLSLQTHKLLQIP

SEQ ID NO: 31519 - protein, 211 aa, Massilia sp.
  misc_feature (1)..(211): tr|A0A0Q5HZ84|A0A0Q5HZ84_9BURK 7-carboxy-7-deazaguanine synthase OS=Massilia sp. Leaf139 OX=1736272 GN=queE PE =3 SV=1
MTYSIKEIFYTLQGEGAHAGRPAVFCRFSGCNLWTGREQDRAASICTFCDTDFVGTDGERGGKFRDADSLAGEIDSLWPASHAPSKYVVFTGGEPLLQLDEALIAAMHARGFTIAIETNGTLPVPPGVDWICVSPKMGSKLVVEKGNEIKVVIPQAGQDLAAYEQLDFENFYVQPMDGILAAQNTRLAIETCRNNPKWKLSLQTHKLLQIP

SEQ ID NO: 31520 - protein, 211 aa, Massilia sp.
  misc_feature (1)..(211): tr|A0A344JCS6|A0A344JCS6_9BURK 7-carboxy-7-deazaguanine synthase OS=Massilia sp. YMA4 OX=1593482 GN=queE PE=3 SV=1
MTYSIKEIFYTLQGEGAHAGRPAVFCRFAGCNLWTGRESDRAGAICQFCDTDFVGTDGERGGKFATPGELATVIDSLWPASHAASKYVVFTGGEPLLQLDGPLIDAMHAAGFTIAIETNGTIAVPPGVDWICVSPKVGSKLVVAKGNELKVVIPQKDQHLADYEHLEFDNFFVQPMDGPLAAFNTTLAIDTCKANPKWKLSLQTHKLLNIP

SEQ ID NO: 31521 - protein, 211 aa, Massilia timonae
  misc_feature (1)..(211): tr|A0A1S2NF34|A0A1S2NF34_9BURK 7-carboxy-7-deazaguanine synthase OS=Massilia timonae OX=47229 GN=queE PE=3 SV= 1
MTYSIKEIFYTLQGEGAHAGRPAVFCRFSGCNLWTGREADRLNSVCQFCDTDFVGTDGERGGKFKEADLLAAEIDSLWPATYPASKYVVFTGGEPLLQLDRPLIDAMHARGFTIAIETNGTLPVPEGVDWICVSPKMGSTLAVHKGSEIKVVIPQVGQDLAAYEGLDFEHFYVQAMDGPLAARNLQLAIETCRANPKWKLSLQTHKLLQIP

SEQ ID NO: 31522 - protein, 211 aa, Massilia timonae
  misc_feature (1)..(211): tr|K9D5T3|K9D5T3_9BURK 7-carboxy-7-deazaguanine synthas e OS=Massilia timonae CCUG 45783 OX=883126 GN=queE PE=3 SV=1
MTYSIKEIFYTLQGEGAHAGRPAVFCRFSGCNLWTGREADRSSSVCQFCDTDFVGTDGERGGKFKEADLLAAEIDSLWPATYPASKYVVFTGGEPLLQLDRPLIDAMHARGFTIAIETNGTLPVPEGVDWICVSPKMGSTLAVHKGSEIKVVIPQVGQDLAAYEGLDFEHFYVQAMDGPLAARNLQLAIETCRANPKWKLSLQTHKLLQIP

SEQ ID NO: 31523 - protein, 211 aa, Massilia umbonata
  misc_feature (1)..(211): tr|A0A4P8HNB3|A0A4P8HNB3_9BURK 7-carboxy-7-deazaguanine synthase OS=Massilia umbonata OX=864828 GN=queE PE=3 S V=1
MTYSIKEIFYTLQGEGAHAGRPAVFCRFAGCNLWTGRESDRATATCQFCDTDFVGTDGERGGKFATPQALAEVIDSLWPETYPASKYVVFTGGEPLLQLDAPLIDAMHAAGFTIAIETNGTVAVPPGIDWVCVSPKVGSQLVVSKGNELKVVIPQANQDLADYEHLDFENFFVQPMDGPLAAFNTTLAIETCKRHPKWKLSLQTHKLLNIP

SEQ ID NO: 31524 - protein, 211 aa, Massilia violaceinigra
  misc_feature (1)..(211): tr|A0A2D2DQ26|A0A2D2DQ26_9BURK 7-carboxy-7-deazaguanine synthase OS=Massilia violaceinigra OX=2045208 GN=queE PE=3 SV=1
MTYSIKEIFYTLQGEGAHAGRPAVFCRFSGCNLWTGRESDRASAVCTFCDTDFVGTDGERGGKFATGTALAALIDSLWPASYPHSKYVVFTGGEPLLQLDAPLIDAMHAAGFEIAIETNGTLPVPPGVDWICVSPKMGSKLVVEKGNELKVVIPQLNQDLGAYEGLDFENFFVQPMDGPLGEHNTRLAIETCKRHPKWKLSLQTHKLLQIP

SEQ ID NO: 31525 - protein, 211 aa, Massilia yuzhufengensis
  misc_feature (1)..(211): tr|A0A1I1R558|A0A1I1R558_9BURK 7-carboxy-7-deazaguanine synthase OS=Massilia yuzhufengensis OX=1164594 GN=queE PE=3 SV=1
MTYSIKEIFYTLQGEGAHAGRPAVFCRFSGCNLWTGREADRASAVCTFCDTDFVGTDGERGGKFRDAAALAAEIDGLWPATHAASKYVVFTGGEPLLQLDQALIDAMHAHGFTIAIETNGTLPVPEGVDWICVSPKMGAQLVVAKGNEIKVVIPQAGQDLAAYEHLDFENFYVQPMDGLLAARNTRLAIETCRRNPKWKLSLQTHKLLQIP

SEQ ID NO: 31526 - protein, 265 aa, Mastigocladus laminosus
  misc_feature (1)..(265): tr|A0A4D9CDM2|A0A4D9CDM2_MASLA 7-carboxy-7-deazaguanine synthase OS=Mastigocladus laminosus UU774 OX=1594576 G N=queE PE=3 SV=1
MTTKIGITPTARLVEVFSAIQGEGLNVGTRQIFIRFALCDLRCQFCDSAHTWNAPTTCRIERSPGKRDFEIYSNPVSLPILLEWIERQNIPCLHDSISLTGGEPLLHAGFLVEFLPQIRAITGLPIYLETGGHRPEQLAMILPYLDSVGMDLKLPSTSGENRWQEHSKFLQLCYESQIEVFVKIIISEQTNPAELERSALLVAQVSPSIPVFLQPVTPLPASEQLTANPVLAPSPEQVLMWQALIKRFVKQVRVIPQTHKMLNQL

SEQ ID NO: 31527 - protein, 264 aa, Mastigocoleus testarum
  misc_feature (1)..(264): tr|A0A0V7ZNP0|A0A0V7ZNP0_9CYAN 7-carboxy-7-deazaguanine synthase OS=Mastigocoleus testarum BC008 OX=371196 GN= queE PE=3 SV=1
MNIETIKSTARLIEIFSAIQGEGLNVGTRQIFIRFAFCDLRCHYCDSAHTWNAPDTCRIEKLPGSREFEIHPNPVSLPILIEWVKRQNIPRLHDSISLTGGEPLLHSNFLIDFLPKVRSVTSLPIYLETGGHRPEQLSKILPYLDSVGMDLKLPSTSGESHWQAHKQFLKICNRAQLEVFVKIVISQQTSWSDLEQAALLIKDINPKILVFLQPVTPLEPGKVFTSEQVFAPFPEQVLSWQASLKQLLDRVRVVPQTHKFIDQL

SEQ ID NO: 31528 - protein, 183 aa, Mediterranea sp.
  misc_feature (1)..(183): tr|A0A1Y4HMV6|A0A1Y4HMV6_9BACT 7-carboxy-7-deazaguanine synthase OS=Mediterranea sp. An20 OX=1965586 GN=queE P E=3 SV=1
MKKKINEIFYSLQGEGCHTGTPAVFIRFSGCNLHCSFCDTQHEEGTPMTNEEIIKEACRYPARMVVLTGGEPALQIDKDLIDRLHREHRYICIETNGTTLLPPGIDWVTCSPKAESTVVIPRINELKVVYTGQDVETLREQLKADHYLLQPCSGQNISETVDYVMQHPHWRLSLQTHKFIGIR

SEQ ID NO: 31529 - protein, 246 aa, Megamonas funiformis
  misc_feature (1)..(246): tr|H3K496|H3K496_9FIRM 7-carboxy-7-deazaguanine synthas e OS=Megamonas funiformis YIT 11815 OX=742816 GN=queE P E=3 SV=1
MQAGVSEIFSSIQGEGKYVGCRQLFIRLIGCNMDCPYCDTDKLAHSNLVPCVLEKCEGYEGDLELKNPLDLNDIMPYINYRLQQPHHSISITGGEPLLYPQIILELAKNLKPLSIPLFLETNGTLVKQLAQVIDEIDIISMDMKLPSDIGKAYWQEHEEFLKLASKKDVYVKIVVSNESTVEDFEKALSIIKNIDENILLVLQPITPLGGLHEAPPEKMLKWQTRAMQVLKNVRVIPQTHKMMNQL

SEQ ID NO: 31530 - protein, 246 aa, Megamonas hypermegale; identical to SEQ ID NO: 31529
  misc_feature (1)..(246): tr|A0A378NV23|A0A378NV23_9FIRM 7-carboxy-7-deazaguanine synthase OS=Megamonas hypermegale OX=158847 GN=queE PE =3 SV=1

SEQ ID NO: 31531 - protein, 246 aa, Megamonas hypermegale
  misc_feature (1)..(246): tr|A0A239TD31|A0A239TD31_9FIRM 7-carboxy-7-deazaguanine synthase OS=Megamonas hypermegale OX=158847 GN=queE PE =3 SV=1
MQAGVSEIFSSIQGEGKYVGCRQLFIRLIGCNMNCPYCDTNDVAHDKTVPCILEKAAGYQGDLKLDNPVDIEDLMPYINYRLQSPHHSISITGGEPLLFTDFIRDLAQKVKQFNVPLFLETNGTLPQQLEKVIDIIDIISMDMKLPSDVQKAYWQEHEQFLQVAKQKDVYVKIVVSAESTEEDFVKALDIIKNVDENILLVLQPITPMGGLHEAPPQKMLDWQSKAMQVLKNVRVIPQTHKMMNQL

SEQ ID NO: 31532 - protein, 246 aa, Megamonas rupellensis
  misc_feature (1)..(246): tr|A0A412CEP4|A0A412CEP4_9FIRM 7-carboxy-7-deazaguanine synthase OS=Megamonas rupellensis OX=491921 GN=queE PE =3 SV=1
MQAGVSEIFSSIQGEGKYVGCRQLFIRLIGCNMDCPYCDTDKLAHSNLVPCVLEKCEGYEGDLELKNPLDLNDIMPYINYRLQQPHHSISITGGEPLLYPQIILELAKNLKPLSISLFLETNGTLVKQLAQVIDEIDIISMDMKLPSDIGKAYWQEHEEFLKLASKKDVYVKIVVSKESTVEDFEKALSIIKNIDENILLVLQPITPLGGLHEAPPEKMLKWQTRAMQVLKNVRVIPQTHKMMNQL

SEQ ID NO: 31533 - protein, 246 aa, Megamonas rupellensis; identical to SEQ ID NO: 31529
  misc_feature (1)..(246): tr|A0A411ZYV4|A0A411ZYV4_9FIRM 7-carboxy-7-deazaguanine synthase OS=Megamonas rupellensis OX=491921 GN=queE PE =3 SV=1

SEQ ID NO: 31534 - protein, 246 aa, Megamonas sp.; identical to SEQ ID NO: 31529
  misc_feature (1)..(246): tr|A0A1H8FZ19|A0A1H8FZ19_9FIRM 7-carboxy-7-deazaguanine synthase OS=Megamonas sp. Calf98-2 OX=1855330 GN=queE PE=3 SV=1

SEQ ID NO: 31535 - protein, 210 aa, Megasphaera cerevisiae
  misc_feature (1)..(210): tr|A0A0J6WZX5|A0A0J6WZX5_9FIRM 7-carboxy-7-deazaguanine synthase OS=Megasphaera cerevisiae DSM 20462 OX=112221 9 GN=queE PE=3 SV=1
MKNSLWVNEIFDSIDGEGKTAGQLASFIRLKGCNLRCAYCDTTYAFHEGYLMEAETIASKVSYPDITITGGEPLCQDLHGLLELLQDHSINIETNGSMDITPYFRYAGVWFTIDYKSLSSGMSNHMLLHNFRCLRPQDVLKFVVGTKDDLEQARFVCDTYRPGCPVYVGAVFGAISPGEIVEFMKEYELTDWHLQLQLHKFIWAPEARGV

SEQ ID NO: 31536 - protein, 210 aa, Megasphaera elsdenii
  misc_feature (1)..(210): tr|G0VPJ7|G0VPJ7_MEGEL 7-carboxy-7-deazaguanine synthas e OS=Megasphaera elsdenii DSM 20460 OX=1064535 GN=queE PE=3 SV=1
MNYSLCVNEIFDSIDGEGKKAGQLATFIRLCGCNLRCSYCDTAYAFNEGQHMDIADIIAQVSYPNVTLTGGEPLCQDIHALLEGLKGHSVNIETNGSMDIEPYFKYDHVWFTVDYKSLSSDMANRMLPENFEKLRPQDVLKFVVGDEADLRQALGVYRLYRPKCAVYVGAVFGKIEPRRIVEFMKENRLTDWHMQLQLHKFIWNPDDRGV

SEQ ID NO: 31537 - protein, 210 aa, Megasphaera elsdenii
  misc_feature (1)..(210): tr|A0A269TH68|A0A269TH68_MEGEL 7-carboxy-7-deazaguanine synthase OS=Megasphaera elsdenii OX=907 GN=queE PE=3 S V=1
MNYSLCVNEIFDSIDGEGKKAGQLATFIRLCGCNLRCSYCDTAYAFNEGQHMDIADIIAQVSYPNVTLTGGEPLCQDIHALLAGLKGHSVNIETNGSMDIEPYFKYDHVWFTVDYKSLSSDMANRMLPENFEKLRPQDVLKFVVGDEADLRQALGVYRLYRPKCAVYVGAVFGKIEPRRIVEFMKENRLTDWHMQLQLHKFIWNPDDRGV

SEQ ID NO: 31538 - protein, 210 aa, Megasphaera genomosp.
  misc_feature (1)..(210): tr|A0A2J8BA31|A0A2J8BA31_9FIRM 7-carboxy-7-deazaguanine synthase OS=Megasphaera genomosp. type_2 OX=699193 GN= queE PE=3 SV=1
MKNKLYINEIFHSIDGEGRRAGELASFIRLCGCNLRCIYCDTTYAFAEGRSMDVEDIVAAVRYRNVTLTGGEPLLQPIHGLLQALSAQDVNIETNGSVDILPYMVYPHVWFTIDYKGPFSQMEEKMYAPNFRHLRSQDVLKFVVGSYQDLEVARILCEEVQPTCAIYVGAVFETLAPRDIVTYMERYSLTSWRLQLQMHKYIWPPDMRGV

SEQ ID NO: 31539 - protein, 210 aa, Megasphaera genomosp.
  misc_feature (1)..(210): tr|D3LT30|D3LT30_9FIRM 7-carboxy-7-deazaguanine synthas e OS=Megasphaera genomosp. type_1 str. 28L OX=699218 GN =queE PE=3 SV=1
MKNKLYVNELFNSIDGEGRRAGELASFIRLCGCNLRCSYCDTTYAFTEGTPMAVEEILSQLQYRNITLTGGEPLLQDVHLLLQRLQDRDVNIETNGSVSIRPYLSYSHVWFTVDYKSISSGMTTAMKEENFQLLRPQDVLKFVVGTHADLEQARKICAYFNPSCPIYISAVFAAIEPKEIVAYMEAYRLMNWRLQLQLHKYIWPPTARGV

SEQ ID NO: 31540 - protein, 218 aa, Megasphaera hexanoica
  misc_feature (1)..(218): tr|A0A344MIY4|A0A344MIY4_9FIRM 7-carboxy-7-deazaguanine synthase OS=Megasphaera hexanoica OX=1675036 GN=queE P E=3 SV=1
MKVAEKFISINGEGNRAGELSVFVRFQGCNLRCSYCDTSWAYEADCPYEELTPDEIVEYVLSTGVHNVTLTGGEPLLSQGIAELIEKLLAQPKIRVEIETNGAVDLRPFCMPARPVFTMDYKLPSSGWERAMKVENFSVLEKQDTVKFVCGSQEDLQRAWEVIQEYRLTERCHVYLSPVFGSIEPVDMVAFMETHKMNDVRLQIQIHKVIWDPEKRGV

SEQ ID NO: 31541 - protein, 217 aa, Megasphaera micronuciformis
  misc_feature (1)..(217): tr|E2ZCX5|E2ZCX5_9FIRM 7-carboxy-7-deazaguanine synthas e OS=Megasphaera micronuciformis F0359 OX=706434 GN=que E PE=3 SV=1
MRVVEKFVSINGEGQRAGELALFIRFQGCNLSCTYCDTAWANEADCPYEEESPQEIVDYACREGVTDITLTGGEPLLQEGIDELIDLLSKHGFHVEIETNGAVSLLPFCQKRRPSFTMDYKLPGSGCEKAMMTGNFAILTEKDTVKFVVSSTEDLQKAEEIATRYDLVNHCAVYISPVFGSIDPAQMVDFMKQRRLNGWRLQLQLHKFIWDPEKRGV

SEQ ID NO: 31542 - protein, 210 aa, Megasphaera sp.
  misc_feature (1)..(210): tr|S7J2L8|S7J2L8_9FIRM 7-carboxy-7-deazaguanine synthas e OS=Megasphaera sp. NM10 OX=1273103 GN=queE PE=3 SV=1
MNYSLCVNEIFDSIDGEGKKAGQLATFIRLCGCNLRCSYCDTAYAFNEGRHMDIADIIAQVSYPNVTLTGGEPLCQDIHALLEGLKGHSVNIETNGSMDIEPYFKYDHVWFTVDYKSLSSDMANRMLPENFEKLRPQDVLKFVVGDEADLRQALGVYQLYRPKCAVYVGAVFGKIEPRRIVEFMKEHRLTDWHMQLQLHKIIWNPDDRGV

SEQ ID NO: 31543 - protein, 217 aa, Megasphaera sp.
  misc_feature (1)..(217): tr|A0A3C1CNX2|A0A3C1CNX2_9FIRM 7-carboxy-7-deazaguanine synthase OS=Megasphaera sp. OX=2023260 GN=queE PE=3 SV =1
MTPEFRNTFLVNEIFDSIEGEGIRAGQLATFIRLSGCNLRCSYCDTAYAFEQGKTMAISDILSSVHYTNVTLTGGEPLQQPIGPLLEALSGHEVNVETNGSIDIRPYQAYYNTFFTIDYKCGSSGMGKAMFLPNFEHLRPLDVLKFVVGSVSDLVEAADFYDAFKSRLADVPIYVSPVFGKIEPKDIVAFMKERRLVHWRVQLQLHKFIWDPRMRGV

SEQ ID NO: 31544 - protein, 220 aa, Megasphaera stantonii
  misc_feature (1)..(220): tr|A0A346AZY2|A0A346AZY2_9FIRM 7-carboxy-7-deazaguanine synthase OS=Megasphaera stantonii OX=2144175 GN=queE P E=3 SV=1
MKYKFPVVEIFDSIEGEGKRTGYMSTFIRFAGCNLRCSYCDTAYALSADDAAAEYTADELAQLVQSKPWSRVTLTGGEPMLQPLQELTERLCRGGCEINIETNGAVLLPKERPAGLFYTMDWKSPSSGMSEAMKLENLQERLTPADVVKFVVATKDDLDDMAYTISHLLPAARPLLYVSPVWGEIEPAALVDFVKEKGLDDVCVQVQLHKIIYDPEARGV

SEQ ID NO: 31545 - protein, 212 aa, Mehylophilales bacterium
  misc_feature (1)..(212): tr|A0A258LHM2|A0A258LHM2_9PROT 7-carboxy-7-deazaguanine synthase OS=Mehylophilales bacterium 35-46-6 OX=197053 5 GN=queE PE=3 SV=1
MKLKIHEIFYSLQGESSRVGLPTVFVRLTGCPMRCVYCDTAYAFSGGSNMEISEIMAKVAECGTKYVTVTGGEPLAQKGCFVLLKELCDAGYSVSLETGGAIDISPVDQRVSVILDVKTPESGEVENNVWSNLMHLKPADEVKFVLCSRADYDWAKQVLSQYHIADKCPVLFSPVYSQVSPTDLAEWVLADKLPVRMQVQLHKILWGEKPGV

SEQ ID NO: 31546 - protein, 212 aa, Melaminivora alkalimesophila
  misc_feature (1)..(212): tr|A0A317RD26|A0A317RD26_9BURK 7-carboxy-7-deazaguanine synthase OS=Melaminivora alkalimesophila OX=1165852 GN =queE PE=3 SV=1
MSYSVKEIFYTLQGEGGQAGMPAVFCRFAGCNLWSGREQDRASAICRFCDTDFVGTDGTLGGKFADAGALARQIAAQWPAQDRAHRLVVLTGGEPLLQVNGPLIDALHAEGFRIAVESNGTIAAPPGIDWLCISPKAGAEWVQREGQELKLVWPQSGLDLDTLETTGQFSHRFLQPMDGPDQAAHIALCIDLCMQRPAWRLSLQTHKLTGIR

SEQ ID NO: 31547 - protein, 245 aa, Melghirimyces algeriensis
  misc_feature (1)..(245): tr|A0A521DKW8|A0A521DKW8_9BACL 7-carboxy-7-deazaguanine synthase OS=Melghirimyces algeriensis OX=910412 GN=que E PE=3 SV=1
MIPMHDWGVLEADHYRKWTIPMVEIFETVEGEGTAAGYPTVFVRVFHCNLRCSWCDTPYSYAPARPEFEATIEEIVDRVNQYSSQRICLTGGEPLMHQEKSAALLLALADRDEVTDVHVETNGAIDLGPFHRLRQKQDHLREKIRFIMDYKLPASGEEHRMIHENFRFLTDRDEVKFVIGDQEDFQCAVRTLETFYQKGQILFSPVFETLSPSLLVKWMLETPLPQVRLNLQLHKWIWDPEKRGV

SEQ ID NO: 31548 - protein, 242 aa, Melghirimyces profundicolus
  misc_feature (1)..(242): tr|A0A2T6BW36|A0A2T6BW36_9BACL 7-carboxy-7-deazaguanine synthase OS=Melghirimyces profundicolus OX=1242148 GN= queE PE=3 SV=1
MNKWELPTPMEYRAWKLPMVEIFETVEGEGTAAGYPTVFVRVFHCNLRCAWCDTPYSYAPARPEFEATIGEILDQVKRYPSRRICLTGGEPLMHRGKSAALLAALADLDQVEDVHVETNGAIDLAPFDRLRRERAERREKIRFIMDYKLPASGEAHRMVRENFRVLTDRDEVKFVIGDREDFRSAVRVVKDWHREGQILFSPVFETLPPRRLVEWVLAEPLPQVKVNLQLHKWIWDPAERGV

SEQ ID NO: 31549 - protein, 242 aa, Melghirimyces thermohalophilus
  misc_feature (1)..(242): tr|A0A1G6K2H8|A0A1G6K2H8_9BACL 7-carboxy-7-deazaguanine synthase OS=Melghirimyces thermohalophilus OX=1236220 GN=queE PE=3 SV=1
MTKWELPSPEEYVNWKLPMVEIFETVEGEGRAAGFPTVFVRLFHCNLRCSWCDTPYSYAPARPEFEATIGEILDRVQSYSSRRICFTGGEPLMHREKSAALLAALADLDHVEDVHVETNGAIDLKPFDQLRRQDPSREEKIRFIMDYKLAASGEEHRMITDNFRLLTEQDEIKFVIGNREDFQAAIRTVEAHHRKGQVLFSPVFEMLPPRKLVKWMLAEPLPQVKLSLQLHKWIWDPSQRGV

SEQ ID NO: 31550 - protein, 212 aa, Melioribacter roseus
  misc_feature (1)..(212): tr|I6Z3S4|I6Z3S4_MELRP 7-carboxy-7-deazaguanine synthas e OS=Melioribacter roseus (strain JCM 17771 / P3M-2) OX =1191523 GN=queE PE=3 SV=1
MLKVNEIYYSIQGESSRAGLPCVFVRLTYCNLRCSYCDTEYAFYDGIDMSKEEILEKVNEYGCKLVELTGGEPLVQKESLDLMKSLCDSGYEVMLETGGSLPIDNVDKRVMIIMDLKCPSSKMEKKNRYENIEFLKPGDEVKFVIGDRNDYEWSLNKIKEFELDKKCGVLFSTVFGKLEPVTLLNWILADKLNVRFQLQMHKYIWKPETKGV

SEQ ID NO: 31551 - protein, 212 aa, Melioribacter sp.; identical to SEQ ID NO: 30784
  misc_feature (1)..(212): tr|A0A1G1BFB0|A0A1G1BFB0_9BACT 7-carboxy-7-deazaguanine synthase OS=Melioribacter sp. GWF2_38_21 OX=1801612 GN =queE PE=3 SV=1

SEQ ID NO: 31552 - protein, 230 aa, Melittangium boletus
  misc_feature (1)..(230): tr|A0A250IHV7|A0A250IHV7_9DELT 7-carboxy-7-deazaguanine synthase OS=Melittangium boletus DSM 14713 OX=1294270 GN=queE PE=3 SV=1
MPLARPHIEPRRVPTADSVVVKEIYLSVQGESSHAGLLCSFVRLTGCHLRCTYCDSEFAFHGGARRQNADVVAEVKALGAQRVEVTGGEPLLQPGVYPLMEALLAEGMTVLLETSGAIDVRLVPPAVHKIVDMKTPSSGESDRNDYRNLQSMNANDELKFVIGGREDYEWSKRLIAEHRLLDKPYELLFSTVHGKLTPKDLAEWVIADRLPVRFQLQMHKYIWHPDERGV

SEQ ID NO: 31553 - protein, 230 aa, Melittangium boletus
  misc_feature (1)..(230): tr|A0A250IDH7|A0A250IDH7_9DELT 7-carboxy-7-deazaguanine synthase OS=Melittangium boletus DSM 14713 OX=1294270 GN=queE PE=3 SV=1
MYGNNPMRPQEDSDGQKLWVQEVFYTLQGEAIFAGQPAVFVRLGGCNLRCYWCDTDFESSTYNPSLDELVAHVESVRPAVCDLIVITGGEPLRQNINPFVTRLLEKGLRVQIETSGSLNLDLPEHPRLFFLCSPKTTKLHPGIAPRISAFKYVVALGETDPQDGLPVMSTQKRDMAARIARPVEGSRVYVMPRDDQDPERNRANMQECARIAMTFGYTLTLQTHKLLGIN

SEQ ID NO: 31554 - protein, 209 aa, Meridianimaribacter sp.
  misc_feature (1)..(209): tr|A0A4Q9RW54|A0A4Q9RW54_9FLAO 7-carboxy-7-deazaguanine synthase OS=Meridianimaribacter sp. CL38 OX=2213021 GN =queE PE=3 SV=1
MKTETQILVDKGEMLPLMEEFYTIQGEGYHKGTAAYFIRVGGCDVGCHWCDVKESWNADIHPPTETSKIVENAAKYSDTIVVTGGEPLTWDMTALTSQLKAKGLQVHIETSGAYKLTGTWDWICLSPKKLKLPTQEVYDNANELKVIVYNKDDFRFAEEQAAKVNKGCILYLQPEWSKRDKVVPEIVDYVMKNPKWKVSLQTHKYLNIP

SEQ ID NO: 31555 - protein, 261 aa, Merismopedia glauca
  misc_feature (1)..(261): tr|A0A2T1BZX3|A0A2T1BZX3_9CYAN 7-carboxy-7-deazaguanine synthase OS=Merismopedia glauca CCAP 1448/3 OX=1296344 GN=queE PE=3 SV=1
MSKLSKYKTANLIEVFSAIQGEGLNIGTRQIFIRFAMCDLRCHYCDSAHTWYSSDTCRIEQNPGKRDFATYPNPVTLDSLISWIRQQNQPGLHDSISLTGGEPLLHAAFLQEFLPQLHQETDLPIYLETGGHRPSQLKMILPYLDSIGMDIKLPSVSGELKWEAHQEFLQLCAEAKVEVFGKIIISEATNPQELEQAATLIAQINPQIPVFLQPVTPLASSDSKPINPPTPEQVLTWQTLMKKQIKQVRVIPQTHKMIDQL

SEQ ID NO: 31556 - protein, 209 aa, Mesocricetibacter intestinalis
  misc_feature (1)..(209): tr|A0A4R6VFG3|A0A4R6VFG3_9PAST 7-carboxy-7-deazaguanine synthase OS=Mesocricetibacter intestinalis OX=1521930 GN=queE PE=3 SV=1
MRSELISNPRYPIVEIFESLQGEGANTGMPSIFIRFGKCNLACPWCDTDYQRFEPMALAEILEKVRSFSAKNIIITGGEPTIQPKIVLLLDCLKAEGYFLAIETNGLKPVPPQIDYIAVSPKALYSRQYGRRCIGSADEVRIVADGDVIEFCRQIETKIKARHYYLSPCEKGGEMNLLETLTQLGILNQARQQPHWQLSIQTHKLIGIA

SEQ ID NO: 31557 - protein, 209 aa, Mesoflavibacter aestuarii
  misc_feature (1)..(209): tr|A0A2T1NGB8|A0A2T1NGB8_9FLAO 7-carboxy-7-deazaguanine synthase OS=Mesoflavibacter aestuarii OX=1266046 GN=qu eE PE=3 SV=1
MKATTQDLVNKGLLLPLMEEFYTIQGEGFHKGTAAYFIRVGGCDVGCHWCDVKESWNAELHPPTKTETIVANAKKYSDTIVVTGGEPLTWDMTVLTTLLKAEGMQVHIETSGAYELSGTWDWVCLSPKKLKLPTQSVYDKANELKVIVYNQDDFRFAEEQAAKVNKDCILYLQPEWSKRDKVVPEIVDYVMKNPKWKVSLQTHKYLNIP

SEQ ID NO: 31558 - protein, 209 aa, Mesoflavibacter sabulilitoris
  misc_feature (1)..(209): tr|A0A2T1NMD2|A0A2T1NMD2_9FLAO 7-carboxy-7-deazaguanine synthase OS=Mesoflavibacter sabulilitoris OX=1520893 G N=queE PE=3 SV=1
MKQEIQDLVNKGLMLPLMEEFYTIQGEGYHKGTAAYFVRIGGCDVGCHWCDVKESWIADLHPPTKTETIVANAKKYSDTVVVTGGEPLTWDMTELTRQLKEEGCKIHIETSGAYELTGQWDWICLSPKKMKLPTKKVYEKADELKVIIYNKDDFKFAEEQAAKVNDNCILYMQPEWSKRDKMIPLIVDYVMANPKWKVSLQTHKYLNIP

SEQ ID NO: 31559 - protein, 209 aa, Mesoflavibacter sp.
  misc_feature (1)..(209): tr|A0A2T1NQK6|A0A2T1NQK6_9FLAO 7-carboxy-7-deazaguanine synthase OS=Mesoflavibacter sp. HG96 OX=2109944 GN=que E PE=3 SV=1
MKKEIRELVDKGLMLPLMEEFYTIQGEGYFKGTAAYFIRIGGCDVGCHWCDVKESWIAELHPPTKTETIVANARKYSDTVVVTGGEPLTWDMTELTKQLKAVGCKTHIETSGAYELTGEWDWICLSPKKMKLPTQKVYDNANELKVIIYNKDDFKFAEEQASKVNANCILYMQPEWSKRDKMIPQIVDYVMANPKWKVSLQTHKYLNIP

SEQ ID NO: 31560 - protein, 210 aa, Mesonia algae
  misc_feature (1)..(210): tr|A0A2W7HUY1|A0A2W7HUY1_9FLAO 7-carboxy-7-deazaguanine synthase OS=Mesonia algae OX=213248 GN=queE PE=3 SV=1
MKKEEIEKLVEKGEMLPLMEEFYTIQGEGYHKGTAAYFIRIGGCDVGCHWCDVKESWDAEKHPPTATKTIVDNALKYSDTIVITGGEPLTWDMTTITKSLKEKGAKTHIETSGAYKLTGDWDWICLSPKKLKLPTAEVSKKAHELKVIVYNKSDFAFAEQQAEKVGENCILYLQPEWSVRDKIVPLIVEYVMKNPKWKVSLQTHKYLNIP

SEQ ID NO: 31561 - protein, 210 aa, Mesonia phycicola
  misc_feature (1)..(210): tr|A0A1M6AUP8|A0A1M6AUP8_9FLAO 7-carboxy-7-deazaguanine synthase OS=Mesonia phycicola OX=579105 GN=queE PE=3 S V=1
MKKEEIEQLVEQGKMLPLMEEFYTIQGEGYHKGTAAYFIRIGGCDVGCHWCDVKESWDAEKHPPTATETIVENAIKYSKTIVVTGGEPLTWDMTELTNQLKDKGAQTHIETSGAYELTGIWDWICLSPKKLKLPTQKVYDQANELKVIVFNKHDLKFAEEQATKVNKDCILYLQPEWSVRDKVVPMIVDYVMQNPQWKVSLQTHKYLNIP

SEQ ID NO: 31562 - protein, 210 aa, Mesonia sp.
  misc_feature (1)..(210): tr|A0A5C8LG14|A0A5C8LG14_9FLAO 7-carboxy-7-deazaguanine synthase OS=Mesonia sp. HuA40 OX=2602761 GN=queE PE=3 SV=1
MTKKEQEKLVSTGEMLPLMEEFYTIQGEGFYKGTAAYFIRIGGCDVGCHWCDVKESWDAEKHPPSMTSTIVKKALDNSKTVVVTGGEPLMWNMSPITKAIKQGGGKTHIETSGAYEVTGDWDWFCLSPKKNKLPTLEAYKRANELKVIVYNKHDFKFAEEQASQVGENCILYLQPEWSVRDKMIPLMVDYVMQNPKWKISLQTHKYLNIP

SEQ ID NO: 31563 - protein, 210 aa, Mesonia sp.
  misc_feature (1)..(210): tr|A0A2W1KE37|A0A2W1KE37_9FLAO 7-carboxy-7-deazaguanine synthase OS=Mesonia sp. K7 OX=2218606 GN=queE PE=3 SV= 1
MDKKLVETLVNQGKMLPLMEEFYTIQGEGFHKGTAAYFIRVGGCDVGCHWCDVKESWDAEKHPPTVTEKIVENATKYSDTIVVTGGEPLTWNMSPLTTMLKQKGVQTHIETSGAYELTGEWDWICLSPKKLKLPTEEVYQKANELKVIVYNNNDFKFAEEQAAKVSGNCVLYLQPEWSVREKVIPKIVDYVMRNPKWKVSLQTHKYLNIP

SEQ ID NO: 31564 - protein, 211 aa, Mesorhizobium albiziae
  misc_feature (1)..(211): tr|A0A1I4DR03|A0A1I4DR03_9RHIZ 7-carboxy-7-deazaguanine synthase OS=Mesorhizobium albiziae OX=335020 GN=queE P E=3 SV=1
MAYAVKEIFYTLQGEGQNAGRAAVFCRFAGCNLWSGREADRSKAICQFCDTDFVGTNGDGGGRFATANDLAQAIAQKWSSGDTRRRFAVLTGGEPLLQLDTSLVEALHAEGFAIAVETNGTLTPPPGIDWICVSPKAGAPVKLTRGNELKLVFPQAGAEPERFEALEFDHFLLQPMDGSARIPNTQAALEFCLANPRWQLCLQTHKQLGIR

SEQ ID NO: 31565 - protein, 244 aa, Mesorhizobium albiziae
  misc_feature (1)..(244): tr|A0A1I4F2M1|A0A1I4F2M1_9RHIZ 7-carboxy-7-deazaguanine synthase OS=Mesorhizobium albiziae OX=335020 GN=queE P E=3 SV=1
MTGTHPAIRVSEIFGPTIQGEGVLIGLPTVFVRTGGCDYRCSWCDSLHAVDNQFRHEWEMMPIDAVWQTVVALSGGRPMMVSLSGGNPAIQPLGALIERGHDEGYRFALETQGSVVRDWFADLDVLVLSPKPPSSEMTTDWAAVQACVQAAQEKPQIVLKLVVFDESDYAYAKDAAARFPRLPVYLQPGNHTPPRPGNEDASVDLGGIMKRMEWLVERVTSDRWFEARVLPQLHVLLWGNKRGV

SEQ ID NO: 31566 - protein, 245 aa, Mesorhizobium amorphae
  misc_feature (1)..(245): tr|A0A212DP05|A0A212DP05_9RHIZ 7-carboxy-7-deazaguanine synthase OS=Mesorhizobium amorphae CCBAU 01583 OX=1449 348 GN=queE PE=3 SV=1
MTCALQPGIRVSEIFGPTIQGEGMLIGLPTVFVRTGGCDYRCSWCDSLHAVDSRFRHDWEMMSADAVWQKVIALSGGQPVMVSLSGGNPAIQPLGPLIDRGHGEGYRFALETQGSVPKQWFADLDVLVLSPKPPSSEMTTDWAAFDTCVEAAQDRPRMALKLVVFDDDDYAYAKDAAARYPRLPVYLQPGNHTPPRPGNEDAFIDMAGVMKRMEWLVEKVTRDRWFEARVLPQLHVLLWGNKRGV

SEQ ID NO: 31567 - protein, 247 aa, Mesorhizobium amorphae
  misc_feature (1)..(247): tr|G6YIG1|G6YIG1_9RHIZ 7-carboxy-7-deazaguanine synthas e OS=Mesorhizobium amorphae CCNWGS0123 OX=1082933 GN=qu eE PE=3 SV=1
MPAMTDTHPAIRVSEIFGPTIQGEGVLIGLPTVFVRTGGCDYRCSWCDSLHAVDNQFRHEWETMSIGAVWQNVLALSGGRPMMVSLSGGNPAIQPLGALIERGHGDGYRFALETQGSVVRDWFADLDVLVLSPKPPSSEMTTDWAALEACLQAAQGKPQIVLKLVVFDESDYAFAKDTAARFPRLPIYLQPGNHTPPRPGNEQAPVDLEGIVKRMEWLVDNVTRDRWFEARVLPQLHVMLWGNKRGV

SEQ ID NO: 31568 - protein, 244 aa, Mesorhizobium australicum
  misc_feature (1)..(244): tr|L0KV12|L0KV12_MESAW 7-carboxy-7-deazaguanine synthas e OS=Mesorhizobium australicum (strain HAMBI 3006 / LMG 24608 / WSM2073) OX=754035 GN=queE PE=3 SV=1
MTDTRPAIRVSEIFGPTIQGEGVLIGLPTVFIRTGGCDYRCSWCDSLHAVDNQFRHEWKMMPVDAVWQSVVALSGARPVMVSLSGGNPAIQPFGGLIERGHAEGYRFALETQASVAKDWFAELDVLVLSPKPPSSEMRTDWVAFEACIEAAREKPQVVLKLVIFDESDYAFAKDAAARFPSLPVYLQPGNHTPPRRGEEDAAVDLAGIMRRMEWLIEKVTQDRWFEARVLPQLHVLLWGNKRAV

SEQ ID NO: 31569 - protein, 244 aa, Mesorhizobium ciceri
  misc_feature (1)..(244): tr|A0A143NH14|A0A143NH14_9RHIZ 7-carboxy-7-deazaguanine synthase OS=Mesorhizobium ciceri OX=39645 GN=queE PE=3 SV=1
MTDMHPAIRVSEIFGPTIQGEGVLIGLPTVFIRTGGCDYRCSWCDSLHAVDNQYRHEWLPMPIDAVWQTVHALSGGRPVMVSLSGGNPAIQPFGPLIERGHREGYRFALETQGSVVREWFADLDVLTLSPKPPSSEMTTRWAAFDACLEAAQEKPQIVLKLVVFDESDYAYAKEVAARYPHLPIYLQPGNHTPPLPGSEDASVDLDGIMMRMEWLVERVTSDRWFEARVLPQLHVLLWGNKRAV

SEQ ID NO: 31570 - protein, 244 aa, Mesorhizobium ciceri; identical to SEQ ID NO: 28237
  misc_feature (1)..(244): tr|A0A3G8FVJ6|A0A3G8FVJ6_9RHIZ 7-carboxy-7-deazaguanine synthase OS=Mesorhizobium ciceri OX=39645 GN=queE PE=3 SV=1

SEQ ID NO: 31571 - protein, 244 aa, Mesorhizobium delmotii
  misc_feature (1)..(244): tr|A0A2P9AT06|A0A2P9AT06_9RHIZ 7-carboxy-7-deazaguanine synthase OS=Mesorhizobium delmotii OX=1631247 GN=queE PE=3 SV=1
MTAPHTAIRVSEIFGPTIQGEGMLIGLPTVFVRTGGCDYRCSWCDSLYAVDSRFRHEWEMMSTDALWQKVVALSGGRPVMVSLSGGNPAIQPLGALLDRGHRDGYRFALETQGSVARNWFAELDVLVLSPKPPSSEMATDWAAFDACVEAARGRPQIALKLVVFDDTDYAYARDAAARYPRLPVYLQPGNHTPPRPGDENAPIDMNGVMKRMEWLVEEVTRDRWFDARVLPQLHVLLWGNKRGV

SEQ ID NO: 31572 - protein, 244 aa, Mesorhizobium delmotii
  misc_feature (1)..(244): tr|A0A2P9ALL2|A0A2P9ALL2_9RHIZ 7-carboxy-7-deazaguanine synthase OS=Mesorhizobium delmotii OX=1631247 GN=queE PE=3 SV=1
MTDTCPAIRVSEIFGPTIQGEGVLIGLPTVFIRTGGCDYRCSWCDSLHAVDSQFRHEWKMMPIDAVWQSVVGLSGGRPVMVSLSGGNPAIQPFGALIERGHGEGYRFALETQGSVVRDWFADLDVLVLSPKPPSSEMRTNWAAFGACIEAAQEKPQIVLKLVVFDENDYAYAKDAAARFPRLPVYLQPGNHTPPRPGNEDAPVDLDGIIKRMEWLVEKVTHDRWFEARVLPQLHVMLWGNRRGV

SEQ ID NO: 31573 - protein, 244 aa, Mesorhizobium erdmanii
  misc_feature (1)..(244): tr|A0A4Q1UUS9|A0A4Q1UUS9_9RHIZ 7-carboxy-7-deazaguanine synthase OS=Mesorhizobium erdmanii OX=1777866 GN=queE PE=3 SV=1
MTDTHPAIRVSEIFGPTIQGEGVLIGLPTVFIRTGGCDYRCSWCDSLHAVDNQFRHEWEMMPIDAVWQTVVTLSGGRPVMVSLSGGNPAIQPFRALIERGHGEGYRFALETQGSVVRDWFADLDVLVLSPKPPSSEMRTDWAVIEACVDAAQEKPQIVLKLVVFDESDYAYAKGAAERFPRLPVYLQPGNHTPPRPGNEDASVDLDGIMKRMQWLVERVTRDRWFEARVLPQLHVLLWGNKRAV

SEQ ID NO: 31574 - protein, 244 aa, Mesorhizobium hawassense
  misc_feature (1)..(244): tr|A0A330H9N5|A0A330H9N5_9RHIZ 7-carboxy-7-deazaguanine synthase OS=Mesorhizobium hawassense OX=1209954 GN=que E PE=3 SV=1
MTDTHPAIRVSEIFGPTIQGEGVLIGLPTVFVRTGGCDYRCSWCDSLHAVDRQFRHEWEMMSSDAVWQNVVALSGGRPLMVSLSGGNPAIQPLGALIKRGHDQGYRFALETQGSVVREWFAELDVLVVSPKPPSSEMRTDWATIEACFQAAQDKPQIVLKLVIFDETDYSFAKEAAARFPRLPVYLQPGNHTPPHPGNEHAPVDVDGIMKRMEWLVDSVTRDRWFEARVLPQLHVMLWGNKRGV

SEQ ID NO: 31575 - protein, 211 aa, Mesorhizobium helmanticense
  misc_feature (1)..(211): tr|A0A2T4ILA1|A0A2T4ILA1_9RHIZ 7-carboxy-7-deazaguanine synthase OS=Mesorhizobium helmanticense OX=1776423 GN= queE PE=3 SV=1
MSYAAKEIFYTLQGEGRNAGRAAVFCRFAGCNLWSGREGDRAKAFCGFCDTDLVGVDGPGGGHFDTPRELALAVEQAWRGSGTGQRLVVLTGGEPLLQIDEELLEALHSLAFEIAVETNGTIPTPAGIDWLCVSPKCNARLVVMAGDELKLVYPQIGAEPEHFEVLAFEHLLLQPMDGPEREANTAAAVAYCLANPRWRLSLQTHKFLGIP

SEQ ID NO: 31576 - protein, 245 aa, Mesorhizobium helmanticense
  misc_feature (1)..(245): tr|A0A2T4IN57|A0A2T4IN57_9RHIZ 7-carboxy-7-deazaguanine synthase OS=Mesorhizobium helmanticense OX=1776423 GN= queE PE=3 SV=1
MTCALHPGIRVSEIFGPTIQGEGVLIGLPTVFVRTGGCDYRCSWCDSLHAVDRRFRHDWEMMSPDAVWQKVIALSGGQPVMVSLSGGNPAIQPLGQLIDRGHGEGYRFALETQGSVSKQWFADLDVLVLSPKPPSSEMTTDWAAFDACLEAAQDKPQMALKLVVFDDDDYAYAKDAAARYPQLPVYLQPGNHTPPRPGDEDGFIDMAGVMRRMEWLVEKVTRDRWFEARVLPQLHVLLWGNKRGV

SEQ ID NO: 31577 - protein, 244 aa, Mesorhizobium huakuii
  misc_feature (1)..(244): tr|A0A068DP71|A0A068DP71_9RHIZ 7-carboxy-7-deazaguanine synthase OS=Mesorhizobium huakuii 7653R OX=763057 GN=q ueE PE=3 SV=1
MTDTHTAIRVSEIFGPTIQGEGVLIGLPTVFIRTGGCDYRCSWCDSLHAVDNQFRSEWEMMPINAVWQTVVTLSGGRPVMVSLSGGNPAIQPFRALIERGHREGYRFALETQGSVARDWFGDLDVLVLSPKPPSSEMMTDWAALEACVDAAQEKPQIVLKLVVFDESDYVYAKGAAERFPRLPVYLQPGNHTPPGPGNEDASVDMDGIMKRMEWLVEKVTGDRWFDARVLPQLHVLLWGNKRAV

SEQ ID NO: 31578 - protein, 245 aa, Mesorhizobium japonicum
  misc_feature (1)..(245): tr|Q98AZ2|Q98AZ2_RHILO 7-carboxy-7-deazaguanine synthas e OS=Mesorhizobium japonicum (strain LMG 29417 / CECT 9 101 / MAFF 303099) OX=266835 GN=queE PE=3 SV=1
MTCALHPGIRVSEIFGPTIQGEGVLIGLPTVFVRTGGCDYRCSWCDSLHAVDRRFRHDWEMMSSDAVWQKVIALSSGQPVMVSLSGGNPAIQPLGQLIDRGHGEGYRFALETQGSVSKQWFADLDVLVLSPKPPSSEMTTDWAAFDACLEAAQDKPQTALKLVVFDEDDYAYAKDAAARYPQLPVYLQPGNHTPPRPGNEDGFIDMAGVMRRMEWLVEKVTRDRWFEARVLPQLHVLLWGNKRGV

SEQ ID NO: 31579 - protein, 244 aa, Mesorhizobium japonicum; identical to SEQ ID NO: 31573
  misc_feature (1)..(244): tr|A0A3M9X4P3|A0A3M9X4P3_9RHIZ 7-carboxy-7-deazaguanine synthase OS=Mesorhizobium japonicum OX=2066070 GN=queE PE=3 SV=1

SEQ ID NO: 31580 - protein, 244 aa, Mesorhizobium kowhaii
  misc_feature (1)..(244): tr|A0A2W7BVY9|A0A2W7BVY9_9RHIZ 7-carboxy-7-deazaguanine synthase OS=Mesorhizobium kowhaii OX=1300272 GN=queE P E=3 SV=1
MTDTHAAIRVSEIFGPTIQGEGVLIGLPTVFIRTGGCDYRCSWCDSLHAVDNQFRSEWEMMPINAVWQTVVTLSGGRPVMVSLSGGNPAIQPFRALIERGHREGYRFALETQGSVARDWFADLDVLVLSPKPPSSEMRTDWAALEACVDAAQEKPQIVLKLVVFDESDYVYAKGAAERFPRLPVYLQPGNHTPPGPGNEDASVDMDGIMKRMEWLVEKVTGDRWFDARVLPQLHVLLWGNKRAV

SEQ ID NO: 31581 - protein, 244 aa, Mesorhizobium mediterraneum; identical to SEQ ID NO: 31569
  misc_feature (1)..(244): tr|A0A271KQE5|A0A271KQE5_9RHIZ 7-carboxy-7-deazaguanine synthase OS=Mesorhizobium mediterraneum OX=43617 GN=qu eE PE=3 SV=1

SEQ ID NO: 31582 - protein, 244 aa, Mesorhizobium metallidurans
  misc_feature (1)..(244): tr|M5ENN2|M5ENN2_9RHIZ 7-carboxy-7-deazaguanine synthas e OS=Mesorhizobium metallidurans STM 2683 OX=1297569 GN =queE PE=3 SV=1
MTDTCPAIRVSEIFGPTIQGEGVLIGLPTVFIRTGGCDYRCSWCDSLHAVDSQFRHEWEMMPIDAVWQSVVGLSGGRPVMVSLSGGNPAIQPFGALIERGHGEGYRFALETQGSVVRDWFADLDVLVLSPKPPSSEMRTDWAAFQACIEAAQQKPQIVLKLVVFDENDYAYAKDAAARFPRLPVYLQPGNHTPPRPGNEDAPVDLDGIIKRMEWLVEKVTHDRWFEARVLPQLHVMLWGNRRGV

SEQ ID NO: 31583 - protein, 244 aa, Mesorhizobium muleiense
  misc_feature (1)..(244): tr|A0A1G9GP39|A0A1G9GP39_9RHIZ 7-carboxy-7-deazaguanine synthase OS=Mesorhizobium muleiense OX=1004279 GN=queE PE=3 SV=1
MTDMHPVIRVSEIFGPTIQGEGVLIGLPTVFIRTGGCDYRCSWCDSLHAVDNQYRHEWLPMPIDAVWQTVHALSGGRPVMVSLSGGNPAIQPFGPLIERGHREGYRFALETQGSVVREWFADLDVLTLSPKPPSSEMTTRWAAFEACLEAAQEKPQIVLKLVVFDESDYAYAKEVAARYPHLPIYLQPGNHTPPHPGSEDTSVDLDGIMMRMEWLVERVTSDRWFEARVLPQLHVLLWGNKRAV

SEQ ID NO: 31584 - protein, 244 aa, Mesorhizobium opportunistum; identical to SEQ ID NO: 31568
  misc_feature (1)..(244): tr|F7Y1I5|F7Y1I5_MESOW 7-carboxy-7-deazaguanine synthas e OS=Mesorhizobium opportunistum (strain LMG 24607 / HA MBI 3007 / WSM2075) OX=536019 GN=queE PE=3 SV=1

SEQ ID NO: 31585 - protein, 244 aa, Mesorhizobium plurifarium
  misc_feature (1)..(244): tr|A0A090EIN9|A0A090EIN9_MESPL 7-carboxy-7-deazaguanine synthase OS=Mesorhizobium plurifarium OX=69974 GN=queE PE=3 SV=1
MTDTQPAIRVSEIFGPTIQGEGVLIGLPTVFVRTGGCDYRCSWCDSLHAVDRQFRHEWEMMSSDAVWQNVVALSGGRPLMVSLSGGNPAIQPFGALIKRGHDEGYRFALETQGSVVRVWFAELDVLVLSPKPPSSEMRTDWATVEACFQAAQDKPQVVLKLVVFDKNDYAFAKEAAARFPRLPVYLQPGNHTPPHPGNEDAPVDVDGIMKRMEWLVDSVTRDRWFEARVLPQLHVMLWGNKRGV

SEQ ID NO: 31586 - protein, 244 aa, Mesorhizobium plurifarium
  misc_feature (1)..(244): tr|A0A090FYL3|A0A090FYL3_MESPL 7-carboxy-7-deazaguanine synthase OS=Mesorhizobium plurifarium OX=69974 GN=queE PE=3 SV=1
MTDMHPAIRVSEIFGPTIQGEGVLIGLPTVFVRTGGCDYRCSWCDSLHAVDRQFRDEWQMMSCDAVWQKIVALSGGRPLMVSLSGGNPAIQPFGALIKRGHDEGYRFALETQGSVVREWFAELDVLVLSPKPPSSEMRTDWAIIEACFQAAQDKPQVVLKLVVFDENDYAFAKEAAARFPRLPVYLQPGNHTPPHPGNEDAPVDVDGIMKRMEWLVDSVTGDRWFEARVLPQLHVMLWGNKRGV

SEQ ID NO: 31587 - protein, 244 aa, Mesorhizobium prunaredense; identical to SEQ ID NO: 31582
  misc_feature (1)..(244): tr|A0A1R3V4M2|A0A1R3V4M2_9RHIZ 7-carboxy-7-deazaguanine synthase OS=Mesorhizobium prunaredense OX=1631249 GN=q ueE PE=3 SV=1

SEQ ID NO: 31588 - protein, 244 aa, Mesorhizobium qingshengii; identical to SEQ ID NO: 31577
  misc_feature (1)..(244): tr|A0A1G5ZYW4|A0A1G5ZYW4_9RHIZ 7-carboxy-7-deazaguanine synthase OS=Mesorhizobium qingshengii OX=1165689 GN=qu eE PE=3 SV=1

SEQ ID NO: 31589 - protein, 245 aa, Mesorhizobium sanjuanii
  misc_feature (1)..(245): tr|A0A2A6FAK3|A0A2A6FAK3_9RHIZ 7-carboxy-7-deazaguanine synthase OS=Mesorhizobium sanjuanii OX=2037900 GN=queE PE=3 SV=1
MTNAMQPGIRVSEIFGPTIQGEGMLIGLPTVFVRTGGCDYRCSWCDSLHAVDRRFRRDWEMMSTDAVWQKVIALSGGQPLMVSLSGGNPAIQPLGGLIDRGHGEGYRFALETQGSVPKQWFADLDVLVLSPKPPSSEMTTDWAAFDTCVEAAQDKPRMALKLVVFDDDDYAYAKDAAARYPQLPVYLQPGNHTPPRPGNEGALIDMAGVMKRMEWLVEKVTRDRWFEARVLPQLHVLLWGNKRGV

SEQ ID NO: 31590 - protein, 211 aa, Mesorhizobium sanjuanii
  misc_feature (1)..(211): tr|A0A2A6FLT7|A0A2A6FLT7_9RHIZ 7-carboxy-7-deazaguanine synthase OS=Mesorhizobium sanjuanii OX=2037900 GN=queE PE=3 SV=1
MSYAVKEIVYTLQGEGRNAGRAAVFCRFAGCNLWSGREGDRAKAFCGFCDTDFVGVDGPGGGHFDTARQLALAIEQAWRGSGAGQRLVVLTGGEPLLQIDEELLEALHSLAFEIAVETNGTIPTPAGIDWLCVSPKCNARLVVMAGDELKLVYPQIGAEPEHFEVLAFEHLLLQPMDGPEREANTAAAVAYCLANPRWRLSLQTHKLLGIP

SEQ ID NO: 31591 - protein, 244 aa, Mesorhizobium sp.; identical to SEQ ID NO: 28237
  misc_feature (1)..(244): tr|A0A436I9F0|A0A436I9F0_9RHIZ 7-carboxy-7-deazaguanine synthase OS=Mesorhizobium sp. M7A.F.Ca.CA.001.06.1.1 O X=2496682 GN=queE PE=3 SV=1

SEQ ID NO: 31592 - protein, 244 aa, Mesorhizobium sp.; identical to SEQ ID NO: 31569
  misc_feature (1)..(244): tr|A0A547MY64|A0A547MY64_9RHIZ 7-carboxy-7-deazaguanine synthase OS=Mesorhizobium sp. WSM4303 OX=2589887 GN=qu eE PE=3 SV=1

SEQ ID NO: 31593 - protein, 244 aa, Mesorhizobium tamadayense
  misc_feature (1)..(244): tr|A0A3P3FS89|A0A3P3FS89_9RHIZ 7-carboxy-7-deazaguanine synthase OS=Mesorhizobium tamadayense OX=425306 GN=que E PE=3 SV=1
MTDTHPAIRVSEIFGPTIQGEGVLMGLPTVFIRTGGCDYRCSWCDSLHAVDNRFRHEWETMPIDAVWQSVVALSGGRPVMVSLSGGNPAIQPFGALIERGHDDGYRFALETQGSVARDWFADLDVLVLSPKPPSSEMRTDWAAFETCIESAQEKPQIVLKLVVFDEGDYAFAKGAAARFPRLLVYLQPGNHTPPRPGNEDAPVDLDGINKRMEWLVEKVTRDRWFEARVLPQLHVMLWGNKRGV

SEQ ID NO: 31594 - protein, 245 aa, Mesorhizobium temperatum
  misc_feature (1)..(245): tr|A0A271LS71|A0A271LS71_9RHIZ 7-carboxy-7-deazaguanine synthase OS=Mesorhizobium temperatum OX=241416 GN=queE PE=3 SV=1
MTSALYPGIRVSEIFGPTIQGEGMLIGLPTVFVRTGGCDYRCSWCDSLHAVDSRFRHDWEMMSADAVWQKVISLSGGQPVMVSLSGGNPAIQPLGPLIDRGHGEGYRFALETQGSVPTGWFADLDVLVLSPKPPSSDMTTDWAAFDACVKAAQDKPQMALKLVVFDDDDYAYAKDAAARYPQLPVYLQPGNHTPPRPGNEDASIDLAGVMKRMEWLVEKVARDRWFEARVLPQLHVLLWGNKRGV

SEQ ID NO: 31595 - protein, 159 aa, Mesorhizobium temperatum
  misc_feature (1)..(159): tr|A0A271LQ49|A0A271LQ49_9RHIZ 7-carboxy-7-deazaguanine synthase OS=Mesorhizobium temperatum OX=241416 GN=queE PE=4 SV=1
MSYAVKEMFYSLQGEGRHTGRPAVFCRFAGCNLWSGRERDRAKAPCNFCDTDFVGVNGIGGGRFNDASSLAIAIENMWGGGASERFVVLTGGEPLLQVGDAILSEFHDLRFEIALETNGTLAAPNTIDWITVSPKGATTLVQTAGNELKLVFPQAGLVS

SEQ ID NO: 31596 - protein, 244 aa, Mesorhizobium tianshanense
  misc_feature (1)..(244): tr|A0A562N4I4|A0A562N4I4_9RHIZ 7-carboxy-7-deazaguanine synthase OS=Mesorhizobium tianshanense OX=39844 GN=que E PE=3 SV=1
MTDTHPAIRVSEIFGPTIQGEGVLIGLPTVFIRTGGCDYRCSWCDSLHAVDNQFRHEWEMMSIGAVWQNVVALSGGRPVMVSLSGGNPAIQPFRALIERGHGEGYRFALETQGSVVRDWFGDLDVLVLSPKPPSSEMRTDWAALEACVDAAQEKPQIVLKLVVFDESDYVYAKDAAARFPRLPVYLQPGNHTPPRPGNEDASVDLDGIMKRMEWLVEKVTRDRWFEARVLPQLHVLLWGNKRAV

SEQ ID NO: 31597 - protein, 242 aa, Mesorhizobium waimense
  misc_feature (1)..(242): tr|A0A3A5K3G7|A0A3A5K3G7_9RHIZ 7-carboxy-7-deazaguanine synthase OS=Mesorhizobium waimense OX=1300307 GN=queE PE=3 SV=1
MTHPAIRVSEIFGPTIQGEGVLIGLPTVFVRTGGCDYRCSWCDSLHAVDNQYRHEWEMMSIDAVWQSVVGLSGGRPVMVSLSGGNPAIQPLGALIERGHREGYRFALETQGSVVRDWFAELDVLVLSPKPPSSEMTTDWAAFEACVQAANEKPQVVLKLVVFDESDYAYAKDAAARFPRLPIYLQPGNHTPPRPGNGDSAVDLDGITKRMEWLVESVTRDRWFEARVLPQLHVMLWGNKRGV

SEQ ID NO: 31598 - protein, 244 aa, Mesorhizobium wenxiniae
  misc_feature (1)..(244): tr|A0A271KR51|A0A271KR51_9RHIZ 7-carboxy-7-deazaguanine synthase OS=Mesorhizobium wenxiniae OX=2014805 GN=queE PE=3 SV=1
MTDMHPAIRVSEIFGPTIQGEGVLIGLPTVFIRTGGCDYRCSWCDSLHAVDNQYRNEWLPMPIDAVWQTVHALSGGRPVMVSLSGGNPAIQPFGPLIERGHRQGYRFALETQGSVVREWFADLDVLILSPKPPSSEMTTSWAAFEACLEAAQEKPQIVLKLVVFDESDYAYAKEVAARYPHLPIYLQPGNHTPPHPGSEDTSVDLDGIMMRMEWLVERVTSDRWFEARVLPQLHVLLWGNKRAV

SEQ ID NO: 31599 - protein, 226 aa, Mesosutterella multiformis
  misc_feature (1)..(226): tr|A0A388SD08|A0A388SD08_9BURK 7-carboxy-7-deazaguanine synthase OS=Mesosutterella multiformis OX=2259133 GN=q ueE PE=3 SV=1
MEEIRYSINEIFASVQGEGLLAGTPAVFVRLQGCPVHCPWCDTKYSWKEDGSGTAKIPLSEVLVKDSRPRSADATLDELVNLILERWPRIPLVVITGGEPAEQPIRPLTERLIAAGKRVSLETSGFLEIDVAPETFVTVSPKITVPGGRVLDSALERADEVKMVIGDESDLAALDAITDKIPESTPISLQPLSMEESAASLCFRTAVERGGRYRVSVQLHKVLRVR

SEQ ID NO: 31600 - protein, 223 aa, Metakosakonia sp.; identical to SEQ ID NO: 30456
  misc_feature (1)..(223): tr|A0A348D909|A0A348D909_9ENTR 7-carboxy-7-deazaguanine synthase OS=Metakosakonia sp. MRY16-398 OX=2487150 GN= queE PE=3 SV=1

SEQ ID NO: 31601 - protein, 223 aa, Metallibacterium scheffleri
  misc_feature (1)..(223): tr|A0A4S3KRL7|A0A4S3KRL7_9GAMM 7-carboxy-7-deazaguanine synthase OS=Metallibacterium scheffleri OX=993689 GN=q ueE PE=3 SV=1
MAAAAPGADVESRLRISEIFLSLQGEADAVGWPTVFVRLTGCPLRCRWCDTAYAFEGGQWLLVDEILAQVVRHGARHVCVTGGEPLAQKRCLRLLARLCDAGHEVSLETSGALDVAGVDARVHKVLDLKAPASGEQARNRWENLAHLRAQDQVKFVLADRDDYDWARGVVQQHALAARCMVLFSPVYGELVPADLAQWILDDKLDVRFQMQLHKILWGEQPGR

SEQ ID NO: 31602 - protein, 230 aa, Methylacidimicrobium cyclopophantes
  misc_feature (1)..(230): tr|A0A5E6MJF0|A0A5E6MJF0_9BACT 7-carboxy-7-deazaguanine synthase OS=Methylacidimicrobium cyclopophantes OX=104 1766 GN=queE PE=3 SV=1
MTRTVDPSPSDAARREPAVVVNEIFWSIQGESTFAGEPCVFVRLTGCDLRCRWCDTQYAFFEGERMPLSRLLREVERFGCGLVELTGGEPLLQRNSRLLLQQLCDAGYTVLLETSGAHSIDGVDPRVHRIVDCKCPSSGESARNLSANLDLLGPRDELKFVIGTEADYQWARKRIDAASWAKRVRAIHFSPVFGELSLETLAGWILRDRLPVRLGFQLHKFIWDPNLRGV

SEQ ID NO: 31603 - protein, 226 aa, Methylacidimicrobium tartarophylax
  misc_feature (1)..(226): tr|A0A5E6MQ74|A0A5E6MQ74_9BACT 7-carboxy-7-deazaguanine synthase OS=Methylacidimicrobium tartarophylax OX=1041 768 GN=queE PE=3 SV=1
MDELSSPSSRREPGVVVNEIFHSIQGESSFAGEPCVFIRLTGCDLRCRWCDTQYAFFEGKRMSLTQLLSAVEGLGCGLVEVTGGEPLLQKHTPLLLRQLCDGGYTVLLETSGAHSIAEVDPRVHRIVDCKCPSSGESSRNLPANLELLGLRDEVKFVIGTELDYEWARDLIRHAPWVKSVRAVHFSPVQGELSLETLAGWLLRDRVPVRLGFQLHKWIWDPDRRGV

SEQ ID NO: 31604 - protein, 229 aa, Methylacidiphilum fumariolicum
  misc_feature (1)..(229): tr|I0JYJ2|I0JYJ2_METFB 7-carboxy-7-deazaguanine synthas e OS=Methylacidiphilum fumariolicum (strain SolV) OX=11 56937 GN=nrdG PE=3 SV=1
MDDITFLPREEVFKLKLVVNELFLSIQGESTFAGYPCAFIRLTGCNLRCRWCDTTYAFSEGKLLPIEAIINQIQKFNIPLVEVTGGEPLLQKNTLHLLRLLCDLGYQVLLETSGALSIRQVDPRVHRIVDLKCPSSGESEKNLLANLDWLREKDELKFVIGNNEDYQWAKTKLKEEKERLTKVKAITFSPVFGELEPSILSEWILADRLNVRLGLQIHKYIWHPEARGV

SEQ ID NO: 31605 - protein, 229 aa, Methylacidiphilum fumariolicum; identical to SEQ ID NO: 31604
  misc_feature (1)..(229): tr|A0A5F0I235|A0A5F0I235_9BACT 7-carboxy-7-deazaguanine synthase OS=Methylacidiphilum fumariolicum OX=591154 G N=queE PE=3 SV=1

SEQ ID NO: 31606 - protein, 233 aa, Methylacidiphilum infernorum
  misc_feature (1)..(233): tr|B3DVI9|B3DVI9_METI4 7-carboxy-7-deazaguanine synthas e OS=Methylacidiphilum infernorum (isolate V4) OX=48144 8 GN=nrdG PE=3 SV=1
MFFFGMNRVYLSAREILELKLLVNEMFLSIQGESTFAGYPCAFIRLTGCNLRCRWCDTTYAFSGGKLMPIRAVIDQVKAYDVPLVEITGGEPLLQKNSLYLLTLLCDLGYEVLLETSGSLPVDRVDSRVHRIVDLKCPSSGQSEHNLLSNLDWLGKRDELKFVIADRKDYEWAKNKLTQGKHWRDKVKAITFSPVFGEMDPQLLSQWILEDKLKVRLGLQIHKYIWGPDIKGV

SEQ ID NO: 31607 - protein, 229 aa, Methylacidiphilum sp.
  misc_feature (1)..(229): tr|A0A4Y8P874|A0A4Y8P874_9BACT 7-carboxy-7-deazaguanine synthase OS=Methylacidiphilum sp. Yel OX=1847730 GN=qu eE PE=3 SV=1
MDGITFLPREEVFKLKLVVNELFLSIQGESTFAGYPCAFIRLTGCNLRCRWCDTTYAFSEGKLLPIEAIINQIQKFNIPLVEVTGGEPLLQKNTLHLLRLLCDLGYQVLLETSGSLSIRQIDPRVHRIVDLKCPSSGESEKNLLANLDWLGEKDELKFVIGNNEDYQWAKTKLKEEKERLTKVKAITFSPVFGELEPRILSEWILADRLNVRLGLQIHKYIWHPEARGV

SEQ ID NO: 31608 - protein, 229 aa, Methylacidiphilum sp.
  misc_feature (1)..(229): tr|A0A4Y8P7N0|A0A4Y8P7N0_9BACT 7-carboxy-7-deazaguanine synthase OS=Methylacidiphilum sp. Phi OX=1847729 GN=qu eE PE=3 SV=1
MSTVAYLSVQEILELKLLVNEIFLSIQGESTFAGYPCSFVRLTGCNLRCRWCDTTYAFSGGKLMSIATILDQIKAYSVPLVEITGGEPLLQKNILYLLSFLCDLGYEVLLETSGSLPIDNVDPRVHRIVDLKCPSSGQSEHNLLANLKKLGERDELKFVIADKKDYEWAKAKLVEEKVWIEKIKAVSFSPVFGELEPQVLSQWILEDKLKVRLGLQIHKYIWDPSMRGV

SEQ ID NO: 31609 - protein, 235 aa, Methylarcula marina
  misc_feature (1)..(235): tr|A0A3R7M9I3|A0A3R7M9I3_9RHOB 7-carboxy-7-deazaguanine synthase OS=Methylarcula marina OX=72022 GN=queE PE=3 SV=1
MTLRIAEIFGPTIQGEGALIGEPTVFIRAGGCDYRCSWCDSLHAVDSSYRHDWMVMTPEAIWQEVRRLSGGRPLTISISGGNPAIQDFAPVIAMGKAEGYRFACETQGSIARPWFSALDTLVLSPKPPSSGESVDWAGFGRCLTAAEACPNVMMKIVIFDDEDYLWARAVAGKFPDLPLYLQPGNPEVDPDRPVDLQACTDRLLWLIEKVTGDGWFAPRVLPQLHVLVWGNKRGV

SEQ ID NO: 31610 - protein, 211 aa, Methylibium petroleiphilum
  misc_feature (1)..(211): tr|A2SD49|A2SD49_METPP 7-carboxy-7-deazaguanine synthas e OS=Methylibium petroleiphilum (strain ATCC BAA-1232 / LMG 22953 / PM1) OX=420662 GN=queE PE=3 SV=1
MTYSVKEVFYTLQGEGSHAGRPAVFCRFAGCNLWSGREADRADAVCRFCDTEFVGTDGTGGGKFTIAESLASHVAAHWPAGDAGPRFVVLTGGEPLLQVDAPLIDALHAQRFEIAVETNGSVPAPPGIDWLCVSPKAGAPLLQRSGQELKVVVPQGGIDLGELDGLDFAQRRVQPMDGPDLAANTDWAVRWCLAHPRWQLSLQTHKLLGIR

SEQ ID NO: 31611 - protein, 211 aa, Methylibium sp.
  misc_feature (1)..(211): tr|A0A0Q7CRI8|A0A0Q7CRI8_9BURK 7-carboxy-7-deazaguanine synthase OS=Methylibium sp. Root1272 OX=1736441 GN=que E PE=3 SV=1
MTYAVKEVFYTLQGEGSHAGRPAVFCRFAGCNLWSGREADRADAVCRFCDTEFVGTDGTGGGKFTIAESLATHVAAHWPSDDAGRRFVVLTGGEPLLQVDASLIDALHAQGFEIAVETNGSVPAPPGIDWLCVSPKAGAPLLQRSGQELKVVVPQDGIDLGELDGLDFAQRRVQPMDGPDLAVNTDWAVRWCLAHPRWQLSLQTHKLLGIR

SEQ ID NO: 31612 - protein, 211 aa, Methylibium sp.
  misc_feature (1)..(211): tr|A0A4P6GVR2|A0A4P6GVR2_9BURK 7-carboxy-7-deazaguanine synthase OS=Methylibium sp. Pch-M OX=2082386 GN=queE P E=3 SV=1
MTYSVKEVFYTLQGEGSHAGRPAVFCRFAGCNLWSGREADRADAVCRFCDTEFVGTDGTGGGKFTIAESLASHVAAHWPAGVAGPRFVVLTGGEPLLQVDAALIDALHAQRFEIAVETNGSVQAPPGIDWLCVSPKAGAPLLQRSGQELKVVVPQDGIDLGELDALDFAQRRVQPMDGPDLAANTDWAVRWCLAHPRWQLSLQTHKLLGIR

SEQ ID NO: 31613 - protein, 212 aa, Methylobacillus flagellatus
  misc_feature (1)..(212): tr|Q1GYT4|Q1GYT4_METFK 7-carboxy-7-deazaguanine synthas e OS=Methylobacillus flagellatus (strain KT / ATCC 5148 4 / DSM 6875) OX=265072 GN=queE PE=3 SV=1
MLRIHEIFHSLQGESSRVGLPTVFVRLTGCPMRCVYCDTEYAFKGGSNMTLDQIMEQVASYGARYVCVTGGEPLAQKKHCLELLRQLCDAGYEVSLETGGAIATDGVDERVAIILDIKTPDSGEVAKNHWDNLSRLKPNDEVKIVLCSRADYEWAKQLLAEHALNEKCAVIFSPVYSQVKPADLADWVLEDRLPVRMQVQLHKILWGETPGK

SEQ ID NO: 31614 - protein, 212 aa, Methylobacillus rhizosphaerae
  misc_feature (1)..(212): tr|A0A238XUS1|A0A238XUS1_9PROT 7-carboxy-7-deazaguanine synthase OS=Methylobacillus rhizosphaerae OX=551994 GN =queE PE=3 SV=1
MLRIHEIFHSLQGESSRVGLPTVFVRLTGCPMRCVYCDTEYAFKGGTNMSLDEIMAQVAGYGARYVCVTGGEPLAQKKGCLALLQRLCDEGYAVSLETGGAVATDGVDERVAVILDIKTPGSGELTNNKWENLQRLKPNDEIKFVLCSREDYDWAKQLLAEHALNEKCQVIFSPVFSQVKPTDLADWVLADKLPVRMQVQLHKILWGETPGK

SEQ ID NO: 31615 - protein, 211 aa, Methylobacillus sp.
  misc_feature (1)..(211): tr|A0A1A9NKK8|A0A1A9NKK8_9PROT 7-carboxy-7-deazaguanine synthase OS=Methylobacillus sp. MM3 OX=1848039 GN=queE PE=3 SV=1
MLKIHEIFHSLQGESTRVGLPTVFVRLTGCPLRCGYCDTAYAFQGGENMTLQQILERVASYGARYVTVTGGEPLAQKQCISLLKMLCDAGYDVSLETGGSLDTSHVDPRVSVILDIKTPGSGEVQKNLWTNLQHLKPTDEVKFVLCGREDYEWAKRVLADQGIAAKCTVLFSPVYSQLNPTELAEWVLQDRLPVRMQVQLHKILWGETPGK

SEQ ID NO: 31616 - protein, 215 aa, Methylobacter sp.
  misc_feature (1)..(215): tr|A0A522WXM3|A0A522WXM3_9GAMM 7-carboxy-7-deazaguanine synthase OS=Methylobacter sp. OX=2051955 GN=queE PE=3 SV=1
MTVSLLRITEIFYSLQGESNTVGLPTVFIRLTGCPLRCVYCDTAYAFSGGKKLAIDVIIAQAEQYETQYITVTGGEPLAQPGCLELMTTLLDKGYIVSLETSGALDISEVDPRVIKVMDLKTPGSGELSKNRYQNIEYLTPKDQVKFVIGNDEDYDWSKALLSEHDLPNRCEILFSPVMGQQNPTELAEKILKDRLPVRFQLQLHKILWDDAQGK

SEQ ID NO: 31617 - protein, 213 aa, Methylobacter sp.
  misc_feature (1)..(213): tr|A0A521X7R5|A0A521X7R5_9GAMM 7-carboxy-7-deazaguanine synthase OS=Methylobacter sp. OX=2051955 GN=queE PE=3 SV=1
MSLLRITEIFYSIQGESNTVGLPTVFVRLTGCPLRCVYCDTAYAFTGGKKIEIDAVIAEVEQYGARYITVTGGEPLAQPGCLELMTKLADKGYVVSLETSGALDVSKVDPRIVKVMDLKTPSSGELSRNFYQNIEYLTAKDQVKFVIGNDKDYDWSKSVLIEYDLPNRCEILFSPVMGQQNPTELAEKILKDRLPVRFQLQLHKLLWDDAQGK

SEQ ID NO: 31618 - protein, 213 aa, Methylobacter tundripaludum
  misc_feature (1)..(213): tr|A0A2S6GFL1|A0A2S6GFL1_9GAMM 7-carboxy-7-deazaguanine synthase OS=Methylobacter tundripaludum OX=173365 GN=q ueE PE=3 SV=1
MTLLRITEIFYSLQGESNTVGLPTVFIRLTGCPLRCVYCDTAYAFTGGKKIGIDAVMAEVKQYDTKYITVTGGEPLAQQGCIELMTKLLDKGYVVSLETSGALDVSEVDPRVVKVMDLKTPSSGELSRNRYQNIEHLTAKDQVKFVIGNDKDYDWSKGILAEYALSDRCDILFSPMMGRQNPTELAEKILKDRLPVRFQLQLHKILWDDAQGK

SEQ ID NO: 31619 - protein, 213 aa, Methylobacter tundripaludum
  misc_feature (1)..(213): tr|A0A2S6HB06|A0A2S6HB06_9GAMM 7-carboxy-7-deazaguanine synthase OS=Methylobacter tundripaludum OX=173365 GN=q ueE PE=3 SV=1
MSSLRITEIFHSLQGESNTVGLPTVFIRLTGCPLRCVYCDTAYAFTGGEKIGIDAIIAQAEQYGTPYITVTGGEPLAQPGCLELMTKLLDKGYVVSLETSGALDVSKVDQRVVKVMDLKTPSSGELSRNFYQNIEYLTAKDQVKFVIGNDSDYDWSKSILTEYDLPNLCEILFSPVMGQQNPTELAEKILKDRLPVRFQLQLHKILWDDAQGK

SEQ ID NO: 31620 - protein, 210 aa, Methylobacterium aquaticum
  misc_feature (1)..(210): tr|A0A0J6S9B6|A0A0J6S9B6_9RHIZ 7-carboxy-7-deazaguanine synthase OS=Methylobacterium aquaticum OX=270351 GN=qu eE PE=3 SV=1
MSYAVKEIFHTLQGEGAQAGRASVFCRFAGCNLWSGREVDRAQAVCRFCDTDFVGTDGVGGGRFSQAEDLAEAIERTWNGARGRRYVVFTGGEPLLQLDAALLAAVHARGFEAAVETNGTQDPPAGIDWICVSPKAGAPLRLSRGDELKLVYPQAGLDPDALADLDFRHLWLQPMDGPDRIANTQAAVAHCLRDARWRLSVQTHKLIGIP

SEQ ID NO: 31621 - protein, 210 aa, Methylobacterium aquaticum
  misc_feature (1)..(210): tr|A0A0C6FSA6|A0A0C6FSA6_9RHIZ 7-carboxy-7-deazaguanine synthase OS=Methylobacterium aquaticum OX=270351 GN=nr dG PE=3 SV=1
MSYAVKEIFHTLQGEGAQAGRASVFCRFSGCNLWSGREADRAQAACRFCDTDFVGTDGVGGGRFPDAEALAEAIERTWNGARGRRYVVFTGGEPLLQLDDALLAAVHARGFEVAVETNGTQAAPAGIDWICVSPKAGAPLRLTGGHELKLVYPQAGLDPDALAELDFRHHWLQPMDGPDRIANTQAAVAHCLRDARWRLSLQTHKLIGIP

SEQ ID NO: 31622 - protein, 210 aa, Methylobacterium brachiatum
  misc_feature (1)..(210): tr|A0A3G2VH05|A0A3G2VH05_9RHIZ 7-carboxy-7-deazaguanine synthase OS=Methylobacterium brachiatum OX=269660 GN=q ueE PE=3 SV=1
MAYAVKEIFHTLQGEGAQAGRAAVFCRFAGCNLWSGREADRAAAACRFCDTDFVGLDGEGGGRFADATALADAIARTWAGGPECRYVVFTGGEPLLQLDSALIDAVHGHGFEIAIETNGTLPAPPGIDWICVSPKGANPLAQTTGHELKLVYPQADADPADFVALAFRHRFLQPMDGPEQGASTQAAIAYCRQDARWRLSLQTHKMIGIP

SEQ ID NO: 31623 - protein, 224 aa, Methylobacterium brachiatum
  misc_feature (1)..(224): tr|A0A1I3NUL9|A0A1I3NUL9_9RHIZ 7-carboxy-7-deazaguanine synthase OS=Methylobacterium brachiatum OX=269660 GN=q ueE PE=3 SV=1
MCGITVERKGFGDTVAYAVKEIFHTLQGEGAQAGRAAVFCRFAGCNLWSGREADRAAAACRFCDTDFVGLDGEGGGRFADATALADAIARTWAGGPECRYVVFTGGEPLLQLDSALIDAVHGHGFEIAIETNGTLPAPPGIDWICVSPKGANPLAQTTGHELKLVYPQVDADPADFVGLAFRHRFLQPMDGPEQGASTQAAIAYCRQDARWRLSLQTHKMIGIP

SEQ ID NO: 31624 - protein, 210 aa, Methylobacterium currus
  misc_feature (1)..(210): tr|A0A2R4WSR7|A0A2R4WSR7_9RHIZ 7-carboxy-7-deazaguanine synthase OS=Methylobacterium currus OX=2051553 GN=queE PE=3 SV=1
MSYAVKEIFHTLQGEGAQAGRASVFCRFAGCNLWSGREADRAGAVCRFCDTDFVGTDGVGGGRFADAEALAAAIEACWGGARGRRYVVFTGGEPLLQLDEALLAAVHARGFEAAVETNGTQAAPAGIDWVCVSPKAGAPLRLTSGDELKLVYPQDGLDPDALAALDFRHLWLQPMDGPDRVAHTQAAVAHCLRDARWRLSLQTHKLIGIP

SEQ ID NO: 31625 - protein, 210 aa, Methylobacterium dankookense
  misc_feature (1)..(210): tr|A0A564FTW0|A0A564FTW0_9RHIZ 7-carboxy-7-deazaguanine synthase OS=Methylobacterium dankookense OX=560405 GN= queE PE=3 SV=1
MAYAVKELFHTLQGEGAQAGRAAVFCRFAGCNLWSGREEDRETAACRFCDTDFVGLDGPGGGRFADADRLAAAIAATWEGGAHNRYVVFTGGEPLLQLDAALIEAVHARGFEIAVETNGTIAAPAGIDWICVSPKAGNPLVQRSGSELKLVFPQAGLDPETFAGLDFRHRFLQPMDGPDRAAHTGAAVAYCRTDARWRLSLQTHKILDIP

SEQ ID NO: 31626 - protein, 210 aa, Methylobacterium frigidaeris
  misc_feature (1)..(210): tr|A0A2G8MBT2|A0A2G8MBT2_9RHIZ 7-carboxy-7-deazaguanine synthase OS=Methylobacterium frigidaeris OX=2038277 GN =queE PE=3 SV=1
MSYAVKEIFHTLQGEGAQAGRASVFCRFAGCNLWSGREADRAEAVCRFCDTDFVGTDGTGGGRFADAEALAEAIERTWNGARGRRYVVFTGGEPLLQLDEALLAAVHARGFEAAVETNGTQAAPAGIDWVCVSPKAGAPLRLTRGDELKLVYPQSGLDPDALAELDFRHLWLQPMDGPDRIANTGAAVAHCLRDARWRLSLQTHKLIGIP

SEQ ID NO: 31627 - protein, 210 aa, Methylobacterium gnaphalii
  misc_feature (1)..(210): tr|A0A512JJ17|A0A512JJ17_9RHIZ 7-carboxy-7-deazaguanine synthase OS=Methylobacterium gnaphalii OX=1010610 GN=q ueE PE=3 SV=1
MAYAVKEVFHTLQGEGAQAGRAAVFCRFAGCNLWSGREEDRAEAACRFCDTDFVGLNGEGGGRFATAADLAAAIAQTWEGGKTDRFVVFTGGEPLLQLDAALIDAVHARGFEIAVETNGTLAAPEGIDWICVSPKAGNPLVQTSGHELKLVFPQEGAEPERFADLAFTRRFLQPMDGPDRLAYTQAAIAYCRADARWRLSLQTHKILGIP

SEQ ID NO: 31628 - protein, 212 aa, Methylobacterium gossipiicola
  misc_feature (1)..(212): tr|A0A1I2R5U8|A0A1I2R5U8_9RHIZ 7-carboxy-7-deazaguanine synthase OS=Methylobacterium gossipiicola OX=582675 GN =queE PE=3 SV=1
MAYAVKELFHTLQGEGAQAGRAAVFCRFAGCNLWSGREEDRATAACRFCDTDFVGLDGEGGGRFATPEDLAEAIAAAWEGGPRNHYVVFTGGEPLLQLDPALIAAVHARGFEIAVETNGTLAAPEGIDWICVSPKAGNPLVQITGHELKLVYPQVEAEADPARFADLAFRHHWLQPMDGPERLANTQAAVAYCRSDARWRLSLQTHKIIGIP

SEQ ID NO: 31629 - protein, 210 aa, Methylobacterium haplocladii
  misc_feature (1)..(210): tr|A0A512IR19|A0A512IR19_9RHIZ 7-carboxy-7-deazaguanine synthase OS=Methylobacterium haplocladii OX=1176176 GN =queE PE=3 SV=1
MAYAVKELFHTLQGEGAQAGRAAVFCRFTGCNLWSGREEDRADAACRFCDTDFVGMNGDGGGRFPSAADLAAAIDAAWEGGEVDRFVVFTGGEPLLQLDTALIAAVHGHGFEIAVETNGTLPAPEGIDWICVSPKAGNPLVQTSGHELKLVFPQAGAEPERFADLAFLRRFLQPMDGPDRLANTQAAIAYCRGDARWRLSLQTHKILGIP

SEQ ID NO: 31630 - protein, 210 aa, Methylobacterium indicum
  misc_feature (1)..(210): tr|A0A0J6R5A4|A0A0J6R5A4_9RHIZ 7-carboxy-7-deazaguanine synthase OS=Methylobacterium indicum OX=1775910 GN=que E PE=3 SV=1
MSYAVKEIFHTLQGEGAQAGRASVFCRFAGCNLWSGREADRAQAVCRFCDTDFVGTDGLGGGRFPDAEALAEAIERTWNGARGRRYVVFTGGEPLLQLDAALLAAVHARGFEVAVETNGTQDAPAGIDWICVSPKAGAPLRLTRGHELKLVYPQAELDPDTLAELDFRHHWLQPMDGPDRIANTQAAVAHCLRDARWRLSLQTHKLIGIP

SEQ ID NO: 31631 - protein, 210 aa, Methylobacterium indicum
  misc_feature (1)..(210): tr|A0A147FRX4|A0A147FRX4_9RHIZ 7-carboxy-7-deazaguanine synthase OS=Methylobacterium indicum OX=1775910 GN=que E PE=3 SV=1
MSYAVKEIFHTLQGEGAQAGRASVFCRFAGCNLWSGREADRAQAVCRFCDTDFVGTDGLGGGRFPDAEALAEAIERTWNGARGRRYVVFTGGEPLLQLDAALLAAVHARGFEVAVETNGTQDAPAGIDWICVSPKAGAPLRLTHGHELKLVYPQAELDPDILAELDFRHLWLQPMDGPDRIANTQAAVAHCLRDARWRLSLQTHKLIGIP

SEQ ID NO: 31632 - protein, 210 aa, Methylobacterium mesophilicum
  misc_feature (1)..(210): tr|M7XXB2|M7XXB2_9RHIZ 7-carboxy-7-deazaguanine synthas e OS=Methylobacterium mesophilicum SR1.6/6 OX=908290 GN =queE PE=3 SV=1
MAYAVKEIFHTLQGEGAQAGRAAVFCRFAGCNLWSGREADRAAAACRFCDTDFVGMDGEGGGRFADAAALADAIAAAWAGGPNNRYVVFTGGEPLLQLDTPLIAAVHAQGFEIAIETNGTLPAPPGIDWICVSPKGRNALAQITGDELKLVYPQADADPSAFVGLDFRHRFLQPMDGPDQGASTQAAIAYCRRDARWRLSLQTHKMIGIP

SEQ ID NO: 31633 - protein, 210 aa, Methylobacterium nodulans
  misc_feature (1)..(210): tr|B8IG28|B8IG28_METNO 7-carboxy-7-deazaguanine synthas e OS=Methylobacterium nodulans (strain LMG 21967 / CNCM I-2342 / ORS 2060) OX=460265 GN=queE PE=3 SV=1
MSYAVKEIFHTLQGEGAQAGRAAVFCRFAGCNLWSGREADRADAICRFCDTDFVGTDGEGGGRFADAEALAAAIAAAWGGGRDGRYVVFTGGEPLLQLDAPLLAAVHARGFATAVETNGTQDAPEGLDWICVSPKAGAPLRITRGDELKLVYPQAGLRPEDLVGLDFRHFWLQPMDGPDRLANTEAAVAYCLRDARWRLSLQTHKLIGIP

SEQ ID NO: 31634 - protein, 230 aa, Methylobacterium nodulans
  misc_feature (1)..(230): tr|B8IAL9|B8IAL9_METNO 7-carboxy-7-deazaguanine synthas e OS=Methylobacterium nodulans (strain LMG 21967 / CNCM I-2342 / ORS 2060) OX=460265 GN=queE PE=3 SV=1
MTVFAVNEIFETFQGEAAFTGTPSVFVRLQGCPVGCAFCDTKMTWHVRPEHEIEVGAMIAKTEDAPTWARLHDEDLAMLVGEFRARHVVFTGGEPALYDLTEVSRRLIDQGRTVQLETSGTALIRIDPHAWVTVSPKIDMPGGLKVLPAAVARANEIKMPIGKPADIEKLQAFLAEHPAVGVAYTGSGPALLIWLQPLSQSEKATALCMEAAAANGWRLSLQTHKFVGVR

SEQ ID NO: 31635 - protein, 210 aa, Methylobacterium organophilum
  misc_feature (1)..(210): tr|A0A2U1ETH3|A0A2U1ETH3_METOR 7-carboxy-7-deazaguanine synthase OS=Methylobacterium organophilum OX=410 GN=qu eE PE=3 SV=1
MAYAVKEIFHTLQGEGAQAGRAAVFCRFAGCNLWSGREADRAAAACRFCDTDFVGMDGEGGGRFADAASLADAIAATWAGGAENRYVVFTGGEPLLQLDTPLIEAVHAAGFEIAIETNGTLPAPPGIDWICVSPKGSNALAQVSGHELKLVYPQADADPAAFVGLAFQHRFLQPMDGPDRAASTEAAIAYCRRDARWRLSLQTHKMIGIP

SEQ ID NO: 31636 - protein, 210 aa, Methylobacterium oryzae
  misc_feature (1)..(210): tr|A0A089Q7M0|A0A089Q7M0_9RHIZ 7-carboxy-7-deazaguanine synthase OS=Methylobacterium oryzae CBMB20 OX=693986 G N=queE PE=3 SV=1
MAYAVKEIFHTLQGEGAQAGRAAVFCRFAGCNLWSGREADRASAACRFCDTDFIGMDGEGGGRFTDAAALADAIAATWAGGAENRYVVFTGGEPLLQLDTPLIEAVHAAGFEIAIETNGTLPAPPGIDWICVSPKGSNALAQTSGHELKLVYPQADADPAAFVGLAFQHRFLQPMDGPDRAASTEAAIAYCRRDARWRLSLQTHKIIGIP

SEQ ID NO: 31637 - protein, 210 aa, Methylobacterium oxalidis
  misc_feature (1)..(210): tr|A0A512IWZ1|A0A512IWZ1_9RHIZ 7-carboxy-7-deazaguanine synthase OS=Methylobacterium oxalidis OX=944322 GN=que E PE=3 SV=1
MAYAVKELFHTLQGEGAQAGRAAVFCRFAGCNLWSGREEDRAGAACTFCDTDFVGMDGPGGGRFAGADDLAGRIAHTWEGGAHGRFVVFTGGEPLLQLDAALIAAVHARGFAIAVETNGTLAAPPGLDWICVSPKAGNALVQTSGHELKLVFPQAGLDPADLAGLDFPHRWLQPMDGPQAAANTRAAVAYCRSDARWRLSLQTHKMIGIP

SEQ ID NO: 31638 - protein, 210 aa, Methylobacterium phyllostachyos
  misc_feature (1)..(210): tr|A0A1H0G0R6|A0A1H0G0R6_9RHIZ 7-carboxy-7-deazaguanine synthase OS=Methylobacterium phyllostachyos OX=582672 GN=queE PE=3 SV=1
MTYAVKELFHTLQGEGAQAGRAAVFCRFAGCNLWSGREADRAAAACRFCDTDFIGLDGEGGGRFADADTLATAIAATWAGGPENRYVVFTGGEPLLQLDAPLIDAVHARGFEIAIETNGTLPAPPGIDWICVSPKGRNALAQTNGHELKLVYPQDDADPADFVGLDFRHRFLQPLDGSGRVASTEAAIAYCRRDARWRLSLQTHKMIGIP

SEQ ID NO: 31639 - protein, 210 aa, Methylobacterium platani
  misc_feature (1)..(210): tr|A0A179SAT6|A0A179SAT6_9RHIZ 7-carboxy-7-deazaguanine synthase OS=Methylobacterium platani OX=427683 GN=queE PE=3 SV=1
MSYAVKEIFHTLQGEGAQAGRASVFCRFAGCNLWSGREADRADAVCRFCDTDFVGTDGIGGGRFPDAEALAAAIAACWGEARGPRYVVFTGGEPLLQLDEALLAAVHARGFEAAVETNGTQVPPEGIDWVCVSPKAGAPLRLTRGHELKLVYPQAGLDPDALAELDFRHLWLQPMDGPDRIANTEAAVAHCLRDGRWRLSLQTHKLIGIP

SEQ ID NO: 31640 - protein, 210 aa, Methylobacterium pseudosasicola
  misc_feature (1)..(210): tr|A0A1I4LBI6|A0A1I4LBI6_9RHIZ 7-carboxy-7-deazaguanine synthase OS=Methylobacterium pseudosasicola OX=582667 GN=queE PE=3 SV=1
MSYAVKEIFHTLQGEGAQAGRAAVFCRFAGCNLWSGREADRAAAACRFCDTDFVGLDGEGGGRFADATALADAIARTWAGGPECRYVVFTGGEPLLQLDTPLIEAVHRHGFEIAIETNGTLPAPPGIDWICVSPKGANPLAQTSGHELKLVYPQMDADPADFVGLAFRHRFLQPMDGPEQSASTQAAIAYCRQDARWRLSLQTHKMIGIP

SEQ ID NO: 31641 - protein, 210 aa, Methylobacterium radiotolerans; identical to SEQ ID NO: 31635
  misc_feature (1)..(210): tr|A0A3S3DDU8|A0A3S3DDU8_9RHIZ 7-carboxy-7-deazaguanine synthase OS=Methylobacterium radiotolerans OX=31998 GN =queE PE=3 SV=1

SEQ ID NO: 31642 - protein, 210 aa, Methylobacterium radiotolerans; identical to SEQ ID NO: 31635
  misc_feature (1)..(210): tr|B1LYV6|B1LYV6_METRJ 7-carboxy-7-deazaguanine synthas e OS=Methylobacterium radiotolerans (strain ATCC 27329 / DSM 1819 / JCM 2831 / NBRC 15690 / NCIMB 10815 / 0-1) OX=426355 GN=queE PE=3 SV=1

SEQ ID NO: 31643 - protein, 210 aa, Methylobacterium sp.
  misc_feature (1)..(210): tr|A0A0Q5YTL7|A0A0Q5YTL7_9RHIZ 7-carboxy-7-deazaguanine synthase OS=Methylobacterium sp. Leaf399 OX=1736364 GN =queE PE=3 SV=1
MSYAVKELFHTLQGEGAQAGRAAVFCRFSGCNLWSGREEDRADAACRFCDTDFIGMDGDGGGRFADADTLARAIAATWGGGDHHRYVVFTGGEPLLQLDAALIDAVHAAGFEIAVETNGTLAAPAGIDWICVSPKAGNPLVQASGHELKLVYPQAGFDLAALAALPFRHHWLQPMDGPDRIAHTRAAVEACRSDARWRLSLQTHKIIGIP

SEQ ID NO: 31644 - protein, 210 aa, Methylobacterium sp.
  misc_feature (1)..(210): tr|A0A4Z0NLA7|A0A4Z0NLA7_9RHIZ 7-carboxy-7-deazaguanine synthase OS=Methylobacterium sp. 6HR-1 OX=1141884 GN=q ueE PE=3 SV=1
MSYAVKEIFHTLQGEGAQAGRASVFCRFAGCNLWSGREADRAEAVCRFCDTDFVGTDGTGGGRFPDAEALADAIERCWGGARGRRYVVFTGGEPLLQLDAALLSAVRARGFECAVETNGTQDAPAGIDWVCVSPKAGAPLRLTRGDELKLVYPQAGLDPDALAELDFRHLWLQPMDGPDRIANTQAAVAHCLRDARWRLSLQTHKLIGIP

SEQ ID NO: 31645 - protein, 210 aa, Methylobacterium tarhaniae
  misc_feature (1)..(210): tr|A0A0J6SJS0|A0A0J6SJS0_9RHIZ 7-carboxy-7-deazaguanine synthase OS=Methylobacterium tarhaniae OX=1187852 GN=q ueE PE=3 SV=1
MSYAVKEIFHTLQGEGAQAGRASVFCRFAGCNLWSGREADRAEAVCRFCDTDFVGTDGVGGGRFADAVALADAIERSWGGARGRRYVVFTGGEPLLQLDEALLAAVHARGFEAAVETNGTQDAPAGIDWICVSPKAGAPLRLTRGDELKLVYPQAALDPDALAGLDFRHLWLQPMDGPDRIANTQAAVAHCLRDARWRLSLQTHKLIGIP

SEQ ID NO: 31646 - protein, 210 aa, Methylobacterium variabile
  misc_feature (1)..(210): tr|A0A0J6S787|A0A0J6S787_9RHIZ 7-carboxy-7-deazaguanine synthase OS=Methylobacterium variabile OX=298794 GN=qu eE PE=3 SV=1
MSYAVKEIFHTLQGEGAQAGRASVFCRFAGCNLWSGREADRAQAVCRFCDTDFVGTDGTGGGRFADAEALAEAIAACWGEARGRRYVVFTGGEPLLQLDAPLLAAVRARGFEAAVETNGTQEPPEGIDWVCVSPKAGAPLRLTRGDELKLVYPQAGLDPDALAELDFRHLWLQPMDGPDRIANTQAAVAHCLRDARWRLSLQTHKLIGIP

SEQ ID NO: 31647 - protein, 213 aa, Methylocaldum marinum
  misc_feature (1)..(213): tr|A0A250L0C6|A0A250L0C6_9GAMM 7-carboxy-7-deazaguanine synthase OS=Methylocaldum marinum OX=1432792 GN=queE P E=3 SV=1
MNQLRVTEIFYSLQGESRTVGLPTVFVRLTGCPLRCVYCDTAYAFTGGRKMSIDEILDEVGSYHPCYVTVTGGEPLAQRGCFTLLDALIEKGYEVSLETSGALDVSEVNPRVVKVLDLKTPSSGEASKNLYRNLDFLDRKDQLKLVIMNEEDYEWAKAAMKEYRLVDRCEVLFSPAMGAQNPTELAEKILRDRLPVRFQIQLHKILWGDAPGR

SEQ ID NO: 31648 - protein, 213 aa, Methylocaldum sp.
  misc_feature (1)..(213): tr|A0A4R7AHG4|A0A4R7AHG4_9GAMM 7-carboxy-7-deazaguanine synthase OS=Methylocaldum sp. 0917 OX=2485163 GN=queE PE=3 SV=1
MNQLRVTEIFYSLQGESRTVGLPTVFVRLTGCPLRCVYCDTAYAFTGGQKMSIDEIVAEVGTYHPGYVTVTGGEPLAQRGCLVLLDALVEKGYEVSLETSGALDVSDVNPKVVKVLDLKTPSSCEESRNLYRNLNYLDRKDQLKFVIMNDADYQWAKAKMEEYGLSDRCEVLFSPAMGTQDPAELADKILRDRLPVRFQVQLHKILWGDTPGR

SEQ ID NO: 31649 - protein, 248 aa, Methylocapsa palsarum
  misc_feature (1)..(248): tr|A0A1I3ZV89|A0A1I3ZV89_9RHIZ 7-carboxy-7-deazaguanine synthase OS=Methylocapsa palsarum OX=1612308 GN=queE P E=3 SV=1
MIKDLERGLFCFGRAPESGTRTSPIEIAALKELRGDPMRIYSVKEIFLTLQGEGAHAGRAAVFCRFSGCNLWSGHDKDRAGADCFFCDTDFVGTDGIGGGKFAHAGELALAIERTWDAGATDRFVVFTGGEPLLQLDAALIEAVHAHGFEIAVETNGTLPPPDGLDWICVSPKAGADLVARKGSELKLVFPQEGLGPEDVADLAFERFWLQPMDGANIAENTKAAVAYCLAHPHWRLSVQTHKMIGVP

SEQ ID NO: 31650 - protein, 211 aa, Methyloceanibacter caenitepidi
  misc_feature (1)..(211): tr|A0A0A8K3N7|A0A0A8K3N7_9RHIZ 7-carboxy-7-deazaguanine synthase OS=Methyloceanibacter caenitepidi OX=1384459 GN=queE PE=3 SV=1
MYAVKEIFYTLQGEGVQAGRPAVFCRFAGCNLWSGREKDREDAVCRFCDTEFVGTDGPGGGRFETAEDLVQACRAAWKGNSGAPEFVVLTGGEPMLQVDVPLIDAFHEAGFETAIETNGTLPVLDDIDWICVSPKAGAPIRQRSGDELKLVYPQPEIKPEDMLGLSFTHFLLQPLDDQSGGASNLEAAVDYCLRHPHWRLSLQTHKILGLP

SEQ ID NO: 31651 - protein, 226 aa, Methyloceanibacter marginalis
  misc_feature (1)..(226): tr|A0A1E3W431|A0A1E3W431_9RHIZ 7-carboxy-7-deazaguanine synthase OS=Methyloceanibacter marginalis OX=1774971 G N=queE PE=3 SV=1
MYAVKEIYYTLQGEGAQAGRPAVFCRFAGCNLWSGREQDRTEAVCNFCDTDFVGTDAPAVANTPTPIVWREPAARPGAAIPVRPPFVVLTGGEPMLQVDEALVDALHITGFEVAIETNGTLPVLPSIDWVCVSPKAGAPLKQRSGDELKLVYPQDRLWPEEVQGLDFTHFLLQPMDDGADSPANVRAAIDYCLAHPKWRLSLQTHKLLGLPYWCGVRPLAGARKIP

SEQ ID NO: 31652 - protein, 211 aa, Methyloceanibacter methanicus
  misc_feature (1)..(211): tr|A0A1E3W552|A0A1E3W552_9RHIZ 7-carboxy-7-deazaguanine synthase OS=Methyloceanibacter methanicus OX=1774968 G N=queE PE=3 SV=1
MYAVKEIYYTLQGEGAQAGRPAVFCRFAGCNLWSGRECDRADALCSFCDTDFAGLDGPGGGRFETAGDLVGACRSAWRGNSGAAQFVVLTGGEPMLQVDEDLIEAFHRDGFEIAIETNGTLPVSDEIDWICVSPKPGMPLRQRSGDELKLVYPQADIAPEEVLGLAFTHFLLQPLDDRAGGTANLQAAIDYCLRHPRWRLSLQTHKILGLP

SEQ ID NO: 31653 - protein, 211 aa, Methyloceanibacter sp.
  misc_feature (1)..(211): tr|A0A353IQZ8|A0A353IQZ8_9RHIZ 7-carboxy-7-deazaguanine synthase OS=Methyloceanibacter sp. OX=1965321 GN=queE PE=3 SV=1
MYAVKEIFYTLQGEGAQSGRPAVFCRFTGCNLWSGREADRADAICRFCDTDFIGTDGTGGGRFETAEDLVGACHTAWRGNSGAAPFVVLTGGEPMLQVDEVLIQAFHGYGFEIAIETNGSLPVSDEIDWICVSPKPGIPLRQQSGDELKLIYPQAEIAPDDVLGLAFTHFLLQPLDDRAGGTSNLQSALDYCLRHPRWRLSLQTHKILGLP

SEQ ID NO: 31654 - protein, 230 aa, Methyloceanibacter stevinii
  misc_feature (1)..(230): tr|A0A1E3VLG3|A0A1E3VLG3_9RHIZ 7-carboxy-7-deazaguanine synthase OS=Methyloceanibacter stevinii OX=1774970 GN= queE PE=3 SV=1
MASWTWGLSQGRFAPTYPLMYAVKEIYYTLQGEGAQAGRPAVFCRFAGCNLWSGREKDRADAICRFCDTEFVGTDGPGGGRFETAEDVVQACRAAWKGNSGAAEFVVLTGGEPMLQVDEALIDAFHQAGFETAIETNGTLPVLDEIDWICVSPKAGAPIRQRSGDELKLVYPQPDMEPEDVLGLSFTHFLLQPLDDRSGGTTNLEAALDYCLRHPQWRLSLQTHKILGLP

SEQ ID NO: 31655 - protein, 211 aa, Methyloceanibacter superfactus
  misc_feature (1)..(211): tr|A0A1E3VPB3|A0A1E3VPB3_9RHIZ 7-carboxy-7-deazaguanine synthase OS=Methyloceanibacter superfactus OX=1774969 GN=queE PE=3 SV=1
MYAVKEIYYTLQGEGAQAGRPAVFCRFAGCNLWSGREQDAADAVCNFCDTDFVGTDGPGGGKFADADALARACREAWRGNSGTPPFVVLTGGEPMLQVDEALVAALHTVGFEVAIETNGTLPVLPSIDWVCVSPKAGAPLRQRSGDELKLVYPQDRLWPDEVQTLDFTHFLLQPLDDGSGAPENVRAAIDYCLAHPKWRLSLQTHKLLGLP

SEQ ID NO: 31656 - protein, 211 aa, Methylocella silvestris
  misc_feature (1)..(211): tr|A0A2J7TJV3|A0A2J7TJV3_METSI 7-carboxy-7-deazaguanine synthase OS=Methylocella silvestris OX=199596 GN=queE PE=3 SV=1
MGRYAVKEIFPTLQGEGAQAGRAAVFCRFAGCNLWSGREQDRAAASCPFCDTDFIGTDGTGGGVFAGADDLAGVIEAAWLGGPGGRYVVFTGGEPLLQLDEPLIAAVHARGFEAAVETNGTLQPPAGVDWLCVSPKAGAPIVVTAGSELKLVYPQDDLLPDALSGLDFAHFWLQPMDGANVEANTKAAVAYCLAHPDWRLSLQTHKLIGIP

SEQ ID NO: 31657 - protein, 211 aa, Methylocella silvestris
  misc_feature (1)..(211): tr|B8ESP0|B8ESP0_METSB 7-carboxy-7-deazaguanine synthas e OS=Methylocella silvestris (strain DSM 15510 / CIP 10 8128 / LMG 27833 / NCIMB 13906 / BL2) OX=395965 GN=queE PE=3 SV=1
MGRYAVKEIFPTLQGEGAQAGRAAVFCRFAGCNLWSGREKDRAAAACPFCDTDFIGTDGPGGGVFGGAEELAGAIEAAWLGGPAGRYVVFTGGEPLLQLDDALIAAVHARGFEAAVETNGTLEPPAGVDWLCVSPKAGAPIVVTAGSELKLVYPQDDLLPDALSGLQFAHFWLQPMDGANVDANTKAAVAYCLAHPDWRLSLQTHKLIGIP

SEQ ID NO: 31658 - protein, 210 aa, Methylocella tundrae
  misc_feature (1)..(210): tr|A0A4V6IMM0|A0A4V6IMM0_METTU 7-carboxy-7-deazaguanine synthase OS=Methylocella tundrae OX=227605 GN=queE PE= 3 SV=1
MAYAVKELFLTLQGEGAQAGRAAVFCRFVGCNLWSGREKDRVEATCSFCDTDFVGTDGEGGGSFARPEALAAAIEAAWRGGTGDRFVVFTGGEPLLQLDEALIEAAHARGFEVAVETNGTLEPPRGVDWLCVSPKAGAALTVTRGSELKLVFPQADLPPDALSGLDFAHFWLQPMDGADVAANTAAAIAYCLSHPHWRLSVQTHKLIGIP

SEQ ID NO: 31659 - protein, 213 aa, Methylococcaceae bacterium
  misc_feature (1)..(213): tr|A0A1Z9UBY0|A0A1Z9UBY0_9GAMM 7-carboxy-7-deazaguanine synthase OS=Methylococcaceae bacterium TMED282 OX=1986 758 GN=queE PE=3 SV=1
  misc_feature (26)..(26): Xaa can be any naturally occurring amino acid
  misc_feature (45)..(46): Xaa can be any naturally occurring amino acid
MSYSVKEIYLTLQGEGAQQGRAAVFXRFAGCNLWSGKEIDRSTAXXNFCDTDFVGTDGPGGAKYPDVESLVGAIELEWAKNIESNSDRLVVFTGGEPALQLTSELTRSLRNSGFKCAIETNGTLPIKAELDWITVSPKTTQKLEVFAGDELKLVYPQQNIKPELFEALDFHHFFLQPKDDKNFNKNLRKSIEYCLKHPRWRLSVQTHKYIGIA

SEQ ID NO: 31660 - protein, 213 aa, Methylococcaceae bacterium
  misc_feature (1)..(213): tr|A0A1Z8WQI1|A0A1Z8WQI1_9GAMM 7-carboxy-7-deazaguanine synthase OS=Methylococcaceae bacterium TMED69 OX=19867 66 GN=queE PE=3 SV=1
MNFSVKEIYHTIQGEGARSGRAAVFCRFSGCNLWSGLEHQRKNAVCNFCDTDFNGTDGQNGGKFLTAEKLASTIERVWVDSTSDSDHRYIVFTGGEPGLQISAELVSSLQTKRFEVAIETNGTVALPENLDWVTVSPKTWNSFVVTKGSELKFVFPQKKLAPEEFKLLDFEHFYIQPKFDEQYDDNLLKSLDFCLKYPKWKLSLQTHKYVGIL

SEQ ID NO: 31661 - protein, 213 aa, Methylococcales bacterium
  misc_feature (1)..(213): tr|A0A418RGH8|A0A418RGH8_9GAMM 7-carboxy-7-deazaguanine synthase OS=Methylococcales bacterium OX=2304002 GN=qu eE PE=3 SV=1
MSSLRITEIFYSLQGESNTVGIPTVFIRLTGCPLRCVYCDTAYAFTGGKKISINEIIAEVEQYNTPYITVTGGEPLAQAACNELLVELVNKDFKVSLETSGAIEISNVNQRVIKVMDLKTPSSGELNKNLYTNIQYLNSKDQVKFVISNDEDYNWSKTILTEYELTNRCEVLFSPVMGIQNPTELAEKILRDRLPVRFQIQLHKLLWNDAQGK

SEQ ID NO: 31662 - protein, 213 aa, Methylococcales bacterium
  misc_feature (1)..(213): tr|A0A3A2ITP1|A0A3A2ITP1_9GAMM 7-carboxy-7-deazaguanine synthase OS=Methylococcales bacterium OX=2304002 GN=qu eE PE=3 SV=1
MSSLRITEIFYSLQGESNTVGIPTVFIRLTGCPLRCVYCDTAYAFTGGKKLSINDIITEAEQYNTPFITVTGGEPLAQPGCIELLTELLNKNFKVSLETSGAIDISNVDQRTVKVMDLKTPGSGELNKNLYENIQYLNSKDQVKFVIGTNEDYNWSKAILTEYALSDRCEILFSPVMGLQNPTELAEKILRDRLPVRFQIQLHKLLWDDAQGK

SEQ ID NO: 31663 - protein, 215 aa, Methylococcus capsulatus
  misc_feature (1)..(215): tr|Q609K1|Q609K1_METCA 7-carboxy-7-deazaguanine synthas e OS=Methylococcus capsulatus (strain ATCC 33009 / NCIM B 11132 / Bath) OX=243233 GN=queE PE=3 SV=1
MTETLVRITEIFFSLQGETRTVGLPTVFVRLTGCPLRCSYCDTAYAFSGGERMSIAEIVERVGRYGARYVTVTGGEPLAQKACLPLLTALCDEGYQVSLETGGAHDISAVDPRVVRVVDLKTPGSGEASRNLYANVDALRQGDQVKFVIADRPDYDWAVAKLDEHRLAERCEILFSPVAGALQPAQLAEWILRDRLPVRFQLQLHKLLWGDTPGH

SEQ ID NO: 31664 - protein, 213 aa, Methylococcus sp.
  misc_feature (1)..(213): tr|A0A432RN31|A0A432RN31_9GAMM 7-carboxy-7-deazaguanine synthase OS=Methylococcus sp. OX=39769 GN=queE PE=3 SV =1
MEYLRITEIFYSIQGESSTTGLPTTFVRLTGCPLRCTYCDSEYAFTGGELMSLSDIVARVSEQPTRFVTVTGGEPLAQKNCSWLLEELIDRGFTVSLETSGAMDLASVDSRVVKVMDLKTPSSGEQHRNLYSNLEYLNHKDQVKFVIGSQEDYAWACDTVREFGLEERCQVLFSPVAGQMGATWLADNILRDGIQVRLQVQLHKLLWGDVAGK

SEQ ID NO: 31665 - protein, 215 aa, Methylocucumis oryzae
  misc_feature (1)..(215): tr|A0A0F3IGL5|A0A0F3IGL5_9GAMM 7-carboxy-7-deazaguanine synthase OS=Methylocucumis oryzae OX=1632867 GN=queE P E=3 SV=1
MMDSELRITEIFYSLQGESNTVGIPTAFIRLTGCPLRCSYCDTAYAFSGGQKMTIADILAEVQTYQCQYVTVTGGEPLAQPGCLTLMTHLADLGFYVSLETSGALDISAVDARIVKVMDLKTPSSGELSKNRYENLAFLTAKDQVKFVIGSQEDYEWSKAWLVEQRLHETCQILFSPVADQQNPTELAEHILRDRLPVRFQVQLHKLLWHDARGK

SEQ ID NO: 31666 - protein, 228 aa, Methylocystaceae bacterium
  misc_feature (1)..(228): tr|A0A395CXB2|A0A395CXB2_9RHIZ 7-carboxy-7-deazaguanine synthase OS=Methylocystaceae bacterium OX=2052174 GN=q ueE PE=3 SV=1
MFGKNPVRTQEAGDGQRLWIQEVFYTLQGEGPFSGQPAVFIRTAGCNLRCFWCDTDFESSEWRPDLSEITATVESLRPAHCDLIVITGGEPMRQNIVPLIRILLSKGYRVQIETNGTLWLDLPEHENLSIICSPKTPTISSDLVERIDAFKYVVLHTNMDSEDGLPSGSTQLADRPSRLFRPPDGATIYVSPCDERGQLEANIKAATESALKHGYRLSLQTHKIIGLP

SEQ ID NO: 31667 - protein, 210 aa, Methylocystaceae bacterium
  misc_feature (1)..(210): tr|A0A395CXL2|A0A395CXL2_9RHIZ 7-carboxy-7-deazaguanine synthase OS=Methylocystaceae bacterium OX=2052174 GN=q ueE PE=3 SV=1
MAYAVKEAFKTLQGEGRQAGRAAVFCRFAGCNLWSGREEDRAAATCRFCDTDFVGTDGENGGKFADAASLAGHIAALWGPEREHRFVVLTGGEPMLQVDAALVDALHAEDFEIAIETNGSSAVLSTIDWICVSPKAGAPLVQTSGDELKLVYPQEGAEPERFEGLAFEHFLLQPMDGPDILRNTRAAIEYCLAHPRWRFSHQTHKTIGVK

SEQ ID NO: 31668 - protein, 210 aa, Methylocystis bryophila
  misc_feature (1)..(210): tr|A0A1W6MRX5|A0A1W6MRX5_9RHIZ 7-carboxy-7-deazaguanine synthase OS=Methylocystis bryophila OX=655015 GN=queE PE=3 SV=1
MPYAVKEAFLTLQGEGLQAGRAAVFCRFAGCNLWSGREKDRGEADCRFCDTDFVGADGEGGGVFRTASGLAAHLAGLWGEARAHRFAVLTGGEPLLQLDLALIAALHEQGFEIAVETNGTFPAPEGLDWICVSPKAGTSLALRQGDELKLVFPQVGAEPERYENLEFREFLLQPMDGPEISRNTKAAIDYCLAHPRWRLSLQTHKIIGVK

SEQ ID NO: 31669 - protein, 210 aa, Methylocystis heyeri
  misc_feature (1)..(210): tr|A0A4S4MIY5|A0A4S4MIY5_9RHIZ 7-carboxy-7-deazaguanine synthase OS=Methylocystis heyeri OX=391905 GN=queE PE= 3 SV=1
MAYAVKEAFYTLQGEGLQAGRPAVFCRFAGCNLWSGREDDRAAAGCRFCDTDFIGVDGENGGKFRTAEELAEMLARLWGPSRDRRFVVLTGGEPMLQTDAPLIDALHRQGFEIAMETNGTLPAPETIDWICVSPKAGAPLAQTRGQELKLVYPQPGAEPELFEGLDFAHFLIQPMDGPEILRNTKAAVDYCLAHPRWRLSVQTHKTIGVK

SEQ ID NO: 31670 - protein, 210 aa, Methylocystis hirsuta
  misc_feature (1)..(210): tr|A0A3M9XK26|A0A3M9XK26_9RHIZ 7-carboxy-7-deazaguanine synthase OS=Methylocystis hirsuta OX=369798 GN=queE PE =3 SV=1
MAYIVKEAFKTLQGEGVNAGRAAVFCRFAGCNLWSGREADRAAAQCRFCDTDFVGFEGEGGGKFADATALAGHLARLWGEGRAQRFAVLTGGEPMLQIDAALVAALHGQGFEIAIETNGTLPVVPEIDWICVSPKAGAPLAQTRGAELKLVFPQQGVDPAAYERLDFTHFLLQPMDGPDVSRNTDAAVSYCLAHPRWRLSLQTHKAIGVK

SEQ ID NO: 31671 - protein, 210 aa, Methylocystis rosea
  misc_feature (1)..(210): tr|A0A3G8M7N4|A0A3G8M7N4_9RHIZ 7-carboxy-7-deazaguanine synthase OS=Methylocystis rosea OX=173366 GN=queE PE=3 SV=1
MAYIVKEAFKTLQGEGVNAGRAAVFCRFAGCNLWSGREEDRAAAQCQFCDTDFVGFAGEGGGKFADASALADHLARLWGEGRERRFAVLTGGEPMLQIDEALVAALHGQGFEIAIETNGTLPVIFGIDWICVSPKGGAPLAQTRGAELKLVYPQQGVDPAAYERLDFAHFLLQPMDGPDVSRNTDAAVSYCLAHPRWRLSVQTHKAIGVK

SEQ ID NO: 31672 - protein, 210 aa, Methylocystis sp.
  misc_feature (1)..(210): tr|A0A2P5NTS7|A0A2P5NTS7_9RHIZ 7-carboxy-7-deazaguanine synthase OS=Methylocystis sp. OX=1911079 GN=queE PE=3 SV=1
MTYAVKEAFKTLQGEGRHMGRAAVFCRFAGCNLWSGREDDREKAVCRFCDTDFVGTDGEGGGKFGAASELAAHLAALWGPGRDGRFTVLTGGEPMLQIDPALVDALHAEGFEIAVETNGTLPATPGLDWICVSPKAGAALVQTSGDELKLIFPQAGAEPGLYEGLDFRHFLLQPMDGPEILRNTRAAVEYCLAHPRWRLSLQTHKMIGVK

SEQ ID NO: 31673 - protein, 210 aa, Methylocystis sp.
  misc_feature (1)..(210): tr|J7QQE4|J7QQE4_METSZ 7-carboxy-7-deazaguanine synthas e OS=Methylocystis sp. (strain SC2) OX=187303 GN=queE P E=3 SV=1
MAYIVKEAFKTLQGEGVNAGRAAVFCRFAGCNLWSGREADRAGAQCQFCDTDFVGFEGEGGGKFPDAAALAGHLAGLWGEGRERRFTVLTGGEPMLQIDEALVAALHGQGFEIAIETNGTLPVLPEIDWICVSPKAGASLVQTRGAELKLVFPQQGVDPAAYERLDFEHFLLQPMDGPDVSRNTDAAVSYCLTHPRWRLSVQTHKAIGVK

SEQ ID NO: 31674 - protein, 213 aa, Methyloglobulus morosus
  misc_feature (1)..(213): tr|V5DZE9|V5DZE9_9GAMM 7-carboxy-7-deazaguanine synthas e OS=Methyloglobulus morosus KoM1 OX=1116472 GN=queE PE =3 SV=1
MNSVRITEIFFSLQGESNTVGIPTVFIRLTGCPLRCGYCDTEYAFTGGQKKSISDIIAEVESFGSRYITVTGGEPLAQPTCLELMTKLLDLGYVVSLETSGALDISGVDSRAVKVMDIKTPSSGELSRNLFSNIRHLNKNDQVKFVIGNDEDYTWSKRILSEYQLADRCEILFSPVMGQQNPTELADKILQDKLPVRFQIQLHKLLWDDARGK

SEQ ID NO: 31675 - protein, 211 aa, Methyloligella halotolerans
  misc_feature (1)..(211): tr|A0A1E2S1Y2|A0A1E2S1Y2_9RHIZ 7-carboxy-7-deazaguanine synthase OS=Methyloligella halotolerans OX=1177755 GN= queE PE=3 SV=1
MTYAVKEIFYTLQGEGVQAGRPAVFCRFAGCNLWSGREEDRGEAVCQFCDTDFVGTDGTGGGKFREAEALAAACKAEWKGNGGTRPFIVLTGGEPMLQVDDALIDALHGVGFEIAIETNGTLPVPRSIDWICVSPKAGAPLQQRSGDELKLVYPQDSLRPEDLWDLDFAHHLLQPMDGPHKAENTHAVIDYCMAHPKWRLSVQSHKILGLR

SEQ ID NO: 31676 - protein, 213 aa, Methylomagnum ishizawai
  misc_feature (1)..(213): tr|A0A1Y6D7P5|A0A1Y6D7P5_9GAMM 7-carboxy-7-deazaguanine synthase OS=Methylomagnum ishizawai OX=1760988 GN=queE PE=3 SV=1
MAALRITEIFRSLQGESRSVGWPTVFVRLTGCPLRCVYCDTAYAFSGGERLELADILERVAGYGVRHVCVTGGEPLAQPACLELLDALVAVGYEVSLETSGALDVAQVNPKVVKVLDLKTPGSGEAARNLYANLDHLDAKDQVKFVIADEADYAWAKAKLAEYRLPERCEVLFSPVAGVQNPTELAGKILRDRLDVRFQLQLHKLLWGDQPGV

SEQ ID NO: 31677 - protein, 213 aa, Methylomicrobium album
  misc_feature (1)..(213): tr|H8GL32|H8GL32_METAL 7-carboxy-7-deazaguanine synthas e OS=Methylomicrobium album BG8 OX=686340 GN=queE PE=3 SV=1
MSSLRITEIFYSLQGESNTVGLPTVFIRLTGCPLRCVYCDTEYAFSGGKKIPIDDILAQVEAYDTPYVTVTGGEPLAQPGCLDLMTRLLDKGYTVSLETSGALDISKVDPRVVKVMDLKTPSSGELDRNLYQNLQFLDRKDQIKFVIGNEEDYAWSKAALNEYQLPERCQILFSPVMGRQDPTDLAEKILADRLPVRFQIQLHKLLWADARGK

SEQ ID NO: 31678 - protein, 213 aa, Methylomicrobium alcaliphilum
  misc_feature (1)..(213): tr|G4ST28|G4ST28_META2 7-carboxy-7-deazaguanine synthas e OS=Methylomicrobium alcaliphilum (strain DSM 19304 / NCIMB 14124 / VKM B-2133 / 20Z) OX=1091494 GN=queE PE=3 SV=1
MSSLKITEIFYSLQGESNTVGLPTVFVRLTGCPLRCVYCDTAYAFSGGERMSIDEIINRVGQYRTKYITVTGGEPLAQSACLELMSRLADLGYQVSIETSGALDVSGVDDRVVKVMDLKTPSSGELHKNLFDNIAYLKANDQVKFVIGDDHDYQWSKAIINQYDLDQRCELLFSPTMGQQDPAELAEKILNDNLPVRFQIQLHKLLWNDAQGR

SEQ ID NO: 31679 - protein, 213 aa, Methylomicrobium buryatense
  misc_feature (1)..(213): tr|A0A4P9UQP7|A0A4P9UQP7_9GAMM 7-carboxy-7-deazaguanine synthase OS=Methylomicrobium buryatense OX=95641 GN=qu eE PE=3 SV=1
MSSLKITEIFYSLQGESNTVGLPTVFIRLTGCPLRCVYCDTAYAFSGGERMAIDEIINRVSQYRTKYITVTGGEPLAQSACLELMSRLADLGYQVSIETSGALDVSGVDDRVVKVMDLKTPSSGELHRNLFDNIAYLKANDQVKFVIGDDHDYQWSKSIIDQYNLDQRCDLLFSPTMGQQDPTELAEKILNDNLPVRFQIQLHKLLWNDAQGR

SEQ ID NO: 31680 - protein, 213 aa, Methylomicrobium kenyense
  misc_feature (1)..(213): tr|A0A543VDS1|A0A543VDS1_9GAMM 7-carboxy-7-deazaguanine synthase OS=Methylomicrobium kenyense OX=269709 GN=que E PE=3 SV=1
MTSLKITEIFYSLQGESNTVGLPTVFIRLTGCPLRCVYCDTAYAFNGGERMSIDEILERTGQYGAKYITVTGGEPLAQPACHELMSRLADEGYRVSIETSGALDVSAIDDRIVKVMDLKTPSSGELHRNLYGNIEYLKAGDQVKFVIGDDCDYQWSKEIIGQYDLDQRCELLFSPTMGRQDPTELAEKILNDRLPVRFQVQLHKLLWNDAQGR

SEQ ID NO: 31681 - protein, 214 aa, Methylomonas denitrificans
  misc_feature (1)..(214): tr|A0A126T6C3|A0A126T6C3_9GAMM 7-carboxy-7-deazaguanine synthase OS=Methylomonas denitrificans OX=1538553 GN=q ueE PE=3 SV=1
MDQTLRITEIFYSLQGEANTVGLPTVFIRLTGCPLRCSYCDTAYAFTGGEKLGIDDILLQVSRYKTRYVTVTGGEPLAQPACNPLMVRLLDAGYQVSLETSGALDVAAVDSRVSKVMDLKTPSSGELERNRYDNIQYLTLHDQVKFVIADAADYQWAKQQLELYRLVEHCEVLFSPVMDVMSPTELAERILTDQLQVRFQIQLHKFLWNDARGK

SEQ ID NO: 31682 - protein, 214 aa, Methylomonas koyamae
  misc_feature (1)..(214): tr|A0A291IFT1|A0A291IFT1_9GAMM 7-carboxy-7-deazaguanine synthase OS=Methylomonas koyamae OX=702114 GN=queE PE= 3 SV=1
MDQQLRITEIFYSLQGETNTVGIPTVFVRLTGCPLRCSYCDTAYAFSGGEKRSIGEIIAEVGRYHTRFVTVTGGEPLAQPGCHPLMTGLLDAGYSVSLETSGALDVAAVDARVVKVVDLKTPSSGEMQRNLYRNLDFLLPHDQVKFVIADAADYEWSKQQLEHYRLAQRCEVLFSPVMGVMPPAALAERILADQLTVRFQIQLHKYLWNDARGK

SEQ ID NO: 31683 - protein, 219 aa, Methylomonas koyamae
  misc_feature (1)..(219): tr|A0A177NCW8|A0A177NCW8_9GAMM 7-carboxy-7-deazaguanine synthase OS=Methylomonas koyamae OX=702114 GN=queE PE= 3 SV=1
MTDELAEPSLRITEIFYSLQGEADSVGWPTVFIRLTGCPLRCAYCDTAYAFSGGEKMPISAILQRVREYSTRYVTVTGGEPLAQPGCLSLLSALADSGYQVSLETSGALDVSGVDARIVKVMDLKTPASGEMARNRYENLDCLTPRDQIKFVIADSADYQWSKQQVNEHRLAERCQVLFSPVMGQMAPSELADRILADQLPVRFQIQLHKFLWDDARGK

SEQ ID NO: 31684 - protein, 214 aa, Methylomonas lenta
  misc_feature (1)..(214): tr|A0A177NJG7|A0A177NJG7_9GAMM 7-carboxy-7-deazaguanine synthase OS=Methylomonas lenta OX=980561 GN=queE PE=3 SV=1
MDASLRISEIFYSLQGESNTVGLPTVFIRLTGCPLRCNYCDTAYAFTGGEKRSLQQILDQVKTYSTSYITVTGGEPLAQPACIDLLLNLLDAGYQVSLETSGALDVSKVDSRVVKVMDLKTPSSQEMQRNLYGNIQYLTAQDQVKFVIANEEDYQWSKQQLSEHDLSGRCQVLFSPVMDVMPAKDLADKILQDQLPVRFQIQLHKYLWNDARGK

SEQ ID NO: 31685 - protein, 214 aa, Methylomonas methanica
  misc_feature (1)..(214): tr|F9ZZV1|F9ZZV1_METMM 7-carboxy-7-deazaguanine synthas e OS=Methylomonas methanica (strain MC09) OX=857087 GN= queE PE=3 SV=1
MDLSLRITEIFYSLQGESSTVGLPTVFIRLTGCPLRCGYCDTAYAFNGGEKQTLPQIMSQVKSYATRYVTVTGGEPLAQPACNALMVELLDAGFQVSLETSGALDVSGVDPRVVKVMDLKTPGSGEMRRNLYNNISFLTAQDQVKFVIADEADYQWSKQQLTEHRLTDRCQVLFSPVMGTMPAVSLADWILADQLPVRFQIQLHKYLWDDARGK

SEQ ID NO: 31686 - protein, 214 aa, Methylomonas methanica
  misc_feature (1)..(214): tr|A0A177LWI6|A0A177LWI6_METMH 7-carboxy-7-deazaguanine synthase OS=Methylomonas methanica OX=421 GN=queE PE=3 SV=1
MDQTLRITEIFYSLQGEANTVGLPTVFIRLTGCPLRCNYCDTAYAFNGGEKLSIDDILQQVGHYKTRYVTVTGGEPLAQPACNSLMVRLLDAGYQVSLETSGALDVAAVDSRVSKVMDLKTPSSGELERNRYDNIQYLTAHDQVKFVIADAADYQWAKQQLELYRLVEHCQVLFSPVMDVMSPTELAERILADQLQVRFQIQLHKFLWNDARGK

SEQ ID NO: 31687 - protein, 219 aa, Methylomonas sp.
  misc_feature (1)..(219): tr|A0A1S1Y0X8|A0A1S1Y0X8_9GAMM 7-carboxy-7-deazaguanine synthase OS=Methylomonas sp. LWB OX=1905845 GN=queE PE =3 SV=1
MTDELAEPSLRITEIFYSLQGEADSVGWPTVFIRLTGCPLRCAYCDTTYAFSGGEKMPISAILQRVREYSTRYVTVTGGEPLAQPGCLSLLSALADSGYQVSLETSGALDVSGVDARIVKVMDLKTPASGEMARNRYENLDCLTPRDQIKFVIADSADYQWSKQQVNEHRLAERCQVLFSPVMGQMAPSELADRILADQLPVRFQIQLHKFLWDDARGK

SEQ ID NO: 31688 - protein, 214 aa, Methylomonas sp.
  misc_feature (1)..(214): tr|A0A172U4Y8|A0A172U4Y8_9GAMM 7-carboxy-7-deazaguanine synthase OS=Methylomonas sp. DH-1 OX=1727196 GN=queE P E=3 SV=1
MDQQLRITEIFYSLQGETNTVGIPTVFVRLTGCPLRCSYCDTAYAFSGGEKRSIGEIIAEVGRYHTRYVTVTGGEPLAQPGCHPLMTGLLDAGYSVSLETSGALDIAAVDARVVKVVDLKTPSSGEMQRNLYCNLDFLLPHDQVKFVIADAADYEWSKQQLEHYRLVQRCEVLFSPVMGVMSPAELAERILADQLTVRFQIQLHKYLWNDARGK

SEQ ID NO: 31689 - protein, 251 aa, Methylomusa anaerophila
  misc_feature (1)..(251): tr|A0A348APR5|A0A348APR5_9FIRM 7-carboxy-7-deazaguanine synthase OS=Methylomusa anaerophila OX=1930071 GN=queE PE=3 SV=1
MTEKHMTGNNTINLVEVFSSIQGEGLYVGCRQLFVRLAGCNLACSYCDTQDSKIMPQQAKFEQFPGKRNFRAVNNPLNIEKLAEHLNCLLRLPHHSVSITGGEPLCQPVAISQLLPLLKAPIYLETNGTLTDNLALILPYIRIISMDIKLPSSTGKSYWQEHSSFLEIAKQREVFVKIVITSATMQSEMEQAVDLIASIDYSIPLVLQPVTPYNGYEAISPDDMLFFQEKALSKLADVRVIPQTHKFIGQM

SEQ ID NO: 31690 - protein, 189 aa, Methylophaga aminisulfidivorans
  misc_feature (1)..(189): tr|F5SXU3|F5SXU3_9GAMM 7-carboxy-7-deazaguanine synthas e OS=Methylophaga aminisulfidivorans MP OX=1026882 GN=q ueE PE=3 SV=1
MFVRLTGCPLRCGYCDTEYAFHGGEKMDLDEIVAKVAAFNPRYVCVTGGEPLAQPNCIPLLTALCDRGYEVSLETSGAMDISKVDKRVSRVMDLKTPGSGEESKNRYENIELLNTHDQLKFVVCHRDDYDWAKQKLQQHQLNERCEVLFSPIHGQLQPAELAEWVVEDNLPVRMQIQMHKYLWGEEKGR

SEQ ID NO: 31691 - protein, 213 aa, Methylophaga frappieri
  misc_feature (1)..(213): tr|I1YIX3|I1YIX3_METFJ 7-carboxy-7-deazaguanine synthas e OS=Methylophaga frappieri (strain ATCC BAA-2434 / DSM 25690 / JAM7) OX=754477 GN=queE PE=3 SV=1
MAQCRVTEIFYSLQGETRTVGLPTVFVRLTGCPLRCGYCDTEYAFYGGQKREISDIVAEVAAYQPRYITVSGGEPLAQSSCRQLLSELCDLGAEVSLETSGAMDISNIDPRVIRVMDLKTPGSGEEKRNRYQNLQLLTTHDQLKFVICHRQDYDWSVETIRTYQLQDRCELLFSPVHSELDPAELAEWIIADNLPVRMQVQLHKYLWQDAQGR

SEQ ID NO: 31692 - protein, 210 aa, Methylophaga lonarensis
  misc_feature (1)..(210): tr|M7P3V2|M7P3V2_9GAMM 7-carboxy-7-deazaguanine synthas e OS=Methylophaga lonarensis MPL OX=1286106 GN=queE PE= 3 SV=1
MSHHGNLYSLQGESRTVGLPTVFVRLTGCPLRCGYCDTEYAFHGGQKMDISDIVAEVAAYQPRYVTVTGGEPLAQSTCLELLTELCDLGLEVSLETSGAMDISKVDSRVSRVMDLKTPGSGEVSKNRYSNIELLNTHDQLKFVICDRSDYEWAVGKINEYDLAQRCELLFSPEHGNLAATDLAEWIIADNLPVRMQIQLHKYLWNDAQGH

SEQ ID NO: 31693 - protein, 213 aa, Methylophaga muralis
  misc_feature (1)..(213): tr|A0A1E3GXE5|A0A1E3GXE5_9GAMM 7-carboxy-7-deazaguanine synthase OS=Methylophaga muralis OX=291169 GN=queE PE= 3 SV=1
MAQCRITEIFYSLQGETRTVGLPTVFVRLTGCPLRCDYCDTAYAFHGGKKMEISDIVAEVKSYNPRYVTVTGGEPLAQSTCRELLTALCDLGVEVSLETSGAMDISDIDPRVVRVVDIKTPASGEVSKNRYSNIDLLNHQDQVKFVICNRDDYDWAREQLAVFNLVSRCEILFSPVHGDLTPTDLAEWIIADNLPVRMQIQLHKYLWNDAQGR

SEQ ID NO: 31694 - protein, 213 aa, Methylophaga nitratireducenticrescens
  misc_feature (1)..(213): tr|I1XEP5|I1XEP5_METNJ 7-carboxy-7-deazaguanine synthas e OS=Methylophaga nitratireducenticrescens OX=754476 GN =queE PE=3 SV=1
MAQCRITEIFYSLQGETRTVGLPTVFVRLTGCPLRCGYCDTAYAFHGGQKMEVSDIVAEVKSYNPRYVTVTGGEPLAQNTCRELLTALCDLDVEVSLETSGAMDIGNIDPRVVRVMDLKTPASGEVSKNLYSNVDQLNHQDQVKFVICNREDYDWAREQLSSLDLIDRCEILFSPVHGDLTPTDLAEWIIADNLPVRMQIQLHKYLWNDAQGR

SEQ ID NO: 31695 - protein, 213 aa, Methylophaga sp.
  misc_feature (1)..(213): tr|A0A1Z7WX91|A0A1Z7WX91_9GAMM 7-carboxy-7-deazaguanine synthase OS=Methylophaga sp. 42_25_T18 OX=1856285 GN=q ueE PE=3 SV=1
MAQCRITEIFYSLQGETRTVGLPTVFVRLTGCPLRCGYCDTAYAFTGGKKMEITDIVEQVSAFNPRYVTVTGGEPLAQQSCHELLAALCDLGVEVSLETSGAIDISTVDPRVVCVMDLKTPKSGEESKNIYANIDKLKSHDQLKFVICDRDDYDWACQKLVEYDLPTRCEILFSPIHGELNPTDLADWIVEDNLAVRMQVQLHKYLWNDEQGR

SEQ ID NO: 31696 - protein, 213 aa, Methylophaga sp.
  misc_feature (1)..(213): tr|A0A2G2ECY3|A0A2G2ECY3_9GAMM 7-carboxy-7-deazaguanine synthase OS=Methylophaga sp. OX=2024840 GN=queE PE=3 S V=1
MAQCRITEIFYSLQGETRTVGLPTVFVRLTGCPLRCGYCDTAYAFHGGQKMEISDIVAEVKSYNPRYVTVTGGEPLAQNTCRELLTALCDLDVEVSLETSGAMDISDIDPRVVRVMDLKTPASGEVSKNRYSNIDLLNHHDQIKFVICNREDYDWAREQLSSLELIDRCEILFSPVHGDLTPTDLAEWIIADNLPVRMQIQLHKYLWNDAQGR

SEQ ID NO: 31697 - protein, 213 aa, Methylophaga sulfidovorans
  misc_feature (1)..(213): tr|A0A1I3Y7L8|A0A1I3Y7L8_9GAMM 7-carboxy-7-deazaguanine synthase OS=Methylophaga sulfidovorans OX=45496 GN=que E PE=3 SV=1
MAQCRITEIFYSLQGESRTVGLPTVFVRLTGCPLRCGYCDTEYAFHGGQKMDIEEIVAKVAAFNPRYVCVTGGEPLAQPNCIPLLTTLCDRGYEVSLETSGAMDISQVDKRVSRVMDLKTPGSGEESKNRYENIELLNAHDQLKFVVCHRDDYDWAKEKLHQHQLNERCEVLFSPIHGQLQPAELAEWVVEDNLPVRMQIQMHKYLWGEEKGR

SEQ ID NO: 31698 - protein, 213 aa, Methylophaga thiooxydans
  misc_feature (1)..(213): tr|C0N2U1|C0N2U1_9GAMM 7-carboxy-7-deazaguanine synthas e OS=Methylophaga thiooxydans DMS010 OX=637616 GN=queE PE=3 SV=1
MAQCRITEIFYSLQGESRTVGLPTVFVRLTGCPLRCGYCDTEYAFYGGQKMDISDIVEQVAAYKPRYVCVTGGEPLAQPNCIPLLTALCDLGVEVSIETSGAMDISKVDPRVIRVMDLKTPGSGEESKNRYENIALLESKDQLKFVICHREDYDWACETLAEYQLSDRCEVLFSPIHGELKPADLADWIVEDNLPVRMQLQLHKYLWGDEQGR

SEQ ID NO: 31699 - protein, 213 aa, Methylophaga thiooxydans
  misc_feature (1)..(213): tr|A0A0A0BGD1|A0A0A0BGD1_9GAMM 7-carboxy-7-deazaguanine synthase OS=Methylophaga thiooxydans OX=392484 GN=queE PE=3 SV=1
MAQCRITEIFYSLQGESRTVGLPTVFVRLTGCPLRCGYCDTEYAFYGGQKMDISDIVEQVAAYKPRYVCVTGGEPLAQPNCIPLLTALCDLGVEVSIETSGAMDISKIDPRVIRVMDLKTPGSGEESKNRYENIALLKSKDQLKFVICHRKDYDWACETLAEYQLSDRCEVLFSPIHGELKPADLADWIVEDNLPVRMQLQLHKYLWGDEQGR

SEQ ID NO: 31700 - protein, 212 aa, Methylophilaceae bacterium
  misc_feature (1)..(212): tr|Y0KJZ5|Y0KJZ5_9PROT 7-carboxy-7-deazaguanine synthas e OS=Methylophilaceae bacterium 11 OX=1101195 GN=queE P E=3 SV=1
MALKIYEIFHSLQGETSRIGLPTVFVRLTGCPMRCTYCDTAYAFNGGSNMEIADIMQQVASYGAHYVTVTGGEPLAQKECRDLLQALCDAGYSVSIETGGAMDISVVDPRVSVILDIKTPASNESENNRWGNLAYLKAADEVKFVLCNRADYDWAKQKVQELKLNEKCPILFSPSYHELAATELAGWVLEDHLPVRMQVQLHKVLWGEKPGV

SEQ ID NO: 31701 - protein, 213 aa, Methylophilaceae bacterium
  misc_feature (1)..(213): tr|A0A4P5TXR2|A0A4P5TXR2_9PROT 7-carboxy-7-deazaguanine synthase OS=Methylophilaceae bacterium OX=2030816 GN=q ueE PE=3 SV=1
MTQLKIFEIFYSLQGESSRVGLPTIFIRLSGCPMRCHYCDTAYAFQGGSMMSIDVIMRSIQKYDTRYVTVTGGEPLAQKEVLSLLKVLADANYEVSLETGGGLSIQEVDSRIKIILDIKTPDSGEEKKNHWDNLNTINAKDEIKFVLCSREDYEWAKKIINQYQITQKCSVLFSPVYQTLQATDLGNWILEDQLPVRMQIQLHKLLWGEKQGV

SEQ ID NO: 31702 - protein, 212 aa, Methylophilales bacterium
  misc_feature (1)..(212): tr|A0A0H4J1N9|A0A0H4J1N9_9PROT 7-carboxy-7-deazaguanine synthase OS=Methylophilales bacterium MBRS-H7 OX=16234 50 GN=queE PE=3 SV=1
MSTLRINEIFYSIQGESSRIGMPTVFVRLTGCPMRCTYCDTAYAFHEGQQQEIEEVIQEIKKFDTNYVTVTGGEPLAQKNCIDLMNQLCELGYQVSLETGGALDIKDVHAKVKIILDVKTPKSNEDKNNFWPNLANIRANDEIKFVIQDYEDFSWSIDIIEKYQLNQSQILFSPVHNVLANKQLAEWILKHQLNVRLQLQLHKILWGEKKGV

SEQ ID NO: 31703 - protein, 216 aa, Methylophilales bacterium
  misc_feature (1)..(216): tr|A0P5E2|A0P5E2_9PROT 7-carboxy-7-deazaguanine synthas e OS=Methylophilales bacterium HTCC2181 OX=383631 GN=qu eE PE=3 SV=1
MVKSQTLKINEIFYSLQGESSRIGLPTIFIRLTGCPMRCNYCDTAYAFHEGKNLSIDAIIEEIKQYDTNFITVTGGEPLAQRNCYSLLDQLCSLGYNVSLETGGALSINEVHENVKIILDIKTPGSGESENNHWDNLPLIKQKDEIKMVITNQEDYEWSKNIIQEKGLYLNYDILFSPSFGQLEPSQLADWILQDNLKVRMQVQLHKIVWGEKKGV

SEQ ID NO: 31704 - protein, 213 aa, Methylophilus medardicus
  misc_feature (1)..(213): tr|A0A5B8CUQ0|A0A5B8CUQ0_9PROT 7-carboxy-7-deazaguanine synthase OS=Methylophilus medardicus OX=2588534 GN=que E PE=3 SV=1
MTSLRIFEIFYSLQGESSRVGLPTIFIRLVGCPLRCGYCDTEYAFKGGSVMPLEQIMAQIAVYDTPYVCVTGGEPLAQKACIELLTKLADTGYQVSLETSGAIDIAAVDKRVKVVMDIKTPGSGEVEKNRWENLPLLKAGDEVKWVICSREDYDWAKQVLQKETFPAGCDQLFSPSFHDVSGDTLASWILQDHLKVRMQLQLHKILWGEKQGV

SEQ ID NO: 31705 - protein, 213 aa, Methylophilus rhizosphaerae
  misc_feature (1)..(213): tr|A0A1G9CK80|A0A1G9CK80_9PROT 7-carboxy-7-deazaguanine synthase OS=Methylophilus rhizosphaerae OX=492660 GN=q ueE PE=3 SV=1
MTTLRIFEIFYSLQGESSRVGLPTIFIRLTGCPLRCVYCDTEYAFKGGGNMTLDEIMQQIATYGTRYVCVTGGEPLAQKGCSELLTRLCEQGYQVSLETSGAMDLTPVDARVKVIMDVKTPGSGEVEKNRWENLPLLKAGDEVKWVVCSREDYDWAKQMMAERAFPMNCDHLFSPSFHEVSGETLASWILEDHLQVRMQLQLHKILWGEKQGV

SEQ ID NO: 31706 - protein, 213 aa, Methylophilus sp.
  misc_feature (1)..(213): tr|A0A2S5NAY8|A0A2S5NAY8_9PROT 7-carboxy-7-deazaguanine synthase OS=Methylophilus sp. OX=29541 GN=queE PE=3 SV =1
MTTLRIFEIFYSLQGESSRVGLPTIFIRLTGCPLRCGYCDTEYAFKGGSNMTLDEIMQQIAAYDTRYVCVTGGEPLAQKPCIELLTRLSDAGYQVSLETSGAMDIADVDSRVKIIMDIKTPGSGEVEKNRWENLPLLKAGDEVKWVVCSRDDYDWAKRMLQTHPFPAHCDQLFSPSFHDVSGETLASWILQDHLKVRMQLQLHKILWGEKQGV

SEQ ID NO: 31707 - protein, 213 aa, Methylophilus sp.
  misc_feature (1)..(213): tr|A0A0Q6BA29|A0A0Q6BA29_9PROT 7-carboxy-7-deazaguanine synthase OS=Methylophilus sp. Leaf416 OX=1736373 GN=qu eE PE=3 SV=1
MTTLRIFEIFYSLQGESSRVGLPTVFIRLTGCPLRCAYCDTEYAFKGGSNMTLDEIMQQVEQYGTRYVCVTGGEPLAQKGCADLLTRLCDAGYRVSLETSGAMDLTPVDQRVKVIMDVKTPGSGEMLKNRWENLPLLKAGDEVKWVICSREDYDWTRQMMAEQPFPADCDHLFSPSFNQVSGETLAGWILQDQLHVRMQLQLHKILWGEKQGV

SEQ ID NO: 31708 - protein, 210 aa, Methylopila sp.
  misc_feature (1)..(210): tr|A0A2H6BFX2|A0A2H6BFX2_9RHIZ 7-carboxy-7-deazaguanine synthase OS=Methylopila sp. Yamaguchi OX=1437817 GN=qu eE PE=3 SV=1
MTYSVKEIFKTLQGEGAQAGRTSVFCRFAGCNLWTGREADRARAVCQFCDTDFIGTDGEGGGKFADADALADAIASAWGSASGPRYVVFTGGEPLLQLDAALTAACRARGFECAVETNGTQARPAGVDWLCVSPKAGAPLALDGGDELKLVYPQAGVDPEAFLGLEFRHFFLQPMDGPEGPANVQAAIAYCLAHPRWRLSLQTHKMIGIP

SEQ ID NO: 31709 - protein, 215 aa, Methyloprofundus sedimenti
  misc_feature (1)..(215): tr|A0A1V8M903|A0A1V8M903_9GAMM 7-carboxy-7-deazaguanine synthase OS=Methyloprofundus sedimenti OX=1420851 GN=q ueE PE=3 SV=1
MKSDDLRISEIFYSLQGESRSVGIPTVFIRLTGCPLRCQYCDTSYAFSGGEMRSLASIIDQVAQYNTRYITVTGGEPLAQRGCLELLKQLADKNYSVSLETSGAIDVSSVDVRIDKVMDLKTPASAEEHRNRYNNLQYLNSKDQIKFVICNAEDYAWSKAKMAEHELTQKCEILFSPSLGQQDPTELAEWILADQLPVRFQVQLHKFLWGDVAGK

SEQ ID NO: 31710 - protein, 212 aa, Methylorubrum extorquens
  misc_feature (1)..(212): tr|A9W217|A9W217_METEP 7-carboxy-7-deazaguanine synthas e OS=Methylorubrum extorquens (strain PA1) OX=419610 GN =queE PE=3 SV=1
MSYAVKELFHTLQGEGAQAGRAAVFCRFSGCNLWSGREEDRAGAACRFCDTDFVGMDGEGGGRFASAEILADAIAATWAGGTSNRYVVFTGGEPLLQLDEALIAAVHARGFEVAVETNGTLPAPPGIDWICVSPKAGNPLVQTSGDELKLVFPQAEAEAAPERFSDLPFRHHFLQPMDGPDAAAHTAAAVAYCRSNARWRLSLQTHKIIGIP

SEQ ID NO: 31711 - protein, 212 aa, Methylorubrum extorquens
  misc_feature (1)..(212): tr|B7KR58|B7KR58_METC4 7-carboxy-7-deazaguanine synthas e OS=Methylorubrum extorquens (strain CM4 / NCIMB 13688 ) OX=440085 GN=queE PE=3 SV=1
MSYAVKELFHTLQGEGAQAGRAAVFCRFSGCNLWSGREEDRAGAACRFCDTDFVGMDGEGGGRFASAEILADAIAATWAGGTANRYVVFTGGEPLLQLDEALIAAVHARGFEVAVETNGTLPAPPGIDWICVSPKAGNPLVQTSGDELKLVFPQAEAEAAPERFSDLPFRHHFLQPMDGPDAAAHTAAAVAYCRSNARWRLSLQTHKIIGIP

SEQ ID NO: 31712 - protein, 210 aa, Methylorubrum populi
  misc_feature (1)..(210): tr|B1ZBZ0|B1ZBZ0_METPB 7-carboxy-7-deazaguanine synthas e OS=Methylorubrum populi (strain ATCC BAA-705 / NCIMB 13946 / BJ001) OX=441620 GN=queE PE=3 SV=1
MSYAVKELFHTLQGEGAQAGRAAVFCRFAGCNLWSGREEDRAEAACRFCDTDFIGMDGEGGGRFSDAEALAEAIAATWGGGKANRYVVFTGGEPLLQLDEALIAAVHARGFEVAVETNGTLPAPPGIDWICVSPKAGNPLAQTSGDELKLVFPQAEALPERFADLPFRHHFLQPMDGPEAAANTAAAVAYCRSDARWRLSLQTHKIIGIP

SEQ ID NO: 31713 - protein, 210 aa, Methylorubrum populi; identical to SEQ ID NO: 31712
  misc_feature (1)..(210): tr|A0A177J9S5|A0A177J9S5_9RHIZ 7-carboxy-7-deazaguanine synthase OS=Methylorubrum populi OX=223967 GN=queE PE= 3 SV=1

SEQ ID NO: 31714 - protein, 225 aa, Methylorubrum salsuginis
  misc_feature (1)..(225): tr|A0A1I3ZUF1|A0A1I3ZUF1_9RHIZ 7-carboxy-7-deazaguanine synthase OS=Methylorubrum salsuginis OX=414703 GN=queE PE=3 SV=1
MRACMGRASSSAIFAMSYAVKELFHTLQGEGAQAGRAAVFCRFAGCNLWSGREEDRAGAACTFCDTDFIGMDGEGGGRFADAAALAEAIAATWGGGASNRYVVFTGGEPLLQLDAALIEAVHARGFEVAVETNGTLPAPPGIDWICVSPKAGNPLAQTSGHELKLVFPQAEAPPERFAELAFRHRFLQPMDGPDAAANTAAAVAYCRSDARWRLSLQTHKIIGIP

SEQ ID NO: 31715 - protein, 212 aa, Methylorubrum sp.
  misc_feature (1)..(212): tr|A0A4Z0E7Y1|A0A4Z0E7Y1_9RHIZ 7-carboxy-7-deazaguanine synthase OS=Methylorubrum sp. Q1 OX=2562453 GN=queE PE =3 SV=1
MSYAVKELFHTLQGEGAQAGRAAVFCRFSGCNLWSGREADRAGAACRFCDTDFVGMDGEGGGRFASAEILADAVAATWAGGAANRYVVFTGGEPLLQLDEALIAAVHARGFEVAVETNGTLPAPPGIDWICVSPKAGNPLVQTSGDELKLVFPQAEAEAAPERFSDLPFRHHFLQPMDGPEAAAHTAAAVAYCRSNARWRLSLQTHKIIGIP

SEQ ID NO: 31716 - protein, 210 aa, Methylosinus sp.
  misc_feature (1)..(210): tr|A0A177PMD1|A0A177PMD1_9RHIZ 7-carboxy-7-deazaguanine synthase OS=Methylosinus sp. R-45379 OX=980563 GN=queE PE=3 SV=1
MAYAVKEAFKTLQGEGRHSGRAAVFCRFAGCNLWSGREADRNAADCRFCDTDFVGVDGENGGKFVDAEALAAHLASLWGENRERRFVVLTGGEPMLQIDPALLDALHAEGFEIAIETNGTIPVPPAVDWICVSPKAGAPLVQTRGDELKLVYPQKGAEPELFEGLAFDHFLLQPMDGPESLRNTKAAIDYCLAHPRWRFSHQTHKAIGVK

SEQ ID NO: 31717 - protein, 210 aa, Methylosinus sp.
  misc_feature (1)..(210): tr|A0A1A6FG19|A0A1A6FG19_9RHIZ 7-carboxy-7-deazaguanine synthase OS=Methylosinus sp. 3S-1 OX=1849840 GN=queE P E=3 SV=1
MAYAVKEAFKTLQGEGRHVGRAAVFCRFAGCNLWSGREIDRAEAVCRFCDTDFVGTNGEGGGRFETAAALAAHLAGLWGGERERRFVVLTGGEPMLQIDAALVDALHDAGFEIAIETNGTRAAPSEIDWICVSPKAGAPLVQSSGDELKLVYPQPGAEPELFEGLAFDHFLLQPMDGPEAAQNTRAAVDYCLAHPRWRFSLQTHKTIGVR

SEQ ID NO: 31718 - protein, 210 aa, Methylosinus sporium
  misc_feature (1)..(210): tr|A0A549SDC1|A0A549SDC1_METSR 7-carboxy-7-deazaguanine synthase OS=Methylosinus sporium OX=428 GN=queE PE=3 S V=1
MAYAVKEAFKTLQGEGRHSGRAAVFCRFAGCNLWSGREADRDAADCRFCDTDFVGVDGESGGKFAEAPALAAHLARLWGENRERRFVVLTGGEPLLQIDAALLDALHAEGFEIAVETNGTIPVPPAVDWICVSPKAGAPLVQTRGDELKLVYPQKGAEPELFEGLAFDHFLLQAMDGPDILRHTKAAIDYCLAHPRWRFSHQTHKAIGVK

SEQ ID NO: 31719 - protein, 210 aa, Methylosinus sporium
  misc_feature (1)..(210): tr|A0A2U1STF5|A0A2U1STF5_METSR 7-carboxy-7-deazaguanine synthase OS=Methylosinus sporium OX=428 GN=queE PE=3 S V=1
MAYAVKEAFKTLQGEGRHSGRAAVFCRFAGCNLWSGREADRDAADCRFCDTDFVGVDGESGGKFAEAPALAAHLARLWGENRERRFVVLTGGEPLLQIDAALLDALHAEGFEIAVETNGTIPVPPAVDWICVSPKAGAPLVQTRGDELKLVYPQKGAEPELFEGLAFDHFLLQAMDGPDILRNTKAAIDYCLAHPRWRFSHQTHKAIGVK

SEQ ID NO: 31720 - protein, 210 aa, Methylosinus trichosporium; identical to SEQ ID NO: 31717
  misc_feature (1)..(210): tr|A0A2D2D3T3|A0A2D2D3T3_METTR 7-carboxy-7-deazaguanine synthase OS=Methylosinus trichosporium OB3b OX=595536 GN=queE PE=3 SV=1

SEQ ID NO: 31721 - protein, 212 aa, Methylotenera mobilis
  misc_feature (1)..(212): tr|C6WZ30|C6WZ30_METML 7-carboxy-7-deazaguanine synthas e OS=Methylotenera mobilis (strain JLW8 / ATCC BAA-1282 / DSM 17540) OX=583345 GN=queE PE=3 SV=1
MKLKIHEIFYSLQGESSRVGLPTVFVRLTGCPMRCVYCDTAYAFSGGSNMEVEDIITKVAEYATPYVTVTGGEPLAQKDCHVLLKALCDQGYSVSLETGGAIDIAPVDPRVSVILDVKTPDSGELKNNLWGNLAHLKKADEVKFVLCSRADYEWAKDFLAKEQLTAKCSVLFSPVYSQLAPADLADWVLADKLPVRMQLQLHKILWGEVPGK

SEQ ID NO: 31722 - protein, 119 aa, Methylotenera mobilis
  misc_feature (1)..(119): tr|A0A351RB46|A0A351RB46_9PROT 7-carboxy-7-deazaguanine synthase QueE (Fragment) OS=Methylotenera mobilis OX=3 59408 GN=DCW48_06690 PE=4 SV=1
SVSLETGGAIDIGPVDARVSVILDIKTPDSGELKNNLWANLTHLKKTDEVKFVLCSRADYDWAKDLLVKERLTDKCPVLFSPVYSQLMPSDLADWVLADKLPVRMQLQLHKILWGEVPG

SEQ ID NO: 31723 - protein, 212 aa, Methylotenera sp.; identical to SEQ ID NO: 31545
  misc_feature (1)..(212): tr|A0A258XJF8|A0A258XJF8_9PROT 7-carboxy-7-deazaguanine synthase OS=Methylotenera sp. 24-45-7 OX=1970397 GN=qu eE PE=3 SV=1

SEQ ID NO: 31724 - protein, 212 aa, Methylotenera sp.
  misc_feature (1)..(212): tr|A0A2S5NTE2|A0A2S5NTE2_9PROT 7-carboxy-7-deazaguanine synthase OS=Methylotenera sp. OX=2051956 GN=queE PE=3 SV=1
MALKIYEIFYSLQGETSRFGLPTVFIRLTGCPMRCTYCDTEYAFSGGNNMEIADILSKTAEFGTRYVTVTGGEPLAQKQSLTLLKALCDEGYNVSLETGGAMDIAPVDTRVSIILDIKTPASNEEKNMLWANLAHIKSSDEIKFVLCNRADYDWAKAKLSALKLTEKCPILFSPSYHELKAEELASWVLQDKLPVRMQIQLHKILWGEKQGV

SEQ ID NO: 31725 - protein, 212 aa, Methylotenera versatilis
  misc_feature (1)..(212): tr|D7DMT8|D7DMT8_METV0 7-carboxy-7-deazaguanine synthas e OS=Methylotenera versatilis (strain 301) OX=666681 GN =queE PE=3 SV=1
MKLKVHEIFYSIQGESSRVGLPTVFVRLTGCPMRCVYCDTAYAFSGGSNIEIADILAKVAEFGTKYVTVTGGEPLAQKDCHFLLKDLCDAGYSVSLETGGAIDISPVDKRVSVILDVKTPDSGELKNNVWSNLDHLKSSDEVKFVLCSREDYQWARDLLSTHKIAEKCPVLFSPVYSQVSPTDLAEWVLADKLPVRMQVQLHKILWGEKPGV

SEQ ID NO: 31726 - protein, 212 aa, Methylothermaceae bacteria
  misc_feature (1)..(212): tr|A0A148N747|A0A148N747_9GAMM 7-carboxy-7-deazaguanine synthase OS=Methylothermaceae bacteria B42 OX=1798802 GN=queE PE=3 SV=1
MSLKVTEIFLSLQGESRTLGLPTVFVRLTGCPLRCRWCDTAYAFHGGQRMALEDIVKAVEAFGVSHVTVTGGEPLAQPDCLSLLTVLADRGFAVSLETSGALDVSEVDTRVVKVVDLKPPGSGELEKNRYENLDYLSENDQVKFVISDREDYLWSKEMLDQYQLPTRCEILFSPVAGEQNPRQLAEWILEDRLPVRFQLQLHKLLWGDEPGR

SEQ ID NO: 31727 - protein, 236 aa, Methyloversatilis sp.
  misc_feature (1)..(236): tr|A0A1B3LL78|A0A1B3LL78_9PROT 7-carboxy-7-deazaguanine synthase OS=Methyloversatilis sp. RAC08 OX=1842540 GN= queE PE=3 SV=1
MNEGSNLEFGVGNPYPSAFTAATALAVTYQVKEIFYTLQGEGLNAGRAAVFCRFAGCNLWSGREADRASAQCRFCDTDFVGTDGTLGGRHEQADTLADAIAGCWAGAGGRRLVVLTGGEPLLQIDAALIDALHARDFEIAVETNGTLAAPDGIDWICVSPKAGNEVVQRHGHELKVVVPQPGLDLAAMESWDFRHFLVQPMDNAQAVDNRRWAIDWCMRHPRWRLSHQTHKALGIR

SEQ ID NO: 31728 - protein, 209 aa, Methyloversatilis universalis
  misc_feature (1)..(209): tr|F5RFB9|F5RFB9_METUF 7-carboxy-7-deazaguanine synthas e OS=Methyloversatilis universalis (strain ATCC BAA-131 4 / JCM 13912 / FAM5) OX=1000565 GN=queE PE=3 SV=1
MAYQVKEIFYTLQGEGLNAGRAAVFCRFAGCNLWSGREQDRASAQCRFCDTDFVGTDGTLGGRYDADALADTVAASWAGEGGARFVVLTGGEPLLQVDAPLIDALHARGFEIAVETNGTLPAPPGLDWVCVSPKAGNPVVQTRGQELKVVVPQAGLDLTAMEAWDFEHFLVQPMDNAASADNTRWAIEWCMQHPRWRLSFQTHKAVGIR

SEQ ID NO: 31729 - protein, 210 aa, Methylovirgula ligni
  misc_feature (1)..(210): tr|A0A3D9YWA6|A0A3D9YWA6_9RHIZ 7-carboxy-7-deazaguanine synthase OS=Methylovirgula ligni OX=569860 GN=queE PE= 3 SV=1
MTYSVKEIYHTLQGEGAQAGRAAVFCRFAGCNLWSGREADRAAAQCDFCDTDFIGTDGPGGGKFAGPGELAEAIAAQWQGETAQALVVFTGGEPLLQLDAALLAALHAKGFSCAVETNGTLAPPEGLDWICVSPKAGTPLVLTSGDELKLVFPQAGQNPESFSGLAFRHFFLQPMDGPAQAANTAQAAAYCLAHPRWRLSLQTHKLIGLP

SEQ ID NO: 31730 - protein, 210 aa, Methylovirgula sp.
  misc_feature (1)..(210): tr|A0A371WTQ2|A0A371WTQ2_9RHIZ 7-carboxy-7-deazaguanine synthase OS=Methylovirgula sp. 4M-Z18 OX=2293567 GN=qu eE PE=3 SV=1
MSYAVKEIFLTLQGEGAHVGRPAVFCRFAGCNLWSGREEDRASAQCTFCDTDFVGMDGTKGARYADAEALAAAIAEEWTAGRAERFCVLTGGEPLLQVDAALIDALHRKGFEIAVETNGTVEPPRGLDWLCVSPKAADPLKIRSGHELKLVYPQPEAMPERFEDLAFQRFSLQPMDGPDVEENTAKAIAYCLAHPQWRLSVQTHKRIGIR

SEQ ID NO: 31731 - protein, 212 aa, Methylovorus glucosetrophus
  misc_feature (1)..(212): tr|C6XA92|C6XA92_METGS 7-carboxy-7-deazaguanine synthas e OS=Methylovorus glucosetrophus (strain SIP3-4) OX=582 744 GN=queE PE=3 SV=1
MKLRIHEIFHSLQGESSRVGLPTVFVRLTGCPMRCVYCDTAYAFHGGSSMEIDDIMQKVAEYGAHYVTVTGGEPLAQRDCHVLLTRLCDAGYSVSLETGGAMDIANVDPRVSVILDIKTPGSGELEKNLWGNLAHLKAQDEVKFVLCDHADYLWAKELLDKQPLHRTCSVLFSPVYSQVNPTELAEWILADKLPVRMQVQLHKILWGERPGV

SEQ ID NO: 31732 - protein, 213 aa, Methylovorus sp.
  misc_feature (1)..(213): tr|A0A1A9T2M9|A0A1A9T2M9_9PROT 7-carboxy-7-deazaguanine synthase OS=Methylovorus sp. MM2 OX=1848038 GN=queE PE =3 SV=1
MTLRIHEIFHSLQGESSRVGLPTVFVRLTGCPMRCVYCDTAYAFKGGSNMSLDDIMVEVESHGTKYVTVTGGEPLAQKEQCLNLLKRLCDAGYSVSLETGGAIDTMGVDARVSVILDIKTPDSGELKNNHWDNLQHLKPIDEIKFVLCSREDYDWAKQLLAEQALHEKCQVIFSPVFSQVNPTDLADWVLQDKLPVRMQVQLHKILWGETPGK

SEQ ID NO: 31733 - protein, 214 aa, Methylovulum psychrotolerans
  misc_feature (1)..(214): tr|A0A2S5CQY1|A0A2S5CQY1_9GAMM 7-carboxy-7-deazaguanine synthase OS=Methylovulum psychrotolerans OX=1704499 GN =queE PE=3 SV=1
MDTTLRITEIFHSLQGEANTVGLPTVFVRLTGCPLRCVYCDTAYAFTGGQKTTLSTILAQVAAYQCRHVTVTGGEPLAQPACLDLLRHLADQGYHVSLETSGALDVSGVDPRIVKVMDLKTPSSGELDKNLYSNIAHLTPQDQVKFVIGDDGDYQWSKAIMAEHALAERCQLLFSPIAGQQNPTELAEKILRDRLPVRFQIQLHKLLWNDAQGK

SEQ ID NO: 31734 - protein, 215 aa, Methylovulum psychrotolerans
  misc_feature (1)..(215): tr|A0A1Z4BVB5|A0A1Z4BVB5_9GAMM 7-carboxy-7-deazaguanine synthase OS=Methylovulum psychrotolerans OX=1704499 GN =queE PE=3 SV=1
MVDTTLRITEIFHSLQGEANTVGLPTVFVRLTGCPLRCVYCDTAYAFTGGQKTTLSTILEQVAAYQCRHVTVTGGEPLAQPACLDLLRHLADQGYHVSLETSGALDVSGVDPRIVKVMDLKTPSSGELDKNLYSNIAHLTPQDQVKFVIGDDGDYQWSKAIMAEHALADRCQLLFSPIAGQQNPTELAEKILRDRLPVRFQIQLHKLLWNDAQGK

SEQ ID NO: 31735 - protein, 214 aa, Methylovulum sp.
  misc_feature (1)..(214): tr|A0A522DIV4|A0A522DIV4_9GAMM 7-carboxy-7-deazaguanine synthase OS=Methylovulum sp. OX=1916980 GN=queE PE=3 S V=1
MLDSLRITEIFYSLQGESNTVGLPTVFIRLTGCPLRCVYCDTVYAFTGGKKARLDTIIREVRQYGCQYVTVTGGEPLAQPACLELMTQLLDDGYIVSLETSGAIDIAEVDPRVIKVMDLKTPSSGELSKNHYENIRYLNPKDQVKFVIGSAEDYEWSKAALTEYKLADRCEILFSPVMGQQNPTELAEKILQDRLPVRFQIQLHKLLWDDAQGK

SEQ ID NO: 31736 - protein, 239 aa, Micavibrio sp.
  misc_feature (1)..(239): tr|A0A1Z8PXK9|A0A1Z8PXK9_9PROT 7-carboxy-7-deazaguanine synthase OS=Micavibrio sp. TMED27 OX=1986607 GN=queE P E=3 SV=1
MSENIRISEIFGPTIQGEGALIGRPTVFVRTGGCDYRCSWCDTLHAVDSEYRDEWTAMSAKDIMSKVEDLSGGKPLTITLSGGNPAIQPFDTLIQLGHEKGYEFAMETQGSVSKDWFSKLDVLILSPKPPSSGMDTDWIDFYQCLKKAGFEKSNGPDILLKFVIFDKEDYLYAKDASSRYPYLPVFLQPGNHQVDGDADQEGLMQKMRWLIDLTVKDQWYEVTILPQLHVMIWGNEKGV

SEQ ID NO: 31737 - protein, 234 aa, Micavibrio sp.
  misc_feature (1)..(234): tr|A0A2D5Y354|A0A2D5Y354_9PROT 7-carboxy-7-deazaguanine synthase OS=Micavibrio sp. OX=2024841 GN=queE PE=3 SV= 1
MSDLIRISEIFGPTIQGEGALIGQPTVFVRTGGCDYRCSWCDTLYAVESKYRKDWVAMRAEEIFAQVEALSNGMPLMITLSGGNPAIQPMQGLLDLGHGRGYKFCMETQGSLAQDWFCDIDVLTLSPKPPSSGMDTDWDVFDACVAAGKGAQIVLKIVVFDAGDYEYARNAAAKYPDLPAYIQPGNHRADGDFDDEAVMARMRWLVETANNDNWYDVTILPQLHTLLWGNQRGV

SEQ ID NO: 31738 - protein, 246 aa, Microbacterium laevaniformans
  misc_feature (1)..(246): tr|A0A150HHY1|A0A150HHY1_9MICO 7-carboxy-7-deazaguanine synthase OS=Microbacterium laevaniformans OX=36807 GN= queE PE=4 SV=1
MVRTAAACELNIAGVTPFSTVDWPDMMTATVFLQGCPWSCFYCHNPALIDPRAEGAVSWADVTDLLCDRMGLLDGVVFSGGEPTLQHALVPAMQMVRSLGFRVGLHTAGAYPGLLAQALPFVDWVGLDIKATPDDYANVTGRAPSGAHAWRSLELVLGNRLLRAGSDHPLDYEVRTTVHPAAIDDAALRELGCRLADAGVDTWAVQRFRETGARQPLPRVSTTDAEAAPLRLDDLPVERFRSLVIR

SEQ ID NO: 31739 - protein, 234 aa, Microbacterium sp.
  misc_feature (1)..(234): tr|A0A2E9NFG3|A0A2E9NFG3_9MICO 7-carboxy-7-deazaguanine synthase OS=Microbacterium sp. OX=51671 GN=queE PE=3 S V=1
MSDLLPISEIFGPTLQGEGPYIGRRATFIRFGGCNLSCDWCDTGYTWDSTRFDLRESITARSVQSIVDDISTRDGLVVITGGEPMLYAHRPAFILLLGELKSAGRELHVESNGTIFPPEEVLSKLDVVVLSPKLSNAGSHQERTAAMATAWGDYQNAHEVHLKFVCVDESDVASAAAVARAHEWDRSRVWVMPEGTDSGTIVDRSKRIAEAALQQQLQMTTRLHILAWGDTRGK

SEQ ID NO: 31740 - protein, 240 aa, Microbacterium sp.
  misc_feature (1)..(240): tr|A0A542GTZ6|A0A542GTZ6_9BACI 7-carboxy-7-deazaguanine synthase OS=Microbacterium sp. SLBN-1 OX=1489561 GN=qu eE PE=3 SV=1
MRKIPVLEVFGPTIQGEGMVIGQKTMFVRTAGCDYSCAWCDSAFTWDGSAKDDIRLMAATEVWDKLKEIGGDRFSHVTISGGNPALLPQIGDLLEILKANGIGSALETQGSRWQDWFYDINDLTISPKPPSSTMETDYDRLDLIVSRLKENGSNFSLKVVVFDETDLEYAKGIHMRYEGVPFYIQTGNPEVSMEDTPRLVSNLLLDYERLIDVVCEQKELNDVRVLPQLHTLVWGNKRGV

SEQ ID NO: 31741 - protein, 212 aa, Microbispora rosea
  misc_feature (1)..(212): tr|A0A1N7HHK7|A0A1N7HHK7_9ACTN 7-carboxy-7-deazaguanine synthase OS=Microbispora rosea OX=58117 GN=queE PE=3 S V=1
MYRVKEIFYTLQGEGSHAGRPSVFCRFTSCNLWTGREKDRHRAICKFCDTDFVGTDGPGGGRFQTAADLAAAVAKTWQGRAHPRSRPYVVCTGGEPLLQLDAEAVDALHAEGFEIAIETNGTRSAPDGIDWICVSPKAGADLVLKTGHDLKLVYPQVGAGPERYEDLDFDRFMLQPMDGPDLAANTQAAIAYCLEHPQWHLSIQTHKTLGIR

SEQ ID NO: 31742 - protein, 212 aa, Microbispora triticiradicis
  misc_feature (1)..(212): tr|A0A372PCP9|A0A372PCP9_9ACTN 7-carboxy-7-deazaguanine synthase OS=Microbispora triticiradicis OX=2200763 GN= queE PE=3 SV=1
MYRVKEIFYTLQGEGSHVGRPSVFCRFTSCNLWTGREADRHRAICRFCDTDFVGTDGPGGGRFATAEDLASAVAKTWQGRPHPRSKPYVVCTGGEPLLQLDQAAVDAFHSKGFEVAIETNGTRPAPAGVDWICVSPKAGTNLILTKGDDLKLVFPQPMAEPKRFEHLAFTRFLLQPMDGPDLAVNTRAAIEYCLEHPQWELSVQTHKNLGIR

SEQ ID NO: 31743 - protein, 244 aa, Microbispora triticiradicis
  misc_feature (1)..(244): tr|A0A372PDL7|A0A372PDL7_9ACTN 7-carboxy-7-deazaguanine synthase OS=Microbispora triticiradicis OX=2200763 GN= queE PE=3 SV=1
MSEQSTAAISVRETGLIVAELFGPTFQGEGPSLGTRATFLRLSRCNLTCSGRMPCDTPYTWDIVRYDLRNESSRRSATEVGDELLLLNTPLVVITGGEPLIQQRQLVPLVRRLVEAGRRVEFETNGTFAPLSEILLDGVRFNVSPKLSNAGMPESMRIVPEALTALAESGRSAFKFVATDRSDLDEIEDLVQRYRLTPVYVMPEGTTPDAVISRARELADDVIARGWSMTQRLHVLLWGDKRGR

SEQ ID NO: 31744 - protein, 221 aa, Microbulbifer agarilyticus
  misc_feature (1)..(221): tr|A0A1Q2MAL7|A0A1Q2MAL7_9GAMM 7-carboxy-7-deazaguanine synthase OS=Microbulbifer agarilyticus OX=260552 GN=qu eE PE=3 SV=1
MGAVSLTEESLRISELFYSLQGEARDAGLPTVFVRLTGCPLRCTYCDSEYAFYGGERMSLAAILQKVQSYPARHVCVTGGEPLAQPNCIPLLRALCDAGYQVSLETSGAMPVDAVDARVSRVVDLKTPASGEQARNRMENIPLLTEKDQVKFVICDRGDYDWARFTLDQYRLSERVGEVLFSPSYEQLAPRQLAEWILEDGLPVRMQMQLHKLLWGDIPGV

SEQ ID NO: 31745 - protein, 219 aa, Microbulbifer aggregans
  misc_feature (1)..(219): tr|A0A1C9W3D3|A0A1C9W3D3_9GAMM 7-carboxy-7-deazaguanine synthase OS=Microbulbifer aggregans OX=1769779 GN=queE PE=3 SV=1
MTDLTAESLRISEIFYSLQGEARDSGLPTVFVRLTGCPLRCTYCDSEYAFYGGERMTLAAILDKVRSYPARYVCVTGGEPLAQPNCLPLLVALCDAGYRVSLETSGAMPVEAVDPRVSRVVDLKTPASGEQHRNRLENIAALTEHDQVKFVICDRGDYEWARFTVDQYSLTERVGEVLFSPSYEQLEARQLAEWILEDGLLVRMQLQTHKLLWGDIPGV

SEQ ID NO: 31746 - protein, 226 aa, Microbulbifer donghaiensis
  misc_feature (1)..(226): tr|A0A1M5CVS7|A0A1M5CVS7_9GAMM 7-carboxy-7-deazaguanine synthase OS=Microbulbifer donghaiensis OX=494016 GN=qu eE PE=3 SV=1
MTDLSSESNRLRGESLRISEIFYSLQGEARDSGLPTVFVRLTGCPLRCTYCDSEYAFYGGERMTLEQILQKVQSYPARYVCVTGGEPLAQPNCLPLLKALCDAGYSVSLETSGAMPIEDVDSRVSRVVDLKTPASGEQHRNRMENIAALTARDQIKFVICDRGDYDWARFTLDQYRLSEKVGEVLFSPSYEQLQPRQLAEWILDDGLPVRMQMQLHKLLWGDIPGV

SEQ ID NO: 31747 - protein, 226 aa, Microbulbifer marinus
  misc_feature (1)..(226): tr|A0A1H4AIW2|A0A1H4AIW2_9GAMM 7-carboxy-7-deazaguanine synthase OS=Microbulbifer marinus OX=658218 GN=queE PE =3 SV=1
MTDMNNESSRVRDDSLRISEIFYSLQGEARESGLPTVFVRLTGCPLRCTYCDSEYAFYGGERLTLEQIVQKVQSYPARHVCVTGGEPLAQPNCLPLLTALCDAGYAVSLETSGAMPIEEVDARVSRVVDLKTPASGEQHRNRMENIAALTERDQVKFVICDRGDYDWARFILDQYRLPERVGEVLFSPSYEQLQPRQLAEWILADGLPVRMQMQLHKLLWGDVPGV

SEQ ID NO: 31748 - protein, 219 aa, Microbulbifer sp.
  misc_feature (1)..(219): tr|A0A2S1JNK9|A0A2S1JNK9_9GAMM 7-carboxy-7-deazaguanine synthase OS=Microbulbifer sp. A4B17 OX=359370 GN=queE PE=3 SV=1
MTDLSKESLRISEIFYSLQGEARESGLPTVFVRLTGCPLRCTYCDSEYAFYGGERMTLEQILQQVQSHPARHVCVTGGEPLAQPNCFPLMKALCDAGYAVSLETSGAMPVDKVDERVSRVVDLKTPASGEQHRNRMENMQVLTRQDQIKFVICDRGDYDWARFTLDQYRIPERVGEVLFSPSYEQLQPRQLAEWILEDGLPVRMQMQMHKLLWGDIPGV

SEQ ID NO: 31749 - protein, 219 aa, Microbulbifer sp.
  misc_feature (1)..(219): tr|A0A510IP19|A0A510IP19_9GAMM 7-carboxy-7-deazaguanine synthase OS=Microbulbifer sp. GL-2 OX=2591606 GN=queE PE=3 SV=1
MSSLSKESLRISEIFYSLQGEARESGLPTVFVRLTGCPLRCTYCDSEYAFHGGERMTLEQILQQVKSHPARHVCVTGGEPLAQPNCLPLLQILCDEGYAVSLETSGAMLVDQVDPRVSRVVDLKTPASGEQHRNRMENMQVLTRDDQIKFVICDRGDYEWAKFTLDQYNLPERVGEVLFSPSYEQLQARQLAEWILADGLPVRMQMQLHKLLWGDIPGV

SEQ ID NO: 31750 - protein, 219 aa, Microbulbifer thermotolerans
  misc_feature (1)..(219): tr|A0A143HRD2|A0A143HRD2_9GAMM 7-carboxy-7-deazaguanine synthase OS=Microbulbifer thermotolerans OX=252514 GN= queE PE=3 SV=1
MPDLSTESLRISEIFYSLQGEARESGLPSVFVRLTGCPLRCTYCDSEYAFYGGERMTLEQILQKVDSYPARYVCVTGGEPLAQPNCLPLLSALCDAGYRVSLETSGAMPVEQVDKRVSRVVDLKTPASGEQQRNRMENIQALGRGDQIKFVICDRKDYEWARFTLDQYRLHERVGEVLFSPSYEQLQPRQLAEWILEDGLPVRMQLQLHKLLWGDIPGV

SEQ ID NO: 31751 - protein, 219 aa, Microbulbifer yueqingensis
  misc_feature (1)..(219): tr|A0A1G8VTM5|A0A1G8VTM5_9GAMM 7-carboxy-7-deazaguanine synthase OS=Microbulbifer yueqingensis OX=658219 GN=qu eE PE=3 SV=1
MTDLSKESLRISEIFYSLQGEARDSGLPSVFVRLTGCPLRCTYCDSEYAFYGGERMALAAILDKVASYPARHVCVTGGEPLAQPNCLPLLATLCDAGYQVSLETSGAMPVEEVDPRVSRVVDLKTPASGEQHRNRMANMDALTRHDQVKFVICDRKDYDWAKFTLDQYRLPERVGEVLFSPSYEQLPARQLAEWILEDGLPVRMQLQLHKLLWGDVPGV

SEQ ID NO: 31752 - protein, 235 aa, Micrococcales bacterium
  misc_feature (1)..(235): tr|A0A1Q4A053|A0A1Q4A053_9MICO 7-carboxy-7-deazaguanine synthase OS=Micrococcales bacterium 72-143 OX=1895790 GN=queE PE=3 SV=1
MSTLIPVVETFVSLQGEGPSAGEPALFLRLANCNLSCEWCDTRHSWDWDTFAKTEEVESVTSPELVERLLRELPPHVNLLVLTGGEPLLHQRAVVSVLAELRVQRPDLRIEVETNGTVPPTPPMRDLVHLFVVSPKLANSGIAEKRRVRISVLTEFATLPSVLKFVVEAPLEVVEAAAVAEAGGFDRKRVWLMPQTTSAAELGSLVAILAPAAINAGFKVSSRLHILAWGETRGT

SEQ ID NO: 31753 - protein, 236 aa, Micrococcus lylae; identical to SEQ ID NO: 31328
  misc_feature (1)..(236): tr|A0A378P0H6|A0A378P0H6_9MICC 7-carboxy-7-deazaguanine synthase OS=Micrococcus lylae OX=1273 GN=queE PE=3 SV= 1

SEQ ID NO: 31754 - protein, 246 aa, Micrococcus sp.
  misc_feature (1)..(246): tr|A0A2J9IQB4|A0A2J9IQB4_9MICC 7-carboxy-7-deazaguanine synthase OS=Micrococcus sp. FDAARGOS_333 OX=1930558 GN =queE PE=3 SV=1
MSSKGGVESFAPQKGLLPISEIFGPTIQGEGPFAGRVCSFLRFGGCNLGCWWCDSAYTWDGRNYDLREEIVMRSAEEVLELVPMSPICVITGGEPLLYQRRPAFMELVRALVRRGQTVHFETNGTVEPLAELVGLAEAFVVSPKLPHARAQRGRVSPALHPGWGAIGRRGSAYLKVVVESESDVVATVRLADENQWDRGRVWVMPEGVDKGTLERKWREVCEWATALGVNASHRLHVLAWGEDRGR

SEQ ID NO: 31755 - protein, 208 aa, Microcoleaceae bacterium
  misc_feature (1)..(208): tr|A0A355CBZ4|A0A355CBZ4_9CYAN 7-carboxy-7-deazaguanine synthase OS=Microcoleaceae bacterium UBA10368 OX=20557 93 GN=queE PE=3 SV=1
MSNLQVKLPIHETFQSTVQGEGYWTGTLVDFIRLAGCPVRCPWCDTGYENGGKDLPSVARSISELLAELQSPRVVITGGEPFIHRDLPELVQALLAADKQVSIETSGAYWLDVSPLAWITLSPKEHVNPKYRVQELFWTRANEIKLVVSTGEELEFYHNFLEKNVNIPVFLQPEWNSKESGIPIILELLKQNPSYRLSLQTHKLIGVQ

SEQ ID NO: 31756 - protein, 208 aa, Microcoleaceae bacterium; identical to SEQ ID NO: 31755
  misc_feature (1)..(208): tr|A0A3D5GA61|A0A3D5GA61_9CYAN 7-carboxy-7-deazaguanine synthase OS=Microcoleaceae bacterium UBA9251 OX=205579 4 GN=queE PE=3 SV=1

SEQ ID NO: 31757 - protein, 259 aa, Microcoleus sp.
  misc_feature (1)..(259): tr|K9WHF9|K9WHF9_9CYAN 7-carboxy-7-deazaguanine synthas e OS=Microcoleus sp. PCC 7113 OX=1173027 GN=queE PE=3 S V=1
MPLETKLTARLVEIFSAIQGEGLNVGTRQIFVRFAMCDLRCKFCDSAHTWGIPSQCRIERTPGERDFETHSNPVPGSLLLQWVERQNQPGLHDSLTLTGGEPLLHAPFLVEFLPLLQQFTPLPIYLETGGHRPEQLAMILPYLDSVGMDIKLKSVSGEEHWAAHTEFLQLCHNSSLELFVKLIVDHNTDPAELEQAAQLVAQVSPQIPVFLQPVTPLESSNQPLRVPAPEQVLAWQALMKGTLASVRVVPQTHKMMDQL

SEQ ID NO: 31758 - protein, 208 aa, Microcoleus vaginatus
  misc_feature (1)..(208): tr|F5UDJ8|F5UDJ8_9CYAN 7-carboxy-7-deazaguanine synthas e OS=Microcoleus vaginatus FGP-2 OX=756067 GN=queE PE=3 SV=1
MSNLQLKLPIHETFQCTVQGEGYWTGTLVDFIRLAGCPVRCPWCDTGYENGGKGLPSVPQSIAQLLAQLQSPRVVITGGEPFIHRDLPELVEALLEADKQVSIETSGAYWQDVSPQAWITLSPKEHVNPKYPVQELFWTRANEIKLVISTGEEVEFYHKHLENNVNIPVFLQPEWNSKKLAIPIILELLKQNPSYRLSLQTHKFIGVQ

SEQ ID NO: 31759 - protein, 205 aa, Microcystis aeruginosa; identical to SEQ ID NO: 29152
  misc_feature (1)..(205): tr|A0A552DC49|A0A552DC49_MICAE 7-carboxy-7-deazaguanine synthase OS=Microcystis aeruginosa Ma_SC_T_19800800_S4 64 OX=2486257 GN=queE PE=3 SV=1

SEQ ID NO: 31760 - protein, 193 aa, Microcystis aeruginosa
  misc_feature (1)..(193): tr|A0A5A5SFU2|A0A5A5SFU2_MICAE 7-carboxy-7-deazaguanine synthase OS=Microcystis aeruginosa NIES-2522 OX=230398 4 GN=queE_2 PE=3 SV=1
MVETFHSVQGEGFWTGSNAFFLRLGGCDVYCPWCDQKESWNAHRYPQKSLGELVEMAKGANPAMVVITGGEPLMHNLDPLTKELKNQGLRVHLETSGAHPFTGVFDWVTFSPKTYKMPDPSIYTRVNELKIVVAHPEDLDWAAMQESKLSEGVIKYLQPEWNTVESKELVFNYVLQHPQWRLSLQTHKFLGVR

SEQ ID NO: 31761 - protein, 205 aa, Microcystis flosaquae
  misc_feature (1)..(205): tr|A0A552KL63|A0A552KL63_9CHRO 7-carboxy-7-deazaguanine synthase OS=Microcystis flos-aquae Mf_QC_C_20070823_S1 0D OX=2486236 GN=queE PE=3 SV=1
MKTVSINHCTYPVVETFHSVQGEGFWTGSNAFFLRLGGCDVYCPWCDQKESWNAHRYPQQSLGELVEMAKGANPAMVVITGGEPLMHNLDPLTKELKNQGLRVHLETSGAHPFTGVFDWVTFSPKTYKMPDPSIYAQVNELKIVVANPEDLDWAAMQESKLSEGVIKYLQPEWNTVESKELVFNYVLRHPQWRLSLQTHKFLGVR

SEQ ID NO: 31762 - protein, 205 aa, Microcystis flosaquae
  misc_feature (1)..(205): tr|A0A552LDG9|A0A552LDG9_9CHRO 7-carboxy-7-deazaguanine synthase OS=Microcystis flos-aquae Mf_WU_F_19750830_S4 60 OX=2486237 GN=queE PE=3 SV=1
MKTVSINHCTYPVVETFHSVQGEGFWTGSNAFFLRLGGCDVYCPWCDQKESWNAHRYPQQSLQELVEMAKGANPAMVVITGGEPLMHNLDPLTKELKNQGLRVHLETSGAHPFTGVFDWVTFSPKTYKMPDPSIYAQVNELKIVVANPEDLDWAAMQESKLSEGVIKYLQPEWNTVESKELVFNYVLQHPQWRLSLQTHKFLGVR

SEQ ID NO: 31763 - protein, 205 aa, Microcystis novacekii
  misc_feature (1)..(205): tr|A0A552J5T2|A0A552J5T2_9CHRO 7-carboxy-7-deazaguanine synthase OS=Microcystis novacekii Mn_MB_F_20050700_S1D OX=2486266 GN=queE PE=3 SV=1
MKTVSINHCTYPVVETFHSVQGEGFWTGSNAFFLRLGGCDVYCPWCDQKESWNAHRYPQKSLGELVEMAKGANPAMVVITGGEPLMHNLDPLTKELKNQGLRVHLETSGAHPFTGVFDWVTFSPKTYKMPDPSIYAQVNELKIVVANPEDLDWAAMQESKLSEGVIKYLQPEWNTVESKELVFNYVLHHPQWRLSLQTHKFLGVR

SEQ ID NO: 31764 - protein, 193 aa, Microcystis panniformis
  misc_feature (1)..(193): tr|A0A0K1S5I7|A0A0K1S5I7_9CHRO 7-carboxy-7-deazaguanine synthase OS=Microcystis panniformis FACHB-1757 OX=1638 788 GN=queE PE=3 SV=1
MVETFHSVQGEGFWTGSNAFFLRLGGCDVYCPWCDQKESWNAHRYPQQSLGELVEMAKGANPAMVVITGGEPLMHNLDPLTKELKNQGLRVHLETSGAHPFTGVFDWVTFSPKTYKMPDPSIYARVNELKIVVANPEDLDWAAMQESKLSEGVIKYLQPEWNTVESKELVFNYVLRHPQWRLSLQTHKFLGVR

SEQ ID NO: 31765 - protein, 205 aa, Microcystis panniformis
  misc_feature (1)..(205): tr|A0A552QA76|A0A552QA76_9CHRO 7-carboxy-7-deazaguanine synthase OS=Microcystis panniformis Mp_MB_F_20051200_S 9 OX=2486223 GN=queE PE=3 SV=1
MKTVSINHCTYPVVETFHSVQGEGFWTGSNAFFLRLGGCDVYCPWCDQKESWNAHRYPQQSLGELVEMAKDANPAMVVITGGEPLMHNLDPLTKELKNQGLRVHLETSGAHPFTGVFDWVTFSPKTYKMPDPSIYAQVNELKIVVANPADLNWAAMQESKLSEGVIKYLQPEWNTVESKELVFNYVLRHPQWRLSLQTHKFLGVR

SEQ ID NO: 31766 - protein, 193 aa, Microcystis sp.
  misc_feature (1)..(193): tr|A0A2L2XMK7|A0A2L2XMK7_9CHRO 7-carboxy-7-deazaguanine synthase OS=Microcystis sp. 0824 OX=1502726 GN=queE PE =3 SV=1
MVETFHSVQGEGFWTGSNAFFLRLGGCDVYCPWCDQKESWNAHRYPQQSLRELVEMAKGANPAMVVITGGEPLMHNLDPLTEELKNQGLRVHLETSGAHPFTGVFDWVTFSPKTYKMPDPTIYAQVNELKIVVANPEDLDWAAMQESKLSEGVIKYLQPEWNTVESKELVFNYVLRHPQWRLSLQTHKFLGVR

SEQ ID NO: 31767 - protein, 205 aa, Microcystis sp.
  misc_feature (1)..(205): tr|A0A552CJ79|A0A552CJ79_9CHRO 7-carboxy-7-deazaguanine synthase OS=Microcystis sp. Msp_OC_L_20101000_S702 OX= 2486218 GN=queE PE=3 SV=1
MKTVSINHCTYPVVETFHSVQGEGFWTGSNAFFLRLGGCDVYCPWCDQKESWNAHRYPQKSLGELVEMAKGANPAMVVITGGEPLMHNLDPLTRELKNQGLRVHLETSGAHPFTGVFDWVTFSPKTYKMPDPSIYARVNELKIVVAHPEDLDWAAMQESKLSEGVIKYLQPEWNTAESKELVFNYVLRHPQWRLSLQTHKFLGVR

SEQ ID NO: 31768 - protein, 205 aa, Microcystis viridis
  misc_feature (1)..(205): tr|A0A552HL56|A0A552HL56_MICVR 7-carboxy-7-deazaguanine synthase OS=Microcystis viridis Mv_BB_P_19951000_S68D OX=2486270 GN=queE PE=3 SV=1
MKTVSINHCTYPVVETFHSVQGEGFWTGSNAFFLRLGGCDVYCPWCDQKESWNAHRYPQQSVRELVEMAKGANPAMVVITGGEPLMHNLDPLTKELKNQGLRVHLETSGAHPFTGVFDWVTFSPKTYKMPDHSIYARVNELKIVVANPRDLEWAAMQESKLSQGVIKYLQPEWNRVESKELVFNYVLHHPQWRLSLQTHKFLGVR

SEQ ID NO: 31769 - protein, 205 aa, Microcystis wesenbergii
  misc_feature (1)..(205): tr|A0A3E0LQW4|A0A3E0LQW4_9CHRO 7-carboxy-7-deazaguanine synthase OS=Microcystis wesenbergii TW10 OX=2060474 GN =queE PE=3 SV=1
MKTVSINHCTYPVVETFHSVQGEGFWTGSNAFFLRLGGCDVYCPWCDQKESWNAHRYPQKSVRELVEMAKGANPAMVVITGGEPLMHNLDPLTKELKNQGLRVHLETSGAHPFTGVFDWVTFSPKTYKMPDPSIYAQVNELKIVVANPEDLDWAAIQESKLSEGVIKYLQPEWNTVESKELVFNYVLRHPQWRLSLQTHKFLGVR

SEQ ID NO: 31770 - protein, 205 aa, Microcystis wesenbergii
  misc_feature (1)..(205): tr|A0A552JS08|A0A552JS08_9CHRO 7-carboxy-7-deazaguanine synthase OS=Microcystis wesenbergii Mw_QC_S_20081001_S 30D OX=2486245 GN=queE PE=3 SV=1
MKTVSINHCTYPVVETFHSVQGEGFWTGSNAFFLRLGGCDVYCPWCDQKESWNAHRYPQKSLGELVEMAKDANPAMVVITGGEPLMHNLDPLTRELKNQGLRVHLETSGAHPFTGFFDWVTFSPKTYKMPDPSIYARVNELKIVVANPEDLDWAAMQESQLSEGVIKYLQPEWNTVESKELVFNYVLRHPQWRLSLQTHKFLGVR

SEQ ID NO: 31771 - protein, 224 aa, Micromonospora aurantiaca
  misc_feature (1)..(224): tr|A0A3M9KBP2|A0A3M9KBP2_9ACTN 7-carboxy-7-deazaguanine synthase OS=Micromonospora aurantiaca OX=47850 GN=queE PE=3 SV=1
MRCNLTCGYPGMPRTADAAASGAMVCDTEYTWNTAKHDLKAAPAMSAAEIWDQLIRLDPAIRDPGMAPVDLVVVSGGEPLLHPGIVVDLARSASASGRALEIETNATIAPSAALIAAGARFNAGLKLASSTVPYAKRIKPQVITQLQASGRARWKFVVSGPDDVREIADLQQQFGLTEVWLSPEGTSVDVIVDRMRWLADVALTHGWNLTTRQHVLIWGDERGR

SEQ ID NO: 31772 - protein, 215 aa, Micromonospora chokoriensis
  misc_feature (1)..(215): tr|A0A1C4UPW1|A0A1C4UPW1_9ACTN 7-carboxy-7-deazaguanine synthase OS=Micromonospora chokoriensis OX=356851 GN=q ueE PE=3 SV=1
MRSVYRVKEIFYTLQGEGTHAGRPAVFCRFTSCNLWTGRESDRHRAICRFCDTDFVGTDGPGGGRFRSAADLAAAVAKTWQGKSHPRSRPYVVCTGGEPLLQLDEAAVQALHAEGFTVAVETNGTRPAPAGLDWICVSPKAGADLVLTQGHDLKLVYPQVGAEPQLFEDLAFEHFLLQPMDGPDRAANTEAAVRYCLDHPQWQLSLQTHKYLGIA

SEQ ID NO: 31773 - protein, 215 aa, Micromonospora echinospora
  misc_feature (1)..(215): tr|A0A1C4WLG8|A0A1C4WLG8_MICEC 7-carboxy-7-deazaguanine synthase OS=Micromonospora echinospora OX=1877 GN=queE PE=3 SV=1
MTDVYRIKEIFYTLQGEGTHAGRPAVFCRFTSCNLWTGREEERHRAICRFCDTDFVGTDGPGGGRFGTAAELAAAVAAAWQGQAHPRSRPYVVCTGGEPLLQLDEAAVSALHDAGFEVAVETNGTRPAPPGIDWTCVSPKAGAEVVLTRGDDLKLVYPQPGAEPARFEHLDFTHFMLQPMDGPDRVANTEAAVRYCLEHPQWRLSLQTHKYIGIA

SEQ ID NO: 31774 - protein, 212 aa, Micromonospora echinospora
  misc_feature (1)..(212): tr|Q6QVS6|Q6QVS6_MICEC 7-carboxy-7-deazaguanine synthas e OS=Micromonospora echinospora OX=1877 GN=queE PE=3 SV =1
MYRIKEIFYTLQGEGTHAGRPAVFCRFTSCNLWTGREEERYRAICRFCDTDFVGTDGPGGGRFGTAAELAAAVAAAWQGQAHPRSRPYVVCTGGEPLLQLDEAAVSALHDAGFEVAVETNGTRPAPPGIDWTCVSPKAGAEVVLTRGDDLKLVYPQPGAEPARFEHLDFTHFMLQPMDGPDRVANTEAAVRYCLEHPQWRLSLQTHKYIGIA

SEQ ID NO: 31775 - protein, 215 aa, Micromonospora inyonensis
  misc_feature (1)..(215): tr|A0A1C6RDT7|A0A1C6RDT7_9ACTN 7-carboxy-7-deazaguanine synthase OS=Micromonospora inyonensis OX=47866 GN=queE PE=3 SV=1
MTGVYRIKEIFYTLQGEGTHAGRPAVFCRFTSCNLWTGRKEDRHRAVCRFCDTDFVGTDGPGGGRFATAADLAAAVAAAWRGGDHPRSRPYVVCTGGEPLLQLDEAAVTALHEAGFEVAVETNGTRPAPPGLDWVCVSPKAGADLVLTRGDDLKLVYPQPGAEPGRFEHLDFTHFMLQPMDGPNRAANTEAAVRYCLEHPQWRLSLQTHKYIGIA

SEQ ID NO: 31776 - protein, 215 aa, Micromonospora inyonensis
  misc_feature (1)..(215): tr|C9W391|C9W391_9ACTN 7-carboxy-7-deazaguanine synthas e OS=Micromonospora inyonensis OX=47866 GN=sis25 PE=3 S V=1
MTGVYRIKEIFYTLQGEGTHAGRPAVFCRFTSCNLWTGREEDRHRAICQFCDTDFVGTDGPGGGRFATAAELAAAVATAWRGQAHPRSRPYVVCTGGEPLLQLDEAAVAALHEAGFEVAVETNGTRPAPPGLDWVCVSPKAGADLVLTRGDDLKLVYPQPGAEPGRFEHLDFTHFMLQPMDGPDRVANTEAAVRYCLEHPQWRFSLQTHKYIGIA

SEQ ID NO: 31777 - protein, 251 aa, Micromonospora lupini
  misc_feature (1)..(251): tr|I0L1T8|I0L1T8_9ACTN 7-carboxy-7-deazaguanine synthas e OS=Micromonospora lupini str. Lupac 08 OX=1150864 GN= queE PE=3 SV=1
MTAPSMPAVPPFPAGSPAVPARPLLVAETFGPTLQGEGPSTGQQALFLRLSRCNLSCPRCDTPYTWDTSRFDLRAHTADRPAEEIIRWVLTQQTRLLVITGGEPLLQQDRLLPVVDAVTAAGRRVEIETNGTVVPLPALVASVGAFNVSPKLAGFAGPRDGRRRINPDALSALAGSGRAVFKFVAADTAELDEIARLQEQFGLDPVWVMPEGTTSDAVLAGMRDLADAVLARGWHLSSRLHVLLWEDTRGR

SEQ ID NO: 31778 - protein, 265 aa, Micromonospora narathiwatensis
  misc_feature (1)..(265): tr|A0A1A8ZA80|A0A1A8ZA80_9ACTN 7-carboxy-7-deazaguanine synthase OS=Micromonospora narathiwatensis OX=299146 G N=queE PE=3 SV=1
MSTTITATTSRTSTQVAVADLFYSFQGEGANLGRRALFVRLLRCNLTCGYPGMPRTADAAAVGAMVCDTEYTWNTAKHDLQAAPAMSAAEIWDDLVRLDPATGNPGLAPVDLIVVSGGEPLLHRGIVTDLARRASASGKALEIETNATMAPSAALIAAGARFNAGLKLASSAVPYGKRIKPQVITQLQASGQARWKFVVTGPDDVREIADLQQEFGLTEVWLSPEGASVDVVISRMRWLADVALTHGWNLTTRQHVLIWGDERGR

SEQ ID NO: 31779 - protein, 268 aa, Micromonospora nigra
  misc_feature (1)..(268): tr|A0A1C6R821|A0A1C6R821_9ACTN 7-carboxy-7-deazaguanine synthase OS=Micromonospora nigra OX=145857 GN=queE PE= 3 SV=1
MTGKRAILPTEITPAGERVGVADLFYSFQGEGVNLGRRALFVRLMRCNLTCGYSRMPRRPNTPAVGAMVCDTEYTWNTAKHDLEAAPTMSAAEIWDALVRLDPATGDPSLAPVGLVVVSGGEPLLHRGTVTALARRATALGKALEIETNATINPGTELIAAGARFNAGLKLASSAVPYSKRVKPQVIRQLQASGQARWKFVVTSPDDVREIADLQQQFGLTDVWLSPEGTSVRVVADRMRWLADVALTRGWNLTTRQHVLIWGDERGR

SEQ ID NO: 31780 - protein, 212 aa, Micromonospora olivasterospora
  misc_feature (1)..(212): tr|Q2MFY9|Q2MFY9_MICOL 7-carboxy-7-deazaguanine synthas e OS=Micromonospora olivasterospora OX=1880 GN=fosF PE= 3 SV=1
MYRVKEIFYTLQGEGSHAGRPAVFCRFTSCNLWTGREEERHRAICQFCDTDFVGTDGPGGGRFATAAELAAAVVAAWRGEDHPRSRPYVVCTGGEPLLQLDEAAVRALHDAGFEVAVETNGTRPAPPGIDWVCVSPKAGADLVLTRGDDLKLVYPQPGAEPARFEGLDFAHFMLQPMDGPDRVANTEAAVRYCLEHPQWRLSLQTHKYIGIA

SEQ ID NO: 31781 - protein, 212 aa, Micromonospora pallida
  misc_feature (1)..(212): tr|A0A1C6TCT7|A0A1C6TCT7_9ACTN 7-carboxy-7-deazaguanine synthase OS=Micromonospora pallida OX=145854 GN=queE P E=3 SV=1
MYRVKEIFYTLQGEGTHAGRPAVFCRFTSCNLWTGREQDRHRAICQFCDTDFVGTDGPGGGRFATAADLAAAVAAAWQGGDHPRSRPYVVCTGGEPLLQLDEAAVTALHEAGFEVAVETNGTRPAPAGIDWVCVSPKAGAEVVLTRGDDLKLVYPQPDAEPARFEHLDFTHFMLQPMDGPDRVANTEAAVRYCLEHPQWRLSLQTHKYIGIA

SEQ ID NO: 31782 - protein, 215 aa, Micromonospora rifamycinica
  misc_feature (1)..(215): tr|A0A1C5JTQ4|A0A1C5JTQ4_9ACTN 7-carboxy-7-deazaguanine synthase OS=Micromonospora rifamycinica OX=291594 GN=q ueE PE=3 SV=1
MNPVYRVKEIFYTLQGEGTHAGRPAVFCRFTSCNLWTGREEDRHRAVCQFCDTDFVGTDGPGGGRFRSAAELAGAVAAAWQGQRHPRSRPYVVCTGGEPLLQLDEAAVQALHDEGFEVAVETNGTRPAPAGLDWICVSPKAGADLVLTRGHDLKLVYPQVGAEPTRFEELDFAHFLLQPMDGPDRVANTEATVRYCLDHPQWQLSLQTHKYLGIA

SEQ ID NO: 31783 - protein, 212 aa, Micromonospora rifamycinica
  misc_feature (1)..(212): tr|A0A120FA89|A0A120FA89_9ACTN 7-carboxy-7-deazaguanine synthase OS=Micromonospora rifamycinica OX=291594 GN=q ueE PE=3 SV=1
MYRVKEIFYTLQGEGTHAGRPAVFCRFTSCNLWTGREEDRHRAVCQFCDTDFVGTDGPGGGRFRSAAELAGAVAAAWQGQRHPRSRPYVVCTGGEPLLQLDEAAVQALHDEGFEVAVETNGTRPAPAGLDWICVSPKAGADLVLTRGHDLKLVYPQVGAEPTRFEELDFAHFLLQPMDGPDRVANTEATVRYCLDHPQWQLSLQTHKYLGIA

SEQ ID NO: 31784 - protein, 212 aa, Micromonospora sagamiensis
  misc_feature (1)..(212): tr|A0A562W8P0|A0A562W8P0_9ACTN 7-carboxy-7-deazaguanine synthase OS=Micromonospora sagamiensis OX=47875 GN=que E PE=3 SV=1
MYRIKEIFYTLQGEGTHAGRPAVFCRFTSCNLWTGREEDRHRAICQFCDTDFVGTDGPGGGRFATATELAAAVAAAWRGQAHPRSRPYVVCTGGEPLLQLDEAAVAALHDAGFEVAVETNGTRPAPAGIDWVCVSPKAGTDLVLTRGDDLKLVYPQPGAEPARFEHLDFTHFMLQPMDGPDRVANTEATVRYCLEHPQWRFSLQTHKYIGIA

SEQ ID NO: 31785 - protein, 212 aa, Micromonospora sp.
  misc_feature (1)..(212): tr|A0A2G6XP21|A0A2G6XP21_9ACTN 7-carboxy-7-deazaguanine synthase OS=Micromonospora sp. CNZ299 OX=2035244 GN=qu eE PE=3 SV=1
MYKIKEIFYTLQGEGSHAGRPAVFCRFASCNLWTGRETDRHRAICQFCDTDFVGTDGPGGGRFASAADLATAVAKTWQGLPHSRSKRYVVCTGGEPLLQLDDDAVAALHAEGFEVAVETNGTKPAPAGLDWICVSPKAGADLVLTAGDELKLVYPQPAAMPELFEDLAFTFMRLQPMDGPEQEANTRAAVAYCLAHPQWQLSLQTHKYLGIA

SEQ ID NO: 31786 - protein, 251 aa, Micromonospora sp.
  misc_feature (1)..(251): tr|A0A559ZH01|A0A559ZH01_9ACTN 7-carboxy-7-deazaguanine synthase OS=Micromonospora sp. CNZ322 OX=2572904 GN=qu eE PE=3 SV=1
MTAPSMPAVPPCPARSPAVPVRPLLVAETFGPTLQGEGPSTGQQALFLRLSRCNLSCPRCDTPYTWDTSRFDLRAHTTHRPAEEVIRWVVTQQTRLLVITGGEPLLQQDRLLPVVKAVTEAGRRVEIETNGTVIPLPALVASMGAFNVSPKLSGFAGPRDGRRRINPAALSALAGSGRAVFKFVATDAAELDEIARLQEQFGLDPVWVMPEGATSDAVLTGMRDLADAVLARGWHLSSRLHVLLWEDTRGR

SEQ ID NO: 31787 - protein, 250 aa, Microscilla marina
  misc_feature (1)..(250): tr|A1ZVR2|A1ZVR2_9BACT 7-carboxy-7-deazaguanine synthas e OS=Microscilla marina ATCC 23134 OX=313606 GN=queE PE =3 SV=1
MKIAKFNGKGEIFYTIQGEGKSLGKPTVFIRSSLCNLHCIWCDTDYTWNWKNTPYPHVFDQTPGYEKYDKKEQIVELSTAQIIEEIAPYACKNLVLTGGEPLLQQKAWVELMAQLRKKDAGYWFEVETNGTLLPSSEFDALIDQYNVSPKLENSNNSMKIREKPEAYAFFRQSPKAWFKFVIAQQADLEEVLELIKKYDLPSHKVYLMPEGTTPEQLKSKQSWLVEQCKQYGFHYTDRLHIHIYGSKRGV

SEQ ID NO: 31788 - protein, 250 aa, Microscillaceae bacterium
  misc_feature (1)..(250): tr|A0A349DW79|A0A349DW79_9BACT 7-carboxy-7-deazaguanine synthase OS=Microscillaceae bacterium OX=2053581 GN=qu eE PE=3 SV=1
MKVAKFNGQGEIFYTIQGEGKSLGKPTVFVRSSLCNLHCIWCDTDYTWNWDTTPHPHIFDKIPGYQKYRKEEQIIELSTEELITEVTQYPCKNLVLTGGEPLLQQKEWVALMTQLRALDTNYWFEVETNGTLLPSQNFDALINQYNVSPKLANSNNSVKLREKPAAYTFFTQSPKAWFKFVIAEKPDLEEVLGLIEKYHIPADKVYLMPEGTTPERLNSKQQWLVEQCKKHGFHYTDRLHIHIYGSKRGV

SEQ ID NO: 31789 - protein, 210 aa, Microvirga aerophila
  misc_feature (1)..(210): tr|A0A512BKX8|A0A512BKX8_9RHIZ 7-carboxy-7-deazaguanine synthase OS=Microvirga aerophila OX=670291 GN=queE PE= 3 SV=1
MAYTVKEVFKTLQGEGAQAGRAAVFCRFSGCNLWSGREDDRSRAICQFCDTDFVGTDGVGGGRFQSAEALAQAIEDAWAGAGRQRFVVFTGGEPLLQLDQFLIEAVRRRGFEVAVETNGTVEAQPGLDWVCVSPKAGAPLRQSRGNELKLVYPQVGLDPATVAGLAFEHFWLQPMDGPRREANTVAAVEYCLQNPRWRLSLQTHKLIGIP

SEQ ID NO: 31790 - protein, 268 aa, Microvirga lotononidis
  misc_feature (1)..(268): tr|I4YK78|I4YK78_9RHIZ 7-carboxy-7-deazaguanine synthas e OS=Microvirga lotononidis OX=864069 GN=queE PE=3 SV=1
MRVNRQAPEKRTTLLQLGHDKLDVHSIFYTIQGEGPFCGTPAVFVRLAGCNLQCPACDTNYTSGRRWMGTDEICDEIQQAYRDSLPLSNNIDELVEGTTDNFPIKRFTGLVVITGGEPLRQQIEVLVLKLIQRFGCYVQVETNGLLPPPPLNIINKNTADCEGLYIVCSPKSGKINPVTAERACCFKYVIAAHSVDENDGLPVYALDNSLGKLRVARPPVNYTGTIYLQPMDEQNPQLNERHLQACVRSCMQYGYRLQLQVHKILRME

SEQ ID NO: 31791 - protein, 210 aa, Microvirga lotononidis
  misc_feature (1)..(210): tr|I4YR50|I4YR50_9RHIZ 7-carboxy-7-deazaguanine synthas e OS=Microvirga lotononidis OX=864069 GN=queE PE=3 SV=1
MSYAVKEIFLTLQGEGAQAGRTAVFCRFAGCNLWSGRESDRAAASCRFCDTDFVGTDGTFGGRYATAADLCHRIEDLWGPGTDHRLVVLTGGEPLLQVDSALIDELHRRSFAIAVETNGTIEPPLGLDWICISPKGSTDLKIRAGHELKLVFPQEDAPPERFASLSFERFSLQPMDGPDQLSNTALAVEYCLAHPQWRLSLQTRKYLGIR

SEQ ID NO: 31792 - protein, 245 aa, Microvirga sp.
  misc_feature (1)..(245): tr|A0A2T7TQU2|A0A2T7TQU2_9RHIZ 7-carboxy-7-deazaguanine synthase OS=Microvirga sp. KLBC 81 OX=1862707 GN=queE PE=3 SV=1
MKGSIRISEIFGPTVQGEGPLIGRPTVFVRTGGCDYRCRWCDTLYAVLPEFRGDWTLMAPIEIMAQVERLSGSTPMLVSLSGGNPALQPLAPLIALGRQKGYTFALETQGSVPQPWFAALDWLMLSPKPPSSGMDTDWQALDESVRAAAGGPHCVVKVVVFDKDDYAYARRMASRYPALSVYLQVGNPAPLVTHSGPGCEEADLDDVMERFRWLVDTVAADRWFTATVLPQLHVLAWGNRSYAGI

SEQ ID NO: 31793 - protein, 25 aa, Microvirga sp.
  misc_feature (1)..(25): tr|A0A2T7TRQ2|A0A2T7TRQ2_9RHIZ 7-carboxy-7-deazaguanine synthase QueE (Fragment) OS=Microvirga sp. KLBC 81 OX= 1862707 GN=DC522_30680 PE=4 SV=1
AADRWFTATVLPQLHVLAWGNKRGV

SEQ ID NO: 31794 - protein, 210 aa, Microvirga vignae
  misc_feature (1)..(210): tr|A0A0H1RBC2|A0A0H1RBC2_9RHIZ 7-carboxy-7-deazaguanine synthase OS=Microvirga vignae OX=1225564 GN=queE PE=3 SV=1
MTYAVKEIFLTLQGEGAQAGRTAVFCRFAGCNLWSGRESDRAAAACRFCDTDFVGTNGTFGGRYATAADLCHRIEELWGPGTDHRLVVLTGGEPLLQVDAALIDELHRRSFTIAVETNGTVEPPPGLDWICVSPKGSTALKIRAGHELKLVFPQEDAPPERFASLSFERFSLQPMDGPDQVVNTARAVEYCLAHPQWRLSLQTHKYLGIR

SEQ ID NO: 31795 - protein, 243 aa, Microvirga vignae
  misc_feature (1)..(243): tr|A0A0H1RDW5|A0A0H1RDW5_9RHIZ 7-carboxy-7-deazaguanine synthase OS=Microvirga vignae OX=1225564 GN=queE PE=3 SV=1
MKGSIRISEIFGPTVQGEGPLIGRPTVFVRTGGCDYRCHWCDTLYAVLPEFREDWTLMAPTEIMAQVERLSGSTPVLVSLSGGNPALQPLAPLIALGRQKGYTFALETQGSVPQPWFAALDWLMLSPKPPSSGMDTDWQALDECVRAAAGGPHCAVKVVVFDEDDYAYARRVASRYPALPVYLQVGNPAPLVTHSGPGSEEADLDDVMERFRWLVDTVAADRWFTATVLPQLHVLAWGNKRGV

SEQ ID NO: 31796 - protein, 209 aa, Microvirgula aerodenitrificans
  misc_feature (1)..(209): tr|A0A2S0PD56|A0A2S0PD56_9NEIS 7-carboxy-7-deazaguanine synthase OS=Microvirgula aerodenitrificans OX=57480 GN =queE PE=3 SV=1
MNYTVKEVFYTLQGEGAQAGRAAVFCRFSGCNLWSGREADRDRAICRFCDTDFVGTGPDGGKFADAGALAAHIRAGWRGQGGTPYVVFTGGEPLLQLDAALITALHRLGFEIGVETNGTLPAPDGIDWLCVSPKAGTDWVQRRGDEIKLVYPQPALLPDTVATDGFTHAWLQPMDGPARTEHTRAAIAACLTDPRWRLSVQTHKITGIR

SEQ ID NO: 31797 - protein, 209 aa, Microvirgula sp.
  misc_feature (1)..(209): tr|A0A329AZ05|A0A329AZ05_9NEIS 7-carboxy-7-deazaguanine synthase OS=Microvirgula sp. AG722 OX=2183901 GN=queE PE=3 SV=1
MNYTVKEVFYTLQGEGAQAGRAAVFCRFSGCNLWSGREVDRDRAICRFCDTDFVGTGPDGGKFADAGALAAHIRAGWRGQGGTPYVVFTGGEPLLQLDAALITALHRLGFEIGVETNGTLPAPDGIDWLCVSPKADTDWVQRRGDEIKLVYPQPALLPDTVATDGFTHAWLQPMDGPARTEHTRAAIAACLTDPRWRLSVQTHKITGIR

SEQ ID NO: 31798 - protein, 218 aa, Minicystis rosea
  misc_feature (1)..(218): tr|A0A1L6LYS8|A0A1L6LYS8_9DELT 7-carboxy-7-deazaguanine synthase OS=Minicystis rosea OX=888845 GN=queE PE=3 SV =1
MAKEDTLVVHEIYASIQGESTFAGLPCTFVRLTGCNLRCTWCDTTQAFHGGQRLPRADVLARALATGTTLVELTGGEPLLQPGALPLMTELCDAGRTVLIETSGERDVSKVDPRVHKIMDLKAPGSGESHRNRWENLEHLTARDEIKFVLAGREDYEWMRDVVRSRRLDSIGCALLASVVWGKLALKDLVAWTLEDALPVRVQIQMHKIIWGADTQGV

SEQ ID NO: 31799 - protein, 215 aa, Mitsuaria sp.
  misc_feature (1)..(215): tr|A0A1A9HP82|A0A1A9HP82_9BURK 7-carboxy-7-deazaguanine synthase OS=Mitsuaria sp. 7 OX=1658665 GN=queE PE=3 SV =1
MTYAVKEMFYTLQGEGAQAGRAAVFCRFAGCNLWTGREQDREKAVCTFCDTDFVGTDGQGGGKFVSADALAEAIDSKWPKDEHGRKTGTPYVVCTGGEPLLQLDGPLITALKAHGFEIAVETNGTQPAPEGLDWICVSPKADAEVVLTKGNELKLVYPQPLALPERFADLAFDHFFLQPMDSVLQKQNTRAAIAYCMDHPQWKLSIQMHKVVGID

SEQ ID NO: 31800 - protein, 215 aa, Mitsuaria sp.
  misc_feature (1)..(215): tr|A0A1I6KT36|A0A1I6KT36_9BURK 7-carboxy-7-deazaguanine synthase OS=Mitsuaria sp. PDC51 OX=1881035 GN=queE PE= 3 SV=1
MTYAVKEMFYTLQGEGAQAGRAAVFCRFAGCNLWSGREQDREKAVCSFCDTDFVGTDGQGGGKFASADALAEAIDAQWPKDADGRKTGTPYVVCTGGEPLLQLDGPLITALKALGFEIAVETNGTQPAPEGLDWICVSPKADAELVLTRGNELKLVYPQPLALPERFADLDFDHFFLQPMDSILQKQNTREAVAYCMAHPQWKLSIQMHKVVGID

SEQ ID NO: 31801 - protein, 251 aa, Mitsuokella jalaludinii
  misc_feature (1)..(251): tr|A0A174C0E3|A0A174C0E3_9FIRM 7-carboxy-7-deazaguanine synthase OS=Mitsuokella jalaludinii OX=187979 GN=queE PE=3 SV=1
MNARHENLIEIFSSIQGEGKYVGCRQVFVRLEGCNLDCSYCDTENKPGSHPACQVETAAGSRTFETIKNPMTASETAAVIVNLLREVPHEAVSFTGGEPLLHAAFIRAVVLQLHALGQQPKVFLETNGTLYRELASILDITDIISMDIKLPSIVTKPQWEAHARFLELARTKDLYVKLVVSAETTDKEFKKSVALLEKEAPDALFIIQPVTPYGGCAAASPEKILACQSYALKHLRDVRVIPQTHKMIGQL

SEQ ID NO: 31802 - protein, 251 aa, Mitsuokella multacida
  misc_feature (1)..(251): tr|C9KKI3|C9KKI3_9FIRM 7-carboxy-7-deazaguanine synthas e OS=Mitsuokella multacida DSM 20544 OX=500635 GN=queE PE=3 SV=1
MNASNENLIEIFSSIQGEGKYVGCRQVFVRLEGCNLDCSYCDTENKPGSHPACQVETAAGSRTFATIKNPMTASETAAVIANLLREVPHEAVSFTGGEPLLHAAFIRAVVLQLRALGQPCKVFLETNGTLYRELASILDITDIISMDIKLPSIVSRPQWEAHARFLELARTKDLYVKLVVSAETTKEEFEKSVALLEEQAPDALFIIQPVTPYGGCKAASPEKILACQSHALKHLKDVRVIPQTHKMIGQL

SEQ ID NO: 31803 - protein, 251 aa, Mitsuokella multacida
  misc_feature (1)..(251): tr|A0A356UPK8|A0A356UPK8_9FIRM 7-carboxy-7-deazaguanine synthase OS=Mitsuokella multacida OX=52226 GN=queE PE= 3 SV=1
MNASNENLIEIFSSIQGEGKYVGCRQVFVRLEGCNLDCSYCDTENKPGSHPACQVETAAGSRTFATIKNPMTATETASVIANLMREVPHEAVSFTGGEPLLHAAFIRAVVLQLRALGQSCKVFLETNGTLYRELASILDITDIISMDIKLPSIVSRPQWEAHARFLELARTKDLYVKLVVSAETTKEEFEKSVALLEEQAPDALFIIQPVTPYGGCKAASPEKILACQSYALKHLKDVRVIPQTHKMIGQL

SEQ ID NO: 31804 - protein, 243 aa, Mitsuokella sp.
  misc_feature (1)..(243): tr|A0A412KZN1|A0A412KZN1_9FIRM 7-carboxy-7-deazaguanine synthase OS=Mitsuokella sp. AF21-1AC OX=2292235 GN=que E PE=3 SV=1
MQENLIEIFSSIQGEGKYVGCRQVFVRFEGCNLDCRYCDTENAPGSHPVCEVETSAGSRQFEHVKNPLTVREAADAIRRLLEAVPHQAVSFTGGEPLLHGPFIRALAEHLDAPVFLETNGTLYRQLEEILDIVDIISMDIKLPSIVREPQWEAHKAFIRLAREKDLYIKLVVSAETSDAEFHTAVGIVAELAPEVPFIIQPVTPYGGCEAAAPGKILTYQAYALQYLRDVRVIPQTHKMIGQL

SEQ ID NO: 31805 - protein, 243 aa, Mitsuokella sp.; identical to SEQ ID NO: 31804
  misc_feature (1)..(243): tr|A0A415RBH1|A0A415RBH1_9FIRM 7-carboxy-7-deazaguanine synthase OS=Mitsuokella sp. AF33-22 OX=2292047 GN=queE PE=3 SV=1

SEQ ID NO: 31806 - protein, 223 aa, Mixta gaviniae
  misc_feature (1)..(223): tr|A0A2L0IJ23|A0A2L0IJ23_9GAMM 7-carboxy-7-deazaguanine synthase OS=Mixta gaviniae OX=665914 GN=queE PE=3 SV=1
MQYPINEMFQTLQGEGFYTGVPAIFIRLQGCPVGCSWCDTKHTWDKLADRETSLGDILIKTVESDAWGAADADALLTTIARQQWTARHVVITGGEPCIHDLTPLTAALQQAGFSCQIETSGTHAVQCTPETWVTVSPKVNMRGGYDVLDQALVRADEIKHPVARQRDIDALEELLARLEDEKARVIALQPISQKEEATRLCIATCIARNWRLSMQTHKYLNIA

SEQ ID NO: 31807 - protein, 223 aa, Mixta sp.
  misc_feature (1)..(223): tr|A0A506V6R3|A0A506V6R3_9GAMM 7-carboxy-7-deazaguanine synthase OS=Mixta sp. BIT-26 OX=2562439 GN=queE PE=3 S V=1
MQYPINEMFQTLQGEGYYTGVPAIFIRLQGCPVGCSWCDTKHTWDKLADRETSLGDILIKTVESDAWGAADADALLRTIAEQQWTARHVVITGGEPCIHDLTPLTEALQQAGFSCQIETSGTHPVRCTSQTWVTVSPKVNMRGGYDVLEQALLRADEIKHPVARQRDIDALDALLAGLSDSKTRIVALQPISQKEDATRLCIATCIARNWRLSMQTHKYLNIA

SEQ ID NO: 31808 - protein, 223 aa, Mixta theicola
  misc_feature (1)..(223): tr|A0A2K1Q7M6|A0A2K1Q7M6_9GAMM 7-carboxy-7-deazaguanine synthase OS=Mixta theicola OX=1458355 GN=queE PE=3 SV= 1
MQYPINEMFQTLQGEGFYTGVPAIFIRLQGCPVGCSWCDTKHTWDKLADRETSLGDILVKTVESDAWGAADADALLQTINQQQWTARHVVITGGEPCIHDLTPLTDALQQAGFSCQIETSGTHPVRCTAQTWVTVSPKVNMRGGYDVLDQALVRADEIKHPVARQRDIAALDQLLETIADDKQRIIALQPISQKEDATRLCIETCIARNWRLSMQTHKYLNIA

SEQ ID NO: 31809 - protein, 229 aa, Mizugakiibacter sediminis
  misc_feature (1)..(229): tr|A0A0K8QS16|A0A0K8QS16_9GAMM 7-carboxy-7-deazaguanine synthase OS=Mizugakiibacter sediminis OX=1475481 GN=qu eE PE=3 SV=1
MTAIVREAAEAAAPASATRLRITEIFHSIQGEADAVGWPTVFVRLTGCPLRCTWCDTEYAFHGGQWRDLDTILAEVAGYGARHVCVTGGEPLAQKRCLALLARLCDAGYEVALETSGALDVSGVDRRVRKVMDLKAPGSGEAARNLWSNLEHLTPRDQVKCVLADRADYDWAVARLREHRLAERCTVLFSPVHGALAPRELAEWILADRLPVRFQLQLHKALWGDVPGR

SEQ ID NO: 31810 - protein, 223 aa, Moellerella wisconsensis
  misc_feature (1)..(223): tr|A0A0H2QQX9|A0A0H2QQX9_9GAMM 7-carboxy-7-deazaguanine synthase OS=Moellerella wisconsensis OX=158849 GN=queE PE=3 SV=1
MQYPINEIFQTLQGEGVFTGVPAIFVRLQGCPVGCSWCDTKHTWQQEPQKQRSLGDILIKQVENDEWAFASVDEIIQRFEQQNYTARHIAITGGEPCIYDLRILTQGLEARGYRCQIETSGTYPIQCSENTWVTVSPKVGMKGGLKVLKEAIDRANEIKHPVAREKDIEALDNLLLLRDNISDLTVSLQPISQKLSATKLCIETCIARNWRLSVQTHKYLNIA

SEQ ID NO: 31811 - protein, 234 aa, Moellerella wisconsensis
  misc_feature (1)..(234): tr|A0A485A448|A0A485A448_9GAMM 7-carboxy-7-deazaguanine synthase OS=Moellerella wisconsensis OX=158849 GN=queE PE=3 SV=1
MLAELNAVEKVMQYPINEIFQTLQGEGVFTGVPAIFVRLQGCPVGCSWCDTKHTWQQEPQKQRSLGDILIKQVENDEWAFASVDEIIQRFEQQNYTARHIAITGGEPCIYDLRILTQGLEARGYRCQIETSGTYPIQCSENTWVTVSPKVGMKGGLKVLKEAIDRANEIKHPVAREKDIEALDHLLLLRDNISDLTVSLQPISQKLSATKLCIETCIARNWRLSVQTHKYLNIA

SEQ ID NO: 31812 - protein, 215 aa, Moheibacter sediminis
  misc_feature (1)..(215): tr|A0A1W2BGB4|A0A1W2BGB4_9FLAO 7-carboxy-7-deazaguanine synthase OS=Moheibacter sediminis OX=1434700 GN=queE P E=3 SV=1
MIALNSITEEQSELLKEGKFLPVMEHFYTLQGEGAHAGKAAYFIRLGGCDVGCHWCDVKDSWDAEKHPLTDIEKLAKEATDLSKTIIITGGEPLMWNLDFLTKKLKEFGAAIHIETSGAYSLSGQIDWITLSPKKLADVEPDVLEKASELKCIIFNNDDFRFAEKYAELVDSSCRLYLQVEWSKKEKMSPLVVEYVKANPKWQVSVQTHKYLDIP

SEQ ID NO: 31813 - protein, 197 aa, Mongoliibacter ruber
  misc_feature (1)..(197): tr|A0A2T0WBM3|A0A2T0WBM3_9BACT 7-carboxy-7-deazaguanine synthase OS=Mongoliibacter ruber OX=1750599 GN=queE PE =3 SV=1
MLPVMEAFYTIQGEGVHTGTPAYFIRLGGCDVGCVWCDVKESWEAEKWPVSTIEEIVQGALAYPGRMVVITGGEPLMYDLGPLTKLLKEKGFTINIETSGAHPFSGTFDWVCFSPKKFKEPHPSIYVQANELKVVIFHKSDFEFAEKHAVLVNDNCHKLLQPEWSRSTQHLQSIIDYVKFHPDWKISLQTHKFMDIP

SEQ ID NO: 31814 - protein, 226 aa, Monoglobus pectinilyticus
  misc_feature (1)..(226): tr|A0A2K9P5Y4|A0A2K9P5Y4_9FIRM 7-carboxy-7-deazaguanine synthase OS=Monoglobus pectinilyticus OX=1981510 GN=qu eE PE=3 SV=1
MNHDSQAFKVCEKFVSINGEGIKAGQLSVFVRFKGCNLDCSYCDTKWANEKDADFESMSTDEIVKYVVETSVQNVTLTGGEPLIQPGISGLIKNLKENDLNVEIETNGAVNLKPFCSDETRPDCFTMDYKLPSSGMEDSMLTDNFFYLKDSDCVKFVAGSENDLEKALKIIHEYDLTNRCHVYISPVFGSIEPVRIVEFMIENVLNNVNLQIQMHKVIWNPEERGV

SEQ ID NO: 31815 - protein, 259 aa, Moorea bouillonii
  misc_feature (1)..(259): tr|A0A1U7N318|A0A1U7N318_9CYAN 7-carboxy-7-deazaguanine synthase OS=Moorea bouillonii PNG OX=568701 GN=queE PE =3 SV=1
MLCGNQATARLIEVFSAIQGEGLNVGTRQIFIRFALCDLRCHFCDSFHTWTVPPQCQVEQTPGKRDFETYPNPVPLRSLLKWVNRQNKHRLHDSISLTGGEPLLHTPFLVEFLPELRQLTGLPIYLETGGHRPQEMAMVLPYLDSVGMDIKLPSVSGENRWAAHKEFLKLCHNSSVEVFVKLIIDCHTDPTELEQSADLVAAVSPEIPVFLQPVTPVEGSGQPIVAPTPEQVLAWQALMKLFLKQVRVLPQTHKMIGQL

SEQ ID NO: 31816 - protein, 259 aa, Moorea producens
  misc_feature (1)..(259): tr|A0A1D8U3B3|A0A1D8U3B3_9CYAN 7-carboxy-7-deazaguanine synthase OS=Moorea producens PAL-8-15-08-1 OX=1458985 GN=queE PE=3 SV=1
MPCGTQPTARLIEVFSAIQGEGLNVGTRQIFIRFALCDLRCHFCDSFHTWAVPPQCQVEQTPGKRDFETYPNPVPLRSLLKWVDRQNKHRLHDSISLTGGEPLLHTPFLVEFLPELRQLTGLPIYLETGGHRPEEIARVLPYLDSVGMDIKLPSVSGENRWADHREFLKVCHNSSVEVFVKLIIDYHTDPTDLEQSADLVAALSPEIPVFLQPVTPVEGSGQPIVTPTPEQVLAWQVLMKRSLKQVRVIPQTHKMIGQL

SEQ ID NO: 31817 - protein, 259 aa, Moorea producens
  misc_feature (1)..(259): tr|A0A1D9G0C5|A0A1D9G0C5_9CYAN 7-carboxy-7-deazaguanine synthase OS=Moorea producens JHB OX=1454205 GN=queE PE =3 SV=1
MPCGNQPTARLIEVFSAIQGEGLNVGTRQIFIRFALCDLRCHFCDSFHTWAVPPQCQVEQTPGKRDFETYPNPVPLPWLLKWVDRQNKHRLHDSISLTGGEPLLHTPFLVEFLPELRQLTGLPIYLETGGHRPEEMARVLPYLDSVGMDIKLPSVSGENRWAAHREFLKLCHNSSVEVFVKLIIDCQTDPTELEQSADLVAALSPEIPVFLQPVTPVEGSGQPIVAPTPEQVLAWQALMKRFLKQVRVLPQTHKMIGQL

SEQ ID NO: 31818 - protein, 212 aa, Moorella glycerini
  misc_feature (1)..(212): tr|A0A0C7NKP8|A0A0C7NKP8_9THEO 7-carboxy-7-deazaguanine synthase OS=Moorella glycerini OX=55779 GN=queE PE=3 S V=1
MLVKEIFLSLQGESTGAGLPTVFVRFSGCNLRCRYCDTKYAYEGGEEVSVQALFERISQYPYRRVCLTGGEPLLQSREELQKLLNVLSNYEVSIETNGSLPLEMVYLNPDQRWVMDIKCPGSGEVAANRWENLSLIRPEDEIKFVVSSEDDYIWAREFIRKNLPVSCERLLFSPAYGLLEPACLAEWILSDGLDVRLQLQLHKIIFGPESRM

SEQ ID NO: 31819 - protein, 220 aa, Moorella mulderi
  misc_feature (1)..(220): tr|A0A151AVA4|A0A151AVA4_9THEO 7-carboxy-7-deazaguanine synthase OS=Moorella mulderi DSM 14980 OX=1122241 GN=q ueE PE=4 SV=1
MDFPSEVCTTVFYGGCNFRCPWCHNADLVLRPFTLPEISPDEVLNLLSRRRSWVQAVCITGGEPTLAPGLEEFILSLKSCGFKVKLDTNGTQPEVLARLLAGGLLDYVAMDVKAPPEKYNLLTGTRADLEAVRESIALIKNSRVAYEFRTTVVPGLLLEEDFLAIGRLLRGARRYVLQQYRPAGTLLDGNFRDILPYPGATLNNIAQKLQPFFANVEIRI

SEQ ID NO: 31820 - protein, 234 aa, Moorella thermoacetica
  misc_feature (1)..(234): tr|A0A1J5NDT3|A0A1J5NDT3_MOOTH 7-carboxy-7-deazaguanine synthase OS=Moorella thermoacetica OX=1525 GN=queE PE= 4 SV=1
MIPIAIRGIQLTSLVDFPGTVCTTIFFGGCNFRCPWCHNADLVLRPSALPETSPAEVLNLLERRSAWVQAVCITGGEPTLAPDLEEFIRSLKASGFKVKLDTNGTQPGVIARLLAGGLLDYVAMDVKGPPEKYDLLTGIRANLEAVRESIALIKNSRVAYEFRTTVVPGLLAEEDLPAIGEMLAGARHYVLQQFRPAGTLLNPGLRELHPYPEATLKNIADTLQPFFARVEVRS

SEQ ID NO: 31821 - protein, 234 aa, Moorella thermoacetica
  misc_feature (1)..(234): tr|A0A1J5JEX2|A0A1J5JEX2_MOOTH 7-carboxy-7-deazaguanine synthase OS=Moorella thermoacetica OX=1525 GN=queE PE= 4 SV=1
MIPIAIRGIQLTSLVDFPGTVCTTIFFGGCNFRCPWCHNADLVLRPSALPETSPAEVLNLLERRSAWVQAVCITGGEPTLAPDLEEFIRSLKASGFKVKLDTNGSQPDVIARLLAGGLLDYVAMDVKGPPGKYDLLTGTRADLEAIKESIAFIKKSRVAYEFRTTVVPGLLAAEDLPAIGEMLAGARHYVLQQFRPGNTLLDASFRLLPPYSGSTLRALAQKLRPYIEKVEVRE

SEQ ID NO: 31822 - protein, 248 aa, Moraxella atlantae
  misc_feature (1)..(248): tr|A0A1B8QF82|A0A1B8QF82_9GAMM 7-carboxy-7-deazaguanine synthase OS=Moraxella atlantae OX=34059 GN=queE PE=3 S V=1
MSISNASDILLNTPLRNTTIPTTDPAAGLRVSEIFYSLQGEALTAGLPTVFIRLTGCPLRCVYCDTEYAFFGGERMSLEDIIADVARYACQRVCVTGGEPLAQPNAIALMRQLLDLGYEISLETSGALDVCGVPPAVSKVMDIKTPSSGEVDKNLWNNLACLTTHDQLKFVIMNRADYDWAKQVLARYDLADKVGTVWFSPMFNVYADRSPDVPSLATELAEWILADALPVRFQLQLHKIIWADAKGK

SEQ ID NO: 31823 - protein, 246 aa, Moraxella atlantae
  misc_feature (1)..(246): tr|A0A1B8QK37|A0A1B8QK37_9GAMM 7-carboxy-7-deazaguanine synthase OS=Moraxella atlantae OX=34059 GN=queE PE=3 S V=1
MSNASDILLNTPLRNTTIPTTDPAAGLRVSEIFYSLQGEALTAGLPTVFIRLTGCPLRCVYCDTEYAFFGGERMSLEDIIADVARYACQRVCVTGGEPLAQPNTIALMRQLLGLGYEISLETSGALDVCGVPPAVSKVMDIKTPSSGEVDKNLWNNLACLTTHDQLKFVIMNRADYDWAKQVLARYDLADKVGTVWFSPMFNVHADRSPEVPSLATELAEWILADALPVRFQLQLHKIIWADAKGK

SEQ ID NO: 31824 - protein, 295 aa, Moraxella bovis
  misc_feature (1)..(295): tr|A0A378PNC7|A0A378PNC7_MORBO 7-carboxy-7-deazaguanine synthase OS=Moraxella bovis OX=476 GN=queE PE=3 SV=1
MARTRLFICLMNLNWCILNVDIFNIIFFPKFCQKSAKIVSFSIIIIPMSANSQSQSTPKSIQLRNTQIPTTDPSAGLKLTEIFYSLQGEALAMGLPTIFIRLTGCPLRCVYCDTTYSFTGGERWGLDTILEHIKEYPCKRICLTGGEPLAQPNAIALMKLLLDNGYEISLETAGALSVKDVPIAVSKVMDLKSPSSGEVGKNLWENLDYLTPHDQIKIVIADRADYDWAKGVLQKYELDKKCGVVWFSPMFNIDERKSDVPNLAVELAEWILADGLPVRFQLQLHKIIWADAKGK

SEQ ID NO: 31825 - protein, 248 aa, Moraxella bovis
  misc_feature (1)..(248): tr|A0A1T0A4K6|A0A1T0A4K6_MORBO 7-carboxy-7-deazaguanine synthase OS=Moraxella bovis OX=476 GN=queE PE=3 SV=1
MSANSQSQSTPKSIQLRNTQIPTTDPSAGLKLTEIFYSLQGEALAMGLPTIFIRLTGCPLRCVYCDTTYSFAGGERWGLDTILEHIKEYPCKRICLTGGEPLAQPNAIALMKLLLDNGYEISLETAGALSVKDVPIAVSKVMDLKSPSSGEVGKNLWENLDYLTPHDQIKIVIADRADYDWAKGVLQKYELDKKCGVVWFSPMFNIDERKSDVPNLAVELAEWILADGLPVRFQLQLHKIIWADAKGK

SEQ ID NO: 31826 - protein, 239 aa, Moraxella bovoculi
  misc_feature (1)..(239): tr|A0A0U2B928|A0A0U2B928_9GAMM 7-carboxy-7-deazaguanine synthase OS=Moraxella bovoculi OX=386891 GN=queE PE=3 SV=1
MPNSTRLRNTFIPTTDPSAGLRLTEIFYSLQGEALAMGLPTIFIRLTGCPLRCVYCDTTYSFTGGERWGLDTILEYIKQYPCKRICLTGGEPLAQPNAIALMKLLLENGYEISLETAGALSVKDVPVAVSKVMDLKSPSSSEVGKNLWKNLEYLTNNDQIKIVIADRADYDWAKEMLQKYELDKKCGVVWFSPMFNIDERKSDVPNLAVELAEWILADGLPVRFQLQLHKIIWADAKGK

SEQ ID NO: 31827 - protein, 239 aa, Moraxella bovoculi
  misc_feature (1)..(239): tr|A0A066UPW4|A0A066UPW4_9GAMM 7-carboxy-7-deazaguanine synthase OS=Moraxella bovoculi 237 OX=743974 GN=queE P E=3 SV=1
MPNSTRLRNTFIPTTDPSAGLRLTEIFYSLQGEALAMGLPTIFIRLTGCPLRCVYCDTTYSFTGGERWGLDTILEYIKQYPCKRICLTGGEPLAQPNAIALMKLLLDNGYEISLETAGALSVKDVPVAVSKVMDLKSPSSGEVRKNLWKNLEYLTNNDQIKIVIADRADYDWAKEMLQKYELDKKCGVVWFSPMFNIDERKSDVPNLAVELAEWILADGLPVRFQLQLHKIIWADAKGK

SEQ ID NO: 31828 - protein, 239 aa, Moraxella canis
  misc_feature (1)..(239): tr|A0A1S9ZQI9|A0A1S9ZQI9_9GAMM 7-carboxy-7-deazaguanine synthase OS=Moraxella canis OX=90239 GN=queE PE=3 SV=1
MNQADTLRNTKIPTTDPQAGLKLTEIFYSLQGEALTSGLPTVFIRLTGCPLRCTYCDTTYSFSGGERWGLDDIMAHIAQYPCKRVCVTGGEPLAQPNAIALMQRLLESGYEISLETAGALSVADVPRSVSKVMDLKTPSSGEADKNLWENLAHLTSHDQIKIVIADRADYDWAKQMIEHHALHERVGTVWLSPMFDINETTSQAPTIATNLAEWILADALPVRLGLQLHKIIWADAKGK

SEQ ID NO: 31829 - protein, 246 aa, Moraxella caprae
  misc_feature (1)..(246): tr|A0A378R2Y8|A0A378R2Y8_9GAMM 7-carboxy-7-deazaguanine synthase OS=Moraxella caprae OX=90240 GN=queE PE=3 SV= 1
MSANSQSTPKSIQLRNTQIPTTDPSAGLKLTEIFYSLQGEALAMGLPTIFIRLTGCPLRCVYCDTTYSFTGGERWGLDTILEHVKEYPCKRICLTGGEPLAQPNSIALMKLLLENGYEISLETAGALSVKDVPIAVSKVMDLKSPSSGEVDKNLWENLGYLTSHDQIKIVIADRADYDWAKDVLQKYELDKKCGVVWFSPMFNIDERKSDVSNLAIKLAEWILADGLPVRFQLQLHKIIWADAKGK

SEQ ID NO: 31830 - protein, 266 aa, Moraxella catarrhalis
  misc_feature (1)..(266): tr|D5VAC7|D5VAC7_MORCB 7-carboxy-7-deazaguanine synthas e OS=Moraxella catarrhalis (strain BBH18) OX=1236608 GN =queE PE=3 SV=1
MDNPFAIYVEVWYNIAFYHHLTLKKPNIVTKDTLRNTKIPTTDPQAGLKLTEIFYSLQGEALTAGLPTIFIRLTGCPLRCHYCDTTYSFSGGERWGLDDIMTHIAQYPCWRVCVTGGEPLAQPNAIALMHKLIQSGYEVSLETAGALSVANVPPLVSKVMDLKSPSSGEADKNLWENLAHLTLHDQIKIVIANRTDYEWAKNIITKHALDDKVGTIWLSPMFNIQENTSHAPKLATDLAEWILKDALPVRFGLQLHKIIWADAKGK

SEQ ID NO: 31831 - protein, 238 aa, Moraxella catarrhalis
  misc_feature (1)..(238): tr|A0A3A9R5V0|A0A3A9R5V0_MORCA 7-carboxy-7-deazaguanine synthase OS=Moraxella catarrhalis OX=480 GN=queE PE=3 SV=1
MTKDTLRNTKIPTTDPQAGLKLTEIFYSLQGEALTAGLPTIFIRLTGCPLRCHYCDTTYSFSGGERWGLDDIMTHIAQYPCWRVCVTGGEPLAQPNAIALMHKLIQSGYEVSLETAGALSVANVPPLVSKVMDLKSPSSGEADKNLWENLAHLTLHDQIKIVIANRTDYEWAKNIITKHALDDKVGTIWLSPMFNIQENTSHAPKLATNLAEWILKDALPVRFGLQLHKIIWADAKGK

SEQ ID NO: 31832 - protein, 237 aa, Moraxella caviae
  misc_feature (1)..(237): tr|A0A1T0A119|A0A1T0A119_9GAMM 7-carboxy-7-deazaguanine synthase OS=Moraxella caviae OX=34060 GN=queE PE=3 SV= 1
MTALRNTQIPTTDPAAGLRLTEIFYSLQGEALTMGLPTIFVRLTGCPLRCTYCDTTYSFTGGERFGLDEIMVKIASFPCKRVCITGGEPLAQPNAIALMQMLVAAGFEVSLETAGALSVKDVPPQVSKVMDLKSPSSGECERNLWENLAHLTTHDQIKIVIADRADYDWAKQMLQTHELHKKCGTVWFSPMFNIDEAYKSDVPMLATNLAEWILADALPVRFQLQLHKIIWADAKGK

SEQ ID NO: 31833 - protein, 240 aa, Moraxella cuniculi
  misc_feature (1)..(240): tr|A0A3S4UJB9|A0A3S4UJB9_9GAMM 7-carboxy-7-deazaguanine synthase OS=Moraxella cuniculi OX=34061 GN=queE PE=3 S V=1
MNTKQTALRNTKIPTTDPQAGLKLTEIFYSLQGEALSSGLPTIFIRLTGCPLRCVYCDTTYSFTGGERWTLEGIADYIAKYPCQRVCITGGEPLAQPNAIALMQLLLDKGYEISLETAGALSVAEVPAAVSKVMDLKTPSSGEMDKNLWENLHHLGRHDQIKIVIADRKDYQWAKQIIATHRLHELVGTVWLSPMFNIHENHGNAPTLATDLAEWILADGLPVRFGLQLHKIIWADAKGK

SEQ ID NO: 31834 - protein, 240 aa, Moraxella cuniculi; identical to SEQ ID NO: 31833
  misc_feature (1)..(240): tr|A0A1N7F6P8|A0A1N7F6P8_9GAMM 7-carboxy-7-deazaguanine synthase OS=Moraxella cuniculi DSM 21768 OX=1122245 GN =queE PE=3 SV=1

SEQ ID NO: 31835 - protein, 241 aa, Moraxella equi
  misc_feature (1)..(241): tr|A0A378QQX2|A0A378QQX2_9GAMM 7-carboxy-7-deazaguanine synthase OS=Moraxella equi OX=60442 GN=queE PE=3 SV=1
MPTIIKTQLRNTQIPTTDPSAGLKLTEIFYSLQGEALAMGLPTIFIRLTGCPLRCVYCDTTYSFTGGQRWGLDAILEHIKQYPCKRICLTGGEPLAQPNAIALMKLLLKNGYEISLETAGALSVKDVPIAVSKVMDLKSPSSGEVDKNLWENLDYLTPHDQIKIVIADHADYDWAKDVLQKYELDKKCGVVWFSPMFNIDERKSDVPNLAVELAEWILADGLPVRFQLQLHKIIWADAKGK

SEQ ID NO: 31836 - protein, 239 aa, Moraxella lacunata
  misc_feature (1)..(239): tr|A0A1V4GUB9|A0A1V4GUB9_MORLA 7-carboxy-7-deazaguanine synthase OS=Moraxella lacunata OX=477 GN=queE PE=3 SV= 1
MPNPTPLRNTFIPTTDPSSGLRLTEIFYSLQGEALTMGLPTIFIRLTGCPLRCTYCDTTYSFTGGERWGLDAILEHIKQYPCKRICLTGGEPLAQPNAIALMKLLLDNGYEISLETAGALSVKDVPIAVSKVMDLKSPSSGEVDKNLWENLNYLTDNDQIKIVITDRADYDWAKDVLQKYELDKKCGVVWFSPMFNIDERKSDVPNLAVELAEWILADGLPVRFQLQLHKIIWADAKGK

SEQ ID NO: 31837 - protein, 239 aa, Moraxella lacunata
  misc_feature (1)..(239): tr|A0A378TUC0|A0A378TUC0_MORLA 7-carboxy-7-deazaguanine synthase OS=Moraxella lacunata OX=477 GN=queE PE=3 SV= 1
MPHPTALRNTFIPTTDPSAGLRLTEIFYSLQGEALAMGLPTIFIRLTGCPLRCVYCDTTYSFTGGERWGLDAILEHIKQYPCKRICLTGGEPLAQPNAIALMKLLLDNGYEISLETAGALSVKDVPVEVSKVMDLKTPSSGEDGKNLWENLDYLTPHDQIKIVIADRADYDWAKDVLQKYELDKKCGVVWFSPMFNIDERKSDVPNLAVELAEWILADGLPVRFQLQLHKIIWADAKGK

SEQ ID NO: 31838 - protein, 245 aa, Moraxella lincolnii
  misc_feature (1)..(245): tr|A0A1T0CD77|A0A1T0CD77_9GAMM 7-carboxy-7-deazaguanine synthase OS=Moraxella lincolnii OX=90241 GN=queE PE=3 SV=1
MPTTDPEAGLKLTEIFYSLQGEALTAGLPTIFIRLTGCPLRCVYCDTEYAFVGGQRWGLDDILTHIQQYPCQRVCVTGGEPLAQPNAIVLMQHLIDAGYEVSLETSGALSVADVPKQVSKVMDLKTPSSGEMTKNLWDNLTHLTQHDQLKFVIMNQKDYDWAKQQVIMHSLHHKVGVVWFSPMFEVNTPKVISISDDTACQHDQSPIQPVQQLAQQLADWILSDALPVRLQLQLHKIIWADAKGK

SEQ ID NO: 31839 - protein, 256 aa, Moraxella macacae
  misc_feature (1)..(256): tr|L2F6K9|L2F6K9_9GAMM 7-carboxy-7-deazaguanine synthas e OS=Moraxella macacae 0408225 OX=1230338 GN=queE PE=3 SV=1
MNNPLRTPLIPTTDPSAGLKVSEIFYSLQGEALTAGLPTIFIRLTGCPLRCVYCDTTYAFSGGERFSLTDILAKVKSFNCKRICLTGGEPLAQPNALALMNLLLEHSYEISLETAGALSVKNVPIAVSKVMDLKTPSSGEANKNLWENLAYLTTHDQLKLVIMNRDDYDWAVQKLFQYDLHKKVGTVWFSPMFNIHDAFNHNNALNHNNTLNSSNAFNSIIPSLATELAEWILADNLPVRFQLQLHKIIWADAKGK

SEQ ID NO: 31840 - protein, 238 aa, Moraxella nonliquefaciens
  misc_feature (1)..(238): tr|A0A1B8PLC8|A0A1B8PLC8_MORNO 7-carboxy-7-deazaguanine synthase OS=Moraxella nonliquefaciens OX=478 GN=queE P E=3 SV=1
MSPPLLRNISIPTTDPSAGLRLTEIFYSLQGEALTMGMPTIFIRLTGCPLRCVYCDTTYSFTGGERWGLDAILAYIKRYPCKRICLTGGEPLAQPNAIALMRLLVDDGYEVSLETAGALSVKNVPVVVSKVMDLKSPSSGENAKNLWQNLDYLTCHDQIKIVIADRADYEWAKNVLHQYQLDKKCGVVWFSPMFNIDERKSDVPNLAVELAEWILADGLPVRFQLQLHKIIWADAKGK

SEQ ID NO: 31841 - protein, 238 aa, Moraxella nonliquefaciens
  misc_feature (1)..(238): tr|A0A1B8QMM7|A0A1B8QMM7_MORNO 7-carboxy-7-deazaguanine synthase OS=Moraxella nonliquefaciens OX=478 GN=queE P E=3 SV=1
MSPPLLRNISIPTTDPSAGLRLTEIFYSLQGEALTMGMPTIFIRLTGCPLRCVYCDTTYSFTGGERWGLDAILAYIKKYPCKRICLTGGEPLAQPNAITLMRLLVDDGYEVSLETAGALSVKNVPVAVSKVMDLKSPSSGENAKNLWQNLDYLTCHDQIKIVIADRADYEWAKNVLHQYQLDKKCGVVWFSPMFNIDERKSDVPNLAVELAEWILADGLPVRFQLQLHKIIWADAKGK

SEQ ID NO: 31842 - protein, 240 aa, Moraxella osloensis
  misc_feature (1)..(240): tr|A0A378Q8S1|A0A378Q8S1_9GAMM 7-carboxy-7-deazaguanine synthase OS=Moraxella osloensis OX=34062 GN=queE PE=3 SV=1
MPNSTLPIRNTAIPTTDPEAGLKVTEIFYSLQGEALTAGLPTIFIRLTGCPLRCVYCDTEYAFVGGERMSLAGILAVCQSFPCQRICLTGGEPLAQPNAIALMNLLLAHGYEISLETSGALSVAEVPTAVSKVMDIKTPSSQEADKNLWQNLPYLTAHDQIKFVIMNRDDYDWSKKILSDYQLDKKVATVWFSPMFNVEERQANVPTLAADLAEWILADALPVRFQLQLHKIIWADAKGK

SEQ ID NO: 31843 - protein, 240 aa, Moraxella osloensis
  misc_feature (1)..(240): tr|A0A173MWU6|A0A173MWU6_9GAMM 7-carboxy-7-deazaguanine synthase OS=Moraxella osloensis OX=34062 GN=queE PE=3 SV=1
MPNSTLPIRNTAIPTTDPEAGLKITEIFYSLQGEALTAGLPTIFIRLTGCPLRCVYCDTEYAFVGGERMSLAGILAVCQSFSCQRICLTGGEPLAQPNAIALMNLLLAHGYEISLETSGALSVAEVPTAVSKVMDIKTPSSQEADKNLWQNLPYLTAHDQIKFVIMNRDDYDWSKKILSDYQLDKKVATVWFSPMFNVEERQANVPTLATDLAEWILADALPVRFQLQLHKIIWADAKGK

SEQ ID NO: 31844 - protein, 239 aa, Moraxella ovis
  misc_feature (1)..(239): tr|A0A378PLJ5|A0A378PLJ5_9GAMM 7-carboxy-7-deazaguanine synthase OS=Moraxella ovis OX=29433 GN=queE PE=3 SV=1
MPNSTRLRNTFIPTTDPSSGLRLTEIFYSLQGEALAMGLPTIFIRLTGCPLRCVYCDTTYSFTGGERWGLDTILEYIKQYPCKRICLTGGEPLAQPNAIALMKLLLENGYEISLETAGALSVKDVPVAVSKVMDLKSPSSGEDGKNLWENLDYLTAHDQLKIVIADRADYDWAKEMLQKYELDKKCGVVWFSPMFNIDERKSDVPNLAVELAEWILADGLPVRFQLQLHKIIWADAKGK

SEQ ID NO: 31845 - protein, 240 aa, Moraxella pluranimalium
  misc_feature (1)..(240): tr|A0A1T0CM03|A0A1T0CM03_9GAMM 7-carboxy-7-deazaguanine synthase OS=Moraxella pluranimalium OX=470453 GN=queE PE=3 SV=1
MTITDPLRNTKIPTTDPQAGLKLTEIFYSLQGEALASGLPTIFIRLTGCPLRCTYCDTTYSFTGGERFSLDEIIDHISQYPCKRVCVTGGEPLAQPNAIALMDRLLSLGYEISLETAGALSVKDVPTAVSKVMDLKTPSSGEMNKNLWKNLDYLTHHDQLKIVIADRADYDWAVAQLHAYELDKKVGTVWFSPMFDVHTAHKGEVPNMATQLAEWILADGLPVRFGLQLHKIIWADAKGK

SEQ ID NO: 31846 - protein, 240 aa, Moraxella porci
  misc_feature (1)..(240): tr|A0A1T0CRY0|A0A1T0CRY0_9GAMM 7-carboxy-7-deazaguanine synthase OS=Moraxella porci DSM 25326 OX=573983 GN=que E PE=3 SV=1
MTITDPLRNTKIPTTDPQAGLKLTEIFYSLQGEALASGLPTIFIRLTGCPLRCTYCDTTYSFTGGERFSLDEIIDHISQYPCKRVCVTGGEPLAQPNAIALMDRLLSLGYEISLETAGALPVKDVPTAVSKVMDLKTPSSGEMDKNLWKNLDYLTHHDQLKIVIADRADYDWAVAQLHAYELDKKVGTVWFSPMFDVHTAHKGEVPSMATQLAEWILADGLPVRFGLQLHKIIWADAKGK

SEQ ID NO: 31847 - protein, 238 aa, Moraxella sp.
  misc_feature (1)..(238): tr|A0A229GUS4|A0A229GUS4_9GAMM 7-carboxy-7-deazaguanine synthase OS=Moraxella sp. VT-16-12 OX=2014877 GN=queE PE=3 SV=1
MPTTPLRNTLIPTTDPAAGLRLTEIFYSLQGEALSMGLPTIFIRLTGCPLRCTYCDTVYSFTGGERHGLDDILAHIAQYPCKRVCITGGEPLAQPNVIALMRLLLAHGYDASLETSGALSVAHVPPAISKVMDLKSPSSGECERNLWENINHLTTHDQLKIVIADRNDYDWAKTQITTHQLDKKCGVIWLSPMFEIDPDKMGVPTIATDLAQWILDDGLPVRFGLQLHKIIWADARGK

SEQ ID NO: 31848 - protein, 240 aa, Moraxella sp.
  misc_feature (1)..(240): tr|A0A2K0XUU5|A0A2K0XUU5_9GAMM 7-carboxy-7-deazaguanine synthase OS=Moraxella sp. RCAD0137 OX=1775913 GN=queE PE=3 SV=1
MTITDPLRNTKIPTTDPQAGLKLTEIFYSLQGEALTSGLPTIFIRLTGCPLRCTYCDTTYSFTGGERFSLDEIIDHISQYPCKRVCVTGGEPLAQPNAIALMDRLLSLGYEISLETAGALSVKDVPTAVSKVMDLKTPSSGEMDKNLWKNLDYLTHHDQLKIVIADRADYDWAVDKLHTYKLDKKVGTVWFSPMFDVHTAHKGEVPNMATQLAEWILADGLPVRFGLQLHKIIWADAKGK

SEQ ID NO: 31849 - protein, 237 aa, Moraxellaceae bacterium
  misc_feature (1)..(237): tr|A0A345P5K6|A0A345P5K6_9GAMM 7-carboxy-7-deazaguanine synthase OS=Moraxellaceae bacterium HYN0046 OX=2283318 GN=queE PE=3 SV=1
MNPLRSTQIPVTDPAAGLRITEIFYSLQGEARDSGYPTVFVRLTGCPLRCTYCDTAYAFEGGIRWSLDAILAEVAQHEGVRHVCVTGGEPLAQPNCIPLLHALCNAGYVVSLETSGAIDVSTVDLRVSRVVDLKTPDSGEMKRNLLTNLPLLTKHDQIKFVITSRTDYEWSRDMLKVHELDKLVGEVWFSPSFAIEVGQVKLPKLARELADWIVEDKLPVRFQLQLHKLLWQDEAGR

SEQ ID NO: 31850 - protein, 240 aa, Moraxellaceae bacterium
  misc_feature (1)..(240): tr|A0A3D3KCV1|A0A3D3KCV1_9GAMM 7-carboxy-7-deazaguanine synthase OS=Moraxellaceae bacterium OX=1889775 GN=queE PE=3 SV=1
MPNSTLPIRNTAIPTTDPEAGLKITEIFYSLQGEALTAGLPTIFIRLTGCPLRCVYCDTEYAFVGGERMSLAGILAVCQSFPCQRICLTGGEPLAQPNAIALMNLLLAHGYEISLETSGALSVAEVPTAVSKVMDIKTPSSQEADKNLWQNIPYLTAHDQIKFVIMNRDDYDWSKQILADYQLDKKVATVWFSPMFNVEERQTNVPTLATDLAEWILADALPVRFQLQLHKIIWADAKGK

SEQ ID NO: 31851 - protein, 223 aa, Morganella morganii
  misc_feature (1)..(223): tr|M7CP67|M7CP67_MORMO 7-carboxy-7-deazaguanine synthas e OS=Morganella morganii SC01 OX=1239989 GN=queE PE=3 S V=1
MQYPINEIFQTLQGEGVFTGVPAIFVRLQRCPVGCSWCDTKHTWEQLPEKVCSAEDMMSKTEEDDRWASLDADSIIMQFEAKGYTARHVVITGGEPCLYDLRPLTAVLEARGYQCQIETSGTQPVQCSEKTWVTVSPKVNMRGGYDVLTPSLLRADEVKHPVGRQRDIDELDLLLAKLPGDKQPVVALQPISQKPAATALCIETCIARNWRFSMQTHKYLNIA

SEQ ID NO: 31852 - protein, 223 aa, Morganella morganii
  misc_feature (1)..(223): tr|A0A2S1B9E0|A0A2S1B9E0_MORMO 7-carboxy-7-deazaguanine synthase OS=Morganella morganii OX=582 GN=queE PE=3 SV =1
MQYPINEIFQTLQGEGVFTGVPAIFVRLQRCPVGCSWCDTKHTWEQLPEKACSAEDMMNKAEEDDRWASLDADSIIMQFEAKVYTARHVVITGGEPCLYDLRPLTAVLEARGYQCQIETSGTQPVQCSEKTWVTVSPKVNMRGGYDVLTPSLLRADEVKHPVGRQRDIDELDLLLAKLPGDKQPVVALQPISQKPAATALCIETCIARNWRFSMQTHKYLNIA

SEQ ID NO: 31853 - protein, 223 aa, Morganella psychrotolerans
  misc_feature (1)..(223): tr|A0A1B8HAM0|A0A1B8HAM0_9GAMM 7-carboxy-7-deazaguanine synthase OS=Morganella psychrotolerans OX=368603 GN=qu eE PE=3 SV=1
MHYPINEIFQTLQGEGVFTGVPAIFVRLQRCPVGCSWCDTKHTWEQDPEKICPADMMMNKTQEDDRWASLSAQDIIMQFGAQGYTARHVVVTGGEPCLYDLQPLTAALEAQGWQCQIETSGTQPVSCSEKTWVTVSPKVNMRGGYDVLTSALIRADEVKHPVGRQRDIDELDLLLAKLPSGEYPVVALQPISQKPAATELCIKTCIARNWRFSMQTHKYLNIA

SEQ ID NO: 31854 - protein, 223 aa, Morganella psychrotolerans
  misc_feature (1)..(223): tr|A0A1B8H9S4|A0A1B8H9S4_9GAMM 7-carboxy-7-deazaguanine synthase OS=Morganella psychrotolerans OX=368603 GN=qu eE PE=3 SV=1
MHYPINEIFQTLQGEGVFTGVPAIFVRLQRCPVGCSWCDTKHTWEQDPEKICSADMMMNKTQENDRWASLSAQDIIMQFTAQGYTARHVVITGGEPCLYDLQPLTAELEAQGWRCQIETSGTQPVLCSEKTWVTVSPKVNMRGGYDVLTSALIRADEVKHPVGRQRDIDELDLLLAKLPSGKYPVVALQPISQKPAATQLCIKTCIARNWRFSMQTHKYLNIA

SEQ ID NO: 31855 - protein, 223 aa, Morganella sp.
  misc_feature (1)..(223): tr|A0A3D3HNG3|A0A3D3HNG3_9GAMM 7-carboxy-7-deazaguanine synthase OS=Morganella sp. (in: Bacteria) OX=1912315 G N=queE PE=3 SV=1
MHYPINEIFQTLQGEGVFTGVPAIFVRLQCCPVGCSWCDTKHTWEQDPEKICSADVMMSKTQEDDRWASLSAEHIIMQFTAQGYTARHIVITGGEPCLYDLQPLTAELEAQGWQCQIETSGTQPVLCSEKTWVTVSPKVNMRGGYDVLTSALIRADEVKHPVGRQRDIDELDLLLAKLPSGKCPVVALQPISQKPAATELCIKTCIARNWRFSMQTHKYLNIA

SEQ ID NO: 31856 - protein, 222 aa, Moritella marina
  misc_feature (1)..(222): tr|A0A5J6WK22|A0A5J6WK22_MORMI 7-carboxy-7-deazaguanine synthase QueE OS=Moritella marina ATCC 15381 OX=120296 2 GN=queE PE=4 SV=1
MQYPVNEIFETVQGEGHFTGYPVIFIRLQGCDVGCSWCDTKQTWTVDPEMQVSQQTVNKACDDKPHWANFTAQEFITMIQKNGFVAKHIVISGGEPCQYDLVELTSKLEQAGYFCQIETSGTSEVRATDSTWVTVSPKIQMKGQLPVLQSALRRANEIKHVIAMEKHIDELDALIADIDLTHKIMCLQPISQQQRATELAIKLCIERNWKLSVQMHKYIFID

SEQ ID NO: 31857 - protein, 222 aa, Moritella sp.
  misc_feature (1)..(222): tr|A0A137S3H4|A0A137S3H4_9GAMM 7-carboxy-7-deazaguanine synthase OS=Moritella sp. JT01 OX=756698 GN=queE PE=3 SV=1
MQYPVNEIFETVQGEGHFTGYPVIFIRLQGCDVGCSWCDTKQTWTVDPEMQVSQQTVNKACDDKPHWANFTAQEFIAMIQKNGFVAKHIVISGGEPCQYDLVELTRELEHAGYFCQIETSGTSEVRATDTTWVTVSPKIQMKGQLPVLQSALRRANEIKHVIAMEKHIEELDELIANIDTADKIMCLQPISQQKRATDLAIKLCIERNWKLSVQMHKYIFID

SEQ ID NO: 31858 - protein, 222 aa, Moritella sp.
  misc_feature (1)..(222): tr|A6FFG0|A6FFG0_9GAMM 7-carboxy-7-deazaguanine synthas e OS=Moritella sp. PE36 OX=58051 GN=queE PE=3 SV=1
MQYPVNEIFETVQGEGHFTGYPVIFIRLQGCDVGCSWCDTKQTWTVDPEMQVSQQTVNKACDDKPHWANFTAQEFITMIQKNGFVAKHIVISGGEPCQYDLVELTSELEQAGYFCQIETSGTSEVRATDSTWVTVSPKIQMKGQLPVLQSALRRANEIKHVIAMEKHIEELDALIADIDTSDKIMCLQPISQQKRATDLAIKLCIERNWKLSVQMHKYIFID

SEQ ID NO: 31859 - protein, 222 aa, Moritella viscosa
  misc_feature (1)..(222): tr|A0A090IE46|A0A090IE46_9GAMM 7-carboxy-7-deazaguanine synthase OS=Moritella viscosa OX=80854 GN=queE PE=3 SV =1
MQYPVNEIFETVQGEGHFTGYPVIFIRLQGCDVGCSWCDTKQTWTVDPEMQVSQQAVNKACDDKPHWANFTAQEFIAMIQKNGFVAKHIVISGGEPCQYDLVELTGELEQAGYFCQIETSGTSEVRATDTTWVTVSPKIQMKGQLPVLQSALRRANEIKHVIAMEKHIEELDELIANIDTEDKIMCLQPISQQKRATDLAIKLCIERNWKLSVQMHKYIFID

SEQ ID NO: 31860 - protein, 222 aa, Moritella yayanosii
  misc_feature (1)..(222): tr|A0A330LL78|A0A330LL78_9GAMM 7-carboxy-7-deazaguanine synthase OS=Moritella yayanosii OX=69539 GN=ygcF PE=3 SV=1
MQYPVNEIFETVQGEGHFTGFPVIFIRLQGCDVGCSWCDTKQTWLVDPEMQVSQQTVNKACDDKPHWANFTAQEFITMIQKNGFVAKHIVISGGEPCQYDLVELTSKLEQAGYFCQIETSGTSEVRATDSTWVTVSPKIQMKGQLPVLQSALRRANEIKHVIAMEKHIEELDALIVDIDTSDKIMCLQPISQQKRATDLAIKLCIERNWKLSVQMHKYIFID

SEQ ID NO: 31861 - protein, 212 aa, Morococcus cerebrosus
  misc_feature (1)..(212): tr|A0A0C1GYU0|A0A0C1GYU0_9NEIS 7-carboxy-7-deazaguanine synthase OS=Morococcus cerebrosus OX=1056807 GN=queE P E=3 SV=1
MKKISVAPENPQYRIVEIFESLQGEGWNTGMAAVFLRLGKCNLACGWCDTDYLTFGMMSLSDILGRLKTYTARNIIITGGEPTIQPHLDMLLDALKAEGYFLCIETNGLKPAPPQIDYVATSPKACYAAKYEKSCIETADEVRIVADGDVVAFCEKMERKIRARHYYLSPCEQNGVMNIYDTIRQIGILNSRPDAPVHWQLSVQTHKWAGIE

SEQ ID NO: 31862 - protein, 225 aa, Motilimonas sp.
  misc_feature (1)..(225): tr|A0A418YG91|A0A418YG91_9GAMM 7-carboxy-7-deazaguanine synthase OS=Motilimonas sp. PLHSC7-2 OX=2303987 GN=que E PE=3 SV=1
MAQQYRINEMFQTIQGEGVYTGVPAVFIRLQGCDVGCPWCDTQHTWHIADQDKTDLIIITDKSNESSRWAQVDSCGIIKEMQRLGYVAKHVVITGGEPCMYDLRELTLALHQQGYSTQIETSGTYKVQVADASFVTVSPKVNMKGGLSVRKDALLRANEIKHPVGTAKDIDALDALIQPLHKQLQAQICLQPISQKPRATQLATQVCIERNWRLSIQTHKYIGID

SEQ ID NO: 31863 - protein, 214 aa, Motiliproteus coralliicola
  misc_feature (1)..(214): tr|A0A369WRH9|A0A369WRH9_9GAMM 7-carboxy-7-deazaguanine synthase OS=Motiliproteus coralliicola OX=2283196 GN=q ueE PE=3 SV=1
MYSVKEIFYSLQGEGAQAGRASIFCRFSGCNLWSGREQDRAKAQCDFCDTDFVGTDGELGGKYPTAEQLADTVAALWRRRSNQAQGGTPYVICTGGEPLLQLDETLIQAFQARGFEVAVETNGTLPAPAGLDWICVSPKGSSELVQLRGHELKLVHPQSGVDPADFASLDFDNFYLQPLDGGDNNANLNACLSYCHEHPRWRLSLQVHKLVDIP

SEQ ID NO: 31864 - protein, 210 aa, Motiliproteus sp.
  misc_feature (1)..(210): tr|A0A1R1MG73|A0A1R1MG73_9GAMM 7-carboxy-7-deazaguanine synthase OS=Motiliproteus sp. MSK22-1 OX=1897630 GN=qu eE PE=3 SV=1
MYSVKELFYSLQGEGAHAGRAAVFCRFTGCNLWSGREQDRAKAACNFCDTDFVGTDGEGGGKYGRATDLAKAAMALWPASQRDSAYLICTGGEPLLQLDQELVSAFKAVGFEVAIETNGTLPAPTDIDWICVSPKGSSELVLQQGDELKLVYRQQDALPERFENLDFSYFFLQAMAGPQEKEQLQQCVKYCQEHPQWRLSLQTHKLIGIP

SEQ ID NO: 31865 - protein, 207 aa, Mucilaginibacter auburnensis
  misc_feature (1)..(207): tr|A0A2H9VMJ2|A0A2H9VMJ2_9SPHI 7-carboxy-7-deazaguanine synthase OS=Mucilaginibacter auburnensis OX=1457233 GN =queE PE=3 SV=1
MAHQVPEDGTLLPLMEEFYTIQGEGFNTGKAAYFIRLGGCDVGCHWCDVKESWNAELHPLTSSDTIVEHASQFPSKAVVVTGGEPLIYNLDYLTTRLQQSGIQTFIETSGAYPLSGSWDWVCLSPKKFKAPMQQVADVANELKVIIFNKSDFAFAEENALRVKPGCKLYLQPEWSRNKEMTPLIVEYVMNNPKWEISLQTHKYLNIP

SEQ ID NO: 31866 - protein, 243 aa, Mucilaginibacter frigoritolerans
  misc_feature (1)..(243): tr|A0A562UHK9|A0A562UHK9_9SPHI 7-carboxy-7-deazaguanine synthase OS=Mucilaginibacter frigoritolerans OX=652788 GN=queE PE=3 SV=1
MDFLLWTIDYGLTKLSTQKKPSPLSFRHKTVLLHFIMAHQIPDDGTLLPLMEEFYTIQGEGFNTGKAAYFIRLGGCDVGCHWCDVKESWDAELHALTAADQIIANASVHPSKAVVVTGGEPLIYNLDYLTAGLQQKGIKTFIETSGAYPLSGSWDWICLSPKKFKSPMPSVAEKADELKVIIFNKSDFEFAECNAKLVSNTCKLFLQPEWSKSKEMIPLIVDYVMNNPQWEISLQTHKYLNIP

SEQ ID NO: 31867 - protein, 207 aa, Mucilaginibacter ginsenosidivorans
  misc_feature (1)..(207): tr|A0A5B8UYU7|A0A5B8UYU7_9SPHI 7-carboxy-7-deazaguanine synthase OS=Mucilaginibacter ginsenosidivorans OX=3980 53 GN=queE PE=3 SV=1
MAHQVPDDGTLLPLMEEFYTIQGEGFNTGKAAYFIRLGGCDVGCHWCDVKESWDAELHPLTAADKIVENALKYPSRAVVVTGGEPLLYNLDYLTSGLRENGIKTFIETSGAYPMSGQWDWVCLSPKKFKKPAAGIAQHADELKVIIFNKSDFAWAEEHAAMVSAQCKLYLQPEWSKAKEMTPLIVDYVMNNPKWEISLQTHKYLNIP

SEQ ID NO: 31868 - protein, 207 aa, Mucilaginibacter ginsenosidivorax
  misc_feature (1)..(207): tr|A0A5B8WAE4|A0A5B8WAE4_9SPHI 7-carboxy-7-deazaguanine synthase OS=Mucilaginibacter ginsenosidivorax OX=86212 6 GN=queE PE=3 SV=1
MAHQIPDDGTLLPLMEEFYTIQGEGYNTGKAAYFIRLGGCDVGCHWCDVKESWDAELHPLTAADQIVANASVHPSKAVVVTGGEPLIYNLDYLTTQLHERGIKTFIETSGAYPLSGDWDWICLSPKKFKAPTPQVAEHAHELKVIVFNKSDFEWAEYHAKMVSPDCKLYLQPEWSKSKEMTPLIVDYVMNNPQWEISLQTHKYLNIP

SEQ ID NO: 31869 - protein, 207 aa, Mucilaginibacter gossypii
  misc_feature (1)..(207): tr|A0A1G7TIL1|A0A1G7TIL1_9SPHI 7-carboxy-7-deazaguanine synthase OS=Mucilaginibacter gossypii OX=551996 GN=que E PE=3 SV=1
MAHQIPDDGTLLPLMEEFYTIQGEGYNTGKAAYFIRLGGCDVGCHWCDVKESWDAELHPLTAADTIVSNADLHPAKAVVVTGGEPLIYNLDYLTHNLHEKGIKTFIETSGAYPLSGDWDWICLSPKKFKAPTPNVAECAHELKVIVFNKSDFEWAEYHAKMVSPDCKLYLQPEWSKSKEMTPLIVDYVKENPQWEISLQTHKYLNIP

SEQ ID NO: 31870 - protein, 207 aa, Mucilaginibacter gossypii
  misc_feature (1)..(207): tr|A0A5C1IGS8|A0A5C1IGS8_9SPHI 7-carboxy-7-deazaguanine synthase OS=Mucilaginibacter gossypii OX=551996 GN=que E PE=3 SV=1
MAHQIPDDGTLLPLMEEFYTIQGEGYNTGKAAYFIRLGGCDVGCHWCDVKESWDAELHPLTAADTIVSNAALHPAKAVVVTGGEPLIYNLDYLTHNLHEKGIKTFIETSGAYPLSGDWDWICLSPKKFKAPTPNVAECAHELKVIVFNKSDFEWAEYHAKMVSPDCKLYLQPEWSKSKEMTPLIVDYVKENPQWEISLQTHKYLNIP

SEQ ID NO: 31871 - protein, 207 aa, Mucilaginibacter gossypiicola
  misc_feature (1)..(207): tr|A0A1H7ZKZ1|A0A1H7ZKZ1_9SPHI 7-carboxy-7-deazaguanine synthase OS=Mucilaginibacter gossypiicola OX=551995 GN =queE PE=3 SV=1
MAHQIPDDGTLLPLMEEFYTIQGEGYNTGKAAYFIRLGGCDVGCHWCDVKESWDAELHALTAADTIVSNAALHPAKAVVVTGGEPLIYNLDYLTHQLHEKGIKTFIETSGAYPLSGDWDWICLSPKKFKAPTPNVAESAHELKVIVFNKSDFEWAEYHAKMVSPDCKLYLQPEWSKSKEMTPLIVDYVKENPQWEISLQTHKYLNIP

SEQ ID NO: 31872 - protein, 207 aa, Mucilaginibacter gotjawali
  misc_feature (1)..(207): tr|A0A0X8X7B3|A0A0X8X7B3_9SPHI 7-carboxy-7-deazaguanine synthase OS=Mucilaginibacter gotjawali OX=1550579 GN=q ueE PE=3 SV=1
MAHQIPEDGTQLPLMEEFYTIQGEGFHTGKAAYFIRLGGCDVGCHWCDVKESWNAELHALTYADQIVENASKYPSKAVVVTGGEPLIYNLDYLTAGLQGRGIKTFIETSGAYPLSGHWDWICLSPKKFKAPTKNVADHADELKVIIFNKSDFAFAEENAKLVSPGCKLYLQPEWSKSKEMTPLIVDYVMNNPHWEISLQTHKYLNIP

SEQ ID NO: 31873 - protein, 207 aa, Mucilaginibacter gracilis
  misc_feature (1)..(207): tr|A0A495J4G7|A0A495J4G7_9SPHI 7-carboxy-7-deazaguanine synthase OS=Mucilaginibacter gracilis OX=423350 GN=que E PE=3 SV=1
MVNQIPEDGTLLPLMEEFYTIQGEGYNTGKAAYFIRLGGCDVGCHWCDVKESWDASIHPLTLADTIVTNAEKFPGKAVVVTGGEPLIYNLDYLTAQLQQRGIKTFIETSGAYPLSGSWDWICLSPKKFKSPNPNVAPFAHELKVIVFNKSDFVWAEQYAELVSPDCKLYLQPEWSKSKENIPLIVDYVMNNPKWEISLQTHKYLNIP

SEQ ID NO: 31874 - protein, 207 aa, Mucilaginibacter lappiensis
  misc_feature (1)..(207): tr|A0A1N6X2P0|A0A1N6X2P0_9SPHI 7-carboxy-7-deazaguanine synthase OS=Mucilaginibacter lappiensis OX=354630 GN=q ueE PE=3 SV=1
MAHQIPDDGTLLPLMEEFYTIQGEGYNTGKAAYFIRLGGCDVGCHWCDVKESWDAELHPLTATDQIVVNASVHPSKAVVVTGGEPLIYNLDYLTSQLHEKGIKTFIETSGAYPLSGDWDWICLSPKKFKAPMPHVAENAHELKVIVFNKSDFEWAEYHAKMVSPDCKLYLQPEWSKSKEMTPLIVDYVMNNPQWEISLQTHKYLNIP

SEQ ID NO: 31875 - protein, 207 aa, Mucilaginibacter mallensis
  misc_feature (1)..(207): tr|A0A1H1UV04|A0A1H1UV04_9SPHI 7-carboxy-7-deazaguanine synthase OS=Mucilaginibacter mallensis OX=652787 GN=qu eE PE=3 SV=1
MAHQIPDDGTLLPLMEEFYTIQGEGYHTGKAAYFIRLGGCDVGCHWCDVKESWDAELHALTAADTIAENASRFPSKAVVVTGGEPLIYNLDYLTSQLQQKGIKTFIETSGAYPLSGHWDWICLSPKKFKGPTTSVAAKADELKVIIFNKSDFEWAEQHAKLVSPDCKLYLQPEWSKSKEMTPLIVEYVMNNPHWEISLQTHKYLNIP

SEQ ID NO: 31876 - protein, 207 aa, Mucilaginibacter oryzae
  misc_feature (1)..(207): tr|A0A316HL11|A0A316HL11_9SPHI 7-carboxy-7-deazaguanine synthase OS=Mucilaginibacter oryzae OX=468058 GN=queE PE=3 SV=1
MAHQIPDDGTLLPLMEEFYTIQGEGYNTGKAAYFIRLGGCDVGCHWCDVKESWDAELHALTAADTIVANANLHPAKAVVVTGGEPLIYNLDYLTHQLHEKGIKTFIETSGAYPLSGDWDWICLSPKKFKAPVPHVAECAHELKVIVFNKSDFEWAEYHAKMVSPDCKLYLQPEWSKAKDMTPLIVDYVKENPQWEISLQTHKYLNIP

SEQ ID NO: 31877 - protein, 207 aa, Mucilaginibacter paludis
  misc_feature (1)..(207): tr|H1YFL4|H1YFL4_9SPHI 7-carboxy-7-deazaguanine synthas e OS=Mucilaginibacter paludis DSM 18603 OX=714943 GN=qu eE PE=3 SV=1
MANQIPEDGTLLPLMEEFYTIQGEGYNTGKAAYFIRLGGCDVGCHWCDVKESWDASIHPLTPSDTIVDNAVKYPGKAVVVTGGEPLIYNLDYLTAQLQQKGIKTFIETSGAYPLSGSWDWICLSPKKFKAPSASVAPYAHELKVIVFNKSDFAWAEQYAALVSPGCKLYLQPEWSKSKEMIPLIVDYVMNNPQWEISLQTHKYLNIP

SEQ ID NO: 31878 - protein, 207 aa, Mucilaginibacter pedocola
  misc_feature (1)..(207): tr|A0A1S9PLE2|A0A1S9PLE2_9SPHI 7-carboxy-7-deazaguanine synthase OS=Mucilaginibacter pedocola OX=1792845 GN=qu eE PE=3 SV=1
MAHQVPEDGTLLPLMEEFYTIQGEGYNTGKAAYFIRLGGCDVGCHWCDVKESWDAEMHPLTHADTIVENAKKHPSKAVVVTGGEPLIYNLDYLTAKLHEEGIKTFIETSGAYPLSGDWDWICLSPKKFKSPMQNVADKAHELKVIIFNKSDFEFAEHNAKLVAPDCKLFLQPEWSKHKEMSPLIVEYVMNNPQWEISLQTHKYLNIP

SEQ ID NO: 31879 - protein, 207 aa, Mucilaginibacter phyllosphaerae
  misc_feature (1)..(207): tr|A0A4Y8ABI2|A0A4Y8ABI2_9SPHI 7-carboxy-7-deazaguanine synthase OS=Mucilaginibacter phyllosphaerae OX=1812349 GN=queE PE=3 SV=1
MAHQVPEDGTLLPLMEEFYTIQGEGYNTGKAAYFIRLGGCDVGCHWCDVKESWDAELHPLTAADTIVNNASKFPSKAVVVTGGEPLIYNLDYLTQNLQQNGIKTFIETSGAYPLSGSWDWICLSPKKFKAPTQQVADKAHELKVIIFNRSDFAFAEHHAKLVGPDCKLYLQPEWSKHAEMTPLIVDYVMANPRWEISLQTHKYLNIP

SEQ ID NO: 31880 - protein, 207 aa, Mucilaginibacter pineti
  misc_feature (1)..(207): tr|A0A1G6THM1|A0A1G6THM1_9SPHI 7-carboxy-7-deazaguanine synthase OS=Mucilaginibacter pineti OX=1391627 GN=queE PE=3 SV=1
MAHQIPDDGTLLPLMEEFYTIQGEGYNTGKAAYFIRLGGCDVGCHWCDVKESWDAELHPLTTADRIVDNAAVHPSKAVVVTGGEPLIYNLDYLTAQLHQRGIKTFIETSGAYPLSGDWDWICLSPKKFKAPIPHVAENAHELKVIVFNKSDFEWAEYHAKMVSPDCKLYLQPEWSKSKEMIPLIVDYVMNNPQWEISLQTHKYLNIP

SEQ ID NO: 31881 - protein, 207 aa, Mucilaginibacter polytrichastri
  misc_feature (1)..(207): tr|A0A1Q5ZW33|A0A1Q5ZW33_9SPHI 7-carboxy-7-deazaguanine synthase OS=Mucilaginibacter polytrichastri OX=1302689 GN=queE PE=3 SV=1
MTAQVPEDGTLLPLMEEFYTIQGEGYNTGKAAYFIRLGGCDVGCHWCDVKESWDASLHPLTTADQIVTNALQFPAKTVVVTGGEPLIYNLDYLTAQMKANGVTTFIETSGAYPLSGHWDWICLSPKKFKAPQPAIAKEAHELKVIVFNKSDFAWAEEYAELVSPGCKLYLQPEWSKSKEVTPLIIDYVMANPKWEISLQTHKYLNIP

SEQ ID NO: 31882 - protein, 207 aa, Mucilaginibacter psychrotolerans
  misc_feature (1)..(207): tr|A0A4Y8SKP1|A0A4Y8SKP1_9SPHI 7-carboxy-7-deazaguanine synthase OS=Mucilaginibacter psychrotolerans OX=152409 6 GN=queE PE=3 SV=1
MAHQVPDDGTLLPLMEEFYTIQGEGYNTGKAAYFIRLGGCDVGCHWCDVKESWDAELHPLTLADTIVANAKVHPSKAVVVTGGEPLIYNLDYLTAQLHNEGIRTFIETSGAYPLSGDWDWICLSPKKFKAPMQNVADKAHELKVIIFNKSDFEFAEHNAKLVAPDCKLYLQPEWSKNKEMAPLIVEYVMNNPQWEVSLQTHKYLNIP

SEQ ID NO: 31883 - protein, 207 aa, Mucilaginibacter rubeus
  misc_feature (1)..(207): tr|A0A5C1HXH2|A0A5C1HXH2_9SPHI 7-carboxy-7-deazaguanine synthase OS=Mucilaginibacter rubeus OX=2027860 GN=queE PE=3 SV=1
MAHQIPDDGTLLPLMEEFYTIQGEGYNTGKAAYFIRLGGCDVGCHWCDVKESWDAELHALTAADTIVNNATLHPAKAVVVTGGEPLIYNLDYLTHQLHEKGIKTFIETSGAYPLSGDWDWICLSPKKFKAPTPHVAECAHELKVIVFNKSDFEWAEYHAKMVSPDCKLYLQPEWSKAKEMTPLIVDYVKENPQWEISLQTHKYLNIP

SEQ ID NO: 31884 - protein, 207 aa, Mucilaginibacter rubeus; identical to SEQ ID NO: 31870
  misc_feature (1)..(207): tr|A0A364WBH5|A0A364WBH5_9SPHI 7-carboxy-7-deazaguanine synthase OS=Mucilaginibacter rubeus OX=2027860 GN=queE PE=3 SV=1

SEQ ID NO: 31885 - protein, 207 aa, Mucilaginibacter sp.
  misc_feature (1)..(207): tr|A0A556MBM2|A0A556MBM2_9SPHI 7-carboxy-7-deazaguanine synthase OS=Mucilaginibacter sp. MAH-19 OX=2597670 GN= queE PE=3 SV=1
MAHQVPEDGTLLPLMEEFYTIQGEGYHTGKAAYFIRLGGCDVGCHWCDVKESWDAELHPLTHADKIVENAMLYPGKAVVVTGGEPLIYNLDYLTSQLQGKGIKTFIETSGAYPLSGHWDWICLSPKKFKGPTPEIARHANELKVIVFNKSDFLFAEQHAELVPVGCKLYLQPEWSKSKEMTPLIVDYVMNNPKWEISLQTHKYLNIP

SEQ ID NO: 31886 - protein, 207 aa, Mucilaginibacter sp.
  misc_feature (1)..(207): tr|A0A437MTG6|A0A437MTG6_9SPHI 7-carboxy-7-deazaguanine synthase OS=Mucilaginibacter sp. YBJ-36 OX=1932778 GN= queE PE=3 SV=1
MAHIIPDDGSQLPLMEEFYTIQGEGYNTGKAAYFIRLGGCDVGCHWCDVKESWDAELHALTHADVIVTNAAIHPAKTVVITGGEPLIYNLEYLTTKLHEQGIKTFIETSGAYPLSGNWDWICLSPKKFKAPTLSVAQKADELKVIVFNKSDFEFAEQNALLVGPDCKLFLQPEWSKAKEMTPLIVDYVMNNPKWEISLQTHKFLNIP

SEQ ID NO: 31887 - protein, 207 aa, Mucilaginibacter yixingensis
  misc_feature (1)..(207): tr|A0A2T5J9L6|A0A2T5J9L6_9SPHI 7-carboxy-7-deazaguanine synthase OS=Mucilaginibacter yixingensis OX=1295612 GN =queE PE=3 SV=1
MAHVIPEDGTMLPLMEEFYTIQGEGFNTGKAAYFIRLGGCDVGCHWCDVKESWDAELHPLTHADVIVKNAGQHPAKAVVVTGGEPLIYNLDYLTAQLQEHGIRTFIETSGAYPLSGNWDWICLSPKKFKAPTPHVAEKADELKVIVFNKSDFMWAEEHAKMVGPNCKLYLQPEWSKAKEMIPLIVDYVMNNPQWEISLQTHKYLNIP

SEQ ID NO: 31888 - protein, 207 aa, Mucinivorans hirudinis
  misc_feature (1)..(207): tr|A0A060RD84|A0A060RD84_9BACT 7-carboxy-7-deazaguanine synthase OS=Mucinivorans hirudinis OX=1433126 GN=queE PE=3 SV=1
MSKDILRQGALLPLVEDFYTIQGEGFHTGKPAYFIRLGGCDVGCGWCDAKFTWNPRKFPPVAVEEIVRRAVACQAKAIVITGGEPTLYPLGKLTEELKKEDFEIFIETSGTNPLTGTIDWVCLSPKPQQPPLQEVLLRADELKIIVESQSDLEWAEENSKKVSDRCLLFLQPEWSVFREITPAIVEYAKQNPRWNVSVQTHKFMKIP

SEQ ID NO: 31889 - protein, 233 aa, Mucispirillum schaedleri
  misc_feature (1)..(233): tr|V2QE12|V2QE12_9BACT 7-carboxy-7-deazaguanine synthas e OS=Mucispirillum schaedleri ASF457 OX=1379858 GN=queE PE=3 SV=1
MKINISEVFYSTQGEGKYIGTAQVFIRLSQCPFSCPYCDTDIQDKEYFKINNKQYNNPVSAEELSEIVLKEFGVGDNFHSYSITGGEPLIHYDFVKKLAYLLKNKSKAKLFLETSGLITKYFQELDNIFDIMSIDIKTHSEKVLKKLPVLLDVLSSLEHSDYYLKLLLPKENAKEIIDYTAQELNKYNIKNIIIQPVDSIIAKDTIDYLYNMYYSKNIEARIIPQTHKILAIP

SEQ ID NO: 31890 - protein, 206 aa, Muribacter muris
  misc_feature (1)..(206): tr|A0A0J5S241|A0A0J5S241_9PAST 7-carboxy-7-deazaguanine synthase OS=Muribacter muris OX=67855 GN=queE PE=3 SV= 1
MNQTEINYRIVEIFETLQGEGFNTGMPSIFIRFGKCNLACPWCDTNYNQFEMMSLTAILTKVALFSARNIIITGGEPTIQPHIEILLDALKQQGYFLAIETNGLKPVPPQIDYIATSPKRLYQKNYLKHHIPTANEVRIVVDGDVLDFCEQIENSIQAQRYYLSPCEQNGEMNMLATITQLGRLNQRPNKPRWQLSIQTHKIAGIA

SEQ ID NO: 31891 - protein, 206 aa, Muribacter muris
  misc_feature (1)..(206): tr|A0A4Y9JW95|A0A4Y9JW95_9PAST 7-carboxy-7-deazaguanine synthase OS=Muribacter muris OX=67855 GN=queE PE=3 SV= 1
MNQTEINYRIVEIFETLQGEGFNTGIPSIFIRFGKCNLACPWCDTNYNQFEMMSLTAILTKVAQFSARNIIITGGEPTIQPHIEILLDALKQQGYFLAIETNGLKPVPPQIDYIATSPKRLYQKNYLKHHIPTANEVRIVVDGDVLDFCEQIENSIQAQRYYLSPCEKNGEMNMLATITQLGRLNQRPNKPRWQLSIQTHKIAGIA

SEQ ID NO: 31892 - protein, 193 aa, Muribaculaceae bacterium
  misc_feature (1)..(193): tr|A0A4Q0IGP2|A0A4Q0IGP2_9BACT 7-carboxy-7-deazaguanine synthase OS=Muribaculaceae bacterium Isolate-007 (NCI) OX=2489217 GN=queE PE=3 SV=1
MKVKEIFYSLQGEGRFTGTAAVFLRLSGCNLKCPFCDTDHFDGTFMSHEDIMDELVKYPSRHLVITGGEPSLQLEPGFINMLHEYGYFVQVETNGTHPLPQNVDWITCSPKSKNIVYDRVNELKVVFGSDAVGGNSLLEHLSISVEAEEYYLQPCDTGDKAVNVEILGRCVEYIKDNPVWRLSLQTHKLIDIP

SEQ ID NO: 31893 - protein, 199 aa, Muribaculaceae bacterium
  misc_feature (1)..(199): tr|A0A3N2NLR2|A0A3N2NLR2_9BACT 7-carboxy-7-deazaguanine synthase OS=Muribaculaceae bacterium Isolate-114 (HZI) OX=2486475 GN=queE PE=3 SV=1
MRKINEIFYSLQGEGHHEGYPSVFVRFSGCNLNCSFCDTAHTEGIYMDDDAIIRAINLYSADWVVLTGGEPAMWIDKDFIHLLKRATGKKIAIETNGTLPVPEGIDWVTVSPKSGFEGAGEAPVRVRHANEIKVVDLGQNLDPYFDLPCRGEDTIMYLQPCYVPDEEEFRQNRLNTVRRILADPKWTLSVQLHRYLDIP

SEQ ID NO: 31894 - protein, 193 aa, Muribaculum intestinale
  misc_feature (1)..(193): tr|A0A1B1SD98|A0A1B1SD98_9BACT 7-carboxy-7-deazaguanine synthase OS=Muribaculum intestinale OX=1796646 GN=queE PE=3 SV=1
MKVKEIFYSLQGEGRFTGTAAVFLRLSGCNLKCPFCDTDHFDGTFMSHEDIMDELVKYPSRHLVITGGEPSLQLEPGFIDMLHEYGYFVQVETNGTHPLPQNVDWITCSPKSKNIVYDRVNELKVVFGSDAVGGNSLLEHLSISVEAEEYYLQPCDTGDKAVNVEILGRCVEYIKDNPVWRLSLQTHKLIDIP

SEQ ID NO: 31895 - protein, 195 aa, Muribaculum sp.
  misc_feature (1)..(195): tr|A0A1Y4C520|A0A1Y4C520_9BACT 7-carboxy-7-deazaguanine synthase OS=Muribaculum sp. An287 OX=1965623 GN=queE P E=3 SV=1
MGSTYRINEIFYSLQGEGFFTGTASVFIRFSGCNLECPFCDTRHEEGTEMSARGIIEAISPWPSPHVVLTGGEPSLFIDRELVEALHGDGRFIAIETNGTNPLPEGIDWITYSPKQFWLPEAEPAITECDELKVVYTGQDLSRYSAIKAAHRFIQPCDTGDGDRNRKLIEESVEFCKRNPQWRLSLQTHKFIDIK

SEQ ID NO: 31896 - protein, 193 aa, Muribaculum sp.
  misc_feature (1)..(193): tr|A0A4P7VH48|A0A4P7VH48_9BACT 7-carboxy-7-deazaguanine synthase OS=Muribaculum sp. TLL-A4 OX=2530390 GN=queE PE=3 SV=1
MYLINEIFYSIQGEGVNAGVPAIFLRFSGCNLKCPFCDTSHQTGNPMSLDDIMHEVSRYNASLVVLTGGEPSLFIDDAIVEALHNAGKTIAIETNGTHPLPAGIDHVTLSPKDDFCDNAQTVIEHCDELKIVYRGDNDPSRYNHIKASHRVLQPCDTGDDEQNRRITSEALDYCLSHPQWRLSLQLHKILNVR

SEQ ID NO: 31897 - protein, 210 aa, Muricauda antarctica
  misc_feature (1)..(210): tr|A0A1M6YZR5|A0A1M6YZR5_9FLAO 7-carboxy-7-deazaguanine synthase OS=Muricauda antarctica OX=1055723 GN=queE PE =3 SV=1
MVEENVMDLVDKGLMLPLMEEFYTIQGEGFHKGTAAYFIRVGGCDVGCHWCDVKESWNAETHPPTSIDSIIANAKKYSDTIVITGGEPLTWDMGPLTHGLKKEGMKTHIETSGAYPLTGVWDWICLSPKKNKLPVGDIAKKADELKVIVYNKHDFIFAEEQAAQVEDNCILYLQPEWSVRDKMVPLIVDYVMKNPKWKVSLQTHKYLNIP

SEQ ID NO: 31898 - protein, 210 aa, Muricauda lutaonensis
  misc_feature (1)..(210): tr|A0A0D5YPZ4|A0A0D5YPZ4_9FLAO 7-carboxy-7-deazaguanine synthase OS=Muricauda lutaonensis OX=516051 GN=queE PE =3 SV=1
MIANDVMDLVEKGLMLPLMEEFYTIQGEGYHKGTAAYFIRIGGCDVGCHWCDVKESWDAETHPPTNIGSIVANAAKYSDTIVVTGGEPLTWDMGPLTASLKNKGLKTHIETSGAYPLTGVWDWICLSPKKNKLPVGNIHQKAHELKVIVYNKHDFKFAEEQAAKVGKNCILYLQPEWSVREKVTPLIVDYVMQHPKWKVSLQTHKYLNIP

SEQ ID NO: 31899 - protein, 210 aa, Muricauda lutimaris
  misc_feature (1)..(210): tr|A0A3A1NDH0|A0A3A1NDH0_9FLAO 7-carboxy-7-deazaguanine synthase OS=Muricauda lutimaris OX=475082 GN=queE PE=3 SV=1
MVEENVMDLVEKGLMLPLMEEFYTIQGEGYHKGTAAYFIRVGGCDVGCHWCDVKESWNAETHPPTTIESIVANAEKYSDTIVITGGEPLTWDMGPLTQGLKERGMTIHIETSGAYPLTGVWDWICLSPKKNKLPVGDIYKKAQELKVIVYNKHDFIFAEEQAAQVGEDCILYLQPEWSVRDKMVPKIVDYVMKHPKWKVSLQTHKYLNIP

SEQ ID NO: 31900 - protein, 210 aa, Muricauda olearia
  misc_feature (1)..(210): tr|A0A444VRX2|A0A444VRX2_9FLAO 7-carboxy-7-deazaguanine synthase OS=Muricauda olearia OX=552546 GN=queE PE=3 S V=1
MVEDNVMDLVDKGLMLPLMEEFYTIQGEGYHKGTAAYFIRVGGCDVGCHWCDVKESWNAETHPPTAVDQIVDHAAKYSNTIVVTGGEPLTWDMGPLTEGLKARNLQTHIETSGAYPLTGIWDWICLSPKKNKLPEGEIYEKADELKVIVYNKHDFIFAEEQAAKVKEDCILYLQPEWSVREKIVPMIVDYVMQHPKWKVSLQTHKYLNIP

SEQ ID NO: 31901 - protein, 210 aa, Muricauda pacifica
  misc_feature (1)..(210): tr|A0A2T0M8D0|A0A2T0M8D0_9FLAO 7-carboxy-7-deazaguanine synthase OS=Muricauda pacifica OX=1080225 GN=queE PE=3 SV=1
MVSEEIMDLVNQGTMLPLMEEFYTIQGEGYHKGTAAYFIRVGGCDVGCHWCDVKESWNAETHPPISVDAIVENATKHSDTIVVTGGEPLTWDMNPLTQGLKAQNLQTHIETSGAYPLTGTWDWICLSPKKNKLPVGEIYNKAHELKVIIYNKHDFIFAEEQAAKVSQDCILYLQPEWSVREKMIPQIVEYVMKNPKWKVSLQTHKYLNIP

SEQ ID NO: 31902 - protein, 216 aa, Muricauda ruestringensis
  misc_feature (1)..(216): tr|G2PSK1|G2PSK1_MURRD 7-carboxy-7-deazaguanine synthas e OS=Muricauda ruestringensis (strain DSM 13258 / CIP 1 07369 / LMG 19739 / B1) OX=886377 GN=queE PE=3 SV=1
MNYLCTMVEENVMDLVEKGLTLPLMEEFYTIQGEGYHKGTAAYFIRIGGCDVGCHWCDVKESWNAETHPPTPIDSIIANAEKYSDTIVITGGEPLTWDMGPLTQGLKAKNMKIHIETSGAYPLTGVWDWICLSPKKNKLPVDDIYRKAHELKVIVYNKHDFIFAEEQAAKVNDDCILYLQPEWSVRDKMVPQIVDYVMKHPKWKVSLQTHKYLNIP

SEQ ID NO: 31903 - protein, 210 aa, Muricauda sp.
  misc_feature (1)..(210): tr|A0A2N0GEB7|A0A2N0GEB7_9FLAO 7-carboxy-7-deazaguanine synthase OS=Muricauda sp. ES.050 OX=1798204 GN=queE PE =3 SV=1
MVEENVMDLVEKGLMLPLMEEFYTIQGEGYHKGTAAYFIRVGGCDVGCHWCDVKESWNAETHPPTSIDSIVANAEKYSDTIVITGGEPLTWDMGPLTQGLKDKNMTIHIETSGAYPLTGVWDWICLSPKKNKLPEGDIYKKAQELKVIVYNKHDFIFAEEQAAQVGEDCILYLQPEWSVRDKMVPQIVDYVMKHPKWKVSLQTHKYLNIP

SEQ ID NO: 31904 - protein, 210 aa, Muricauda sp.
  misc_feature (1)..(210): tr|A0A2D9BSH9|A0A2D9BSH9_9FLAO 7-carboxy-7-deazaguanine synthase OS=Muricauda sp. OX=192149 GN=queE PE=3 SV=1
MVEENVMDLVEKGLMLPLMEEFYTIQGEGYHKGTAAYFIRVGGCDVGCHWCDVKESWNAETHPPTAIDSIIANAEKYSDTIVITGGEPLTWDMGPLTQGLKAKNMKIHIETSGAYPLTGVWDWICLSPKKNKLPEGEIYKKAHELKVIVYNKHDFIFAEEQAAQVGKDCILYLQPEWSVRDKMVPLIVDYVMKHPKWKVSLQTHKYLNIP

SEQ ID NO: 31905 - protein, 210 aa, Muricauda taeanensis
  misc_feature (1)..(210): tr|A0A3A1NRK7|A0A3A1NRK7_9FLAO 7-carboxy-7-deazaguanine synthase OS=Muricauda taeanensis OX=1005926 GN=queE PE =3 SV=1
MVEENVMDLVDKGLMLPLMEEFYTIQGEGFHKGTAAYFIRVGGCDVGCHWCDVKESWNAETHPPTSIDSIIANAKKYSDTIVITGGEPLTWDMGPLTHGLNKEGMKTHIETSGAYPLTGVWDWICLSPKKNKLPIGDIAKKADELKVIVYNKHDFIFAEEQAAQVEDNCILYLQPEWSVRDKMVPLIVDYVMKNPKWKISLQTHKYLNIP

SEQ ID NO: 31906 - protein, 210 aa, Muricauda zhangzhouensis
  misc_feature (1)..(210): tr|A0A1H2Q932|A0A1H2Q932_9FLAO 7-carboxy-7-deazaguanine synthase OS=Muricauda zhangzhouensis OX=1073328 GN=que E PE=3 SV=1
MVEENVMELVNKGVMLPLMEEFYTIQGEGYHKGTAAYFIRVGGCDVGCHWCDVKESWNAETHPPTAIESIISNAEKYSDTIVITGGEPLTWDMGPLTEGLKAKNMKTHIETSGAYPLTGVWDWICLSPKKNKLPVGEIYEKADELKVIVYNKHDFIFAEEQAAQVGENCILYLQPEWSVRDKMVPMIVDYVMENPKWKVSLQTHKYLNIP

SEQ ID NO: 31907 - protein, 210 aa, Muriicola sp.
  misc_feature (1)..(210): tr|A0A411EAV9|A0A411EAV9_9FLAO 7-carboxy-7-deazaguanine synthase OS=Muriicola sp. MMS17-SY002 OX=2507538 GN=qu eE PE=3 SV=1
MEAKAVMELVNEGKMLPLMEEFYTIQGEGYHKGTAAYFIRIGGCDVGCHWCDVKESWNAEIHPPSAVETIVENAAKYSDTIVVTGGEPLTWDMNPLTTLLREKQLKIHIETSGAYPLSGTWDWICLSPKKNKAPVGDIHLRADELKVIVYNRDDLRFAEEHAAKVSENCVLYLQPEWSVREKVTPLIVDYVMAHPKWKVSLQTHKYLNIP

SEQ ID NO: 31908 - protein, 211 aa, Mycoavidus cysteinexigens
  misc_feature (1)..(211): tr|A0A2Z6EYA9|A0A2Z6EYA9_9BURK 7-carboxy-7-deazaguanine synthase OS=Mycoavidus cysteinexigens OX=1553431 GN=qu eE PE=3 SV=1
MASYSIKEIFYTLQGEGINAGRPAVFCRFAGCNLWSGREQNRAQAVCRFCDTDFVGTDGENGGKYQNAASLASQITSLWPSGAMHRLVVCTGGEPLLQLDDELIQALHAAHFEIALETNGTLPIPAGIDWVCVSPKADAPLVVTQGDELKVVVPQANQQLLSYESLDFKHFLVQPMDNAARAFNTQFAIDWCKQHPRWRLSMQTHKYLNIP

SEQ ID NO: 31909 - protein, 211 aa, Mycobacterium angelicum
  misc_feature (1)..(211): tr|A0A1W9ZW13|A0A1W9ZW13_9MYCO 7-carboxy-7-deazaguanine synthase OS=Mycobacterium angelicum OX=470074 GN=queE PE=3 SV=1
MGYTVKEIFYTLQGEGFHTGRPAVFCRFASCNLWTGRESDRKRAICKFCDTDFVGTDGPGGGRFASAEKLASAIARAWPETGHEHRMVVCTGGEPLLQVDTALTAALHAEGFYIAVETNGTRLPPPGIDWICVSPKMGAALPVTSGDELKLVYPQDGGDPEQFEHLDFGSFRLSPMDGPALRENTAAAVEFCLKRPRWRLSLQTHKYLEIP

SEQ ID NO: 31910 - protein, 211 aa, Mycobacterium bohemicum
  misc_feature (1)..(211): tr|A0A1X1QWY6|A0A1X1QWY6_9MYCO 7-carboxy-7-deazaguanine synthase OS=Mycobacterium bohemicum OX=56425 GN=queE P E=3 SV=1
MAYTVKEIFYTLQGEGFHTGRPAVFCRFASCNLWNGRERDRAQAICKFCDTDFVGTNGPGGGHFQDATDLAAAVARAWPESSHEHRMVVCTGGEPLLQLDNALVDALHVQGFYVAVETNGTRHPPPGIDWTCVSPKIGAPLVLTSGDELKLVFPQDGGDPAQFENLNFGSFRLSPMDGPSVDENTASAVEYCLKRPRWRLSLQTHKYLGIA

SEQ ID NO: 31911 - protein, 211 aa, Mycobacterium bohemicum; identical to SEQ ID NO: 31910
  misc_feature (1)..(211): tr|A0A0U0W844|A0A0U0W844_9MYCO 7-carboxy-7-deazaguanine synthase OS=Mycobacterium bohemicum DSM 44277 OX=12366 09 GN=queE PE=3 SV=1

SEQ ID NO: 31912 - protein, 162 aa, Mycobacterium pseudokansasii
  misc_feature (1)..(162): tr|A0A498QZK2|A0A498QZK2_9MYCO 7-carboxy-7-deazaguanine synthase OS=Mycobacterium pseudokansasii OX=2341080 GN =queE PE=4 SV=1
MESTRFNKPGTIPLQFQTEVRDGCPSDCGLCPDHKQHACLGLIEVNTHCNPDCPICFADSGHQPDGYALAVAQCEKMLDALVAAEGEPEIVMFSGGEPTIHKQILEFVDAAQARPIKTVIINTNGIRLASDRRFVASLAQRNRRPNDSVHADDRGKGVIDHR

SEQ ID NO: 31913 - protein, 211 aa, Mycobacterium scrofulaceum
  misc_feature (1)..(211): tr|A0A1A2UED9|A0A1A2UED9_MYCSC 7-carboxy-7-deazaguanine synthase OS=Mycobacterium scrofulaceum OX=1783 GN=queE PE=3 SV=1
MPYNVKEIFYTLQGEGHHTGRPAVFLRFASCNLWTGRELDRTRAICKFCDTDFVGTDGQGGGRFRDATELATAVEGQWPEVSWDRRMVVCTGGEPLLQLDEVLVDALHDRGFYVAIETNGTRRAPDGIDWICVSPKVGAPLVQISGDELKLVFPQDGGDPEQYEDLDFQSFRLSPMDGPALRENTASAVEYCLKRPRWQLNLQTHKYLGIP

SEQ ID NO: 31914 - protein, 210 aa, Mycobacterium sp.
  misc_feature (1)..(210): tr|A0A554U8T2|A0A554U8T2_9MYCO 7-carboxy-7-deazaguanine synthase OS=Mycobacterium sp. KBS0706 OX=2578109 GN=qu eE PE=3 SV=1
MGYVVKEIFKTLQGEGRHAGRASVFCRFVGCNLWTGREQDRAEAVCRFCDTDFLGTDGPGGGRFDGAEALAAAIEACWNSPAADRFVVFTGGEPLLQLDRALLDAIHARGFTAAVETNGTIDPPAELDWVCVSPKAGAPLAARRGDELKLIYPQPELLPEAVADLDFTHFWLQPMDGPDRIANTEAAVAYCLSHPQWRLSLQTHKLIGIP

SEQ ID NO: 31915 - protein, 211 aa, Mycobacterium sp.
  misc_feature (1)..(211): tr|A0A1A2JG69|A0A1A2JG69_9MYCO 7-carboxy-7-deazaguanine synthase OS=Mycobacterium sp. E3339 OX=1834146 GN=queE PE=3 SV=1
MPYNVKEIFYTLQGEGHHTGRPAVFLRFASCNLWTGRESDRTRAICKFCDTDFVGTDGQGGGRFRDATQLANAVEGQWPEVSWDRRMVVCTGGEPLLQLDEVLVDALHDRGFYVAIETNGTRSAPDGIDWICVSPKVGAPLVQTSGDELKLVFPQDGGGPEQYENLDFQSFRLSPMDGPALRENTASAVEYCLKRPRWQLNLQTHKYLGIP

SEQ ID NO: 31916 - protein, 211 aa, Mycobacterium szulgai
  misc_feature (1)..(211): tr|A0A1X2F2Z6|A0A1X2F2Z6_MYCSZ 7-carboxy-7-deazaguanine synthase OS=Mycobacterium szulgai OX=1787 GN=queE PE=3 SV=1
MGYTVKEIFYTLQGEGFHTGRPAVFCRFASCNLWTGREADRKRAICKFCDTDFVGIDGPGGGRFASAENLASAIAQAWSETGREHRMVVCTGGEPLLQVDTALVAALHAEGFYIAIETNGTRLPPPGIDWICVSPKIGAPLSVTSGDELKLVYPQDGGDPEQFEQLDFGSFRLSPMDGSALRENTAAAVEFCLRRPRWRLSLQTHKYLEIP

SEQ ID NO: 31917 - protein, 222 aa, Mycolicibacter arupensis
  misc_feature (1)..(222): tr|A0A5B1M685|A0A5B1M685_9MYCO 7-carboxy-7-deazaguanine synthase OS=Mycolicibacter arupensis OX=342002 GN=queE PE=3 SV=1
MQGEGPYMGRRAMFVRLGGCNLSCSWCDTPYTWNGARFDLRHEIAPQSSESVLVQLDEWADGIVVITGGEPLLQASYPEFSILLRALRNRGREVHVESNGTIFPPHEVLEMLDVVVLSPKLANAGKHRGGQSAAMHAGWATVVAEREVYLKIVCRNGADVASVAELAEDIGWPRDRVWVMPEGTRPETIAASITEIADAAIAFGVNVSSRLQVLAWGDVRGH

SEQ ID NO: 31918 - protein, 234 aa, Mycolicibacterium mucogenicum
  misc_feature (1)..(234): tr|A0A1A0MM52|A0A1A0MM52_9MYCO 7-carboxy-7-deazaguanine synthase OS=Mycolicibacterium mucogenicum OX=56689 GN= queE PE=3 SV=1
MTLYVSEVFGPTVQGEGPYMGRRAMFVRLGGCNLSCSWCDTPYTWNGARFDLRHEIAPQSSESVLVQLDEWADGIVVITGGEPLLQASYPEFSILLRALRNRGREVHVESNGTIFPPHEVLEMLDVVVLSPKLANAGKHRGGQSAAMHAGWATVVAEREVYLKIVCRNGADVASVAELAEDIGWPRDRVWVMPEGTRPETIAASITEIADAAIAFGVNVSSRLQVLAWGDVRGH

SEQ ID NO: 31919 - protein, 234 aa, Mycolicibacterium obuense
  misc_feature (1)..(234): tr|A0A0M2JTH2|A0A0M2JTH2_9MYCO 7-carboxy-7-deazaguanine synthase OS=Mycolicibacterium obuense OX=1807 GN=queE PE=3 SV=1
MTLYVSEVFGPTVQGEGPYMGRRAMFVRLGGCNLSCSWCDTPYTWNGARFDLRHEIAPQSSESVLVQLDEWADGIVVITGGEPLLQASYPEFLILLRALRNRGREVHVESNGTIFPPHEVLEMLDVVVLSPKLANAGKHRGGQSAAMHAGWATVVAEREVYLKIVCRNGADVASVAELAEDIGWPRDRVWVMPEGTRPETIAASITEIADAAIAFGVNVSSRLQVLAWGDVRGH

SEQ ID NO: 31920 - protein, 211 aa, Myroides guanonis
  misc_feature (1)..(211): tr|A0A1I3SVS9|A0A1I3SVS9_9FLAO 7-carboxy-7-deazaguanine synthase OS=Myroides guanonis OX=1150112 GN=queE PE=3 SV=1
MKKQIIEQDLTYNGTILPLMEEFYTIQGEGFHTGTAAYFIRLGGCDVGCHWCDVKESWEVLKHPLTSIDTIVGNASEKANLAVITGGEPLMWNLEPLTKALKDSGMFVNMETSGAYELTGSFDWICLSPKKTMLPTQSVYDAANELKAIIYNKHDFIFAEEQAAKVNDKAILFLQPEWSKSEEVLPLIIEYVKENPKWRISLQTHKYLDIP

SEQ ID NO: 31921 - protein, 209 aa, Myroides indicus
  misc_feature (1)..(209): tr|A0A4R7EYL7|A0A4R7EYL7_9FLAO 7-carboxy-7-deazaguanine synthase OS=Myroides indicus OX=1323422 GN=queE PE=3 S V=1
MEAETKKALDAGINLPLMEEFYTIQGEGYYSGHAAYFIRLGGCDVGCHWCDVKESWNATLHPLTKVEDIIERASKIAKLAVITGGEPLMYNLDYLTAELKRKGMQTNIETSGAYELSGDFDWICLSPKKAKLPVQSVYDAANELKVIIYNKHDFIFAEEQAAKVNKNALLLLQTEWGKRTEMMPLIIEYVKQNPKWKISLQTHKFLDIP

SEQ ID NO: 31922 - protein, 210 aa, Myroides marinus
  misc_feature (1)..(210): tr|A0A161S1X5|A0A161S1X5_9FLAO 7-carboxy-7-deazaguanine synthase OS=Myroides marinus OX=703342 GN=queE PE=3 SV =1
MTKDYDKVALDEGRILPLMEEFYTIQGEGYYSGHAAYFIRLGGCDVGCHWCDVKESWDAELHPLTDVHNIVARAKAEANLAVITGGEPLMYNLDYITSELKKAGLQTNIETSGAYELSGDFDWICLSPKKNKLPTQSVYDAADELKVVIYNKHDFIFAEEQAARVNDNALLLLQVEWSKRAEMNPLIVEYVKKNPQWKISVQTHKYLDIP

SEQ ID NO: 31923 - protein, 210 aa, Myroides odoratimimus
  misc_feature (1)..(210): tr|A0A0E1ZE59|A0A0E1ZE59_9FLAO 7-carboxy-7-deazaguanine synthase OS=Myroides odoratimimus CCUG 10230 OX=883150 GN=queE PE=3 SV=1
MTKDYDKEALDEGRILPLMEEFYTIQGEGFYSGHAAYFIRLGGCDVGCHWCDVKESWDAELHPLTDVQQIVSRAGKEANLAVITGGEPLMYNLDVITAELKKAGLQTNIETSGAYDLTGDFDWICLSPKKNKLPTQSVYDAANELKVVIYNKHDFIFAEEQAARVNKDALLLLQVEWSKRAEMNPLIVDYVKKNPKWKISVQTHKYLDIP

SEQ ID NO: 31924 - protein, 210 aa, Myroides odoratimimus; identical to SEQ ID NO: 31923
  misc_feature (1)..(210): tr|A0A0S7ECJ7|A0A0S7ECJ7_9FLAO 7-carboxy-7-deazaguanine synthase OS=Myroides odoratimimus OX=76832 GN=queE PE= 3 SV=1

SEQ ID NO: 31925 - protein, 211 aa, Myroides odoratus
  misc_feature (1)..(211): tr|H1Z9M2|H1Z9M2_MYROD 7-carboxy-7-deazaguanine synthas e OS=Myroides odoratus DSM 2801 OX=929704 GN=queE PE=3 SV=1
MIQENLENKALTEGRVLPLMEQFYTIQGEGFYSGHAAYFIRLGGCDVGCHWCDVKESWDAELHPLTAVEKIVSDASAVANLAVITGGEPLMYNLDYLTKKLKEAGLKTNIETSGAYEMSGDFDWVCLSPKKAKLPTASAYAAANELKVVIYNKHDFIFAEEQAAKVNKDALLLLQTEWSKRAVMMPLIIEYVKKNPQWKISLQTHKYLDIP

SEQ ID NO: 31926 - protein, 211 aa, Myroides odoratus; identical to SEQ ID NO: 31925
  misc_feature (1)..(211): tr|A0A378RU83|A0A378RU83_MYROD 7-carboxy-7-deazaguanine synthase OS=Myroides odoratus OX=256 GN=queE PE=3 SV=1

SEQ ID NO: 31927 - protein, 211 aa, Myroides phaeus
  misc_feature (1)..(211): tr|A0A1G8EZX8|A0A1G8EZX8_9FLAO 7-carboxy-7-deazaguanine synthase OS=Myroides phaeus OX=702745 GN=queE PE=3 SV= 1
MLKEENNKALKEGKELPLMEDFYTIQGEGFYSGHAAYFIRLGGCDVGCHWCDVKESWDAELHPLTKVEDMVAKASENEGKLVIITGGEPLMYNLDYLTSELKKAGMQTNIETSGAYEMSGDFDWICLSPKKNKLPTQSVYDSAHELKVVIYNKHDFIFAEEQAARVNGNALLLLQTEWSKKDEMTPLIVEYVKKNPKWKISMQTHKYLDIP

SEQ ID NO: 31928 - protein, 210 aa, Myroides profundi
  misc_feature (1)..(210): tr|A0A0B5RU85|A0A0B5RU85_9FLAO 7-carboxy-7-deazaguanine synthase OS=Myroides profundi OX=480520 GN=queE PE=3 S V=1
MTKDYDKEALDEGRILPLMEEFYTIQGEGFYSGHAAYFIRLGGCDVGCHWCDVKESWDAELHPLTDVQQIVSRASEEANLAVITGGEPLMYNLDVITAELKKAGLQTNIETSGAYELTGDFDWICLSPKKNKLPTQSVYDAANELKVVIYNKHDFIFAEEQAARVNKDALLLLQVEWSKRAEMNPLIVEYVKKNPKWKISVQTHKYLDIP

SEQ ID NO: 31929 - protein, 213 aa, Myxococcaceae bacterium
  misc_feature (1)..(213): tr|A0A521U206|A0A521U206_9DELT 7-carboxy-7-deazaguanine synthase OS=Myxococcaceae bacterium OX=2484252 GN=queE PE=3 SV=1
MAYTVKELFYTLQGEGARAGRAAVFVRFSGCNLWNGREADRERGAGGCARWCDTDFVGTDGDGGGRFATAEAVADAAAGAWGPGREARYVVCTGGEPLLQLDEALIEAFHREGFEVAIETNGTLPVPPGVDWVCVSPKAGSTVVVRSGHELKLVIPQEGVNPVDFEGWSFERFFVQPCDGMLRAEHTRRAIEWCRAHPKWRLSLQTHKLLGIP

SEQ ID NO: 31930 - protein, 230 aa, Myxococcaceae bacterium
  misc_feature (1)..(230): tr|A0A4Q5ZGB9|A0A4Q5ZGB9_9DELT 7-carboxy-7-deazaguanine synthase OS=Myxococcaceae bacterium OX=2484252 GN=queE PE=3 SV=1
MPAARPHIEPRRVPTADSVVVKEIYLSLQGESSHAGLLCAFIRLTGCHLRCTYCDSEFAFHGGSRRKNADIVTEILALNTPAVEVTGGEPLLQPGVYPLMESLLDAGLKVLLETSGAIDVRLVPPAVHKIVDMKTPSSGECDRNDYRNLVSMNANDELKLVIGSREDYEWSRALITEHRLGSKPYSVLCSTIFDKLHPRELAEWIIEDRLPVRFQLQMHKYLWDPNARGV

SEQ ID NO: 31931 - protein, 218 aa, Myxococcales bacterium
  misc_feature (1)..(218): tr|A0A0S8F010|A0A0S8F010_9DELT 7-carboxy-7-deazaguanine synthase OS=Myxococcales bacterium SG8_38_1 OX=1703408 GN=queE PE=3 SV=1
MADADQIRVHEIYESIQGESTFAGLPCTFVRLSRCNLRCRWCDTPQAFEGGTEMSRTDVLERALSFGTPLVELTGGEPLLQEGAFPLLRELCDAGRVVLLETSGERDISKVDPRVHRIMDLKAPGSGESARNRWENIGHLTTRDEVKIVLADRADYEWAKGVIEEHGLRGRVKEVLLSPVWGELDPKDLVQWVLEDDLGVRVQIQMHKVIWDADTQGV

SEQ ID NO: 31932 - protein, 230 aa, Myxococcales bacterium
  misc_feature (1)..(230): tr|A0A2D5EUB2|A0A2D5EUB2_9DELT 7-carboxy-7-deazaguanine synthase OS=Myxococcales bacterium OX=2026763 GN=queE PE=3 SV=1
MKLRIAKDRLLVSEIFDSVQGEGPSAGTPSTFLRLGHCNLRCAWCDTPYTWDWERHRLEDELRAWDLDALAADLVARAPQNLVVTGGEPLLQRDALAALLPRLGKRVEVETAGTLPPELEGVAQWNVSPKLASSGNPLDKRWRPDVLRAFARREDAVFKFVIASEADLEELRARVSELALPPERVWLMPEGTDAATLAERGRALSEVCVQEGWRLGWRLHVSLWGDRRGV

SEQ ID NO: 31933 - protein, 230 aa, Myxococcus fulvus
  misc_feature (1)..(230): tr|F8C8N3|F8C8N3_MYXFH 7-carboxy-7-deazaguanine synthas e OS=Myxococcus fulvus (strain ATCC BAA-855 / HW-1) OX= 483219 GN=queE PE=3 SV=1
MPAARPHIEPRRVPSADSVVVKEIYLSVQGESSHAGLLCAFVRLTGCHLRCTYCDSEFAFHGGARRKIPDIVSEVRAMRTPMVEVTGGEPLLQPGVYPLMEALLDAGFKVLLETSGAIDVRLVPPAVHKIVDMKTPSSGEHLRNDYRNFTSMNANDELKFVIGSREDYDWAKALIAEHQLLQKPYGTLFSTVFDKLHPRELAEWVIEDRLAVRFQLQMHKYMWDPNERGV

SEQ ID NO: 31934 - protein, 230 aa, Myxococcus fulvus
  misc_feature (1)..(230): tr|A0A511T0D2|A0A511T0D2_MYXFU 7-carboxy-7-deazaguanine synthase OS=Myxococcus fulvus OX=33 GN=queE PE=3 SV=1
MPAARPHIEPRLVPAADSVVVKEIYLSLQGESSHAGLLCAFVRLTGCHLRCTYCDSEFAFHGGTRMKNADVVEQVKALRTPRVEVTGGEPLLQPGVYPLMQSMLDAGLIVLLETSGAIDVRLVPPAVHKIVDMKTPSSGECARNDLRNFTSMNANDEVKFVIGSREDYEWSKALIAEHRLTEKPFSLLFSTVFGKLHPRELAEWTIEDRLSVRFQLQMHKYMWDPNERGV

SEQ ID NO: 31935 - protein, 230 aa, Myxococcus hansupus
  misc_feature (1)..(230): tr|A0A0H4X362|A0A0H4X362_9DELT 7-carboxy-7-deazaguanine synthase OS=Myxococcus hansupus OX=1297742 GN=queE PE= 3 SV=1
MPAARPHIEPRRVPTADSVVVKEIYLSVQGESSHAGLLCAFVRLTGCHLRCTYCDSEFAFHGGARRKIPDIVSEVLGMRTPMVEVTGGEPLLQPGVYPLMEALLDAGLKVLLETSGAIDVRLVPPAVHKIVDMKTPSSGEHLRNDYRNFTSMNANDELKFVIGSREDYDWAKALIAEHQLLQKPYGTLFSTVFDKLHPRQLAEWVIEDRLAVRFQLQMHKYMWDPNERGV

SEQ ID NO: 31936 - protein, 230 aa, Myxococcus macrosporus
  misc_feature (1)..(230): tr|A0A250JN60|A0A250JN60_9DELT 7-carboxy-7-deazaguanine synthase OS=Myxococcus macrosporus DSM 14697 OX=118931 0 GN=queE PE=3 SV=1
MPAARPHIEPRRVPSADSVVVKEIYLSVQGESSHAGLLCAFVRLTGCHLRCTYCDSEFAFHGGARRKIPDIVNEVRAMRTPMVEVTGGEPLLQPGVYPLMEALLDAGFKVLLETSGAIDVRLVPPAVHKIVDMKTPSSGEHLRNDYRNFTSMNANDELKFVIGSREDYDWAKALIAEHQLLQKPYGTLFSTVFDKLHPRELAEWVIEDRLAVRFQLQMHKYMWDPNERGV

SEQ ID NO: 31937 - protein, 230 aa, Myxococcus sp.
  misc_feature (1)..(230): tr|A0A540WKE5|A0A540WKE5_9DELT 7-carboxy-7-deazaguanine synthase OS=Myxococcus sp. AM401 OX=2590453 GN=queE PE =3 SV=1
MPAARPHIEPRLVPTADSVVVKEIYLSLQGESSHAGLLCAFIRLTGCHLRCTYCDSEFSFHGGARRKNADVIEEIKALRTPRVEITGGEPLLQPGVYPLMQSLLDEGFTVLLETSGAIDVRLVPPAVHKIVDMKTPSSGEAARNDLRNFASMNANDELKFVIGSREDYDWSKALIAEHRLAEKPFALLFSTVFEKLHPRELAEWTIEDRLSVRFQLQMHKYLWEPNARGV

SEQ ID NO: 31938 - protein, 216 aa, Myxococcus sp.
  misc_feature (1)..(216): tr|A0A540WUT6|A0A540WUT6_9DELT 7-carboxy-7-deazaguanine synthase OS=Myxococcus sp. AM401 OX=2590453 GN=queE PE =3 SV=1
MSYAVKELFYTLQGEGAQSGRAAVFLRFSGCNLWSGFARDRERGTGGCSRWCDTDFVGTNGPGGGRFASAEGLADAVAAAWLPNMGTSVRPMVVCTGGEPLLQLDAPLIEALHARGFFLAIETNGTRPVPAGIDWVCVSPKAGTDLVQKKGHELKLVYPQPGFEPGQFESLEFEHFFLQPMDGPERTRNTTQAMQFCLNHPQWRLGIQMHKSAGFP

SEQ ID NO: 31939 - protein, 230 aa, Myxococcus stipitatus
  misc_feature (1)..(230): tr|L7U0V4|L7U0V4_MYXSD 7-carboxy-7-deazaguanine synthas e OS=Myxococcus stipitatus (strain DSM 14675 / JCM 1263 4 / Mx s8) OX=1278073 GN=queE PE=3 SV=1
MPVARPHIEPRLVPSADSVVVKEIYLSLQGESSHAGLLCAFIRLTGCHLRCTYCDSEFAFHGGKRRKNAEILEEVKSLRTPRVEITGGEPLLQPGVYPLMQSLLDGGYTVLLETSGAIDVRLVPPDVHKIVDMKTPSSGESSRNDLRNFASMNARDELKFVIGSREDYEWSKALITEHRLAEKPFALLFSTVFDKLHPRELAEWTVDDRLPVRFQLQMHKYLWDPNARGV

SEQ ID NO: 31940 - protein, 230 aa, Myxococcus virescens
  misc_feature (1)..(230): tr|A0A511H925|A0A511H925_9DELT 7-carboxy-7-deazaguanine synthase OS=Myxococcus virescens OX=83456 GN=queE PE=3 SV=1
MPAARPHIEPRRVPTADSVVVKEIYLSVQGESSHAGLLCAFIRLTGCHLRCTYCDSEFAFHGGARRKIADIVSEVRDLRTPMVEVTGGEPLLQPGVYPLMEALLDAGFKVLLETSGAIDVRLVPPAVHKIVDMKTPSSGEHLRNDYRNFTSMNANDELKFVIGSREDYDWAKALIAEHQLLQKPYGSLFSTVFDKLHPRELAEWVIEDRLAVRFQLQMHKYMWDPNARGV

SEQ ID NO: 31941 - protein, 216 aa, Myxococcus xanthus
  misc_feature (1)..(216): tr|A0A4Y6CN43|A0A4Y6CN43_MYXXA 7-carboxy-7-deazaguanine synthase OS=Myxococcus xanthus OX=34 GN=queE PE=3 SV=1
MSYAVKELFYTLQGEGAQAGRAAVFLRFTGCNLWSGLERDREKGAGGCSRWCDTDFVGMDGAGGGRFSSAVALAEAVAAAWPRSQAAGQAPMVVCTGGEPLLQLDAPLIDALHAQGFFVAVETNGTQPVPSSVDWICVSPKAGSTLVQRSGNELKFVFPQPGFDPERFLELEFAHFFLQPMDGPAQAANMERALHYCLEHPRWRLGLQMHKVAGIR

SEQ ID NO: 31942 - protein, 230 aa, Myxococcus xanthus
  misc_feature (1)..(230): tr|A0A4Y6C2J5|A0A4Y6C2J5_MYXXA 7-carboxy-7-deazaguanine synthase OS=Myxococcus xanthus OX=34 GN=queE PE=3 SV=1
MPAARPHIEPRRVPTADSVVVKEIYLSVQGESSHAGLLCAFIRLTGCHLRCTYCDSEFAFHGGARRKIADIVSEVRGLRTPMVEVTGGEPLLQPGVYPLMEALLDAGFKVLLETSGAIDVRLVPPAVHKIVDMKTPSSGEHLRNDYRNFTSMNANDELKFVIGSREDYDWAKALIAEHQLLQKPYGSLFSTVFDKLHPRELAEWVIEDRLAVRFQLQMHKYMWDPNARGV

SEQ ID NO: 31943 - protein, 258 aa, Nannocystis exedens
  misc_feature (1)..(258): tr|A0A1I1WU24|A0A1I1WU24_9DELT 7-carboxy-7-deazaguanine synthase OS=Nannocystis exedens OX=54 GN=queE PE=3 SV= 1
MTAAFDPPGSAPNSVGPSLSTSPPTWLPIQERFVSLQGEGTLVGVPSSFVRVSGCNLRCAWCDSPATSWAPSGRRTELAELVAFCAAGPRHVVLTGGEPLLFAGVAALSRWLREAGHHITVETAGTVWLDGLACDLLSLSPKLRHSTPWDRDPAQAERHERARLNVPVLARLMASFPWQLKFVVRADAGAADVAEVEALLRELAVPDDQRSRVLLMPECTDSEALRAAYRALLPICVERGFRLGERLHIHMFGHTPGT

SEQ ID NO: 31944 - protein, 218 aa, Natranaerobius trueperi
  misc_feature (1)..(218): tr|A0A226BY22|A0A226BY22_9FIRM 7-carboxy-7-deazaguanine synthase OS=Natranaerobius trueperi OX=759412 GN=queE PE=3 SV=1
MFKVNETFVSINGEGPHAGQLAFFVRFQGCNLNCSYCDTDYARSLNSEYIEKSTHDLVSEIEQSGVNSILLTGGEPLLQDKDSLSFLITTLLDKGYNVDIETNGAVDIKWIDNDVNIIMDYKLPSSNMESDMLIANIKSLQKNDAIKFVCGNDKDLNKVLEIIDKYNLNKKTQVFLSPVFGMLEPSQIVEFIKENNTNDVKVQLQLHKIIWDPDMRGV

SEQ ID NO: 31945 - protein, 222 aa, Natranaerovirga hydrolytica
  misc_feature (1)..(222): tr|A0A4V2Q088|A0A4V2Q088_9FIRM 7-carboxy-7-deazaguanine synthase OS=Natranaerovirga hydrolytica OX=680378 GN=q ueE PE=3 SV=1
MSYKVVEKFISINGEGQRAGQLAVFIRFAGCNLNCSYCDTLWANEKNVDYEVMTLEDIYTYIESTGVKNITITGGEPLLQDNIFDLIKVLTAENELRLEIETNGSVSIKKYYEKLNHPPSFTMDYKLESSQMEDKMNIDNFNVLTQKDTVKFVVGDMKDLIKVKEVIDEYNLTEKTNVYLSPIYGKINYQDMVDFMIENKLNDVSLQLQLHKIIWDPNQKGV

SEQ ID NO: 31946 - protein, 222 aa, Natranaerovirga pectinivora
  misc_feature (1)..(222): tr|A0A4R3MQG3|A0A4R3MQG3_9FIRM 7-carboxy-7-deazaguanine synthase OS=Natranaerovirga pectinivora OX=682400 GN=q ueE PE=3 SV=1
MSYKVVETFVSINGEGRKAGQLAVFIRLAGCNLECSYCDTMWANNTDVKYTEMSSEDIYSYIKSTNIKNITITGGEPLLQDNIIDLLNLLSSDNELSVEIETNGSVPLEPFHKGMDRPPSFTMDYKLGSSKMEGHMELDNLQFLTKYDTLKFVVGNLEDLERARGLINDYDLTNKTNIFLSPVFNVINYEDIVEYMKANHLNDVSLQLQLHKIIWNPDERGV

SEQ ID NO: 31947 - protein, 240 aa, Natribacillus halophilus
  misc_feature (1)..(240): tr|A0A1G8PDC2|A0A1G8PDC2_9BACI 7-carboxy-7-deazaguanine synthase OS=Natribacillus halophilus OX=549003 GN=queE PE=3 SV=1
MSSKIPVLEIFGPTIQGEGMVAGQKTMFVRTGGCDYRCAWCDSAFTWDGSQKATPMTADDIMAKLEQTGGGRFSHVTISGGNPALHVGIAELIERFQEKGIASAVETQGSFWQDWLLNVDDVTISPKPPSSEMTTDWSRLDTFMMRLSARRDGNHNLKIVIFDEEDLVYAKQVHGRYPDVPLYLQVGNDDLDNQDPARLRDHLLEKYEWLVDRVMADPELNRVRVLPQIHALLWGNKQGV

SEQ ID NO: 31948 - protein, 312 aa, Natronoflexus pectinivorans
  misc_feature (1)..(312): tr|A0A4R2GE16|A0A4R2GE16_9BACT 7-carboxy-7-deazaguanine synthase OS=Natronoflexus pectinivorans OX=682526 GN=q ueE PE=3 SV=1
MIQQTVIKHKFSVSGLRTPVSEKLKAMSTKIVLANEGVFPITKDINGAALSQLPATAIPVAGTIQGEGKLAGVPSLFIRFSSCNLRCIWQLPDGSYSRCDTPYASFDTQQVVHTTVKEVIQLVKKNLGSIRHVVITGGEPLMQKDALAELACGLKNELNVHLTIETNGSMFNKDVAENIDLFSISPKLANSEPNPEKLKALGLNPSGPLSYHAQRRYNSKALQSYINLCNESDKEMQLKFVVGKPEDEQEIINDFLNQLNGWKPSDIMLMPLGANEEELKQTTPLTLEMAIRNGWRFTPRVHIDIFGCKPGV

SEQ ID NO: 31949 - protein, 214 aa, Natronospirillum operossus
  misc_feature (1)..(214): tr|A0A4Z0WIR0|A0A4Z0WIR0_9BACT 7-carboxy-7-deazaguanine synthase OS=Natronospirillum operossus OX=2562806 GN=q ueE PE=3 SV=1
MYQIKEVFHTLQGEGAHSGRPAVFCRFAGCNLWSGREQDRAVARCNFCDTDFVGTDGQNGGSFRLPTELADHIAGFWPADQGHRYVICTGGEPLLQLDAPLIEALHARGFEIGVETNGTLPAPAGIDWLCVSPKGATNVVIEQCDELKLVYPQAEAPPERFSRIAARNFYLSPMNPPDGTISTDSPAVRAAIDYCLAHPQWKLTLQSHKILHID

SEQ ID NO: 31950 - protein, 233 aa, Nautilia profundicola
  misc_feature (1)..(233): tr|B9L874|B9L874_NAUPA 7-carboxy-7-deazaguanine synthas e OS=Nautilia profundicola (strain ATCC BAA-1463 / DSM 18972 / AmH) OX=598659 GN=queE PE=3 SV=1
MKSEKLIPVSEIFYSIQGEGKYAGHPSVFVRVGGCNLKCPGFGEKGCDSYYAVDKSYKSEWKLMSVEEIKSEVSKYIRKDTHLVITGGEPTLFYKQLYPLVVWFEGQITVETNTTVDIDFEKYPAYKDVAFAMSVKLSNSAEEYGKRVKKHVIKSYVKNAPKSFFKFVIDKDLNNEIKDITAGINAPVYCMPLGADKEELEKNAPFVFGFCLKHGYCYSDRIHIRLFGKKKGV

SEQ ID NO: 31951 - protein, 230 aa, Nautilia sp.
  misc_feature (1)..(230): tr|A0A3T0L0I2|A0A3T0L0I2_9PROT 7-carboxy-7-deazaguanine synthase OS=Nautilia sp. PV-1 OX=2579250 GN=queE PE=3 SV=1
MGHIPISEIFYSIQGEGKYAGHPSVFVRVGGCNLKCPGFGEKGCDSYYAVDKSYKSEWKLMNVEEIKSEVSKYLNKNTHLVITGGEPTLFYKQLYPLVEWFKGQITIETNTTVDINFEKYPAYKKAAFAMSVKLSNSGEEYTKRVKKGIIASYVKNAPKSFFKFVIDRDLNDEIKEITGETNAAVYCMPLGADREELEKNAPFVFGFCLKHGYCYSDRIHIRLFGKKKGV

SEQ ID NO: 31952 - protein, 229 aa, Nautilia sp.
  misc_feature (1)..(229): tr|A0A432RT14|A0A432RT14_9PROT 7-carboxy-7-deazaguanine synthase OS=Nautilia sp. OX=2231114 GN=queE PE=3 SV=1
MTSKTIPITEIFYSIQGEGKYCGHPSLFIRVGGCNLTCSGFSKHGCDSFYAVDKKYKSSWKMMSINDLIVEIEKYYPCDIVLTGGEPTLYYQKLYPIIEKFDNITIETNTTIDIDFEKYPAFKKVSFAMSVKLSNSGEEYSKRVNKEAIQNIANNAKNSFFKFVINSDLLSEINDICKNIDLPIYCMPLGETKKELEKNSPFVFDFCLKNNFFYSDRIHIRLFSKKRGV

SEQ ID NO: 31953 - protein, 210 aa, Neisseria animalis
  misc_feature (1)..(210): tr|A0A3N3EHS8|A0A3N3EHS8_NEIAN 7-carboxy-7-deazaguanine synthase OS=Neisseria animalis OX=492 GN=queE PE=3 SV= 1
MTEIRPENPRYRLVEMFESLQGEGYNTGMRAVFLRLGKCNLACGWCDTDYLTFEMTGLSDILGRLKQYTARTVIITGGEPTIQPHLDILLDTLKAQGYYLCIETNGLNPAPPQIDFVAASPKACYAGKYTKQYIETADEVRIVADGDVTAFAEEMERKIRARHYYLSPCEQNGEMNIYDTIRQIGLLNSRPNAPVHWSLSLQTHKLAGIE

SEQ ID NO: 31954 - protein, 210 aa, Neisseria animaloris
  misc_feature (1)..(210): tr|A0A448UD65|A0A448UD65_9NEIS 7-carboxy-7-deazaguanine synthase OS=Neisseria animaloris OX=326522 GN=queE PE= 3 SV=1
MTEICPENPPYRIVEIFESLQGEGYNTGMPAVFIRLGKCNLACSWCDTDYLTFNMMSLQDILGRLKSYTARNIIITGGEPTIQPHLDILLDTLKAEGYTLCIETNGLNPAPPQIDFVATSPKACYAEKYEKQCIATADEVRIVADGDVLAFCERMEHKIRAKHYYLSPCEQNGEMNIYDTIRQIGLLNSRPDAPVHWQLSVQTHKWAGIE

SEQ ID NO: 31955 - protein, 210 aa, Neisseria arctica
  misc_feature (1)..(210): tr|A0A0J0YS30|A0A0J0YS30_9NEIS 7-carboxy-7-deazaguanine synthase OS=Neisseria arctica OX=1470200 GN=queE PE=3 SV=1
MQTIQPADPIFRIVEIFESLQGEGYNTGMPAVFIRLGKCNLACRWCDTDYLTFQQMPLSEILGRLKNYTARNIIITGGEPTIQPHLETLLNALKKEGYYLCIETNGLNPVPPQIDYIATSPKACYAEKYQTQYIKRADEVRIVVDGDIIAFCTAIEQKIRARHYYLSPCEQNGVMNIYETIRQIGLLNSRPDAAVHWQLSVQTHKWAGIE

SEQ ID NO: 31956 - protein, 212 aa, Neisseria bacilliformis
  misc_feature (1)..(212): tr|F2BCW9|F2BCW9_9NEIS 7-carboxy-7-deazaguanine synthas e OS=Neisseria bacilliformis ATCC BAA-1200 OX=888742 GN =queE PE=3 SV=1
MTRIDLAPADPQYRIVEIFESLQGEGWNTGMPAIFVRLGKCNLACSWCDTDYLKFSMMPLSEILGRLKNYTARNIIITGGEPTIQPHLNTLLDALKNAGYRLCIETNGLNPAPPQIDYVAASPKACYAAKYEKSCIAAADEVRIVADGDVISFCEALEQKIRARRYYLSPCEQNGAMNIYDTIRQIGILNSRPDAPVHWQLSVQTHKWAGIE

SEQ ID NO: 31957 - protein, 212 aa, Neisseria canis
  misc_feature (1)..(212): tr|A0A1X3CZ81|A0A1X3CZ81_9NEIS 7-carboxy-7-deazaguanine synthase OS=Neisseria canis OX=493 GN=queE PE=3 SV=1
MLPIHTQTQNPPYRIVEIFESLQGEGYNTGMPAVFIRLGKCNLACSWCDTDYLTFNMMSLQDIVGRLKSYTARNIIITGGEPTIQPHLDILLDALKTEGYTLCIETNGLNPAPPQIDFVAASPKACYAEKYEKQCIATADEVRIVADGDVLAFCERMEHKIRAKHYYLSPCEQNGEMNIYDTIRQIGLLNSRPNATVHWQLSVQTHKWAGIE

SEQ ID NO: 31958 - protein, 200 aa, Neisseria cinerea
  misc_feature (1)..(200): tr|A0A2X3Z4T4|A0A2X3Z4T4_NEICI 7-carboxy-7-deazaguanine synthase OS=Neisseria cinerea OX=483 GN=queE PE=3 SV=1
MKKISVTPKNPQYRIVEIFESLQGEGWNTGMPAIFVRLGKCNLACGWCDTDYLTFGMMGLSDILGRLKTYAARNIIITGGEPTIQPHLDTLLDALKAEGYFLCLETNGLKPAPPQIDYVATSPKVCYADKYETNCIAEADEVRIVADGDVIAFCENMERKIRARRYYLSPCEKDGVMNIYDTIRQIGILNSRPDASVHWS

SEQ ID NO: 31959 - protein, 212 aa, Neisseria cinerea
  misc_feature (1)..(212): tr|D0W2T6|D0W2T6_NEICI 7-carboxy-7-deazaguanine synthas e OS=Neisseria cinerea ATCC 14685 OX=546262 GN=queE PE= 3 SV=1
MKKINVAPENPQYRIVEIFESLQGEGWNTGMPAIFVRLGKCNLACGWCDTDYLTFDIMSLSDILGRLKTYAARNIIITGGEPTIQPHLDTLLDALKAEGYFLCIETNGLKPAPPQIDYVATSPKVCYADKYETNCIAEADEVRIVADGDVVAFCENMERKIRARRYYLSPCEQNGAMNIYDTIRQIGILNSRPDASVHWQLSVQTHKWAGIE

SEQ ID NO: 31960 - protein, 210 aa, Neisseria dentiae
  misc_feature (1)..(210): tr|A0A1X3DF61|A0A1X3DF61_9NEIS 7-carboxy-7-deazaguanine synthase OS=Neisseria dentiae OX=194197 GN=queE PE=3 S V=1
MTEIRPENPAYRIVEIFESLQGEGYNTGMSAVFIRLGKCNLACAWCDTDYLTFTMMSLADILGRLKSYTARNIIITGGEPTIQPHLAVLLDALKSAGYRLYLETNGLNPAPPQIDYVAASPKACYAAKYEQQCIETADEVRIVADGDVLAFCAAMEQKIRAEHYYLSPCERKGEMNIYETIRQIGLLNSRPDAAVHWQLSVQTHKWAGIE

SEQ ID NO: 31961 - protein, 210 aa, Neisseria dumasiana
  misc_feature (1)..(210): tr|A0A1X3DKE1|A0A1X3DKE1_9NEIS 7-carboxy-7-deazaguanine synthase OS=Neisseria dumasiana OX=1931275 GN=queE PE= 3 SV=1
MTEIRPENPQYRIVEIFESLQGEGYNTGMPAVFIRLGKCNLACSWCDTDYLTFNMMSLQDILGRLKNHTARNIIITGGEPTIQPHLDILLDTLKTEGYTLCIETNGLNPAPPQIDFVATSPKACYAEKYEKQCITTADEVRIVADGDVLAFCERMEQKIRAKHYYLSPCEQNGEMNIYDTIRQIGLLNSRPNAPVHWQLSVQTHKWAGIE

SEQ ID NO: 31962 - protein, 212 aa, Neisseria elongata
  misc_feature (1)..(212): tr|A0A378TYT1|A0A378TYT1_NEIEL 7-carboxy-7-deazaguanine synthase OS=Neisseria elongata OX=495 GN=queE PE=3 SV= 1
MKKISVAPENPQFRIVEIFESLQGEGWNTGMPAVFVRLGKCNLACGWCDTDYLKFGMMSLSDILGRLKTYTARNVIITGGEPTIQPHLDTLLDALKAEGYFLCIETNGLKPAPSQIDYVATSPKACYAEKYETNCIAKADEVRIVADGDVVAFCQNMERKIRARHYYLSPCEQNGAMNIYDTIRQIGILNSRPDAPVHWQLSVQTHKWAGIE

SEQ ID NO: 31963 - protein, 212 aa, Neisseria elongata
  misc_feature (1)..(212): tr|D4DQ49|D4DQ49_NEIEG 7-carboxy-7-deazaguanine synthas e OS=Neisseria elongata subsp. glycolytica ATCC 29315 O X=546263 GN=queE PE=3 SV=1
MKKISVAPENPQYRIVEIFESLQGEGWNTGMPAVFVRLGKCNLACGWCDTDYLKFGMMSLSDILGRLKTYAARNVIITGGEPTIQPHLDTLLDTFKAEGYFLCIETNGLKPAPPQIDYVATSPKACYAAKYETNCITEADEVRIVADGDVVAFCENMERKIRARHYYLSPCEQDGAMNIYDTIRQIGILNSRPDAPAHWQLSVQTHKWAGIE

SEQ ID NO: 31964 - protein, 211 aa, Neisseria flavescens
  misc_feature (1)..(211): tr|A0A154U6V1|A0A154U6V1_NEIFL 7-carboxy-7-deazaguanine synthase OS=Neisseria flavescens OX=484 GN=queE PE=3 S V=1
MTIQITPNNPQYRIVEIFESLQGEGWNTGMPAVFIRLGKCNLACSWCDTDYLKFGMMSLSDILGRLKTYTARNIIITGGEPTIQPHLDTLLNALKAEGYFLCIETNGLNPAPPQIDYVATSPKACYAAKYESSCIEKADEVRIVADGDVIAFCQEMERKIRARHYYLSPCEQDGVMNIYDTIRQIGVLNSRPDAPIHWQLSVQTHKWAGIE

SEQ ID NO: 31965 - protein, 211 aa, Neisseria flavescens
  misc_feature (1)..(211): tr|C5TL96|C5TL96_NEIFL 7-carboxy-7-deazaguanine synthas e OS=Neisseria flavescens SK114 OX=596320 GN=queE PE=3 SV=1
MTIQITPNNPQYRIVEIFESLQGEGWNTGMPAVFVRLGKCNLACGWCDTDYLKFGMMSLSDILGRLKTYTARNVIITGGEPTIQPHLNTLLDALKAEGYFLCIETNGLNPAPPQIDYVATSPKACYAAKYESSCIEKADEVRIVADGDVVAFCQEMERKIRAQHYYLSPCEQDGVMNIYDTIRQIGVLNSRPDAPVHWQLSVQTHKWAGIE

SEQ ID NO: 31966 - protein, 212 aa, Neisseria gonorrhoeae
  misc_feature (1)..(212): tr|B4RQ65|B4RQ65_NEIG2 7-carboxy-7-deazaguanine synthas e OS=Neisseria gonorrhoeae (strain NCCP11945) OX=521006 GN=queE PE=3 SV=1
MKKISVAPENPQYRIVEIFESLQGEGRNTGMPAVFVRLGKCNLACGWCDTDYLTFGMMSLSDILGCLKTYAARNIIITGGEPTIQPHLDMLLDTLKAEGYFLCLETNGLKPAPPQIDYVATSPKACYAAKYETNCIAEADEVRIVADGDVLAFCENMERKIRARHYYLSPCEQNGVMNIYDTIRQIGILNSRPDAPVHWQLSVQTHKWAGIE

SEQ ID NO: 31967 - protein, 212 aa, Neisseria gonorrhoeae
  misc_feature (1)..(212): tr|A0A5K1QHF9|A0A5K1QHF9_NEIGO 7-carboxy-7-deazaguanine synthase OS=Neisseria gonorrhoeae OX=485 GN=queE PE=4 SV=1
MKKISVAPENPQYRIVEIFESLQGEGRNTGMPAVFVRLGKCNLACGWCDTDYLTFGMMSLSDILGCLKTYAARNIIITGGEPTIQPHLDMLLDTLKAEGYFLCIETNGLNPVPPQIDYVATSPKACYAAKYEKSCIETADEVRIVADGDVVGFCENMERKIRAHHYYLSPCEQDGAMNIYDTIRQIGILNSRPDAPVHWQLSVQTHKWAGIE

SEQ ID NO: 31968 - protein, 209 aa, Neisseria iguanae
  misc_feature (1)..(209): tr|A0A2P7TYY1|A0A2P7TYY1_9NEIS 7-carboxy-7-deazaguanine synthase OS=Neisseria iguanae OX=90242 GN=queE PE=3 SV =1
MVVEPVNPQYRIVEIFESLQGEGYNTGMPAIFIRLGKCNLACSWCDTDYLRFELMSLQEILGRLKSYSARNVIITGGEPTIQLYLNTLLNALKAAGYYLCLETNGLHPAPPQIDFVATSPKACYAAKYAQSCIATADEVRIVADGDVLAFCEQMECKIHAKHFYLSPCEQNGIMNIYDTIRQIGLLNSRPNAPVHWQLSVQTHKWAGIE

SEQ ID NO: 31969 - protein, 212 aa, Neisseria lactamica
  misc_feature (1)..(212): tr|E4ZEY0|E4ZEY0_NEIL0 7-carboxy-7-deazaguanine synthas e OS=Neisseria lactamica (strain 020-06) OX=489653 GN=q ueE PE=3 SV=1
MKKINVAPENPQYRIVEIFESLQGEGRNTGMPAVFVRLGKCNLACGWCDTDYLTFGMMSLSDILGRLKTYTVRNIIITGGEPTIQPHLDTLLDALKAEGYFLCLETNGLNPAPPQIDYVATSPKACYAAKYEKSCIETADEVRIVADGDVLAFCENMERKIRARHYYLSPCEQNGAMNIYDTIRQIGILNSRPDAPVHWQLSVQTHKWAGIE

SEQ ID NO: 31970 - protein, 212 aa, Neisseria lactamica
  misc_feature (1)..(212): tr|D0WB74|D0WB74_NEILA 7-carboxy-7-deazaguanine synthas e OS=Neisseria lactamica ATCC 23970 OX=546265 GN=queE P E=3 SV=1
MKKINVAPENPQYRIVEIFESLQGEGRNTGMPAVFVRLGKCNLACGWCDTDYLTFGMMSLSDILGRLKAYAARNIIITGGEPTIQPHLDTLLDALKAEGYFLCLETNGLNPAPPQIDYVATSPKACYAAKYETNCIAEADEVRIVADGDVLAFCENMERKIRARHYYLSPCEQNGAMNIYDTIRQIGILNSRPDAPVHWQLSVQTHKWAGIE

SEQ ID NO: 31971 - protein, 212 aa, Neisseria macacae
  misc_feature (1)..(212): tr|F9EUV2|F9EUV2_9NEIS 7-carboxy-7-deazaguanine synthas e OS=Neisseria macacae ATCC 33926 OX=997348 GN=queE PE= 3 SV=1
MKKISVAPENPQYRIVEIFESLQGEGWNTGMPAVFVRLGKCNLACGWCDTDYLKFGMMSLSDILGRLKTYTARNIIITGGEPTIQPHLDTLLDALKAEGYFLCIETNGLKPAPPQIDYVATSPKACYAAKYETNCIAEANEVRIVADGDVVAFCENMERKIRARHYYLSPCEQNGVMNIYDTIRQIGLLNSRPDAPVHWQLSVQTHKWAGIE

SEQ ID NO: 31972 - protein, 212 aa, Neisseria meningitidis
  misc_feature (1)..(212): sp|Q9K0Q5|QUEE_NEIMB 7-carboxy-7-deazaguanine synthase OS=Neisseria meningitidis serogroup B (strain MC58) OX= 122586 GN=queE PE=3 SV=1
MKKINVAPENPQYRIVEIFESLQGEGWNTGMPAVFVRLGKCNLACGWCDTDYLTFGMMGLSDILGRLKTYAARNIIITGGEPTIQPHLDMLLDTLKAEGYFLCLETNGLNPAPPQIDYVATSPKACYAAKYENSCIETADEVRIVADGDVLAFCENMERKIRAHHYYLSPCEQDGAMNIYDTIRQIGILNSRPDASVHWQLSVQTHKWAGIE

SEQ ID NO: 31973 - protein, 212 aa, Neisseria meningitidis
  misc_feature (1)..(212): tr|A0A121PH74|A0A121PH74_NEIME 7-carboxy-7-deazaguanine synthase OS=Neisseria meningitidis OX=487 GN=queE PE=3 SV=1
MKKINVAPENPQYRIVEIFESLQGEGWNTGMPAVFVRLGKCNLACGWCDTDYLTFGMMSLSDILGCLKTYAARNIIITGGEPTIQPHLDMLLDTLKAEGYFLCLETNGLNPAPPQIDYVATSPKACYAAKYEKSCIETADEVRIVADGDVVAFCENMERKIRAHHYYLSPCEQDGAMNIYDTIRQIGILNSRPDASVHWQLSVQTHKWAGIE

SEQ ID NO: 31974 - protein, 212 aa, Neisseria mucosa
  misc_feature (1)..(212): tr|A0A2R4AW95|A0A2R4AW95_NEIMU 7-carboxy-7-deazaguanine synthase OS=Neisseria mucosa OX=488 GN=queE PE=3 SV=1
MKKISVSPENPQYRIVEIFESLQGEGWNTGMPAVFVRLGKCNLACGWCDTDYLKFGMMSLSDILGRLKTYTARNIIITGGEPTIQPHLDTLLDALKAEGYFLCIETNGLKPAPPQIDYVATSPKACYAAKYETNCIAEANEVRIVADGDVVVFCENMERKIRARHYYLSPCEQNGVMNIYDTIRQIGLLNSRPDAPVHWQLSVQTHKWAGIE

SEQ ID NO: 31975 - protein, 212 aa, Neisseria mucosa
  misc_feature (1)..(212): tr|D2ZU72|D2ZU72_NEIMU 7-carboxy-7-deazaguanine synthas e OS=Neisseria mucosa ATCC 25996 OX=546266 GN=queE PE=3 SV=1
MKKISVAPENPQYRIVEIFESLQGEGWNTGMPAVFVRLGKCNLACGWCDTDYLKFGMMSLSDILGRLKTYTARNIIITGGEPTIQPHLDTLLDALKAEGYFLCIETNGLKPAPPQIDYVATSPKACYAAKYETNCIAEADEVRIVADGDVVAFCENMERKIRARYYYLSPCEQNGAMNIYDTIHQIGILNSRPDAPVHWQLSVQTHKWAGIE

SEQ ID NO: 31976 - protein, 211 aa, Neisseria perflava
  misc_feature (1)..(211): tr|A0A2I1QWJ3|A0A2I1QWJ3_NEIPE 7-carboxy-7-deazaguanine synthase OS=Neisseria perflava OX=33053 GN=queE PE=3 S V=1
MTIQITPNNPQYRIVEIFESLQGEGWNTGMPAVFIRLGKCNLACSWCDTDYLKFGMMSLSDILGRLKTYTARNIIITGGEPTIQPHLDTLLNTLKAEGYFLCIETNGLNPAPPQIDYVATSPKACYAAKYEKSCIEKADEVRIVADGDVITFCQEMERKIRAQHYYLSPCEQDGVMNIYDTIRQIGVLNSRSDAPVHWQLSVQTHKWAGIE

SEQ ID NO: 31977 - protein, 212 aa, Neisseria polysaccharea
  misc_feature (1)..(212): tr|E2PI41|E2PI41_NEIPO 7-carboxy-7-deazaguanine synthas e OS=Neisseria polysaccharea ATCC 43768 OX=546267 GN=qu eE PE=3 SV=1
MKKISVAPENPQYRIVEIFESLQGEGWNTGMPAVFVRLGKCNLACGWCDTDYLTFSMMSLSDILGRLKAYAARNIIITGGEPTIQPHLDALLDTLKAEGYFLCLETNGLNPAPPQIDYVATSPKAYYAAKYEKSCIETADEVRIVADGDVVGFCENMERKIRARHYYLSPCEQDGAMNIYDTIRQIGILNSRPDAPVHWQLSVQTHKWAGIE

SEQ ID NO: 31978 - protein, 211 aa, Neisseria shayeganii
  misc_feature (1)..(211): tr|G4CF30|G4CF30_9NEIS 7-carboxy-7-deazaguanine synthas e OS=Neisseria shayeganii 871 OX=1032488 GN=queE PE=3 S V=1
MKFPLLPDNPSYRIVEIFESLQGEGYHTGMPAVFIRLGKCNLACAWCDTDYLNFRPMSLHDILNTVAAYASRNIIITGGEPTIQPHLNQLLDALKARGYRLHLESNGLQAIPEQIDYAAVSPKAAYAEKYAAAGTKRADEVRIVADGDVLAFCSTIEQNIQAERYYLSPCERDGEMNIHHTIRQLGQLNARGSAFPHWQLSVQTHKWAGIE

SEQ ID NO: 31979 - protein, 212 aa, Neisseria sicca
  misc_feature (1)..(212): tr|C6M3W6|C6M3W6_NEISI 7-carboxy-7-deazaguanine synthas e OS=Neisseria sicca ATCC 29256 OX=547045 GN=queE PE=3 SV=1
MKKISVAPENPQYRIVEIFESLQGEGWNTGMPAVFVRLGKCNLACGWCDTDYLKFSMMSLSDILGRLKTYTVRNIIITGGEPTIQPHLDTLLDALKAEGYFLCIETNGLKPVPPQIDYVATSPKACYAAKYEKSCIETADEVRIVADGDVVAFCENMERKIRARHYYLSPCEQNGVMNIYDTIRQIGILNSRPDAPVHWQLSVQTHKWAGIE

SEQ ID NO: 31980 - protein, 212 aa, Neisseria sicca
  misc_feature (1)..(212): tr|I2NS68|I2NS68_NEISI 7-carboxy-7-deazaguanine synthas e OS=Neisseria sicca VK64 OX=1095748 GN=queE PE=3 SV=1
MKKISVAPENPQYRIVEIFESLQGEGWNTGMPAVFVRLGKCNLACGWCDTDYLKFGMMSLSDILGRLKTYTARNIIITGGEPTIQPHLDTLLDALKAEGYFLCIETNGLKPAPPQIDYVATSPKACYAAKYETNCIAEANEVRIVADGDVVAFCQNMERKIRARHYYLSPCEQNGVMNIYDTIRQIGILNSRPDAPVHWQLSVQTHKWAGIE

SEQ ID NO: 31981 - protein, 212 aa, Neisseria sp.
  misc_feature (1)..(212): tr|A0A1F1SHD9|A0A1F1SHD9_9NEIS 7-carboxy-7-deazaguanine synthase OS=Neisseria sp. HMSC31F04 OX=1581075 GN=queE PE=3 SV=1
MKKISVAPENPQYRIVEIFESLQGEGWNTGMPAVFVRLGKCNLACGWCDTDYLKFGMMGLSDILGRLKTYTARNIIITGGEPTIQPHLDTLLDALKAEGYFLCIETNGLKPAPPQIDYVATSPKACYAAKYETNCIAEADEVRIVADGDVVAFCQNMERKIRASHYYLSPCEQDGVMNIYDTIRQIGILNSRPDAPVHWQLSVQTHKWAGIE

SEQ ID NO: 31982 - protein, 211 aa, Neisseria sp.
  misc_feature (1)..(211): tr|A0A2H9X086|A0A2H9X086_9NEIS 7-carboxy-7-deazaguanine synthase OS=Neisseria sp. N95_16 OX=2024408 GN=queE PE =3 SV=1
MMVPIEPANPQYRIVEIFESLQGEGYNTGMPAIFIRLGKCNLACSWCDTDYLRFEMMSLHEILGRLKNYRARNIIITGGEPTIQPHLDTLLNTLKAAGYYLCMETNGLNPTPIQIDFVATSPKACYADKYAKSCIEKADEVRIVADGDVLAFCEQMERKIQAEHFYLSPCERNGVMNIYDTIRQIGLLNSRAHTTVHWQLSVQTHKWAGIE

SEQ ID NO: 31983 - protein, 211 aa, Neisseria subflava
  misc_feature (1)..(211): tr|A0A4D7WYD9|A0A4D7WYD9_NEISU 7-carboxy-7-deazaguanine synthase OS=Neisseria subflava OX=28449 GN=queE PE=3 S V=1
MTIQITPNNPQYRIVEIFESLQGEGWNTGMPAVFIRLGKCNLACSWCDTDYLKFGMMSLSDILGRLKTYTARNIIITGGEPTIQPHLDTLLNALKAEGYFLCIETNGLNTAPPQIDYVATSPKACYAAKYESSCIEKADEVRIVADGDVVAFCQEMERKIRAQHYYLSPCEQDGVMNIYDTIRQIGVLNSRSDSPVHWQLSVQTHKWAGIE

SEQ ID NO: 31984 - protein, 211 aa, Neisseria subflava
  misc_feature (1)..(211): tr|D3A6H6|D3A6H6_NEISU 7-carboxy-7-deazaguanine synthas e OS=Neisseria subflava NJ9703 OX=546268 GN=queE PE=3 S V=1
MTIHITPNNPQYRIVEIFESLQGEGWNTGMPAVFIRLGKCNLACSWCDTDYLKFGMMSLSDILGRLKTYTARNIIITGGEPTIQPHLDTLLNALKAEGYFLCIETNGLNPAPPQIDYVATSPKACYAAKYESGCIEKADEVRIVADGDVIAFCQEMERKIRAQHYYLSPCEQDGVMNIYDTIRQIGVLNSRPDAPVHWQLSVQTHKWAGIE

SEQ ID NO: 31985 - protein, 210 aa, Neisseria wadsworthii
  misc_feature (1)..(210): tr|G4CSP6|G4CSP6_9NEIS 7-carboxy-7-deazaguanine synthas e OS=Neisseria wadsworthii 9715 OX=1030841 GN=queE PE=3 SV=1
MIKNHADNPQYRIVEIFESLQGEGYNTGMPAVFIRLGKCNLACPWCDTDYLTFKPMTLSEIHACLKSYTARNIIITGGEPTIQPNLAALLDSLKAEGYRLCIETNGLNPAPPQIDYVATSPKACYAEKYEKQCIATADEVRIVADGDVTAFCERMEHKIRAKHYYLSPCEKTGVMNIYDTIRQIGELNSRPNAPVHWQLSVQTHKWAGIE

SEQ ID NO: 31986 - protein, 210 aa, Neisseria weaveri
  misc_feature (1)..(210): tr|A0A3S4Z353|A0A3S4Z353_9NEIS 7-carboxy-7-deazaguanine synthase OS=Neisseria weaveri OX=28091 GN=queE PE=3 SV =1
MTEIRPENPQYRIVEIFESLQGEGYNTGMPAVFIRLGKCNLACSWCDTDYLTFNMMSLQDILGRLKSYTARNIIITGGEPTIQPHLDILLDTLKAEGYTLCIETNGLNPAPPQIDFVTASPKACYAEKYEKQCIATADEVRIVADGDVLAFCERMEHKIRAKHYYLSPCEQNGEMNIYDTIRQIGLLNSRSDAPVHWQLSVQTHKWAGIE

SEQ ID NO: 31987 - protein, 210 aa, Neisseria zalophi
  misc_feature (1)..(210): tr|A0A5J6PZ43|A0A5J6PZ43_9NEIS 7-carboxy-7-deazaguanine synthase QueE OS=Neisseria zalophi OX=640030 GN=D0T92_ 07750 PE=4 SV=1
MTEIFPHNPQYRIVEIFESLQGEGYNTGMPAIFIRLGKCNLACPWCDTDYLTFTMMSLSDILGRLKSYTARNIIITGGEPTIQPHLDTLLNALKAEGYTLWMETNGLNPAPAQIDFVATSPKARYADKYQKQCIEKADEVRIVVDGDILAFCEQMEKKIAAKHYFLSPCEENGIMNIHETIRQLGILNSRPHAPVHWQLSIQTHKWAGIE

SEQ ID NO: 31988 - protein, 210 aa, Neisseria zoodegmatis
  misc_feature (1)..(210): tr|A0A1X3CPM3|A0A1X3CPM3_9NEIS 7-carboxy-7-deazaguanine synthase OS=Neisseria zoodegmatis OX=326523 GN=queE PE =3 SV=1
MTEIRPENPQYRIVEIFESLQGEGYNTGMPAVFIRLGKCNLACSWCDTDYLTFNMMSLQDILGRLKNHTARNIIITGGEPTIQPHLDILLDALKAEGYTLCIETNGLNPAPPQIDFVATSPKACYAEKYEKQCIATADEVRIVADGDVLAFCERMEQKIRAKHYYLSPCEQNGEMNIYDTIRQIGLLNSRPDALAHWQLSVQTHKWAGIE

SEQ ID NO: 31989 - protein, 210 aa, Neisseria zoodegmatis
  misc_feature (1)..(210): tr|A0A378WTM1|A0A378WTM1_9NEIS 7-carboxy-7-deazaguanine synthase OS=Neisseria zoodegmatis OX=326523 GN=queE PE =3 SV=1
MTEIRPENPQYRIVEIFESLQGEGYNTGMPAVFIRLGKCNLACSWCDTDYLTFNTMSLQDILGRLKNHTARNIIITGGEPTIQPHLDILLDTLKAEGYTLCIETNGLNPAPPQIDFVATSPKACYAEKYEKQCIATADEVRIVADGDVLAFCERMEQKIRAKHYYLSPCEQNGEMNIYDTIRQIGLLNSRPDAPVHWQLSVQTHKWAGIE

SEQ ID NO: 31990 - protein, 221 aa, Neisseriaceae bacterium
  misc_feature (1)..(221): tr|A0A2I7N312|A0A2I7N312_9NEIS 7-carboxy-7-deazaguanine synthase OS=Neisseriaceae bacterium DSM 100970 OX=2052 837 GN=queE PE=3 SV=1
MQYPINEIFYTLQGEASFVGQPSVFIRLQGCNVGCAFCDTKHTWELDTANQVKTIQVIEKTGDRLGWAYFSLEEILAEIARYPACRHIVFTGGEPAMYDLRELISILEDKGYSTQIETSGTEILRVSEKTWVTLSPKIDMPGNKTILAENVARANEIKMPVGKIQDIEKLKRLLQQHAVTNKLIWLQPLSCKENPTKLCIEAALANNWRLSAQVHKYINIR

SEQ ID NO: 31991 - protein, 222 aa, Neisseriaceae bacterium
  misc_feature (1)..(222): tr|A0A3S0DJ21|A0A3S0DJ21_9NEIS 7-carboxy-7-deazaguanine synthase OS=Neisseriaceae bacterium OX=2014784 GN=queE PE=3 SV=1
MQYPINEIFYSLQGEANFAGLPSVFIRMQGCAVGCAFCDTKHTWELDPTTQQTPQAVVGKIFEHSAKWAYFTAEDIWREIKKYPACRHIVFTGGEPAMYDLRSITEDLHAQGYTTQIETSGTEPLRLSDKTWVTLSPKIDMPGHKQILAENVARANEIKMPIGKMADIIKLKQLLVQYTINTQLIWLQPLSCKETPTKLCIEQALANNWRVSTQIHKFINIH

SEQ ID NO: 31992 - protein, 221 aa, Neisseriales bacterium
  misc_feature (1)..(221): tr|A0A5C8AXI8|A0A5C8AXI8_9NEIS 7-carboxy-7-deazaguanine synthase OS=Neisseriales bacterium OX=2053582 GN=queE PE=3 SV=1
MQYPINEIFYTLQGEASFVGQPSVFIRLQGCNVGCAFCDTKHTWELDTANQVKTIQVIEKTGDRLDWAYFSLEEILAEIARYPACRHIVFTGGEPAMYDLRELISILEDKGYSTQIETSGTEILRVSEKTWVTLSPKIDMPGNKIVLAENVARANEIKMPVGKAQDIEKLKQLLQQHAVTNKLIWLQPLSCKENPTKLCIEAALANNWRLSAQVHKYINIR

SEQ ID NO: 31993 - protein, 213 aa, Neoasaia chiangmaiensis
  misc_feature (1)..(213): tr|A0A1U9KMC6|A0A1U9KMC6_9PROT 7-carboxy-7-deazaguanine synthase OS=Neoasaia chiangmaiensis OX=320497 GN=queE PE=3 SV=1
MSYAVKEMFATLQGEGAQTGRASVFCRFAGCNLWSGREQDRAQAACTFCDTDFVGVDGEGGGRFSCAEALADALETTWRTHAGDAPGRYVVFTGGEPLLQLDAALIDAAHARGFEIAVETNGTIAAPVGIDWICVSPKPNAPLVQTHGHELKLVYPQTQLSPEMFGDLAFDNFWLQPMDGAARVANTSAAVAYCLAHPQWRLSLQTHKLIGIP

SEQ ID NO: 31994 - protein, 215 aa, Neochlamydia sp.
  misc_feature (1)..(215): tr|A0A0C1HJD6|A0A0C1HJD6_9BACT 7-carboxy-7-deazaguanine synthase OS=Neochlamydia sp. EPS4 OX=1478175 GN=queE P E=3 SV=1
MNSLNIIEIFRSIQGETSLAGLPTTFIRLAACNLRCSWCDTTYSFGRGVSYTLENIFSKVASFGCQYVCVTGGEPLLQANVIPLMEQLCQAGYIVSLETGGSLSTQKVNANVRIILDIKCPGSQMSNKNLWDNLNHLRFHDQIKFVISNREDYDYAKMVCSQYQLFKKVSEILFSPVFEVLPSQTLVNWILEDQLAVRLNLQIHKFIWPSHTRGV

SEQ ID NO: 31995 - protein, 215 aa, Neochlamydia sp.
  misc_feature (1)..(215): tr|A0A3T1C8H7|A0A3T1C8H7_9BACT 7-carboxy-7-deazaguanine synthase OS=Neochlamydia sp. S13 OX=1353976 GN=queE PE =3 SV=1
MNSLNIIEIFRSIQGETSLAGLPTTFIRLAACNLRCSWCDTTYSFGRGASYTLENIFSKVASFGCQYVCVTGGEPLLQANVIPLMEQLCQAGYIVSLETGGSLSTQKVNANVRIILDIKCPGSQMSNKNLWDNLNHLRFHDQIKFVISNREDYDYAKMVCSQYQLFKKVSEILFSPVFEVLPSHTLVNWILEDQLAVRLNLQIHKFIWPPHTRGV

SEQ ID NO: 31996 - protein, 238 aa, Neokomagataea sp.
  misc_feature (1)..(238): tr|A0A506UKJ2|A0A506UKJ2_9PROT 7-carboxy-7-deazaguanine synthase OS=Neokomagataea sp. Jb2 OX=2558904 GN=queE P E=3 SV=1
MAYAVKEVFYTLQGEGAQTGRAAVFCRFAGCNLWSGRESDRGRAECTFCDTDFIGTNGEGGGKFPTPEALARHILSCWQAGCTQPEGARPYVVFTGGEPLLQLDSPLLQAVRALGFETAVETNGTLPAPPELDWICVSPKTDAPLVQSRGDELKLVYPQAHLRPEMFAGLDFRHFWLQPLDGSALPEPQPASSQAPPLDHDGHLASSRADATAQAVRYCQAHPRWRLSLQTHKLIGIP

SEQ ID NO: 31997 - protein, 213 aa, Neokomagataea tanensis
  misc_feature (1)..(213): tr|A0A4Y6V6T8|A0A4Y6V6T8_9PROT 7-carboxy-7-deazaguanine synthase OS=Neokomagataea tanensis OX=661191 GN=queE P E=3 SV=1
MAYTVKEMFLTLQGEGAQTGRAAVFCRFAGCNLWSGREVDRATATCRFCDTDFIGTNGDGGGKFPTAQALAETITHCWSAEADTSGQRYVVFTGGEPLLQLDNSLIDAMHRAGFEIAVETNGTLPAPPGVDWICVSPKADAPVVQQSGAELKLVFPQTELTPQQFESFDFKHFWLQPMDGPDRIANTQAAVAYCRAHPKWRLSLQTHKMIDIP

SEQ ID NO: 31998 - protein, 210 aa, Neorhizobium galegae
  misc_feature (1)..(210): tr|A0A0T7G528|A0A0T7G528_RHIGA 7-carboxy-7-deazaguanine synthase OS=Neorhizobium galegae bv. officinalis OX=32 3656 GN=queE PE=3 SV=1
MGYAVKEMFKTLQGEGAQAGRAAVFCRFAGCNLWSGREEDRDQAVCQFCDTDFVGTDGIGGAKFKDAATLAVAIAATWGDTPHRRYVVFTGGEPLLQLDDDLVAAVHQQGFEIAIETNGTLEPPAGVDWICVSPKAGAPLKLREGSELKLVYPQPGLLPEALPDLHFEHYFLQPMDGPRRTENTVAVTEYCMEHPKWRLSLQTHKMIGIP

SEQ ID NO: 31999 - protein, 248 aa, Neorhizobium sp.
  misc_feature (1)..(248): tr|A0A4R3A6Z7|A0A4R3A6Z7_9RHIZ 7-carboxy-7-deazaguanine synthase OS=Neorhizobium sp. JUb45 OX=2485113 GN=queE PE=3 SV=1
MSAASEKIRISEIFGPTIQGEGMLIGQPTVFVRTGGCDYRCSWCDTLHAVDSEYRHNWLAMEVETIWGQVRHLSGDVPLTVSLSGGNPAIQPLGSLIRRGKRDGYRFAIETQGSVARDWFAELDFLVLSPKPPSSCMETDWDVLADCLRAATGSPAGGPRIGLKFVVFDDADYAFAKDAAARFPDLPVYLQPGNHTPPPPDDDDARIDLDGIMDRMLWLVDKVTDDRWFSATVLPQLHVLLWGNKRGV

SEQ ID NO: 32000 - protein, 244 aa, Neorhizobium sp.
  misc_feature (1)..(244): tr|A0A386E247|A0A386E247_9RHIZ 7-carboxy-7-deazaguanine synthase OS=Neorhizobium sp. NCHU2750 OX=1825976 GN=qu eE PE=3 SV=1
MTSAAEIIRVSEIFGPTIQGEGMLIGQPTVFVRTGGCDYRCSWCDTLHAVDSDYRHDWKPMDAGTIWDEVRELSGGRPLMVSLSGGNPAIQPMKPLIRRGKNDGYRFAIETQGSIARDWFADLDVLVLSPKPPSSGMETDWDKLADCLAAAGKAPRIALKFVIFDDADYDFARETSGRYPELPVYLQPGNHTPPPPDDDDARIDLDRIMDRMLWLVDKVTADRWFSATVLPQLHVLLWGNKRGV

SEQ ID NO: 32001 - protein, 265 aa, Neosynechococcus sphagnicola
  misc_feature (1)..(265): tr|A0A098TPA2|A0A098TPA2_9CYAN 7-carboxy-7-deazaguanine synthase OS=Neosynechococcus sphagnicola sy1 OX=149702 0 GN=queE PE=3 SV=1
MSTSSTANSRTARLIEVFSAIQGEGQNVGTRQIFIRFAQCDLRCHFCDSVHTWEVPESCRIERSPGERDFETHVNPVTQEHLLQWVQRQHQPGLHDSISLTGGEPLLHASFLQSFLPLVRQQTSLPVYLETGGHRPQQLRQILTHLDSIGMDLKLPSVSGETWWQAHRQCLQAAHSAGVEVFVKIIIAAQTDLTDLLQAAQLVAAVSPEIPVFLQPVTPLEQLHPKQVPLAVPRPDQVLAWQSLLKQTLQWVRVIPQTHKMIAQL

SEQ ID NO: 32002 - protein, 210 aa, Neptuniibacter sp.
  misc_feature (1)..(210): tr|A0A136HHG8|A0A136HHG8_9GAMM 7-carboxy-7-deazaguanine synthase OS=Neptuniibacter sp. Phe_28 OX=1795871 GN=qu eE PE=3 SV=1
MYSVKEIFYSLQGEGAQSGRASIFCRFTGCNLWSGREQDRATAVCSFCDTDFIGTDGQNGGKFQTASDLCAFLRTFWPSDSNTPPYIIFTGGEPALQLDQHLVDECHQHGFIIAIETNGTKPLPTDIDWICVSPKADAKIIITSGDELKLVYPQALAQPEQFEAMDFTEFYLQPLDSPARPMHTKAVVDYCLQHPRWKLSLQNHKVLGID

SEQ ID NO: 32003 - protein, 209 aa, Neptunomonas antarctica
  misc_feature (1)..(209): tr|A0A1N7KLC3|A0A1N7KLC3_9GAMM 7-carboxy-7-deazaguanine synthase OS=Neptunomonas antarctica OX=619304 GN=queE PE=3 SV=1
MYSVKEMFYTLQGEGAHAGRPAVFCRFTGCNLWSGREKDRATAICNFCDTDFVGTDGQNGDKFVTAESLAMTIQSFWPTPEGKPYVVFTGGEPALQLDQALVTAMHLVGFEIAIETNGTKPLPAGIDWICVSPKASAEVIIQTGHELKLVYPQLDAMPEKFTTLNFDHFYLQPMDNQDQNNNTQQVIEYCMRHPQWKMSLQTHKIIGID

SEQ ID NO: 32004 - protein, 213 aa, Neptunomonas qingdaonensis
  misc_feature (1)..(213): tr|A0A1I2PZD0|A0A1I2PZD0_9GAMM 7-carboxy-7-deazaguanine synthase OS=Neptunomonas qingdaonensis OX=1045558 GN=q ueE PE=3 SV=1
MYSVKEMFYTLQGEGAHAGRPAVFCRFTGCNLWSGREQDRASAICNFCDTDFIGTDGQNGGKFATAESLANKIKSFWATPEGTPYVVFTGGEPALQLDKALVMAMHAVGFEIAIETNGTKPLPRNIDWICVSPKSTTEVIIQKGNELKLVYPQTDAMPEKFNALQFDHFYLQPMDDLIDKPGQTNNTQDTIAYCLRHPQWKLSLQTHKIIGID

SEQ ID NO: 32005 - protein, 209 aa, Neptunomonas sp.
  misc_feature (1)..(209): tr|A0A437Q8E0|A0A437Q8E0_9GAMM 7-carboxy-7-deazaguanine synthase OS=Neptunomonas sp. HPM-16 OX=1815562 GN=queE PE=3 SV=1
MYSVKEMFYTLQGEGAHAGRPAVFCRFTGCNLWSGREQDRAKAVCDFCDTDFVGTDGQNGGKFATAQDLAQRIASFWPTPEGIPFVVFTGGEPALQLDTPLIDAVHKVGFEVAIETNGTKPLPEGIDWICVSPKGSSDVIITQGHELKLVYPQAAAMPDRFAGADFEHFYLQPIDSAAEPNSTQQAIKYCMQHPRWKLSLQTHKIIGID

SEQ ID NO: 32006 - protein, 212 aa, Nevskiales bacterium; identical to SEQ ID NO: 27172
  misc_feature (1)..(212): tr|A0A2F0A0X7|A0A2F0A0X7_9GAMM 7-carboxy-7-deazaguanine synthase OS=Nevskiales bacterium OX=2026766 GN=queE PE =3 SV=1

SEQ ID NO: 32007 - protein, 193 aa, Niabella drilacis
  misc_feature (1)..(193): tr|A0A1G6KYT8|A0A1G6KYT8_9BACT 7-carboxy-7-deazaguanine synthase OS=Niabella drilacis OX=1285928 GN=queE PE=3 SV=1
MEHFYTIQGEGYHQGKAAYFIRLGGCDVGCTWCDVKESWPFDAHPLWPVADIVEAVKKTPARIAVITGGEPLLHPLDGLTTALRENGIATNIETSGSAPLSGEWDWICLSPKKFKQPLPAILPGAHELKIIVYNKTDFAWGEQFAAQVSPGCKLYLQPEWSKAAQMTPLIIDYIKDHPQWELSLQIHKYINVP

SEQ ID NO: 32008 - protein, 193 aa, Niabella ginsenosidivorans
  misc_feature (1)..(193): tr|A0A1A9I9F3|A0A1A9I9F3_9BACT 7-carboxy-7-deazaguanine synthase OS=Niabella ginsenosidivorans OX=1176587 GN=q ueE PE=3 SV=1
MEHFYTIQGEGFHQGKAAYFIRLGGCDVGCTWCDVKESWPFDAHPYYPIESLITEVKKTNTKMVVVTGGEPLLHNLDTLTNALHTEGFHTNIETSGSSPLSGSWDWICLSPKKFKRPLPEVLLKANELKVIVYNKTDFAWGEQFAAQVTPNCKLYLQPEWSKAAAMTPLIVEYIKQHPEWELSLQLHKYINVP

SEQ ID NO: 32009 - protein, 193 aa, Niabella soli
  misc_feature (1)..(193): tr|W0EXJ1|W0EXJ1_9BACT 7-carboxy-7-deazaguanine synthas e OS=Niabella soli DSM 19437 OX=929713 GN=queE PE=3 SV= 1
MEHFYTIQGEGFHQGRAAYFVRLGGCDVGCTWCDVKDSWSFDAHPLLATEAIVAAVKNAKATMAVITGGEPLLHDLNPLTAALRENGIETNIETSGSAPLTGTWDWICLSPKKFKQPRAEILPKANELKVIVYNKTDFAWGEQFAAQVAPHCKLYLQPEWSKADAMTPLIVDYIKQNPQWELSLQLHKYINVP

SEQ ID NO: 32010 - protein, 215 aa, Niastella koreensis
  misc_feature (1)..(215): tr|G8TLJ8|G8TLJ8_NIAKG 7-carboxy-7-deazaguanine synthas e OS=Niastella koreensis (strain DSM 17620 / KACC 11465 / GR20-10) OX=700598 GN=queE PE=3 SV=1
MTVFITNFALMTNVSIAVQYPVMEAFYTLQGEGYHQGKAAYFVRLGGCDVGCVWCDVKDSWEAGKHPLQSIEEIVTGASAFPGRMAIVTGGEPLMHNLDALTDALHAAGFATNIETSGAWPVSGSWDWICLSPKKFKAPLPEILPLANELKVVIFNKSDFEWAEKYAALVSPACKLFLQPEWSKSAVVTPLIIDYIKDNPRWEFSLQLHKYIHVP

SEQ ID NO: 32011 - protein, 206 aa, Niastella populi
  misc_feature (1)..(206): tr|A0A1V9G7Z9|A0A1V9G7Z9_9BACT 7-carboxy-7-deazaguanine synthase OS=Niastella populi OX=550983 GN=queE PE=3 SV =1
MTKASIDTIQYPVMESFYTLQGEGYHQGRAAYFIRLGGCDVGCVWCDVKESWEASKHPLQTIETIVAGASAEPGRLAIITGGEPLMHNLDALTDALHAAGFQTNIETSGAWPVSGSWDWICLSPKKFKAPLPEILPLANELKVVVYNKSDFEWAEKYAALVSPACKLYLQPEWSKSAAVTPLIIDYIKANPRWEFSLQLHKYIHVP

SEQ ID NO: 32012 - protein, 206 aa, Niastella sp.
  misc_feature (1)..(206): tr|A0A4R2W051|A0A4R2W051_9BACT 7-carboxy-7-deazaguanine synthase OS=Niastella sp. CF465 OX=2135684 GN=queE PE= 3 SV=1
MTKTTTDIIQYPVMEAFYTLQGEGYHQGKAAYFVRLGGCDVGCVWCDVKDSWEAGKHPLHTIEEIVAGASAEPGRLAIITGGEPLMHNLDALTDALHEAGFETNIETSGAWPVSGSWDWICLSPKKFKAPLPEILPLANELKVVVFNKSDFEWAEKYAALVSPGCKLYLQPEWSKVATVTPLIIDYIKANPRWEFSLQLHKYINVP

SEQ ID NO: 32013 - protein, 193 aa, Niastella sp.
  misc_feature (1)..(193): tr|A0A1E4EDD5|A0A1E4EDD5_9BACT 7-carboxy-7-deazaguanine synthase OS=Niastella sp. SCN 39-18 OX=1660119 GN=queE PE=3 SV=1
MEHFYTLQGEGFHQGKAAYFIRLGGCDVGCTWCDVKESWDALAHPEMEIRDLLHAVTKTKARMVVITGGEPLMHNLDSLCEALMEAGYETNIETSGSSPLSGAWNWICLSPKKFKAPLPQVIAQAHELKIIIYNKSDFAWAEQYAAQVPSHCKLYLQPEWSKANAITPLIVDYIKQHPQWELSLQIHKYIHVP

SEQ ID NO: 32014 - protein, 205 aa, Niastella vici
  misc_feature (1)..(205): tr|A0A1V9FYQ6|A0A1V9FYQ6_9BACT 7-carboxy-7-deazaguanine synthase OS=Niastella vici OX=1703345 GN=queE PE=3 SV= 1
MTKASTDIQYPVMESFYTLQGEGYHQGKAAYFIRLGGCDVGCVWCDVKESWEASKHPLQSIEEIVAGASANPGRMAIVTGGEPLMHNLDALTQALHEAGFQTNIETSGAWPVSGSWDWICLSPKKFKVPLPEILPLANELKVVVYNKTDFMWAEKYAALVSPSCKLFLQPEWSKSGIVTPLIIDYIKDNPQWEFSLQLHKYIHVP

SEQ ID NO: 32015 - protein, 205 aa, Niastella yeongjuensis
  misc_feature (1)..(205): tr|A0A1V9FC44|A0A1V9FC44_9BACT 7-carboxy-7-deazaguanine synthase OS=Niastella yeongjuensis OX=354355 GN=queE P E=3 SV=1
MVSTQPTIQYPVMEAFYTLQGEGYHQGKAAYFVRLGGCDVGCVWCDVKDSWDAGKHPLQSIDEIVTGASAFPGRMAIVTGGEPLMHNLDALTDALHAAGFATNIETSGAWPVSGSWDWICLSPKKFKAPLPEILPMANELKVVIYNKSDFEWAEKYAALVSPSCKLFLQPEWSKSAMVTPLIIDYIKENPRWEFSLQLHKYIHVP

SEQ ID NO: 32016 - protein, 230 aa, Nibricoccus aquaticus
  misc_feature (1)..(230): tr|A0A290QC01|A0A290QC01_9BACT 7-carboxy-7-deazaguanine synthase OS=Nibricoccus aquaticus OX=2576891 GN=queE P E=3 SV=1
MLISEIFYSLQGEGVLTGVPSVFVRAAGCNLRCNWCDTPYASWKPEGETRSVAEIVTEISRHPAKHVVLTGGEPMIAKEIRELAGEVKKLGYHITIETAGTVAPEGIACDLASISPKLKNSAPDERLPDAWRERHEATRWQPEVVRAWIDAGDYQLKFVVSSAADVQEIEEMLAELGRDIPRAKVLLMPEGTSMEALRARAGWLGELCKERGYRYAHRLHVELYGNKRGT

SEQ ID NO: 32017 - protein, 208 aa, Nicoletella semolina
  misc_feature (1)..(208): tr|A0A4R2N7N2|A0A4R2N7N2_9PAST 7-carboxy-7-deazaguanine synthase OS=Nicoletella semolina OX=271160 GN=queE PE= 3 SV=1
MNENILQTPYRIVEIFETLQGEGFNTGMPSIFIRFGKCNLACDWCDTNYHQYENKTLGDILATIRQFSAKNIIITGGEPTIQPHLERLLDRLKNEGYFLAIETNGLKPVPLQIDYIATSPKRLYQKNYLKHHIPFAHEVRIVVDSDVQDFCEQIEQSIKADRYYLSPCEKEGEMNLLETITQLGKLNARLNKPRWQLSIQTHKIAGIE

SEQ ID NO: 32018 - protein, 211 aa, Nisaea sp.
  misc_feature (1)..(211): tr|A0A2D7Z475|A0A2D7Z475_9PROT 7-carboxy-7-deazaguanine synthase OS=Nisaea sp. OX=2024842 GN=queE PE=3 SV=1
  misc_feature (17)..(17): Xaa can be any naturally occurring amino acid
  misc_feature (45)..(45): Xaa can be any naturally occurring amino acid
  misc_feature (66)..(66): Xaa can be any naturally occurring amino acid
  misc_feature (68)..(68): Xaa can be any naturally occurring amino acid
  misc_feature (137)..(137): Xaa can be any naturally occurring amino acid
  misc_feature (176)..(176): Xaa can be any naturally occurring amino acid
  misc_feature (180)..(180): Xaa can be any naturally occurring amino acid
MTYSVKEVFYTLQGEGXNAGRPAVFCRFAGCNLWSGRESDRAQAXCQFCDTDFVGTDGPGGGKFAXAXALAAHVDGFWPAAPGGRKLVVCTGGEPALQIDEGLVDALHGHGFEIAIETNGTLALPAGIDWICVSPKXGNALNVTAGDELKVVFPQADIDLAGLAALPFTHHLLQPXDGPXRAAAEAATVRACMADPRWRLSVQTHKYLGFD

SEQ ID NO: 32019 - protein, 212 aa, Nisaea sp.; identical to SEQ ID NO: 28836
  misc_feature (1)..(212): tr|A0A2D7JP15|A0A2D7JP15_9PROT 7-carboxy-7-deazaguanine synthase OS=Nisaea sp. OX=2024842 GN=queE PE=3 SV=1

SEQ ID NO: 32020 - protein, 223 aa, Nissabacter sp.
  misc_feature (1)..(223): tr|A0A4V1FGQ2|A0A4V1FGQ2_9GAMM 7-carboxy-7-deazaguanine synthase OS=Nissabacter sp. SGAir0207 OX=2126321 GN=qu eE PE=3 SV=1
MQYPINEMFQTLQGEGYFTGVPAIFVRLQGCPVGCSWCDTKHTWDKLADREVALDEILVKTVETDAWGAATTEDLLAVIERNGYTARHIVITGGEPCIYDLGPLTLLLEKSGFTCQIETSGTHEVRCSPNTWVTVSPKVNMRGGMAVLDQALKRADEIKHPVARERDIEALDALLARLHDEKHRIVALQPISQKEEATRLCIETCIARNWRLSMQTHKYLNIA

SEQ ID NO: 32021 - protein, 253 aa, Nitratifractor salsuginis
  misc_feature (1)..(253): tr|E6X235|E6X235_NITSE 7-carboxy-7-deazaguanine synthas e OS=Nitratifractor salsuginis (strain DSM 16511 / JCM 12458 / E9I37-1) OX=749222 GN=queE PE=3 SV=1
MFWLTEKFLSIQGEGRYAGVPSYFLRTGGCNLHCPGFGAEYDVEGEKRYGCDTWFSVDRAFAARWQAVESAAPLLEEMDRAFLEIGYLPHVVITGGEPLIYAADPAFYEVVEGLVERGVQITFETNGTVAPDFLRYGAYKACTFALSVKLSNSGEPKERRIHPEVLRTIASEAGEAFLKFTLDRSSIESGEALREIEEIRNYLPETEVYCMPMGESREVLRQNDWAVFAFCIRHNFHYSDRLHIRIFDTTVGV

SEQ ID NO: 32022 - protein, 249 aa, Nitratireductor aquibiodomus
  misc_feature (1)..(249): tr|I5BY81|I5BY81_9RHIZ 7-carboxy-7-deazaguanine synthas e OS=Nitratireductor aquibiodomus RA22 OX=1189611 GN=qu eE PE=3 SV=1
MSTLRIAEIFGPTIQGEGALIGMPTVFVRAGGCDYRCRWCDSLHAVDNAYRHDWLPMQSRDVFERIKDLSGGAPVMVSLSGGNPAIQPFERLIDTGRAEGYRFALETQGSIARDWFAKLDMLVLSPKPPSSGETVDWERFDACIAAAGSASTVMKIVIFDEADYRWAKDAAERYPALPLYLQPGNHTPPPPTPEAEAEDAAIDMEGILERMRWLVDRTVADRWFSPHILPQLHVLLWATGAASERKRQQ

SEQ ID NO: 32023 - protein, 239 aa, Nitratireductor indicus
  misc_feature (1)..(239): tr|K2NYP5|K2NYP5_9RHIZ 7-carboxy-7-deazaguanine synthas e OS=Nitratireductor indicus C115 OX=1231190 GN=queE PE =3 SV=1
MSTLRIAEIFGPTIQGEGALIGLPTVFVRAGGCDYRCRWCDSLHAVDNAHRHGWTPMETRHVWAKVRELSGEVPLTVSLSGGNPAIQPFRALIETGKPEGYRFAMETQGSVARDWFDLLDMLVLSPKPPSSGETVDWARFEECLEAAGPARCVLKIVVFDEEDYLWAKAAAARFPTLPLYLQPGNHTPPPPEALDAAIDMEGILQRMRWLVDRTAEDRWFAPHILPQLHVLLWGNRRGV

SEQ ID NO: 32024 - protein, 239 aa, Nitratireductor pacificus
  misc_feature (1)..(239): tr|K2MH05|K2MH05_9RHIZ 7-carboxy-7-deazaguanine synthas e OS=Nitratireductor pacificus pht-3B OX=391937 GN=queE PE=3 SV=1
MSTLRIAEIFGPTIQGEGALIGLPTVFVRAGGCDFRCSWCDSLHAVDNAYRHDWIPMQTAEVWERVRALSGGQPLTVSLSGGNPAIQPFGLLVRTGRAQGYRFAMETQGSVPREWFAALDTLVLSPKPPSSGETMDWQRFEECIAAARDAAVVLKIVVFDDDDYAWARLVAQRYASLPLYLQPGNHTPPPPDAEDAAIDMDGVLDRMRWLVKRAAADRWFTPHILPQLHVLLWGNRRGV

SEQ ID NO: 32025 - protein, 239 aa, Nitratireductor sp.
  misc_feature (1)..(239): tr|A0A1H4LCY0|A0A1H4LCY0_9RHIZ 7-carboxy-7-deazaguanine synthase OS=Nitratireductor sp. ES.061 OX=1855335 GN=q ueE PE=3 SV=1
MSTLRIAEIFGPTIQGEGALIGMPTVFVRAGGCDYRCRWCDSLHAVDNTYRHDWLPMQSRDVFERIKDLSVGAPVMVSLSGGNPAIQPFEELIDTGRAEGYRFALETQGSIARDWFAKLDMLVLSPKPPSSGETVDWERFEVCIAAAGSASTVMKIVIFDEADYRWARHVANRYPALPLYLQPGNHTPPPPEAEDAAIDMEGILERMRWLVDRTVADRWFSPHILPQLHVLLWGNRRGV

SEQ ID NO: 32026 - protein, 252 aa, Nitratiruptor sp.
  misc_feature (1)..(252): tr|A6Q5C9|A6Q5C9_NITSB 7-carboxy-7-deazaguanine synthas e OS=Nitratiruptor sp. (strain SB155-2) OX=387092 GN=qu eE PE=3 SV=1
MLYLVEDFYSIQGEGKFIGTPSVFFRFGGCNLKCPSFGEYFIQGRIVHGCDSIRAVNRELFQSKWKEIGTKDELIEILHSHVEYLDFKPHIVITGGEPLIYWNDPVFYGFLEYLVEEGYIVTIETNATIVIDFEKYPAYKDVIFAMAVKLANSGEKYEKRVNKKAIEAIAVNTGYSFFKFTLDRGSVQMRAYEEIVDIVGEYPEIEVFCMPLGDKIDELKKHDKAVAEFCMIHGFIYSDRLQVRLWNREKRR

SEQ ID NO: 32027 - protein, 253 aa, Nitratiruptor tergarcus
  misc_feature (1)..(253): tr|A0A1W1WQ40|A0A1W1WQ40_9PROT 7-carboxy-7-deazaguanine synthase OS=Nitratiruptor tergarcus DSM 16512 OX=10690 81 GN=queE PE=3 SV=1
MMLYLVEHFYSIQGEGKFIGTPSIFFRFGGCNLKCPSFGEYFIKGTKIFGCDSVRAVNRKLFEEEWQEIQKSETLITILQEHLENLDFKPHIVLTGGEPLLYWRDETFYGFVEYLIAQGFIVTIETNATIEIDFANFPAYKDVIFALAVKLSNSGEPYEKRVNKRAIDAIINNTAYSFFKFTLNRGIIEMRAYEEIVDIVGEYPEVEVFCMPQGDRVEILRKNDKVVAEFCMIYGFIYSDRLQVRLWNREKMR

SEQ ID NO: 32028 - protein, 210 aa, Nitrincola lacisaponensis
  misc_feature (1)..(210): tr|A0A063Y1A0|A0A063Y1A0_9GAMM 7-carboxy-7-deazaguanine synthase OS=Nitrincola lacisaponensis OX=267850 GN=que E PE=3 SV=1
MYSVKEIFYTLQGEGAHAGRPAIFCRFTGCNLWSGREQDRATAVCDFCDTDFIGTDGQNGGKFATAESLVQRLRQFWPPGASTPPYLVCTGGEPALQLDQTLVDALHAEGFIIAIETNGSKPLPEGIDWICVSPKADTPLCITQGNELKLVYPQILAQPERFEALAFEHFYLQPLDGPDATAALTACLHYCLQHPQWKLSLQTHKMIGID

SEQ ID NO: 32029 - protein, 209 aa, Nitrincola nitratireducens
  misc_feature (1)..(209): tr|W9V108|W9V108_9GAMM 7-carboxy-7-deazaguanine synthas e OS=Nitrincola nitratireducens OX=1229521 GN=queE PE=3 SV=1
MYSVKEVFYTLQGEGAHAGRPAIFCRFTGCNLWSGREIDRSKAICQFCDTDFIGHDGQNGGKFDSPDALVTHLQRFWPLSSEPPYVVCTGGEPALQLDQPLVDALHKAGFIIAIETNGTKPLPNGIDWICVSPKADTDIIIRKGNELKLVYPQSHAMPERFVSYQFDNFYLQPMDSADAQENLKATLNYCLRHPQWRLSLQTHKILGID

SEQ ID NO: 32030 - protein, 210 aa, Nitrincola sp.
  misc_feature (1)..(210): tr|A0A5J6LFC6|A0A5J6LFC6_9GAMM 7-carboxy-7-deazaguanine synthase OS=Nitrincola sp. KXZD1103 OX=2614693 GN=queE PE=4 SV=1
MYSVKESFYTLQGEGAHAGRPAIFCRFTGCNLWSGREQDRASAVCNFCDTDFVGTDGQNGGKFASAEALVAHLKCFWPLTTTQPPYLVCTGGEPALQLDQTLVDALHQEGFIIAVETNGTKPLPDGIDWICVSPKADTPLYLQGGNELKLVYPQTQALPERFEQLQFDHFYLQPMDGPAQAASLVACIDYCKAHPRWKLSLQTHKLIGID

SEQ ID NO: 32031 - protein, 210 aa, Nitrincola sp.
  misc_feature (1)..(210): tr|A0A5A9W6H8|A0A5A9W6H8_9GAMM 7-carboxy-7-deazaguanine synthase OS=Nitrincola sp. MEB193 OX=1708751 GN=queE P E=3 SV=1
MYSVKEVFYSLQGEGAQSGRPAIFCRFSGCNLWSGREQDRASSVCRFCDTDFIGTDGQNGGKFASPEALVAHLLSLWPSNSGVSPYVICTGGEPALQLDQALVDALHAQGVEIAIETNGTRPLPKGLDWICVSPKADSDVIIQQGDELKLVYPQVEIQPEQCQHWSFKHFYLQPMDSPERQAHLQACLDYCLTHPQWKLSLQTHKILGID

SEQ ID NO: 32032 - protein, 209 aa, Nitrincola tibetensis
  misc_feature (1)..(209): tr|A0A364NL04|A0A364NL04_9GAMM 7-carboxy-7-deazaguanine synthase OS=Nitrincola tibetensis OX=2219697 GN=queE P E=3 SV=1
MYSVKEVFYTLQGEGAHAGRPAIFCRFTGCNLWSGREVDRSNAICQFCDTDFIGSDGQNGGKFNCPEALVTHLQHFWPLSSEPPYVVCTGGEPALQLDQPLVDALHKAGFIIAIETNGTKPLPNGIDWICVSPKADTDIIIRKGNELKLVYPQSQAMPERFVSYQFDNFYLQPMDSEDAQENLKATLSYCLRHPKWRLSLQTHKILGID

SEQ ID NO: 32033 - protein, 211 aa, Nitritalea halalkaliphila
  misc_feature (1)..(211): tr|I5C1K7|I5C1K7_9BACT 7-carboxy-7-deazaguanine synthas e OS=Nitritalea halalkaliphila LW7 OX=1189621 GN=queE P E=3 SV=1
MDTRTLSSQVRAGQALPIMESFYTVQGEGTFTGHAAYFIRIGGCDVGCVWCDVKDSWEAARWPIQSIEEIVAGARAYPGRLAVITGGEPLLYPLAPLTDALRAAGFQVHLETSGAHPFSGSFDWVVFSPKKFKAPHPSIFEVADELKVVVSHKSDFTFAQENASKMYKNAVFRLQPEWTKSSRYLGSIIEFVKLHPEWQISLQTHKFMEIP

SEQ ID NO: 32034 - protein, 210 aa, Nitrobacter hamburgensis
  misc_feature (1)..(210): tr|Q1QIG9|Q1QIG9_NITHX 7-carboxy-7-deazaguanine synthas e OS=Nitrobacter hamburgensis (strain DSM 10229 / NCIMB 13809 / X14) OX=323097 GN=queE PE=3 SV=1
MSYAVKEIFLTLQGEGAHAGRAAVFCRFAGCNLWSGREEDRTSAICRFCDTDFVGMDGTRGGRYAAADELADTVAAQWTGSAPHRYAVLTGGEPLLQVDKAFVDALHARGFEIGIETNGTIVPPDGIDWLCVSPKAGADLRVTKGHELKLVYPQAGARPEDFKDLAFERFSLQPMDGPDAADNTARAIDYCMRHPQWRLSLQTHKTLGIR

SEQ ID NO: 32035 - protein, 210 aa, Nitrobacter sp.
  misc_feature (1)..(210): tr|A0A1M3C889|A0A1M3C889_9BRAD 7-carboxy-7-deazaguanine synthase OS=Nitrobacter sp. 62-23 OX=1895798 GN=queE P E=3 SV=1
MSYAVKEIFLTLQGEGAHAGRAAVFCRFSGCNLWSGREEDRASATCRFCDTDFVGTDGTLGGRYATADRLADTIATQWAGPPARRYAVLTGGEPLLQVDKALVDALHARGFEIGIETNGTIAPPDGVDWLCVSPKAGADLRVTRGQELKLVYPQADARPEDFADLAFERFSLQPMDGPDAAGNTARAIDYCLRHPQWRLSLQTHKTLGIR

SEQ ID NO: 32036 - protein, 210 aa, Nitrobacter sp.
  misc_feature (1)..(210): tr|A3WT48|A3WT48_9BRAD 7-carboxy-7-deazaguanine synthas e OS=Nitrobacter sp. Nb-311A OX=314253 GN=queE PE=3 SV= 1
MSYAIKEVFLTLQGEGAHAGRAAVFCRFSGCNLWSGREKDRASATCAFCDTDFVGTDGTLGGRYDTADALAETVAAQWIGPAAHRYAVLTGGEPLLQVDKAFIDALHARRFEIGIETNGTIVPPDGIDWLCVSPKAGADLRVTKGHELKLVYPQENIRPEDFKDLAFERFSLQPMDGPDAADNTARAIDYCLRHPQWRLSLQTHKTIGIR

SEQ ID NO: 32037 - protein, 210 aa, Nitrobacter vulgaris
  misc_feature (1)..(210): tr|A0A1V4HWA7|A0A1V4HWA7_NITVU 7-carboxy-7-deazaguanine synthase OS=Nitrobacter vulgaris OX=29421 GN=queE PE=3 SV=1
MSYAVKEIFLTLQGEGAHAGRAAVFCRFSGCNLWSGREKDRASATCRFCDTDFVGTDGTLGGRYDTADALAETIAAQWIGPAAHRYTVLTGGEPLLQVNKPLVDALHARGFEIGIETNGTIAPPDGIDWLCVSPKAGADLLVTKGHELKLVYPQTNIRPEDFKDLTFERFSLQPMDGPDVAGNTVRAINYCLRHPQWRLSLQTHKTLGIR

SEQ ID NO: 32038 - protein, 210 aa, Nitrobacter winogradskyi
  misc_feature (1)..(210): tr|A0A4Y3W653|A0A4Y3W653_NITWI 7-carboxy-7-deazaguanine synthase OS=Nitrobacter winogradskyi OX=913 GN=queE PE =3 SV=1
MSYAVKEIFLTLQGEGAHAGRAAVFCRFSGCNLWSGREEDRASATCRFCDTDFVGTDGTLGGRYATADALADTVAGQWAGPAAHRYTVLTGGEPLLQVDKAFVDALHARGFEVGIETNGTLAPPDGIDWLCVSPKAGADLRIRRGHELKLVYPQADARPEDFVNLAFDRFSLQPMDGPDAAENTARAIDYCLRHPQWRLSLQTHKTLGIR

SEQ ID NO: 32039 - protein, 210 aa, Nitrobacter winogradskyi
  misc_feature (1)..(210): tr|Q3SPB9|Q3SPB9_NITWN 7-carboxy-7-deazaguanine synthas e OS=Nitrobacter winogradskyi (strain ATCC 25391 / DSM 10237 / CIP 104748 / NCIMB 11846 / Nb-255) OX=323098 GN =queE PE=3 SV=1
MSYAVKEIFLTLQGEGAHAGRAAVFCRFSGCNLWSGREEDRASATCRFCDTDFVGTDGTLGGRYASADALADTVAGQWAGPAAHRYAVLTGGEPLLQVDKAFVDALHARGFEIGIETNGTLAPPDGIDWLCVSPKAGADLRIRRGHELKLVYPQADARPEDFADLAFDRFSLQPMDGPDAAENTARAVDYCLRHPQWRLSLQTHKTLGIR

SEQ ID NO: 32040 - protein, 225 aa, Nitrococcus mobilis
  misc_feature (1)..(225): tr|A4BLV1|A4BLV1_9GAMM 7-carboxy-7-deazaguanine synthas e OS=Nitrococcus mobilis Nb-231 OX=314278 GN=queE PE=3 SV=1
MGAMPSVAMRPRPEALRVTEIFYSLQGEAGTVGAPTVFVRLTGCPLRCHYCDTAYAFHGGEKMSIIRILDRVGEHAAKFVTVTGGEPLAQRGCLTLLSSLCDRGYRVSLETSGALDVQAVDPRVIKVMDLKTPGSGEERRNRWENLNYLRPHDELKFVICNRQDYDWARTKVSELKLGERWTVFFSASYGELSSRLLADWILADHLNVRLQIQLHKYLWGDQPGR

SEQ ID NO: 32041 - protein, 213 aa, Nitrosococcus halophilus
  misc_feature (1)..(213): tr|D5C4X3|D5C4X3_NITHN 7-carboxy-7-deazaguanine synthas e OS=Nitrosococcus halophilus (strain Nc4) OX=472759 GN =queE PE=3 SV=1
MKRLRITEIFHSLQGESRSVGWPTVFVRLTGCPLRCHYCDTEYAFQGGTWMELDEILATVAEFGARHVTVTGGEPLAQPACLELLTQLCDVGYEVSLETSGALDISAVDPRVVKVMDLKTPGSGEEARNSTTNLDYLSSQDQVKLVLCDRHDYEWARTALERHRLAERCEVLFSPSYEQLSPTDLAEWILEDRLPVRMQIQLHKYLWGEEPGR

SEQ ID NO: 32042 - protein, 213 aa, Nitrosococcus oceani
  misc_feature (1)..(213): tr|A0A0E2ZRF0|A0A0E2ZRF0_9GAMM 7-carboxy-7-deazaguanine synthase OS=Nitrosococcus oceani C-27 OX=314279 GN=que E PE=3 SV=1
MKRLRITEIFYSLQGEARSVGWPTAFVRLTGCPLRCHYCDTEYAFQGGRWMALDGILDAVAEFGVRHVTVTGGEPLAQSACLGLLTRLCDAGYEVSLETSGALDISAVDRRVIKVMDWKTPGSGEEARNLSTNLEHLSSQDQVKLVLCNRHDYDWAKGVLERHRLTEYCEVLFSPSYEQLSPTDLADWILADHLPVRMQIQLHKYLWGEEPGR

SEQ ID NO: 32043 - protein, 213 aa, Nitrosococcus oceani; identical to SEQ ID NO: 32042
  misc_feature (1)..(213): tr|Q3JER5|Q3JER5_NITOC 7-carboxy-7-deazaguanine synthas e OS=Nitrosococcus oceani (strain ATCC 19707 / BCRC 174 64 / NCIMB 11848 / C-107) OX=323261 GN=queE PE=3 SV=1

SEQ ID NO: 32044 - protein, 213 aa, Nitrosococcus wardiae
  misc_feature (1)..(213): tr|A0A4P7BVF4|A0A4P7BVF4_9GAMM 7-carboxy-7-deazaguanine synthase OS=Nitrosococcus wardiae OX=1814290 GN=queE P E=3 SV=1
MKRLRITEIFHSLQGESRSVGWPTVFVRLTGCPLRCHYCDTEYAFQGGTWMDLDEILATVAEFSARHVTVTGGEPLAQPACLELLTRLCDTGYEVSLETSGALDISAVDPRVVKVMDLKTPGSGEEARNSATNLDYLSPQDQVKLVLCDRHDYEWAKATLERHRLAERCEVLFSPSYEQLSPTDLAEWILEDRLPVRMQIQLHKYLWGEEPGR

SEQ ID NO: 32045 - protein, 213 aa, Nitrosococcus watsoni
  misc_feature (1)..(213): tr|D8K8Q5|D8K8Q5_NITWC 7-carboxy-7-deazaguanine synthas e OS=Nitrosococcus watsoni (strain C-113) OX=105559 GN= queE PE=3 SV=1
MKRLRITEIFYSLQGEARSVGWPTAFVRLTGCPLRCHYCDTEYAFQGGNWMALDRILDVVAEFGVRHVTVTGGEPLVQSACLELLTRLCDAGYEVSLETSGALDISAIDCRVVKVMDWKTPGSGEEARNLYTNLAHLSSQDQVKLVLCNRHDYDWAKAVLDRHRLTEYCDVLFSPSHEQLSPTDLADWILADRLPVRMQIQLHKYLWGEEPGR

SEQ ID NO: 32046 - protein, 237 aa, Nitrosomonadaceae bacterium
  misc_feature (1)..(237): tr|A0A2E6USS6|A0A2E6USS6_9PROT 7-carboxy-7-deazaguanine synthase OS=Nitrosomonadaceae bacterium OX=2026767 GN= queE PE=3 SV=1
MASTSTSTSISASSSQHKVIQPFESETLRVNEIFVSLQGETSRVGLPTVFVRLTGCPLRCSYCDTEYAFHYGKNLSVSSVLSRISDYKVQNVTVTGGEPLAQKKCLLLLRLLCDAGYLVSLETSGSQDVSNVDDRVTKIIDIKTPASGESQKNNWNNLNHLTSQDELKFVLCNEADYQWAVKIMHNYNLDKLCPILFSPVYNKLDPTLLAEWVLRDRLGVRVQIQLHKLLWGEEPGR

SEQ ID NO: 32047 - protein, 218 aa, Nitrosomonadaceae bacterium
  misc_feature (1)..(218): tr|A0A4P5UDE1|A0A4P5UDE1_9PROT 7-carboxy-7-deazaguanine synthase OS=Nitrosomonadaceae bacterium OX=2026767 GN= queE PE=3 SV=1
MTTPEAQTLRVSEIFFSLQGETSRIGLPTVFVRLTGCPLRCGYCDTGYAFYGGESVTISSILDDVSGHMPRYVTVTGGEPLAQKECLTLLSLLCDAGYSVSLETSGAMDISNVDDRVTRVLDIKTPGSGEVKKNRWSNLEHLSPRDELKFVLCDEADYLWAVKMIDENDLDKICSILFSPVYGRLDPTILAEWILRDHLSVRLQIQLHKFLWGEGPGR

SEQ ID NO: 32048 - protein, 220 aa, Nitrosomonadales bacterium
  misc_feature (1)..(220): tr|A0A2E0I7Q4|A0A2E0I7Q4_9PROT 7-carboxy-7-deazaguanine synthase OS=Nitrosomonadales bacterium OX=2026761 GN=q ueE PE=3 SV=1
MIKNEFQLKQLKVNEIFYSLQGESSYVGIPTIFIRLTGCPMRCGYCDTAYAFIEGKNFTINQIVENISKYKTKNITVTGGEPLAQKECWNLLKILSDRGYIVSLETGGAISINKIDDRVKIILDIKTPGSGEEKNNLWSNLKLIKPKDEIKFVITDLDDYIWAKEILFKEKLNEKASILFSPVYGNIKPKDLAEWILNDHLPVRFQIQLHKMIWGQIPGV

SEQ ID NO: 32049 - protein, 210 aa, Nitrosomonadales bacterium
  misc_feature (1)..(210): tr|A0A1E4GJF1|A0A1E4GJF1_9PROT 7-carboxy-7-deazaguanine synthase OS=Nitrosomonadales bacterium SCN 54-20 OX=16 60164 GN=queE PE=3 SV=1
MRVNEIFLSLQGETSRVGLPTVFVRLTGCPLRCGYCDTAYAFHEGERISLAAILLEVARHGVRHVTVTGGEPLAQKECLTLLRLLCDADYSVSLETSGALDISKVDERVSRILDLKTPGSGEAEKNLWSNIQYLTSHDEVKFVLCDEGDYRWAVEIMGKHRLDRTWPVLFSPVHGRLDPTVLAEWILRDRLPVRMQVQLHKLLWGEGPGR

SEQ ID NO: 32050 - protein, 228 aa, Nitrosomonas aestuarii
  misc_feature (1)..(228): tr|A0A1I3XCH7|A0A1I3XCH7_9PROT 7-carboxy-7-deazaguanine synthase OS=Nitrosomonas aestuarii OX=52441 GN=queE PE =3 SV=1
MNSPAANRYLKQADKTATLRVSEIFYSLQGETSRIGLPTVFIRLTGCPLRCGYCDTAYAFTGGENMSITAIVQQTADYRTRYVTVTGGEPLAQKACLTLLTALCDAAHSVSLETSGAMDLSAVDPRVSKIMDIKTPGSGEVEKNRWSNLDYLTWQDEIKFVLCGEADYQWACQMIQEHQLDSRCPVLFSPVHGQLIPSTLADWILRDHLPVRMQIQLHKLLWEDGPGR

SEQ ID NO: 32051 - protein, 229 aa, Nitrosomonas communis
  misc_feature (1)..(229): tr|A0A0F7KDE6|A0A0F7KDE6_9PROT 7-carboxy-7-deazaguanine synthase OS=Nitrosomonas communis OX=44574 GN=queE PE= 3 SV=1
MHSLSLLRQHATQKPEAEVLRVSEIFYSIQGETSRTGLPTVFIRLTGCPLRCGYCDTEYAFSGGENMSIADVLNKASNYASRYITVTGGEPLAQKACSTLLKVLCDTGYSVSIETSGALDISKLDKRVSKIMDIKTPGSGEVAKNRWSNLDYLTDQDELKFVLCDEADYRWAVDVFYERCLHQICPVLFSPVYGQLDPAKLADWILKDRLPVRLQLQLHKILWGEVAGR

SEQ ID NO: 32052 - protein, 242 aa, Nitrosomonas communis
  misc_feature (1)..(242): tr|A0A5D3YBQ9|A0A5D3YBQ9_9PROT 7-carboxy-7-deazaguanine synthase OS=Nitrosomonas communis OX=44574 GN=queE PE= 3 SV=1
MKEAIVKAVSKDVMHSLSLLRQHATQKPEAEVLRVSEIFYSIQGETSRTGLPTVFIRLTGCPLRCGYCDTEYAFSGGENMSIADVLNKASNYASRYITVTGGEPLAQKACSTLLKVLCDTGYSVSIETSGALDISKLDKRVSKIMDIKTPGSGEVAKNRWSNLDYLTDQDELKFVLCDEADYRWAVDVFYERCLHQICPVLFSPVYGQLDPAKLADWILKDRLPVRLQLQLHKILWGEVAGR

SEQ ID NO: 32053 - protein, 218 aa, Nitrosomonas cryotolerans
  misc_feature (1)..(218): tr|A0A1N6G6L6|A0A1N6G6L6_9PROT 7-carboxy-7-deazaguanine synthase OS=Nitrosomonas cryotolerans ATCC 49181 OX=11 31553 GN=queE PE=3 SV=1
MQNIETEILRINEIFFSLQGETSRVGLPTVFIRLTGCPLRCGYCDTEYAFSGGENMPISAILSKVSHYKARYITVTGGEPLAQKACLMLLSALCNTGYAVSLETSGALDISEVDARVCKVMDIKTPGSGEMAKNQWSNLDYLTQQDELKFVLCDEADYQWASEIIHTRRLDQVCPILFSPVYDQLDPSILATWILRDHLPVRMQIQLHKLLWEEGPGR

SEQ ID NO: 32054 - protein, 211 aa, Nitrosomonas europaea
  misc_feature (1)..(211): tr|Q82XN6|Q82XN6_NITEU 7-carboxy-7-deazaguanine synthas e OS=Nitrosomonas europaea (strain ATCC 19718 / CIP 103 999 / KCTC 2705 / NBRC 14298) OX=228410 GN=queE PE=3 SV =1
MLRITEIFYSLQGETSRMGLPTVFVRLTGCPLRCGYCDTGYAFSGGKSMSISEIMGEVASFSPRYVTVTGGEPLAQADSLVLLAALCDRGYSVSLETSGALDIARVDARVSRIVDIKTPGSGEVEKNHWNNLAYLTSHDEIKFVLCDRADYDWARQKLLELKLDVICPVLFSPAYGQLVPADLAAWILQDQLPVRLQLQLHKLLWGECVGR

SEQ ID NO: 32055 - protein, 211 aa, Nitrosomonas europaea; identical to SEQ ID NO: 32054
  misc_feature (1)..(211): tr|A0A1I0C209|A0A1I0C209_NITER 7-carboxy-7-deazaguanine synthase OS=Nitrosomonas europaea OX=915 GN=queE PE=3 SV=1

SEQ ID NO: 32056 - protein, 211 aa, Nitrosomonas eutropha
  misc_feature (1)..(211): tr|A0A1G4VWH0|A0A1G4VWH0_9PROT 7-carboxy-7-deazaguanine synthase OS=Nitrosomonas eutropha OX=916 GN=queE PE=3 SV=1
MLRVTEIFYSLQGETSRMGLPTVFIRLTGCPLRCGYCDTSYAFSGGESMDISEIMRKVASFSPHYVTVTGGEPLAQADSLTLLTALCDRGYSVSLETSGALDISRVDTRVSRILDIKTPGSGEMEKNYWNNLDCLTAHDEIKFVLCDRTDYNWAMQKLLTLELANICPVLFSPVYNQLDPAALAAWILQDRLPVRLQFQLHKLLWGECVGR

SEQ ID NO: 32057 - protein, 211 aa, Nitrosomonas eutropha; identical to SEQ ID NO: 32056
  misc_feature (1)..(211): tr|Q0AJ95|Q0AJ95_NITEC 7-carboxy-7-deazaguanine synthas e OS=Nitrosomonas eutropha (strain DSM 101675 / C91) OX =335283 GN=queE PE=3 SV=1

SEQ ID NO: 32058 - protein, 211 aa, Nitrosomonas halophila
  misc_feature (1)..(211): tr|A0A1H3IR52|A0A1H3IR52_9PROT 7-carboxy-7-deazaguanine synthase OS=Nitrosomonas halophila OX=44576 GN=queE PE =3 SV=1
MLRITEIFYSLQGETSRAGLPTVFIRLTGCPLRCRYCDTSYAFSGGQTMSIAAILDAVAAFAPHYVTVTGGEPLAQSNCRVLLTSLCDAGYSVSLETSGALDISQVDRRVSRIVDIKTPGSGEVDKNRWQNLDDLTAHDEVKFVLCGQADYHWAMQVLRDFKLDTKCPVLFSPSHHELKPTELANWILQDRLPVRMQLQLHKLLWGECAGK

SEQ ID NO: 32059 - protein, 231 aa, Nitrosomonas marina
  misc_feature (1)..(231): tr|A0A1I0BFD6|A0A1I0BFD6_9PROT 7-carboxy-7-deazaguanine synthase OS=Nitrosomonas marina OX=917 GN=queE PE=3 SV =1
MSLISSTSKDPKSTNSDTTVSLRISEIFHSLQGETSRSGLSTVFVRLTGCPLRCGYCDTAYAFTGGVHMTIAAILKQVANYKTHYVTVTGGEPLAQKSCLALLTALCDRNYSVSLETSGALDLSGVDPRVSKVMDIKTPGSGEMDKNHWANLEYLTPHDEVKFVLCDEADYQWARQIIKAYRLENRCPLLFSPVYGQLEPSVLADWILRDQVPVRLQIQLHKLLWGDGPGR

SEQ ID NO: 32060 - protein, 231 aa, Nitrosomonas marina
  misc_feature (1)..(231): tr|A0A1H8CKV4|A0A1H8CKV4_9PROT 7-carboxy-7-deazaguanine synthase OS=Nitrosomonas marina OX=917 GN=queE PE=3 SV =1
MSLISSTSKDPTSTNSDTTVSLRISEIFHSLQGETSRSGLPTVFVRLTGCPLRCGYCDTAYAFTGGEHMTIAAILKQVANYKTHYVTVTGGEPLAQKSCLPLLTALCDRNYSVSLETSGAMDLSGVDPRVSKIMDIKTPGSGEMDKNHWANLDYLTPHDEVKFVLCDEADYQWAHQIIKACRLENRCPLLFSPVYGQLDPSALAEWILRDHLPVRLQIQLHKLLWGDGPGR

SEQ ID NO: 32061 - protein, 211 aa, Nitrosomonas mobilis
  misc_feature (1)..(211): tr|A0A1G5SF44|A0A1G5SF44_9PROT 7-carboxy-7-deazaguanine synthase OS=Nitrosomonas mobilis OX=51642 GN=queE PE=3 SV=1
MPRITEIFYSLQGETSRVGLPTAFIRLTGCPLRCGYCDTSYAFSGGTLMSIDSVINQVALFSTHYVTVTGGEPLAQVDCLPLLASLCDLGYSVSLETSGAIDISPVDTRVSRIVDIKTPGSGEVERNNWKNLEYLTAQDELKFVLCDENDYHWAKQVMHDRKLDQICPILFSPVFQQLDPTALATWILQDKLPVRLQLQLHKLIWGECAGK

SEQ ID NO: 32062 - protein, 229 aa, Nitrosomonas nitrosa
  misc_feature (1)..(229): tr|A0A1I4S456|A0A1I4S456_9PROT 7-carboxy-7-deazaguanine synthase OS=Nitrosomonas nitrosa OX=52442 GN=queE PE=3 SV=1
MDFPLPLRQHSLKQRESETLRVSEIFYSLQGETSRVGLPTVFIRLTGCPLRCGYCDTAYAFTGGENISIMDVLAKVSEYAPRYVTVTGGEPLAQKACLTLLTSLCDAGYSVSIETSGALDISGIDKRVSKIVDIKTPDSGEVTKNRWANLDYLTPQDELKFVLCSEQDYRWAVDIFYERQLDQLCPVLFSPAFGQLDPALLASWILKDRLPVRLQLQLHKILWGEVAGR

SEQ ID NO: 32063 - protein, 218 aa, Nitrosomonas oligotropha
  misc_feature (1)..(218): tr|A0A2T5I3Y7|A0A2T5I3Y7_9PROT 7-carboxy-7-deazaguanine synthase OS=Nitrosomonas oligotropha OX=42354 GN=queE PE=3 SV=1
MQALETTVLRISEIFFSLQGETSRIGLPTVFVRLTGCPLRCGYCDTAYAFSGGENLSIAEILCQVARHKTRYVTVTGGEPLAQKACLVLLTALCDAHYSVSLETSGALDLSQVDARVSKIMDIKTPGSGEVSKNNWRNLEYLTPQDEIKFVLCDEADYQWACELIGSKQLQPICPILFSPVYESLNPAQLASWILRDELPVRMQVQLHKLLWGEGPGR

SEQ ID NO: 32064 - protein, 218 aa, Nitrosomonas oligotropha
  misc_feature (1)..(218): tr|A0A1H8NRF6|A0A1H8NRF6_9PROT 7-carboxy-7-deazaguanine synthase OS=Nitrosomonas oligotropha OX=42354 GN=queE PE=3 SV=1
MQALETTVLRISEIFFSLQGETSRIGLPTVFVRLTGCPLRCGYCDTAYAFSGGENLSIAEILRQVARHKTRYVTVTGGEPLAQKACLVLLTALCDAHYSVSLETSGALDLSQVDARVSKIMDIKTPGSGEVSKNNWRNLEYLTPQDEIKFVLCDEADYQWACEIIRSSQLQPICPILFSPVYESLNPAQLASWILRDELPVRMQVQLHKLLWGEGPGR

SEQ ID NO: 32065 - protein, 229 aa, Nitrosomonas sp.
  misc_feature (1)..(229): tr|A0A1H3NFZ6|A0A1H3NFZ6_9PROT 7-carboxy-7-deazaguanine synthase OS=Nitrosomonas sp. Nm58 OX=200126 GN=queE PE =3 SV=1
MHFPFSLQQHSTHKPETEVLRVSEVFYSLQGETSRIGLPTVFIRLTGCPLRCGYCDTEYAFSGGRNMSIAEVLDEASSYASRYITVTGGEPLAQKACLTLLTVLCDAGYSVSIETSGALDVSKVDKRVSKIVDIKTPGSGEVTKNLWSNLEYLTCHDELKFVLCDKADYQWAVGVFYERRLDQICPVLFSPVYGQLDPALLADWILKDRLAVRLQLQLHKMLWGEVAGR

SEQ ID NO: 32066 - protein, 218 aa, Nitrosomonas sp.
  misc_feature (1)..(218): tr|F8GGH4|F8GGH4_NITSI 7-carboxy-7-deazaguanine synthas e OS=Nitrosomonas sp. (strain Is79A3) OX=261292 GN=queE PE=3 SV=1
MQALETATLRISEIFYSLQGETSRVGLPTVFVRLTGCPLRCGYCDTAYAFSGGANLSIAKILNQVAHYQTNYVTVTGGEPLAQKACLDLLTALCDAQYSVSLETSGALDLSKVDVRVCKVMDIKTPGSGEVAKNNWSNLAHLKQHDEIKFVLCDEADYQWACEIIHNRQLQQTCPILLSPVYGSLDPATLASWILRDSLPVRMQIQMHKLLWGEGPGR

SEQ ID NO: 32067 - protein, 212 aa, Nitrosomonas stercoris
  misc_feature (1)..(212): tr|A0A4Y1YKC9|A0A4Y1YKC9_9PROT 7-carboxy-7-deazaguanine synthase OS=Nitrosomonas stercoris OX=1444684 GN=queE PE=3 SV=1
MLRVTEIFYSLQGETSRVGLPTVFIRLTGCPLRCGYCDTSYAFSGGKRMHLDEIMHEVALFAPHYVTLTGGEPLAQTNSLALLTALCDQGYAVSLETSGALDISHVDTRVSRILDIKTPGSGEVAKNHWRNIDYLTAQDEIKFVLCDRADYDWAVEKLRTLKLDSLCPVLFSPVFNQLDSAKLADWILQDRLPVRLQLQLHKLLWGEECAGR

SEQ ID NO: 32068 - protein, 219 aa, Nitrosomonas ureae
  misc_feature (1)..(219): tr|A0A285BZB6|A0A285BZB6_9PROT 7-carboxy-7-deazaguanine synthase OS=Nitrosomonas ureae OX=44577 GN=queE PE=3 S V=1
MMQALETTTLRVNEIFFSLQGETSRVGLPTVFVRLTGCPLRCGYCDTAYAFTGGENISIAEILNRIADYKTNYITVTGGEPLAQKACLVLLTALCNAKYSVSLETSGALDLSQVDLRVCKVMDIKTPGSGEVTKNNWENLIHLTPKDEIKFVLCDEADYQWASEIIRCKQLFRLCPILFSPVYDVLNPATLASWILRDELPVRMQLQMHKLLWGEGPGR

SEQ ID NO: 32069 - protein, 219 aa, Nitrosomonas ureae
  misc_feature (1)..(219): tr|A0A1H9CLT3|A0A1H9CLT3_9PROT 7-carboxy-7-deazaguanine synthase OS=Nitrosomonas ureae OX=44577 GN=queE PE=3 S V=1
MMQAFETTTLRINEIFFSLQGETSRVGLPTVFVRLTGCPLRCGYCDTAYAFTGGENISIAEILNRIAHYKTNYITVTGGEPLAQKACLVLLTALCDAKYSVSLETSGALDLSQVDLRVCKVMDIKTPGSGEVTKNNWENLIHLTPKDEIKFVLCNEADYQWAGEIIRRKQLSQLCPILFSPVYDSLNPATLASWILRDELPVRMQLQMHKLLWGEGPGR

SEQ ID NO: 32070 - protein, 218 aa, Nitrosospira briensis
  misc_feature (1)..(218): tr|A0A1I5EN56|A0A1I5EN56_9PROT 7-carboxy-7-deazaguanine synthase OS=Nitrosospira briensis OX=35799 GN=queE PE= 3 SV=1
MRPSEAGYLRVSEIFFSLQGETSRVGLPTVFVRLTGCPLRCGYCDTEYAFQGGDRISIVDILTKVASYGTRYVTVTGGEPLAQKECLALLSLLCEAHYSVSLETSGALDVSAVDPCVSKILDIKTPGSGEAERNRWSNLDCLTSQDEVKFVLCDETDYLWAVEVLRERRLDRICPVLFSPVYGKLDPAALAAWVLRDHLPVRVQVQLHKLLWGEGPGR

SEQ ID NO: 32071 - protein, 230 aa, Nitrosospira lacus
  misc_feature (1)..(230): tr|A0A1W6SLY2|A0A1W6SLY2_9PROT 7-carboxy-7-deazaguanine synthase OS=Nitrosospira lacus OX=1288494 GN=queE PE=3 SV=1
MVHTPFPLQHSITQPADAVNLRVSEIFFSLQGETSRAGLPTVFVRLTGCPLRCGYCDTGYAFYGGKSLSISTILAEVARYVPHYVTVTGGEPLAQKECLVLLRLLCDAGYSVSLETSGALDISRVDARVSRILDIKTPGSGEVEKNQWSNLDHLTRHDEVKFVLCDEADYEWAVEAIRERKLDLICPILFSPVYDKLDPATLAEWVLRDRLPVRVQIQLHKLLWGEGPGR

SEQ ID NO: 32072 - protein, 234 aa, Nitrosospira multiformis
  misc_feature (1)..(234): tr|A0A1I0FAS4|A0A1I0FAS4_9PROT 7-carboxy-7-deazaguanine synthase OS=Nitrosospira multiformis OX=1231 GN=queE P E=3 SV=1
MVQTLSPDFPHLSRKIPSSAEAASLRVNEIFLSLQGETSRVGLPTVFVRLTGCPLRCGYCDTAYAFHEGERISLATILLEVARHGAHHVTVTGGEPLAQKECLTLLRLLCDAGYSVSLETSGALDISKVDERVSRILDLKTPGSGEAEKNLWSNIQYLTSHDEVKFVLCDEGDYRWAVEMMGKHRLDRTYPVLFSPVHGELDPIVLAEWILRDRLPVRMQVQLHKLLWGEGPGR

SEQ ID NO: 32073 - protein, 234 aa, Nitrosospira multiformis
  misc_feature (1)..(234): tr|Q2Y5H3|Q2Y5H3_NITMU 7-carboxy-7-deazaguanine synthas e OS=Nitrosospira multiformis (strain ATCC 25196 / NCIM B 11849 / C 71) OX=323848 GN=queE PE=3 SV=1
MVQILSPDFPPLSRKIPSSAEGASLRVNEIFLSLQGETSRVGLPTVFVRLTGCPLRCGYCDTAYAFHEGERLSLAAILMEVARHGARHVTVTGGEPLAQKECLALLRLLCDAGYSVSMETGGALDISKVDARVSRILDLKTPGSGEVEKNLWSNVQYLTSHDEVKFVLCDEDDYRWAVEMMGKHRLDHTCPVLFSPVHGKLEPTVLAEWILRDRLPVRMQVQLHKLLWGEGPGR

SEQ ID NO: 32074 - protein, 246 aa, Nitrosospira sp.
  misc_feature (1)..(246): tr|A0A1M7EM59|A0A1M7EM59_9PROT 7-carboxy-7-deazaguanine synthase OS=Nitrosospira sp. Nsp11 OX=1855338 GN=queE PE=3 SV=1
MVHTFSPPPPPPISQVKRSPEAERSPEAERSRKAESLRISEIFFSLQGETSRSGLPTVFVRLTGCPLRCAYCDTDYAFYGGKRLSISDILAEVASYGARYVTVTGGEPLAQKECLLLLTLLCDAGYSVSLETSGALDISEVDDRVSKILDIKTPGSGEVARNFWPNLQHLTSHDEVKFVLCDEADYQWALEVMHERQLSLICPVLFSPVYGKLDPAMLAAWVLRDRVMVRVQIQLHKLLWGEGAGR

SEQ ID NO: 32075 - protein, 230 aa, Nitrosospira sp.
  misc_feature (1)..(230): tr|A0A495EM01|A0A495EM01_9PROT 7-carboxy-7-deazaguanine synthase OS=Nitrosospira sp. Nsp44 OX=1945879 GN=queE PE=3 SV=1
MIQTSSQLVNPACASPEHAYLRVSEIFLSLQGETSRVGLPTVFVRLTGCPLRCHYCDTEYAFYGGRRIAISAILDEIANYAVRHVTVTGGEPLAQKECPTLLKLLCDAGYSVSLETSGALDISKLDVRVSRIVDIKTPGSGELDKNRWSNLHHLTSHDEVKFVLCDKTDYEWAVAVMREHELDRICPILFSPVYGSLDPTTLAEWVLRDRLPVRVQVQLHKLLWGEGPGR

SEQ ID NO: 32076 - protein, 218 aa, Nitrosovibrio sp.
  misc_feature (1)..(218): tr|A0A497X7E7|A0A497X7E7_9PROT 7-carboxy-7-deazaguanine synthase OS=Nitrosovibrio sp. Nv12 OX=2135773 GN=queE PE=3 SV=1
MQSSEAGNLRVNEIFLSLQGETSRVGLPTVFVRLTGCPLRCGYCDTEYAFYGGKRLPISDILVEVASYAARYVTVTGGEPLAQKECLTLLRLLCDAGYSVSLETSGALDVSMVDERVSKILDIKTPGSGEAEKNRWSNLPYLTPHDEVKFVLCDEIDYQWAVEAMRKHQLDLVCPVLFSPVYDRLDPAALAAWVLRDRLPVRVQVQLHKLLWGEGPGR

SEQ ID NO: 32077 - protein, 218 aa, Nitrosovibrio sp.
  misc_feature (1)..(218): tr|A0A1K1MXX6|A0A1K1MXX6_9PROT 7-carboxy-7-deazaguanine synthase OS=Nitrosovibrio sp. Nv17 OX=1855339 GN=queE PE=3 SV=1
MCRDGDATLRVNEIFHSLQGETSRAGLPTVFVRLTGCPLRCDYCDTGYAFHEGRNLTLSAILAAVAGYAPRYVTVTGGEPLAQSACPMLLGRLCDAGYSVSLETSGALDISGVDARVSRIMDIKTPGSGEVEKNRWSNLDHLTAHDEIKFVLSDETDYRWAMRILRKYRLDLICPLLLSPVHGALDPATLAAWVLRDRLPVRVQIQLHKLLWGEGPGR

SEQ ID NO: 32078 - protein, 233 aa, Nitrosovibrio tenuis
  misc_feature (1)..(233): tr|A0A1H7LFU4|A0A1H7LFU4_9PROT 7-carboxy-7-deazaguanine synthase OS=Nitrosovibrio tenuis OX=1233 GN=queE PE=3 SV=1
MASTLSPASSVSPRNTRSSDEESLRVSEIFFSLQGETSRVGLPTVFVRLAGCPLRCGYCDTEYAFYGGRRLSITAILAEVCSFAAHYVTVTGGEPLAQKECLTLLKELCNAGYSVSLETSGALDISKIDTRVSKIMDIKTPGSGEVEKNLWSNLNHLAANDEVKFVLCDEVDYRWAIEIFRERQLDLICPILFSPVYGRLDPATLAGWVLRDRLPVRMQIQLHKVLWGEGPGR

SEQ ID NO: 32079 - protein, 212 aa, Nitrospina gracilis
  misc_feature (1)..(212): tr|M1YYS5|M1YYS5_NITG3 7-carboxy-7-deazaguanine synthas e OS=Nitrospina gracilis (strain 3/211) OX=1266370 GN=q ueE PE=3 SV=1
MLKVTEIFKSVQGESTRAGLPCLFVRLTGCNLRCRWCDTEYSFYGGKSMSLDEIIHALTPHKISLVEITGGEPLLQDEVYELMQALLDRDYTVMLETGGSLSLEHVPAAVIKIVDLKCPGSGEVMQNRYDNLDRLQPHDEVKFVIADRTDYEWSRDTLKKYNIDQKGQVLFSPVYDKLPLKDLTEWVLEDGLPVRVQTQLHKWIWGKDAIGV

SEQ ID NO: 32080 - protein, 212 aa, Nitrospina sp.
  misc_feature (1)..(212): tr|A0A523NU69|A0A523NU69_9BACT 7-carboxy-7-deazaguanine synthase OS=Nitrospina sp. OX=2024844 GN=queE PE=3 SV= 1
MLQVNEIFKSIQGESSHAGLLCAFVRLTGCNLRCTWCDTEYAFHAGKNMSIDEIVRTVDSYGLSLVEITGGEPLLQDGVYDLMQAFLAKNYQVLLETGGSLPLDRVPHQVIKIVDLKCPGSGEESKNLFSNLDLLQPTDEVKFVILDRADYEWSKQIMAQYGIHKKAQVLFSPVYDKLALKDLAEWALADNLPVRLQTQLHKVAWGKDTIGV

SEQ ID NO: 32081 - protein, 212 aa, Nitrospina sp.
  misc_feature (1)..(212): tr|A0A523NX31|A0A523NX31_9BACT 7-carboxy-7-deazaguanine synthase OS=Nitrospina sp. OX=2024844 GN=queE PE=3 SV= 1
MLTINEIFKSIQGESSYTGRPCIFIRLTGCNLRCSWCDTEYAFYEGQPKSVKDIMDAIEPLGVPLVEITGGEPLLQEEVYDLMDVLLAKNYEVLLETGGGVSVAKVPERVIKILDIKCPGSGEDAKNLWDNLDHLNPHDEVKFVLADRADYEWSRDVLQRRDIHQKVQVLFSPVYDTLGLKELAAWVLDDNLPVRVQTQLHKIIWGKDAIGV

SEQ ID NO: 32082 - protein, 211 aa, Nitrospinae bacterium
  misc_feature (1)..(211): tr|A0A2H0MGD4|A0A2H0MGD4_9BACT 7-carboxy-7-deazaguanine synthase OS=Nitrospinae bacterium CG11_big_fil_rev_8_2 1_14_0_20_56_8 OX=1974049 GN=queE PE=3 SV=1
MLTVSEIYKTIQGESTYAGLPCVMVRLTGCNLRCVWCDSTHAFYSGKNMTREEVVRQVSEFKIPLVEITGGEPLLQADVYPLMEDLIGKNFTVLLETSGSVSIENVPRKVVKIMDLKCPGSGENEKNHFDNLRGLADWDEVKFVISDRTDYEWSRDTVQSYAIPPRQVLFSPVFDRISLRSLADWILADNLGVRLQTQLHKHIWDKNAVGV

SEQ ID NO: 32083 - protein, 212 aa, Nitrospinae bacterium
  misc_feature (1)..(212): tr|A0A2H0CWF8|A0A2H0CWF8_9BACT 7-carboxy-7-deazaguanine synthase OS=Nitrospinae bacterium CG22_combo_CG10-13_8 _21_14_all_47_10 OX=1974050 GN=queE PE=3 SV=1
MLKINEIYASIQGESSHTGLPCVFIRLTGCNLRCSWCDTAYAFHKGDDFTVDQIMQKIEAFALPLVEITGGEPLMQEDVYPLMEALLEKGYRVMLETGGALPIDGVPEKVIKILDIKCPGSGEKEKNRLENLQLLAPHDEVKFVLLDRADYEWSRDLLKKCDLAPSVQVLFSPVYDRLDLKDLSEWILEDRLPVRLQTQLHKVIWSKNAIGV

SEQ ID NO: 32084 - protein, 214 aa, Nitrospira bacterium
  misc_feature (1)..(214): tr|A0A0S8AHP2|A0A0S8AHP2_9BACT 7-carboxy-7-deazaguanine synthase OS=Nitrospira bacterium SG8_35_4 OX=1704025 G N=queE PE=3 SV=1
MLKINEIFKSIQGESTFAGLPCTFVRLAGCNLRCTYCDTNYAYYHGNEISDEEIVSKIEEYGVKFVEFTGGEPLLQEETPKLLKSLLDRDYTVLIETNGSICIGCLDKRLNIIMDYKSPKSGMSERMRPKNFEFLKKTDQIKFVLMDESDYNWAKRTIEENKLFDKFDNILMSPAYGELSPKELVAWVLKDNLPVRVQLQIHKYIWAPDEREGV

SEQ ID NO: 32085 - protein, 214 aa, Nitrospira bacterium
  misc_feature (1)..(214): tr|A0A0S8D153|A0A0S8D153_9BACT 7-carboxy-7-deazaguanine synthase OS=Nitrospira bacterium SG8_35_1 OX=1704024 G N=queE PE=3 SV=1
MLKINEIFKSIQGESTFAGLPCTFVRLAGCNLRCTYCDTNYAYYDGEELSDDAIIRKIEEYGVTCVEFTGGEPLLQEETPKLLKTLLDKGYNVLVETNGSICIGCLDKRLNIIMDYKTPKSGMSERMRPKNFEFLKKTDQIKFVLMDESDYQWAKAVIEENGLTEKFENILMSPAYGELSPKSLVTWVLKDNLPVRVQLQIHKYIWAPDEREGV

SEQ ID NO: 32086 - protein, 212 aa, Nitrospira defluvii
  misc_feature (1)..(212): tr|D8P9W6|D8P9W6_9BACT 7-carboxy-7-deazaguanine synthas e OS=Nitrospira defluvii OX=330214 GN=queE PE=3 SV=1
MVKVTEIFHSIQGESTYAGRPCVFVRLTGCPLRCTWCDTAYAFYGGRDLTIDDIVNQVRAFSCDLVEVTGGEPLSQPASLPLLTRLCDEGFEVLVETSGAIETIGVDRRVHVILDVKCPGSGMTDRMCWSNLDRLAPQDEVKFVIKDRVDYEWAREVLHRHELPGRCTVLMSPVFGEVEVRYLAEWILADKLPVRFQLQMHKFIWAPDMRGV

SEQ ID NO: 32087 - protein, 211 aa, Nitrospira japonica
  misc_feature (1)..(211): tr|A0A1W1I3M7|A0A1W1I3M7_9BACT 7-carboxy-7-deazaguanine synthase OS=Nitrospira japonica OX=1325564 GN=queE PE= 3 SV=1
MRITEIFHSIQGESTYAGEPCVFVRLTGCPLRCTWCDTAYAFHEGQEMSLADVMTAVKSYGCRLVEVTGGEPLAQSQTIELIESLCETGYKVLVETSGAIDISPVDRRAQIILDVKCPGSGMTERMWWPNLAQLTAKDEVKFVVAGRSDYDWAVGIIERYGLTGLCPVLMSPVFETLEPRQLAEWILRDRLPIRFQLQLHKFIWAPDARGV

SEQ ID NO: 32088 - protein, 222 aa, Nitrospira lenta
  misc_feature (1)..(222): tr|A0A330L3T6|A0A330L3T6_9BACT 7-carboxy-7-deazaguanine synthase OS=Nitrospira lenta OX=1436998 GN=queE PE=3 S V=1
MTAPLQTQEQPLRVTEIFHSIQGESTYAGQPCVFVRLTGCPLRCTWCDTEYSFYGGTTFSIDEILSTIRAYGCQLVEVTGGEPLAQPAALPLIARLCDAGYTVLIETSGAIDVQPVDRRAKLILDVKCPGSGMTDRMHWPNLDYLTAKDEAKFVLASREDYEWARGMVAQYRLADRCPVLFSPVFGSLDLRALAEWILADRLSVRFQLQMHKYIWAPDMRGV

SEQ ID NO: 32089 - protein, 212 aa, Nitrospira moscoviensis
  misc_feature (1)..(212): tr|A0A0K2G6P4|A0A0K2G6P4_NITMO 7-carboxy-7-deazaguanine synthase OS=Nitrospira moscoviensis OX=42253 GN=queE P E=3 SV=1
MLRVTEIFHSLQGESTFAGRPCVFVRLTGCPLRCTWCDTEYAFYGGTEQSIDDIIARVRAYGCPLVEVTGGEPLAQPDAAALLKRLCDEGFTVLLETSGALDAAAVDQRVHIILDIKCPGSGMAERMHWPNVERLRSQDEAKFVLQDRADYEWAKDVMIRYGLTERCTVLFSPVFGVLDPQHLAEWILADRLPVRFQLQMHKFIWAPDMRGV

SEQ ID NO: 32090 - protein, 211 aa, Nitrospira sp.
  misc_feature (1)..(211): tr|A0A136K6Z4|A0A136K6Z4_9BACT 7-carboxy-7-deazaguanine synthase OS=Nitrospira sp. OLB3 OX=1617410 GN=queE PE= 3 SV=1
MRVTEIFHSIQGESTHAGHPCVFIRLTGCPLRCTWCDTAYAFYGGREMSIEDIVAQTRTFGCDLVELTGGEPLSQPDAPLLLARLCDERFEVLLETSGAINTAVVDRRVRVILDVKCPGSGMSDRMHWPNLDRLSSQDEVKFVIRDRADYEWAREMVRQRDLSATCPVLFSPVFGELEPRSLAEWVLGDRLRVRFQLQMHKYIWAPDMRGV

SEQ ID NO: 32091 - protein, 212 aa, Nitrospira sp.
  misc_feature (1)..(212): tr|A0A3C1QF91|A0A3C1QF91_9BACT 7-carboxy-7-deazaguanine synthase OS=Nitrospira sp. OX=70125 GN=queE PE=3 SV=1
MVKITEIFHSIQGESTYAGRPCVFVRLTGCPLRCTWCDTAYAFYGGRDMTIDDIVNQVRAFNCDLVEVTGGEPLSQTESLPLLSRLCDEGFEVLVETSGAIDTAGVDRCVHVILDVKCPGSGMTDRMYWPNLDRLAPHDEVKFVIKDRSDYEWARDVLHRYDLPARCTVLMSPVFGEVEVRHLAEWILADKLPVRFQLQMHKYIWAPDMRGV

SEQ ID NO: 32092 - protein, 212 aa, Nitrospiraceae bacterium
  misc_feature (1)..(212): tr|A0A3N5IBK8|A0A3N5IBK8_9BACT 7-carboxy-7-deazaguanine synthase OS=Nitrospiraceae bacterium OX=2026770 GN=que E PE=3 SV=1
MLRVTEIFHSIQGESSYAGQPCVFVRLTGCPLRCTWCDTDYAFYGGQECSIEEVLAKVRTYGCRLVEVTGGEPLAQPESLPLMSKLCDTGYTVLLETSGAVDIAQVDPRVHVIMDVKCPGSGMTERMHWPNLSTLTAKDEAKFVLADRADYDWAHDILARYDIASRCSVLFSPVFGSLDVRQLAEWILADRLPVRFQLQMHKYIWAPDMRGV

SEQ ID NO: 32093 - protein, 150 aa, Nitrospiraceae bacterium
  misc_feature (1)..(150): tr|A0A356R7R7|A0A356R7R7_9BACT 7-carboxy-7-deazaguanine synthase (Fragment) OS=Nitrospiraceae bacterium OX=202 6770 GN=DD706_09820 PE=3 SV=1
MTTLPSLKITEIFHSLQGESTRVGQPCVFVRLTGCPLRCTWCDTEYAFYGGNTMPIETILAQVQSYGCPLVEVTGGEPLHQPGSLVLLTQLCEAGLHVMLETSGAFDIANVDERVSIILDVKCPGSGMTDRMQWDTLRHLSGKDEVKFVL

SEQ ID NO: 32094 - protein, 211 aa, Nitrospirae bacterium
  misc_feature (1)..(211): tr|A0A1G1E9K8|A0A1G1E9K8_9BACT 7-carboxy-7-deazaguanine synthase OS=Nitrospirae bacterium GWA2_42_11 OX=181775 2 GN=queE PE=3 SV=1
MKINEIFKSIQGETTYQGLPAVFIRTTGCNLRCSWCDTTYAYSEGNEYSIEDILKIIDKYSCKDIVITGGEPLTQDETPLLIDRLITLGHTVLLETNGSLDISIVHPDTIRILDIKCPGSGMSENMMWNNIKSLKPHDEVKFVVSDYNDYIWAKSVIESYNLVNLCHVLVMPVFARLDPKALAGWIINDNLDVRLQLQIHKYIWGPDTRGV

SEQ ID NO: 32095 - protein, 211 aa, Nitrospirae bacterium
  misc_feature (1)..(211): tr|A0A2G4HXK4|A0A2G4HXK4_9BACT 7-carboxy-7-deazaguanine synthase OS=Nitrospirae bacterium OX=2026887 GN=queE P E=3 SV=1
MRVTEIFHSIQGESSYAGQPCVFVRLTGCPLRCTWCDTDYAFYGGHDCSIDEVLAKVQTYGCRLVEVTGGEPLAQTESLPLMARLCDADYTVLLETSGSIEIAPVDPRVHIILDVKCPGSGMTERMHWPNLAGLTAKDEAKFVLADRADYDWAKEILARHHLADRCSVLFSPVFGSLDLRQLAEWILADRLPVRFQLQMHKYIWAPDMRGV

SEQ ID NO: 32096 - protein, 209 aa, Nitrospirillum amazonense
  misc_feature (1)..(209): tr|A0A560I8D0|A0A560I8D0_9PROT 7-carboxy-7-deazaguanine synthase OS=Nitrospirillum amazonense OX=28077 GN=queE PE=3 SV=1
MVYYVKEIFLTIQGEGINCGRVAVFCRFSGCNLWSGREIDRPTAACKFCDTDFVGLDGDRGGRYLAEELANTMACLWPQETTRPLAVMTGGEPLLQLDSELIHALHARGFEIAVETNGTIPIPGGVDWVCVSPKSATMLSVVSGDELKIVYPQKNLPPEALENMEFNHKILQPMDGPEREKNLKAAIAYCLAHPRWRLSLQTHKIIGIR

SEQ ID NO: 32097 - protein, 213 aa, Nocardia brasiliensis
  misc_feature (1)..(213): tr|K0F0H8|K0F0H8_9NOCA 7-carboxy-7-deazaguanine synthas e OS=Nocardia brasiliensis ATCC 700358 OX=1133849 GN=qu eE PE=3 SV=1
MSYQIKEIFYTLQGEGGQAGRPAVFCRFSGCNLWSGRESGRARAVCSFCDTDFVGTDGTGGGTFRDTASLTEAVRAAWKGEVHARAVPMVVCTGGEPLLQLDQQLVDSFHAAGFYVAVETNGTRPAPAGLDWICVSPKAGTTLTITEGDELKLVYPQPEAPPARFENLGFRKLRLQPMDGPDLVANTRSAIEYCLNYPQWQLSVQSHKYLGIR

SEQ ID NO: 32098 - protein, 213 aa, Nocardia sp.
  misc_feature (1)..(213): tr|A0A3A4KD97|A0A3A4KD97_9NOCA 7-carboxy-7-deazaguanine synthase OS=Nocardia sp. YIM PH 21724 OX=2340916 GN=qu eE PE=3 SV=1
MSYQVKEIFYTLQGEGTHAGRPAVFCRFAACNLWSGTEAGRARAVCTFCDTDFVGTDGPGGGMFRTPEELAAAISKTWDGLAHPRAQRFVVCTGGEPLLQLDTPAVEALHAAGFEIAVETNGTKPAPEGLDWICVSPKAGAPLNLTSGDELKLVYPQVGAEPERFENLDFPRLLLQPMDGPDVVENTRRAVDYCLRHPQWRLSTQTHKYLGIR

SEQ ID NO: 32099 - protein, 211 aa, Nocardioidaceae bacterium
  misc_feature (1)..(211): tr|E9US36|E9US36_9ACTN 7-carboxy-7-deazaguanine synthas e OS=Nocardioidaceae bacterium Broad-1 OX=408672 GN=que E PE=3 SV=1
MTYKVKEIFYTLQGEGTHAGRPAVFCRFTSCNLWTGREKDRDRAICKFCDTAFVGTDGEGGGKFADAAALAAAVASKWPMGTDGQPMVVCTGGEPLLQLDDAAVAAMKAAGFYVAVETNGTILPPAGIDWLCVSPKIGSDLVVESGQELKFVVPQADVDPTTFEALDFESFRVQPMDGPDLAANTEYAVKFCLEHPRWHLSTQTHKFLGIP

SEQ ID NO: 32100 - protein, 296 aa, Nocardioides bacterium
  misc_feature (1)..(296): tr|A0A4S5AUA0|A0A4S5AUA0_9ACTN 7-carboxy-7-deazaguanine synthase OS=Nocardioides bacterium OX=1565122 GN=queE PE=3 SV=1
MTENTDLPAVSDKQRARIVAQPGLEVPLLPRQARAATPRPQGRPLRVDPCRTPSTTTAARTLTLPLSEVFGPTWQGEGPYAGRRCGFVRLGECNLTCEWCDTPYTWDRARHDVTAECPPTAVADIATAVTNLDVDVMVLSGGEPLLHAKRTPACALGVLLDCTPFVSWHVETNGTIPPPDWLVERVQHFTASPKVGTRDPEHRRLNPRALTAWRELCDQGAAAFKFVCRDEADLASVHSLCARMKIDAAHVWIMPEGRSAQAVLDAQRDLAPRIRDHGYNLTTRLHVLTYDDRRGV

SEQ ID NO: 32101 - protein, 211 aa, Nocardioides caeni
  misc_feature (1)..(211): tr|A0A4S8NHR6|A0A4S8NHR6_9ACTN 7-carboxy-7-deazaguanine synthase OS=Nocardioides caeni OX=574700 GN=queE PE=3 SV=1
MTYKVKEIFYTLQGEGTHAGRPAVFCRFSSCNLWTGREADRERAICKFCDTDFVGTDGEGGGKFADAEALAEAVAAKWPMNSGGRPMVVCTGGEPLLQLDVNAIEAFHARGFYVAVETNGTIAPPPGIDWLCVSPKIGSELIVEKGQELKFVVPQGGVDPTAFEHLDFESFRVQPMDGPDVVANTELAVKFCLDHPLWQLSLQTHKHLGIP

SEQ ID NO: 32102 - protein, 211 aa, Nocardioides sp.
  misc_feature (1)..(211): tr|A0A1V1W5W4|A0A1V1W5W4_9ACTN 7-carboxy-7-deazaguanine synthase OS=Nocardioides sp. PD653 OX=393303 GN=queE P E=3 SV=1
MTYKVKEIFYTLQGEGTHAGRPAVFCRFSSCNLWTGREADRERAICKFCDTDFVGTDGEGGGKFADAQALAAAVAAKWPVNGGGRPMVVCTGGEPLLQLDTAAVDAFHELGFYVAVETNGTLVPPAGIDWLCVSPKIGSELVVEKGQELKFVVPQGGVDPTAFEHLDFESFRAQPMDGPDVAANTELAVKFCLDHPLWQLSLQTHKHLGIP

SEQ ID NO: 32103 - protein, 211 aa, Nocardioides sp.
  misc_feature (1)..(211): tr|A0A542RQF8|A0A542RQF8_9BURK 7-carboxy-7-deazaguanine synthase OS=Nocardioides sp. SLBN-35 OX=512030 GN=queE PE=3 SV=1
MTYSVKEIFYTLQGEGGQAGTPAVFCRFAGCNLWTGREQDRAQAICPFCDTDFVGTDGTLGGKFETATALAELIAAQWPAGAGHRLVVLTGGEPLLQVDAALIDALHAQQFRIAVESNGTVAAPEGIDWLCISPKAGAPWVQRSGQELKLVWPQPGFDLRALEQETQFTHRFLQPMDGLLQRQNTAACIDACLAHPAWRLSLQTHKLTGIR

SEQ ID NO: 32104 - protein, 222 aa, Nocardiopsis dassonvillei
  misc_feature (1)..(222): tr|A0A223QE75|A0A223QE75_NOCDA 7-carboxy-7-deazaguanine synthase OS=Nocardiopsis dassonvillei OX=2014 GN=queE PE=3 SV=1
MQGEGPSLGRRCAFVRLGGCNLSCRWCDTPYTWDWTGLGDGKVAYDPKKELRAVPYPQVRDRLVAYGVPLIVVSGGEPLNQQARLLPLVRDLRDSGHDIEVETNGTIIPEPRLAESVRFNVSPKLAHSGDPEDRRIVGPALAALAAVPGTAFKFVCRTEADLDEVGTLVERYGIGPVWVMPEGRTRAALDRSLVRLRDPVMARGWNLTTRLHIMLWGDRRGV

SEQ ID NO: 32105 - protein, 211 aa, Nocardiopsis sinuspersici
  misc_feature (1)..(211): tr|A0A1V3BVC2|A0A1V3BVC2_9ACTN 7-carboxy-7-deazaguanine synthase OS=Nocardiopsis sinuspersici OX=501010 GN=que E PE=3 SV=1
MGYLVKEIFYTLQGEGSHAGRPAVFCRMSRCNLWTGYEKDRHRAICTFCDTDFVGTDGVGGGRFATADELADAVARAWPSEERAHRFVVCTGGEPLLQLDEEAVEALHKQGFEVAVETNGTRVPPEGIDWLCVSPKIGSKLVVDQGDELKLVYPQPGGSPESFEHLDFSVFRLQPMDGPELEANTRETVEYCLKNPHWRLSLQTHKYLGIQ

SEQ ID NO: 32106 - protein, 239 aa, Nocardiopsis sp.
  misc_feature (1)..(239): tr|A0A317MLS2|A0A317MLS2_9ACTN 7-carboxy-7-deazaguanine synthase OS=Nocardiopsis sp. L17-MgMaSL7 OX=1938893 GN =queE PE=3 SV=1
MSPERVDGPGLLVAERFGVERPTFQGEGPSSGVPALFIRLSRCNLTCTWCDTPYTWDTSRFDLRAESSRQTVQDLLVWAHGSRVELVVITGGEPLIQQRSLVPLVRGLLARGNRVEFETNGTITPAPELLVEGVRFNVSPKLANSGVAEDRRLVPETLKAFAASGRAVFKFVARTEADLDEIDALTGRYGLAPIWVMPEGATPEELIATTRVLADSVAARRWHLAQRLHVMAFAQTRGR

SEQ ID NO: 32107 - protein, 237 aa, Nocardiopsis sp.
  misc_feature (1)..(237): tr|A0A495KZT9|A0A495KZT9_9ACTN 7-carboxy-7-deazaguanine synthase OS=Nocardiopsis sp. Huas11 OX=2183912 GN=queE PE=3 SV=1
MNLLLSPTFDGPDLVVSEVFGPTVQGEGPNCGRRAVFVRLADCNLACSWCDTPYSWKWNEYVRREETYRCNAEEVLDRARSSGVGLVVVTGGEPLLQKALEPLVATLTDGGLDVEVETNGTRLPSPDLLFRARFNVSPKLANAGVPQRRRIRAGVLRALARSGNAVFKFVVQRSEELDEVADLVERCRLAPVWIMPQGTSAEEVLAHQSALADEVIKRGWNLSTRLHVLLWGDQRGR

SEQ ID NO: 32108 - protein, 265 aa, Nodularia sp.
  misc_feature (1)..(265): tr|A0A218PZE6|A0A218PZE6_9CYAN 7-carboxy-7-deazaguanine synthase OS=Nodularia sp. NIES-3585 OX=1973477 GN=queE PE=3 SV=1
MTVKTTVQPTARLIEVFSAIQGEGLNVGTRQLFIRFAFCDLRCHFCDSAHTWNAPPTCRIERSPGLRDFEIHSNPVPLPILMQWVERQNLPCLHDSISLTGGEPLLHAAFLKVFLPQVRSLTNLPIYLESGGHRPQQLAMILPYLDSVGMDLKLPSVSGESLWQEHTEFLQLCFNSHLEVFVKVIISDHTDPAELERAAAMVADVSPDIPVFLQPVTPLPASEQLTKTPVLAPAPEKVLIWQALMKQFLPQVRVIPQTHKMLNQL

SEQ ID NO: 32109 - protein, 265 aa, Nodularia spumigena
  misc_feature (1)..(265): tr|A0ZLR2|A0ZLR2_NODSP 7-carboxy-7-deazaguanine synthas e OS=Nodularia spumigena CCY9414 OX=313624 GN=queE PE=3 SV=1
MTVKTTVQPTARLIEVFSAIQGEGLNVGTRQLFIRFALCDLRCHFCDSAHTWNAPATCRIELTPGLRDFEIHSNPVSLPILIQWVERQNLPCLHDSISLTGGEPLLHAAFLKEFLPQVRSLTNLPIYLESGGHRPEQLAMVLPYLDSVGMDLKLPSVSGESLWTEHTNFLQLCFNTHLEVFVKIIISDNTDPAELERSAAMVADVSPDIPIFLQPVTPLAASEQLTETPVLAPAPEKVLMWQALMKQFVPQVRVIPQTHKMLNQL

SEQ ID NO: 32110 - protein, 265 aa, Nodularia spumigena
  misc_feature (1)..(265): tr|A0A161XRE0|A0A161XRE0_NODSP 7-carboxy-7-deazaguanine synthase OS=Nodularia spumigena CENA596 OX=1819295 GN= queE PE=3 SV=1
MTVKTTVQPTARLIEVFSAIQGEGLNVGTRQLFIRFALCDLRCHFCDSAHTWNAPATCRIERSPGLRDFEIHSNPVPLPILIQWVERQNLPCLHDSISLTGGEPLLHAAFLKEFLPQVRSLTNLPIYLESGGHRPEQLAMVLPYLDSVGMDLKLPSVSGESLWTEHTNFLQLCSNTHLEVFVKIIISDNTDPAELERSAAMVADVSPDIPIFLQPVTPLAASEQLTETPVLAPAPEKVLMWQTLMKRFIPHVRVIPQTHKMLNQL

SEQ ID NO: 32111 - protein, 209 aa, Nonlabens agnitus
  misc_feature (1)..(209): tr|A0A2S9WUS4|A0A2S9WUS4_9FLAO 7-carboxy-7-deazaguanine synthase OS=Nonlabens agnitus OX=870484 GN=queE PE=3 S V=1
MKDTIENKVDAGVMLPLMEEFYTIQGEGFHTGTAAYFIRIGGCDVGCHWCDVKESWNAETHPPTAIEHIVENADKWSKTIVITGGEPLTWNMQPLTNALKDRGMTVHIETSGAYPLTGTWDWICLSPKKVKMPVPEIYKEANELKVIVYNKNDFAFAKAESQKVTSSCQLFLQPEWSVREKMIPLITEFVMENPEWRVSLQTHKYLNIP

SEQ ID NO: 32112 - protein, 210 aa, Nonlabens arenilitoris
  misc_feature (1)..(210): tr|A0A2S7UC52|A0A2S7UC52_9FLAO 7-carboxy-7-deazaguanine synthase OS=Nonlabens arenilitoris OX=1217969 GN=queE PE=3 SV=1
MLEKSISQAVEKGEMLPLMEEFYTIQGEGSHTGKAAYFIRVGGCDVGCHWCDVKESWDPEKHPPTAVDAIVANAAKYSKTIVVTGGEPLTWDMGPLTTGLKNEGMQVHIETSGAYPLSGTWDWICLSPKKMKMPLPEVYEAAHELKVIVFNRHDFAFAKAEAEKVSSNCKLYLQPEWSVREKMIPMITEFVMDNPEWHVSLQTHKYLNIP

SEQ ID NO: 32113 - protein, 243 aa, Nonlabens dokdonensis
  misc_feature (1)..(243): tr|L7W5S9|L7W5S9_NONDD 7-carboxy-7-deazaguanine synthas e OS=Nonlabens dokdonensis (strain DSM 17205 / KCTC 124 02 / DSW-6) OX=592029 GN=queE PE=3 SV=1
MKTYLKNYIVLRLLNNLKHSRIMKTIAKTYLCGMLEKKIQQQVEKGTMLPLMEEFYTIQGEGFHTGRAAYFIRVGGCDVGCHWCDVKESWAPEKHPPTSVDHIVSNAAKYSKTIVVTGGEPLTWNMEPLTSGLKDAGLDVHIETSGAYPLTGQWDWICLSPKKAKMPLQEVYEAAHELKVIVYNRHDLAFAKAESEKVSSQCKLFLQPEWSVREKMIPLITEFVMQNPEWQVSLQTHKYLNIP

SEQ ID NO: 32114 - protein, 210 aa, Nonlabens dokdonensis
  misc_feature (1)..(210): tr|A0A1Z8AW23|A0A1Z8AW23_9FLAO 7-carboxy-7-deazaguanine synthase OS=Nonlabens dokdonensis OX=328515 GN=queE PE =3 SV=1
MLEKNIQQQVEKGTMLPLMEEFYTIQGEGYHTGRAAYFIRVGGCDVGCHWCDVKESWAPEKHPPTSVDHIVSNAAKYSKTIVVTGGEPLTWNMEPLTAGLKNAGLDVHIETSGAYPLTGHWDWICLSPKKAKMPLQEVYEAAHELKVIVYNRHDLAFAKAESEKVSSHCKLFLQPEWSVREKMIPFITEFVMENPEWQVSLQTHKYLNIP

SEQ ID NO: 32115 - protein, 209 aa, Nonlabens marinus
  misc_feature (1)..(209): tr|W8VQ90|W8VQ90_9FLAO 7-carboxy-7-deazaguanine synthas e OS=Nonlabens marinus S1-08 OX=1454201 GN=queE PE=3 SV =1
MEKKIQDQVNAGTLLPLMEEFYTIQGEGFHTGTAAYFIRVGGCDVGCHWCDVKESWNADTHPPTHIDQIIDHAAQWSKTIVITGGEPLTWDMEPLTQGLKDRGMTVHIETSGAYPLSGAWDWICLSPKKVKMPVAEIYKEAHELKMIIYNKSDFAFAKAEAQKVSATCQLFLQPEWSVREKMIPQITEFVMQNPEWRVSLQTHKYLNIP

SEQ ID NO: 32116 - protein, 210 aa, Nonlabens sediminis
  misc_feature (1)..(210): tr|A0A090Q245|A0A090Q245_9FLAO 7-carboxy-7-deazaguanine synthase OS=Nonlabens sediminis OX=319236 GN=queE PE=3 SV=1
MNQEVVQDQVEKGLMLPLMEEFYTIQGEGSHTGRAAYFIRVGGCDVGCHWCDVKESWDPEKHPPTAIDQIIENASKYSKTIVITGGEPLTWDMGPLTQGLKERQMQVHIETSGAYPLTGDWDWICLSPKKVKMPVPEIYPKAHELKVIVYNKHDFAFAKAEAEKVSSSCKLYIQPEWSVREKMIPLITDFVMQNPEWQVSLQTHKYLNIP

SEQ ID NO: 32117 - protein, 209 aa, Nonlabens sp.
  misc_feature (1)..(209): tr|A0A1G5BBV3|A0A1G5BBV3_9FLAO 7-carboxy-7-deazaguanine synthase OS=Nonlabens sp. Hel1_33_55 OX=1336802 GN=que E PE=3 SV=1
MKETIENKVNAGLMLPLMEEFYTIQGEGFHTGTAAYFIRIGGCDVGCHWCDVKESWNAETHPPTSIEQIVDHADKWSKTIVITGGEPLTWNMQPLTRALKDRDMTVHIETSGAYPLTGIWDWICLSPKKIKMPVPEIYKKANELKVIVYNKNDFAFAKAESQKVSANCQLFLQPEWSVREKMIPLITEFVMENPEWRVSLQTHKYLNIP

SEQ ID NO: 32118 - protein, 210 aa, Nonlabens sp.
  misc_feature (1)..(210): tr|A0A2K8X5T0|A0A2K8X5T0_9FLAO 7-carboxy-7-deazaguanine synthase OS=Nonlabens sp. MB-3u-79 OX=2058134 GN=queE PE=3 SV=1
MLEKTLQQQVEKGTMLPLMEEFYTIQGEGYHTGRAAYFIRVGGCDVGCHWCDVKESWAPEKHPPTGVDHIVANAAKYSKTIVVTGGEPLTWNMEPLTTGLKNAGLDIHIETSGAYPLTGQWDWICLSPKKAKMPLQEVYLSAHELKVIVFNRHDLAFAKAESEKVSSQCKLFLQPEWSVREKMIPLITEFVMENPEWQVSLQTHKYLNIP

SEQ ID NO: 32119 - protein, 210 aa, Nonlabens spongiae
  misc_feature (1)..(210): tr|A0A1W6MNR8|A0A1W6MNR8_9FLAO 7-carboxy-7-deazaguanine synthase OS=Nonlabens spongiae OX=331648 GN=queE PE=3 SV=1
MLEKEIKTAVDRGDMLPLMEEFYTIQGEGYHTGRAAYFIRVGGCDVGCHWCDVKESWDPAKHPPTETSKIVENAAKYSKTIVVTGGEPLTWDMNPLTSQLKAKDLQVHIETSGAYPLTGTWDWICLSPKKVKMPLPEAYEAAHELKVIVYNRHDLAFAKAESQKVNPDCKLFLQPEWSVREKIIPLITDFVMQNPEWQVSLQTHKYLNIP

SEQ ID NO: 32120 - protein, 210 aa, Nonlabens tegetincola; identical to SEQ ID NO: 32116
  misc_feature (1)..(210): tr|A0A2S7T451|A0A2S7T451_9FLAO 7-carboxy-7-deazaguanine synthase OS=Nonlabens tegetincola OX=323273 GN=queE PE =3 SV=1

SEQ ID NO: 32121 - protein, 118 aa, Nonlabens ulvanivorans
  misc_feature (1)..(118): tr|A0A090PW06|A0A090PW06_NONUL Queuosine biosynthesis q ueE radical SAM OS=Nonlabens ulvanivorans OX=906888 GN= JCM19297_1471 PE=4 SV=1
MGPLTTGLKNKGMQVHIETSGAYPLSGSWDWICLSPKKMKMPLPEVYEAAHELKVIIFNKHDFAFAKAEAEKVSSTCKLYLQPEWSVREKMIPLITEFVMDNPEWHVSLQTHKYLNIP

SEQ ID NO: 32122 - protein, 210 aa, Nonlabens ulvanivorans
  misc_feature (1)..(210): tr|A0A090QCM8|A0A090QCM8_NONUL 7-carboxy-7-deazaguanine synthase OS=Nonlabens ulvanivorans OX=906888 GN=queE P E=3 SV=1
MLEKSISQAVEKGEMLPLMEEFYTIQGEGSHTGKAAYFIRVGGCDVGCHWCDVKESWDPEKHPPTAVDAIVANAAKYSKTIVVTGGEPLTWDMGPLTTGLKSEGMQVHIETSGAYPLSGSWDWICLSPKKMKMPLPEVYEAAHELKVIIFNKHDFAFAKAEAEKVSSNCKLYLQPEWSVREKMIPLITEFVMDNPEWHVSLQTHKYLNIP

SEQ ID NO: 32123 - protein, 210 aa, Nonlabens xylanidelens
  misc_feature (1)..(210): tr|A0A2S6IHD8|A0A2S6IHD8_9FLAO 7-carboxy-7-deazaguanine synthase OS=Nonlabens xylanidelens OX=191564 GN=queE P E=3 SV=1
MLEKTIQQQVEKGTMLPLMEEFYTIQGEGYHTGRAAYFIRVGGCDVGCHWCDVKESWDPEKHPPTGVDQIVVNAAKYSKTIVVTGGEPLTWNMEPLTTGLKNASLDVHIETSGAYPLSGHWDWICLSPKKAKMPLPEVYEAAHELKVIVFNRHDLAFAKAESEKVSSTCKLFLQPEWSVREKMIPFITEFVMENPEWQVSLQTHKYLNIP

SEQ ID NO: 32124 - protein, 240 aa, Nonomuraea fuscirosea
  misc_feature (1)..(240): tr|A0A2T0LXZ3|A0A2T0LXZ3_9ACTN 7-carboxy-7-deazaguanine synthase OS=Nonomuraea fuscirosea OX=1291556 GN=queE P E=3 SV=1
MSATEVSVPPHDATLLISERFGPTLQGEGPSTGMNALFVRLSRCNLSCSWCDTPYTWDPTRFNLREHRERVPVADLVAWALNRPVPLIVITGGEPLLQQRHLAPLAEPLLRAGRHLEIETNGTIAPDPALLVDGLRFNVSPKLGNANVPRKRRIKPAALEALSSSGQAVFKFVACCLDDLDEIAELAERFAMKQVWVMPEGVTADHVLSRAQLLSEAVIARGWSLSLRLHVLLWGDERGR

SEQ ID NO: 32125 - protein, 267 aa, Nonomuraea solani
  misc_feature (1)..(267): tr|A0A1H5T033|A0A1H5T033_9ACTN 7-carboxy-7-deazaguanine synthase OS=Nonomuraea solani OX=1144553 GN=queE PE=3 SV=1
MSADLLSIADPTEQRPVPIAELFYSFQGEGVNLGRRALLVRFLGCNLTCGYRQAPATGDIPAQGTMLCDTEYTWNSAKHDLSDGVRHLTPQGVWDELINLDPATATPSIAPVDLIVVTGGEPLLHQDAILHLARQAALTGRHIEIETNATIKPNPKLLSPGVAFNAGPKLASSAVPRKKRIKPDAIRAIEASGQARWKFVVSTLEDLTEIAELQAEFGLTEIWLSPEGTTPTRVLERMRMAASFALAHGWNLTTREHVLIWGGQRAK

SEQ ID NO: 32126 - protein, 211 aa, Nonomuraea solani
  misc_feature (1)..(211): tr|A0A1H6EYU3|A0A1H6EYU3_9ACTN 7-carboxy-7-deazaguanine synthase OS=Nonomuraea solani OX=1144553 GN=queE PE=3 SV=1
MYRVKEIFYTLQGEGAHAGRPAVFCRFTGCNLWTGHEEHRVRAICKFCDTDFVGTDGSGGGRFRTAADLAAAVAAFWPADVAGGERYVVCTGGEPLLQLDHAAVEALHESGFTVAVETNGTRAAPPGIDWICVSPKSSAELVLTSGDELKLVFPQHDARPERYEELDFARFSLQPMDGPDAVANTRLALEYCLTNPRWRLSLQTHKIVGIR

SEQ ID NO: 32127 - protein, 240 aa, Nonomuraea sp.
  misc_feature (1)..(240): tr|A0A2W2G8D0|A0A2W2G8D0_9ACTN 7-carboxy-7-deazaguanine synthase OS=Nonomuraea sp. KC333 OX=2070368 GN=queE PE =3 SV=1
MTATAVSAPSRAAELLLAERFGPTLQGEGPSIGQSALFIRLSRCNLSCTWCDTPYTWDSARFDLRQQSERTSVADLVAWALAHPVPLIVITGGEPLLQQRHLPALAEPLLQAGRRLEIETNGTVAPDSALLLAGLRFNVSPKLANAGVPADRRIKSAALEALSASGKAVFKFVARDAADLADLAELAERFAMRQVWVMPEGVTADDVLGCAQALAETVIARGWSLSLRLHVLLWGDERGR

SEQ ID NO: 32128 - protein, 233 aa, Nonomuraea sp.
  misc_feature (1)..(233): tr|A0A4R4VPU2|A0A4R4VPU2_9ACTN 7-carboxy-7-deazaguanine synthase OS=Nonomuraea sp. KC310 OX=1848322 GN=queE PE =3 SV=1
MPALPVSEVFGPTIQGEGPYAGRSAWFVRLGGCNLSCSWCDSAYTWDAQRFDLRREIPMTPVEEVLAQVPSSSLVVVTGGEPLLHQNRPAWRALCNGLRARRCTLHVETNGTIVPNETTRGCVQTFVVSPKLANAGVHRGNIDPALRTGWVEVAESGNAHLKVVCASTDDVAGALEIARTTGWPLSQVWVMPEGTTAQELNGRWRAIADAAAHAGINATHRLHILAWQDCRGH

SEQ ID NO: 32129 - protein, 246 aa, Nosocomiicoccus massiliensis
  misc_feature (1)..(246): tr|A0A2J6NIG8|A0A2J6NIG8_9STAP 7-carboxy-7-deazaguanine synthase OS=Nosocomiicoccus massiliensis OX=1232430 GN =queE PE=3 SV=1
MRQQKKMPIMEIFGPTIQGEGMVIGRKTMFVRTGGCDYSCAWCDSAFTWNGEEKANVLSAEDVYNKIQEIGYIDNRRNFNHVTITGGNPALINKPMNDLIDMLHNDDVKVGLETQGSIYQDWFLKIDDLTISPKPPSSKMETDFKILDDILNKLHEANVNFSLKVVIFNEEDFDYAKYVYNRYKNYNRNFYVSVGNPDPYEGGDISRRLLNDLKELWEMVLNDPEANDFKPLPQLHALIYDNQRGV

SEQ ID NO: 32130 - protein, 265 aa, Nostoc azollae
  misc_feature (1)..(265): tr|D7DYT9|D7DYT9_NOSA0 7-carboxy-7-deazaguanine synthas e OS=Nostoc azollae (strain 0708) OX=551115 GN=queE PE= 3 SV=1
MIAKTTVKPTARLVEVFSAIQGEGLNVGTRQIFIRFGLCDLRCHFCDSAHTWDAPSLCKIELSPGLRDFEMHSNPIPPATLIKWVERQNLPFLHDSISLTGGEPLLHAPFLAQFLPEVRAQTNLPIYLETGGHRPDQLAMILPYLDSVGMDLKLPSVSGETHWTEHKEFLQICFEANLDIFVKIIVSQRTDPGELERSALLVAEVGQDIPIFLQPVTPLAESQQFSSVPVEAPAPQQVLEWQALMKKFVKQVRVIPQTHKMLNQM

SEQ ID NO: 32131 - protein, 265 aa, Nostoc calcicola
  misc_feature (1)..(265): tr|A0A1U7IBX4|A0A1U7IBX4_9NOSO 7-carboxy-7-deazaguanine synthase OS=Nostoc calcicola FACHB-389 OX=1357508 GN=q ueE PE=3 SV=1
MIAKTTVTSTARLVEVFSAIQGEGLNVGTRQIFIRFALCDLRCHFCDSAHTWNAPLNCRIERSPGLRDFEIYSNPVPLPILIEWVQRQNLPSLHDSISLTGGEPLLHAQFLTQFLPEVRAITGLPIYLETGGHRPEQLAMILPYLDSVGMDFKLPSVSGESHWQEHAKFLQLCRDSYLNVFVKIIVSQNTDPAELERSALLVADVSPDIPVFLQPVTPLIESEQFSPIPALAPAPDRVLMWQALMKQFLKQVRVIPQTHKMLNQL

SEQ ID NO: 32132 - protein, 277 aa, Nostoc carneum
  misc_feature (1)..(277): tr|A0A1Z4HNZ2|A0A1Z4HNZ2_9NOSO 7-carboxy-7-deazaguanine synthase OS=Nostoc carneum NIES-2107 OX=1973483 GN=que E PE=3 SV=1
MTTRRDRFFNHPMTAKTTVKPTARLIEVFSAIQGEGLNVGTRQIFIRFALCDLRCHFCDSAHTWNAPSICRIERTPGLRDFEEHSNPIPLPILLEWVERQNQPSIHDSISLTGGEPLLHAPFLELFLPQVRSLTNLPIYLETGGHRPEQLAMILPYLDSVGMDLKLPSVSGESYWQEHGQCLKLSYDSHLNIFVKIIISQQTEPTELERSALLVASVSSDIPVFLQPVTPLPVSEKSPAKTILAPTPDQVLQWQALMKQWLKHVRVVPQTHKMLNQL

SEQ ID NO: 32133 - protein, 265 aa, Nostoc commune
  misc_feature (1)..(265): tr|A0A2R5FTU4|A0A2R5FTU4_NOSCO 7-carboxy-7-deazaguanine synthase OS=Nostoc commune NIES-4072 OX=2005467 GN=que E PE=3 SV=1
MIAKNTVTPTARLIEIFSAIQGEGLNVGTRQIFIRFALCDLRCQFCDSVHTWNAPASCRIERSPGLRDFEIHSNPVSLPILVEWVERQNVPSLHDSISLTGGEPLLHAPFLTQFLPEVRAITGLPIYLETGGHRPEQLAIILPYLDSVGMDLKLPSVSGESHWQEHAKFLQLCHDSYLNVFVKIIVSQNTDPAELERSALLVAEVSPDISVFLQPVTPLAVSEQFSSIPVFAPTADQVLTWQALMKGFLKYVRVIPQTHKMLNQL

SEQ ID NO: 32134 - protein, 266 aa, Nostoc cycadae
  misc_feature (1)..(266): tr|A0A2H6LBD9|A0A2H6LBD9_9NOSO 7-carboxy-7-deazaguanine synthase OS=Nostoc cycadae WK-1 OX=1861711 GN=queE PE= 3 SV=1
MTANITVEPTARLIEVFSAIQGEGLNVGTRQIFIRFALCDLRCHFCDSSHTWNAPTTCKVERSPGLRDFEIHSNPVPLTILLEWIKRQNLPLLHDSISVTGGEPLLHAPFLHEFLPQVRSLTGLPIYLETGGHRPDQLAMILPYLDSVGMDWKLPSVSGETYWQAHAKFLQLCHNNPSVDVFIKIIISQSTNPDELKQAALLIADINPNIPVFLQPVTPLPVSEQFTPTPILAPNPDQVLMWQVLMKKFVPHVRVVPQTHKMLNQL

SEQ ID NO: 32135 - protein, 265 aa, Nostoc flagelliforme
  misc_feature (1)..(265): tr|A0A2K8SYV3|A0A2K8SYV3_9NOSO 7-carboxy-7-deazaguanine synthase OS=Nostoc flagelliforme CCNUN1 OX=2038116 GN= queE PE=3 SV=1
MIAKNTVTPTARLIEIFSAIQGEGLNVGTRQIFIRFALCDLRCQFCDSVHTWNAPASCRIERSPGLRDFETYSNPISLPILIEWVERQNVPCLHDSISLTGGEPLLHAPFLTQFLPEVRAITGLPIYLETGGHRPEQLAMILPYLDSVGMDLKLPSVSGESYWQEHAKFLQLCHNSYLNVFVKIIVSQNTDPAELERSALLVAEVSPDISVFLQPVTPLPVSEQFSPIPALAPTADQVLMWQALMKGFLKHVRVIPQTHKMLNQL

SEQ ID NO: 32136 - protein, 265 aa, Nostoc linckia
  misc_feature (1)..(265): tr|A0A1Z4L535|A0A1Z4L535_NOSLI 7-carboxy-7-deazaguanine synthase OS=Nostoc linckia NIES-25 OX=1091006 GN=queE PE=3 SV=1
MIAKTTVTPTARLVEVFSAIQGEGLNVGTRQIFIRFALCDLRCHFCDSAHTWNAPVSCRIERSPGLRDFEIYSNPVPLPILIEWVERQNLPSLHDSISLTGGEPLLHAPFLTQFLPKVRDITGLPIYLETGGHRPEQLAMILPYLDSVGMDFKLPSVSGESHWQEHAKSLQLCHDSYLNVFVKIIVSQNTDPAELERSALLVADISPDIPVFLQPVTPLTESEQLSPIPVLAPTPDRVLIWQALMKQSLKQVRVIPQTHKMLNQL

SEQ ID NO: 32137 - protein, 265 aa, Nostoc linckia
  misc_feature (1)..(265): tr|A0A2C6WID8|A0A2C6WID8_NOSLI 7-carboxy-7-deazaguanine synthase OS=Nostoc linckia z16 OX=1628751 GN=queE PE=3 SV=1
MIAKTTVTPTARLVEVFSAIQGEGLNVGTRQIFVRFALCDLRCHFCDSAHTWNAPVSCRIERSPGLRDFEIYSNPVPLPILIEWVERQNLPSLHDSISLTGGEPLLHAPFLTQFLPKVRDITGLPIYLETGGHRPEQLAMILPYLDSVGMDFKLPSVSGESHWQEHAKSLQLCHDSYLNVFVKIIVSQNTDPDELERSALLVADISPDIPVFLQPVTPLPESEQFSPIPVLAPTPDRVLMWQALMKQSLKQVRVIPQTHKMLNQL

SEQ ID NO: 32138 - protein, 265 aa, Nostoc minutum
  misc_feature (1)..(265): tr|A0A367RMS0|A0A367RMS0_9NOSO 7-carboxy-7-deazaguanine synthase OS=Nostoc minutum NIES-26 OX=1844469 GN=queE PE=3 SV=1
MTAKTTVKPTARLIEVFSAIQGEGLNVGTRQIFIRFALCDLRCHFCDSAHTWNAPATCKVERSPGLRDFEIHSNPVPLPTLIEWVQRQNLPCLHDSISLTGGEPLLHVPFLKEFLPEVRSLTNLPVYLETGGHRPEQLATILPYLDSVGMDFKLPSVSGESHWSEHAKFLQLCFGSHLDIFVKIIISNNTDPTELERSALLVADVSPDIPIFLQPVTPLPASEQFTQTPVLAPTPEQVLMWQALMKKFVPHVRVIPQTHKMLNQL

SEQ ID NO: 32139 - protein, 265 aa, Nostoc piscinale
  misc_feature (1)..(265): tr|A0A0M5MG18|A0A0M5MG18_9NOSO 7-carboxy-7-deazaguanine synthase OS=Nostoc piscinale CENA21 OX=224013 GN=queE PE=3 SV=1
MTANTTEPTARLIEVFSAIQGEGLNVGTRQIFIRFALCDLRCNFCDSSHTWNAPTTCKVERSPGSREFEIHSNPVPLTILLDWIKRQNLPLLHDSISLTGGEPLLHAPFLDEFLPQVRSLTGLPIYLETGGHRPEQLAMILPYLDSVGMDWKLPSVSGETYWQEHTKFLQLCHNNPSLDVFVKIIISQNTNPDELQKTALLIADINPKVPVFLQPVTPLPASEQFTAKPLLAPNPDQVLMWQALMKKFVPHVRVVPQTHKMLNQL

SEQ ID NO: 32140 - protein, 265 aa, Nostoc punctiforme
  misc_feature (1)..(265): tr|A0A367RFU3|A0A367RFU3_NOSPU 7-carboxy-7-deazaguanine synthase OS=Nostoc punctiforme NIES-2108 OX=1356359 GN =queE PE=3 SV=1
MIAKNTVTPTARLIEVFSAIQGEGLNVGTRQIFIRFALCDLRCHFCDSAHTWSAPTTCRIERSPGLRDFEIHSNPVPLPILIEWVEQQNLPCLHDSISLTGGEPLLHASFLTQFLPQVRAITGLPIYLETGGHRPEQLAMIIPYLDSVGMDLKLPSVSGESHWQEHSKFLQLCYDSYLNVFVKIIVSQNTDPAELERSASLVAEVSPDISVFLQPVTPLAVSEQFSPVPALAPSSDQVLTWQALMKGFVKHVRVIPQTHKMLNQL

SEQ ID NO: 32141 - protein, 265 aa, Nostoc punctiforme
  misc_feature (1)..(265): tr|B2JA32|B2JA32_NOSP7 7-carboxy-7-deazaguanine synthas e OS=Nostoc punctiforme (strain ATCC 29133 / PCC 73102) OX=63737 GN=queE PE=3 SV=1
MIAKTTVTPTARLVEVFSAIQGEGLNVGTRQIFIRFALCDLRCHFCDSAHTWNAPATCRIERSPGLRDFEIHSNPVPLPILIEWVEQQNLPCLHDSISLTGGEPLLHAPFLTQFLPQVRAITGLPIYLETGGHRSEQLAMILPYLDSVGMDFKLPSVSGESHWQEHAKFLQLCHDSYLNVFVKIIVSQNTDPGELERSASLVAKVSPDIPVFLQPVTPLAVSEQFSSILMLAPTPDQVLTWQALMKGFIKHVRVIPQTHKMLNQL

SEQ ID NO: 32142 - protein, 209 aa, Nostoc sp.
  misc_feature (1)..(209): tr|A0A318AJT7|A0A318AJT7_9NOSO 7-carboxy-7-deazaguanine synthase OS=Nostoc sp. 3335mG OX=2204170 GN=queE PE=3 SV=1
MSFAVKEIFLTLQGEGINAGRRAVFLRFAGCNLWSGREEDRATAQCTFCDTDFIGMDGEEGGRYDLAALVAKVSALWGDIGGDRLVVMTGGEPMLQVTDALVDALHVAGFEVAMETNGTLPAAPGIDWVTVSPKAGNEVVQRSGQELKLVWPQSGIDPEAMRGWDFAHFLIQPMDGIGREEWRETAIRYVMDHPGWRLSVQTHKAMGIP

SEQ ID NO: 32143 - protein, 264 aa, Nostoc sp.
  misc_feature (1)..(264): tr|K9QZ37|K9QZ37_NOSS7 7-carboxy-7-deazaguanine synthas e OS=Nostoc sp. (strain ATCC 29411 / PCC 7524) OX=28072 GN=queE PE=3 SV=1
MTAKTTAEPTARLIEVFSAIQGEGLNVGTRQIFIRFAFCDLRCHFCDSVHTWNAPANCRIERSPGLRDFETHPNPVPIPILLEWIERQNLPSLHDSISLTGGEPLLHAGFLKEFLPQVRSLTGLPIYLETGGHRPEQLAMILPYLDLVGMDWKLPSVSGESHWQEHMKFLQICYPNLETFIKIIISDQTDVAELEQAALLVADVSPEIPLFLQPVTPLAESEQFTKTPVLAPTPEQVLTWQALMKRFLKQVRVVPQTHKMLNQL

SEQ ID NO: 32144 - protein, 265 aa, Nostocales cyanobacterium
  misc_feature (1)..(265): tr|A0A1Y0RJ39|A0A1Y0RJ39_9CYAN 7-carboxy-7-deazaguanine synthase OS=Nostocales cyanobacterium HT-58-2 OX=19407 62 GN=queE PE=3 SV=1
MTVKTTITPSARLIEVFSAIQGEGLNVGTRQIFIRFALCDLRCHFCDSAHTWHAPATCRIEQTPGLRDFEIYSNPVTLPMLLEWVERQNLPFLHDTISLTGGEPLLHTPFLVEFLPQVRSVTGLPVYLETGGHRPEQLDTILPYIDSVGMDFKLPSTSGETRWQEHTKFLELCWKSQVEVFIKIIVSQTTDPTELERSAELIASISPSIPVFLQPVTPLDDPIAFNQPPVLAPSPSQVLNWQALMKRYVKQVRVIPQTHKMLNQL

SEQ ID NO: 32145 - protein, 214 aa, Notoacmeibacter marinus
  misc_feature (1)..(214): tr|A0A231UXI6|A0A231UXI6_9RHIZ 7-carboxy-7-deazaguanine synthase OS=Notoacmeibacter marinus OX=1876515 GN=queE PE=3 SV=1
MSYAVKEMFYTLQGEGAQAGRASLFCRFAGCNLWSGREQDRHKAVCQFCDTDFVGMDGPGGGRFASADKLAARARQMWDETAAGENGQPYIVCTGGEPLLQLDPPLIAALHAAGFEIAVETNGTIEAPAGIDWICVSPKAGSELVQKAGHELKLVWPQPPFALEQFEPLAFDRFYLQPMDGPYVAANTRLCVETAMARPKWRLSLQTHKIIGIA

SEQ ID NO: 32146 - protein, 214 aa, Notoacmeibacter sp.
  misc_feature (1)..(214): tr|A0A3L7JD57|A0A3L7JD57_9RHIZ 7-carboxy-7-deazaguanine synthase OS=Notoacmeibacter sp. M2BS9Y-3-1 OX=2448481 GN=queE PE=3 SV=1
MSYAVKEMFYTLQGEGAQAGRASLFCRFAGCNLWTGREQDRHKAICQFCDTDFIGMDGPGGGRCATPKDLAQQARRMWDQTAASQSGKPYIVCTGGEPLLQLDAPLIAALHEAGFEIAVETNGTIAAPDGIDWICVSPKAGSELVQTRGNELKLVWPQPPFSLEQFEPLAFDKFYLQPMDGPDVIANTQLCVKTSMARPQWRLSLQTHKMIGIA

SEQ ID NO: 32147 - protein, 211 aa, Noviherbaspirillum autotrophicum
  misc_feature (1)..(211): tr|A0A0C2BX13|A0A0C2BX13_9BURK 7-carboxy-7-deazaguanine synthase OS=Noviherbaspirillum autotrophicum OX=709839 GN=queE PE=3 SV=1
MSYSVKEIFYTLQGEGTHAGRPAVFCRFSGCNLWSGRESDRASAVCKFCDTDFVGMDGELGGKYPDSSSLAKTIDTLWPAAYAASKFVVFTGGEPLLQLDAALIESMHACGFEIAIESNGTLPVPAGVDWVCISPKVGSTLQVRKGNELKVVIPQQNQNLDDYEPLDFDHFYLQPMDGPDVERNTQRAIELCKQRPQWKLSLQTHKLLQIP

SEQ ID NO: 32148 - protein, 211 aa, Noviherbaspirillum denitrificans
  misc_feature (1)..(211): tr|A0A254THP3|A0A254THP3_9BURK 7-carboxy-7-deazaguanine synthase OS=Noviherbaspirillum denitrificans OX=196843 3 GN=queE PE=3 SV=1
MTYSVKEIFYTLQGEGTHAGRPAVFCRFAGCNLWTGRESDRASAICKFCDTDFVGTDGVRGGKFADGAALAETIDALWPAAYTKSKFVVFTGGEPLLQLDGALIEAMHARGFEIAIETNGTIAVPDGVDWICVSPKVGSELVVRRGNELKVVIPQANQDVATYESLDFDHFYLQPMDGPDAAHNTRLAIEMCRTNPKWKLSLQTHKLLQIP

SEQ ID NO: 32149 - protein, 211 aa, Noviherbaspirillum humi
  misc_feature (1)..(211): tr|A0A239H877|A0A239H877_9BURK 7-carboxy-7-deazaguanine synthase OS=Noviherbaspirillum humi OX=1688639 GN=queE PE=3 SV=1
MTYSVKEMFYTLQGEGTHAGRPAVFCRFSGCNLWSGREADRATAVCRFCDTDFVGTDGEGGGKFAAAADLAERIDSFWPAAYPQRKFVVFTGGEPLLQLDAPLLEQVHARGFEVAIESNGTLPVPAGVDWVCISPKIGSELVVTKGDELKVVIPQLGQDISRYENLDFTHFYLQAMDGPKVEANTRLAIETCKQRPRWKLSLQTHKLLHIP

SEQ ID NO: 32150 - protein, 211 aa, Noviherbaspirillum sp.
  misc_feature (1)..(211): tr|A0A3A3G8S5|A0A3A3G8S5_9BURK 7-carboxy-7-deazaguanine synthase OS=Noviherbaspirillum sp. K1S02-23 OX=2320865 GN=queE PE=3 SV=1
MTYSVKEIFYTLQGEGTHAGRPAVFCRFSGCNLWSGRESDRASAVCKFCDTDFVGTDGERGGKYPGAQQLADAIDSLWPDTHAASKYVVFTGGEPLLQLDTPLIDAVHAAGFEIAIETNGTLPVPPGVDWICVSPKIGSELVQRSGNELKVVIPQVGQSLQDYETLDFQHFYVQPMDGPQQEANTRLAIDTCKRNPHWKLSLQTHKLLQIP

SEQ ID NO: 32151 - protein, 211 aa, Noviherbaspirillum sp.
  misc_feature (1)..(211): tr|A0A5B8N557|A0A5B8N557_9BURK 7-carboxy-7-deazaguanine synthase OS=Noviherbaspirillum sp. UKPF54 OX=2601898 G N=queE PE=3 SV=1
MSYIVKEIFYTLQGEGTHAGRPAVFCRFSGCNLWSGRESDRASAVCKFCDTDFVGTDGELGGKYPDSASLAKAIDALWPAAYPASKFVVFTGGEPLLQLDAALIESMHAHGFEIAIESNGTLPVPAGVDWICISPKIGSMLQVRRGNELKVVIPQQNQNLDDYELLEFDHFYLQPMDGPDAERNTQLAIELCKQRPQWKLSLQTHKLLQIP

SEQ ID NO: 32152 - protein, 208 aa, Novimethylophilus kurashikiensis
  misc_feature (1)..(208): tr|A0A2R5F766|A0A2R5F766_9PROT 7-carboxy-7-deazaguanine synthase OS=Novimethylophilus kurashikiensis OX=182552 3 GN=queE PE=3 SV=1
MHEIFFSLQGETSRMGLPTAFVRLTGCPLRCGYCDTAYAFQGGSTMELAEILDKVAATGAHYVTVTGGEPLAQKDCLPLLKQLCDAGYNVSIETGGSLDISGVDPRVSVILDIKTPGSGEVSKNLWTNLDHIKPKDEIKFVICNREDYEWARQVLQERQLAERCPVLFSPVYGEISARDLAEWGLADKLPVRFQVQLHKILWGEEPGR

SEQ ID NO: 32153 - protein, 247 aa, Novosphingobium aromaticivorans
  misc_feature (1)..(247): tr|Q2G4E0|Q2G4E0_NOVAD 7-carboxy-7-deazaguanine synthas e OS=Novosphingobium aromaticivorans (strain ATCC 70027 8 / DSM 12444 / CIP 105152 / NBRC 16084 / F199) OX=2792 38 GN=queE PE=3 SV=1
MLTLATVNPGEPEVFSSLQGEGPGMGRPSVFVRLSRCNLACRWCDTAYTWRFAGDNRPHRDEVAFEKAGNQLVMSEEDTAALILVHPEDRLVITGGEPLLQGAALARLVALLKAERPALHVEIETNGTVAVHPALDPLVDQFNVSPKLSHSGNPAELALLPERLEAWARDPRAWFKFVVADPSDLAEISALQDRFGIAPDHLFVMPEGTSSAVLRDRSRWLAEEALVRGWRFTDRLHIHLYGDTRGT

SEQ ID NO: 32154 - protein, 243 aa, Novosphingobium barchaimii
  misc_feature (1)..(243): tr|A0A147ELT6|A0A147ELT6_9SPHN 7-carboxy-7-deazaguanine synthase OS=Novosphingobium barchaimii OX=1420591 GN=q ueE PE=3 SV=1
MLTLATTTPGEPEIFTSLQGEGLSLGRPSTFVRLSRCNLACQWCDTAYTWRFEGDNRPHRDALAFDRTQNQVALSEEDVAARITALSPDRLVVTGGEPLLQGPALARLLALLPGMHVEIETNGTVAPHPALDGLVHQYNVSPKLAHSGNPADLALMPERLQAWATDPRAVFKFVIAQAADMAQVLGLQRDYAIPADRVFLMAEGRTPAELAARNRWLAQLCLDHGLRFTDRLHIHLYGDTRGT

SEQ ID NO: 32155 - protein, 248 aa, Novosphingobium barchaimii
  misc_feature (1)..(248): tr|A0A0J8B1I5|A0A0J8B1I5_9SPHN 7-carboxy-7-deazaguanine synthase OS=Novosphingobium barchaimii LL02 OX=1114963 GN=queE PE=3 SV=1
MTLTLATTTPGEPEIFASLQGEGPSMGRPSTFVRLSRCNLACQWCDTAYTWRFTGDNRFHRDDLAFERRENQVAMEEGDLARAVADLVPDRLVITGGEPLLQGAALARMVAALNELRPGMHVEVETNSTVAPHPALDGLVHQYNVSPKLAHSGNPAELALLPDRLSAWAANPRAFFKFVIAEKSDLTEVMALQETYAIPGPRLFLMPEGRSSDVIRKRSGWLADFCSLHGLRFTDRLHIHLWGDTRGT

SEQ ID NO: 32156 - protein, 248 aa, Novosphingobium fuchskuhlense
  misc_feature (1)..(248): tr|A0A117USK6|A0A117USK6_9SPHN 7-carboxy-7-deazaguanine synthase OS=Novosphingobium fuchskuhlense OX=1117702 G N=queE PE=3 SV=1
MSLTLATTTPGEPEIFPSLQGEGPSAGRPCVFVRLSRCNLACRWCDTAYTWRFTGDIRPHRDDLTFERSENQITLDVREVAMRILALRPTRLVITGGEPLLQAPALGRLIPMLKEAVPGLEVEIETNGSVPPPHSITQLVDQFNVSPKLSHSGNDESLALVPALLREWAASTKAWFKFVVADEDDVNEVAELQAIYHIPAERLFVMPEGTSSKILRERSKWLAGAALTHGWRFTDRLHIHLYGDTRGT

SEQ ID NO: 32157 - protein, 243 aa, Novosphingobium ginsenosidimutans
  misc_feature (1)..(243): tr|A0A5B8S591|A0A5B8S591_9SPHN 7-carboxy-7-deazaguanine synthase OS=Novosphingobium ginsenosidimutans OX=11765 36 GN=queE PE=3 SV=1
MLTLATTTPGEPEIFASLQGEGPSIGRPVAFVRLSRCNLACTWCDTAYTWRFEGDNRPHRDGLAFERKANQVVLDEADVAARIMALGQDRLVITGGEPLLQGTALARMVTLLEGMSVEIETNGTVAPHPALDPLVSQYNVSPKLKHSGNPVDSAQIPERFAEWIQKPQVWFKFVVATPDDVAEVLDLIETHRLPRERTFVMPEGTDSATLRERERWLAPLALQHGLRLSDRMHIHLYGDTRGT

SEQ ID NO: 32158 - protein, 247 aa, Novosphingobium guangzhouense
  misc_feature (1)..(247): tr|A0A2K2FVZ7|A0A2K2FVZ7_9SPHN 7-carboxy-7-deazaguanine synthase OS=Novosphingobium guangzhouense OX=1850347 G N=queE PE=3 SV=1
MLTLATTTPGQPEIFASLQGEGPSMGRPSTFVRLSRCNLACQWCDTAYTWRFTGDNRFHRDALAFERRENQVTMEEAELAQAVADLVPDRLVITGGEPLLQGAALARMLAALDAIRPGMHVEVETNSTVAPHPALDARIDQYNVSPKLAHSGNPADLALLPDRLSAWAAEPRAFFKFVVATRADVDEVMALQQTYAIPGARLFLMPEGRSSDVIRERSGWLADFCSQHGLRFTDRLHIHLWGDTRGT

SEQ ID NO: 32159 - protein, 244 aa, Novosphingobium kunmingense
  misc_feature (1)..(244): tr|A0A2N0HKJ3|A0A2N0HKJ3_9SPHN 7-carboxy-7-deazaguanine synthase OS=Novosphingobium kunmingense OX=1211806 GN= queE PE=3 SV=1
MSLTLATVRPGEPEIFASLQGEGASAGRPVAFVRLSRCNLACQWCDTAYTWRFTGDNRPHRDGLAFERKANQIVLDEAELAERVLALGQDRLVITGGEPLLQGAALARLVPLLAGMSVEIETNGSVAPHPALDAQVAQYNVSPKLAHSGNPADLALVPERLTAWAGDPRAFFKFVVAEPDDLAEVEALQAAYGIASERLYLMGEGTDSATLLARARWLSDECLKRGWRFTDRLHIHLYGDTRGT

SEQ ID NO: 32160 - protein, 248 aa, Novosphingobium lindaniclasticum
  misc_feature (1)..(248): tr|T0IUX1|T0IUX1_9SPHN 7-carboxy-7-deazaguanine synthas e OS=Novosphingobium lindaniclasticum LE124 OX=1096930 GN=queE PE=3 SV=1
MTLALATTTPGEPEVFASLQGEGASMGRPSTFVRLSRCNLACEWCDTAYTWRFSGDNRFHRDDLAFERKANQVMAEEADVARMVADLPPDRLVITGGEPLLQGPQLARMLAALDEARPGMHVEIETNGSVAPHAVLDARVQQYNVSPKLSHSGNPAELALVPERLDAWAADPRAWFKFVVAEPADVEEVRALKERHAIPAERIFLMPEGRSSDVIRQRSGWLSDICTREGYRFSDRLHIHIWGDTRGT

SEQ ID NO: 32161 - protein, 247 aa, Novosphingobium malaysiense
  misc_feature (1)..(247): tr|A0A0B1ZV19|A0A0B1ZV19_9SPHN 7-carboxy-7-deazaguanine synthase OS=Novosphingobium malaysiense OX=1348853 GN= queE PE=3 SV=1
MLTLATTVPGDPEIFASLQGEGPSIGRPSTFVRLSRCNLACQWCDTAYTWRFEGDNRPHRDEAAFERKSNQLSLEEADVAERIAALAPDRLVITGGEPLLQGAALARMASALNDLRPGMHIEIETNGTVAPHPALDPLIHQFNVSPKLAHSGNPADLALIPERLAAWAAEPRAVFKFVVAQQADLDEVHALQDHYAIPSERLFVMPEGRSSDVLRQRSAWMADFCAQSGWRFTDRLHIHLWGDTRGT

SEQ ID NO: 32162 - protein, 248 aa, Novosphingobium mathurense
  misc_feature (1)..(248): tr|A0A1U6GSZ5|A0A1U6GSZ5_9SPHN 7-carboxy-7-deazaguanine synthase OS=Novosphingobium mathurense OX=428990 GN=qu eE PE=3 SV=1
MPLILATTTPGEPEIFASLQGEGASMGRPSTFVRLSRCNLACQWCDTAYTWRFEGDNRPHRDDTAFERKANQLTLEEADVAAQVAALPPDRLVVTGGEPLLQGAALARMIGELNAMRPGMHVEIETNGSVAPHAALDPLIHQFNVSPKLAHSGNPAELALIPERLAAWSADPRAFFKFVIAVPDDLDEVLALQQAHAIPGERIFLMPEGRSSEVVRQRSAWLADLCMNRGLRFTDRLHIHLWGDTRGT

SEQ ID NO: 32163 - protein, 248 aa, Novosphingobium nitrogenifigens
  misc_feature (1)..(248): tr|F1ZBN1|F1ZBN1_9SPHN 7-carboxy-7-deazaguanine synthas e OS=Novosphingobium nitrogenifigens DSM 19370 OX=98392 0 GN=queE PE=3 SV=1
MALVLATTTPGEAELFASLQGEGASLGRPSVFVRLSRCNLACRWCDTAYTWRFSGDNRPHRDDIAFERTANQITADEGDIATRILAFGVPRLVVTGGEPLLQAPALARMIAAVRAGNEAMHIEIETNGSVAPTPALDALIDQYNVSPKLAHSGNPADLALIPERLAAWAADPRAYFKFVIATPDDLTQVRELVATYGIVPERLFVMPEGTDSATLRERSRWLAQAAIDAGWRVTDRLHIHLYGDTRGT

SEQ ID NO: 32164 - protein, 248 aa, Novosphingobium pentaromativorans
  misc_feature (1)..(248): tr|G6E8L1|G6E8L1_9SPHN 7-carboxy-7-deazaguanine synthas e OS=Novosphingobium pentaromativorans US6-1 OX=1088721 GN=queE PE=3 SV=1
MPLILATTTPGEPEIFASLQGEGASMGRPSTFVRLSRCNLACQWCDTAYTWRFEGDNRPHSDDVAFERKANQLTLEEADVAARVAALHPDRLVLTGGEPLLQGPALARLVTELDALRPGMHVEVETNGSVAPHAALDPMIHQFNVSPKLAHSGNPADLALIPQRLAAWSADPRAFFKFVIAAPEDLQEVLALQQTYAIPGERIFLMPEGRSSEVVRQRSAWLADLCLDNALRFTDRLHIHLWGDTRGT

SEQ ID NO: 32165 - protein, 248 aa, Novosphingobium pentaromativorans
  misc_feature (1)..(248): tr|A0A2W5QE64|A0A2W5QE64_9SPHN 7-carboxy-7-deazaguanine synthase OS=Novosphingobium pentaromativorans OX=20584 4 GN=queE PE=3 SV=1
MTLALATTTPGEPEVFASLQGEGASMGRPSTFVRLSRCNLACQWCDTAYTWRFTGDNRFHRDDLAFERKANQVMAEEADVARMVADLPPDRLVITGGEPLLQGPQLARMLAALDEARPGMHVEIETNGSVAPHASLDARVQQYNVSPKLSHSGNPAELALVPERLDAWAADPRAYFKFVVAEPADVDEVRALKERHDIPAERIFLMPEGRSSDVIRQRSPWLSDICTQEGYRFTDRLHIHIWGDTRGT

SEQ ID NO: 32166 - protein, 248 aa, Novosphingobium resinovorum
  misc_feature (1)..(248): tr|A0A1D8A3T4|A0A1D8A3T4_9SPHN 7-carboxy-7-deazaguanine synthase OS=Novosphingobium resinovorum OX=158500 GN=q ueE PE=3 SV=1
MTLTLATTTPGQPEIFASLQGEGPSMGRPSTFVRLSRCNLACQWCDTAYTWRFTGDNRFHRDDLAFERRENQVTMEEADLAQAVADLVPDRLVITGGEPLLQGAALARMVKALDEIRPGMHVEVETNSTVAPHPALDARIDQYNVSPKLAHSGNPDTLALLPERLAAWAAEPRAFFKFVVATRDDLDEVMALQQTYAIPGARLFLMPEGRSSDVIRERSGWLADFCSQHGLRFTDRLHIHLWGDTRGT

SEQ ID NO: 32167 - protein, 247 aa, Novosphingobium resinovorum
  misc_feature (1)..(247): tr|A0A031K3W3|A0A031K3W3_9SPHN 7-carboxy-7-deazaguanine synthase OS=Novosphingobium resinovorum OX=158500 GN=q ueE PE=3 SV=1
MLTLATTTPGQPEIFASLQGEGPSMGRPSTFVRLSRCNLACQWCDTAYTWRFTGDNRFHRDDLAFERRENQVTMEEADLAQAVADLVPDRLVITGGEPLLQGAALARMVKALDEIRPGMHVEVETNSTVAPHPALDARIDQYNVSPKLAHSGNPDTLALLPERLAAWAAEPRAFFKFVVATRDDLDEVMALQQTYAIPGARLFLMPEGRSSDVIRERSGWLADFCSQHGLRFTDRLHIHLWGDTRGT

SEQ ID NO: 32168 - protein, 248 aa, Novosphingobium sediminis
  misc_feature (1)..(248): tr|A0A512ALJ7|A0A512ALJ7_9SPHN 7-carboxy-7-deazaguanine synthase OS=Novosphingobium sediminis OX=707214 GN=que E PE=3 SV=1
MSLTLATTTPGEPEIFPSLQGEGPSAGRPCVFVRLSRCNLACRWCDTAYTWRFTGDIRPHRDDLTFERSENQITLDVREAAMRILALRPTRLVITGGEPLLQAPSLAKLIPMLREAVPALEVEIETNGSVPPPHAIMQLVDQFNVSPKLSHSGNAEHLALVPELLRDWAASPKAWFKFVVADMDDVNEVAELQAMYRIPSERLFVMPEGTSSETLRERSKWLAGAALTHGWRFTDRLHIHLYGDTRGT

SEQ ID NO: 32169 - protein, 267 aa, Novosphingobium sp.
  misc_feature (1)..(267): tr|A0A1W2A6N1|A0A1W2A6N1_9SPHN 7-carboxy-7-deazaguanine synthase OS=Novosphingobium sp. B1 OX=1938756 GN=queE PE=3 SV=1
MPCTPPRPSVWQRRCSGWGNLLTLATVNPGEPEVFSSLQGEGPGMGRPSVFVRLSRCNLACRWCDTAYTWRFTGDNRPHRDEVAFERRENQVTLDEQEVAALILSHPEDRLVITGGEPLLQGASLARLVALLKAERPALHIEIETNGSVPPHGALDPCIDQYNVSPKLAHSGNAAELALVPERLEAWSGNVRAWFKFVVASPADLAEIAALQDRYHIASDRLFVMPEGTASSTLRERSRWLAEEALAKGWRFTDRLHIHLYGDTRGT

SEQ ID NO: 32170 - protein, 247 aa, Novosphingobium sp.
  misc_feature (1)..(247): tr|A0A258V2R8|A0A258V2R8_9SPHN 7-carboxy-7-deazaguanine synthase OS=Novosphingobium sp. 28-62-57 OX=1970409 GN =queE PE=3 SV=1
MLTLATVNPGEPEVFSSLQGEGPSMGRPSVFVRLSRCNLACRWCDTAYTWRFTGDNRPHRDEVAFERTDNQLTMTEEDAAALILSHPEDRLVITGGEPLLQGAALARMVALMKAARPALHVEIETNGTVAVHPALNPLVDQFNVSPKLAHSGNDAALSLVPEQLTQWAQNPRAWFKFVVATPADLAEISALQERYGIAPDHLFVMPEGTASATLRERSRWLAEEALERGWRFTDRLHIHLYGDTRGT

SEQ ID NO: 32171 - protein, 249 aa, Novosphingobium subterraneum
  misc_feature (1)..(249): tr|A0A0B9A061|A0A0B9A061_9SPHN 7-carboxy-7-deazaguanine synthase OS=Novosphingobium subterraneum OX=48936 GN=q ueE PE=3 SV=1
MNLLTLATVNPGEPEVFSSLQGEGLGLGRPSVFVRLSRCNLACRWCDTAYTWRFTGDNRPHRDEVAFERWENQLKMSEADAAALILSHPEDRLVITGGEPLLQGAALARLVALLKAERPALHVEIETNGTVAVHPELDPLIDQFNVSLKLAHSGNPAELALVPERLDAWARDVRAWFKFVVASASDLAEIAALQDRHGIASDHLFVMPEGTASSVLRERSRWLAEEALERGWRFTDRLHIHLYGDTRGT

SEQ ID NO: 32172 - protein, 267 aa, Novosphingobium taihuense
  misc_feature (1)..(267): tr|A0A562JZG6|A0A562JZG6_9SPHN 7-carboxy-7-deazaguanine synthase OS=Novosphingobium taihuense OX=260085 GN=que E PE=3 SV=1
MRCTLPRPSGSQRRCSGWGNLLTLATTSPGEPEVFSSLQGEGPGMGRPSVFMRLSRCNLACRWCDTAYTWRFTGDNRPHRDEVAFERGENQVAMSEADAAALILSHPEDRLVITGGEPLLQGAALARVVALVKAERPALHVEIETNGTVAAHAELDPLINQFNVSPKLAHSGNAAELALVPERLDAWARDPRAWFKFVVATASDLAEISALQARHAIASDHLFVMPEGTSSAVLRDRSRWLAEEALERGWRFTDRLHIHLYGDTRGT

SEQ ID NO: 32173 - protein, 244 aa, Novosphingobium tardaugens
  misc_feature (1)..(244): tr|U3A3S9|U3A3S9_9SPHN 7-carboxy-7-deazaguanine synthas e OS=Novosphingobium tardaugens NBRC 16725 OX=1219035 G N=queE PE=3 SV=1
MALALATTTPGEPEIFASLQGEGPSQGRPSTFIRLSRCNLACQWCDTAYTWRFTGDNRPHRDGTAFDRTANQLMMAEDKAAERILALGQDRLVITGGEPLLQAAALARMLGHLPTMHVEIETNGTVAPSPALDAMVQQYNVSPKLAHSGNPTDLALIPERLAEWAQNPRAFFKFVIATPDDMAEVLALQERYAIPGDRIFLMPEGTASAILRERQVWLSDLCMRHGFRMSDRLHIHLYGDTRGT

SEQ ID NO: 32174 - protein, 223 aa, Obesumbacterium proteus; identical to SEQ ID NO: 30493
  misc_feature (1)..(223): tr|A0A4Q9D5G4|A0A4Q9D5G4_9GAMM 7-carboxy-7-deazaguanine synthase OS=Obesumbacterium proteus OX=82983 GN=queE P E=3 SV=1

SEQ ID NO: 32175 - protein, 223 aa, Obesumbacterium proteus; identical to SEQ ID NO: 30493
  misc_feature (1)..(223): tr|A0A1B7KE16|A0A1B7KE16_9GAMM 7-carboxy-7-deazaguanine synthase OS=Obesumbacterium proteus ATCC 12841 OX=1354 268 GN=queE PE=3 SV=1

SEQ ID NO: 32176 - protein, 218 aa, Oblitimonas alkaliphila
  misc_feature (1)..(218): tr|A0A0K1XGQ8|A0A0K1XGQ8_9GAMM 7-carboxy-7-deazaguanine synthase OS=Oblitimonas alkaliphila OX=1697053 GN=queE PE=3 SV=1
MIKLATEPQFNIVEIFQSLQGEGYNTGMDAIFIRFGKCNLACPWCDTDYLSYSTLSLSEILKQVEALNATNIIITGGEPSVVPEIDLLLKQLKQRGYFLTIETNGLQPVPSEIDFISASPKALYAKKYHSQMLTQADEVRIVVDGDVFDFCQFIEQHLPAKHYYLSPCEQITVSSSKTSSPSFTLLETLQLLGRLNQRAQGQPHWQLSLQTHKLLGIR

SEQ ID NO: 32177 - protein, 210 aa, Oceanibaculum indicum
  misc_feature (1)..(210): tr|K2JL81|K2JL81_9PROT 7-carboxy-7-deazaguanine synthas e OS=Oceanibaculum indicum P24 OX=1207063 GN=queE PE=3 SV=1
MTYSVKELFKTLQGEGAQAGRAAVFCRFAGCNLWTGREEDRAGAVCRFCDTDFVGTDGEGGGKFRDADALAEAIAACWGTGTARRYVVFTGGEPLLQLDKALVDAVHARGFEIAIETNGTLEPPPGIDWICVSPKEGADWVLRRGDELKLVYPQPGLGPDGMTALSFRHFWLQPMDGPARAENTAAAVAYCLDHPDWRLSVQTHKMIGIP

SEQ ID NO: 32178 - protein, 210 aa, Oceanibaculum indicum
  misc_feature (1)..(210): tr|A0A420WI89|A0A420WI89_9PROT 7-carboxy-7-deazaguanine synthase OS=Oceanibaculum indicum OX=526216 GN=queE PE =3 SV=1
MTYSVKELFKTLQGEGAQAGRAAVFCRFAGCNLWTGREEDRAGAVCRFCDTDFVGTDGEGGGKFRDADALAEAIAACWGTGTARRYVVFTGGEPLLQLDKALVDAVHARGFEIAIETNGTLEPPPGIDWICVSPKEGADWVLRRGDELKLVYPQPGLGPEGMTALSFRHFWLQPMDGPARAENTAAAVAYCLDHPDWRLSVQTHKMIGIP

SEQ ID NO: 32179 - protein, 209 aa, Oceanicaulis sp.
  misc_feature (1)..(209): tr|A0A2T4ZRM3|A0A2T4ZRM3_9RHOB 7-carboxy-7-deazaguanine synthase OS=Oceanicaulis sp. PT13A OX=2135616 GN=queE PE=3 SV=1
MTYSVKEMFLTVQGEGGQTGRPAVFLRFAGCNLWSGLERDRASAICQFCDTDFVGVDGVNGGKFKTAEALAEAVASLWPGGGEPYVVCTGGEPLLQLDAPLIDALHAEGFKIAVETNGTIEAPDGIDWVCVSPKSTAPLKQISGDELKLVYPQPEAMPELFEHLDFKQFRLQPMDGPHQAENAQAAFEYCLKHPQWMLSLQTHKWINVP

SEQ ID NO: 32180 - protein, 209 aa, Oceanicaulis sp.
  misc_feature (1)..(209): tr|A0A3D4J1E3|A0A3D4J1E3_9RHOB 7-carboxy-7-deazaguanine synthase OS=Oceanicaulis sp. OX=1924941 GN=queE PE=3 S V=1
MTYSVKEMFLTVQGEGGQTGRPAVFLRFAGCNLWSGLERDRASAICQFCDTDFVGVDGVNGGKFKTAEALAEAVASLWPGGGEPYVVCTGGEPLLQLDAPLIDALHKSGFKIAVETNGTIKAPEGIDWVCVSPKSTPPLKQLTGDELKLVYPQPEAMPELFEHLDFRQFRLQPMDGPRQAENALAAFEYCLKHPKWMLSLQTHKWINVP

SEQ ID NO: 32181 - protein, 214 aa, Oceanicoccus sagamiensis
  misc_feature (1)..(214): tr|A0A1X9NAL7|A0A1X9NAL7_9GAMM 7-carboxy-7-deazaguanine synthase OS=Oceanicoccus sagamiensis OX=716816 GN=queE PE=3 SV=1
MTDLRITEIFYSLQGETKTVGLPTVFVRLTGCPLRCGYCDTEYAFHGGEKRSQQSILDEVASHQPRYITVTGGEPLAQPNCLPLLTALCDQGYEVSLETSGAITLAGVDPRVVTVMDLKTPASNEVSRNLYENIGHLSRQDQIKFVICDRGDYEWARFKIDEYQLTDKVDEILFSPSFGQVDGKELAEWILADNLPVRLQLQLHKLLWDDAAGH

SEQ ID NO: 32182 - protein, 210 aa, Oceanihabitans sediminis
  misc_feature (1)..(210): tr|A0A368P550|A0A368P550_9FLAO 7-carboxy-7-deazaguanine synthase OS=Oceanihabitans sediminis OX=1812012 GN=que E PE=3 SV=1
MTRSERQELLDKGLLLPLMEEFYTIQGEGFHKGTAAYFVRIGGCDVGCHWCDVKESWLPELHPATKAVDIAENAAKYSRTIVVTGGEPLMWDMGPLTKELKDKGLQIHIETSGAYKLTGIWDWICLSPKKNKLPTEEVYAKAHELKCIVYNKDDFRFAEEQAAKINDDCILYLQPEWSKRDKMMPQIVDYVMKNPKWKVSLQTHKYLNIP

SEQ ID NO: 32183 - protein, 238 aa, Oceanimonas baumannii
  misc_feature (1)..(238): tr|A0A235CMM6|A0A235CMM6_9GAMM 7-carboxy-7-deazaguanine synthase OS=Oceanimonas baumannii OX=129578 GN=queE PE =3 SV=1
MIAISEIFGPTIQGEGALTGVPTVFVRTGGCDFRCSWCDTLYAVEPRFRADWTPMSAGAVLAEVERLSGGRPLLITLSGGNPALQPLGDLLQLGHDKGYTFAIETQGSKAQKWFGQLDHLTLSPKPPSSGMAFSQSRFGECLAAAGEHTRVTLKLVIADETDYRWAREFAAQYPQLPLTLQPCNPVPATPDEPERETDLDALNARLRWLVDKVTADGWFEARVLPQLHVIIWNNERGV

SEQ ID NO: 32184 - protein, 238 aa, Oceanimonas doudoroffii
  misc_feature (1)..(238): tr|A0A233RF68|A0A233RF68_9GAMM 7-carboxy-7-deazaguanine synthase OS=Oceanimonas doudoroffii OX=84158 GN=queE P E=3 SV=1
MIAISEIFGPTIQGEGALTGVPTVFVRTGGCDFRCSWCDTLYAVEARFKADWTPMSAEAVLAEVERLSGGRPLLITLSGGNPALQPLGDLLSLGQARGYTFAIETQGSKAQDWFARLDHLTLSPKPPSAGMAFSQRRFDACLAAAGVNTQVTLKLVIADEADYRWARDFAARYPHLPLTLQPCNPAPATPDEPARETDLDALNARLRWLVDKVTADGWFAARVLPQLHVIIWNNERGV

SEQ ID NO: 32185 - protein, 238 aa, Oceanimonas sp.
  misc_feature (1)..(238): tr|H2FX31|H2FX31_OCESG 7-carboxy-7-deazaguanine synthas e OS=Oceanimonas sp. (strain GK1) OX=511062 GN=queE PE= 3 SV=1
MIAISEIFGPTIQGEGALTGVPTVFVRTGGCDFRCSWCDTLYAVEPRFKADWTPMSAEAVLAEVERLSGGRPLLVTLSGGNPALQPLGELLALGHAKGYTFAIETQGSKVQDWFAELDHLTLSPKPPSAGMAFSQHRFDACLAAAGAHTQVTLKLVIADEVDYQWARDFAARYPQLPLTLQPCNPAPATPDEPERTTDLDALNAHLRWLVDRVTADGWFEARVLPQLHVIIWNNERGV

SEQ ID NO: 32186 - protein, 239 aa, Oceanisphaera arctica
  misc_feature (1)..(239): tr|A0A2P5TR02|A0A2P5TR02_9GAMM 7-carboxy-7-deazaguanine synthase OS=Oceanisphaera arctica OX=641510 GN=queE PE =3 SV=1
MSIAISEIFGPTIQGEGALIGVPTLFVRTGGCDFRCSWCDTLYAVEPRFKADWTPMSAEAVMTEVNGLSGGHPLLVTLSGGNPALQPLTELLELGHAQGYTFAMETQGSKVQDWFAMLDHLTLSPKPPSSGMAFNRSRFEASLAAAGDQTQVSLKLVIADEADYQWARDVAAGYPQLPLTLQPCNPSPATPEQPDLETDTESLNSRLRWLVDKVTADRWFNARVLPQLHVLIWNNERGV

SEQ ID NO: 32187 - protein, 266 aa, Oceanisphaera profunda
  misc_feature (1)..(266): tr|A0A1Y0D1P3|A0A1Y0D1P3_9GAMM 7-carboxy-7-deazaguanine synthase OS=Oceanisphaera profunda OX=1416627 GN=queE PE=3 SV=1
MSKVTSRATTLNQDSGTPNLNSDTRAFIAISEIFGPTIQGEGALIGVPTVFVRTGGCDFRCSWCDTLYAVEPRFKADWAQMSAQAVMAEIIRLSGNQPLLVTLSGGNPALQPLGELVQLGQQQGYTFAIETQGSKAQPWFGLLDHLTLSPKPPSSGMAFNRARFAECLTAAGKRTQISLKLVISDDADYQWAKEFAARYPQLSLTLQPCNLAPATPEQPDMETDIESLNARLRWLVDKVTADRWFNARVLPQLHVLIWNNERGFKA

SEQ ID NO: 32188 - protein, 241 aa, Oceanobacillus caeni; identical to SEQ ID NO: 27973
  misc_feature (1)..(241): tr|A0A0N0M7X4|A0A0N0M7X4_9BACI 7-carboxy-7-deazaguanine synthase OS=Oceanobacillus caeni OX=405946 GN=queE PE= 3 SV=1

SEQ ID NO: 32189 - protein, 240 aa, Oceanobacillus iheyensis
  misc_feature (1)..(240): tr|Q8EMN9|Q8EMN9_OCEIH 7-carboxy-7-deazaguanine synthas e OS=Oceanobacillus iheyensis (strain DSM 14371 / CIP 1 07618 / JCM 11309 / KCTC 3954 / HTE831) OX=221109 GN=qu eE PE=3 SV=1
MKIPVLEIFGPTIQGEGMVIGRKTMFVRTAGCDYSCSWCDSKFTWDGSEKDSIQLLEPEEVFDSLKDIGGNTFGHVTISGGNPALLKQIDGLVDLLHQHQIEVALETQGSRWQDWFTKVDDLTLSPKPPSSGMKTNFTTLDNIIERLDKEQDGHFSLKVVIFDQEDLTYAEQIHVRYPFVTLFLQVGNDNIEASEDDRLLSDLLDKYEKLIDLVMENKVLKDVRVLPQLHTYLWGNKRGV

SEQ ID NO: 32190 - protein, 242 aa, Oceanobacillus oncorhynchi
  misc_feature (1)..(242): tr|A0A0A1MXR2|A0A0A1MXR2_9BACI 7-carboxy-7-deazaguanine synthase OS=Oceanobacillus oncorhynchi OX=545501 GN=qu eE PE=3 SV=1
MRKIPVLEIFGPTIQGEGMVVGRKTMFVRTAGCDYRCAWCDSAFTWDGSAKEDIVQMTSEDIWQRLQEVGGSCFDHVTISGGNPALLSAIDNLIDLLQEKSIEVALETQGSRYQNWFVKIDDLTISPKPPSSKMKTNWETLDDIIHQLEINDRLAHASLKVVIFDKEDLRYAEKVHQRYPKLAFFLQVGNDDLEEIEPQQLSRHLLNKYEWLIDQVVASTVLNRVRVLPQVHALVWGNKRGV

SEQ ID NO: 32191 - protein, 241 aa, Oceanobacillus profundus
  misc_feature (1)..(241): tr|A0A417YLR6|A0A417YLR6_9BACI 7-carboxy-7-deazaguanine synthase OS=Oceanobacillus profundus OX=372463 GN=queE PE=3 SV=1
MRKIPVLEIFGPTIQGEGMVIGQKTMFVRTAGCDYSCSWCDSKFTWDGSEKESIQMMEPQKIVDALFEKGDGRFQHVTISGGNPGLLAQLNTLVDLLHENKVKVALETQGSRWQKWFTKIDDLTISPKPPSSGMTTNFETLDFIIRSLEEKQQGNFSLKVVIFEKGDLQYAINIHKRYPDVELFLQVGNDDLETVEQDKLLPYLLEKYERLVDLVMNNSELNDVRVLPQLHTYLWGNKRGV

SEQ ID NO: 32192 - protein, 242 aa, Oceanobacillus sojae
  misc_feature (1)..(242): tr|A0A511ZJB1|A0A511ZJB1_9BACI 7-carboxy-7-deazaguanine synthase OS=Oceanobacillus sojae OX=582851 GN=queE PE= 3 SV=1
MRKIPVLEIFGPTIQGEGMVVGRKTMFVRTAGCDYRCAWCDSSFTWDGSAKEDIVQMTSEEIWQRLKEIGGNQFDHVTISGGNPALLSAIDNLIDLLQKNNIEVALETQGSSYQDWFVRIDDLTISPKPPSSNMKTNWEKLDDIIHQLKANERLKHTSLKVVIFDKEDLHYAEKVHQRYPELAFFMQVGNDDLEEAEPQQLSRHLLNKYEWLINEVVASTVLNRVRVLPQVHALVWGNKRGV

SEQ ID NO: 32193 - protein, 240 aa, Oceanobacillus sp.
  misc_feature (1)..(240): tr|A0A1E5K2G6|A0A1E5K2G6_9BACI 7-carboxy-7-deazaguanine synthase OS=Oceanobacillus sp. E9 OX=1742575 GN=queE P E=3 SV=1
MKIPVLEIFGPTIQGEGMVIGRKTMFVRTAGCDYSCSWCDSKFTWDGSEKDSIQMLEPAEIFDSLKEVGGNKFGHVTISGGNPGLLKQIDSLVDLLHQHQIEVALETQGSRWQNWFTKIDDLTLSPKPPSSGMKTNFTTLDYIIERLHKEQDGHFSLKVVIFDEEDLAYAEQIHERYPSVTLFLQVGNDNLEANENESLLSDLLEKYEKLIDRVMENKLLKDVRVLPQLHTYLWGNKRGV

SEQ ID NO: 32194 - protein, 241 aa, Oceanobacillus sp.
  misc_feature (1)..(241): tr|A0A498DB95|A0A498DB95_9BACI 7-carboxy-7-deazaguanine synthase OS=Oceanobacillus sp. YLB-02 OX=2448030 GN=qu eE PE=3 SV=1
MRKIPVLEIFGPTIQGEGMVIGQKTMFVRTAGCDYSCSWCDSKFTWDGSEKESIQMMEPQKIVDALFEKGGGRFQHVTISGGNPGLLVQLNALVDLLHENQVKVALETQGSRWQQWFTKIDDLTISPKPPSSGMTTNFETLDFIISSLKEEQQGDFSLKVVIFGEEDMQYAINIHKRYPDVKLFLQVGNDDLETGEQEKLLPYLLKKYERLVDLVMNNAELNDVRVLPQLHTYIWGNKRGV

SEQ ID NO: 32195 - protein, 234 aa, Oceanobacter sp.
  misc_feature (1)..(234): tr|A0A2G2JQD4|A0A2G2JQD4_9GAMM 7-carboxy-7-deazaguanine synthase OS=Oceanobacter sp. OX=2030817 GN=queE PE=3 S V=1
MTTSTYRIKEIFYTLQGEGAHAGRPAVFCRFSKCNLWNGREDGRAAAVCTFCDTDFIGTDGNLGGTYSLEELIETIGKQWPGKTIGDSVQGQPYVVCTGGEPALQLDTALVDALHHAGFEVAIETNGTLPLPANIDWVCLSPKADAELVVIECDELKLVYPQPTAMPERFDYIEADHFYLQPMADYEPVVLASDKLSGAREGLSLTNTQKALQYCMKHPKWKLSLQTHKMIGIE

SEQ ID NO: 32196 - protein, 229 aa, Oceanococcus atlanticus
  misc_feature (1)..(229): tr|A0A1Y1SCA1|A0A1Y1SCA1_9GAMM 7-carboxy-7-deazaguanine synthase OS=Oceanococcus atlanticus OX=1317117 GN=queE PE=3 SV=1
MGDALTSAQTQVRAPTAARLKITEVFRSLQGEALQVGLPTTFVRLTGCPLRCRYCDSAYAFHGGQWRELEDLLSDPLVQGTRHICVTGGEPLAQKTCIPFLRALCDAGHAVSLETSGALDISPVDARVSRVVDIKTPDSGEVRRNLWDNLDGLRAHDQVKLVICSRADFDWAVTIIDQYRLLERCAVLVSPSFGQVDPSALAQWVLDSGLELRFQLQLHKLLWGDEPGH

SEQ ID NO: 32197 - protein, 225 aa, Oceanococcus sp.
  misc_feature (1)..(225): tr|A0A520SLW6|A0A520SLW6_9GAMM 7-carboxy-7-deazaguanine synthase OS=Oceanococcus sp. OX=1958892 GN=queE PE=3 S V=1
MTSAQTQVRAPTAARLKITEVFRSLQGEALQVGLPTTFVRLTGCPLRCRYCDSAYAFHGGQWRELEDLLSDPLVQGTRHICVTGGEPLAQKTCIPFLRALCDAGHAVSLETSGALDISPVDARVSRVVDIKTPDSGEVRRNLWDNLDGLRAHDQVKLVICSRADFDWAVTIIDQYRLLERCAVLVSPSFGQVDPSALAQWVLDSGLELRFQLQLHKLLWGDEPGH

SEQ ID NO: 32198 - protein, 216 aa, Oceanospirillaceae bacterium
  misc_feature (1)..(216): tr|A0A3D2EWC6|A0A3D2EWC6_9GAMM 7-carboxy-7-deazaguanine synthase OS=Oceanospirillaceae bacterium OX=1899355 GN =queE PE=3 SV=1
MYSVKEIFYTLQGEGRHAGRPAVFCRFAGCNLWTGSEARRASSLCNFCDTDFVGVDGHCGGRYNTAAELVEVIEQQWPEGMPGHPLVVLTGGEPMLQLDEALINALHDEGFEIALETNGTIPVPESVDWICVSPKGEAKLLQTSGQELKLVYPQHQAMPEQFSHLDFDHFYLQPMDTSYIATSSDDGDYVQQAIEYCLLHPQWHLSLQTHKITGIL

SEQ ID NO: 32199 - protein, 234 aa, Oceanospirillaceae bacterium
  misc_feature (1)..(234): tr|A0A2E2G5F2|A0A2E2G5F2_9GAMM 7-carboxy-7-deazaguanine synthase OS=Oceanospirillaceae bacterium OX=1899355 GN =queE PE=3 SV=1
MAKNTYRVKEVFYTLQGEGAQAGRPAVFCRFSKCNLWNGREDSRTAAVCKFCDTDFIGTDGHLGGEYSASELVTIIASQWPGETSGNSVQGKPYVVCTGGEPALQLDSALVDELHKAGFEVAIETNGTLPLPDGIDWICLSPKGDSELAVINCDELKLVYPQADAPPERFDYIVAEHCYLQPMADFEPVVIASDKLEGAKEGLSVSNTRKAVDYCMKHPKWKLSLQTHKLLGIE

SEQ ID NO: 32200 - protein, 228 aa, Oceanospirillales bacterium
  misc_feature (1)..(228): tr|A0A357LVG7|A0A357LVG7_9GAMM 7-carboxy-7-deazaguanine synthase OS=Oceanospirillales bacterium OX=1914300 GN= queE PE=3 SV=1
MAASYRVKEIFYTLQGEGAQAGRPAVFCRFSKCNLWNGREDGRENAVCQFCDTDFIGTDGHLGGVYTASDLVNIISTQWPDLSQGTPYVVCTGGEPALQLDDELVTTLHKAGFEIAIETNGTLPLPDGIDWICLSPKAGAEVVIDRCDELKLVFPQPLAMPERFTGFNATHYYLQPMADYAPVVIASDKLSGAKQSLSATTTRKTLDYCLQHPQWKLSIQTHKLLEIE

SEQ ID NO: 32201 - protein, 232 aa, Oceanospirillales bacterium
  misc_feature (1)..(232): tr|A0A3D3E822|A0A3D3E822_9GAMM 7-carboxy-7-deazaguanine synthase OS=Oceanospirillales bacterium OX=1914300 GN= queE PE=3 SV=1
MTKTYRVKEIFYTLQGEGAQAGRPSVFCRFSKCNLWNGKEESRSQSVCDFCDTDFIGTDGENGGVYSAQELVQLISSLWPGNPSPQTKDKNQGTPYIVCTGGEPLLQLDEPLIEVMHHYGFEVAVETNGTLPAPEGLDWICLSPKADAELSLIECDELKLVYPQPLAMPEFFEHVQATHRYLQPMADASLDYIVSDAHEGLSQSNTQKATNYCLKHPKWKLSLQTHKMLGIE

SEQ ID NO: 32202 - protein, 113 aa, Oceanospirillum linum
  misc_feature (1)..(113): tr|A0A1T1H7J3|A0A1T1H7J3_OCELI 7-carboxy-7-deazaguanine synthase QueE (Fragment) OS=Oceanospirillum linum OX=9 66 GN=BTA35_0216480 PE=4 SV=1
MSNSTLRITEIFYSLQGETRTVGLPTVFIRLTGCPMRCVYCDTSYAFSGGETVSIDSIMSQTEQYKARYVTVTGGEPLAQKNCAKLLTRLCDAGYQVSVETGGAIDIASVDPR

SEQ ID NO: 32203 - protein, 216 aa, Oceanospirillum multiglobuliferum
  misc_feature (1)..(216): tr|A0A1T4RQ70|A0A1T4RQ70_9GAMM 7-carboxy-7-deazaguanine synthase OS=Oceanospirillum multiglobuliferum OX=64969 GN=queE PE=3 SV=1
MSNSTLRITEIFYSLQGETRTVGLPTVFIRLTGCPMRCVYCDTSYAFSGGETVSIDSIMSQTEQYKARYVTVTGGEPLAQKNCAKLLTRLCDAGYQVSVETGGAIDIASVDPRACVVLDIKTPASGELGKNLWSNIALLKKDDQVKFVICNRSDYEWVRFKINELDLNSRVSEILFSPSHHELSAKTLAEWIIEDRLQVRLQVQLHKILWNDEPGH

SEQ ID NO: 32204 - protein, 227 aa, Oceanospirillum sp.
  misc_feature (1)..(227): tr|A0A2D5G9I5|A0A2D5G9I5_9GAMM 7-carboxy-7-deazaguanine synthase OS=Oceanospirillum sp. OX=2021254 GN=queE PE= 3 SV=1
MRRLFFYRCVVMSESTLRITEIFCSLQGETRTVGLPTVFIRLTGCPMRCVYCDTSYSFYGGETVKIDDIMAQTAGYGAKHVTVTGGEPLAQKRCFELLTRLCDEGYEVSVETGGAMDISCADPRACMVLDIKTPASGELAKNRWENIEYLKANDQVKFVICDRQDYEWSRMKIEELALHDRVDEILFSPIHGQLDARELAEWILRDKLQVRFQLQLHKILWDDAQGR

SEQ ID NO: 32205 - protein, 246 aa, Ochrobactrum anthropi
  misc_feature (1)..(246): tr|A6WXM5|A6WXM5_OCHA4 7-carboxy-7-deazaguanine synthas e OS=Ochrobactrum anthropi (strain ATCC 49188 / DSM 688 2 / JCM 21032 / NBRC 15819 / NCTC 12168) OX=439375 GN=q ueE PE=3 SV=1
MGRVQTVTQIRIAEIFGPTLQGEGVLIGEPTVFVRTGGCDYRCVWCDSLHAVESRFRREWKAMSVEAVWGEVTTLSRNKPLTVSLSGGNPAIQPLGPLIEHGKTEGYRFALETQGSVAQDWFSALDTLVLSPKPPSSGMDADFDALAVCVEAAGRTPRTVLKFVIFDDADYVFAKDVASQYSGLPVYLQPGNHTPPPPEAHDAAIDIDGIMRRMEWLVEKVIADGWYEAHVLPQLHVLIWGNRRGV

SEQ ID NO: 32206 - protein, 246 aa, Ochrobactrum anthropi; identical to SEQ ID NO: 32205
  misc_feature (1)..(246): tr|A0A3R8YA72|A0A3R8YA72_OCHAN 7-carboxy-7-deazaguanine synthase OS=Ochrobactrum anthropi OX=529 GN=queE PE=3 SV=1

SEQ ID NO: 32207 - protein, 246 aa, Ochrobactrum cytisi
  misc_feature (1)..(246): tr|A0A1J6HWD4|A0A1J6HWD4_9RHIZ 7-carboxy-7-deazaguanine synthase OS=Ochrobactrum cytisi OX=407152 GN=queE PE=3 SV=1
MGRVQTVTQIRIAEIFGPTIQGEGVLIGEPTVFVRTGGCDYRCVWCDSLHAVESRFRHEWKAMSVEAIWGEVTTLSRNKPLTVSLSGGNPAIHPLGPLIEHGKTEGYRFALETQGSVAQDWFSALDTLVLSPKPPSSGMSSDFDALAACIEAAGIGPRTVLKFVIFDDADYAFAKDVASQYSGLPVYLQPGNHTPPPPEAHDAAIDIDGIMRRMEWLVEKVIADGWYEAHVLPQLHVLIWGNKRGV

SEQ ID NO: 32208 - protein, 243 aa, Ochrobactrum gallinifaecis
  misc_feature (1)..(243): tr|A0A502BJV7|A0A502BJV7_9RHIZ 7-carboxy-7-deazaguanine synthase OS=Ochrobactrum gallinifaecis OX=215590 GN=qu eE PE=3 SV=1
MKAGPEIRISEIFGPTIQGEGVLSGEPTVFVRTGGCDYRCAWCDSLHAVESRFRHDWKPMSIDAIWQEVTTLSGKKPITVSLSGGNPAIQPLGPLIDHGHAQNYRFALETQGSVAKDWFAKLDTLVLSPKPPSSGMQTDWNALASCIDAAGPKPKTVLKFVVFDDADYAFAKATSALHPHLPIYLQPGNHTPPPPEDDDARIDMDGIMNRMEWLIDKVMADRWFEARVLPQLHVLIWGNKRGV

SEQ ID NO: 32209 - protein, 243 aa, Ochrobactrum grignonense
  misc_feature (1)..(243): tr|A0A256FAS4|A0A256FAS4_9RHIZ 7-carboxy-7-deazaguanine synthase OS=Ochrobactrum grignonense OX=94627 GN=queE PE=3 SV=1
MKASPEIRISEIFGPTIQGEGVLSGEPTVFIRTGGCDYRCAWCDSLHAVESRFRHDWKPMSVEAIWHEVTALSGKKPITVSLSGGNPAIQPLGPLIDHGHAQDYRFALETQGSVAKDWFAKLDTLVLSPKPPSSGMETDWGALAASIDAAGSKPRTVLKFVVFDDADYAFAKAASARHPHLAVYLQPGNHTPPPPEDNDARIDMGGIMRRMEWLIDKVMADRWFEAHVLPQLHVLIWGNKRGV

SEQ ID NO: 32210 - protein, 200 aa, Ochrobactrum haematophilum
  misc_feature (1)..(200): tr|A0A2P9HQW3|A0A2P9HQW3_9RHIZ 7-carboxy-7-deazaguanine synthase OS=Ochrobactrum haematophilum OX=419474 GN=qu eE PE=3 SV=1
MKPVSEIRISEIFGPTIQGEGVLIGEPTVFVRTGGCDYRCAWCDSLHAVESRFRHEWKSMGVEAIWHEVTALSENRPLTVSLSGGNPAIQPLGPLIAHGKKEAYRFALETQGSVAKDWFSALDTLVLSPKPPSSAMAFDPDALAACVEAAGPKPRTVLKFVIFDDADYASQNTSRRFIRICRSISSPAITRRHRQKRTMH

SEQ ID NO: 32211 - protein, 243 aa, Ochrobactrum haematophilum
  misc_feature (1)..(243): tr|A0A397L6Y5|A0A397L6Y5_9RHIZ 7-carboxy-7-deazaguanine synthase OS=Ochrobactrum haematophilum OX=419474 GN=qu eE PE=3 SV=1
MKPAPEIRISEIFGPTIQGEGVLIGEPTVFVRTGGCDYRCVWCDSLHAVESRFRHEWKPMGVEAIWREVTELSGKKPLTVSLSGGNPAIQPLAPLIERGKADGYRFALETQGSVARDWFSMLDTLVLSPKPPSSKMAFDPDALAACIAAAGPNPRTVLKFVIFDEADYAFAKDVSARHPHLPVYLQPGNHTPPPPEADDASIDIDGIMRRMEWLVDKVIADRWFAAHVLPQLHVLIWGNRRGV

SEQ ID NO: 32212 - protein, 248 aa, Ochrobactrum intermedium
  misc_feature (1)..(248): tr|U4VJQ5|U4VJQ5_9RHIZ 7-carboxy-7-deazaguanine synthas e OS=Ochrobactrum intermedium 229E OX=1337887 GN=queE P E=3 SV=1
MGRVPTVTRIRIAEIFGPTIQGEGVLIGEPTVFVRTGGCDYRCAWCDSLHAVESRFRHEWKTMSVEAIWDEVTALSRNKPLTVSLSGGNPAIQPLGPLIEHGRKHGYRFALETQGSVVQGWFSALDTLVLSPKPPSSAMDTDFDALAACIEAAGNTPRTVLKFVIFDDADYAFAKEVANRHPHLPVYLQPGNHTPPPPEANDAAIDIDGIMRRMEWLVEKVIADGWYEAHVLPQLHVLIWGGNKRGGV

SEQ ID NO: 32213 - protein, 246 aa, Ochrobactrum intermedium
  misc_feature (1)..(246): tr|C4WJA3|C4WJA3_9RHIZ 7-carboxy-7-deazaguanine synthas e OS=Ochrobactrum intermedium LMG 3301 OX=641118 GN=que E PE=3 SV=1
MGRVPTVTRIRIAEIFGPTIQGEGVLIGEPTVFVRTGGCDYRCAWCDSLHAVESRFRHEWKTMSVEAIWDEVTALSRNKPLTVSLSGGNPAIQPLGPLIEHGRKHGYRFALETQGSVVQGWFSALDTLVLSPKPPSSAMDTDFDALAACIEAAGNTPRTVLKFVIFDDADYAFAKEVANRHPHLPVYLQPGNHTPPPPEANDAAIDIDGIMRRMEWLVEKVIADGWYEAHVLPQLHVLIWGNKRGV

SEQ ID NO: 32214 - protein, 240 aa, Ochrobactrum lupini
  misc_feature (1)..(240): tr|A0A256GR36|A0A256GR36_9RHIZ 7-carboxy-7-deazaguanine synthase OS=Ochrobactrum lupini OX=255457 GN=queE PE=3 SV=1
MTQIRIAEIFGPTIQGEGVLIGEPTVFVRTGGCDYRCVWCDSLHAVESRFRREWKAMSVEAVWDQVTTLSRNKPLKVSLSGGNPAIQPLGPLIEHGKTDGYRFALETQGSVAQDWFSALDTLVLSPKPPSSGMDADFDALAVCVEAAGRTPRTVLKFVIFDDADYAFAKDVASQYSSLPVYLQPGNHTPPPPEAHDAAIDIDGIMRRMEWLVEKVIADGWYEAHVLPQLHVLIWGNRRGV

SEQ ID NO: 32215 - protein, 246 aa, Ochrobactrum oryzae
  misc_feature (1)..(246): tr|A0A2S7J1E9|A0A2S7J1E9_9RHIZ 7-carboxy-7-deazaguanine synthase OS=Ochrobactrum oryzae OX=335286 GN=queE PE=3 SV=1
MGRVQTVTQIRIAEIFGPTIQGEGVLIGEPTVFVRTGGCDYRCIWCDSLHAVESRFRHEWKAMSVEAIWDEVTALSRNKPITVSLSGGNPAIQPLGPLIEHGKAEGYRFALETQGSVAQGWFSALDTLVVSPKPPSSGMSTDFDLLAACVEAAGTAPRTVLKFVIFDDEDYAFTKAVASRHPQLPVYLQPGNHTPPPPEAHDAAIDMDGIMRRMEWLADKVIADGWYEAHVLPQLHVLIWGNRRGV

SEQ ID NO: 32216 - protein, 253 aa, Ochrobactrum pecoris
  misc_feature (1)..(253): tr|A0A5C5CNF5|A0A5C5CNF5_9RHIZ 7-carboxy-7-deazaguanine synthase OS=Ochrobactrum pecoris OX=867683 GN=queE PE= 3 SV=1
MGRVQTVTSEQKPPRDIRIAEIFGPTIQGEGVLIGEPTVFVRTGGCDYRCAWCDSLHAVESRFRHEWKAMSVEAIWDEVTALSRNKPLMVSLSGGNPAIQPLGPLIERGKAEGYRFALETQGSVAQDWFSAIDTLVLSPKPPSSAMNTDFDALAACVETVGKAPRTVLKFVIFDDADYAFAKEVARQYPRLPVYLQPGNHTPPPPEAHDAAIDIDGIMRRMEWLVEKVIGDGWYGAHVLPQLHVLIWGNRRGV

SEQ ID NO: 32217 - protein, 253 aa, Ochrobactrum pseudogrignonense
  misc_feature (1)..(253): tr|A0A1A9FQW2|A0A1A9FQW2_9RHIZ 7-carboxy-7-deazaguanine synthase OS=Ochrobactrum pseudogrignonense OX=419475 G N=queE PE=3 SV=1
MGRVSPREPVMKTSSEIRISEIFGPTIQGEGVLSGEPTVFVRTGGCDYRCAWCDSLHAVESRFRHDWKPMSVDAIWHEVTILSGKKPITVSLSGGNPAIQPLGPLIDHGHTQGYRFALETQGSVAKDWFSRLDTLVLSPKPPSSGMDTDWNALAASIDAAGPAPKTVLKFVVFDDADYAFAKAASARHPHLAVYLQPGNHTPPPPEDDDARIDMDGIMSRMEWLIDKVMADRWFEAHVLPQLHVLIWGNKRGV

SEQ ID NO: 32218 - protein, 243 aa, Ochrobactrum pseudogrignonense
  misc_feature (1)..(243): tr|A0A256GM93|A0A256GM93_9RHIZ 7-carboxy-7-deazaguanine synthase OS=Ochrobactrum pseudogrignonense OX=419475 G N=queE PE=3 SV=1
MKTSSEIRISEIFGPTIQGEGVLSGEPTVFVRTGGCDYRCAWCDSLHAVESRFRHDWKPMSVDAIWHEVTILSGKKPITVSLSGGNPAIQPLGPLIDHGHTQGYRFALETQGSVAKDWFSRLDTLVLSPKPPSSGMDTDWNALAASIDAAGPAPKTVLKFVVFDDADYAFARAASARHPHLAVYLQPGNHTPPPPEDDDARIDMDGIMSRMEWLIDKVMADRWFEAHVLPQLHVLIWGNKRGV

SEQ ID NO: 32219 - protein, 243 aa, Ochrobactrum quorumnocens
  misc_feature (1)..(243): tr|A0A248UKU9|A0A248UKU9_9RHIZ 7-carboxy-7-deazaguanine synthase OS=Ochrobactrum quorumnocens OX=271865 GN=que E PE=3 SV=1
MKTDTEIRISEIFGPTIQGEGLLSGEPTVFVRTGGCDYRCVWCDSLHAVESRFRHDWKPMSVDAIWHEVTILSGKKPITVSLSGGNPAIQPLGPLIDHGHTQGYRFALETQGSVAKDWFSRLDTLVLSPKPPSSGMETDWDALAASIDAAGSKPTTVLKFVIFDDADYAFAKAASARHPHLAVYLQPGNHTPPPPEDDDARIDMDGIMRRMEWLIDKVMQDRWFEAHVLPQLHVLIWGNKRGV

SEQ ID NO: 32220 - protein, 243 aa, Ochrobactrum rhizosphaerae
  misc_feature (1)..(243): tr|A0A256F3J5|A0A256F3J5_9RHIZ 7-carboxy-7-deazaguanine synthase OS=Ochrobactrum rhizosphaerae OX=571254 GN=qu eE PE=3 SV=1
MKEASEIRISEIFGPTIQGEGVLSGEPTVFVRTGGCDYRCVWCDSLHAVESRFRQEWKPMDVEAIWHEVTALSGKRPITVSLSGGNPAIQPLGPLIDHGQSEGYRFALETQGSVTKDWFAKLDTLVLSPKPPSSGMETDWGALAASIQAAGSKPKTVLKFVVFDDADYAFAKDVSARHPHLAIYLQPGNHTPPPPEDDDARIDMDGIMRRMEWLIDKVMQDRWFEAHVLPQLHVLIWGNKRGV

SEQ ID NO: 32221 - protein, 241 aa, Ochrobactrum sp.
  misc_feature (1)..(241): tr|A0A4R7WRG5|A0A4R7WRG5_9RHIZ 7-carboxy-7-deazaguanine synthase OS=Ochrobactrum sp. LP_5_YM OX=2485134 GN=que E PE=3 SV=1
MNTEIRISEIFGPTIQGEGVLSGEPTIFVRTGGCDYRCAWCDSLHAVESRFRHDWKVMSVDAIWHEVTALSGKNPITVSLSGGNPAIQPLGPLIDHGHAQGYRFALETQGSVPKDWFAKLDTLVLSPKPPSSCMETDWDALAASIDAAGSKPKTVLKFVIFDDADYAFAKAASACHPHLAVYLQPGNHTPPPPEDDDARIDMDGIMRRMEWLIDKVMRDRWFEAHVLPQLHVLIWGNKRGV

SEQ ID NO: 32222 - protein, 243 aa, Ochrobactrum sp.
  misc_feature (1)..(243): tr|A0A5C5CIB4|A0A5C5CIB4_9RHIZ 7-carboxy-7-deazaguanine synthase OS=Ochrobactrum sp. LCB8 OX=2479765 GN=queE P E=3 SV=1
MKPVSEIRISEIFGPTIQGEGVLIGEPTVFVRTGGCDYRCAWCDSLHAVESRFRHEWKPMGVEAIWHEVTALSGNRPLTVSLSGGNPAIQPLGPLIAHGKKEAYRFALETQGSVAKDWFSGLDTLVLSPKPPSSAMAFDPDALAACVEAAGPKPRTVLKFVIFDDADYAFAKHVSALYPHLPVYLQPGNHTPPPPETDDALIDIDGIMRRMEWLVEKVIADRWFEAHVLPQLHVLIWGNKRGV

SEQ ID NO: 32223 - protein, 243 aa, Ochrobactrum thiophenivorans
  misc_feature (1)..(243): tr|A0A256G0N2|A0A256G0N2_9RHIZ 7-carboxy-7-deazaguanine synthase OS=Ochrobactrum thiophenivorans OX=571255 GN= queE PE=3 SV=1
MTTDPEIRISEIFGPTIQGEGVLSGEPTVFVRTGGCDYRCAWCDSLHAVESRFRHEWQPMSVDAIWREVTTLSGKKPITVSLSGGNPAIQPLAPLIDHGHAQGYRFALETQGSVAKDWFSKLDTLVLSPKPPSSGMETDWAALAASINAAGSKPKTVLKFVVFDDADYAFAKGASARHPHLPVYLQPGNHTPPPPEDDDARIDMDGIMHRMEWLIDKVMADRWFEAHVLPQLHVLIWGNKRGV

SEQ ID NO: 32224 - protein, 248 aa, Unknown
  misc_feature (1)..(248): tr|A0A2A4Z1W3|A0A2A4Z1W3_9PROT 7-carboxy-7-deazaguanine synthase OS=OCS116 cluster bacterium OX=2030921 GN=que E PE=3 SV=1
MNELLRPELEIAKSKTLRVVEIFGPTIQGEGAYIGRPTVFVRFGGCDYRCLWCDTMHAVGKQYVHEWAKMTAVEILTKIDELTGGAPILITISGGNPAIQQLEEFLVLGKAKGHTFSMETQGSVSKDWFGLLDQLTLSPKPPSSGEATDWTKLDKCIAVADKVETSLKVVVFDRADYAYARDVAKRYPNLPLFLSIGNDDTDPNAPVDKEALHAKMRELIDWVNADSWYNVTILPQLHVLLWGNQLGV

SEQ ID NO: 32225 - protein, 271 aa, Odoribacter laneus
  misc_feature (1)..(271): tr|R5VBJ4|R5VBJ4_9BACT 7-carboxy-7-deazaguanine synthas e OS=Odoribacter laneus CAG:561 OX=1263089 GN=queE PE=3 SV=1
MLHLAKDGIFPIIKDAAGHPLSSLPASGFPFAGTIQGEGKLCGMPSLFVRVAGCNLHCHWSTSEGKLTECDTAYAAYRLQNTFSLETEEICRLIRANTENLDHIVITGGEPFLQAEALTNLCKALKQSRKYHLTIETNATLYDKDLVEQIDFFSLSPKLSSSQSPAFSGKQKSGVPLNPLCIQQFIDHARSNGKDFQLKFVYTATKDIQEIKTLLSSLKKWHKSDILLMPLGTTPTEVQAHSRETLRHCLQNGWRYCDRLHLTLFGPKEGV

SEQ ID NO: 32226 - protein, 271 aa, Odoribacter laneus
  misc_feature (1)..(271): tr|H1DFE3|H1DFE3_9BACT 7-carboxy-7-deazaguanine synthas e OS=Odoribacter laneus YIT 12061 OX=742817 GN=queE PE= 3 SV=1
MLHLAKDGIFPIVKDAAGHPLSSLPASGFPFAGTIQGEGKLCGIPSLFVRVAGCNLHCHWSTSEGKLTECDTAYAAYRLQNTFSLETEEICRLIRANTENLDHIVITGGEPFLQADALTNLCKALKQSRKYHVSIETNATLYDKDLVEQIDFFSLSPKLSSSQSPAFSGKQKSGVPLNPLCIQQFIDHARSNGKDFQLKFVYTATKDIQEIKTLLSSLKKWHKSDILLMPLGTIPTEVQAHSRETLRHCLQNGWRYCDRLHLTLFGPKEGV

SEQ ID NO: 32227 - protein, 271 aa, Odoribacter sp.
  misc_feature (1)..(271): tr|A0A373UXF7|A0A373UXF7_9BACT 7-carboxy-7-deazaguanine synthase OS=Odoribacter sp. AF21-41 OX=2293111 GN=queE PE=3 SV=1
MLHLAKDGIFPITKDKDGKLLKEVPASGLHVAGTIQGEGKLNGIPSLFIRLAGCNLHCTWKTLAGNTCECDTAYAAFKVENSFSLPVEEIVRIISHNRGNIDHIVITGGEPFLQADKVRALCLQLKKESHFHITVETNATLYVEECAEMIDFFSLSPKLSGSVPPAPHADHHNKTRINIPAIQSFITHARKNKKDFQLKFVYSGENDVIEIQALLKQLDGWAKEDILLMPMGATPEELSLSIPKTLEHCIRNGWRFCDRLHISLFGNKQGV

SEQ ID NO: 32228 - protein, 267 aa, Odoribacter sp.
  misc_feature (1)..(267): tr|A0A1Q6IKT2|A0A1Q6IKT2_9BACT 7-carboxy-7-deazaguanine synthase OS=Odoribacter sp. 43_10 OX=1897010 GN=queE P E=3 SV=1
MRLAKDGIFPIVKDKDGHLLPDLPASGFQFAGTVQGEGKLCGIPSLFVRLAGCNLQCHWQTSDGLSSPCDSAYAAYQLKDTRQVSVEAIYTTLLQNAGPIRHIVLTGGEPLLQVKELKALCQKLKSDYRFHLTLETNATLFDPELARYIDLFSLSPKLSSSYTGASPLSIQRLNPECIQQYISSARQYQKDFQLKFVYACDEDIDEIQQLLSVLQAWKNDDILLMPLGGTPEIMRRNMRKTLEYCIRNGWRYCDRLHISLFGDKAGV

SEQ ID NO: 32229 - protein, 267 aa, Odoribacter splanchnicus; identical to SEQ ID NO: 32228
  misc_feature (1)..(267): tr|F9Z7X0|F9Z7X0_ODOSD 7-carboxy-7-deazaguanine synthas e OS=Odoribacter splanchnicus (strain ATCC 29572 / DSM 20712 / CIP 104287 / JCM 15291 / NCTC 10825 / 1651/6) O X=709991 GN=queE PE=3 SV=1

SEQ ID NO: 32230 - protein, 267 aa, Odoribacter splanchnicus
  misc_feature (1)..(267): tr|A0A412TYG0|A0A412TYG0_9BACT 7-carboxy-7-deazaguanine synthase OS=Odoribacter splanchnicus OX=28118 GN=queE PE=3 SV=1
MRLAKDGIFPIVKDKDGHLLPDLPASGFQFAGTVQGEGKLCGIPSLFVRLAGCNLQCHWQTSDGLSSPCDSAYAAYQLKDTRQVSVEAIYTTLLQNAGPIRHIVLTGGEPLLQVKELKALCQKLKSDNRFHLTLETNATLFDPELVRYIDLFSLSPKLSSSYTGASPLSIQRLNPECIQQYISSARQYQKDFQLKFVYACDEDIDEIQQLLSVLQAWKNDDILLMPLGGAPEIMRRNMRKTLEHCIRNNWRYCDRLHISLFGDKAGV

SEQ ID NO: 32231 - protein, 262 aa, Oerskovia enterophila
  misc_feature (1)..(262): tr|A0A163Q7G2|A0A163Q7G2_9CELL 7-carboxy-7-deazaguanine synthase OS=Oerskovia enterophila OX=43678 GN=queE PE= 4 SV=1
MTALASTPPGPSGRPAGSPTAGHRTGSHRSRTLAPLAVAGMTSLSTVDWPGRLVATVFLQGCPWHCTYCHAPDLAAVAPGDVTSPISWPDVVAFLERRREALDGVVFSGGEPTLQAALPAAIADVRNLGLAVGLHTAGPWPVRLEHVLPLVDWVGLDIKHLPEDYALVTGARPSGEAAYKSLAVLQRSGVDHEVRTTVDPTVHSRGDVLELCGRLAALGVRGHVLQEAHPLGTDARYAAALAGRRLSDVLHDDDLPQLERRT

SEQ ID NO: 32232 - protein, 208 aa, Ohtaekwangia koreensis
  misc_feature (1)..(208): tr|A0A1T5LTK0|A0A1T5LTK0_9BACT 7-carboxy-7-deazaguanine synthase OS=Ohtaekwangia koreensis OX=688867 GN=queE P E=3 SV=1
MPETINETLIQALPLMEDFYTIQGEGYYQGSAAYFLRLGGCDVGCVWCDVKESWDASAHPLVTVQEMASRVKKSGSPIAVITGGEPVMYNLTALTASIKSEGIRTHIETSGVYPLTGTWDWVCFSPKKFKNPDPSIFEKTDELKVIIYNKSDFGWAEDFASKVRSSCQLYLQPEWSKEKEMVPLIIDYVKANPQWQISLQVHKYMNIP

SEQ ID NO: 32233 - protein, 207 aa, Okeania hirsuta
  misc_feature (1)..(207): tr|A0A3N6PXB7|A0A3N6PXB7_9CYAN 7-carboxy-7-deazaguanine synthase OS=Okeania hirsuta OX=1458930 GN=queE PE=3 SV =1
MTEKLIIPIHETFQKTIQGEGYWTGTPVDFIRLAGCPVGCHYCDTGYANGGVDLPRQIRTFDELINELFSPRVVISGGEPFIHKQLPNLVNKIEATGRQVSIETSGCYWQEISHQTWITLSPKQHISSKYPVVKQMWMRASEIKLVIETGKELEFYSKILLANNNIPVFLQPEWYSRNLALPLVLELLQEYPNYRLSVQLHKYLGIQ

SEQ ID NO: 32234 - protein, 228 aa, Oleiagrimonas soli
  misc_feature (1)..(228): tr|A0A099CTP4|A0A099CTP4_9GAMM 7-carboxy-7-deazaguanine synthase OS=Oleiagrimonas soli OX=1543381 GN=queE PE=3 SV=1
MSEQVTGAARDSSSAAERLRVCEIFHSIQGEADAVGWPTVFVRLTGCPLRCVWCDTEYSFQGGEWHDIDDLVAQVGAFDTRHVCVTGGEPLAQKRCLRLLERLCDAGHEVSLETSGALDVSEVDPRVRKVMDLKAPGSGESARNLWSNLAHLQAHDQIKIVIADRADYEWACDVLREHALQQRCMVLFSPVHLKLTPRQLAEWILADRLPVRLQTQMHKQLWGETPGH

SEQ ID NO: 32235 - protein, 228 aa, Oleiagrimonas sp.
  misc_feature (1)..(228): tr|A0A328T5A4|A0A328T5A4_9GAMM 7-carboxy-7-deazaguanine synthase OS=Oleiagrimonas sp. MCCC 1A03011 OX=1926883 GN=queE PE=3 SV=1
MNKQATGTTGVSASGAERLRVCEIFHSIQGEADAVGWPTVFVRLTGCPLRCVWCDTEYSFQGGEWRDIDDLVADVGAFDTRHVCVTGGEPLAQKRCLLLLQRLCGAGHEVSLETSGALDVSGVDPRVRKVMDLKAPGSGEAARNLWSNLDHLQAHDQIKIVIADREDYEWARAAVREHALEQRCMVLFSPVHGKLAPRQLAEWILEDRLPVRLQMQMHKQLWGDAPGH

SEQ ID NO: 32236 - protein, 234 aa, Oleibacter marinus
  misc_feature (1)..(234): tr|A0A1N7LHZ9|A0A1N7LHZ9_9GAMM 7-carboxy-7-deazaguanine synthase OS=Oleibacter marinus OX=484498 GN=queE PE=3 SV=1
MAKNTYRVKEVFYTLQGEGAQAGRPAVFCRFSKCNLWNGREDSRTAAVCKFCDTDFIGTDGHLGGEYSASELVTIIASQWPGETSGNSVQGKPYVVCTGGEPALQLDSVLIDELHKAGFEVAIETNGTLPLPDGIDWVCLSPKGDSKLAVINCDELKLVYPQADALPERFDYIVAEHCYLQPMADFEPVVIASDKLEGAKEGLSVSNTRKAVDYCMKHPKWKLSLQTHKLLGIE

SEQ ID NO: 32237 - protein, 213 aa, Oleiphilus messinensis
  misc_feature (1)..(213): tr|A0A1Y0I1P4|A0A1Y0I1P4_9GAMM 7-carboxy-7-deazaguanine synthase OS=Oleiphilus messinensis OX=141451 GN=queE P E=3 SV=1
MFYSLQGEGARSGRAAVFCRFSKCNLWTGREQDRKAAVCNFCDTDIVGTDGQNGGIFTGALALVDAVTALWPDNAGGKPYVICTGGEPALQLDEELISCFHDSGFEVGIETNGTLPLPNGLDWICVSPKGSAQVVVEHCNELKLVYPQALAPPERFQNLSAENYFLSPMASPNVADSALDAFKQENTRKALEYCLVHPQWRLTLQMHKLLGID

SEQ ID NO: 32238 - protein, 232 aa, Oleispira antarctica
  misc_feature (1)..(232): tr|R4YTD1|R4YTD1_OLEAN 7-carboxy-7-deazaguanine synthas e OS=Oleispira antarctica RB-8 OX=698738 GN=queE PE=3 S V=1
MTKTYRVKEIFYTLQGEGAQAGRPSVFCRFSKCNLWNGKEESRAQSVCDFCDTDFVGTDGENGGIYSAKELVELIASLWPGKPSPKSRNKNQGSPYIVCTGGEPLLQLDEPLIEVMHDYGFEIAVETNGTLPAPEGLDWICLSPKADAELILIECDELKLVYPQPLALPESFNYVQATHRYLQPMADASLDYIVSDAHQGLSQSNTQKATHYCLKHPQWKLSLQTHKMLGIE

SEQ ID NO: 32239 - protein, 232 aa, Oleispira sp.
  misc_feature (1)..(232): tr|A0A2E3B8Q5|A0A2E3B8Q5_9GAMM 7-carboxy-7-deazaguanine synthase OS=Oleispira sp. OX=2024846 GN=queE PE=3 SV=1
  misc_feature (178)..(178): Xaa can be any naturally occurring amino acid
MTKTYRVKEIFYTLQGEGAQAGRPSVFCRFSKCNLWNGKEESRSQSVCDFCDTDFIGTDGENGGVYSAQELVQLISSLWPGNPSPQTKDKNQGTPYIVCTGGEPLLQLDEPLIEVMHHYGFEVAVETNGTLPAPEGLDWICLSPKADAELSLIECDELKLVYPQPLAMPEFFEHVQAXHRYLQPMADASLDYIVSDAHEGLSQSNTQKATNYCLKHPKWKLSLQTHKMLGIE

SEQ ID NO: 32240 - protein, 211 aa, Oleomonas sp.
  misc_feature (1)..(211): tr|A0A418WEZ5|A0A418WEZ5_9PROT 7-carboxy-7-deazaguanine synthase OS=Oleomonas sp. K1W22B-8 OX=2320859 GN=queE PE=3 SV=1
MGYAVKEIFKTLQGEGAQAGRAAVFCRFAGCNLWSGREADRADAVCTFCDTDFVGMDGDGGGRFETAQDLAAAIERAWADASHERRYIVFTGGEPLLQLDEALLEAVHARGFAAAVETNGTQEAPAGLDWVCVSPKAGAPLKLDQGDEMKLVYPQAGLDPAQVADLAFEHFWLQPMDGPDRLANTAAAVAYCLDHPRWRLSLQTHKLIGIP

SEQ ID NO: 32241 - protein, 230 aa, Oligella ureolytica
  misc_feature (1)..(230): tr|A0A378XCI9|A0A378XCI9_9BURK 7-carboxy-7-deazaguanine synthase OS=Oligella ureolytica OX=90244 GN=queE_2 PE= 3 SV=1
MVETVIIPIPSREPIQDPNPEFRIVEIFESLQGEGYNTCMPAIFIRLGRCDLACSWCDTDYQTYDSMTLTQILEKLQGYTAKNIIITGGEPAIHPRLTVLLDALKSRAYYLCIETNGLHQIPAQIDYIATSPKACYAERYQKKALSHADEVRIVADLNTMTERQFMDFAQVMAQKITAKHYYLSPLEIEGEMNIYQTIRLIGQLNAAGVEGPNTVHWQLSVQTHKWAGIE

SEQ ID NO: 32242 - protein, 243 aa, Oligella ureolytica
  misc_feature (1)..(243): tr|A0A378XAC4|A0A378XAC4_9BURK 7-carboxy-7-deazaguanine synthase OS=Oligella ureolytica OX=90244 GN=queE_1 PE= 3 SV=1
MVSEKQRVIRLSSETAGSAEEPQFRIAEIFESLQGEGYNTGMPAIFIRLGRCDLACSWCDTDYMRFNYVPLSQVLAMLQGYTARNIIITGGEPVVHPRLGSLLDALKERGYTLCIETNGLHQVPEQIDYIATSPKACYAERYVGGGLTEADEVRIVVDVSGVSADVGGELQPSDSEYSFEVTEKERQFMHFAQAMAQKISAKQYYLSPLEEEGEMNIHQTIRLIGLLNVTEQANKVRLLHKNG

SEQ ID NO: 32243 - protein, 210 aa, Oligotropha carboxidovorans
  misc_feature (1)..(210): tr|B6JI62|B6JI62_OLICO 7-carboxy-7-deazaguanine synthas e OS=Oligotropha carboxidovorans (strain ATCC 49405 / D SM 1227 / KCTC 32145 / OM5) OX=504832 GN=queE PE=3 SV=1
MSYAVKEIFLTLQGEGAHAGRTAVFCRFAGCNLWTGREQDRADATCRFCDTDFVGTDGTLGGRYATADALADQIAATWGEGTTHRFVVLTGGEPLLQIDVELIEALHARHFMIAVETNGTLPAPPGLDWICVSPKADTELAIRQGHELKLVYPQAENTPEDYAALAFAHFSLQPMDGPDLAQNTERAIDYCLRHPQWRLSVQTHKTIGIR

SEQ ID NO: 32244 - protein, 207 aa, Olivibacter sp.
  misc_feature (1)..(207): tr|A0A5C0ZJS6|A0A5C0ZJS6_9SPHI 7-carboxy-7-deazaguanine synthase OS=Olivibacter sp. LS-1 OX=2592345 GN=queE PE =3 SV=1
MSKQVPADGTLLPLMEEFYTIQGEGYHTGKAAYFIRLGGCDVGCHWCDVKESWDAELHPLTKADDIIRNAARYPAKTVVITGGEPLIYNLDYLTRGLQDAGIKTFIETSGAYPLSGHWDWVCLSPKKFKAPLPDVIEAAGELKVIVFNKSDFEWAERYAAQIPVGRKLYLQPEWSKAAQMTPLIIDYVKENPKWEISLQTHKYLNIP

SEQ ID NO: 32245 - protein, 209 aa, Olleya aquimaris
  misc_feature (1)..(209): tr|A0A327RD33|A0A327RD33_9FLAO 7-carboxy-7-deazaguanine synthase OS=Olleya aquimaris OX=639310 GN=queE PE=3 SV =1
MKQEIQDLVNKGLMLPLMEEFYTIQGEGYHKGTAAYFIRIGGCDVGCHWCDVKESWIADLHPPTKTETIVQNAKKYSDTVVVTGGEPLTWDMTELTSKLKAENCKTHIETSGAYELTGEWDWICLSPKKMKLPTQSVYEKANELKCIIYNKDDFKFAEAQAEKVNNDCILYLQPEWSKRDTMIPLIVDYVMANPKWKVSLQTHKYLNIP

SEQ ID NO: 32246 - protein, 209 aa, Olleya namhaensis
  misc_feature (1)..(209): tr|A0A1I3RKE1|A0A1I3RKE1_9FLAO 7-carboxy-7-deazaguanine synthase OS=Olleya namhaensis OX=1144750 GN=queE PE=3 SV=1
MKQEIQDLVNKGLMLPLMEEFYTIQGEGFHKGTAAYFIRIGGCDVGCHWCDVKESWNANLHPPTSTDVIVANAKKYSDTVVVTGGEPLTWDMTALTDKLKAEGCKIHIETSGAYELTGQWDWICLSPKKMKLPTQGVYDKAHELKCIIYNKDDFKFAEEQAAKVNSDCILYLQPEWSKRDTMIPMIVDYVMANPKWKVSLQTHKYLNIP

SEQ ID NO: 32247 - protein, 209 aa, Olleya sp.
  misc_feature (1)..(209): tr|A0A2K8X3A1|A0A2K8X3A1_9FLAO 7-carboxy-7-deazaguanine synthase OS=Olleya sp. Bg11-27 OX=2058135 GN=queE PE=3 SV=1
MKQEIQDLVNKGLMLPLMEEFYTIQGEGFHKGTAAYFIRIGGCDVGCHWCDVKESWNANLHPPTSTDVIVANAKKYSDTVVVTGGEPLTWDMTALTDKLKAEGCKIHIETSGAYELTGQWDWICLSPKKMKLPTQGVYDKAHELKCIIYNKDDFKFAEEQAAKVNGDCILYLQPEWSKRDTMIPMIVDYVMANPKWKVSLQTHKYLNIP

SEQ ID NO: 32248 - protein, 209 aa, Olleya sp.
  misc_feature (1)..(209): tr|A0A559RIS4|A0A559RIS4_9FLAO 7-carboxy-7-deazaguanine synthase OS=Olleya sp. Hel_I_94 OX=1250001 GN=queE PE= 3 SV=1
MKQETQDLVNKGLMLPLMEEFYTIQGEGFHKGTAAYFIRIGGCDVGCHWCDVKESWNADLHPPTSTDVIVANAKKYSDTVVVTGGEPLTWDMTALTDKLKAEGCKIHIETSGAYELTGQWDWICLSPKKMKLPTQGVYDKAHELKCIIYNKDDFKFAEAQAAKVNGDCILYLQPEWSKRDTMIPMIVDYVMANPKWKVSLQTHKYLNIP

SEQ ID NO: 32249 - protein, 213 aa, Unknown
  misc_feature (1)..(213): tr|A0A0R2TH21|A0A0R2TH21_9GAMM 7-carboxy-7-deazaguanine synthase OS=OM182 bacterium BACL3 MAG-120619-bin3 OX=1 655593 GN=queE PE=3 SV=1
MSVRLTEIFHSLQGEARTAGRPTVFVRLTGCPLRCTYCDTAYAFEGGKQHSLDSVLAQVAEHSADYVTVTGGEPLAQPAAIQLMQRLCDAGYQVSLETGGAMPIDDVDDRVSIVLDLKTPASGECDRNLLANVPLLRPKDQVKFVICDRGDYEWSKAQVHMHDLGSRVDDILFSPSYEELAPALLAQWVLEDRLKVRMQLQLHKQIWGDKKGV

SEQ ID NO: 32250 - protein, 173 aa, Unknown
  misc_feature (1)..(173): tr|A0A0R2S4R7|A0A0R2S4R7_9GAMM 7-carboxy-7-deazaguanine synthase (Fragment) OS=OM182 bacterium BACL3 MAG-12050 7-bin80 OX=1655577 GN=ABR69_00920 PE=3 SV=1
AYAFEGGKQHSLDSVLAQVAEHSADYVTVTGGEPLAQPAAIQLMQRLCDAGYQVSLETGGAMPIDDVDDRVSIVLDLKTPASGECDRNLLANVPLLRPKDQVKFVICDRGDYEWSKAQVHMHDLGSRVDDILFSPSYEELAPALLAQWVLEDRLKVRMQLQLHKQIWGDKKGV

SEQ ID NO: 32251 - protein, 227 aa, Omnitrophica bacterium
  misc_feature (1)..(227): tr|A0A1G1J3R4|A0A1G1J3R4_9BACT 7-carboxy-7-deazaguanine synthase OS=Omnitrophica bacterium RBG_13_46_9 OX=1801 818 GN=queE PE=3 SV=1
MREAKISEIFLSIQGEGIYFGIPQLFIRFYRCNLSCGFCDTDLDSYQIFTLDNLMGKIAEYKAPYHSLSLTGGEPLLQAYFIRDFLRAHKESHKKPVYLETNGILYRELSRVVDYVDIIAMDFKLPSSTGETDFWRKHEKFLRIANRKKVFIKAVITSATTSEDISRMRKVAYKIAKDIPIVLQPVTALSESERIPQEFLSRFRDILKESMERVEIIPQVHRMIGVR

SEQ ID NO: 32252 - protein, 247 aa, Omnitrophica bacterium
  misc_feature (1)..(247): tr|A0A1G1KSX5|A0A1G1KSX5_9BACT 7-carboxy-7-deazaguanine synthase OS=Omnitrophica bacterium RIFCSPLOWO2_12_FULL _44_17 OX=1801832 GN=queE PE=3 SV=1
MIDDVTAKPITKSVAEITEIFSSLQGEGLYVGERHLFVRFGGCNLTCQYCDEKGKTPKTMTSEEVLDYVKNVDLISGPHSYISLTGGEPLMSGAFLLKLCPELKSEGFKLYLETNGTLVEEMKNLMPFVDVISMDVKPASVTKGKSWLDEHERFLGAIYNYGKKRPDIFVKMVIDNTLVLKEFRDLCEMIGLVDANIPLILQPVSRFSEGYHDPDLMHFLTGLQTNALYVLKDVRIIPRLHKLLKIR

SEQ ID NO: 32253 - protein, 226 aa, Unknown
  misc_feature (1)..(226): tr|A0A1G1PVG0|A0A1G1PVG0_9BACT 7-carboxy-7-deazaguanine synthase OS=Omnitrophica WOR_2 bacterium RIFCSPLOWO2_1 2_FULL_51_8 OX=1801870 GN=queE PE=3 SV=1
MNGRISEIFDSVQGEGIYFGEKQLFVRFFGCNLSCRFCDTKLDRFTEYEPRELLEEIRLYKDKQDSFESISFTGGEPLLQAGFLQEVLKLTSGHGYKNYLETNGTLPGELSEVIDYLHTVAMDLKLPSSSGMPQLWPMHRRFLKTASRKDVFIKAVICGTTSEDDIRQAAELILEADRSAILVLQPNSFEKISALTERLGQFKDYCVGRGVITCVIPQLHKKIGLR

SEQ ID NO: 32254 - protein, 223 aa, Unknown
  misc_feature (1)..(223): tr|A0A0S8IGE5|A0A0S8IGE5_9BACT 7-carboxy-7-deazaguanine synthase OS=Omnitrophica WOR_2 bacterium SM23_72 OX=17 03777 GN=queE PE=3 SV=1
MKGRIFDVFESIQGEGLYLGEKQIFVRMHGCNLSCRYCDTHMDRFREYEPRELIEEIGLYGNDFHSISFTGGEPLLQKEFLKEVLKHTCLLGYKNYLETNATLSGELEDVIDYLDFLSIDLKLPTSTGMGCLWGLHRKFLKIASRKENFIKAVICSTTIEDDLRYAIDLIKDVSPQSILVLQPNSLDYNEHLQVMLQKFREVCTEAKVTACIIPQVHKIAGIK

SEQ ID NO: 32255 - protein, 231 aa, Opitutaceae bacterium
  misc_feature (1)..(231): tr|A0A178IHR1|A0A178IHR1_9BACT 7-carboxy-7-deazaguanine synthase OS=Opitutaceae bacterium TSB47 OX=1184151 GN= queE PE=3 SV=1
MLISEIFYSLQGEGELTGVPSVFVRTSGCNLRCNWCDTPYASWEPEGRAMETGEIMAEINRHAAARHVVLTGGEPLVAKDIRVLAAAVRATGRHITIETAATIAPDGIACDLASLSPKLRNSAPDTRLPESWRERHKAARWRPDVVRAWMAHCAYQFKFVVSAPADIEELEAMLREAGGDILPSKVLLMPEGTTMEALRARAGWVGEICKARGYRYAHRLHIELYGNKRGT

SEQ ID NO: 32256 - protein, 230 aa, Opitutaceae bacterium
  misc_feature (1)..(230): tr|A0A2T6DS22|A0A2T6DS22_9BACT 7-carboxy-7-deazaguanine synthase OS=Opitutaceae bacterium EW11 OX=2161865 GN=q ueE PE=3 SV=1
MLISEIFHSLQGEGELIGVPSVFVRTSGCNLRCNWCDTPYASWNPEGENRSLEDILAVVARYPAKHVVLTGGEPMIAKGIHELAEELRRRGYHITIETAGTIRPDGIACDLASVSPKLSNSTPDDRLPSAWKERHEATRFQPDVLRAWIDRGAYQLKFVVSSPADLDEIQRLIAALERQVPRDKILLMPEARTPERLREQAGWLSEQCKAGGFRYAHRLHLELYGNRRGT

SEQ ID NO: 32257 - protein, 232 aa, Opitutae bacterium
  misc_feature (1)..(232): tr|A0A2A2QNG9|A0A2A2QNG9_9BACT 7-carboxy-7-deazaguanine synthase OS=Opitutae bacterium Tous-C5TDCM OX=1982322 GN=queE PE=3 SV=1
MLISEIFYSLQGEGALSGVPSVFVRTSGCNLRCAWCDTPYASWNPEGTTMRVDNIVAAVQSHRTARHVVLTGGEPMIAKEIRELAAALKELGYHITIETAATVAPEAIACDLASMSPKLLNSAPQGTEHGVWRKKHEATRWQPTVVRAWLDAGCDYQFKFVVAAPSDVEELEGMLASLKRDIPRHKVQLMPEARTLEAMRERAGWLGEVCKARGYRYAHRLHIELYGNKRGT

SEQ ID NO: 32258 - protein, 231 aa, Opitutae bacterium
  misc_feature (1)..(231): tr|A0A2A2Q6S1|A0A2A2Q6S1_9BACT 7-carboxy-7-deazaguanine synthase OS=Opitutae bacterium Tous-C1TDCM OX=1982319 GN=queE PE=3 SV=1
MLIAEVFHSLQGEGELTGVPSVFIRTSGCNLRCAWCDTPYASWAPEGKLRLLPDLIAEVDAHPATRHVVLTGGEPMIAKDVRPLAAALRATGRHLTIETAATVAPDGIGCDLASLSPKLLNSAPDPVEHAAWRKKHEATRWQPDVVRAWIDAYPYQFKFVVARPEDIEELEHMLAALKREIPRHKVLLMPEATSLEKMRSRAAWLGDLCKARGYRYAHRLHIELYGNKRGT

SEQ ID NO: 32259 - protein, 229 aa, Opitutales bacterium
  misc_feature (1)..(229): tr|A0A424KCX6|A0A424KCX6_9BACT 7-carboxy-7-deazaguanine synthase OS=Opitutales bacterium TMED207 OX=1986795 GN =queE PE=3 SV=1
  misc_feature (46)..(46): Xaa can be any naturally occurring amino acid
  misc_feature (61)..(61): Xaa can be any naturally occurring amino acid
  misc_feature (139)..(139): Xaa can be any naturally occurring amino acid
  misc_feature (163)..(163): Xaa can be any naturally occurring amino acid
  misc_feature (178)..(178): Xaa can be any naturally occurring amino acid
MTKNGKLPIYEQFFTWQGEGIHQGRSAYFIRTFGCPVHCPWCDSAXTWHPDFIPKTIEKIXPKDLIENAQKNNASIVVVTGGEPTIHNLNELCALCSEANLPVHLETSGAFEIKGTFDWITLSPKEWKLPLQKNIQSAXEIKLIVDTTSAIQQWLERFPDITXVETVWLHPEWSKRNXANILDTITEWIKDHGDPFRAGYQIHKLFSADQKDVHSKPNVPLGGDRNLGF

SEQ ID NO: 32260 - protein, 223 aa, Opitutales bacterium
  misc_feature (1)..(223): tr|A0A2E7PZZ8|A0A2E7PZZ8_9BACT 7-carboxy-7-deazaguanine synthase OS=Opitutales bacterium OX=2026772 GN=queE PE =3 SV=1
MMGLPVYERFHSWQGEGTHLGKSAFFIRLHGCPVHCSWCDSAGTWHPDHRPESVENMDPQKLADEAFLSCPEIVVITGGEPAIHDLQDLAYQLRSRNLPVHLETCGAFPISGEIDWITISPKWAAPPIEETLEFADELKIIVENEHSIAKWSEKLSLPDFNLPVWLNPEWSKSKDPVVLESINQWVKERGAPFRAGFQAHKLFFADQGDERSRPDASLSHLQE

SEQ ID NO: 32261 - protein, 231 aa, Opitutus sp.
  misc_feature (1)..(231): tr|A0A2T6D7S7|A0A2T6D7S7_9BACT 7-carboxy-7-deazaguanine synthase OS=Opitutus sp. ER46 OX=2161864 GN=queE PE=3 SV=1
MLIAEIFHSLQGEGELTGVPSVFVRTSGCNLRCAWCDTPYASWNPEGKNLGVPQIIAAVEQYRTAHHVVLTGGEPMIAKDIRELATALKALGRHITIETAATVAPTGIACDLASLSPKLLNSAPDALEHTTWRRRHEATRWQPDVVRAWIDAYPYQFKFVVARPEDVEELEHMLAALQREIPPHKVLLMPEGTTLERIRTRAPWLAQLCKERGYRYAHRLHLELYGNKRGT

SEQ ID NO: 32262 - protein, 230 aa, Opitutus sp.
  misc_feature (1)..(230): tr|A0A1H1N978|A0A1H1N978_9BACT 7-carboxy-7-deazaguanine synthase OS=Opitutus sp. GAS368 OX=1882749 GN=queE PE= 3 SV=1
MLIAEIFHSLQGEGELTGVSSVFVRTSGCNLRCNWCDTPYASWSPEGVQMRVDEIVAEVTKRPARHVVLTGGEPMVAREIRELAAALKKLGYHITIETAATIAPDSIACDLASLSPKLRNSAPDERLSAAWRGKHEALRWQPEVVKAWLAGYGFQLKFVVAQVADVDEIEGMLAQLGRDIPRAKVLLMPEGTTVEALRAKAGWLGELCKVRGYRYAPRLHIELYGNKRGT

SEQ ID NO: 32263 - protein, 231 aa, Opitutus terrae
  misc_feature (1)..(231): tr|B1ZWM3|B1ZWM3_OPITP 7-carboxy-7-deazaguanine synthas e OS=Opitutus terrae (strain DSM 11246 / JCM 15787 / PB 90-1) OX=452637 GN=queE PE=3 SV=1
MLISEIFYSLQGEGLLTGVPSVFVRTSGCNLRCNWCDTPYASWNPEGKPWRIEQIVREVQSHPTARHVVLTGGEPMIAKEIAELAAQLKGLHYHITIETAATVAPEGIACDLASLSPKLLNSAPDARLGVAWRRKHEALRWQPAVVRAWVDAYPYQLKFVVARPEDVEEIETMLGALEREIPRHRVLLMPEGTTVEAIRTKSGWLGETCKARGFRYAHRLHLELYGNQRGT

SEQ ID NO: 32264 - protein, 245 aa, Orenia marismortui
  misc_feature (1)..(245): tr|A0A4R8H0Q0|A0A4R8H0Q0_9FIRM 7-carboxy-7-deazaguanine synthase OS=Orenia marismortui OX=46469 GN=queE PE=3 S V=1
MKKEDIKIPVVEIFKSISGEGVSAGEVVVFVRVAGCNLRCSYCDTKYSYNQNLEEYQYLTYEEIRERINKFNCNKVICTGGEPLESDQAKRYLPLYLAEQGFKVRIETNGSCQLYSEQELSEFEINSRDSDLNYTLDIKSPSSKMSDNNIFMDNFIKLESNDELKFVVGDNQDLEYALAVIEKHKNILAQRQVMINFSPIFEVIEVDEIVEFLKQESLFFTKNNLKVRLSLQIHKFIWPPEARGV

SEQ ID NO: 32265 - protein, 248 aa, Orenia metallireducens
  misc_feature (1)..(248): tr|A0A285GWQ3|A0A285GWQ3_9FIRM 7-carboxy-7-deazaguanine synthase OS=Orenia metallireducens OX=1413210 GN=queE PE=3 SV=1
MRIRELEEIKIPIVEIFNSISGEGISAGEVVTFLRVAGCNLRCGYCDTTYSYQGSDDEYQWLTFQEILERLSRYNCNKVICTGGEPLETTKVKRYLPLYLLKQGYEVRIESNGSCPIYSQEELREFAITEEINRLDYTLDIKVPSSKMSDHNIFAENFINLISGDELKFVVGNDKDLNYAKEVIDEYRDILAKGDVIINFSPVFETIKAETIVEFLKENNSYFVDNNLQTRLSLQLHKFIWDPEAKGV

SEQ ID NO: 32266 - protein, 248 aa, Orenia metallireducens
  misc_feature (1)..(248): tr|A0A1C0ACR2|A0A1C0ACR2_9FIRM 7-carboxy-7-deazaguanine synthase OS=Orenia metallireducens OX=1413210 GN=queE PE=3 SV=1
MKIREFEEVRIPVVEIFNSISGEGISAGEVVTFLRVAECNLRCSYCDTTYSYQLSDDNYDWLTPQEILERLSQYNCNKVICTGGEPLETTKAKRYLPLYLVKKGYKVRIESNGSCPVYSKKELREFEIEQVNDRLNYTLDIKPPSSKMSNHNIFAENFIKLTLGDELKFVVANDEDLNYAKKVIDKYKDILAKSNLIINFSPVFQAIEAESLVEFLKENNPYFINNNLKVRLSLQLHKFIWDPEAKGV

SEQ ID NO: 32267 - protein, 217 aa, Oribacterium sp.
  misc_feature (1)..(217): tr|A0A1I2PWC8|A0A1I2PWC8_9FIRM 7-carboxy-7-deazaguanine synthase OS=Oribacterium sp. WCC10 OX=1855343 GN=queE PE=3 SV=1
MKVVEKFVSINGESTRAGELAVFIRFKGCNLSCSYCDTMWANEKNCPYTEMSPEEILNYVRETGVTNVTLTGGEPLLQDQVSELIELLLDNGNRVEIETNGSIDLKPFITEKRPVFTMDYKLPGSRCEKSMLIENFSLLEEQDTVKFVSGSIEDLDKARSIIETYDLCRKCHTYISPVFGSIEPSEIVDYMIQHNMNEVRLQIQMHKVIWDPDKRGV

SEQ ID NO: 32268 - protein, 217 aa, Oribacterium sp.
  misc_feature (1)..(217): tr|A0A1S9BST3|A0A1S9BST3_9FIRM 7-carboxy-7-deazaguanine synthase OS=Oribacterium sp. C9 OX=1943579 GN=queE PE= 3 SV=1
MKVVEKFVSINGEGTRAGELAVFIRFKGCNLRCSYCDTMWANEGNCLYTEMSQEEILTYILETGVKNVTLTGGEPLLQKGAHELIQLLLENGLSVEIETNGSVDLRPFTGGRRPLFTMDYKLPGSNCEDGMLLENFELLDPQDTVKFVSGSIEDLERARCLIEKYGLTERCHVYISPVFGSIEPKDIVDYMIEHKMNDVRLQIQMHKVIWDPDKRGV

SEQ ID NO: 32269 - protein, 277 aa, Oricola cellulosilytica
  misc_feature (1)..(277): tr|A0A4R0PAY8|A0A4R0PAY8_9RHIZ 7-carboxy-7-deazaguanine synthase OS=Oricola cellulosilytica OX=1429082 GN=queE PE=3 SV=1
MPGAPPLWLVQGALARDDRCQGQRNAQDLGRISPMSEERTIKVCEIFGPTIQGEGALIGRPTVFVRTGGCDYRCSWCDSLHAVESRFRDDWRPMEPHEILESVRRLSGGKPLTVTLSGGNPAIQPFADLIRRGKADGYGFALETQGSVSQPWFSELETLVLSPKPPSSGMQCDVDAVRTCLRAAGEGPRSVLKFVVFDDADFRFARQTAALFPTLRVYLQPGNHTPPPPGEEDAAIDLDGINRRFEWLVGKVLSEGWFEAHVLPQLHVLIWGNRRGV

SEQ ID NO: 32270 - protein, 213 aa, Ornithobacterium rhinotracheale
  misc_feature (1)..(213): tr|I3ZXD9|I3ZXD9_ORNRL 7-carboxy-7-deazaguanine synthas e OS=Ornithobacterium rhinotracheale (strain ATCC 51463 / DSM 15997 / CCUG 23171 / CIP 104009 / LMG 9086) OX=8 67902 GN=queE PE=3 SV=1
MVQSLTPEQTELMNAGKLLPIMEDFYTLQGEGAHTGAASYFIRIGGCDVGCHWCDVKESWDASKHPLTPVDELVERATKYAKMIVITGGEPLMWNLEYLTQKLKEKGCKIHIETSGSHSLSGTLDWICLSPKKRLLPKQDVLDRASELKVIVFNHHDFKFAEEYAAKVSPDCVLYLQPEWSKREEMTPKIIDYILENPKWKISLQTHKVLRIP

SEQ ID NO: 32271 - protein, 213 aa, Ornithobacterium rhinotracheale
  misc_feature (1)..(213): tr|A0A3R5XU10|A0A3R5XU10_9FLAO 7-carboxy-7-deazaguanine synthase OS=Ornithobacterium rhinotracheale OX=28251 G N=queE PE=3 SV=1
MVQTLTPEQTKLMNAGKLLPIMEDFYTLQGEGAHTGAASYFIRIGGCDVGCHWCDVKESWEAGKHPLTPVDELVERANQHAKMIVITGGEPLMWNLDYLTQKLKEKGCQIHIETSGSHPLSGTLDWICLSPKKRLLPKQEVLERASELKVIIFNHHDFKFAEEYAAKVSPECELYLQPEWSKREEMTPKIIDYILGNPKWKISLQTHKVLHIP

SEQ ID NO: 32272 - protein, 210 aa, Orrella dioscoreae
  misc_feature (1)..(210): tr|A0A1C3JWR5|A0A1C3JWR5_9BURK 7-carboxy-7-deazaguanine synthase OS=Orrella dioscoreae OX=1851544 GN=queE PE=3 SV=1
MAYSVKELFKTLQGEGAHAGRASVFCRFAGCNLWTGREADRVSAACRFCDTDFVGTDGDGGGKFADAQALADALAACWGPGTEHRYVVFTGGEPLLQLDPALIEAAHAQGFTIAIETNGTLPVPPGVDWICVSPKGSAPLAQTRGDELKLVYPQPEHTPARFAGLDFTHFWLQPMDGPARVANTALAVEYCTAHPPWRLSLQTHKYIGIP

SEQ ID NO: 32273 - protein, 219 aa, Oryzomicrobium terrae
  misc_feature (1)..(219): tr|A0A5C1E4U7|A0A5C1E4U7_9RHOO 7-carboxy-7-deazaguanine synthase OS=Oryzomicrobium terrae OX=1735038 GN=queE P E=3 SV=1
MVENHRQLTLKVSEIFYSVQGEASRVGLPTVFVRLTGCPLRCTWCDTAYAFTGGETQTIGQVLYEVAKHPTHHVCVSGGEPLAQKNCLPLLTALCDDGCDVSLETSGALDISAVDPRVSRIMDLKAPDSGEVGRNRLANLAHLTHRDELKIVIASRGDYEWAKEQLREHALTDKCPVLFSPVAGQLEPRQLAEWILTDGLPVRFQVQLHKILWGNMKGK

SEQ ID NO: 32274 - protein, 270 aa, Oscillatoria acuminata
  misc_feature (1)..(270): tr|K9TBC9|K9TBC9_9CYAN 7-carboxy-7-deazaguanine synthas e OS=Oscillatoria acuminata PCC 6304 OX=56110 GN=queE P E=3 SV=1
MTHSIAAPPTTRAIEVFSGIQGEGLNVGTRQIFIRFGGCDLRCNYCDSAHTWTIPDTCRIEKTPGDRDFEVHPNPVPLPLFLDWIDRQNQPSLHDSISLTGGEPLLHTPFLEEFLPPLKQRTGLPLYLETGGHRPQQLQRILPYLDLVGMDIKLPSVSGETHWQAHQEFLSLCCTAGVEVFVKIIISDDTLEAELEQAAQLVAGINPLVTVFLQPVTPLSAGEMANFGDRPTPAIKSPAPTKVLAWQGVMKQWLKPVRVVPQTHKMLGQL

SEQ ID NO: 32275 - protein, 208 aa, Oscillatoria nigroviridis
  misc_feature (1)..(208): tr|K9VHN4|K9VHN4_9CYAN 7-carboxy-7-deazaguanine synthas e OS=Oscillatoria nigro-viridis PCC 7112 OX=179408 GN=q ueE PE=3 SV=1
MSNLQLKLPIHETFQCTVQGEGYWTGTLVDFIRLAGCPVRCPWCDTGYANGGKGLPSVPQSIAQLLAQLQSPRVVITGGEPFIHRDLPELVEALLEADKQVSIETSGACWQDVSPQAWITLSPKEHVNPKYPVQEIFWTRANEIKLVVSTGEEVEFYHKHLENNVNIPVFLQPEWNSKKTAIPIILELLKQNPSYRLSLQTHKFIGVQ

SEQ ID NO: 32276 - protein, 210 aa, [Oscillatoria] sp.
  misc_feature (1)..(210): tr|D8G901|D8G901_9CYAN 7-carboxy-7-deazaguanine synthas e OS=[Oscillatoria] sp. PCC 6506 OX=272129 GN=queE PE=3 SV=1
MLESNLHIKLPIHETFQSTVQGEGYWSGTLVDFIRLAGCPVHCPWCDTGYSEGGKDLPNVQRSIVELLTELKSPRVVISGGEPFIHKNLPLLVESLLEVGKQVSIETSGSHWQEVAGETWITLSPKEHVNPKYPVQEKFWSRANEIKLVISTGEEVNFYRDGLVSNPNIPVFLQPEWSDRFRAIPIILQLLQQNPGYRLSLQTHKLIGVQ

SEQ ID NO: 32277 - protein, 210 aa, Oscillatoriales cyanobacterium
  misc_feature (1)..(210): tr|A0A1C0VQU9|A0A1C0VQU9_9CYAN 7-carboxy-7-deazaguanine synthase OS=Oscillatoriales cyanobacterium USR001 OX=1 880991 GN=queE PE=3 SV=1
MLDLTLNLKLPIHETFQSTVQGEGYWTGNLVDFIRLAGCPVGCPWCDTGYSDGGKNLPNVSRSIAELLAELKSPRVVISGGEPFIHKNLTPLITSLLEFGKQVSIETSGICWQEVPAETWITLSPKQHVNSQYPVQKQFWTRANEIKLVISNGEEIDFYRNCLNSTLNIPIFLQPEWNNRSIAMPIILDLLQQYPNYRLSLQTHKFIDLQ

SEQ ID NO: 32278 - protein, 204 aa, Oscillatoriales cyanobacterium
  misc_feature (1)..(204): tr|A0A1J5GJ31|A0A1J5GJ31_9CYAN 7-carboxy-7-deazaguanine synthase OS=Oscillatoriales cyanobacterium CG2_30_40_6 1 OX=1805291 GN=queE PE=3 SV=1
MFEIPVHETFQSTIQGEGYWVGTLVDFIRLAGCPVRCPWCDTGYGDGGMDLPRQLRSFDSLMAELRSPRVVISGGEPLIYAQLPRLIQTIEATRRTVAIETSGSFWQDIPNSVWVTLSPKHHVSPNYPVVPLIWKRANEIKLVIETGSELEFYAEYLELNDQIPVFLQPEWNQRDRTLPLVLELLKKFPHYRLSVQIHKWLQVP

SEQ ID NO: 32279 - protein, 214 aa, Osedax symbiont
  misc_feature (1)..(214): tr|S6GKU5|S6GKU5_9GAMM 7-carboxy-7-deazaguanine synthas e OS=Osedax symbiont Rs2 OX=1330035 GN=queE PE=3 SV=1
MYKVKEMFYTLQGEGAQAGRPAVFCRFTGCNLWSGRERDRAKSVCDFCDTDFIGTDGQNGAKFSTALDLAKAIASFWPVPKVGQGTQGIPYVVFTGGEPALQLDAALISALKQQNFEIAIETNGTKELPQGIDWICVSPKADAKVIIQSGQELKLVYPQSLAMPQRFEQFNFQHFYLQPMAQDNANHTQATIEYCMTHPRWKLSLQTHKITGID

SEQ ID NO: 32280 - protein, 214 aa, Osedax symbiont
  misc_feature (1)..(214): tr|A0A1Y5GRI8|A0A1Y5GRI8_9BACT 7-carboxy-7-deazaguanine synthase OS='Osedax' symbiont bacterium Rs2_46_30_T18 OX=1856298 GN=queE PE=3 SV=1
MYKVKEMFYTLQGEGAQAGRPAVFCRFTGCNLWSGRERDRAKSVCDFCDTDFIGTDGQNGAKFSTALELADKIASFWPTPQLGRSVEGVPYVVFTGGEPALQLDEALTSALKQRNFEIAIETNGTKQLPAGIDWICVSPKADAEVIIECGQELKLVYPQSLAMPQRFEQLNFEHFYLQPMAQDNANHTKATIEYCMAHPRWKLSLQTHKITGID

SEQ ID NO: 32281 - protein, 179 aa, Otariodibacter oris
  misc_feature (1)..(179): tr|A0A420XH27|A0A420XH27_9PAST 7-carboxy-7-deazaguanine synthase OS=Otariodibacter oris OX=1032623 GN=queE PE= 3 SV=1
MQAVNSSQNNALISYRIVEIFETLQGEGYNTGMPSIFIRFGKCNLACPWCDTNYHQYEEKTASEILSIVKQFSAKNIIITGGEPTIQPHLDILLDMLKNEGYFLAIETNGLKPVPLQIDYIATSPKRLYQKNYSKHHIPYADGEVNMLATITQLGLLNQRANKPHWHLSIQTHKIANID

SEQ ID NO: 32282 - protein, 219 aa, Ottowia sp.
  misc_feature (1)..(219): tr|A0A5C7W0R0|A0A5C7W0R0_9BURK 7-carboxy-7-deazaguanine synthase OS=Ottowia sp. OX=1898956 GN=queE PE=3 SV=1
MDNAAPPNRLRLTEIFLSLQGEAASVGWPTVFVRLTGCPLRCQYCDTAYAFHGGQWWEIEDILAEVARLGVRHVCVTGGEPLAQKRCLELLRQLCDAGYEVSLETSGALDIAGVDPRVSRVVDLKTPGSAEQARNRLENLPLLTARDQVKFVLCGRGDYEWARAMVAEHRLAERCEVLFSPSKTELEPRELADWIVADRLPVRFQMQLHKLLWNDEPGR

SEQ ID NO: 32283 - protein, 207 aa, Owenweeksia hongkongensis
  misc_feature (1)..(207): tr|G8R255|G8R255_OWEHD 7-carboxy-7-deazaguanine synthas e OS=Owenweeksia hongkongensis (strain DSM 17368 / CIP 108786 / JCM 12287 / NRRL B-23963 / UST20020801) OX=926 562 GN=queE PE=3 SV=1
MTENDKVEKGLFLPLMEEFYTIQGEGYHSGRAAYFIRIGGCDVGCHWCDVKESWNPKLHPPTDIQQIADHAAEYSKTIVITGGEPLMWNMEPITTLLKDKGLEVHIETSGAYTVSGNWDWFCLSPKKTKPPVKEAYEYAHELKVIIYNKHDFKWAEEHAARVGAHCKLFLQPEWSRREVMMDDIANYVMQNPKWQISLQTHKYIGIP

SEQ ID NO: 32284 - protein, 203 aa, Owenweeksia sp.
  misc_feature (1)..(203): tr|A0A1Z8L9N4|A0A1Z8L9N4_9FLAO 7-carboxy-7-deazaguanine synthase OS=Owenweeksia sp. TMED14 OX=1986609 GN=queE PE=3 SV=1
  misc_feature (44)..(44): Xaa can be any naturally occurring amino acid
  misc_feature (68)..(68): Xaa can be any naturally occurring amino acid
  misc_feature (87)..(87): Xaa can be any naturally occurring amino acid
  misc_feature (93)..(93): Xaa can be any naturally occurring amino acid
MKRTELPALPLMEAFRTIQGEGAHTGLPSFFLRIGGCDVGCHWXDVKESWDPNKHPLTEISDILSQIXDSDKTIVITGGEPLMWDMXPLTTSXKGMGKRIHLETSGSYNFSGTWDWVCLSPKKTKPPIDQWYSQADELKIIIYNQDDLKWAEYHSKRVGKKCKIYLQPEWSKKEKVMPMIIKFLESKPDWRLSLQSHKYIGLP

SEQ ID NO: 32285 - protein, 209 aa, Owenweeksia sp.
  misc_feature (1)..(209): tr|A0A2D8SRU0|A0A2D8SRU0_9FLAO 7-carboxy-7-deazaguanine synthase OS=Owenweeksia sp. OX=2024847 GN=queE PE=3 SV =1
MVNAHEEKVAQGLWVPLMEEFYTIQGEGFHTGKAAYFIRIGGCDVGCHWCDVKESWNPDLHPPTEVQQIADTAAHYSKTVVVTGGEPLTWNMDPLTHALQERGLQIHLETSGAYQLSGSWDWICLSPKKTKPPVDEVYAQAHELKIIIYNKHDFKWAEEHAARVGDHCKLFLQPEWSRSKEMMSSIADYVMQNPQWQISLQTHKYIGIP

SEQ ID NO: 32286 - protein, 211 aa, Oxalobacter formigenes
  misc_feature (1)..(211): tr|C3X240|C3X240_OXAFO 7-carboxy-7-deazaguanine synthas e OS=Oxalobacter formigenes HOxBLS OX=556268 GN=queE PE =3 SV=2
MAYSVKEIFYTLQGEGARTGRPAVFCRFSGCNLWSGREQDRARAICRFCDTDFVGTSGERGGKFPEAEKLASVIISLWPREHAENRYVVFTGGEPLLQLDRPLIGIMHRAGFEIAIETNGTIPVPEGVDWVCVSPKVGSTLVVKSGDELKVVIPQAGQNLADYEDLSFSHFYVQPMDGENRERNIKMAIDTCLKNPKWKLGLQTHKYLQIP

SEQ ID NO: 32287 - protein, 219 aa, Oxalobacter formigenes
  misc_feature (1)..(219): tr|C3XA64|C3XA64_OXAFO 7-carboxy-7-deazaguanine synthas e OS=Oxalobacter formigenes OXCC13 OX=556269 GN=queE PE =3 SV=1
MDDCQDIVLTYSVKEIFYTLQGEGARSGRPAVFCRFSGCNLWSGREADRSRSVCRFCDTDFVGTDGVNGGKFAQAEDLSSFIESLWPAGFMENRYVVFTGGEPLLQLDAALIDAMHGKGFEIAIETNGTLAVPDGIDWVCVSPKAGADLAVAGGDELKVVVPQPGQILADYESLAFTHFYVQPMDGENRLQNVKIAIDTCLQNPKWKLSLQTHKYLQIP

SEQ ID NO: 32288 - protein, 211 aa, Oxalobacter sp.
  misc_feature (1)..(211): tr|A0A3A6P9G9|A0A3A6P9G9_9BURK 7-carboxy-7-deazaguanine synthase OS=Oxalobacter sp. OX=2093374 GN=queE PE=3 SV =1
MTYAIKEIFYTLQGEGARAGRPAVFCRFAGCNLWSGREADRAGAMCRYCDTDFVGTDGAHGGKYENAEALANAMDALWPATFAASKYVVLTGGEPLLQLDATLIAALHLHGFEIAIETNGSLPVPEGVDWVCVSPKVGVKLAVKRGDELKLVVPQSGLSLPDYEGLEFSHFFVQPMDNADREANAQYAVRLCLQNPRWKLSLQAHKILQIP

SEQ ID NO: 32289 - protein, 186 aa, Oxalobacteraceae bacterium
  misc_feature (1)..(186): tr|A0A4Q3IJQ6|A0A4Q3IJQ6_9BURK 7-carboxy-7-deazaguanine synthase (Fragment) OS=Oxalobacteraceae bacterium OX=1 871070 GN=queE PE=3 SV=1
PQAVDQAGKVGRESDRSTAVCQFCDTDFVGTDGERGGKYRAAADLAGLIDSLWPASHAASKYVVFTGGEPLLQLDSALIAAMHERGFEIAIETNGTLAVPPGVDWVCVSPKAGSFLNVEQGSELKVVIPQAGQNLADYERLSFDHFYLQAMDGPEAAANIRLAIETCKSNPKWKLSLQTHKLLQIP

SEQ ID NO: 32290 - protein, 211 aa, Oxalobacteraceae bacterium
  misc_feature (1)..(211): tr|A0A4Y9QJ09|A0A4Y9QJ09_9BURK 7-carboxy-7-deazaguanine synthase OS=Oxalobacteraceae bacterium OM1 OX=2561929 GN=queE PE=3 SV=1
MTYSVKEMFYTLQGEGTHAGRPAVFCRFSGCNLWSGRESDRATAICKFCDTDFVGIDGEGGGKFADAALLAAAIDARWPTSDTAHKFVVFTGGEPLLQLDAALIDAMHARGFEIAIETNGTLAAPPGIDWICVSPKLGSELVQRRGNELKVVIPQEAQDLSAYEALAFDHFYLQPMDGPFAERNTRLAIELCKQRPQWKLSLQTHKLLNIP

SEQ ID NO: 32291 - protein, 325 aa, Oxobacter pfennigii
  misc_feature (1)..(325): tr|A0A0P8X604|A0A0P8X604_9CLOT 7-carboxy-7-deazaguanine synthase OS=Oxobacter pfennigii OX=36849 GN=queE PE=4 SV=1
MKEAGFYKKLKDNLVKCNLCPNYCVIENANLGSCRTRKNTGGTLYTLNYNRIAALALDPIEKKPLYHFYPGTKILSAGTLGCNLKCSFCQNWHIAQDDADTQEITGERLVDIAIKQESLGIAFTYNEPFIWYEYIYEIAKLCKKKGLKYVLVTNGYVNEEPLNEMLHLIDAMNIDVKGFTGKFYKDICKGILEPVKRTVEKAASQCHIEVTTLVVTDLNDTIDEIRELSLWLSSIDKNIPLHLSRYFPNYKLDNPPTPLNTLKMLYDEAKKHLNYVYLGNVADKDNTTYCPKCKNPLVKRGSNVTVEGIYKGKCKNCSESINIIY

SEQ ID NO: 32292 - protein, 236 aa, Pacificibacter maritimus
  misc_feature (1)..(236): tr|A0A3N4UVC9|A0A3N4UVC9_9RHOB 7-carboxy-7-deazaguanine synthase OS=Pacificibacter maritimus OX=762213 GN=queE PE=3 SV=1
MTSLRIAEIFGPTVQGEGALIGEPTVFVRTGGCDYRCVWCDSLHAVASEFRHTWAAMTTDDIWNDITRLSQGKPLTVSLSGGNPAIQDFAPLITLGHEHGYKFALETQGSIARPWFSQIDTLVLSPKPPSSGETVDWTAFDACLEAAQDAGTVVMKIVIFDDKDYDWARDVADAYPALPLYLQPGNPEVDPNVAVDPQALSDRLLWLVDKVMEDAWFTPRVLPQLHVMLWGNKRGV

SEQ ID NO: 32293 - protein, 210 aa, Pacificimonas flava
  misc_feature (1)..(210): tr|M2T999|M2T999_9SPHN 7-carboxy-7-deazaguanine synthas e OS=Pacificimonas flava OX=1234595 GN=queE PE=3 SV=1
MSYAVKEIFPTLQGEGGQAGRRAVFLRFAGCNLWTGREQDRAGAVCRFCDTDFVGMNGPGGGRFPDADALADAVERTWGDSREHRLTVCTGGEPLLQLDTPLIEALHRRGFEIAVETNGTVPAPAGLDWICVSPKAAEPLKQRSGNELKLVYPQPENDPAQFEHLAFDHFFLQPMDSPQQAENVAAATRYCMDHPKWRLSLQTHKLIGIP

SEQ ID NO: 32294 - protein, 209 aa, Pacificimonas flava
  misc_feature (1)..(209): tr|A0A219B5H7|A0A219B5H7_9SPHN 7-carboxy-7-deazaguanine synthase OS=Pacificimonas flava OX=1234595 GN=queE PE= 3 SV=1
MSYAVKELFLTLQGEGAQAGRRAVFLRFSGCNLWSGRERDRASAVCTFCDTDFVGTDGERGGRYETEELAGLVEEVWGLAQPARLVVCTGGEPLLQLDRQLIDALHRRGFEIAIESNGTIAAPDGVDWICISPKAAQPLVQTRGQELKLVYPQAENDPADFEHLDFEHFYLQPMDGPSQAENIAAATRYCLDHPGWRLSLQTHKLIGIP

SEQ ID NO: 32295 - protein, 231 aa, Paenibacillaceae bacterium
  misc_feature (1)..(231): tr|A0A2A6DXR9|A0A2A6DXR9_9BACL 7-carboxy-7-deazaguanine synthase OS=Paenibacillaceae bacterium JTherm OX=19066 05 GN=queE PE=3 SV=1
MNRPEWNTVRVPIVEIFETIEGEGTKAGFPTVFVRLFGCNLRCVWCDTTYSYPPAEPGPTLTVADIVERVTSYRSRHLCLTGGEPLMYGERSRMLLEALAECGAFDDIHVETNGAVDLRPFLESVRSLAVRYIMDYKLPDSGEERRMVAGNLPLLRPQDELKFVVASRRDFDRAVSLLDEYDVRAQVLFSPVWGAVEPRKLAEWMLERGLARARLNLQLHKIIWSPDARGV

SEQ ID NO: 32296 - protein, 233 aa, Paenibacillaceae bacterium
  misc_feature (1)..(233): tr|A0A354DFI0|A0A354DFI0_9BACL 7-carboxy-7-deazaguanine synthase OS=Paenibacillaceae bacterium OX=2003592 GN=q ueE PE=3 SV=1
MENLCLPMVECFQTVEGEGKMAGTPTTFVRVYNCNLRCRWCDTPYSYAPEHPSYFSSIGEILEQVKSFGHGSVCLTGGEPLMHGEKSLALVKELSLLPEVWDVHVETNGSIPLHEFIDLRSQDEKIGKTLRFIVDYKLPSSGEEDQMDSSTFSLLQAQDEGKFVVANDDDFHRALEVIKNNSIQADLLFSPVWDTMPPHHLVELLLAHRPHGGRARLNLQLHKMIWDPDMRGV

SEQ ID NO: 32297 - protein, 271 aa, Paenibacillus agaridevorans
  misc_feature (1)..(271): tr|A0A2R5F042|A0A2R5F042_9BACL 7-carboxy-7-deazaguanine synthase OS=Paenibacillus agaridevorans OX=171404 GN=q ueE PE=3 SV=1
MTDFQRSRRSDSAALANAGKASGTASGLVGAARPIPVLEVFGPTVQGEGMVVGRKTMFVRTAGCDYSCSWCDSAFTWDGSGKDDIRLLSAAAIIEELEKIGGGTFDHVTISGGNPALLPQLSALIQGLQDRGCKVALETQGSRWQPWFTAIDDLTLSPKPPSSGMTTNWDTLDDIVSRLGEAGNGFCLKVVIFDDADLDYARKVHARYRDVPFYLQAGNGNLTETDPQAMLPYLVERYEWLISRTMPDESLRGVHVLPQLHTWIYGNKKGV

SEQ ID NO: 32298 - protein, 245 aa, Paenibacillus algorifonticola
  misc_feature (1)..(245): tr|A0A1I2IK03|A0A1I2IK03_9BACL 7-carboxy-7-deazaguanine synthase OS=Paenibacillus algorifonticola OX=684063 GN =queE PE=3 SV=1
MLKQAEARIPVMEIFGPTVQGEGMVIGQKTMFVRTAGCDYSCAWCDSAFTWDGTGKDDIRMLTAAEIISELHAVGGEAFSHVTLSGGNPALLRHAGELVQGLHAAGIQVALETQGSKWQDWLLDIDELTLSPKPPSSGMDTSWEMLDEIVHQLSAANRSFSLKVVVFDDADLAYAASVHARYPGVLFFVQAGNDDLAEGDNGKLRDKLVERYEWLIERVMVRSDMNQVRVLPQLHAWVWGNKRGV

SEQ ID NO: 32299 - protein, 241 aa, Paenibacillus alvei
  misc_feature (1)..(241): tr|S9SMX0|S9SMX0_PAEAL 7-carboxy-7-deazaguanine synthas e OS=Paenibacillus alvei TS-15 OX=1117108 GN=queE PE=3 SV=1
MTIPVLEIFGPTVQGEGLLVGQKTMFVRTAGCDYRCSWCDSAFTWDGSAKDDIRQLTADAVIEELDRLAKGRYGHVTISGGNPALLEGMDELVQRLGERGVRTAVETQGSRWQDWLLDIDDVTLSPKPPSSGMGTNFTRLDEIVGKLWNRSARKGLCLKVVVFNEDDMQYAIEVHERYPEIPFVMQTGNEDVHSGDDGELVQKLLRQYEWLIDKVALEPRLNQIRVLPQLHTLVWGNKRGV

SEQ ID NO: 32300 - protein, 241 aa, Paenibacillus alvei
  misc_feature (1)..(241): tr|K4Z971|K4Z971_PAEA2 7-carboxy-7-deazaguanine synthas e OS=Paenibacillus alvei (strain ATCC 6344 / DSM 29 / N BRC 3343 / NCIMB 9371 / NCTC 6352) OX=1206781 GN=queE P E=3 SV=1
MTIPVLEIFGPTVQGEGLLVGQKTMFVRTAGCDYRCSWCDSAFTWDGSAKDDIQQMAADEVIAELDRLAEGRYAHVTISGGNPALLGGIGELVERLSKRGVRTAVETQGSRWQNWLLDIDDVTLSPKPPSSGMDTDFVRLDEIAEKLWNRSVRKGLCLKVVVFNEEDMRYAIAVHERYPEIPFVMQTGNEDVHNNDDQELIQKLLRRYEWLIDQVALEPRLNRTRVLPQLHTLVWGNKRGV

SEQ ID NO: 32301 - protein, 257 aa, Paenibacillus amylolyticus
  misc_feature (1)..(257): tr|A0A100VHP1|A0A100VHP1_PAEAM 7-carboxy-7-deazaguanine synthase OS=Paenibacillus amylolyticus OX=1451 GN=queE PE=3 SV=1
MSSVTQQVNETGTRKEARIPVMEIFGPTVQGEGMVIGQKTMFVRTAGCDYRCSWCDSAFTWNGSGKDQIRMITPEDVWEELRRVGGTRFSHVTISGGNPALLASLGGLVALLRENGIRTAVETQGSRWQSWLADIDEVTVSPKPPSSGMDTDWAVLDDLIKRLAAGPVERSHSLKIVIFDETDLDYARRVHARYPGTDLFLQTGNPDVTSADTPDLASSLLARYEWLIDQVSASDDLNNVRVLPQLHTLVWGNKRGV

SEQ ID NO: 32302 - protein, 257 aa, Paenibacillus amylolyticus
  misc_feature (1)..(257): tr|A0A1R1DY35|A0A1R1DY35_PAEAM 7-carboxy-7-deazaguanine synthase OS=Paenibacillus amylolyticus OX=1451 GN=queE PE=3 SV=1
MSSVTQQVNETGSRKEARIPVMEIFGPTVQGEGMVIGQKTMFVRTAGCDYRCSWCDSAFTWDGSGKDQIRMITPEDVWEELRRVGGTRFSHVTISGGNPALLASLGGLVALLRENGIRTAVETQGSRWQPWLANIDEVTVSPKPPSSGMDTDWAVLDDLIERLAAGPVERSHSLKIVIFDETDLDYARRVHARYPGTDLFLQTGNPDVTSADTPDLASSLLARYEWLIDQVSASDDLNNVRVLPQLHTLVWGNKRGV

SEQ ID NO: 32303 - protein, 257 aa, Paenibacillus antarcticus
  misc_feature (1)..(257): tr|A0A168QTM7|A0A168QTM7_9BACL 7-carboxy-7-deazaguanine synthase OS=Paenibacillus antarcticus OX=253703 GN=que E PE=3 SV=1
MSSQHPKGHFEDSKPARRLPILEIFGPTVQGEGMVIGRKTMFVRTAGCDYHCSWCDSSFTWDGSGKDLIKLLSPEQICHELYQIGEDRFSHVTLSGGNPTLLPQLGELIQLLHDRNITVAVETQGSRWQDWLIDVDEVTLSPKPPSSGMITEWRTLDIIVDNLKQRPAKYSHSLKVVIFDEADLDYAVTVHLRYPDTLLYLQVGNSDVHTMDSTQLTMTLLQRYEWLIDKVMESSILNNVRVLPQLHTLVWGNKRGV

SEQ ID NO: 32304 - protein, 269 aa, Paenibacillus aquistagni
  misc_feature (1)..(269): tr|A0A1X7M0F6|A0A1X7M0F6_9BACL 7-carboxy-7-deazaguanine synthase OS=Paenibacillus aquistagni OX=1852522 GN=que E PE=3 SV=1
MDDGMSHKNGMNSVLARCDASQAHSHTPHTQRIPVLEVFGPTVQGEGALVGQKTMFVRTAGCDYRCSWCDSAFTWDGSAKDEIQLLTAEEIFLRLESLAAGRYSHVTLSGGNPALLPSLGELVKLLKQKGIRTAVETQGTKWQPWLAEIDDVTVSPKPPSSGMTTDDDKLEELMNRLCKADTSVCLKVVVFDEADLQYAVDMHERYAGIPFVLQTGNPDVASANDDELIKGLLKRYEWLIEQAAAEPRLNDAKVLPQLHTLVWGNKRGV

SEQ ID NO: 32305 - protein, 239 aa, Paenibacillus baekrokdamisoli
  misc_feature (1)..(239): tr|A0A3G9JKN2|A0A3G9JKN2_9BACL 7-carboxy-7-deazaguanine synthase OS=Paenibacillus baekrokdamisoli OX=1712516 G N=queE PE=3 SV=1
MSSRFPVMEIFGPTIQGEGMVIGQKTMFVRTAGCDYQCAWCDSAFTWDGTGKEDIRMLTAEEIAAELREIGGTTHVTISGGNPALLPHLNELIDRLHEQGITVALETQGSLWKNWFLQIDELTLSPKPPSSGMTTDWSQLDAIVAQLTEHERAFSLKVVVFDEADLQYAVTVHERYKQVPFYLQAGNDDVIQEDTSVLLNRLIERYKWLVDMVIASSALTNVRVLPQLHAWLWGNKRGK

SEQ ID NO: 32306 - protein, 264 aa, Paenibacillus barcinonensis
  misc_feature (1)..(264): tr|A0A2V4V7P0|A0A2V4V7P0_PAEBA 7-carboxy-7-deazaguanine synthase OS=Paenibacillus barcinonensis OX=198119 GN=q ueE PE=3 SV=1
MSSVQDQKQTGSAAAHNPAPAGQARIPVMEVFGPTVQGEGMVIGQKTMFVRTAGCDYRCSWCDSAFTWDGSGKDQIRMLTPEAVWDELRRLGGTRFSHVTLSGGNPALLASLGGLVALLRENGVRTAVETQGSRWQPWLADIDEVTVSPKPPSSGMDTDWAVLDEVMGRLAAGPANQSHSLKIVIFDQTDLDYARRVHTRYPGTALFLQTGNPDVASVDTPDLAASLLARYEWLIDQISASDDLNNVRVLPQLHTLVWGNKRGV

SEQ ID NO: 32307 - protein, 253 aa, Paenibacillus barengoltzii
  misc_feature (1)..(253): tr|R9LAQ2|R9LAQ2_9BACL 7-carboxy-7-deazaguanine synthas e OS=Paenibacillus barengoltzii G22 OX=1235795 GN=queE PE=3 SV=1
MNKDATLQEHRELPIPVMEIFGPTVQGEGMVIGQKTMFVRTAGCDYRCSWCDSAFTWDGSGKDMIRRLTPAEILGELRDIGGDRFSHVTLSGGNPALLPQLAGLVELLHAEGIAVAVETQGSRWQDWLAEIDQVTLSPKPPSSGMDTNWDVLDDIVTRLAARPHPLAVSLKVVVFDDDDLAYAKRVHARYPNVPMYVQVGNPDVKRMDIQEHASDLLRRYEALIDKVMATPDLNNVRVLPQLHALVWGNKRGV

SEQ ID NO: 32308 - protein, 222 aa, Paenibacillus beijingensis
  misc_feature (1)..(222): tr|A0A0D5NQW3|A0A0D5NQW3_9BACL 7-carboxy-7-deazaguanine synthase OS=Paenibacillus beijingensis OX=1126833 GN=q ueE PE=3 SV=1
MVIGQKTMFVRTAGCDYSCSWCDSAFTWDGSAKEEIRLLTPEQIDAELRELGGGAPGHVTLSGGNPALLRQLGQLIELLHESGAAVALETQGSRWQDWFVAVDELTLSPKPPSSGMKTDWAVLDQIVSRLQDAGSRFSLKVVIFDEEDLRYAAGVHERYPAVPFFLQSGNDRLLEPDAGELLRHLQARYEWLVERVMAEPGWKQVRVLPQLHAWIWGNKRGV

SEQ ID NO: 32309 - protein, 245 aa, Paenibacillus borealis
  misc_feature (1)..(245): tr|A0A1R0YFU0|A0A1R0YFU0_9BACL 7-carboxy-7-deazaguanine synthase OS=Paenibacillus borealis OX=160799 GN=queE P E=3 SV=1
MGVVTVSKIPVIEMFGPTIQGEGAVIGVKTMFVRTYGCDYRCSWCDSAFTWDGSAKDKVRMLTPEEIMAELLSLAGNNFDCVTISGGNPALIGEAMGTFIMGLHERGIQAAIETQGSRWQEWFNDVDVLTISPKPPSSGMKTDWEILDGIMGKLHDKGKAAHSLKVVVFNEGDYEYAKAVHKRYPEVPLFLQPGNEDVTEEGDISVRLLGRLEWLFNQVIVDPEMNRARVLPQLHALIWHNKRGK

SEQ ID NO: 32310 - protein, 240 aa, Paenibacillus borealis
  misc_feature (1)..(240): tr|A0A089LIF5|A0A089LIF5_9BACL 7-carboxy-7-deazaguanine synthase OS=Paenibacillus borealis OX=160799 GN=queE P E=3 SV=1
MSKIPVIEMFGPTIQGEGAVIGVKTMFVRTYGCDYRCSWCDSAFTWDGSAKDKVTMMEPQEILAGLLELAGENFNCVTISGGNPALIGEAIGEFITLLHERGIQAAIETQGSRWQDWFNDVDVLTISPKPPSSGMKTDWDKLHEIMLRVGNHGKAAHSLKVVVFNQEDYEYARKVHFKYPEVPLFLQPGNDNVTEEGDISGRLLGRLEWLFNLVIADPQMNRARVLPQLHALIWHNKRGK

SEQ ID NO: 32311 - protein, 286 aa, Paenibacillus bovis
  misc_feature (1)..(286): tr|A0A172ZM88|A0A172ZM88_9BACL 7-carboxy-7-deazaguanine synthase OS=Paenibacillus bovis OX=1616788 GN=queE PE= 3 SV=1
MNENDQTGRENEQASRGNESVGTASRPTATIPVLEIFGPTVQGEGMVIGQKTMFVRTAGCDYRCSWCDSAFTWDGSAKDQIRKLSAQDVYDELKAIGGDRFNHVTISGGNPALLVSIGELVQLLRQDGIRTAVETQGSRWQDWLLDINDVTISPKPPSSGMETNFEILDSIIRKLRQNQINQMMQDIIYADSDEQAPVDQSISLKVVIFDEADLKYAEQVHKRYPNVPFYMQTGNPDVTSADDNIASSLLHRYEWLIDQAMDMPAFNDARILPQLHTLVWGNKRGV

SEQ ID NO: 32312 - protein, 242 aa, Paenibacillus catalpae
  misc_feature (1)..(242): tr|A0A1I1Z6A6|A0A1I1Z6A6_9BACL 7-carboxy-7-deazaguanine synthase OS=Paenibacillus catalpae OX=1045775 GN=queE PE=3 SV=1
MTEKRIPVMEIFGPTVQGEGMVIGQKTMFIRTAGCDYSCSWCDSAFTWDGTGKDDIRMLTADDIVTELRELGGNTFSHVTLSGGNPALLKNADELVDTLHREGIRVAVETQGSRWQDWLLAIDELTLSPKPPSSGMTTNWVVLDEIVTKLTGGQNPFSLKVVVFDEQDLAYAAEVHNRYAGVPFFVQTGNDDLLEADNGKLASMLIERYEWLIDQVMKREDMTNVRVLPQLHALVWGNKRGV

SEQ ID NO: 32313 - protein, 238 aa, Paenibacillus cellulosilyticus
  misc_feature (1)..(238): tr|A0A2V2YEF1|A0A2V2YEF1_9BACL 7-carboxy-7-deazaguanine synthase OS=Paenibacillus cellulosilyticus OX=375489 G N=queE PE=3 SV=1
MSSSDMHQSERDPLDTRLPMVEIFETVEGEGTRAGFPTVFVRLFGCNLRCTWCDTTYSYPPAKSEFTLSIREIVEQVRSYKSKHICFTGGEPLLYGDKSARLLQALADIEGIVDVHVETNGAIGLAPFLEKVQASNVRYVMDYKLPDSGENERMDSDNFALLRSQDEVKFVIATDRDFDFAVETLKRYPTKALPMFSPVWESMPPAKLVERMLEAGLSNVKLNMQLHKIIWDPAKRGV

SEQ ID NO: 32314 - protein, 275 aa, Paenibacillus chitinolyticus
  misc_feature (1)..(275): tr|A0A410WS68|A0A410WS68_9BACL 7-carboxy-7-deazaguanine synthase OS=Paenibacillus chitinolyticus OX=79263 GN=q ueE PE=3 SV=1
MSASQTNAAVPSPPRTLPAAGKTAAAAVSPSGTAAAGEATIPVLEIFGPTVQGEGMVIGRKTMFVRTAGCDYRCSWCDSAFTWDGSGAADIRPLTAEAVWEELVRTGGSRFSHVTLSGGNPALLRSLGPLVKLLRAQGIRTAVETQGSRWQDWLTEIDEVTLSPKPPSSGMETDFAKLDDIVRRLNPDGVSLKVVVFDERDFAFAREVHRRYPAVPFYLQAGNEDVRLADDDLLRGQLLRKYEWLVDLTMASEDLNDVRVLPQLHALLWGNKRGV

SEQ ID NO: 32315 - protein, 249 aa, Paenibacillus contaminans
  misc_feature (1)..(249): tr|A0A329MV46|A0A329MV46_9BACL 7-carboxy-7-deazaguanine synthase OS=Paenibacillus contaminans OX=450362 GN=que E PE=3 SV=1
MTELNGKPQSRLIPVIEIFGPTVQGEGMVIGKKTMFVRTAGCDYSCKWCDSSFTWDGSGKSDIRQLSAQDIYNELLQTGGDTFAHVTVSGGNPALLPQLGELIEVLKRQGLSVALETQGSRWQDWFWSIDDLTISPKPPSSGMKTDFTVLDSIAAKLAERARHYSLKVVVFDDADLQYAAEIHERYPNIPFYVQAGNGRLHETDPGMMLPYLLERYEWLIGRTMEHRRLKQVHVLPQLHTWLWGNKKGV

SEQ ID NO: 32316 - protein, 258 aa, Paenibacillus crassostreae
  misc_feature (1)..(258): tr|A0A167GR55|A0A167GR55_9BACL 7-carboxy-7-deazaguanine synthase OS=Paenibacillus crassostreae OX=1763538 GN=q ueE PE=3 SV=1
MNSQSVHVDERISHQIDRPIPVLEVFGPTVQGEGMVIGRKTMFVRTAGCDYHCSWCDSSFTWDGSGKEQIRLLQSEQIWDELYQIGGACFSHVTLSGGNPALLPQLGGLVQLLHDRNIIVAVETQGSKWQDWLASVDEVTISPKPPSSGMNTDWEILDEIINHLEVRPVTYSHSLKVVIFNEEDLDYAVKVHLRYLDTPMYLQVGNADVHTTDSNQLTSTLLERYEWLIEKVMESSMLNQVRVLPQLHTLIWGNKRGV

SEQ ID NO: 32317 - protein, 240 aa, Paenibacillus curdlanolyticus
  misc_feature (1)..(240): tr|E0IGB9|E0IGB9_9BACL 7-carboxy-7-deazaguanine synthas e OS=Paenibacillus curdlanolyticus YK9 OX=717606 GN=que E PE=3 SV=1
MMNKMGDAIHAERDPLDSKLPMVEIFETVEGEGTRAGFPTVFVRLFGCNLRCVWCDTTYSYPPAKSEYSLSIREIVEKVKSYRSRHICFTGGEPLLYGDRSAMLLKALAEIDGIVDVHVETNGAIGLAPFLESVPLPNVRYVMDYKLPDSGENDKMEMANFELLRPQDEIKFVIASDQDFDAAVETLRRYPTQALPMFSPVWESMPPAKLVDRMLEAGLSGVKLNMQLHKIIWDPAKRGV

SEQ ID NO: 32318 - protein, 178 aa, Paenibacillus darwinianus
  misc_feature (1)..(178): tr|A0A015NQ10|A0A015NQ10_9BACL 7-carboxy-7-deazaguanine synthase (Fragment) OS=Paenibacillus darwinianus OX=13 80763 GN=BG52_07400 PE=4 SV=1
VEELLRIGGSRFGHVTLSGGNPALLPQLDELIRLLHARGMQVALETQGSRWQEWFRAIDDLTISPKPPSSGMNTDWNRLDEIMNKLSGRAEGLCLKVVIFDEADLDYALTVHRRYPGVPLVLQVGNDDVGTSDAAGLIVKLLRRYEWLVERVAASEAFRQVRVLPQLHTLLWGNKRGV

SEQ ID NO: 32319 - protein, 241 aa, Paenibacillus dendritiformis
  misc_feature (1)..(241): tr|A0A4R5YRE2|A0A4R5YRE2_9BACL 7-carboxy-7-deazaguanine synthase OS=Paenibacillus dendritiformis OX=130049 GN= queE PE=3 SV=1
MTIPVLELFGPTVQGEGLLVGRKTMFVRTAGCDYRCSWCDSAFTWDGSAKEEIRSLTAEDILRELNALAAGRFDHVTISGGNPALIPGISGLVRLLGEHGIRTAVETQGSRWQEWLLDIDDVTLSPKPPSSGMSTDEARLDQMVSRLWDRPDRKGLCLKIVVFDEQDLGYAIRMHERYPDIPFVLQTGNDDVQSADDHELIRKLLGRYEWLIEQVAADPRLNRVRVLPQLHTLVWGNKRGV

SEQ ID NO: 32320 - protein, 241 aa, Paenibacillus dendritiformis
  misc_feature (1)..(241): tr|H3SNA4|H3SNA4_9BACL 7-carboxy-7-deazaguanine synthas e OS=Paenibacillus dendritiformis C454 OX=1131935 GN=qu eE PE=3 SV=1
MTIPVLELFGPTVQGEGMLVGRKTMFVRTAGCDYRCSWCDSAFTWDGSAKEEIRSLTAEDILRELNALAAGRFDHVTISGGNPALIPGISGLVRLLGEHGIRTAVETQGSRWQEWLLDIDDVTLSPKPPSSGMSTDEARLDQMVSQLWERPDRKGLCLKIVVFDDRDLAYAIRMHERYPDIPFVLQTGNDDVRSADDHELIRKLLGRYEWLIEQVAADPRLNRVRVLPQLHTLVWGNKRGV

SEQ ID NO: 32321 - protein, 240 aa, Paenibacillus donghaensis
  misc_feature (1)..(240): tr|A0A2Z2KNP7|A0A2Z2KNP7_9BACL 7-carboxy-7-deazaguanine synthase OS=Paenibacillus donghaensis OX=414771 GN=que E PE=3 SV=1
MSKLPVIEIFGPTIQGEGAVIGVKTMFVRTYGCDYRCSWCDSAFTWDGSAKDKMRLLEPEQVVAELLELGGDNFSSVTISGGNPALIGEGVGQLIELLHQREIGVAIETQGSRWQDWFLQVDALTISPKPPSSGMATNWEMLDSILHKLKSSESAAHNLKVVVFDEQDYAYAKAVHQRYPGVELFLQPGNTDVTEEGDISTRLLGRLEWLFQQVIADPEMNQVRVLPQLHALIWHNKRGK

SEQ ID NO: 32322 - protein, 241 aa, Paenibacillus durus
  misc_feature (1)..(241): tr|A0A089IVV4|A0A089IVV4_PAEDU 7-carboxy-7-deazaguanine synthase OS=Paenibacillus durus OX=44251 GN=queE PE=3 SV=1
MSAKIPVIEMFGPTIQGEGAVIGVKTMFVRTYGCDYRCAWCDSAFTWDGTGKDKRVMMDAEEIMSGLTELGGDRFDCVTISGGNPALIGEGLSELIGLLHERGIKAAIETQGSRWQDWFMEVDALTISPKPPSSGMPTDWEVLDSIMARVRTSGKGGHSLKVVVFDDEDYKYAAQVHHRYPDVPFFLQPGNDNVTEEGDISARLLNKLEWLFEKVIVDPEMNAARVLPQLHALIWHNKRGK

SEQ ID NO: 32323 - protein, 241 aa, Paenibacillus durus
  misc_feature (1)..(241): tr|A0A0F7F936|A0A0F7F936_PAEDU 7-carboxy-7-deazaguanine synthase OS=Paenibacillus durus ATCC 35681 OX=1333534 GN=queE PE=3 SV=1
MSAKIPVIEMFGPTIQGEGAVIGVKTMFVRTYGCDYHCSWCDSSFTWDGSGKDKRVMMDAEEIMSGLTELGGDRFDCVTISGGNPALIGEGLSELIDLLHERGIKAAIETQGSRWQDWFLKVDALTISPKPPSSGMPTDWEVLDSIMERVRTSGKGAHSLKVVVFDDEDYKYAAKVHHRYPDVPFFLQPGNDNVTEEGDISARLLNKLEWLFEKVIADPEMNAARVLPQLHALIWHNKRGK

SEQ ID NO: 32324 - protein, 224 aa, Paenibacillus elgii
  misc_feature (1)..(224): tr|A0A161US47|A0A161US47_9BACL 7-carboxy-7-deazaguanine synthase OS=Paenibacillus elgii OX=189691 GN=queE PE=3 SV=1
MIRLPMVEIFETVEGEGTRAGFPTVFVRLFGCNLRCTWCDTKYSYPPAEAEFTMTIDDIVAEAGRYRSRHVCLTGGEPLLYGDKSAALIEALVATGRYDDLHIETNGAIDLTPFLERIESPIVRYIMDYKLPDSGEEERMVTANLAKLRPQDELKFVIGSERDFHAAKALLEAYPTRALPLFSPVWETMPPAKLVGLMLEHGLSGVKLNMQMHKIIWDPAARGV

SEQ ID NO: 32325 - protein, 245 aa, Paenibacillus etheri
  misc_feature (1)..(245): tr|A0A0W1AYY9|A0A0W1AYY9_9BACL 7-carboxy-7-deazaguanine synthase OS=Paenibacillus etheri OX=1306852 GN=queE PE =3 SV=1
MEAVTVSKIPVIEMFGPTIQGEGTVIGVKTMFVRTYGCDYRCSWCDSAFTWDGTAKNKVQMMAADEIMNELLALAGDNFDCVTISGGNPALIGEGMGTFINLLHERGIQAAIETQGSKWQEWFNDVDVLTISPKPPSSGMTTNWEILDNIMSKMENLGRSTHSLKVVVFDDKDFDYAKDIHRRYPNVQLFLQPGNDDVTEEGDISARLLGRLEWLFNKVILDPEMNRVRVLPQLHALIWHNKRGK

SEQ ID NO: 32326 - protein, 252 aa, Paenibacillus faecis
  misc_feature (1)..(252): tr|A0A5D0CYK2|A0A5D0CYK2_9BACL 7-carboxy-7-deazaguanine synthase OS=Paenibacillus faecis OX=862114 GN=queE PE= 3 SV=1
MNSAERGCGSLPPIPVLEIFGPTVQGEGMVIGQKTMFVRTAGCDYRCAWCDSAFTWDGSAKEQIRRMAPAEILGELRALGGGRFSHVTLSGGNPALLPQLAGLVSLLRREGIAVAVETQGSRWQDWLAEIDQVTISPKPPSSGMDTDWAALDGIVAKLAARPAPLAVSLKVVVFDDADLAYAKRVHARYPGVAMFVQVGNPDVRRMDTLAHAADLLDRYGRLIDRVMDTAELNDVRVLPQLHALVWGNKRGV

SEQ ID NO: 32327 - protein, 226 aa, Paenibacillus ferrarius
  misc_feature (1)..(226): tr|A0A1V4HJ97|A0A1V4HJ97_9BACL 7-carboxy-7-deazaguanine synthase OS=Paenibacillus ferrarius OX=1469647 GN=queE PE=3 SV=1
MRDYRIPMVEIFETVEGEGTRAGFPTVFVRLFGCNLRCTWCDTKYSYPPAEAENVMTIAEIVSKVSSFRSRHICLTGGEPLLYGEKSLALIEALAELEQVDDLHIETNGAIDLALFVERVASPKVRYIMDFKLPDSGEMAQMLTSNFALLREQDELKFVIGSELDFRTAVEVLEQHPTKALPMFSPVWETMPPHKLVEHMLAAGLSKVKLNMQLHKIIWDPAMRGV

SEQ ID NO: 32328 - protein, 242 aa, Paenibacillus ginsengarvi
  misc_feature (1)..(242): tr|A0A3B0BLE2|A0A3B0BLE2_9BACL 7-carboxy-7-deazaguanine synthase OS=Paenibacillus ginsengarvi OX=400777 GN=que E PE=3 SV=1
MSGARFPVMELFGPTVQGEGMVIGRKTMFVRTAGCDYSCSWCDSAFTWDGSGKADIRMMNAQDIYEELYKLGGETFAHVTVSGGNPALLPQLGELIDLLHSRGIGVALETQGSRWQDWFWRIDELTLSPKPPSSGMVTDWAALDSIVARLTERKRLFSLKVVVFGDSDLEYAAGVHERYAHVPFYVQAGNDRLWETEPERLLPYLLERYRWLIDRVMPHPRLRQVHVLPQLHTWIWGNKKGV

SEQ ID NO: 32329 - protein, 258 aa, Paenibacillus glacialis
  misc_feature (1)..(258): tr|A0A168NN24|A0A168NN24_9BACL 7-carboxy-7-deazaguanine synthase OS=Paenibacillus glacialis OX=494026 GN=queE PE=3 SV=1
MSSQNYDKRKPDDHKLGRPLPVLEIFGPTVQGEGMVIGRKTMFVRTAGCDYHCSWCDSSFTWDGSGKDLIKLLSPEQICHELYQVGEDRFSHVTLSGGNPALLPQLGELIQLLHDRNITVAVETQGSRWQDWLIAVDEVTLSPKPPSSGMETEWKMLDIIVDNLRQRPARYSHSLKVVIFDEVDLDYATTVHLRYPETLLYLQVGNSDVHTMDSVQLTTNLLQRYEWLIDKVMESSTLNNVRVLPQLHTLVWGNKRGV

SEQ ID NO: 32330 - protein, 264 aa, Paenibacillus glucanolyticus
  misc_feature (1)..(264): tr|A0A163KND7|A0A163KND7_9BACL 7-carboxy-7-deazaguanine synthase OS=Paenibacillus glucanolyticus OX=59843 GN=q ueE PE=3 SV=1
MNDQHVTTANDPGRGSAAAATVDRPIPVMEIFGPTVQGEGMVVGRKTMFVRTAGCDYRCSWCDSAFTWDGSAKDSISHMSADDIWQELYRLGGERFDHVTLSGGNPALLSQLGSLVNELHRHGITVAVETQGSRWQDWLNEVDEVTISPKPPSSGMATDWGKLDDIISRLSGRPPGRSFSLKVVVFDDHDLAYAETVHERYPNVPFYLQTGNPDVGTGDTTTLVSHLLDRYEQLVEAVMLSDRLNDVRVLPQLHTLVWGNKRGV

SEQ ID NO: 32331 - protein, 240 aa, Paenibacillus graminis
  misc_feature (1)..(240): tr|A0A089M7A6|A0A089M7A6_9BACL 7-carboxy-7-deazaguanine synthase OS=Paenibacillus graminis OX=189425 GN=queE P E=3 SV=1
MSKLPVIEIFGPTIQGEGAVIGVKTMFVRTYGCDYRCSWCDSAFTWDGSAKDKVRMLAPEEIMNELTALAGDNFDCVTISGGNPALIGGGMGTLIQLLHERGIQAAIETQGSRWQDWFYDVDVLTVSPKPPSSGMKTDWNMLDGILDQMKEHGRAAHSLKVVVFNDEDYQYAKSIHRRYPGVPLFLQPGNEDVNEEGDISVRLLARLEWLFNLVIADPEMNKARVLPQLHALIWHNKRGK

SEQ ID NO: 32332 - protein, 243 aa, Paenibacillus hemerocallicola
  misc_feature (1)..(243): tr|A0A5C4T8X5|A0A5C4T8X5_9BACL 7-carboxy-7-deazaguanine synthase OS=Paenibacillus hemerocallicola OX=1172614 G N=queE PE=3 SV=1
MTEGRPIPVIEIFGPTVQGEGMVIGQKTMFVRTAGCDYSCAWCDSAFTWDGSGKADIRLLTAQDVYAEMRHIGGEAFAHATISGGNPALLPQLGELIGLLHGQRIRVALETQGSRWQNWFWDIDDLTLSPKPPSSRMETDWPVLDDIVAKLTERNRSFSLKIVVFDEADLQYAAEVHERYPHVPFYAQAGNGRLSETEPERLLPYLLERYEWLIDRVMAHTGLKQVHVLPQLHTWVWGNKKGV

SEQ ID NO: 32333 - protein, 284 aa, Paenibacillus herberti
  misc_feature (1)..(284): tr|A0A229NYZ7|A0A229NYZ7_9BACL 7-carboxy-7-deazaguanine synthase OS=Paenibacillus herberti OX=1619309 GN=queE PE=3 SV=1
MPTRSATPRRKRIPVLEVFGPTVQGEGMVIGVKTMFVRTAGCDYSCSWCDSAFTWDGSAKDDIRWLEPQEIIDELTALSGGSWPGHVTLSGGNPALLPQLGELISQLQAGGSAVALETQGSRWQDWFLDIDELTLSPKPPSSGMETDWAQLESIVERLVQAGRIPSLKVVVMESKVGAEAAAEHANQPADGDSQATKKPEPAEAGSGWSDLEFAKEVHRRFPAIPMFLQAGNDQLDEPDSAALREHLAARYERLIDEVMSDPEWRRVRILPQLHAWLWGNKRGV

SEQ ID NO: 32334 - protein, 264 aa, Paenibacillus ihbetae
  misc_feature (1)..(264): tr|A0A1B2DXP8|A0A1B2DXP8_9BACL 7-carboxy-7-deazaguanine synthase OS=Paenibacillus ihbetae OX=1870820 GN=queE P E=3 SV=1
MNNQHRKAETGASGGAFAAATVDRPIPVMEIFGPTVQGEGMVVGRKTMFVRTAGCDYRCSWCDSAFTWDGSAADSIRKMSTDEIWQELYRLGGERFDHVTLSGGNPALLSQLGSLVDELHRHGITVAVETQGSRWQDWLNDIDEVTISPKPPSSGMDTDWEKLDIMISRLSARQPGRSFSLKVVVFDDADLAYAETVHERYPNVPFYLQTGNPDVSTSDTASHVGYLLERYEWLVNAVMQSDRLNDVRVLPQLHTLVWGNKRGV

SEQ ID NO: 32335 - protein, 259 aa, Paenibacillus illinoisensis
  misc_feature (1)..(259): tr|A0A2W0C5C2|A0A2W0C5C2_9BACL 7-carboxy-7-deazaguanine synthase OS=Paenibacillus illinoisensis OX=59845 GN=qu eE PE=3 SV=1
MSSVQENVNASSSVQNKEARIPVMEIFGPTVQGEGMVIGQKTMFVRTAGCDYRCSWCDSAFTWDGSGKDQIQMITPEDVWAELRRVGGSRFSHVTISGGNPALLASLGGLVSLLRENGIRTAVETQGSRWQPWLADIDEVTVSPKPPSSGMDTNWDVLDDLINRLSTGPAERSHSLKIVIFDEVDLDYARRVHERYPATDLYLQTGNPDVTSTETPDLASSLLARYEWLIDQVSASDDLNDVRVLPQLHTLVWGNKRGV

SEQ ID NO: 32336 - protein, 240 aa, Paenibacillus jilunlii
  misc_feature (1)..(240): tr|A0A1G9KC13|A0A1G9KC13_9BACL 7-carboxy-7-deazaguanine synthase OS=Paenibacillus jilunlii OX=682956 GN=queE P E=3 SV=1
MSKLPVIEIFGPTIQGEGAVIGVKTMFVRTYGCDYRCGWCDSAFTWDGSAKDKVRMLAPEEIMDELTALAGDNFDCVTLSGGNPALIGEGMGILIQLLQERGIQAAIETQGSRWQDWFYDVDVLTVSPKPPSSGMKTDWNMLDGIMDKMKAQGRAAHSLKVVVFNEEDYQYAKSIHRRYPGVPLYLQPGNEDVTEEGDISVRLLGKLEWLFNLVIADPEMNKARVLPQLHALIWHNKRGK

SEQ ID NO: 32337 - protein, 293 aa, Paenibacillus kribbensis
  misc_feature (1)..(293): tr|A0A222WQ58|A0A222WQ58_9BACL 7-carboxy-7-deazaguanine synthase OS=Paenibacillus kribbensis OX=172713 GN=queE PE=3 SV=1
MNNNTVTAHQATTSSRVLQTAPIPVLEVFGPTVQGEGMVIGRKTMFVRTAGCDYHCSWCDSAFTWDGSAKDQIRRLSAADIWQELKAIGGECFSHVTLSGGNPVLLPQLGELVALLRSQGIATAVETQGSRWQDWLYDIDEVTLSPKPPSSGMTTNWDVLDDIVARLSNRKRTDCKTVGESRSATHVSTAACTEEAVNESARFYHGACSLKVVIFDDTDLAYARTVHQRYPHVPLFLQTGNPDVSTENTEQIAESLLHRYEWLIDRVMDDSRLNDVRVLPQLHTLVWGNKRGV

SEQ ID NO: 32338 - protein, 264 aa, Paenibacillus lactis
  misc_feature (1)..(264): tr|G4HI41|G4HI41_9BACL 7-carboxy-7-deazaguanine synthas e OS=Paenibacillus lactis 154 OX=743719 GN=queE PE=3 SV =1
MNNQHSKAETGTSGGAFAAATVDRPIPVMEIFGPTVQGEGMVVGRKTMFVRTAGCDYRCAWCDSAFTWDGSAADSIRKMSTDEIWQELYRLGGERFDHVTLSGGNPALLSQLGSLVDELHRHGITVAVETQGSRWQDWLNDIDEVTISPKPPSSGMETDWEKLDIMISRLSARQPGRSFSLKVVVFDDTDLAYAETVHERYPNVPFYLQTGNPDVSTSDTSSHVSYLLERYEWLVNAVMQSDRLNDVRVLPQLHTLVWGNKRGV

SEQ ID NO: 32339 - protein, 245 aa, Paenibacillus larvae
  misc_feature (1)..(245): tr|V9W437|V9W437_9BACL 7-carboxy-7-deazaguanine synthas e OS=Paenibacillus larvae subsp. larvae DSM 25430 OX=69 7284 GN=queE PE=3 SV=1
MTNIPVLEIFGPTIQGEGMVIGQKTMFVRTAGCDYRCSWCDSSFTWDGSGKDQIRMLSPEDIVEELKRLGGKRFSHVTISGGNPVLLSQMGKLVSLLQSQGIRTAIETQGSKWQDWLLAVDDVTLSPKPPSSGMTTDWGMLDKIAEKLRGRMQSHPMQRVSLKVVVFDDIDFQYAKRVHQRYPLVPMYLQVGNPDIYTADNAKLLEQLLDRYEWLIRKTVASGDLNDVMVLPQLHAFLWGNKRGV

SEQ ID NO: 32340 - protein, 245 aa, Paenibacillus larvae; identical to SEQ ID NO: 32339
  misc_feature (1)..(245): tr|A0A1V0URX4|A0A1V0URX4_9BACL 7-carboxy-7-deazaguanine synthase OS=Paenibacillus larvae subsp. pulvifaciens O X=1477 GN=queE PE=3 SV=1

SEQ ID NO: 32341 - protein, 264 aa, Paenibacillus lautus
  misc_feature (1)..(264): tr|A0A385TS12|A0A385TS12_PAELA 7-carboxy-7-deazaguanine synthase OS=Paenibacillus lautus OX=1401 GN=queE PE=3 SV=1
MNNVHETPVTDSNGASSPAMTVDRPIPVMEIFGPTVQGEGMVVGRKTMFVRTAGCDYRCSWCDSAFTWDGSAKDSISLLSADEIWQELYRLGGERFDHVTLSGGNPALLPQLGALVDELHRHGITVAVETQGSRWQDWLNHIDEVTISPKPPSSGMDTDWGKLDDIVSRLSARPPGRTFSLKVVVFDDKDLTYAETVHERYPNVPFYLQTGNPDVGTGDTTSLVSHLLDRYESLVDAVMQSDRLNDVRVLPQLHTLVWGNKRGV

SEQ ID NO: 32342 - protein, 245 aa, Paenibacillus lautus
  misc_feature (1)..(245): tr|A0A2A5LJ49|A0A2A5LJ49_PAELA 7-carboxy-7-deazaguanine synthase OS=Paenibacillus lautus OX=1401 GN=queE PE=3 SV=1
MTVDRPIPVMEIFGPTVQGEGMVVGRKTMFVRTAGCDYRCSWCDSAFTWDGSAKDSISLLSADEIWQELYRLGGERFDHVTLSGGNPALLSQLGALVDELHRHGITVAVETQGSRWQDWLNHIDEVTISPKPPSSGMDTDWGKLDDIVSRLSARPPGRTFSLKVVVFDDKDLTYAETVHERYPNVPFYLQTGNPDVGTGDTTSLVSHLLDRYESLVDAVMQSDRLNDVRVLPQLHTLVWGNKRGV

SEQ ID NO: 32343 - protein, 246 aa, Paenibacillus lentus
  misc_feature (1)..(246): tr|A0A3S8RZH7|A0A3S8RZH7_9BACL 7-carboxy-7-deazaguanine synthase OS=Paenibacillus lentus OX=1338368 GN=queE PE =3 SV=1
MSNHQQPIPVLEIFGPTIQGEGMVIGQKTMFVRTAGCDYRCSWCDSAFTWDGSAKDDIRLLTAEDIYAELCSLGGDRFSHVTLSGGNPALLGGLGTLVSLLHERGFIVAVETQGSRWQDWLAEVDEVTLSPKPPSSGMTTDWNMLDEVTSKLSARPYPLKQSLKVVVFDDEDLAYAKEVHVRYPHIPFYLQVGNPDVKRMDIQQHTADLLERYEQLIDQVVSAPELNNVRVLPQLHALVWGNKRGV

SEQ ID NO: 32344 - protein, 244 aa, Paenibacillus macerans
  misc_feature (1)..(244): tr|A0A090Z9L2|A0A090Z9L2_PAEMA 7-carboxy-7-deazaguanine synthase OS=Paenibacillus macerans OX=44252 GN=queE PE =3 SV=1
MNNPPIPVLEVFGPTVQGEGMVIGQKTMFVRTAGCDYRCVWCDSAFTWDGSAKDAIRFMTPAAIWEELREIGGDRFSHVTLSGGNPALLPQLAGLVALLHAKGVAIAVETQGSRWQDWLAEIEQVTLSPKPPSSGMETDWAILDDIVTKLSHRPHPLAVSLKVVVFDEADLAYAKQVHARYPDTPMYVQVGNPDVRRMDIREHAADLLRRYEALIDKVVASSELNNVRVLPQLHALVWGNKRGV

SEQ ID NO: 32345 - protein, 258 aa, Paenibacillus macquariensis
  misc_feature (1)..(258): tr|A0A1N6UXF6|A0A1N6UXF6_9BACL 7-carboxy-7-deazaguanine synthase OS=Paenibacillus macquariensis OX=948756 GN=q ueE PE=3 SV=1
MSSQSYDKRKPDDLKLGRPLPVLEIFGPTVQGEGMVIGRKTMFVRTAGCDYHCSWCDSSFTWDGSGKDLIKLLSPEQICHELYQVGEDRFSHVTLSGGNPALLPQLGELIQLLHDRNITVAVETQGSRWQDWLIAVDEVTLSPKPPSSGMETEWKMLDIIVDKLKQRPAKYSHSLKVVIFDEADLDYAVTIHLRYPDTLLYLQVGNSDVHTMDSTQLTMTLLQRYEWLIDKVMESSTLNNIRVLPQLHTLVWGNKRGV

SEQ ID NO: 32346 - protein, 258 aa, Paenibacillus macquariensis; identical to SEQ ID NO: 32345
  misc_feature (1)..(258): tr|A0A168FMK3|A0A168FMK3_PAEMC 7-carboxy-7-deazaguanine synthase OS=Paenibacillus macquariensis OX=1468 GN=que E PE=3 SV=1

SEQ ID NO: 32347 - protein, 236 aa, Paenibacillus montanisoli
  misc_feature (1)..(236): tr|A0A328UCH1|A0A328UCH1_9BACL 7-carboxy-7-deazaguanine synthase OS=Paenibacillus montanisoli OX=2081970 GN=qu eE PE=3 SV=1
MTDNVAAAAARSFRLPMVEIFETVEGEGTRAGFPTVFVRLFGCNLRCVWCDTKYSYPPAEAEFTMSIEDIVAQVEKQYKAEHICMTGGEPLLYGNKSAALLQALCDIERIKDVHVETNGAIDLEPFLRGVTSSKARYIMDYKLPDSGENEAMLHHNFALLREQDEVKFVIASDRDFDAAVRTLTTSPTAALALFSPVWETMPPAKLVEKMLASGLTGVKLNMQLHKIIWDPAQRGV

SEQ ID NO: 32348 - protein, 244 aa, Paenibacillus mucilaginosus
  misc_feature (1)..(244): tr|F8FPI8|F8FPI8_PAEMK 7-carboxy-7-deazaguanine synthas e OS=Paenibacillus mucilaginosus (strain KNP414) OX=103 6673 GN=queE PE=3 SV=1
MIELEQQELTVQQESIKNPLDIRLPMVEIFETVEGEGTRAGFPTVFIRLFGCNLRCTWCDTKYSYPPAEAEFVMTIGEIVQEAAKYKAKHICFTGGEPLLYGDKSAALIEALVAAGRYTDLHVETNGAVDLAPFLERIDSPVVRYVMDYKLPDSGEQEKMLTGNLALLRPQDELKFVIGSERDFFTAVQVLKDYPTKALPLFSPVWETMPPVKLVGLMLEHGLSHVKLNMQLHKIIWDPAERGV

SEQ ID NO: 32349 - protein, 244 aa, Paenibacillus mucilaginosus; identical to SEQ ID NO: 32348
  misc_feature (1)..(244): tr|H6NA13|H6NA13_9BACL 7-carboxy-7-deazaguanine synthas e OS=Paenibacillus mucilaginosus 3016 OX=1116391 GN=que E PE=3 SV=1

SEQ ID NO: 32350 - protein, 243 aa, Paenibacillus nanensis
  misc_feature (1)..(243): tr|A0A3A1V5U7|A0A3A1V5U7_9BACL 7-carboxy-7-deazaguanine synthase OS=Paenibacillus nanensis OX=393251 GN=queE P E=3 SV=1
MSSARRIPVLEIFGPTVQGEGMVVGRKTMFVRTAGCDYQCSWCDSAFTWDGSGKDDIRLLSAAEVIGELERAGGQAFDHVTVSGGNPALLPQLGGLIDGLHERGIQVALETQGSRWQPWFTAIDDLTLSPKPPSSGMETNWDVLDDIVARLQAAGSRFCLKVVVFDDADLAYARMVHARYPLVPFYAQAGNGNLTETEPAKMLPYLVERYEWLIGQIMADNSLRSVHVLPQLHTWVWGNKKGV

SEQ ID NO: 32351 - protein, 235 aa, Paenibacillus naphthalenovorans
  misc_feature (1)..(235): tr|A0A0U2W0L7|A0A0U2W0L7_9BACL 7-carboxy-7-deazaguanine synthase OS=Paenibacillus naphthalenovorans OX=162209 GN=queE PE=3 SV=1
MSQAAERVDINEIKLPMVEIFETVEGEGSRAGFPTVFIRLFGCNLRCTWCDTKYSYPPAEAEFVMTIGDIVAEASRYSSKHVCLTGGEPLLYGDRSTALIEALAATGRYTDLHIETNGAIDLTPYLERIKSPIVRYIMDYKLPDSGEEDKMITANLSKLRPQDELKFVIGSDRDFLAAKTVLETFPTAALPLFSPVWETMPPDKLVRLMLEHGLSQVKLNMQMHKIIWDPAMRGV

SEQ ID NO: 32352 - protein, 235 aa, Paenibacillus naphthalenovorans
  misc_feature (1)..(235): tr|A0A480BAE4|A0A480BAE4_9BACL 7-carboxy-7-deazaguanine synthase OS=Paenibacillus naphthalenovorans OX=162209 GN=queE PE=3 SV=1
MSQAAERVDINEIKLPMVEIFETVEGEGSRAGFPTVFIRLYGCNLRCTWCDTKYSYPPAEAEFVMTIGDIVAEASRYSSKHVCLTGGEPLLYGDRSTALIEALAATGRYTDLHIETNGAIDLTPYLERIKSPIVRYIMDYKLPDSGEEDKMITANLSKLRPQDELKFVIGSDRDFLAAKTVLETFPTAALPLFSPVWETMPPDKLVRLMLEHGLSQVKLNMQMHKIIWDPAMRGV

SEQ ID NO: 32353 - protein, 297 aa, Paenibacillus nuruki
  misc_feature (1)..(297): tr|A0A1E3KZL5|A0A1E3KZL5_9BACL 7-carboxy-7-deazaguanine synthase OS=Paenibacillus nuruki OX=1886670 GN=queE PE =3 SV=1
MSTTFKVNAEQIAKANQLAGSDTDNHDHSEHPHTPKIAPIPVLEIFGPTVQGEGMVIGQKTMFVRTAGCDYRCSWCDSAFTWDGSAKDQIMRLSAEEVYAQLFDIGGDRFNHVTISGGNPALLPQLGQLVQLLSEKGIRTAVETQGSKWQDWLTDINEVTISPKPPSSGMTTNFEVLDDIIRRLEHNQISRYTAQAQEAPLSYAGTSQFAHSFSLKVVIFDEQDLAYAEKVHLRYPNVLLYLQTGNPDVTSADDQIAASLLKRYEWLIDQAMDMPAFNDARILPQLHTLVWGNKRGV

SEQ ID NO: 32354 - protein, 240 aa, Paenibacillus odorifer
  misc_feature (1)..(240): tr|A0A1R0ZMC7|A0A1R0ZMC7_9BACL 7-carboxy-7-deazaguanine synthase OS=Paenibacillus odorifer OX=189426 GN=queE P E=3 SV=1
MSKIPVIEMFGPTIQGEGAVIGVKTMFVRTYGCDYRCGWCDSAFTWDGTAKDKVRMMTSDEIMNELLAIAGDNFDCVTISGGNPALIGDGMGTFINLLHERGIQAAIETQGSKWQEWFNDVDVLTISPKPPSSGMTTNWEILDNIMSKMEKLGRSMHSLKVVVFDDKDFDYAKDIHQRYPNVQLFLQPGNDDVTEEGDISARLLGRLEWLFNKVIVDADMNRVRVLPQLHALIWHNKRGK

SEQ ID NO: 32355 - protein, 240 aa, Paenibacillus odorifer
  misc_feature (1)..(240): tr|A0A1R0WRS5|A0A1R0WRS5_9BACL 7-carboxy-7-deazaguanine synthase OS=Paenibacillus odorifer OX=189426 GN=queE P E=3 SV=1
MSKIPVIEMFGPTIQGEGAVIGVKTMFVRTYGCDYRCGWCDSAFTWDGTAKNKVRMMEAEEIINELLALAGDNFDCVTISGGNPALIGEGMGTFINLLHERGIKAAIETQGSKWQDWFNDVDVLTISPKPPSSGMTTNWEMLDNIMSKMEKLGRSTHSLKVVVFDDKDFDYAKNVHQRYPNVQLFLQPGNDDVTEEGNISARLLGRLEWLFNKVIVDSDMNKVRVLPQLHALIWHNKRGK

SEQ ID NO: 32356 - protein, 234 aa, Paenibacillus oryzae
  misc_feature (1)..(234): tr|A0A1A5YPD3|A0A1A5YPD3_9BACL 7-carboxy-7-deazaguanine synthase OS=Paenibacillus oryzae OX=1844972 GN=queE PE =3 SV=1
MEVFGPTVQGEGMVIGRKTMFVRTAGCDYQCSWCDSAFTWDGTGKADIRLLSAKEIFDELLAVGGEGFDHVTISGGNPALLPQLASLIDLLHAEGIRVALETQGSRWQPWFTVIDDLTLSPKPPTSGMVTDLGKLDEIIGELSQAKTVFCLKVVVFDEADLAYAKTIHIRYPGVPFYLQAGNGNLLETDPAALLPYLVERYEWLIEFVMDDNELRGVHVLPQLHTWVWGNKKGV

SEQ ID NO: 32357 - protein, 226 aa, Paenibacillus oryzisoli
  misc_feature (1)..(226): tr|A0A198AM36|A0A198AM36_9BACL 7-carboxy-7-deazaguanine synthase OS=Paenibacillus oryzisoli OX=1850517 GN=queE PE=3 SV=1
MRDIRIPMVEIFETVEGEGTRAGFPTIFVRLFGCNLRCSWCDTTYSYPPAEAENVMTIAEIISKVQTFRSRHICLTGGEPLLYGDKSLALIEAIAELAQVDDLHIETNGAIHLAPFIAQVSSPKVRYVMDFKLPDSGEMDRMIYSNFELLREQDELKFVIGSDLDFQTAVSVLQKYPTKALPMFSPVWETMPPRKLVDLMLAEGLSKVKLNMQLHKIIWDPAMRGV

SEQ ID NO: 32358 - protein, 250 aa, Paenibacillus pabuli
  misc_feature (1)..(250): tr|A0A327PJP9|A0A327PJP9_9BACL 7-carboxy-7-deazaguanine synthase OS=Paenibacillus pabuli OX=1472 GN=queE PE=3 SV=1
MSSVERSQEARIPVMEIFGPTVQGEGMVIGQKTMFVRTAGCDYRCSWCDSAFTWDGSGKDLIRMITPEDVWNELRRVGGSRFSHVTISGGNPALLASLGGLVKLLRENGIRTAVETQGSRWQPWLADIDEVTVSPKPPSSGMDTDWAVLDDLIGRLTAGPVERSHSLKIVIFDETDLDYARRVHARYPGTDLFLQTGNPDVTSANTPDLASSLLARYEWLIDQVSASDDLNDVRVLPQLHTLVWGNKRGV

SEQ ID NO: 32359 - protein, 243 aa, Paenibacillus paeoniae
  misc_feature (1)..(243): tr|A0A371PPB0|A0A371PPB0_9BACL 7-carboxy-7-deazaguanine synthase OS=Paenibacillus paeoniae OX=2292705 GN=queE PE=3 SV=1
MSNPRRIPVMEVFGPTVQGEGMVIGRKTMFVRTAGCDYQCAWCDSAFTWDGTGKDEIRLLSAGEVIQELERIGGSSFDHVTLSGGNPALLPQLGELIVGLHERGIKAALETQGSRWQPWFTDIDDLTLSPKPPSSGMTTDWAVLDDIVERLLNQGSDFCLKVVVFDETDLAYGKSVHKRYADVPFYLQAGNGNLTESEPHLMLPYLVERYEWLIELAMADDELRGVHVLPQLHTWVWGNKKGV

SEQ ID NO: 32360 - protein, 278 aa, Paenibacillus pasadenensis
  misc_feature (1)..(278): tr|A0A2N5N128|A0A2N5N128_9BACL 7-carboxy-7-deazaguanine synthase OS=Paenibacillus pasadenensis OX=217090 GN=qu eE PE=3 SV=1
MAERRTRIPVLETFGPTVQGEGMVIGVKTCFVRTAGCDYSCSWCDSAFTWDGSAKDDIRWLEPEDVLEELKALSGGEWPGHVTLSGGNPALLPQLGGLIALLRSGGTIIALETQGSRWQDWFLDVDELTLSPKPPSSGMATDWARLDEIVERLAAAGRSPSLKVVVMEEPASEAGSAAGTSAASETGGARLAVEANGASRQGSDLAYAKEVHRRFPAVSMFLQAGNDRLDEPDPAALREHLAARYERLVDAVMADPDWRHVRVLPQLHAWLWGNKRGV

SEQ ID NO: 32361 - protein, 226 aa, Paenibacillus pectinilyticus
  misc_feature (1)..(226): tr|A0A1C0ZV71|A0A1C0ZV71_9BACL 7-carboxy-7-deazaguanine synthase OS=Paenibacillus pectinilyticus OX=512399 GN= queE PE=3 SV=1
MRDIRIPMVEIFETVEGEGTRAGFPTIFVRLFGCNLRCTWCDTKYSYPPAEAENVMTIAEIVSKVQSFRSRHICLTGGEPLLYGDKSLALIEALAALEQIDDLHIETNGAIDLAPFIAQVSSPKVRYIMDFKLPDSGEMDQMIYSNFPLLREQDELKFVIGSDLDFQTAVDVLAQNPTKALPMFSPVWETMPPRKLVDLMLAAGLSKVKLNMQLHKIIWDPAMRGV

SEQ ID NO: 32362 - protein, 292 aa, Paenibacillus peoriae
  misc_feature (1)..(292): tr|A0A0K2F5V2|A0A0K2F5V2_9BACL 7-carboxy-7-deazaguanine synthase OS=Paenibacillus peoriae OX=59893 GN=queE PE= 3 SV=1
MSNTVTANIVNTHQPMTTPDKASTAPIPVLEVFGPTVQGEGMVIGRKTMFVRTAGCDYHCSWCDSAFTWDGSAKDQIRRLSATDIWQELKAIGGERFSHVTLSGGNPALLPQLGELITLLRSQGIATAVETQGSRWQEWLYDIDEVTLSPKPPSSGMTTNWDVLDDIVARLSNRKMASESRATSNVPTAPGLKEPANESARLYTGACSLKVVIFDDTDLAYARIVHERYPHVPLFLQTGNPDVNTENTGQIAESLLHRYEWLIDRVMDDSRLNDVRVLPQLHTLVWGNKRGV

SEQ ID NO: 32363 - protein, 287 aa, Paenibacillus peoriae
  misc_feature (1)..(287): tr|A0A2S6NWF4|A0A2S6NWF4_9BACL 7-carboxy-7-deazaguanine synthase OS=Paenibacillus peoriae OX=59893 GN=queE PE= 3 SV=1
MSNTVTTHQPMTASHGTKLAPIPVLEVFGPTVQGEGMVIGRKTMFVRTAGCDYHCSWCDSAFTWDGSAKDQIRRLSATDIWQELKAIGGERFSHVTLSGGNPALLPQLGELITLLRSQGIATAVETQGSRWQEWLYDIDEVTLSPKPPSSGMTTNWDVLDDIVARLSNRKMASESRATSSVPTATGLKEPSNESARLYTGACSLKIVIFDDTDLAYARIVHERYPHVPLFLQTGNPDVNTENTGQIAESLLHRYEWLIDRVMDDSRLNDVRVLPQLHTLVWGNKRGV

SEQ ID NO: 32364 - protein, 224 aa, Paenibacillus pini
  misc_feature (1)..(224): tr|W7Y9I5|W7Y9I5_9BACL 7-carboxy-7-deazaguanine synthas e OS=Paenibacillus pini JCM 16418 OX=1236976 GN=queE PE =3 SV=1
MVIGQKTMFVRTAGCDYRCSWCDSSFTWDGSGAGDISKMRAQEIWQELRRIGGDRFSHVTLSGGNPALLPQLSSLVSLLKESGIRMAVETQGSRWQDWLSDVEEVTISPKPPSSGMETNWVTLDSIIANLVNRPSGYTFSLKVVIFNEEDLAYAKRVHTRYPDAAMFLQVGNPDVERMDIQVHASDLLKQYEELIQRVVDSAELNNVRVLPQLHTLVWGNKRGV

SEQ ID NO: 32365 - protein, 243 aa, Paenibacillus pinisoli
  misc_feature (1)..(243): tr|A0A3A6PCN4|A0A3A6PCN4_9BACL 7-carboxy-7-deazaguanine synthase OS=Paenibacillus pinisoli OX=1276110 GN=queE PE=3 SV=1
MNSPRRIPVMEVFGPTVQGEGMVIGRKTMFVRTAGCDYQCAWCDSAFTWDGTGKDEIRLLAASEVMEELERTGGSSFDHVTISGGNPALLPQLGELIARLHERGIKTALETQGSRWQPWFADIDDLTLSPKPPSSGMATDWALLDDIVAKLIEQGSAFCLKVVVFDEADLAYAKTVHKRYADVPFYLQAGNGNLTETEPRLMLPYLVERYEWLIGLAMADSELRGVHVLPQLHTWVWGNKKGV

SEQ ID NO: 32366 - protein, 265 aa, Paenibacillus polymyxa
  misc_feature (1)..(265): tr|E3EFG2|E3EFG2_PAEPS 7-carboxy-7-deazaguanine synthas e OS=Paenibacillus polymyxa (strain SC2) OX=886882 GN=q ueE PE=3 SV=1
MSNTVNANTVTTHQPTTTLDRAKAAPIPVLEVFGPTVQGEGMVIGRKTMFVRTAGCDYHCSWCDSAFTWDGSAKDQIRRLSATDIWQELKSIGGERFSHVTLSGGNPALLPQLGALITLLRSQGIATAVETQGSRWQEWLYDIDEVTLSPKPPSSGMTTNWEVLDDIVTRLSNQRMAGACSLKVVIFNDTDLAYARTIHERYPHIPLFLQTGNPDVNTENTGQIAESLLHRYEWLIDRVMDDSRLNDVRVLPQLHTLVWGNKRGV

SEQ ID NO: 32367 - protein, 287 aa, Paenibacillus polymyxa
  misc_feature (1)..(287): tr|A0A1D7MLE5|A0A1D7MLE5_PAEPO 7-carboxy-7-deazaguanine synthase OS=Paenibacillus polymyxa OX=1406 GN=queE PE= 3 SV=1
MSNTMTTHQPMIASHGTQIAPIPVLEVFGPTVQGEGMVIGRKTMFVRTAGCDYHCSWCDSSFTWDGSSKDQIRRLSATDIWQELKAIGGERFSHVTFSGGNPALLPQLGELITLLRSQGTATAVETQGSRWQEWLYDIDEVTLSPKPPSSGMTTNWDVLDDIVARLSNRKMAGESRATSNVPTATGLKEPANESARLYTGACSLKVVIFDDTDLAYARTVHERYPHVPLFLQTGNPDVNTENTGQIAESLLHRYEWLIDRVMDDSRLNDVRVLPQLHTLVWGNKRGV

SEQ ID NO: 32368 - protein, 245 aa, Paenibacillus polysaccharolyticus
  misc_feature (1)..(245): tr|A0A1G5GH46|A0A1G5GH46_9BACL 7-carboxy-7-deazaguanine synthase OS=Paenibacillus polysaccharolyticus OX=58269 2 GN=queE PE=3 SV=1
MSKEARIPVMEVFGPTVQGEGMVIGQKTMFVRTAGCDYRCSWCDSAFTWDGSGKDQIRMLTPEAVWDELRRLGGTRFSHVTLSGGNPALLASLGGLVALLRENGVRTAVETQGSRWQSWLADVDEVTVSPKPPSSGMDTDWAVLDDMISRLAAGPADRNHSLKIVIFDQTDLNYARRVHARYPGTALFLQTGNPDVSSADTPDLAASLLERYELLIDQVSASDDLNNVRVLPQLHTLVWGNKRGV

SEQ ID NO: 32369 - protein, 241 aa, Paenibacillus popilliae
  misc_feature (1)..(241): tr|M9LA60|M9LA60_PAEPP 7-carboxy-7-deazaguanine synthas e OS=Paenibacillus popilliae ATCC 14706 OX=1212764 GN=q ueE PE=3 SV=1
MTIPVLELFGPTVQGEGMLVGRMTMFVRTAGCDYRCSWCDSAFTWDGSAKDEIRSLTAEDILRELNTLAAGRFDHVTISGGNPALLPGIGDLVHLLREHGICTAVETQGSRWQEWLLDIDDVTLSPKPPSSGMSTDEARLDPIVSELWERPDRKGLCLKIVVFDERDLEYAIRMHERYPDIPFILQTGNDDVRSADDHELIRKLLCRYEWLIEQVAADPRLNRVRVLPQLHTLVWGNKRGV

SEQ ID NO: 32370 - protein, 243 aa, Paenibacillus prosopidis
  misc_feature (1)..(243): tr|A0A368VZ38|A0A368VZ38_9BACL 7-carboxy-7-deazaguanine synthase OS=Paenibacillus prosopidis OX=630520 GN=queE PE=3 SV=1
MSANKRIPVMEIFGPTVQGEGMVIGRKTMFVRTAGCDYSCSWCDSAFTWDGSGKEDIRLLTALEIIEELKQIGGDTFEHVTISGGNPALLPQLGELIDRLHDEGISVALETQGSRWQDWFWAIDELTLSPKPPSSGMTTDWSVLDDIVAKLNGQERNFCLKTVVFNDADLEYATSVHLRYPHIPFYLQAGNGNLQETEPRLMLPYLVERYEWLIERIMPNPDLKRVHVLPQLHTWVWGNKKGV

SEQ ID NO: 32371 - protein, 245 aa, Paenibacillus rhizosphaerae
  misc_feature (1)..(245): tr|A0A1R1F1X6|A0A1R1F1X6_9BACL 7-carboxy-7-deazaguanine synthase OS=Paenibacillus rhizosphaerae OX=297318 GN=q ueE PE=3 SV=1
MDVRMNIPVLEIFGPTVQGEGMVIGQKTMFVRTAGCDYHCSWCDSAFTWDGSAKADIRQMSAGDIWEELQRIGGERFSHVTLSGGNPALLPQLGSLVSLLESHGIRIAVETQGSRWQDWLDDIHEVTLSPKPPSSGMETDWEMLDSIVTRLAARPAAYAYSLKVVVFDDADLAYATKVHARYPQAPMYLQVGNTDLKRMDIAGHAADLLARYERLIDAVVASPELNAVRVLPQLHALVWGNKRGV

SEQ ID NO: 32372 - protein, 219 aa, Paenibacillus rigui
  misc_feature (1)..(219): tr|A0A229ULE0|A0A229ULE0_9BACL 7-carboxy-7-deazaguanine synthase OS=Paenibacillus rigui OX=554312 GN=queE PE=3 SV=1
MVEIFETVEGEGTRAGFPTVFVRLFGCNLRCTWCDTKYSYPPEEAEFVMTMGEIVEQVKGFRSTHVCLTGGEPLLYGDKSAALIEALLGIDRLTDIHVETNGAIDLTLFLERIHSPKVRYVMDYKLPDSGESDKMLLSNFGKLRGQDELKFVIGSLEDFHEARRLLEQVPTKALPLFSPVWETMPPARLVELMLEHGLSQVKLNMQLHKIIWNPAARGV

SEQ ID NO: 32373 - protein, 240 aa, Paenibacillus riograndensis
  misc_feature (1)..(240): tr|A0A0E3WHY8|A0A0E3WHY8_9BACL 7-carboxy-7-deazaguanine synthase OS=Paenibacillus riograndensis SBR5 OX=107357 1 GN=queE PE=3 SV=1
MSKLPVIEIFGPTIQGEGAVIGVKTMFVRTYGCDYRCSWCDSAFTWDGSAKDKVRMLAPEEIMDELAALAGGNFDCVTLSGGNPALIGEGMGRLIQLLHERGIQAAVETQGSRWQNWFYAVDVLTVSPKPPSSGMETDWNMLDGIMDKMKAHGRATHSLKVVVFNDEDYQYAKRVHSRYPGVPFFLQPGNEDVTEEGDISVRLLARLEWLFNLVIADPEMNKARVLPQLHALIWHNKRGK

SEQ ID NO: 32374 - protein, 244 aa, Paenibacillus riograndensis
  misc_feature (1)..(244): tr|A0A132TLG2|A0A132TLG2_9BACL 7-carboxy-7-deazaguanine synthase OS=Paenibacillus riograndensis OX=483937 GN=q ueE PE=3 SV=1
MSFKENPIPVLEIFGPTVQGEGLVIGQKTMFVRTAGCDYSCSWCDSSFTWDGSAKNEIKQLSAQTIYHELKTLGGTTFKHVTISGGNPALLKNIGYLVDLLHDQGIRVGLETQGSRWQEWMADIDDLTISPKPPSSGMITDWDRLDEVMEKLKNSSNEICIKVVVFDEDDLQYAVQVHKRYPHMRLVLQVGNSDVTTGDREGLVFDLLEKYEWLISQVMASSDLRQVKVLPQLHTLLWGNKRGV

SEQ ID NO: 32375 - protein, 241 aa, Paenibacillus sabinae
  misc_feature (1)..(241): tr|X4ZLN4|X4ZLN4_9BACL 7-carboxy-7-deazaguanine synthas e OS=Paenibacillus sabinae T27 OX=1268072 GN=queE PE=3 SV=1
MSAKIPVIEMFGPTIQGEGAVIGVKTMFVRTYGCDYRCSWCDSAFTWDGSSKDKRVMMDAEEIMSGLTELGGNRFDCVTISGGNPALIGEGLSELIDLLHERGIKAAIETQGSRWQDWFLKVDALTISPKPPSSGMSTDWEVLDSIMERVRTSGKGAHSLKVVVFDDEDYKYAAKVHHRYPDIPFFLQPGNDNVTEEGDISTRLLSKLEWLFDKVIADPDMNAARVLPQLHALIWHNKRGK

SEQ ID NO: 32376 - protein, 248 aa, Paenibacillus selenitireducens
  misc_feature (1)..(248): tr|A0A1T2X308|A0A1T2X308_9BACL 7-carboxy-7-deazaguanine synthase OS=Paenibacillus selenitireducens OX=1324314 GN=queE PE=3 SV=1
MMRDASQREIPVLEIFGPTVQGEGMVIGQKTMFVRTAGCDYHCDWCDSAFTWDGSGKDAIRHMHADEIWNELHDIGGNRFSHVTLSGGNPALLPSLGQLVDLLHRQGMTLAVETQGSRWQDWLARVEQVTLSPKPPSSGMSTDWSRLDDIVEKLSKRPVEYAMSLKVVIFDLTDLNYAKEVHSRYPRIPLYLQVGNPDVQRMDIANHASDLLLRYEQLIELVMASSELKDVRVLPQLHSLVWGNKRGV

SEQ ID NO: 32377 - protein, 245 aa, Paenibacillus silvae
  misc_feature (1)..(245): tr|A0A2W6N8U4|A0A2W6N8U4_9BACL 7-carboxy-7-deazaguanine synthase OS=Paenibacillus silvae OX=1325358 GN=queE PE =3 SV=1
MSKEARIPVMEVFGPTVQGEGMVIGQKTMFVRTAGCDYRCFWCDSAFTWDGSGKDQIRMLTPEAVWDELRRLGGTRFSHVTLSGGNPALLASLGGLVALLREHGVRTAVETQGSRWQSWLADIDEVTVSPKPPSSGMDTDWAVLDDVIGRLAAGKADRSHSLKIVIFDQTDLDYARRVHARYPGTALFLQTGNPDVASADTPDLAASLLERYEWLIDQVSASDDLNNVRVLPQLHTLVWGNKRGV

SEQ ID NO: 32378 - protein, 264 aa, Paenibacillus solani
  misc_feature (1)..(264): tr|A0A0M1P0S1|A0A0M1P0S1_9BACL 7-carboxy-7-deazaguanine synthase OS=Paenibacillus solani OX=1705565 GN=queE PE =3 SV=1
MNNTHVTPANENVRDSSPTLTVERPIPVMEIFGPTVQGEGMVVGRKTMFVRTAGCDYRCSWCDSAFTWDGSAKDTISLMNAEEIWQELYRLGGERFDHVTLSGGNPALLSQLGTLVDELHRHGITVAVETQGSRWQDWLNDIDEVTISPKPPSSGMDTDWGKLDDIVSRLSARPPGRTYSLKVVIFDDKDLTYAETVHERYPNVPFYLQTGNPDVGTGNTTELVSHLLGRYEQLVDAVMQSDRLNDVRILPQLHTLVWGNKRGV

SEQ ID NO: 32379 - protein, 241 aa, Paenibacillus sophorae
  misc_feature (1)..(241): tr|A0A1H8FPI4|A0A1H8FPI4_9BACL 7-carboxy-7-deazaguanine synthase OS=Paenibacillus sophorae OX=1333845 GN=queE PE=3 SV=1
MSAKIPVIEMFGPTIQGEGAVIGVKTMFVRTYGCDYRCTWCDSAFTWDGSGKDKRVMMDAEEIMSGLTELGGDRFDCVTISGGNPALIGEGLSELIDLLHERGIKAAIETQGSRWQDWFMEVDALTISPKPPSSGMSTDWDVLDSIMERVRTSGKGNHSLKVVVFDDEDYKYAAQIHHRYPDVPFFLQPGNDNVTEEGDISARLLNKLEWLFEKVIADPEMNAARVLPQLHALIWHNKRGK

SEQ ID NO: 32380 - protein, 275 aa, Paenibacillus sp.
  misc_feature (1)..(275): tr|A0A1H5V4N9|A0A1H5V4N9_9BACL 7-carboxy-7-deazaguanine synthase OS=Paenibacillus sp. UNC499MF OX=1502751 GN=q ueE PE=3 SV=1
MSASRTYAAVPSPPQTLPAAGNTTAVSAAPADKTTPAEATIPVLEIFGPTVQGEGMVIGRKTMFVRTAGCDYRCSWCDSAFTWDGSGAGDIRPLTAEAVWEELVRTGGSRFSHVTLSGGNPALLRSLGPLVKLLRAQGIRTAVETQGSRWQDWLTEIDEVTLSPKPPSSGMETDFAKLDDIVRRLNPDGISLKVVVFDERDFAFAREVHRRYPAVPFYLQAGNEDVRLADDDLLRGQLLRKYEWLVDLTMASEDLNDVRVLPQLHALLWGNKRGV

SEQ ID NO: 32381 - protein, 241 aa, Paenibacillus sp.
  misc_feature (1)..(241): tr|A0A3D9GWH0|A0A3D9GWH0_9BACL 7-carboxy-7-deazaguanine synthase OS=Paenibacillus sp. VMFN-D1 OX=2135608 GN=qu eE PE=3 SV=1
MNIPVLEIFGPTVQGEGMVIGQKTMFVRTAGCDYRCSWCDSAFTWDGSAKADIRQMSAGDIWEELQRIGGERFSHVTLSGGNPALLPQLGSLVSLLESHGIRVAVETQGSRWQDWLDDIHEVTLSPKPPSSGMETDWEMLDSIVTRLAARPAAYAYSLKVVVFDDADLAYAAKVHARYPQAPMYLQVGNPDLKRMDIAGHAADLLARYERLIDAVVASPELNAVRVLPQLHALVWGNKRGV

SEQ ID NO: 32382 - protein, 241 aa, Paenibacillus stellifer
  misc_feature (1)..(241): tr|A0A089LRM6|A0A089LRM6_9BACL 7-carboxy-7-deazaguanine synthase OS=Paenibacillus stellifer OX=169760 GN=queE PE=3 SV=1
MSTKIPVIEMFGPTIQGEGAVIGVKTMFVRTYGCDYRCSWCDSAFTWDGSAKDLRVMMEPEEVLSGLLEIGGDRFDTVTISGGNPALIGEGISELIGLLHDRGIKVAIETQGSRWQDWFLEVDALTVSPKPPSSGMATDWTMLDSILTEVGMNARGSYSLKVVVFDDIDYDYAVQVHKRYPDVPFYLQPGNDNVTEEGDISARLLGRLEWLFNKAIADPDMNAARVLPQLHALIWYNKRGK

SEQ ID NO: 32383 - protein, 247 aa, Paenibacillus swuensis
  misc_feature (1)..(247): tr|A0A172TMJ9|A0A172TMJ9_9BACL 7-carboxy-7-deazaguanine synthase OS=Paenibacillus swuensis OX=1178515 GN=queE PE=3 SV=1
MDQEQEREMERELRAEVNPADAGELRLPMVEIFETVEGEGTRAGFPTVFVRLFGCNLRCTWCDTTYSYPPAEADNFMTIREITQQVMTYRSTHLCLTGGEPLLYGGRSMALIRNLAELPHLVDLHIETNGAIDLKPFMEGVQSSKVRYVMDYKLPDSGEGGKMNTGNLALLRKQDELKFVIGSERDFQAALRILKENPTEALPLFSPVWETMPPRRLVELMLEHGLSQVKLNMQMHKIIWDPAMRGV

SEQ ID NO: 32384 - protein, 250 aa, Paenibacillus taichungensis
  misc_feature (1)..(250): tr|A0A2V3SEJ1|A0A2V3SEJ1_9BACL 7-carboxy-7-deazaguanine synthase OS=Paenibacillus taichungensis OX=484184 GN=q ueE PE=3 SV=1
MSSVERSKEARIPVMEIFGPTVQGEGMVIGQKTMFVRTAGCDYRCSWCDSAFTWDGSGKDLIRMITPEDVWNELCRVGGSRFSHVTISGGNPALLASLGGLVKLLRENGIRTAVETQGSRWQPWLADIDEVTVSPKPPSSGMDTDWAVLDDLIGRLAAGPVERSHSLKIVIFDETDLDYARRVHARYPGTDLFLQTGNPDVTSADTPDLASSLLARYEWLIDQVSASDDLNDVRVLPQLHTLVWGNKRGV

SEQ ID NO: 32385 - protein, 250 aa, Paenibacillus taichungensis
  misc_feature (1)..(250): tr|A0A329R7D3|A0A329R7D3_9BACL 7-carboxy-7-deazaguanine synthase OS=Paenibacillus taichungensis OX=484184 GN=q ueE PE=3 SV=1
MSSVEQIKEARIPVMEIFGPTVQGEGMVIGQKTMFVRTAGCDYRCSWCDSAFTWDGSGKDLIRMITPEDVWNELRRVGGSRFSHVTISGGNPALLASLGGLVKLLRENGIRTAVETQGSRWQSWLADIDEVTVSPKPPSSGMETDWAVLDDLIHRLAARPVGRSHSLKIVIFDGIDLDYARRVHARYPGTDLFLQTGNPDVTSADTPDLASSLLARYEWLIEQVSASADLNDVRVLPQLHTLVWGNKRGV

SEQ ID NO: 32386 - protein, 236 aa, Paenibacillus taihuensis
  misc_feature (1)..(236): tr|A0A3D9S2M4|A0A3D9S2M4_9BACL 7-carboxy-7-deazaguanine synthase OS=Paenibacillus taihuensis OX=1156355 GN=que E PE=3 SV=1
MPVNATEQEKRSIRLPMVEIFETVEGEGTRAGFPTVFVRLFGCNLRCVWCDTKYSYPPAEAEFTMTIEDIVAEVEQKYKAEHICMTGGEPLLYGNRSGELLQALCNIERIKDVHVETNGAIDLAPFLQDIASPKARYIMDYKLPDSGENEAMIHENFSLLREQDEVKFVIASDRDFDAAVETLAKYPTKALALFSPVWESMPPARLVEKMLASGLTGVKLNMQLHKIIWDPAQRGV

SEQ ID NO: 32387 - protein, 290 aa, Paenibacillus terrae
  misc_feature (1)..(290): tr|G7VYT3|G7VYT3_PAETH 7-carboxy-7-deazaguanine synthas e OS=Paenibacillus terrae (strain HPL-003) OX=985665 GN =queE PE=3 SV=1
MSNITATHQTPPRGPKIAPIPVLEVFGPTVQGEGMVIGRKTMFVRTAGCDYHCSWCDSAFTWDGSAKDQIRRLSATDIWQELQAIGGTRFSHVTLSGGNPALLPQLGELITLLRSQGIATAVETQGSRWQEWLYDIDEVTLSPKPPSSGMSTNWDVLDDIVARLSNRKITDWKAAGEPSSASNFSTATCTKEAANESVRFYHGACSLKVVIFDDIDLTYARTVHERYPHVPLFLQTGNPDVNTENTGQIAESLLHRYEWLIDRVMDDSRLNDVRVLPQLHTLVWGNQRGV

SEQ ID NO: 32388 - protein, 271 aa, Paenibacillus terrae
  misc_feature (1)..(271): tr|A0A0D7X6D9|A0A0D7X6D9_9BACL 7-carboxy-7-deazaguanine synthase OS=Paenibacillus terrae OX=159743 GN=queE PE= 3 SV=1
MPVLEVFGPTVQGEGMVIGRKTMFVRTAGCDYHCSWCDSAFTWDGSAKDQIRRLSATDIWQELQSIGGTRFSHVTLSGGNPALLPQLGELITLLRSQNIATAVETQGSRWQEWLYHIDEVTLSPKPPSSGMTTNWDVLDDIVARLSNQKITDWKAAGEPSSASNFSTATCTKEAANESVRYYHGACSLKVVIFDDIDLAYARTVHERYPHVPLFLQTGNPDVNTENTGQIAESLLHRYEWLIDRVMDDSCLNDVRVLPQLHTLVWGNKRGV

SEQ ID NO: 32389 - protein, 244 aa, Paenibacillus thermophilus
  misc_feature (1)..(244): tr|A0A388MPX5|A0A388MPX5_9BACL 7-carboxy-7-deazaguanine synthase OS=Paenibacillus thermophilus OX=1181891 GN=q ueE PE=3 SV=1
MNNPPIPVLEVFGPTVQGEGMVIGQKTMFVRTAGCDYRCAWCDSAFTWDGSAKDAIRFMTPAEIWEELREIGGDRFSHVTLSGGNPALLPQLAGLVALLHAKGVAIAVETQGSRWQDWLAEIEQVTLSPKPPSSGMETDWAILDDIVTKLSHRPHPLAVSLKVVVFDEADLAYAKQVHARYPDTAMYVQVGNPDVRRMDIREHAADLLRRYEALIDKVVASSELNNVRVLPQLHALVWGNKRGV

SEQ ID NO: 32390 - protein, 250 aa, Paenibacillus thiaminolyticus
  misc_feature (1)..(250): tr|A0A3A3H805|A0A3A3H805_PANTH 7-carboxy-7-deazaguanine synthase OS=Paenibacillus thiaminolyticus OX=49283 GN= queE PE=3 SV=1
MLASSLSRKSLIPVIEIFGPTVQGEGVLSGCKTMFVRMAGCDYRCSWCDSAFTWDGSERGRIRMLHAEEIWAELEGLASSRFRHVTLSGGNPALLPQLESLVQLLREHGVKSAVETQGSCWQDWLTEVDDVTISPKPPSSGMETDWGKLDRMIERLTEADRQAAVSLKVVVFDQADLEYAAAIHKRYPNVPFVLQTGNDQLGASDRASLAESLLKRYEWLVDAVSASSELNNVRVLPQLHALVWGNKRGV

SEQ ID NO: 32391 - protein, 241 aa, Paenibacillus thiaminolyticus
  misc_feature (1)..(241): tr|A0A3A3GGT1|A0A3A3GGT1_PANTH 7-carboxy-7-deazaguanine synthase OS=Paenibacillus thiaminolyticus OX=49283 GN= queE PE=3 SV=1
MTIPVLELFGPTVQGEGLLVGRKTMFVRTAGCDYRCSWCDSAFTWDGSAKEEIRSLTAEDILRELNALAAGRFDHVTISGGNPALLPGIGDLVRLLGEHGICTAVETQGSRWQDWLLDIDDVTLSPKPPSSCMSTDQARLDQNVSRLWDRPDRKGLCLKIVVFDERDLAYAIRMHERYPDIPFVLQTGNDDVRSADDNELIRKLLGRYEWLIEQVAADPRLNRARVLPQLHTLVWGNKRGV

SEQ ID NO: 32392 - protein, 224 aa, Paenibacillus tianmuensis
  misc_feature (1)..(224): tr|A0A1G4RPS9|A0A1G4RPS9_9BACL 7-carboxy-7-deazaguanine synthase OS=Paenibacillus tianmuensis OX=624147 GN=que E PE=3 SV=1
MIRLPMVEIFETVEGEGTRAGFPTVFVRLFGCNLRCTWCDTKYSYPPAEAEFTMTIEDIVVEAGRYHSRHVCLTGGEPLLYGDRSAVLIEALVATGRYDDLHIETNGAIDLAPFLERIESPVVRYIMDYKLPDSGEEERMITANLAKLRPQDELKFVIGSERDFHAAKALLEAYPTRALPLFSPVWETMPPAKLVGLMLEHGLSQVKLNMQLHKIIWDPAARGV

SEQ ID NO: 32393 - protein, 240 aa, Paenibacillus typhae
  misc_feature (1)..(240): tr|A0A1G8GVS8|A0A1G8GVS8_9BACL 7-carboxy-7-deazaguanine synthase OS=Paenibacillus typhae OX=1174501 GN=queE PE =3 SV=1
MSKIPVIEIFGPTIQGEGAVIGVKTMFVRTYGCDYRCSWCDSAFTWDGSAKDIVRMLEPEEIMDELLALAGSNFDSVTISGGNPALLGDSMGQFVDLLHERGIQAAIETQGSRWQDWFYEIDALTISPKPPSSGMKTDWAMLDSILEKLKVPGKGTHSLKVVVFNEEDYVYAKTVHQRYPEVQLYLQPGNDDVTEPGDISARLLGRLEWLFNLVIADPAMNRVRVLPQLHALIWHNKRGK

SEQ ID NO: 32394 - protein, 242 aa, Paenibacillus tyrfis
  misc_feature (1)..(242): tr|A0A081NU67|A0A081NU67_9BACL 7-carboxy-7-deazaguanine synthase OS=Paenibacillus tyrfis OX=1501230 GN=queE PE =3 SV=1
MSSNTIPVLEIFGPTVQGEGLVIGQKTMFVRTAGCDYSCSWCDSSFTWDGSAKEEIKQLSAQAIWDELVSIGGITFEHVTISGGNPALIKNIGHLVNLLHDNGVRVGLETQGSRWQTWMRDIDDLTISPKPPSSGMITDWDKLDGIIQNLNGENNEVCIKVVVFDEYDLQYAVKVHKRYPQMRLVLQVGNKDVTTADKEALVFELLERYEWLINQVMDSSELKQVKVLPQLHTLLWGNKRGV

SEQ ID NO: 32395 - protein, 224 aa, Paenibacillus tyrfis
  misc_feature (1)..(224): tr|A0A081P6G0|A0A081P6G0_9BACL 7-carboxy-7-deazaguanine synthase OS=Paenibacillus tyrfis OX=1501230 GN=queE PE =3 SV=1
MIRLPMVEIFETVEGEGTRAGFPTVFVRLFGCNLRCTWCDTKYSYPPAEAEFTMTIEDIVAEAGRYRSRHVCLTGGEPLLYGDKSAALIEALVATGRYDDLHIETNGAMDLTPFLERIESPIVRYIMDYKLPDSGEEERMITANLAKLRPQDELKFVIGSERDFHTARALLEAYPTRALPLFSPVWETMPPAKLVGLMLEHGLSRVKLNMQMHKIIWDPAARGV

SEQ ID NO: 32396 - protein, 266 aa, Paenibacillus uliginis
  misc_feature (1)..(266): tr|A0A1X7HPD6|A0A1X7HPD6_9BACL 7-carboxy-7-deazaguanine synthase OS=Paenibacillus uliginis N3/975 OX=1313296 G N=queE PE=3 SV=1
MSNSETLSPAKLSSGSSAAASVIDRPIPVMEIFGPTVQGEGMVIGRKTMFVRTAGCDYRCSWCDSAFTWDGSGTDSISRMNPEEIWQELFRLGGDRFDHVTLSGGNPALLSQLDGLVNVLHSHGITVAVETQGSRWQDWLIDIDEVTISPKPPSSGMNTDWTKLDDMISRLSARAPGRSFSLKVVIFDDLDLAYAETVHERYPNVPFYVQTGNPDVSTTSEASSHISGLLQRYERLVDAVMQSDRLNDVRVLPQLHTLVWSNKRGV

SEQ ID NO: 32397 - protein, 244 aa, Paenibacillus vortex
  misc_feature (1)..(244): tr|A0A2R9SZ56|A0A2R9SZ56_9BACL 7-carboxy-7-deazaguanine synthase OS=Paenibacillus vortex V453 OX=715225 GN=que E PE=3 SV=1
MTHRENSIPVLEIFGPTVQGEGLVIGQKTMFVRTAGCDYSCSWCDSSFTWDGSAKNEIKQLSAQTIYDELNSLGGTTFEHVTISGGNPALIKNIGYLVDLLHDKGIRVGLETQGSRWQDWMADIDDLTVSPKPPSSGMITDWDRLDGVIKNLNNSPNEICIKVVIFDEDDLQYAIKVHKRYPHMRLVLQVGNSDVTTVDRESLVFALLEKYEWLINQVMVSTELKQVKVLPQLHTLLWGNKRGV

SEQ ID NO: 32398 - protein, 224 aa, Paenibacillus vortex
  misc_feature (1)..(224): tr|A0A2R9SYL3|A0A2R9SYL3_9BACL 7-carboxy-7-deazaguanine synthase OS=Paenibacillus vortex V453 OX=715225 GN=que E PE=3 SV=1
MVVGRKTMFVRTAGCDYRCSWCDSAFTWDGSAKDSISHMSADDIWQELYRLGGERFDHVTLSGGNPALLSQLGSLVNELHRHGITVAVETQGSRWQDWLNEVDEVTISPKPPSSGMATDWGKLDDIISRLSGRPPGRSFSLKVVVFDDHDLAYAETVHERYPNVPFYLQTGNPDVGTGDTTTLVSHLLDRYEQLVEAVMLSDRLNDVRVLPQLHTLVWGNKRGV

SEQ ID NO: 32399 - protein, 226 aa, Paenibacillus whitsoniae
  misc_feature (1)..(226): tr|A0A430J7B1|A0A430J7B1_9BACL 7-carboxy-7-deazaguanine synthase OS=Paenibacillus whitsoniae OX=2496558 GN=que E PE=3 SV=1
MQDYRIPMVEIFETVEGEGTRAGFPTIFVRLFGCNLRCTWCDTKYSYPPAEAENVMTIAEIVSKVQTFRSRHICLTGGEPLLYGEKSLALVEALAALEQVDDLHIETNGAIDLAPFIAKVASPKVRYIMDYKLPDSGEMEQMQTGNFALLREQDELKFVIGSDLDFQTAVDVLESYPTKALPMFSPVWETMPPYKLVEKMLSAGLSKVKLNMQLHKIIWDPAMRGV

SEQ ID NO: 32400 - protein, 240 aa, Paenibacillus wynnii
  misc_feature (1)..(240): tr|A0A098M3S1|A0A098M3S1_9BACL 7-carboxy-7-deazaguanine synthase OS=Paenibacillus wynnii OX=268407 GN=queE PE= 3 SV=1
MSKIPVIEMFGPTIQGEGAVIGVKTMFVRTYGCDYRCSWCDSAFTWDGSAKDKVRMLSADDIIVELTELAGNNFNCVTISGGNPALIGEGMMDLIVKLQERGIKVAIETQGSKWQDWLSRVDMLTISPKPPSSGMTTDWSVLDTLMSRIKTGNVSSYSLKVVVFGDEDYEYARTVHERYPDVPFYLQTGNEDVTEEGDISCRLLGRLEWLFNKVIVDPRMNNARVLPQLHALIWHNKRGK

SEQ ID NO: 32401 - protein, 235 aa, Paenibacillus xerothermodurans
  misc_feature (1)..(235): tr|A0A2W1N8L3|A0A2W1N8L3_9BACL 7-carboxy-7-deazaguanine synthase OS=Paenibacillus xerothermodurans OX=1977292 GN=queE PE=3 SV=1
MRQVSANPDWYNIKLPMVEIFETVEGEGTRAGFPTIFVRLFGCNLRCTWCDTKYSYPPEEADRVMTISQIVQEVRKYRSTHLCLTGGEPLLYGEKSAALIEALIDIDSLTDIHIETNGAIDISMFMDRISSPKVRYIVDYKLPDSGETDKMVLGNLMKLREQDELKFVIGSEQDFAEAVRVLEQYPTMALPLFSPVWETMPPHKLVQLMLEHGLSRVKLNMQLHKIIWDPAARGV

SEQ ID NO: 32402 - protein, 257 aa, Paenibacillus xylanexedens
  misc_feature (1)..(257): tr|A0A3N6CYK4|A0A3N6CYK4_9BACL 7-carboxy-7-deazaguanine synthase OS=Paenibacillus xylanexedens OX=528191 GN=qu eE PE=3 SV=1
MSSVTQQVNETGSRKEARIPVMEIFGPTVQGEGMVIGQKTMFVRTAGCDYRCSWCDSAFTWDGSGKDQIRMITPEDVWEELRRVGGTRFSHVTISGGNPALLASLGGLVALLRENGIRTAVETQGSRWQPWLADIDEVTVSPKPPSSGMDTDWAVLDDLIGRLAAGPVERSHSLKIVIFDETDLDYARRVHARYPGTDLFLQTGNPDVTSADTPDLASSLLARYEWLIDQVSASDDLNNVRVLPQLHTLVWGNKRGV

SEQ ID NO: 32403 - protein, 257 aa, Paenibacillus xylanexedens
  misc_feature (1)..(257): tr|A0A1L5LLL8|A0A1L5LLL8_9BACL 7-carboxy-7-deazaguanine synthase OS=Paenibacillus xylanexedens OX=528191 GN=qu eE PE=3 SV=1
MSSVTQQVNETRSRIEARIPVMEIFGPTVQGEGMVIGQKTMFVRTAGCDYRCSWCDSAFTWDGSGKDQIRMITPEDVWAELRRVGGTRFSHVTISGGNPALLASLGGLVALLRENGIRTAVETQGSRWQPWLANIDEVTVSPKPPSSGMDTDWAVLDDLIERLAAGPVERSHSLKIVIFDEIDLDYARRVHARYPGTDLFLQTGNPDVTSADTPDLASSLLARYEWLIDQVSASDDLNNVRVLPQLHTLVWGNKRGV

SEQ ID NO: 32404 - protein, 247 aa, Paenibacillus yonginensis
  misc_feature (1)..(247): tr|A0A1B1N6K0|A0A1B1N6K0_9BACL 7-carboxy-7-deazaguanine synthase OS=Paenibacillus yonginensis OX=1462996 GN=qu eE PE=3 SV=1
MPPSAAATIPVLEIFGPTVQGEGMVIGQKTMFVRTAGCDYRCSWCDSAFTWDGSAKDQIQRLSAEDIWQRLIELGGDRFSHVTLSGGNPALLPQLGSLVALLREKGISMAVETQGSRWQDWLDDIDEVTLSPKPPSSGMETNFDMLDDIVARLARRPRPFDYSLKVVVFDDQDLDYAIRVHQRYPQAQFYVQVGNPDTVRMDVQEHALFLLQRYEELVEKVMTKPELNRVRVLPQLHALIWGNKRGV

SEQ ID NO: 32405 - protein, 236 aa, Paenimaribius caenipelagi
  misc_feature (1)..(236): tr|A0A547PUR5|A0A547PUR5_9RHOB 7-carboxy-7-deazaguanine synthase OS=Paenimaribius caenipelagi OX=2489174 GN=qu eE PE=3 SV=1
MTVLRIAEIFGPTIQGEGALIGEPTLFVRAGGCDYRCVWCDSLHAVESRYRHTWAPMSSEDVWAELRHLSGDQPVTISLSGGNPAIQDFGPVIALGRAAGYRFACETQGSLARGWFGALDTLVLSPKPPSSGETVDWSVFADCVEAGRAARSTVMKIVVFDQADFDWAKDAHARHPDLPLYLQPGNPEVDPEIPVDPQALADRLGWLTGLAMEDRWFTPRILPQLHVLIWGNKRGV

SEQ ID NO: 32406 - protein, 235 aa, Paenisporosarcina antarctica
  misc_feature (1)..(235): tr|A0A4P6ZUZ6|A0A4P6ZUZ6_9BACL 7-carboxy-7-deazaguanine synthase OS=Paenisporosarcina antarctica OX=417367 GN= queE PE=3 SV=1
MKIPVMEIFGPTIQGEGMVIGQKTMFVRTGGCDYSCSWCDSKFTWDGSGKSTAMKAEEIISSLKDIGGEAFSHITISGGNPALHKGLGELINQCHEQGWKVAVETQGSYWQDWLLDIDDVTISPKPPSSLMTTDFNKLDTFMHNLKVANASLKVVVFNDEDFTYAEVIHQRYPTVPFFLQVGNDDVLTIDDQALVSLLLKRFEWLIDRSMKSTIMNDAKVLPQLHALIWGNKRGV

SEQ ID NO: 32407 - protein, 235 aa, Paenisporosarcina sp.
  misc_feature (1)..(235): tr|S2XDL9|S2XDL9_9BACL 7-carboxy-7-deazaguanine synthas e OS=Paenisporosarcina sp. HGH0030 OX=1078085 GN=queE P E=3 SV=1
MKIPVMEIFGPTIQGEGMVIGQKTMFVRTGGCDYSCSWCDSKFTWDGTGKSTAMKPEEIISSLKEIGGDAFSHITISGGNPALHKGLGEFINQCHEQGWKVAIETQGSFWQDWLTEIDDITISPKPPSSLMVTDFNKLDTFMRNLKDSHISLKVVVFNEEDFDFAEMVHMRYPAVPFYLQVGNEDVLTVDDQALVSTLLTRFEWLIDRAMKSTIMNDAKVLPQLHALVWGNKRGV

SEQ ID NO: 32408 - protein, 235 aa, Paenisporosarcina sp.
  misc_feature (1)..(235): tr|A0A2T6KGG5|A0A2T6KGG5_9BACL 7-carboxy-7-deazaguanine synthase OS=Paenisporosarcina sp. OV554 OX=2135694 GN= queE PE=3 SV=1
MKIPVMEIFGPTIQGEGMVIGQKTMFVRTGGCDYSCSWCDSKFTWDGTGKSTAMKAEEIIETLKEIGGEAFSHITISGGNPALHKGLGEFINQCHEQGWKVAIETQGSFWQDWLLDIDDVTISPKPPSSLMKTDFSKLDLFMQNLVDSNVSLKVVIFDEEDFGYAEMIHTRYPEVPFFLQVGNDDVLTVDDQALVSTLLKRFEWLIDRSMKSTIMNDAKVLPQLHALIWGNKRGV

SEQ ID NO: 32409 - protein, 218 aa, Pajaroellobacter abortibovis
  misc_feature (1)..(218): tr|A0A1L6MZ45|A0A1L6MZ45_9DELT 7-carboxy-7-deazaguanine synthase OS=Pajaroellobacter abortibovis OX=1882918 GN =queE PE=3 SV=1
MAKEDTLVIHEIYTSIQGESTFAGLPCTFIRTTGCNLRCSWCDTPHAFYDGTRMRRQKVLYAALERGTSLIEMTGGEPLLQPAVFPLLEELCNASRTVLLETSGEADVAKVDPRVHKIMDLKPPGSGESHRIRWSNLEFISARDELKFVLANRQDYEWMREMIQTFRLTDRTPHLLASTVFGQLSPQALIQWVLEDRVQVRVQLQLHKYIWPPDIQGV

SEQ ID NO: 32410 - protein, 209 aa, Paludibacter propionicigenes
  misc_feature (1)..(209): tr|E4T1V8|E4T1V8_PALPW 7-carboxy-7-deazaguanine synthas e OS=Paludibacter propionicigenes (strain DSM 17365 / J CM 13257 / WB4) OX=694427 GN=queE PE=3 SV=1
MRSKADEILLNVVEIFHSIQGEGANAGRSAVFVRLSNCNKNCWYCDTDWSKGETMSVSQILAEVNKFVGKKDYPNNLIIWTGGEPTLQLTDEILSHFSEYYNCIETNGTNPVPSLIKYISCSPKVKPEVLRKNFKHVNEFRYPIGDGDVLPDIAELPAADNYIVSPIFLGEAKKRFEQVDENVKYAIDFVKKNPRWRLSLQLHKLLNIP

SEQ ID NO: 32411 - protein, 209 aa, Paludibacterium purpuratum
  misc_feature (1)..(209): tr|A0A4R7B1R1|A0A4R7B1R1_9NEIS 7-carboxy-7-deazaguanine synthase OS=Paludibacterium purpuratum OX=1144873 GN=q ueE PE=3 SV=1
MYTVKEIFYTLQGEGGQTGRAAVFCRFAGCNLWSGKERHRAQAICQFCDTDFVGTGPDGGKFADAEALAERVAAAWPDRNQGRPYVVCTGGEPLLQLDAPLIDALHARGFEVAVETNGTVVAPQGIDWLCVSPKAGAPLRQTSGSELKLVYPQQTALPETFEHLDFTHWYLQPMDGPDADANLQAAIAYCLAHPRWRLSLQTHKTIRIR

SEQ ID NO: 32412 - protein, 243 aa, Paludifilum halophilum
  misc_feature (1)..(243): tr|A0A235B582|A0A235B582_9BACL 7-carboxy-7-deazaguanine synthase OS=Paludifilum halophilum OX=1642702 GN=queE PE=3 SV=1
MRKGWELPSSEGYRDWKLPMVEVFETVEGEGTAAGFPTVFVRLFHCNLRCSWCDTPYSYAPARPEYEAAIGEIVHQVERYASRRICFTGGEPLMHQEKSAALLAALADLDSIEDIHIETNGAIDLAPFDALRRSREDWFRKVRFIMDYKLPASGEEHRMIRGNFDHLTDQDEVKLVIGNEEDFRAAVRVVRQYHRQGQVLFSPVWETMPPRRLVEKVLAEPLPQVKVSLQLHKVIWDPAERGV

SEQ ID NO: 32413 - protein, 242 aa, Paludisphaera borealis
  misc_feature (1)..(242): tr|A0A1U7CXU6|A0A1U7CXU6_9BACT 7-carboxy-7-deazaguanine synthase OS=Paludisphaera borealis OX=1387353 GN=queE PE=3 SV=1
MENAAGSRAETAASIALARRLKPLENKPAGVLVVHEIYRSLQGESTYAGLPCVFVRLTACQLRCVYCDTPHAFQHGEPLSLDDVVEQALKLGDDLVEITGGEPLLQDEVYPLMSRLADHGRTVLLETSGAVDTSLVDPRVRVILDLKTPGSGELAANVWSNLNRLKPIDEVKFVLCSRDDFDWAVDVVHRHDLTRRCPVLFSAVFGQVNPTDLAAWILESRLPIRLQLQQHKILWDPKARGV

SEQ ID NO: 32414 - protein, 231 aa, Panacagrimonas perspica
  misc_feature (1)..(231): tr|A0A4S3K8E1|A0A4S3K8E1_9GAMM 7-carboxy-7-deazaguanine synthase OS=Panacagrimonas perspica OX=381431 GN=queE PE=3 SV=1
MDDAAPAPAATGREAGTQSRRLRITEIFVSLQGESTRVGLPSVFVRLTGCPLRCSYCDTAYAFHGGQSRDLDEVLAEVESYGVRHVCVTGGEPLAQRTCLDLLRALCDRGLSVSLETSGALDVSRVDPRVSRIVDVKTPGSGEALRNLLGNLDLLTPADEIKFVVCSRADYEWARELIAARALAQRCTVLLSPSHGQIEPAELARWIVEDRLPVRFQMQLHKILWGNVAGY

SEQ ID NO: 32415 - protein, 193 aa, Panacibacter ginsenosidivorans
  misc_feature (1)..(193): tr|A0A5B8VGP0|A0A5B8VGP0_9BACT 7-carboxy-7-deazaguanine synthase OS=Panacibacter ginsenosidivorans OX=1813871 GN=queE PE=3 SV=1
MEAFYTLQGEGFHQGRAAYFIRLGGCDVGCSWCDVKESWDALKHPVLSIDKIIAEAKKHPGRLAVVTGGEPLMHDLDALTRALHNAGFENNIETSGSHPLSGTWDWICLSPKKFKAPLPEILPLANELKVVVYNKSDFKWAEDYAAKVSATCKLYLQPEWGKSEKITPLIIDYIKANPQWELSMQLHKYINVP

SEQ ID NO: 32416 - protein, 193 aa, Panacibacter sp.
  misc_feature (1)..(193): tr|A0A4U3L7L2|A0A4U3L7L2_9BACT 7-carboxy-7-deazaguanine synthase OS=Panacibacter sp. 17mud1-8 OX=2575867 GN=qu eE PE=3 SV=1
MEAFYTLQGEGFYQGQAAYFIRLGGCDVGCFWCDVKESWDAAAHPQVAIEEIIAGAAAYPGRIAVVTGGEPLLHNLDELTAELRQAGFQTNIETSGSSPISGKWDWICLSPKKFKAPLPENIPLANELKIIVYNKHDFAWAERFAQQTSKNCRLYLQPEWSKAAEVTPLIVEYIKANPKWQLSLQVHKYINVP

SEQ ID NO: 32417 - protein, 211 aa, Pandoraea apista
  misc_feature (1)..(211): tr|A0A0B5FEC7|A0A0B5FEC7_9BURK 7-carboxy-7-deazaguanine synthase OS=Pandoraea apista OX=93218 GN=queE PE=3 SV= 1
MTYAVKEIFYTLQGEGANAGRPAVFCRFAGCNLWTGREEDRADAVCQFCDTDFVGTDGENGGKYRTPADLVAQIVALWPQGDRAHRFVVCTGGEPLLQLDAPLIEALHAEGFRIAVETNGTQAIPEGIDWVCVSPKADAEMVVTRGDELKVVVPQDRQRLADYEALDFQHFYLQPMDGPLRDTNTKLAIDYCKSHPRWSLSMQTHKYLNIP

SEQ ID NO: 32418 - protein, 211 aa, Pandoraea faecigallinarum
  misc_feature (1)..(211): tr|A0A0H3WRA1|A0A0H3WRA1_9BURK 7-carboxy-7-deazaguanine synthase OS=Pandoraea faecigallinarum OX=656179 GN=que E PE=3 SV=1
MTYAVKEIFYTLQGEGANAGRPAVFCRFAGCNLWTGREEDRAEAVCQFCDTDFVGTDGENGGKYRTPADLVAQIVALWPQGDRAHRFVVCTGGEPLLQLDAPLIDALHAEGFRIAVETNGTQAIPDGIDWVCVSPKADAEMVVTRGDELKVVVPQDRQRLADYEALDFTHFYLQPMDGPLRDTNTRLAIEYCKSHPRWSLSMQTHKYLNIP

SEQ ID NO: 32419 - protein, 211 aa, Pandoraea fibrosis
  misc_feature (1)..(211): tr|A0A5E4VVW1|A0A5E4VVW1_9BURK 7-carboxy-7-deazaguanine synthase OS=Pandoraea fibrosis OX=1891094 GN=queE PE=3 SV=1
MTYAVKEIFYTLQGEGANAGRPAVFCRFAGCNLWTGREEDRAEAVCQFCDTDFVGTDGENGGKYRTPADLVAQIVALWPEGDRAHRFVVCTGGEPLLQLDAPLIDALHAEGFRIAVETNGTQVVPEGIDWVCVSPKADAEMVVTRGDELKVVVPQDRQRLADYEALDFQHFYLQPMDGPLRDTNTKLAIDYCKSHPRWSLSMQTHKYLNIP

SEQ ID NO: 32420 - protein, 211 aa, Pandoraea fibrosis
  misc_feature (1)..(211): tr|A0A0B3SP75|A0A0B3SP75_9BURK 7-carboxy-7-deazaguanine synthase OS=Pandoraea fibrosis OX=1891094 GN=queE PE=3 SV=1
MTYAVKEIFYTLQGEGANAGRPAVFCRFAGCNLWTGREEDRAEAVCQFCDTDFVGTDGENGGKYRTPADLVAQIVALWPEGDRAHRFVVCTGGEPLLQLDSPLIDALHAEGFRIAVETNGTQVVPEGIDWVCVSPKADAEMVVTRGDELKVVVPQDRQRLADYEALDFQHFYLQPMDGPLRDTNTKLAIDYCKSHPRWSLSMQTHKYLNIP

SEQ ID NO: 32421 - protein, 211 aa, Pandoraea norimbergensis
  misc_feature (1)..(211): tr|A0A0U2WJ80|A0A0U2WJ80_9BURK 7-carboxy-7-deazaguanine synthase OS=Pandoraea norimbergensis OX=93219 GN=queE PE=3 SV=1
MTYAVKEIFYTLQGEGANAGRPAVFCRFAGCNLWTGREEDRAEAVCQFCDTEFVGTDGENGGKYRTPADLVAQIVALWPEGDRAHRFVVCTGGEPLLQLDAPLIAALHAEGFRIAVETNGTQVVPEGIDWVCVSPKADAGLVVTRGDELKVVVPQDRQRLAEYETLDFTHFYLQPMDGPLRDTNTKLAIDYCKSHPRWSLSMQTHKYLNIP

SEQ ID NO: 32422 - protein, 211 aa, Pandoraea oxalativorans
  misc_feature (1)..(211): tr|A0A0E3YB47|A0A0E3YB47_9BURK 7-carboxy-7-deazaguanine synthase OS=Pandoraea oxalativorans OX=573737 GN=queE PE=3 SV=1
MTYAVKEIFYTLQGEGANAGRPAVFCRFAGCNLWTGREEDRADAVCQFCDTDFVGTDGENGGKYRTPADLVAQVVALWPQDDRAHRFIVCTGGEPLLQLDAPLIAALHAEGFRIAVETNGTQAIPEGIDWVCVSPKADAELIVTRGDELKVVVPQDRQRLADYEALDFTHFYLQPMDGPLRDTNTKLAIDYCKSHPRWSLSMQTHKYLNIP

SEQ ID NO: 32423 - protein, 211 aa, Pandoraea pnomenusa
  misc_feature (1)..(211): tr|A0A518QXM3|A0A518QXM3_9BURK 7-carboxy-7-deazaguanine synthase OS=Pandoraea pnomenusa OX=93220 GN=queE PE=3 SV=1
MTYAVKEIFYTLQGEGANAGRPAVFCRFAGCNLWTGREEDRAEAVCQFCDTDFVGTDGENGGKYRTPADLVAQIVALWPQGDRAHRFVVCTGGEPLLQLDAPLIDALHAEGFRIAVETNGTQVIPEGIDWVCVSPKADAEMVVTRGDELKVVVPQDRQRLAEYEALDFAHFYLQPMDGPLRDTNTKLAIDYCKSHPRWSLSMQTHKYLNIP

SEQ ID NO: 32424 - protein, 211 aa, Pandoraea pnomenusa
  misc_feature (1)..(211): tr|A0A378YQA7|A0A378YQA7_9BURK 7-carboxy-7-deazaguanine synthase OS=Pandoraea pnomenusa OX=93220 GN=queE PE=3 SV=1
MTYAVKEIFYTLQGEGANAGRPAVFCRFAGCNLWTGREEDRAGAVCQFCDTDFVGTDGENGGKYRTPADLVAQIVALWPRDDRAHRFVVCTGGEPLLQLDAPLIDALHAEGFRIAVETNGTQAIPEGIDWVCVSPKADAEMVVTRGDELKVVVPQDRQRLLEYEALDFAHFYLQPMDGPLRDTNTKLAIDYCKSHPRWSLSMQTHKYLNIP

SEQ ID NO: 32425 - protein, 211 aa, Pandoraea pulmonicola
  misc_feature (1)..(211): tr|A0A378Z4W9|A0A378Z4W9_9BURK 7-carboxy-7-deazaguanine synthase OS=Pandoraea pulmonicola OX=93221 GN=queE PE= 3 SV=1
MTYAVKEIFYTLQGEGANAGRPAVFCRFAGCNLWTGREEDRAEAVCQFCDTDFVGTDGENGGKYRTPAELVAQIVALWPADDRANRFVVCTGGEPLLQLDAPLIDALHAEGFRIAVETNGTQGVPEGIDWVCVSPKADAELVVTHGDELKVVVPQDHQRLADYETLDFAHFYLQPMDGPLRDTNTKLAIDYCKAHPRWSLSMQTHKYLNIP

SEQ ID NO: 32426 - protein, 211 aa, Pandoraea sp.
  misc_feature (1)..(211): tr|A0A1Q4CH76|A0A1Q4CH76_9BURK 7-carboxy-7-deazaguanine synthase OS=Pandoraea sp. 64-18 OX=1895806 GN=queE PE= 3 SV=1
MTYAVKEIFYTLQGEGANAGRPAVFCRFAGCNLWTGREEDRADAVCQFCDTDFIGTDGENGGKYRTPADLVAQIVALWPAGERAHRFVVCTGGEPLLQLDAPLIDALHAEGFRIAVETNGTQAIPEGIDWVCVSPKADAELIVTRGDELKVVVPQDRQRLAEYEALDFQYFYLQPMDGPLRDTNTKLAIDYCKAHPRWSLSMQTHKYLNIP

SEQ ID NO: 32427 - protein, 211 aa, Pandoraea sp.
  misc_feature (1)..(211): tr|A0A522ERZ1|A0A522ERZ1_9BURK 7-carboxy-7-deazaguanine synthase OS=Pandoraea sp. OX=1883445 GN=queE PE=3 SV=1
MTYTVKEIFYTLQGEGANAGRPAVFCRFAGCNLWTGREQDRADAVCRFCDTDFVGTDGENGGKYATPEALAERIASLWPAGDSEHRFVVCTGGEPLLQLDEPLIDALHRSRFRIAIETNGTQPVPPGIDWVCVSPKADAPLVVTRGHELKVVVPQARQSLAGYEALDFEHFYLQPMDGPLREANTRWAIDYCKQHPRWRLSMQTHKYLNIP

SEQ ID NO: 32428 - protein, 211 aa, Pandoraea sputorum
  misc_feature (1)..(211): tr|A0A239S6A7|A0A239S6A7_9BURK 7-carboxy-7-deazaguanine synthase OS=Pandoraea sputorum OX=93222 GN=queE PE=3 S V=1
MTYAVKEIFYTLQGEGANAGRPAVFCRFAGCNLWTGREEDRADAVCQFCDTDFVGTDGENGGKYRTPAELVAQVVALWPQDDRAHRFIVCTGGEPLLQLDAPLIAALHAEGFRIAVETNGTQAIPEGIDWVCVSPKADAELIVTRGDELKVVVPQDRQRLADYEALDFTHFYLQPMDGPLRDTNTRLAIDYCKSHPRWSLSMQTHKYLNIP

SEQ ID NO: 32429 - protein, 211 aa, Pandoraea sputorum
  misc_feature (1)..(211): tr|A0A5E5ANA5|A0A5E5ANA5_9BURK 7-carboxy-7-deazaguanine synthase OS=Pandoraea sputorum OX=93222 GN=queE PE=3 S V=1
MTYAVKEIFYTLQGEGANAGRPAVFCRFAGCNLWTGREEDRAEAVCQFCDTDFVGTDGENGGKYRTPAELVAQVVALWPQDDRAHRFIVCTGGEPLLQLDALLIAALHAEGFRIAVETNGTQAIPEGIDWVCVSPKADAELIVTRGDELKVVVPQDRQRLADYEALDFTHFYLQPMDGPLRDTNTRLAIDYCKSHPRWSLSMQTHKYLNIP

SEQ ID NO: 32430 - protein, 211 aa, Pandoraea terrae
  misc_feature (1)..(211): tr|A0A5E4T9N1|A0A5E4T9N1_9BURK 7-carboxy-7-deazaguanine synthase OS=Pandoraea terrae OX=1537710 GN=queE PE=3 S V=1
MTYAVKEIFYTLQGEGANAGRPAVFCRFAGCNLWTGREEDRAEAVCQFCDTDFVGMDGENGGKFRTPGALVAQIVALWPEGDRAHRFVVCTGGEPLLQLDPALIDALHAEGFTIAVETNGTQPVPDGIDWVCVSPKADAPLVVTRGDELKVVVPQDRQRLADYEALDFKHFYLQPMDGPLRDTNTRLAIDYCKSHPRWSLSMQTHKYLNIP

SEQ ID NO: 32431 - protein, 211 aa, Pandoraea thiooxydans
  misc_feature (1)..(211): tr|A0A0G3ERG7|A0A0G3ERG7_9BURK 7-carboxy-7-deazaguanine synthase OS=Pandoraea thiooxydans OX=445709 GN=queE PE =3 SV=1
MTYTVKEIFYTLQGEGANAGRPAVFCRFAGCNLWTGREQDRADAVCRFCDTDFVGTDGENGGKYATPEALAERIASLWPAGDSAHRFVVCTGGEPLLQLDAPLIDALHRAHFRIAIETNGTQPVPPGIDWVCVSPKADAPLVVTRGHELKVVVPQARQSLADYEALDFEHFYLQPMDGPLREANTRWAIDYCKQHPRWRLSMQTHKYLNIP

SEQ ID NO: 32432 - protein, 211 aa, Pandoraea vervacti
  misc_feature (1)..(211): tr|A0A0C5JM05|A0A0C5JM05_9BURK 7-carboxy-7-deazaguanine synthase OS=Pandoraea vervacti OX=656178 GN=queE PE=3 SV=1
MTYAVKEIFYTLQGEGANAGRPAVFCRFAGCNLWTGREEDRAGAVCQFCDTDFVGTDGENGGKYRTPADLVAQIAALWPQSDRAHRFVVCTGGEPLLQLDAPLIDALHAEGFRIAVETNGTQVIPEGIDWVCVSPKADAEMIVKRGDELKVVVPQDRQRLADYETLDFTHFYLQPMDGPLRDTNTKLAIDYCKSHPRWSLSMQTHKYLNIP

SEQ ID NO: 32433 - protein, 242 aa, Pannonibacter indicus
  misc_feature (1)..(242): tr|A0A0K6HS32|A0A0K6HS32_9RHOB 7-carboxy-7-deazaguanine synthase OS=Pannonibacter indicus OX=466044 GN=queE PE =3 SV=1
MSGEILRISEIFGPTIQGEGALIGMATVFVRTGGCDFRCSWCDTLHAVDSAYRDTWTPMSADAVMDEVRRLSGGEPLMVTVSGGNPAIQPLGRLIELGKREGYRFALETQGSLSRDWFAALDVLSLSPKPPSSGMAFDRKALADAVAAAGPNTAIALKFVVFDEADYGFAREVARAYPHLPVYLQPGNHTPPPAGQEDAVIDIPGIMARLRWLIGRAANDRWFQASILPQLHTLIWGNLRGV

SEQ ID NO: 32434 - protein, 242 aa, Pannonibacter phragmitetus
  misc_feature (1)..(242): tr|A0A379A0L5|A0A379A0L5_9RHOB 7-carboxy-7-deazaguanine synthase OS=Pannonibacter phragmitetus OX=121719 GN=qu eE PE=3 SV=1
MSGQTLRISEIFGPTIQGEGALIGMATVFVRTGGCDFRCSWCDTLHAVDSAYRETWTPMSADAVMDEVRRLSGGAPLMITVSGGNPAIQPLGRLIELGKREGYRFALETQGSLSRDWFAALDVLSLSPKPPSSSMAFDRKALADAIAAAGPGTAIALKFVVFDEPDYGFAREVAGAYPHLPVYLQPGNHTPPPADQEDAVIDIPGIMARMRWLIDRAANDRWFEASILPQLHTLIWGNLRGV

SEQ ID NO: 32435 - protein, 242 aa, Pannonibacter phragmitetus
  misc_feature (1)..(242): tr|A0A0U3E5E7|A0A0U3E5E7_9RHOB 7-carboxy-7-deazaguanine synthase OS=Pannonibacter phragmitetus OX=121719 GN=qu eE PE=3 SV=1
MSGETLRISEIFGPTIQGEGALIGMATVFVRTGGCDFRCSWCDTLHAVDSAYRDTWTPMSADAVMDEVRRLSGGAPLMVTVSGGNPAIQPLGRLIELGKREGYRFALETQGSLSRDWFAGFDVLSLSPKPPSSGMAFDRKALADAVAAAGPNTAIALKFVVFDEADYGFAREVARAYPHLPVYLQPGNHTPPPADQEDAVIDIPGIMARLRWLIDRAANDRWFEASILPQLHTLIWGNLRGV

SEQ ID NO: 32436 - protein, 223 aa, Pantoea alhagi
  misc_feature (1)..(223): tr|A0A1W6B698|A0A1W6B698_9GAMM 7-carboxy-7-deazaguanine synthase OS=Pantoea alhagi OX=1891675 GN=queE PE=3 SV= 1
MQYPINEMFQTLQGEGFYTGVPAIFIRLQGCPVGCSWCDTKHTWDKLADRETSLGDILLKTVETDAWGAADADALLNTINQQQWTARHVVITGGEPCIHDLTPLTEALQQAGFSCQIETSGTYAVRCTAQTWVTVSPKVNMRGGYDVLDQALVRADEIKHPVARQRDIDALDLLLARLKDQKARIIALQPISQKEDATRLCIATCIARNWRLSMQTHKYLNIA

SEQ ID NO: 32437 - protein, 223 aa, Pantoea allii
  misc_feature (1)..(223): tr|A0A4S3BGN3|A0A4S3BGN3_9GAMM 7-carboxy-7-deazaguanine synthase OS=Pantoea allii OX=574096 GN=queE PE=3 SV=1
MFYPINEMFQTLQGEGYYTGVPAIFIRLQGCPVGCSWCDTKHTWEKRTDRETSLGDILIKTVESDAWGDADAATLVSAIGQQGWTARHVVITGGEPAIYDLRPLTTALEQHGFQCQIETSGTHEIHCSEQTWVTVSPKVNMRGGYDVLPQALSRADEIKHPVARERDVEALDLLLAGIDDTKARIIALQPISRKDDATRLCIETCIARNWRLSMQTHKYLNIA

SEQ ID NO: 32438 - protein, 223 aa, Pantoea allii
  misc_feature (1)..(223): tr|A0A2V2BPX2|A0A2V2BPX2_9GAMM 7-carboxy-7-deazaguanine synthase OS=Pantoea allii OX=574096 GN=queE PE=3 SV=1
MQYPINEMFQTLQGEGYYTGVPAIFIRLQGCPVGCSWCDTKHTWEKQADRETSLGDILVKTVESDAWGNADAAMLLSSIQQQGWTARHVVITGGEPAIYDLRPLTASLEAAGFQCQIETSGTHEIHCADATWVTVSPKVNMRGGYDVLAQALSRADEIKHPVARQRDVDALDDLLAGIHDSKARIIALQPISRKDEATKLCIETCIARNWRLSMQTHKYLNIA

SEQ ID NO: 32439 - protein, 223 aa, Pantoea ananas
  misc_feature (1)..(223): tr|A0A2U1D5I0|A0A2U1D5I0_PANAN 7-carboxy-7-deazaguanine synthase OS=Pantoea ananas OX=553 GN=queE PE=3 SV=1
MQYPINEMFQTLQGEGYYTGVPAIFIRLQGCPVGCSWCDTKHTWEKQADRETSLGDILVKTVESDAWGNADTATLLSSIAQQGWTARHVVITGGEPAIYDLRPLTASLEAAGFQCQIETSGTHEIHCSEQTWVTVSPKVNMRGGYDVLAQALSRADEIKHPVARQRDVEALDDLLAGIQDSKARIIALQPISRKDEATKLCIETCIARNWRLSMQTHKYLNIA

SEQ ID NO: 32440 - protein, 223 aa, Pantoea ananas
  misc_feature (1)..(223): tr|A0A2S7ZV66|A0A2S7ZV66_PANAN 7-carboxy-7-deazaguanine synthase OS=Pantoea ananas OX=553 GN=queE PE=3 SV=1
MFYPINEMFQTLQGEGYYTGVPAIFIRLQGCPVGCSWCDTKHTWEKRTDRETSLGDILIKTVESDAWGDADAATLVNAIAQQGWTARHVVITGGEPAIYDLRPLTTALEQHGFQCQIETSGTHEIHCSEQTWVTVSPKVNMRGGYDVLPQALSRADEIKHPVARERDVDALDLLLAGIDDTKARIIALQPISRKDDATRLCIETCIARNWRLSMQTHKYLNIA

SEQ ID NO: 32441 - protein, 223 aa, Pantoea ananatis
  misc_feature (1)..(223): tr|D4GLI4|D4GLI4_PANAM 7-carboxy-7-deazaguanine synthas e OS=Pantoea ananatis (strain LMG 20103) OX=706191 GN=y gcF PE=3 SV=1
MQYPINEMFQTLQGEGYYTGVPAIFIRLQGCPVGCSWCDTKHTWEKQADRETSLGDILVKTVESDAWGNADTATLLSSIAQQGWTARHAVITGGEPAIYDLRPLTASLEAAGFQCQIETSGTHEIHCSEQTWVTVSPKVNMRGGYDVLAQALSRADEIKHPVARQRDVEALDDLLAGIQDSKARIIALQPISRKDEATKLCIETCIARNWRLSMQTHKYLNIA

SEQ ID NO: 32442 - protein, 223 aa, Pantoea ananatis; identical to SEQ ID NO: 32439
  misc_feature (1)..(223): tr|A0A0H3KZA9|A0A0H3KZA9_PANAA 7-carboxy-7-deazaguanine synthase OS=Pantoea ananatis (strain AJ13355) OX=93267 7 GN=ygcF PE=3 SV=1

SEQ ID NO: 32443 - protein, 223 aa, Pantoea anthophila
  misc_feature (1)..(223): tr|A0A506NMP4|A0A506NMP4_9GAMM 7-carboxy-7-deazaguanine synthase OS=Pantoea anthophila OX=470931 GN=queE PE=3 SV=1
MFYPINEMFQTLQGEGYYTGVPALFIRLQGCPVGCSWCDTKHTWDKRADRETSLGDILIKTVESDAWGDADAATLLRAIEQQGWTARHVVITGGEPAIYDLRPLTAALEQQGFQCQIETSGTHEIHCSERTWVTVSPKVNMRGGYDVLPQALSRADEIKHPVARQRDVEALDALLAGIEDSKPRIIALQPISRKEEATRLCIETCIARNWRLSMQTHKYLNIA

SEQ ID NO: 32444 - protein, 223 aa, Pantoea coffeiphila
  misc_feature (1)..(223): tr|A0A2S9I967|A0A2S9I967_9GAMM 7-carboxy-7-deazaguanine synthase OS=Pantoea coffeiphila OX=1465635 GN=queE PE= 3 SV=1
MQYPINEMFQTLQGEGIYTGVPAIFIRLQGCPVGCSWCDTKHTWDKLADRETSLGDILLKTVETDAWGAADADALIGVIRGNGWTANHIVITGGEPCIHDLTPLTASLQQQGFSCQIETSGTHTVRCTPQTWVTVSPKVNMRGGYDVLNQALVRADEVKHPVARQRDVDALDALLATLDDDKARIIALQPISQKADATQLCIDTCIARNWRLSMQTHKYLNIA

SEQ ID NO: 32445 - protein, 223 aa, Pantoea conspicua
  misc_feature (1)..(223): tr|A0A1X1BVY5|A0A1X1BVY5_9GAMM 7-carboxy-7-deazaguanine synthase OS=Pantoea conspicua OX=472705 GN=queE PE=3 S V=1
MQYPINEMFQTLQGEGFYTGVPAIFIRLQGCPVGCSWCDTKHTWEKRADRETSLGDILIKTVESDAWGDADAATLLNAIQQQGWTARHVVITGGEPAIYDLRPLTTALEQHGFQCQIETSGTHDIRCSEQTWVTVSPKVNMRGGYDVLPQALVRADEIKHPVARMRDVEALDELLAGLDDDKARIIALQPISRKDEATRLCIEICIARNWRLSMQTHKYLNIA

SEQ ID NO: 32446 - protein, 223 aa, Pantoea cypripedii
  misc_feature (1)..(223): tr|A0A1X1EXE1|A0A1X1EXE1_PANCY 7-carboxy-7-deazaguanine synthase OS=Pantoea cypripedii OX=55209 GN=queE PE=3 S V=1
MFYPINEMFQTLQGEGFYTGVPALFIRLQGCPVGCSWCDTKHTWEKLADRETSLGDILVKTVESDAWGNADAAMLIESIQRQGWTARHVVITGGEPAIYDLRPLTSALEAAGFQCQIETSGTHEIRCTDTTWVTVSPKVNMRGGYDVLPQALVRADEIKHPVARERDVEALDALLAGLHDEKKRIIALQPISRGDAATKLCIETCIARNWRLSMQTHKYLNIA

SEQ ID NO: 32447 - protein, 223 aa, Pantoea deleyi
  misc_feature (1)..(223): tr|A0A506PY71|A0A506PY71_9GAMM 7-carboxy-7-deazaguanine synthase OS=Pantoea deleyi OX=470932 GN=queE PE=3 SV=1
MFYPINEMFQTLQGEGYYTGVPAIFIRLQGCPVGCSWCDTKHTWEKRADRETSLGDILIKTVESDAWGDADAATLLRAIAEQGWTARHVVITGGEPAIYDLRPLTAALEEQGFQCQIETSGTHEIHCSGQTWVTVSPKVNMRGGYDVLDQALSRADEIKHPVARERDVEALDQLLAGVNDAKARIIALQPISRKEDATRLCIETCIARNWRLSMQTHKYLNIA

SEQ ID NO: 32448 - protein, 223 aa, Pantoea dispersa
  misc_feature (1)..(223): tr|A0A518XFA9|A0A518XFA9_9GAMM 7-carboxy-7-deazaguanine synthase OS=Pantoea dispersa OX=59814 GN=queE PE=3 SV= 1
MFYPINEMFQTLQGEGFYTGVPAIFIRLQGCPVGCSWCDTKHTWEKLANRETSLGDILVKTVESDAWGSADAATLIDTIARQGWTARHVVITGGEPAIFDLRPLTDALEAAGFQCQIETSGTHEVHCSAGTWVTVSPKVNMRGGYDVLPQALQRADEIKHPVARERDVEALDALLAGLHDTKPRIVALQPISRGEAATRLCIETCIARNWRLSMQTHKYLNIA

SEQ ID NO: 32449 - protein, 223 aa, Pantoea dispersa
  misc_feature (1)..(223): tr|A0A437T623|A0A437T623_9GAMM 7-carboxy-7-deazaguanine synthase OS=Pantoea dispersa OX=59814 GN=queE PE=3 SV= 1
MFYPINEMFQTLQGEGFYTGVPAIFIRLQGCPVGCSWCDTKHTWETRADRETSLGDILVKTVESDAWGSADAATLIDSIQRQGWTARHVVITGGEPAIFDLRPLTEALKAAGFQCQIETSGTHEVHCSAATWVTVSPKVNMRGGYDVLPQALQRADEIKHPVARERDVEALDALLAGLQDEKKRIVALQPISRGEAATRLCIETCIARNWRLSMQTHKYLNIA

SEQ ID NO: 32450 - protein, 223 aa, Pantoea eucalypti; identical to SEQ ID NO: 32440
  misc_feature (1)..(223): tr|A0A506P5X3|A0A506P5X3_9GAMM 7-carboxy-7-deazaguanine synthase OS=Pantoea eucalypti OX=470933 GN=queE PE=3 S V=1

SEQ ID NO: 32451 - protein, 223 aa, Pantoea latae
  misc_feature (1)..(223): tr|A0A1V9DCW4|A0A1V9DCW4_9GAMM 7-carboxy-7-deazaguanine synthase OS=Pantoea latae OX=1964541 GN=queE PE=3 SV=1
MQYPINEMFQTLQGEGFYTGVPAIFIRLQGCPVGCSWCDTKHTWEKRADRETALGDILIKTVESEAWGNADAALLIETIQRQGWTARHVVITGGEPAIYDLRPLTTALEAHGFQCQIETSGTHEVHCSDRTWVTVSPKVNMRGGYDVLAQALQRADEIKHPVARERDVEALDELLATLSDNKARIIALQPISRKDAATKLCIDTCIARNWRLSMQTHKYLNIA

SEQ ID NO: 32452 - protein, 223 aa, Pantoea rodasii
  misc_feature (1)..(223): tr|A0A0B1R509|A0A0B1R509_9GAMM 7-carboxy-7-deazaguanine synthase OS=Pantoea rodasii OX=1076549 GN=queE PE=3 SV =1
MFYPINEMFQTLQGEGFYTGVPALFIRLQGCPVGCSWCDTKHTWEKLADRETSLGDILVKTVESDAWGSADAAMLIETIQRQGWTARHVVITGGEPAIFDLRPLTEALEAAGFDCQIETSGTHEVQCSEATWVTVSPKVNMRGGYDVLPQALQRADEIKHPVARERDVEALDALLAGLHDDKNRIVALQPISRGDAATKLCIETCIARNWRLSMQTHKYLNIA

SEQ ID NO: 32453 - protein, 223 aa, Pantoea rodasii
  misc_feature (1)..(223): tr|A0A2M9W8F5|A0A2M9W8F5_9GAMM 7-carboxy-7-deazaguanine synthase OS=Pantoea rodasii OX=1076549 GN=queE PE=3 SV =1
MFYPINEMFQTLQGEGFYTGVPALFIRLQGCPVGCSWCDTKHTWEKLANRETSLGDILVKTVESDAWGSADAAMLIETIQRQGWTARHVVITGGEPAIFDLRPLTEALEAGGFDCQIETSGTHEVQCSDATWVTVSPKVNMRGGYDVLPQALQRADEIKHPVARERDVEALDVLLAGLHDDKKRIVALQPISRGDAATKLCIDTCIARNWRLSMQTHKYLNIA

SEQ ID NO: 32454 - protein, 223 aa, Pantoea rwandensis
  misc_feature (1)..(223): tr|A0A1X1CSD6|A0A1X1CSD6_9GAMM 7-carboxy-7-deazaguanine synthase OS=Pantoea rwandensis OX=1076550 GN=queE PE=3 SV=1
MFYPINEMFQTLQGEGFYTGVPALFIRLQGCPVGCSWCDTKHTWEKLADRETSLGDILIKTVESDAWGSADAAMLIETIQRQGWTARHVVITGGEPAIFDLRPLTEALEAAGFECQIETSGTHEVHCSDATWVTVSPKVNMRGGYDVLPQALQRADEIKHPVARERDVEALDVLLAGLHDDKKRIVALQPISRGDAATKLCIDTCIARNWRLSMQTHKYLNIA

SEQ ID NO: 32455 - protein, 223 aa, Pantoea sesami; identical to SEQ ID NO: 29891
  misc_feature (1)..(223): tr|A0A1M5UH68|A0A1M5UH68_9GAMM 7-carboxy-7-deazaguanine synthase OS=Pantoea sesami OX=1881110 GN=queE PE=3 SV= 1

SEQ ID NO: 32456 - protein, 223 aa, Pantoea sp.
  misc_feature (1)..(223): tr|A0A2S4RNZ6|A0A2S4RNZ6_9GAMM 7-carboxy-7-deazaguanine synthase OS=Pantoea sp. PSNIH5 OX=1758192 GN=queE PE=3 SV=1
MQYPINEMFQTLQGEGFYTGVPAIFIRLQGCPVGCSWCDTKHTWDKLADRETSLGDILIKTVESDAWGAADADALLATIKRQQWTARHVVITGGEPCIHDLTPLTAALQQAGFSCQIETSGTHEVQCSPETWVTVSPKVNMRGGYDVLNQALARADEIKHPVARQRDIDALDELLARLEDEKARIVALQPISQKEDATRLCIATCIARNWRLSMQTHKYLNIA

SEQ ID NO: 32457 - protein, 223 aa, Pantoea sp.; identical to SEQ ID NO: 29506
  misc_feature (1)..(223): tr|A0A519R615|A0A519R615_9GAMM 7-carboxy-7-deazaguanine synthase OS=Pantoea sp. OX=69393 GN=queE PE=3 SV=1

SEQ ID NO: 32458 - protein, 223 aa, Pantoea stewartii
  misc_feature (1)..(223): tr|H3RGW0|H3RGW0_PANSE 7-carboxy-7-deazaguanine synthas e OS=Pantoea stewartii subsp. stewartii DC283 OX=660596 GN=ygcF PE=3 SV=1
MQYPINEMFQTLQGEGYYTGVPAIFIRLQGCPVGCSWCDTKHTWEKQADRETALGDILVKTVESDAWGNADVPMLLSSIAQQGWTARHIVITGGEPAIYDLRPLTDALEAAGFQCQIETSGTHEIHCSAQTWVTVSPKVNMRGGYDVLAQALSRADEIKHPVARQRDVEALDDLLAGIQDTKARIIALQPISRKDDATKLCIETCIARNWRLSMQTHKYLNIA

SEQ ID NO: 32459 - protein, 223 aa, Pantoea vagans
  misc_feature (1)..(223): tr|E1SC31|E1SC31_PANVC 7-carboxy-7-deazaguanine synthas e OS=Pantoea vagans (strain C9-1) OX=712898 GN=queE PE= 3 SV=1
MFYPINEMFQTLQGEGYYTGVPAIFIRLQGCPVGCSWCDTKHTWEKRADRETSLGDILIKTVESDAWGDADASTLLRSIEQQGWTARHVVITGGEPAIYDLRPLTTILEQHGFQCQIETSGTHEIHCSEQTWVTVSPKVNMRGGYDVLPQALSRADEIKHPVARQRDVDALDGLLAGIDDTKARIIALQPISRKDDATRLCIETCIARNWRLSMQTHKYLNIA

SEQ ID NO: 32460 - protein, 223 aa, Pantoea vagans
  misc_feature (1)..(223): tr|A0A2R4JB76|A0A2R4JB76_9GAMM 7-carboxy-7-deazaguanine synthase OS=Pantoea vagans OX=470934 GN=queE PE=3 SV=1
MFYPINEMFQTLQGEGYYTGVPAIFIRLQGCPVGCSWCDTKHTWEKRADRETSLGDILIKTVESDAWGDADAVTLLRSIEQQGWTARHVVITGGEPAIYDLRPLTTILEQHGFQCQIETSGTHEIHCSEQTWVTVSPKVNMRGGYDVLPQALSRADEIKHPVARQRDVDALDGLLAGIDDTKARIIALQPISRKDDATRLCIETCIARNWRLSMQTHKYLNIA

SEQ ID NO: 32461 - protein, 223 aa, Pantoea wallisii
  misc_feature (1)..(223): tr|A0A1X1DA69|A0A1X1DA69_9GAMM 7-carboxy-7-deazaguanine synthase OS=Pantoea wallisii OX=1076551 GN=queE PE=3 S V=1
MFYPINEMFQTLQGEGFYTGVPAIFIRLQGCPVGCSWCDTKHTWEKHADRETSLGDILVKTVESDAWGSADAATLIETIQRQGWTARHIVITGGEPAIFDLRPLTDALEAGGFQCQIETSGTHEVHCSAATWVTVSPKVNMRGGYDVLPQALQRADEIKHPVARERDVEALDALLAGLGDEKKRIVALQPISRGDAATKLCIETCIARNWRLSMQTHKYLNIA

SEQ ID NO: 32462 - protein, 180 aa, Parabacteroides acidifaciens
  misc_feature (1)..(180): tr|A0A3D8HF56|A0A3D8HF56_9BACT 7-carboxy-7-deazaguanine synthase OS=Parabacteroides acidifaciens OX=2290935 GN =queE PE=3 SV=1
MRKINEIFYSLQGEGFHTGTPAVFIRFSGCNLKCSFCDTRHEDGTLMSDEEILQAVSAYPSNVVILTGGEPSLWIDQSFIDLLHQAGKYICIETNGTNPLPEGIDWVTCSPKGAPLRLTHIDEIKVVYTGQDLTAYANLKASWHFLQPCSCQNTKEVVEYILHHPLWRLSLQTHKLIDIN

SEQ ID NO: 32463 - protein, 181 aa, Parabacteroides chinchillae
  misc_feature (1)..(181): tr|A0A1H5Y8R5|A0A1H5Y8R5_9BACT 7-carboxy-7-deazaguanine synthase OS=Parabacteroides chinchillae OX=871327 GN=q ueE PE=3 SV=1
MRKINEIFYSLQGEGFHAGTPAIFIRFSGCNLKCNFCDTQHESGELMSDKDILQTIDGYPANMVILTGGEPSLWIDDLFIKQLHQAGKIVCIETNGTRSIPASIDWVTCSPKQDAPVLLNRMDEVKVVYTGQDVSPYLELPAQHHYLQPCSCKNTKEVVDYILAHPKWKLSLQTHKLIHIQ

SEQ ID NO: 32464 - protein, 181 aa, Parabacteroides distasonis
  misc_feature (1)..(181): tr|A0A174VK93|A0A174VK93_9BACT 7-carboxy-7-deazaguanine synthase OS=Parabacteroides distasonis OX=823 GN=queE PE=3 SV=1
MRKINEIFYSLQGEGFHTGTPAVFVRFSGCNLRCSFCDTRHEEGVMMTDEEIVEKVSSFPARMVILTGGEPSLWIDKALISRLREAGKQICIETNGTRPLPDGIDWVTCSPKENAPVVLERVDEIKVVYTGQDLSAYAEIPARYHFLQPCSCQNTKEVVDYILRHPRWRLSLQTHKLIDIQ

SEQ ID NO: 32465 - protein, 181 aa, Parabacteroides distasonis
  misc_feature (1)..(181): tr|A0A3L7ZZ39|A0A3L7ZZ39_9BACT 7-carboxy-7-deazaguanine synthase OS=Parabacteroides distasonis OX=823 GN=queE PE=3 SV=1
MRKINEIFYSLQGEGFHTGTPAVFVRFSGCNLRCGFCDTRHEEGVMMTDEEIVEKVSSFPARMVILTGGEPSLWIDKSLISRLREAGKQVCIETNGTRPLPDGIDWVTCSPKENAPVVLERIDEIKVVYTGQDLSAYAEMPARYHFLQPCSCRNTEEVVDYILRHPRWRLSLQTHKLIDIR

SEQ ID NO: 32466 - protein, 181 aa, Parabacteroides goldsteinii
  misc_feature (1)..(181): tr|K5Y108|K5Y108_9BACT 7-carboxy-7-deazaguanine synthas e OS=Parabacteroides goldsteinii CL02T12C30 OX=999418 G N=queE PE=3 SV=1
MRKINQIFYSLQGEGFYTGRAAVFIRFSGCNLKCSFCDTEHEEGTLMSDEEILEAISAYPSDMVILTGGEPALWIDKAFIDMLHKAGKYICIETNGTRPLPKGIDWVTCSPKEGAPLKIDHMDEVKVVYLGQDLSSYIKLPAKYHFLQPCSCRNTMEIVNYILQHPEWQLSLQTHKLIDIA

SEQ ID NO: 32467 - protein, 181 aa, Parabacteroides goldsteinii
  misc_feature (1)..(181): tr|A0A0J6C6V0|A0A0J6C6V0_9BACT 7-carboxy-7-deazaguanine synthase OS=Parabacteroides goldsteinii OX=328812 GN=q ueE PE=3 SV=1
MRKINQIFYSLQGEGFYTGRAAVFIRFSGCNLKCSFCDTEHEEGTLMSDEEILEAISAYPSDMVILTGGEPALWIDEAFIDMLHKAGKYICIETNGTRPLPKGIDWVTCSPKEGAPLKIDHMDEVKVVYLGQDLSSYIKLPAKYHFLQPCSCRNTMEIVNYILQHPEWQLSLQTHKLIDIA

SEQ ID NO: 32468 - protein, 190 aa, Parabacteroides gordonii
  misc_feature (1)..(190): tr|A0A0F5J8S1|A0A0F5J8S1_9BACT 7-carboxy-7-deazaguanine synthase OS=Parabacteroides gordonii MS-1 = DSM 23371 OX=1203610 GN=queE PE=3 SV=1
MNQNQTQRSMRKINQIFYSLQGEGYHTGKAAVFIRFSGCNLKCSFCDTEHEEGTLMSDEEIIRTISAYPSNLVVLTGGEPALWIDEEFIDLLHKEGKYICIETNGTRKLPANIDWVTCSPKEGAPICIDRMDEVKVVYLGQDLSSYINLPAKHHYIQPCSCRNTPEIVEYILQHPEWQLSLQTHKLIDIP

SEQ ID NO: 32469 - protein, 180 aa, Parabacteroides johnsonii
  misc_feature (1)..(180): tr|B7B7W9|B7B7W9_9BACT 7-carboxy-7-deazaguanine synthas e OS=Parabacteroides johnsonii DSM 18315 OX=537006 GN=q ueE PE=3 SV=1
MRKINEIFYSLQGEGFHTGTPAVFVRFSGCNLKCSFCDTRHEEGILMSDEDILQAISAFPSNVVILTGGEPSLWIDQTFIDLLHMAGKYICIETNGTNPLPEGIDWVTCSPKGFPLRLAHIDEVKVVYTGQDLTEYAGLEATWHFLQPCSCLNTKEVVEYILHHPQWRLSLQTHKLIDIS

SEQ ID NO: 32470 - protein, 180 aa, Parabacteroides johnsonii
  misc_feature (1)..(180): tr|K5YS86|K5YS86_9BACT 7-carboxy-7-deazaguanine synthas e OS=Parabacteroides johnsonii CL02T12C29 OX=999419 GN= queE PE=3 SV=1
MRKINEIFYSLQGEGFHTGTPAVFVRFSGCNLKCSFCDTRHEEGILMSDEDILQAISAFPSNVVILTGGEPSLWIDQTFIDLLHMAGKYICIETNGTNPLPEGIDWVTCSPKGFPLRLAHIDEVKVVYTGQDLTEYAGLKATWHFLQPCSCLNTKEVVEYILHHPQWRLSLQTHKLIHIS

SEQ ID NO: 32471 - protein, 181 aa, Parabacteroides merdae
  misc_feature (1)..(181): tr|A0A4Q5CCM8|A0A4Q5CCM8_9BACT 7-carboxy-7-deazaguanine synthase OS=Parabacteroides merdae OX=46503 GN=queE PE =3 SV=1
MKKINEIFYSIQGEGYFTGTPTVFVRFSGCNLRCPFCDTEHKEGKMLSDDDIIAEINRYPVLHVVLTGGEPCMQVTYDLVDKIKATGRFVQIETNGTLVPPVNIDWITCSPKDGGKTVVINPNELKVVYIGQDMSQYDKYSAGIYYLQPCSGQNTKEVINYIKEHPKWKLSLQTHKILNVR

SEQ ID NO: 32472 - protein, 180 aa, Parabacteroides merdae
  misc_feature (1)..(180): tr|A0A412LT92|A0A412LT92_9BACT 7-carboxy-7-deazaguanine synthase OS=Parabacteroides merdae OX=46503 GN=queE PE =3 SV=1
MRKINEIFYSLQGEGFHTGTPAVFVRFSGCNLKCSFCDTRHEEGILMSDEEILRAISAFPSNVVILTGGEPSLWIDQAFIDLLHRAGKYICIETNGTKPLPKGIDWVTCSPKGTPLQLTHIDEVKVVYTGQDLTEYTGLEATWHFLQPCSCRNTKEVVEYILHHPQWRLSLQTHKLINIR

SEQ ID NO: 32473 - protein, 181 aa, Parabacteroides sp.; identical to SEQ ID NO: 32464
  misc_feature (1)..(181): tr|E1YVT4|E1YVT4_9BACT 7-carboxy-7-deazaguanine synthas e OS=Parabacteroides sp. 20_3 OX=469591 GN=queE PE=3 SV =1

SEQ ID NO: 32474 - protein, 181 aa, Parabacteroides sp.
  misc_feature (1)..(181): tr|C7XB66|C7XB66_9BACT 7-carboxy-7-deazaguanine synthas e OS=Parabacteroides sp. D13 OX=563193 GN=queE PE=3 SV= 1
MRKINEIFYSLQGEGFHTGTPAVFVRFSGCNLRCGFCDTRHEEGVMMTDEEIVEKVSSFPARMVILTGGEPSLWIDKALISRLREAGKQICIETNGTRPLPDGIDWVTCSPKENAPVVLERVDEIKVVYTGQDLSAYAEIPARYHFLQPCSCQNTKEVVDYILRHPRWRLSLQTHKLIDIQ

SEQ ID NO: 32475 - protein, 210 aa, Paraburkholderia aromaticivorans
  misc_feature (1)..(210): tr|A0A248VFB1|A0A248VFB1_9BURK 7-carboxy-7-deazaguanine synthase OS=Paraburkholderia aromaticivorans OX=202619 9 GN=queE PE=3 SV=1
MTYAVKEIFYTLQGEGANAGRPAVFCRFAGCNLWSGREEDRAEAVCRFCDTDFVGTDGENGGKYRTAEELVQMIASQWPQGEGERFVVCTGGEPMLQIDPPLVDALHAAGFEIAIETNGSLPVLETIDWICVSPKADAPLVVTRGNELKVVIPQDNQRLSEYAKLDFEYFLVQPMDGPSRDINTKLAIDWCKRHPQWRLSMQTHKYLNIP

SEQ ID NO: 32476 - protein, 210 aa, Paraburkholderia aspalathi
  misc_feature (1)..(210): tr|A0A1I7CGD5|A0A1I7CGD5_9BURK 7-carboxy-7-deazaguanine synthase OS=Paraburkholderia aspalathi OX=1324617 GN=q ueE PE=3 SV=1
MTYAVKEIFYTLQGEGANAGRPAVFCRFAGCNLWSGREEDRADAVCRFCDTDFVGTDGENGGKYRTPEELVQMIASQWPEGEGERFVVCTGGEPMLQIDQPFVDALHAAGFEIAIETNGSLPVLETIDWICVSPKADAPLVVTKGNELKVVIPQDNQRLSEYAKLDFEYFLVQPMDGPSRDLNTKLAIDWCKRHPQWRLSMQTHKYLNIP

SEQ ID NO: 32477 - protein, 210 aa, Paraburkholderia azotifigens
  misc_feature (1)..(210): tr|A0A5C6VTR2|A0A5C6VTR2_9BURK 7-carboxy-7-deazaguanine synthase OS=Paraburkholderia azotifigens OX=2057004 GN =queE PE=3 SV=1
MTYAVKEIFYTLQGEGANAGRPAVFCRFAGCNLWSGREEDRAQAVCKFCDTDFVGTDGENGGKFRTPEELAAKIASLWPEGEGQRFVVCTGGEPMLQIDQPLVDALHAQGFEIAIETNGSLPVLDTIDWICVSPKADAPLVQTKGNELKVVVPQDNQRLADYAKLEFDYFLVQPMDGPSRDINTKLAIDWCKRHPQWRLSMQTHKYLNIP

SEQ ID NO: 32478 - protein, 210 aa, Paraburkholderia bryophila
  misc_feature (1)..(210): tr|A0A329C051|A0A329C051_9BURK 7-carboxy-7-deazaguanine synthase OS=Paraburkholderia bryophila OX=420952 GN=qu eE PE=3 SV=1
MTYAVKEIFYTLQGEGANAGRPAVFCRFAGCNLWSGREEDRADAVCRFCDTDFVGTDGENGGKYRTPEELVQMIASQWPEGEGERFVVCTGGEPMLQIDSPLVDALHAAGFEIAIETNGSLPVLETIDWICVSPKADAPLVVTKGNELKVVIPQDNQRLSEYAKLDFEYFLVQPMDGPSRDLNTKLAIDWCKRHPQWRLSMQTHKYLNIP

SEQ ID NO: 32479 - protein, 210 aa, Paraburkholderia caballeronis
  misc_feature (1)..(210): tr|A0A1H7HCU2|A0A1H7HCU2_9BURK 7-carboxy-7-deazaguanine synthase OS=Paraburkholderia caballeronis OX=416943 GN =queE PE=3 SV=1
MTYAVKEIFYTLQGEGANAGRPAVFCRFAGCNLWSGREEDRSDAVCRFCDTDFVGTDGENGGKYRSAEELVAKIASLWPEGEGNRFVVCTGGEPMLQIDPPFVDALHAAGFEIAIETNGSLPVLDTIDWICVSPKADAPLVVTKGNELKVVVPQDNQRLADYAKLDFQYFLVQPMDGPSRDLNTKLAIDWCKRHPQWRLSMQTHKYLNIP

SEQ ID NO: 32480 - protein, 210 aa, Paraburkholderia caribensis
  misc_feature (1)..(210): tr|A0A0P0R5B7|A0A0P0R5B7_9BURK 7-carboxy-7-deazaguanine synthase OS=Paraburkholderia caribensis MBA4 OX=132366 4 GN=queE PE=3 SV=1
MTYAVKEIFYTLQGEGANAGRPAVFCRFAGCNLWSGREEDRADAVCQFCDTDFVGTDGENGGKFRTPEELAAKIASLWPEGEGQRFVVCTGGEPMLQMDQPLVDALHAQGFEIAIETNGSLPVLDTIDWICVSPKADAPLVQTKGNELKVVVPQENQRLADYAKLDFDYFLVQPMDGPSRDINTKLAIDWCKRHPQWRLSMQTHKYLNIP

SEQ ID NO: 32481 - protein, 210 aa, Paraburkholderia caribensis
  misc_feature (1)..(210): tr|A0A2T3YLC4|A0A2T3YLC4_9BURK 7-carboxy-7-deazaguanine synthase OS=Paraburkholderia caribensis OX=75105 GN=qu eE PE=3 SV=1
MTYAVKEIFYTLQGEGANAGRPAVFCRFAGCNLWSGREEDRADAVCQFCDTDFVGTDGENGGKFRTPEELAAKIASLWPEGEGQRFVVCTGGEPMLQIDQPLVDAFHAQGFEIAIETNGSLPVLDTIDWICVSPKADAPLVQTKGNELKVVVPQENQRLADYAKLDFDYFLVQPMDGPSRDINTKLAIDWCKRHPQWRLSMQTHKYLNIP

SEQ ID NO: 32482 - protein, 235 aa, Paraburkholderia diazotrophica
  misc_feature (1)..(235): tr|A0A1H7EFD1|A0A1H7EFD1_9BURK 7-carboxy-7-deazaguanine synthase OS=Paraburkholderia diazotrophica OX=667676 G N=queE PE=3 SV=1
MQCDVSSVAVPPVGSYPVNEIFESLQGEGSFTGTPSVFVRLQGCPVGCAWCDSKHTWQVMPEREISVGAMGDKTGRPCDSYAWCDVPTLANIVRAADAEHVVITGGEPCMYDLRPLIAKLEAWHHRVQVETSGTYVPLVTPSTFVTTSPKYGMPSGRPVLDEALARANEIKYPVGKQRDIDIVLERLDPIQRARGTPIWLQPLSLSSRATGICMKAAHRYGWRVSLQTNKFINIR

SEQ ID NO: 32483 - protein, 210 aa, Paraburkholderia diazotrophica
  misc_feature (1)..(210): tr|A0A1H6RE95|A0A1H6RE95_9BURK 7-carboxy-7-deazaguanine synthase OS=Paraburkholderia diazotrophica OX=667676 G N=queE PE=3 SV=1
MTYAVKEIFYTLQGEGANAGRPAVFCRFAGCNLWSGREEDRADAVCKFCDTDFVGTDGENGGKFRTPEELAAKIASLWPEGEDQRFVVCTGGEPMLQIDQPFVDALHAAGFEIAIETNGSLPVLDTIDWICVSPKADAPLVQTKGNELKVVVPQENQRLADYAKLDFDYFLVQPMDGPSRDINTKLAIDWCKRHPQWRLSMQTHKYLNIP

SEQ ID NO: 32484 - protein, 210 aa, Paraburkholderia dipogonis
  misc_feature (1)..(210): tr|A0A4Y8N7H7|A0A4Y8N7H7_9BURK 7-carboxy-7-deazaguanine synthase OS=Paraburkholderia dipogonis OX=1211383 GN=q ueE PE=3 SV=1
MTYAVKEIFYTLQGEGANAGRPAVFCRFAGCNLWSGREEDRAEAVCRFCDTDFVGTDGENGGKYRTADDLVKMIASQWPEGEGERFVVCTGGEPMLQIDQPLVDALHAAGFEIAIETNGSLPVLETIDWICVSPKADAPLVVTKGNELKVVIPQDNQRLSEYAKLDFEYFLVQPMDGPSRDLNTRLAIDWCKRHPQWRLSMQTHKYLNIP

SEQ ID NO: 32485 - protein, 210 aa, Paraburkholderia eburnea
  misc_feature (1)..(210): tr|A0A2S4MP40|A0A2S4MP40_9BURK 7-carboxy-7-deazaguanine synthase OS=Paraburkholderia eburnea OX=1189126 GN=que E PE=3 SV=1
MTYAVKEIFYTLQGEGANAGRPAVFCRFAGCNLWSGREEDRESAQCRFCDTDFVGTDGENGGKFRTPEELVAKIASLWPEGEGNRFVVCTGGEPMLQIDQPFVDALHAAGFEIAIETNGSLPVLETIDWICVSPKADAPLVVTRGNELKVVVPQDNQRLADYAKLDFEYFLVQPMDGPSRDLNTKLAIDWCKRHPQWRLSMQTHKYLNIP

SEQ ID NO: 32486 - protein, 231 aa, Paraburkholderia endofungorum
  misc_feature (1)..(231): tr|A0A2P5KD99|A0A2P5KD99_9BURK 7-carboxy-7-deazaguanine synthase OS=Paraburkholderia endofungorum OX=417203 GN =queE PE=3 SV=1
MAGALILRRFDASGAGSEMTYAVKEIFYTLQGEGANAGRPAVFCRFAGCNLWSGREQDRADAVCRFCDTDFVGTDGENGGKYRDADALVAKIASLWPPGEVAAQYRFVVCTGGEPMLQLDAALIDALHRERFVIAIETNGTLPVLPGIDWVCVSPKAGSSLVVTRGNELKVVIPQDNQQLSEYARLDFEHFLVQPMDGPSRELNTKLAVDWCKRHPQWRLSMQTHKYLNIP

SEQ ID NO: 32487 - protein, 210 aa, Paraburkholderia fungorum
  misc_feature (1)..(210): tr|A0A0D5VAV5|A0A0D5VAV5_9BURK 7-carboxy-7-deazaguanine synthase OS=Paraburkholderia fungorum OX=134537 GN=que E PE=3 SV=1
MTYAVKEIFYTLQGEGANAGRPAVFCRFAGCNLWSGREEDRAEAVCRFCDTDFVGTDGENGGKYRTPEELVQMIASQWPEGEGERFVVCTGGEPMLQIDQPFVDALHAAGFEIAIETNGSLPVLETIDWICVSPKADAPLVVTKGNELKVVIPQDNQRLSEYAKLDFEYFLVQPMDGPSRELNTKLAIDWCKRHPQWRLSMQTHKYLNIP

SEQ ID NO: 32488 - protein, 210 aa, Paraburkholderia fungorum
  misc_feature (1)..(210): tr|A0A1H0YZA8|A0A1H0YZA8_9BURK 7-carboxy-7-deazaguanine synthase OS=Paraburkholderia fungorum OX=134537 GN=que E PE=3 SV=1
MTYAVKEIFYTLQGEGANAGRPAVFCRFAGCNLWSGREEDRAEAVCRFCDTDFVGTDGENGGKYRTAEDLVAMIASLWPEGEGERFVVCTGGEPMLQIDQPLVDALHAAGFEIAIETNGSMPVLETIDWICVSPKADAPLVVTKGNELKVVIPQDNQRLSEYAKLDFEYFLVQPMDGPSRDINTKLAIDWCKRHPQWRLSMQTHKYLNIP

SEQ ID NO: 32489 - protein, 210 aa, Paraburkholderia ginsengiterrae
  misc_feature (1)..(210): tr|A0A1A9NBH8|A0A1A9NBH8_9BURK 7-carboxy-7-deazaguanine synthase OS=Paraburkholderia ginsengiterrae OX=1462993 GN=queE PE=3 SV=1
MTYAVKEIFYTLQGEGANAGRPAVFCRFAGCNLWSGREEDRAEAVCRFCDTDFVGTDGENGGKYRTAAELVQMIASQWPEGEGQRFVVCTGGEPMLQIDPPLVDALHAAGFEIAIETNGSLPVLETIDWICVSPKADAPLVVTKGNELKVVIPQDNQRLSEYAKLDFEYFLVQPMDGPSRDINTRLAIDWCKRHPQWRLSMQTHKYLNIP

SEQ ID NO: 32490 - protein, 210 aa, Paraburkholderia graminis
  misc_feature (1)..(210): tr|B1G3M7|B1G3M7_PARG4 7-carboxy-7-deazaguanine synthas e OS=Paraburkholderia graminis (strain ATCC 700544 / DS M 17151 / LMG 18924 / NCIMB 13744 / C4D1M) OX=396598 GN =queE PE=3 SV=1
MTYAVKEIFYTLQGEGANAGRPAVFCRFAGCNLWSGREEDRADAVCRFCDTDFVGTDGENGGKYRTAADLVQMIASQWPEGEGQRFVVCTGGEPMLQIDQPLVDALHAAGFEIAIETNGSLPVLETIDWICVSPKADAPLVVTKGNELKVVIPQDNQRLSDYAKLDFDYFLVQPMDGPSRDINTRLAIDWCKRHPQWRLSMQTHKYLNIP

SEQ ID NO: 32491 - protein, 210 aa, Paraburkholderia hospita
  misc_feature (1)..(210): tr|A0A1H6I049|A0A1H6I049_9BURK 7-carboxy-7-deazaguanine synthase OS=Paraburkholderia hospita OX=169430 GN=queE PE=3 SV=1
MTYAVKEIFYTLQGEGANAGRPAVFCRFAGCNLWSGREEDRADAVCQFCDTDFVGTDGENGGKFRTPEELAAKIASLWPEGEGQRFVVCTGGEPMLQIDQPLVDALHAQGFEIAIETNGSLPVLDTIDWICVSPKADAPLVQTRGNELKVVVPQENQRLADYAKLDFDYFLVQPMDGPSRDINTKLAIDWCKRHPQWRLSMQTHKYLNIP

SEQ ID NO: 32492 - protein, 210 aa, Paraburkholderia hospita
  misc_feature (1)..(210): tr|A0A244DH23|A0A244DH23_9BURK 7-carboxy-7-deazaguanine synthase OS=Paraburkholderia hospita OX=169430 GN=queE PE=3 SV=1
MTYAVKEIFYTLQGEGANAGRPAVFCRFAGCNLWSGREEDRDDAVCQFCDTDFVGTDGENGGKFRTPEELAAKIASLWPEGEGQRFVVCTGGEPMLQIDQPLVDALHAQGFEIAIETNGSLPVLDTIDWICVSPKADAPLVQTRGNELKVVVPQENQRLADYAKLDFDYFLVQPMDGPSRDINTKLAIDWCKRHPQWRLSMQTHKYLNIP

SEQ ID NO: 32493 - protein, 210 aa, Paraburkholderia insulsa; identical to SEQ ID NO: 32487
  misc_feature (1)..(210): tr|A0A2T1B4E6|A0A2T1B4E6_9BURK 7-carboxy-7-deazaguanine synthase OS=Paraburkholderia insulsa OX=1441714 GN=que E PE=3 SV=1

SEQ ID NO: 32494 - protein, 210 aa, Paraburkholderia megapolitana
  misc_feature (1)..(210): tr|A0A1I3UX37|A0A1I3UX37_9BURK 7-carboxy-7-deazaguanine synthase OS=Paraburkholderia megapolitana OX=420953 GN =queE PE=3 SV=1
MTYAVKEIFYTLQGEGANAGRPAVFCRFAGCNLWSGREEDRADAVCRFCDTDFVGTDGENGGKYRSAEELVAMIAAQWPQGEDNRFVVCTGGEPMLQMDPPFVDALHAAGFEIAIETNGSLPVLETIDWICVSPKADAPLVVTKGNELKVVVPQDNQRLADYAKLEFDYFLVQPMDGPSRDINTKLAIDWCKRHPQWRLSMQTHKYLNIP

SEQ ID NO: 32495 - protein, 210 aa, Paraburkholderia monticola
  misc_feature (1)..(210): tr|A0A149PXZ6|A0A149PXZ6_9BURK 7-carboxy-7-deazaguanine synthase OS=Paraburkholderia monticola OX=1399968 GN=q ueE PE=3 SV=1
MTYVVKEIFYTLQGEGANAGRPAVFCRFAGCNLWSGREEDRAEAVCRFCDTDFVGTDGENGGKYRTPDELVAMIASQWPQGEGERFVVCTGGEPMLQLDQPLVDALHAAGFEIAIETNGSLPVLDTIDWICVSPKADAPLVVTKGNELKVVIPQDNQRLADYAKLDFEYFLVQPMDGPSRDINTKLAIDWCKRHPQWRLSMQTHKYLNIP

SEQ ID NO: 32496 - protein, 210 aa, Paraburkholderia phenazinium
  misc_feature (1)..(210): tr|A0A1G7PHU0|A0A1G7PHU0_9BURK 7-carboxy-7-deazaguanine synthase OS=Paraburkholderia phenazinium OX=60549 GN=q ueE PE=3 SV=1
MTYAVKEIFYTLQGEGANAGRPAVFCRFAGCNLWSGREEDRAEAVCRFCDTDFVGTDGENGGKYRTADELVAMIASQWPEGEGQRFVVCTGGEPMLQIDQPFVDALHAAGFEIAIETNGSLPVLETIDWICVSPKADAPLVVTKGNELKVVIPQDNQRLSEYAALDFEYFLVQPMDGPSRDINTKLAIDWCKRHPQWRLSMQTHKYLNIP

SEQ ID NO: 32497 - protein, 210 aa, Paraburkholderia phenazinium
  misc_feature (1)..(210): tr|A0A1N6L6L4|A0A1N6L6L4_9BURK 7-carboxy-7-deazaguanine synthase OS=Paraburkholderia phenazinium OX=60549 GN=q ueE PE=3 SV=1
MTYAVKEIFYTLQGEGANAGRPAVFCRFAGCNLWSGREEDRAEAVCRFCDTDFVGTDGENGGKYRSAADLVAMIAAQWPEGEGERFVVCTGGEPMLQMDQPFVDALHAAGFEIAIETNGSLPVLETIDWICVSPKADAPLVVTKGNELKVVIPQDNQRLSEYAALDFEYFLVQPMDGPSRDINTKLAIDWCKRHPQWRLSMQTHKYLNIP

SEQ ID NO: 32498 - protein, 235 aa, Paraburkholderia phenoliruptrix
  misc_feature (1)..(235): tr|K0DWI6|K0DWI6_9BURK 7-carboxy-7-deazaguanine synthas e OS=Paraburkholderia phenoliruptrix BR3459a OX=1229205 GN=queE PE=3 SV=1
MQCEVPSVAVPPVCSYPVNEIFESLQGEGSFTGTPSVFVRLQGCLVGCPWCDSKHTWQVMPEREISVGAMGEKTGRPCDSYAWCDVPTLANIVRAADAEHVVITGGEPCMYDLRPLIAKLEAWHHRVQVETSGTYVPLVTPSTFVTTSPKYEMPSGRPVLDEALARANEIKCPVGKQRDIDIVLERLDPIQRARGTPIWLQPLSLSPRATGICMKAAHRYGWRVSLQTNKLINIR

SEQ ID NO: 32499 - protein, 210 aa, Paraburkholderia phenoliruptrix
  misc_feature (1)..(210): tr|K0DHM4|K0DHM4_9BURK 7-carboxy-7-deazaguanine synthas e OS=Paraburkholderia phenoliruptrix BR3459a OX=1229205 GN=queE PE=3 SV=1
MTYAVKEIFYTLQGEGANAGRPAVFCRFAGCNLWSGREEDRAEAVCRFCDTDFVGTDGENGGKYRTPEELVQMIASQWPEGEGQRFVVCTGGEPMLQIDAPLVDALHAAGFEIAIETNGSLPVLETIDWICVSPKADAPLVVTKGNELKVVIPQDNQRLSDYAKLDFEYFLVQPMDGPSRDINTRLAIDWCKRHPQWRLSMQTHKYLNIP

SEQ ID NO: 32500 - protein, 210 aa, Paraburkholderia phymatum
  misc_feature (1)..(210): tr|B2JJV2|B2JJV2_PARP8 7-carboxy-7-deazaguanine synthas e OS=Paraburkholderia phymatum (strain DSM 17167 / CIP 108236 / LMG 21445 / STM815) OX=391038 GN=queE PE=3 SV= 1
MTYAVKEIFYTLQGEGANAGRPAVFCRFAGCNLWSGREEDRADAVCKFCDTDFVGTDGENGGKFRTPEELAAKIASLWPEGEDQRFVVCTGGEPMLQIDQPLVDALHAQGFEIAIETNGSLPVLDTIDWICVSPKAGAPLVQTKGNELKVVVPQDNQRLADYAKLEFDYFLVQPMDGPSRDINTKLAIDWCKRHPQWRLSMQTHKYLNIP

SEQ ID NO: 32501 - protein, 235 aa, Paraburkholderia phymatum
  misc_feature (1)..(235): tr|B2JY77|B2JY77_PARP8 7-carboxy-7-deazaguanine synthas e OS=Paraburkholderia phymatum (strain DSM 17167 / CIP 108236 / LMG 21445 / STM815) OX=391038 GN=queE PE=3 SV= 1
MHCDVPSVAVPPVGSYPVNEIFESLQGEGNFTGTPSVFVRLQGCPVGCAWCDSKHTWQVMPEREISVGAMGEKTGRPCDSYAWCDVPTLANIVRAADAEHVVITGGEPCMYDLRPLIAKLQAWHHRVQVETSGTYVPLVTPSTFVTTSPKYGMPSGRPVLDEALERANEIKYPVGKQRDIDIVLERLDPIQRARGTPIWLQPLSLSSRATGICMKAAHRYGWRVSLQTNKFINIR

SEQ ID NO: 32502 - protein, 210 aa, Paraburkholderia phytofirmans
  misc_feature (1)..(210): tr|B2T1L4|B2T1L4_PARPJ 7-carboxy-7-deazaguanine synthas e OS=Paraburkholderia phytofirmans (strain DSM 17436 / LMG 22146 / PsJN) OX=398527 GN=queE PE=3 SV=1
MTYAVKEIFYTLQGEGANAGRPAVFCRFAGCNLWSGREEDRAEAVCRFCDTDFVGTDGENGDKYRTADDLVKMIAAQWPEGEGERFVVCTGGEPMLQIDQPLVDALHAAGFEIAIETNGSLPVLETIDWICVSPKADAPLVVTKGNELKVVIPQDNQRLSEYAKLDFEYFLVQPMDGPSRDLNTRLAIDWCKRHPQWRLSMQTHKYLNIP

SEQ ID NO: 32503 - protein, 235 aa, Paraburkholderia piptadeniae
  misc_feature (1)..(235): tr|A0A1N7SL85|A0A1N7SL85_9BURK 7-carboxy-7-deazaguanine synthase OS=Paraburkholderia piptadeniae OX=1701573 GN =queE PE=3 SV=1
MQCDVPSVAVPPVGSYPVNEIFESLQGEGSFTGTPSVFVRLQGCPVGCAWCDSKHTWQVMPEREISVGAMGEKTGRPCDSYAWCDVPTLANIVRAADAEHVVITGGEPCMYDLRPLIAKLEAWHHRVQVETSGTYVPLVTPSTFVTASPKYGMPSGRPVLDEALARANEIKYPVGKQRDIDIVLERLDPIQRARGTPIWLQPLSLSSRATGICMKAAHRYGWRVSLQTNKFINIR

SEQ ID NO: 32504 - protein, 210 aa, Paraburkholderia piptadeniae
  misc_feature (1)..(210): tr|A0A1N7RJC1|A0A1N7RJC1_9BURK 7-carboxy-7-deazaguanine synthase OS=Paraburkholderia piptadeniae OX=1701573 GN =queE PE=3 SV=1
MTYAVKEIFYTLQGEGANAGRPAVFCRFAGCNLWSGREEDRADAVCKFCDTDFVGTDGENGGKFRTPEELAAKIASLWPEGEDQRFVVCTGGEPMLQIDQPFVDALHAAGFEIAIETNGSLPVLDTIDWICVSPKADAPLVQTKGNELKVVVPQENQRLADYAKLDFDYFLVQPMDGPSRDINTKLAIEWCKRHPQWRLSMQTHKYLNIP

SEQ ID NO: 32505 - protein, 210 aa, Paraburkholderia rhizosphaerae
  misc_feature (1)..(210): tr|A0A4R8LQJ4|A0A4R8LQJ4_9BURK 7-carboxy-7-deazaguanine synthase OS=Paraburkholderia rhizosphaerae OX=480658 G N=queE PE=3 SV=1
MTYAVKEIFYTLQGEGANAGRPAVFCRFAGCNLWSGREEDRADAVCRFCDTDFVGTDGENGGKFRSADELVAKIASLWPQGEGERFVVCTGGEPMLQIDPPFVDALHAAGFEIAIETNGSLPVLETIDWICVSPKADAPLVVTKGNELKVVVPQDNQRLSDYEKLDFEYFLVQPMDGPSRDINTKLAIDWCKRHPRWRLSMQTHKYLNIP

SEQ ID NO: 32506 - protein, 263 aa, Paraburkholderia rhizoxinica
  misc_feature (1)..(263): tr|E5ANB0|E5ANB0_PARRH 7-carboxy-7-deazaguanine synthas e OS=Paraburkholderia rhizoxinica (strain DSM 19002 / C IP 109453 / HKI 454) OX=882378 GN=queE PE=3 SV=1
MSASGLNCTIGASVAARVRHADCAHAATTRFGMADASIPRRFDVSGTGSEMTYAVKEIFYTLQGEGANAGRPAVFCRFAGCNLWSGREQDRADAVCRFCDTDFVGTDGENGGKYRDADALVAKIASLWPPGEAAAQYRFVVCTGGEPMLQLDAALIDALHRERFVIAVETNGTLPVLPGIDWVCVSPKAGSSIVVTRGNELKVVIPQDNQPLSEYARLDFEHFLVQPMDGPSRELNTKLAVDWCKRHPQWRLSMQTHKYLNIP

SEQ ID NO: 32507 - protein, 210 aa, Paraburkholderia rhynchosiae
  misc_feature (1)..(210): tr|A0A2N7WQF8|A0A2N7WQF8_9BURK 7-carboxy-7-deazaguanine synthase OS=Paraburkholderia rhynchosiae OX=487049 GN= queE PE=3 SV=1
MTYAVKEIFYTLQGEGANAGRPAVFCRFAGCNLWSGREDDRAEAVCRFCDTDFVGTDGENGGKYRTAEDLAQMIASQWPEGEGQRFVVCTGGEPMLQIDQPLVDALHAAGFEIAIETNGSLPVLETIDWICVSPKADAPLVVTKGNELKVVIPQDNQRLSDYAKLDFEYFLVQPMDGPSRDINTKLAIDWCKRHPQWRLSMQTHKYLNIP

SEQ ID NO: 32508 - protein, 210 aa, Paraburkholderia ribeironis
  misc_feature (1)..(210): tr|A0A1N7RJX9|A0A1N7RJX9_9BURK 7-carboxy-7-deazaguanine synthase OS=Paraburkholderia ribeironis OX=1247936 GN= queE PE=3 SV=1
MTYAVKEVFYTLQGEGANAGRPAVFCRFAGCNLWSGREEDRAEAVCRFCDTDFVGTDGENGGKYRTAEELVAMIVSLWPQGEGERFVVCTGGEPMLQIDQPLVDALHAASFEIAIETNGSLPVLETIDWVCVSPKADAPLVVTRGNELKVVIPQDNQRLSEYAKLDFEYFLVQPMDGPSRELNTRLAIDWCKRHPQWRLSMQTHKYLNIP

SEQ ID NO: 32509 - protein, 235 aa, Paraburkholderia ribeironis
  misc_feature (1)..(235): tr|A0A1N7SJF1|A0A1N7SJF1_9BURK 7-carboxy-7-deazaguanine synthase OS=Paraburkholderia ribeironis OX=1247936 GN= ygcF PE=3 SV=1
MQCDVPAVAGPPVGTYPVNEIFESLQGEASFTGTPSVFVRLQGCPVGCPWCDTKHTWQVIPEREISVGAMGEKTEQPCDSYAWCDVPTLANIVRAADAEHVVITGGEPCMYDLRPLIAKLEAWHHRVQVETSGTYVPLVTPSTFVTVSPKYAMSGGRPVLDEALARANEIKHPVGKQREINIVLEKLDPIHQARGTPIWLQPLSLSSRATGICIQAAHRYGWRVSLQTHKFINIR

SEQ ID NO: 32510 - protein, 210 aa, Paraburkholderia sacchari
  misc_feature (1)..(210): tr|A0A0A6QFF7|A0A0A6QFF7_9BURK 7-carboxy-7-deazaguanine synthase OS=Paraburkholderia sacchari OX=159450 GN=que E PE=3 SV=1
MTYAVKEIFYTLQGEGANAGRPAVFCRFAGCNLWSGREEDRETAVCRFCDTDFVGTDGENGGKYRTPEELVAMIASLWPEGEGSRFVVCTGGEPMLQIDQPFVDALHAAGFEIAIETNGSLPVLETIDWICVSPKADAPLVVTKGNELKVVVPQDNQRLADYAKLDFEYFLVQPMDGPSRDLNTKLAIDWCKRHPQWRLSMQTHKYLNIP

SEQ ID NO: 32511 - protein, 210 aa, Paraburkholderia sartisoli
  misc_feature (1)..(210): tr|A0A1H4FTA0|A0A1H4FTA0_9BURK 7-carboxy-7-deazaguanine synthase OS=Paraburkholderia sartisoli OX=83784 GN=que E PE=3 SV=1
MTYAVKEIFYTLQGEGANAGRPAVFCRFAGCNLWSGREEDRADAVCRFCDTDFVGTDGENGGKFRTADELVAMIASLWPEGEGERFVVCTGGEPMLQIDPPFVDALHAAGFEIAIETNGSLPVLDTIDWICVSPKADAPLVVTKGNELKVVVPQDNQRLADYAKLEFDYFLVQPMDGPSRDINTKLAIDWCKRHPQWRLSMQTHKYLNIP

SEQ ID NO: 32512 - protein, 210 aa, Paraburkholderia sediminicola
  misc_feature (1)..(210): tr|A0A3R7D1A2|A0A3R7D1A2_9BURK 7-carboxy-7-deazaguanine synthase OS=Paraburkholderia sediminicola OX=458836 GN =queE PE=3 SV=1
MTYAVKEIFYTLQGEGANAGRPAVFCRFAGCNLWSGREEDRAEAVCRFCDTDFVGTDGENGGKYRTAEELVQMIASQWPEGEGERFVVCTGGEPMLQIDPPFVDALHAAGFEIAIETNGSLPVLETIDWICVSPKADAPLVVTKGNELKVVIPQDNQRLSEYAKLDFEYFLVQPMDGPSRDLNTKLAIDWCKRHPQWRLSMQTHKYLNIP

SEQ ID NO: 32513 - protein, 210 aa, Paraburkholderia silvatlantica
  misc_feature (1)..(210): tr|A0A2V4TRC4|A0A2V4TRC4_9BURK 7-carboxy-7-deazaguanine synthase OS=Paraburkholderia silvatlantica OX=321895 G N=queE PE=3 SV=1
MTYAVKEIFYTLQGEGANAGRPAVFCRFAGCNLWSGREEDREQAVCRFCDTDFVGTDGENGGKFRTQEELVAKIASLWPEGEGNRFVVCTGGEPMLQIDPPFVDALHAAGFEIAIETNGSLPVLDTIDWICVSPKADAPLVVTKGNELKVVVPQENQRLADYAKLDFEYFLVQPMDGPSRDLNTKLAIDWCKRHPQWRLSMQTHKYLNIP

SEQ ID NO: 32514 - protein, 211 aa, Paraburkholderia sp.
  misc_feature (1)..(211): tr|A0A3D9LKD6|A0A3D9LKD6_9BURK 7-carboxy-7-deazaguanine synthase OS=Paraburkholderia sp. BL27I4N3 OX=1938805 G N=queE PE=3 SV=1
MTYSVKEIFYTLQGEGANAGRPAVFCRFSGCNLWTGREQDRSTAQCSFCDTDFVGTDGTGGGKFKDARDLANAIASQWPTTDRAHRFVVLTGGEPLLQVDSALTTALAEEGFFIAVETNGTVSAPAGLDWICVSPKAGTHIRIKAGNELKLVFPQIAFDPKGFEHLAFERFYLQPMDGPDQAQNIAKAIDFCKAHPRWSLSFQTHKALGIR

SEQ ID NO: 32515 - protein, 210 aa, Paraburkholderia sp.
  misc_feature (1)..(210): tr|A0A372K4W5|A0A372K4W5_9BURK 7-carboxy-7-deazaguanine synthase OS=Paraburkholderia sp. DHOC27 OX=2303330 GN= queE PE=3 SV=1
MTYAVKEIFYTLQGEGANAGRPAVFCRFAGCNLWSGREEDRAEAVCRFCDTDFVGTDGENGGKYRTAEELVQMIASQWPEGEGERFVVCTGGEPMLQMDQPFVGALHAAGFEIAIETNGSLPVLETIDWICVSPKADAPLVVTKGNELKVVIPQDNQRLSEYAALDFEYFLVQPMDGPSRDINTKLAIDWCKRHPQWRLSMQTHKYLNIP

SEQ ID NO: 32516 - protein, 210 aa, Paraburkholderia sprentiae
  misc_feature (1)..(210): tr|A0A1I9YIG9|A0A1I9YIG9_9BURK 7-carboxy-7-deazaguanine synthase OS=Paraburkholderia sprentiae WSM5005 OX=7545 02 GN=queE PE=3 SV=1
MTYAVKEIFYTLQGEGANAGRPAVFCRFAGCNLWSGREEDRAEAVCRFCDTDFVGTDGENGGKYRTADDLVAMITSQWPQGEGERFVVCTGGEPMLQIDQPLVDALHAAGFEIAIETNGSLPVLETIDWICVSPKADAPLVVTKGNELKVVIPQDNQRLADYAKLDFEYFLVQPMDGPSRDINTKLAIDWCKRHPQWRLSMQTHKYLNIP

SEQ ID NO: 32517 - protein, 210 aa, Paraburkholderia susongensis
  misc_feature (1)..(210): tr|A0A1X7K5M9|A0A1X7K5M9_9BURK 7-carboxy-7-deazaguanine synthase OS=Paraburkholderia susongensis OX=1515439 GN =queE PE=3 SV=1
MTYAVKEIFYTLQGEGANAGRPAVFCRFAGCNLWSGREEDRADAVCRFCDTDFVGTDGENGGKYRTPDELVAMIASQWPQGEGERFVVCTGGEPMLQIDQPLVDALHAAGFEIAIETNGSLPVLETIDWICVSPKADAPLVVTKGNELKVVIPQDNQRLADYAKLDFEYFLVQPMDGPSRDINTKLAIDWCKRHPQWRLSMQTHKYLNIP

SEQ ID NO: 32518 - protein, 210 aa, Paraburkholderia terrae
  misc_feature (1)..(210): tr|A0A2I8EH52|A0A2I8EH52_9BURK 7-carboxy-7-deazaguanine synthase OS=Paraburkholderia terrae OX=311230 GN=queE PE=3 SV=1
MTYAVKEIFYTLQGEGANAGRPAVFCRFAGCNLWSGREEDRADAVCQFCDTDFVGTDGENGGKFRTPEELAAKIASLWPEGEGQRFVVCTGGEPMLQIDQPLVDALHAQGFEIAIETNGSLPVLDTIDWICVSPKADAPLVQTKGNELKVVVPQENQRLADYAKLDFDYFLVQPMDGPSRDINTKLAIDWCKRHPQWRLSMQTHKYLNIP

SEQ ID NO: 32519 - protein, 210 aa, Paraburkholderia terrae
  misc_feature (1)..(210): tr|I5CWM8|I5CWM8_9BURK 7-carboxy-7-deazaguanine synthas e OS=Paraburkholderia terrae BS001 OX=1171375 GN=queE P E=3 SV=1
MTYAVKEIFYTLQGEGANAGRPAVFCRFAGCNLWSGREEDRADAVCQFCDTDFVGTDGENGGKFRTPEELAAKIASLWPEGEGQRFVVCTGGEPMLQIDQPLVDALHAQGFEIAIETNGSLPVLDTIDWICVSPKANAPLVQTRGNELKVVVPQENQRLADYAKLDFDYFLVQPMDGPSRDINTKLAIDWCKRHPQWRLSMQTHKYLNIP

SEQ ID NO: 32520 - protein, 210 aa, Paraburkholderia terricola
  misc_feature (1)..(210): tr|A0A1M6SFP8|A0A1M6SFP8_9BURK 7-carboxy-7-deazaguanine synthase OS=Paraburkholderia terricola OX=169427 GN=qu eE PE=3 SV=1
MTYAVKEIFYTLQGEGTNAGRPAVFCRFAGCNLWSGREEDRADAVCRFCDTDFVGTDGENGGKYRSAEELVQMIASLWPQGEGERFVVCTGGEPMLQIDPPFVDALHAAGFEIAIETNGSLPVLETIDWICVSPKAGAPLVVTKGNELKVVIPQDNQRLSDYAKLDFEYFLVQPMDGPSRDINTKLAIDWCKRHPQWRLSMQTHKYLNIP

SEQ ID NO: 32521 - protein, 210 aa, Paraburkholderia tropica
  misc_feature (1)..(210): tr|A0A1A5X7N0|A0A1A5X7N0_9BURK 7-carboxy-7-deazaguanine synthase OS=Paraburkholderia tropica OX=92647 GN=queE PE=3 SV=1
MTYAVKEIFYTLQGEGANAGRPAVFCRFAGCNLWSGREEDRESAQCRFCDTDFVGTDGENGGKFRTPEELVAKIASLWPEGENHRFVVCTGGEPMLQIDPPFVDALHAAGFEIAIETNGSLPVLDTIDWICVSPKADAPLVVTKGNELKVVVPQDNQRLADYAKLDFEYFLVQPMDGPSRDLNTKLAIDWCKRHPQWRLSMQTHKYLNIP

SEQ ID NO: 32522 - protein, 210 aa, Paraburkholderia tuberum
  misc_feature (1)..(210): tr|A0A1H1CWT8|A0A1H1CWT8_9BURK 7-carboxy-7-deazaguanine synthase OS=Paraburkholderia tuberum OX=157910 GN=queE PE=3 SV=1
MTYAVKEIFYTLQGEGANAGRPAVFCRFAGCNLWSGREEDRADAVCRFCDTDFVGTDGENGGKYRTPDELVAMIASQWPQGEGERFVVCTGGEPMLQLDQPLVDALHAAGFEIAIETNGSLPVLDTIDWICVSPKADAPLVVTKGNELKVVIPQDNQRLADYAKLDFEYFLVQPMDGPSRDINTKLAIDWCKRHPQWRLSMQTHKYLNIP

SEQ ID NO: 32523 - protein, 210 aa, Paraburkholderia unamae
  misc_feature (1)..(210): tr|A0A328Y4M2|A0A328Y4M2_9BURK 7-carboxy-7-deazaguanine synthase OS=Paraburkholderia unamae OX=219649 GN=queE PE=3 SV=1
MTYAVKEIFYTLQGEGANAGRPAVFCRFAGCNLWSGREEDRAEAVCRFCDTDFVGTDGENGGKFRTPEELVAKIASLWPEGEGNRFVVCTGGEPMLQIDAPFVDALHAAGFEIAIETNGSLPVLETIDWICVSPKADAPLVVTKGNELKVVVPQDNQRLADYAKLDFEYFLVQPMDGPSRDLNTKLAIDWCKRHPQWRLSMQTHKYLNIP

SEQ ID NO: 32524 - protein, 210 aa, Paraburkholderia xenovorans
  misc_feature (1)..(210): tr|Q146Z5|Q146Z5_PARXL 7-carboxy-7-deazaguanine synthas e OS=Paraburkholderia xenovorans (strain LB400) OX=2662 65 GN=queE PE=3 SV=1
MTYAVKEIFYTLQGEGANAGRPAVFCRFAGCNLWSGREEDRAEAVCRFCDTDFVGTDGENGGKYRTAEDLVRMIASQWPQGEGERFVVCTGGEPMLQIDQPLVDALHAAGFEIAIETNGSLPVLETIDWICVSPKADAPLVVTKGNELKVVIPQDNQRLSEYAKLDFEYFLVQPMDGPSREINTRLAIDWCKRHPQWRLSMQTHKYLNIP

SEQ ID NO: 32525 - protein, 224 aa, Parachlamydia acanthamoebae
  misc_feature (1)..(224): tr|F8KZP3|F8KZP3_PARAV 7-carboxy-7-deazaguanine synthas e OS=Parachlamydia acanthamoebae (strain UV7) OX=765952 GN=queE PE=3 SV=1
MTQPLTFASKEQLNIIEIFSSVQGETSFAGLPTAFIRLAACNLRCSWCDTSYSFGRGDVFGLPQILEKVDEFGCRNVCVTGGEPLLQKNVYPLMTQLCDKNYIVSVETGGSLSIEEIDPRVHIILDIKCPDSNMSDRNFWPNLSAIRPEDEVKFVINGYQDYLYAKEVCEKFQLFSRKIPVLLSPVFDVLDSKELVNWVLQDKLPVRLNMQLHKFIWSATTRGV

SEQ ID NO: 32526 - protein, 224 aa, Parachlamydia acanthamoebae; identical to SEQ ID NO: 32525
  misc_feature (1)..(224): tr|A0A0C1END6|A0A0C1END6_9BACT 7-carboxy-7-deazaguanine synthase OS=Parachlamydia acanthamoebae OX=83552 GN=qu eE PE=3 SV=1

SEQ ID NO: 32527 - protein, 224 aa, Parachlamydia sp.
  misc_feature (1)..(224): tr|A0A2H9SPH7|A0A2H9SPH7_9BACT 7-carboxy-7-deazaguanine synthase OS=Parachlamydia sp. OX=2052048 GN=queE PE=3 SV=1
MTLPLASVSKEQLNIVEIFSSVQGETSFTGLPTVFVRLAACNLRCSWCDTSYSFGRGVPHPIDEILETVRNSGCRHVCITGGEPLLQKNVHILMSLICNEKLTVSLETGGSLPINEVDSRVIVILDIKCPDSKMSDRNYWPNLEIIRPQDEVKFVVNGYQDYLYAKDICEKHGLFTRKIPVLLSPVFGVLDPKELIEWMLRDKLPVRLNMQVHKFIWSPTTRGV

SEQ ID NO: 32528 - protein, 236 aa, Paracoccus aestuarii
  misc_feature (1)..(236): tr|A0A418ZTB0|A0A418ZTB0_9RHOB 7-carboxy-7-deazaguanine synthase OS=Paracoccus aestuarii OX=453842 GN=queE PE= 3 SV=1
MKPLRIAEIFGPTIQGEGALIGEPTVFVRAGGCDYRCSWCDSMHAVDSAYRDAWAPMTTEAIWAEVARLSGGRALTLSISGGNPAIQDFGQLVARARAEGYRTALETQGSVARDWFAGLDMLVLSPKPPSSGEVPDPEALAACIAAGQGAGAMVLKMVIFDAEDYAFARRIAADHPGLPVYLQPGNPETDPDRPVAAQDVADRLLWLVEMVTADGWFGVRVLPQLHVLLWGNQRGV

SEQ ID NO: 32529 - protein, 234 aa, Paracoccus alcaliphilus
  misc_feature (1)..(234): tr|A0A1H8LXJ5|A0A1H8LXJ5_9RHOB 7-carboxy-7-deazaguanine synthase OS=Paracoccus alcaliphilus OX=34002 GN=queE P E=3 SV=1
MTLRIAEIFGPTIQGEGALIGQPTVFIRAGGCDYRCSWCDSLHAVESRFRHDWAPMQPAAIMDRVAQLSGGQPLMVSISGGNPAIQDFGPVIALGRKAGYGFACETQGSVARDWFAGLALLVLSPKPPSSGQATDWAAFDACLAAAGDAPRVMKIVIFDEADLEWARDAAARYPGLTLYLQPGNPETDPDRPVDPQGLADRMLWLVEATVGRGWLTPRILPQLHVLIWGNRRGV

SEQ ID NO: 32530 - protein, 235 aa, Paracoccus bengalensis
  misc_feature (1)..(235): tr|A0A3D9XVG6|A0A3D9XVG6_9RHOB 7-carboxy-7-deazaguanine synthase OS=Paracoccus bengalensis OX=302403 GN=queE P E=3 SV=1
MTLRIAEIFGPTIQGEGALIGEPTVFVRAGGCDYRCVWCDSPHAVESRHRHEWRPMSAEAVWAEVRRLSGDQPLTVSLSGGNPAIQDFAPLIALGRAAGYRFACETQGSVAQPWFADLAMLVLSPKPPSSGQVVDWDALDRCVQAGEGAGQRVLKIVIFDQADLDWAHEAAARHPDLPLYLQPGNPETDPALPVDPQALADRLLWLVENTVGRGWLKPRILPQLHVLIWGNRRGV

SEQ ID NO: 32531 - protein, 235 aa, Paracoccus denitrificans
  misc_feature (1)..(235): tr|A1B9Q3|A1B9Q3_PARDP 7-carboxy-7-deazaguanine synthas e OS=Paracoccus denitrificans (strain Pd 1222) OX=31858 6 GN=queE PE=3 SV=1
MTLRIAEIFGPTIQGEGALIGEPTVFVRAGGCDYRCVWCDSLHAVESSHRHEWRPMSAEAVWAEVRRLSGGQPLTVSLSGGNPAIQDFTPLIALGREQGYRFACETQGSVAQPWFAELSTLVLSPKPPSSGQVVDWDAFDRCLKAGEGAGQRVLKIVIFDQVDLDWAREVAARHPGLPLYLQPGNPETDPALPVDPQALADRLLWLVENTVGRGWLKPRILPQLHVLIWGNRRGV

SEQ ID NO: 32532 - protein, 240 aa, Paracoccus gahaiensis
  misc_feature (1)..(240): tr|A0A4U0REA4|A0A4U0REA4_9RHOB 7-carboxy-7-deazaguanine synthase OS=Paracoccus gahaiensis OX=1706839 GN=queE P E=3 SV=1
MTGAEKPLRIAEIFGPTIQGEGALIGLPTVFVRAGGCDYRCAWCDSMHAVDSAYRETWAPMSTAQVWDRVRELSGGGPLTVSLSGGNPAIQDFGPLIAMGRAEGYGFALETQGSVARDWFSELSMLVLSPKPPSSGEHPDWAAFEACLAAGQGAEAVVMKIVVFDDADYAWAQEVAGRYPDLPLVLQPGNPEVDPAVPVAAQDVADRLLWLVEKVTADGWFRPRLLPQLHVMLWGNRRGV

SEQ ID NO: 32533 - protein, 235 aa, Paracoccus haeundaensis
  misc_feature (1)..(235): tr|A0A5C4R6D9|A0A5C4R6D9_9RHOB 7-carboxy-7-deazaguanine synthase OS=Paracoccus haeundaensis OX=225362 GN=queE PE=3 SV=1
MKPLRIAEIFGPTIQGEGALIGQPTVFVRAGGCDYRCSWCDSMHAVDSAFRDSWAAMQTAEVWAQVRALSGGRPLTVSISGGNPAIQDFGPLIATGRAEGYGFALETQGSVARDWFADLTLLVLSPKPPSSGETPDPAAFEACLAAAQGTRTVLKIVVFDDADYVWARDWAGRYPDLDLVLQPGNPEVDPDVPVAAQDVADRLLWLVDKVMADGWFRPRLLPQLHVLLWGNRRGV

SEQ ID NO: 32534 - protein, 240 aa, Paracoccus hibiscisoli
  misc_feature (1)..(240): tr|A0A4U0QSC6|A0A4U0QSC6_9RHOB 7-carboxy-7-deazaguanine synthase OS=Paracoccus hibiscisoli OX=2023261 GN=queE PE=3 SV=1
MKPPERPLRIAEIFGPTIQGEGALIGQPTVFVRAGGCDYRCSWCDSMHAVDSAYRDSWAAMDAAQVWARVRELSGGRPLTVSISGGNPAIQDFGPLIAMGRAEGYAFALETQGSIARDWFAQLSVLVLSPKPPSSGERPDWAAFDACLAAGQGAGAVVLKIVVFDDADYAWARAVADRYPGLDLVLQPGNPEVDPDLPVAAQDVADRLLWLVDKVMAEGWFRPRLLPQLHVLLWGNKRGV

SEQ ID NO: 32535 - protein, 235 aa, Paracoccus homiensis
  misc_feature (1)..(235): tr|A0A1I0EQM9|A0A1I0EQM9_9RHOB 7-carboxy-7-deazaguanine synthase OS=Paracoccus homiensis OX=364199 GN=queE PE= 3 SV=1
MKLRIAEIFGPTIQGEGVLIGEPTVFVRAGGCDYRCSWCDSLHAVDSAFRHDWAPMSPDAIMDRVRELSGGQPLTVSLSGGNPAIQDFGPVIASGRQSGYRFACETQGSVARPWFAELDTLVLSPKPPSSGETVDWAAFADCVRAGHAARQTVMKIVIFDQADFDWARAAHDRHPDLPLFLQPGNPEVDPALPVDPAMLAQRLEWLTDRAMQAGWFAPRILPQLHVLIWGNKRGV

SEQ ID NO: 32536 - protein, 234 aa, Paracoccus laeviglucosivorans
  misc_feature (1)..(234): tr|A0A521B4P2|A0A521B4P2_9RHOB 7-carboxy-7-deazaguanine synthase OS=Paracoccus laeviglucosivorans OX=1197861 G N=queE PE=3 SV=1
MTLRIAEIFGPTIQGEGVLIGEPTVFIRAGGCDYRCSWCDSLHAVESRYRHDWAALSDAEVWARVRDLSGGQPLTVSISGGNPAIQDFGPVIALGRAQGYRFACETQGSIPRDWFGELSTLVLSPKPPSSGETVDWDAFASCVQAGRLARTVMKIVIFDETDLEWARDTHARHPELPLYLQPGNPVTDPDTPVAPQALADRLLWLVDSTVGRGWLTPHILPQLHVLIWGNRRGV

SEQ ID NO: 32537 - protein, 235 aa, Paracoccus pantotrophus
  misc_feature (1)..(235): tr|A0A1I5IMI0|A0A1I5IMI0_PARPN 7-carboxy-7-deazaguanine synthase OS=Paracoccus pantotrophus OX=82367 GN=queE P E=3 SV=1
MTLRIAEIFGPTIQGEGALIGEPTVFVRAGGCDYRCLWCDSLHAVDSRHRHEWRPMSAEAIWADVRRLSGGQPLTVSLSGGNPAIQDFAPLIALGRAAGYRFACETQGSVAQPWFADLSTLVLSPKPPSSGQVVDWDAFDRCLKAGEGAGQRVLKIVIFDRRDLDWARAVADRHPGLPLYLQPGNPETDPAQPVDPQALADRLLWLVENTVGRGWLKPRILPQLHVLIWGNRRGV

SEQ ID NO: 32538 - protein, 235 aa, Paracoccus pantotrophus
  misc_feature (1)..(235): tr|A0A495P449|A0A495P449_PARPN 7-carboxy-7-deazaguanine synthase OS=Paracoccus pantotrophus OX=82367 GN=queE P E=3 SV=1
MTLRIAEIFGPTIQGEGALIGEPTVFVRAGGCDYRCLWCDSLHAVESRHRHEWRPMSAEAIWADVRRLSGGQPLTVSLSGGNPAIQDFAPLIALGRAAGYRFACETQGSVAQPWFADLSTLVLSPKPPSSGQVVDWDAFDRCLKAGEGAGQRVLKIVIFDRRDLDWARAVADRHPGLPLYLQPGNPETDPAQPVDPQALADRLLWLVENTVGRGWLKPRILPQLHVLIWGNRRGV

SEQ ID NO: 32539 - protein, 235 aa, Paracoccus saliphilus
  misc_feature (1)..(235): tr|A0A1N7PHT5|A0A1N7PHT5_9RHOB 7-carboxy-7-deazaguanine synthase OS=Paracoccus saliphilus OX=405559 GN=queE PE =3 SV=1
MTLRIAEIFGPTIQGEGALIGEPTVFIRAGGCDYRCSWCDSLHAVDSRYRHDWTVMTPEAIWQEVRRLSGGRPLTISISGGNPAIQDFAPVIAMGKAEGYRFACETQGSIARPWFSALDTLVLSPKPPSSGENVDWVGFGRCLTAAETCPNVVMKIVIFDDEDYLWAKAVAEKFPDLPLYLQPGNPEVDPDRPIDLQACADRLLWLIEKVTGDDWFAPRVLPQLHVLVWGNKRGV

SEQ ID NO: 32540 - protein, 235 aa, Paracoccus seriniphilus
  misc_feature (1)..(235): tr|A0A239PV48|A0A239PV48_9RHOB 7-carboxy-7-deazaguanine synthase OS=Paracoccus seriniphilus OX=184748 GN=queE PE=3 SV=1
MTLRIAEIFGPTIQGEGALIGEPTVFVRAGGCDYRCSWCDSLHAVESKYRHDWAKMTTETVWKKVRELSRDRPLTVSLSGGNPAIQDFGPLISMGKAANYRFACETQGSIARQWFAQLDTLVLSPKPPSSGERVDWDAFDACRDIGRKARQQVLKIVIFDEVDYQWAREVHARHSDLALFLQPGNPVVDPDIAVDPQSLADRLGWLTEMAMTDGWFAPRILPQLHVLIWGNKRGV

SEQ ID NO: 32541 - protein, 236 aa, Paracoccus siganidrum
  misc_feature (1)..(236): tr|A0A419A618|A0A419A618_9RHOB 7-carboxy-7-deazaguanine synthase OS=Paracoccus siganidrum OX=1276757 GN=queE P E=3 SV=1
MSRLRIAEIFGPTIQGEGALIGEPTVFVRAGGCDYRCAWCDSMHAVDSRYRDTWAAMTSEAVWAKVRQLSGGRALTVSISGGNPAIQDFGPLIEMGRAAGYRFACETQGSVARDWFGALDMLVLSPKPPSSGQVTDWNAFADCLAAGRGAGRMVMKIVVFDEADYAWARQAAARHPDLPLYLQPGNPEVDPSVPVGAQQVADRLLWLVEKVTGDGWFAPRVLPQLHVMLWGNKRGV

SEQ ID NO: 32542 - protein, 236 aa, Paracoccus sp.
  misc_feature (1)..(236): tr|A0A3A3DF04|A0A3A3DF04_9RHOB 7-carboxy-7-deazaguanine synthase OS=Paracoccus sp. JM45 OX=2283626 GN=queE PE= 3 SV=1
MSRLRIAEIFGPTIQGEGALIGEPTVFIRAGGCDYRCSWCDSLHAVESAFRETWTPLEPEQVWVKVRDLSGGVPLTISISGGNPAIQDFGPVIAMGKRDGYRFACETQGSVARVWFGDLDMLVLSPKPPSSDQVVDWDAFDACVQAGQTAKQTVIKIVIFDDADYRWAQEAAARYPNLPLYLQPGNPEVDPDVPVAAQDVADRLLWLVNKVTADRWFRPRVLPQLHVMLWGNLRGV

SEQ ID NO: 32543 - protein, 240 aa, Paracoccus sp.
  misc_feature (1)..(240): tr|A0A4P7HMX0|A0A4P7HMX0_9RHOB 7-carboxy-7-deazaguanine synthase OS=Paracoccus sp. 2251 OX=2560053 GN=queE PE= 3 SV=1
MKAPEKPLRIAEIFGPTIQGEGALIGLPTVFVRAGGCDYRCAWCDSMHAVDSAYRETWAAMSTAQVWDRVCALSGGRPLTVSLSGGNPAIQDFGPLIARGRAEGYDFALETQGSVARDWFSDLSMLVLSPKPPSSGERPDWAAFDACLAAGQGAGAVVMKIVVFDDADYAWAQEVAGRYPDLPLVLQPGNPEVDPAVPVAAQDVADRLLWLVEKVTADGWFRPRLLPQLHVMLWGNRRGV

SEQ ID NO: 32544 - protein, 235 aa, Paracoccus versutus
  misc_feature (1)..(235): tr|A0A3E0BPY7|A0A3E0BPY7_PARVE 7-carboxy-7-deazaguanine synthase OS=Paracoccus versutus OX=34007 GN=queE PE=3 SV=1
MTLRIAEIFGPTIQGEGALIGEPTVFVRAGGCDYRCVWCDSPHAVESRHRHEWRPMSAEAVWAEVRRLSGGQPLTVSLSGGNPAIQDFAPLIALGRAAGYRFACETQGSVAQPWFADLAMLVLSPKPPSSGQVVDWDAFDRCVQAGVGAAQRVLKIVIFDQADLDWAHEVAARHPDLPLYLQPGNPETDPALPVDPQALADRLLWLVENTVGRGWLKPRILPQLHVLIWGNRRGV

SEQ ID NO: 32545 - protein, 235 aa, Paracoccus versutus
  misc_feature (1)..(235): tr|A0A369U3T1|A0A369U3T1_PARVE 7-carboxy-7-deazaguanine synthase OS=Paracoccus versutus OX=34007 GN=queE PE=3 SV=1
MTLRIAEIFGPTIQGEGALIGEPTVFVRAGGCDYRCVWCDSPHAVESRHRHEWRPMSAEAVWAEVRRLSGGQPLTVSLSGGNPAIQDFAPLIALGRAAGYRFACETQGSVAQPWFADLAMLVLSPKPPSSGQVVDWDAFDRCVQAGEGAGQRVLKIVIFDQADLDWAHEVAARHPDLPLYLQPGNPETDPALPVDPQALADRLLWLVENTVGRGWLKPRILPQLHVLIWGNRRGV

SEQ ID NO: 32546 - protein, 210 aa, Paracraurococcus sp.
  misc_feature (1)..(210): tr|A0A4R4DQN0|A0A4R4DQN0_9PROT 7-carboxy-7-deazaguanine synthase OS=Paracraurococcus sp. NE82 OX=2527868 GN=qu eE PE=3 SV=1
MSYAVKEIFPTLQGEGAQSGRPSVFCRFAGCNLWSGREEDRAEAVCRFCDTDFVGMDGEGGGRFADATELAAAITAAWPGGEAHRYVVFTGGEPLLQLDVPLIAALHAAGFEVAVESNGTIEPPEGIDWLCVSPKSGAPLRAMRGDELKLVYPQPGLPPESVEHLDFRHFFLQPMDGPDRAANTAAAVAHCLRHPRWRLSLQTHKLIGIP

SEQ ID NO: 32547 - protein, 228 aa, Parafilimonas terrae
  misc_feature (1)..(228): tr|A0A1I5VK74|A0A1I5VK74_9BACT 7-carboxy-7-deazaguanine synthase OS=Parafilimonas terrae OX=1465490 GN=queE PE =3 SV=1
MNPFLVNSFQTTYKPVLSSESNTATLPVMEAFYTLQGEGFHQGKAAYFIRLGGCDVGCFWCDVKESWDAAVHPQKTVAKIIEEAKKAISFQPSAVSPIFVITGGEPLLHNLDELTLGLKNEGFKTNIETSGSSPLSGYWDWICLSPKKFKNPLPEVFAAASELKVVVYNKSDFKWAEENAAQVSADCKLYLQPEWSKAQSITPSIIEYIKQHPRWQLSLQVHKYLDIP

SEQ ID NO: 32548 - protein, 243 aa, Parageobacillus caldoxylosilyticus
  misc_feature (1)..(243): tr|A0A023DBY0|A0A023DBY0_9BACI 7-carboxy-7-deazaguanine synthase OS=Parageobacillus caldoxylosilyticus NBRC 10 7762 OX=1220594 GN=queE PE=3 SV=1
MEKTIPVLEIFGPTIQGEGMVIGQKTMFVRTAGCDYRCRWCDSAFTWDGSAKEEIRPMTAEQIWERLYELGGDRFSHVTISGGNPVLISALEELVLLLKKKGIRLAVETQGSRWQDWLYHIDEVTISPKPPSSGMDTDFAMLDHIVKKLADAGRASHMSLKVVVFDDIDFDYAKRVHRRYPGIPFYLQVGNADTAEADDAALRTQLLARLEWLVEKVAQSNELNDVRVLPQLHTLLWGNKRGV

SEQ ID NO: 32549 - protein, 243 aa, Parageobacillus caldoxylosilyticus; identical to SEQ ID NO: 32548
  misc_feature (1)..(243): tr|A0A150L5X6|A0A150L5X6_9BACI 7-carboxy-7-deazaguanine synthase OS=Parageobacillus caldoxylosilyticus OX=8140 8 GN=queE PE=3 SV=1

SEQ ID NO: 32550 - protein, 243 aa, Parageobacillus genomosp.
  misc_feature (1)..(243): tr|A0A023CTG4|A0A023CTG4_9BACI 7-carboxy-7-deazaguanine synthase OS=Parageobacillus genomosp. 1 OX=1295642 GN= queE PE=3 SV=1
MAKTIPVLEIFGPTIQGEGMVIGQKTMFVRTAGCDYRCRWCDSAFTWDGSAKEEIQPMTAEQIWERLYELGGDRFSHVTLSGGNPVLISALEELVLLLKKKGIRLAVETQGSRWQDWLYHIDEVTISPKPPSSGMDTDFAMLDHIVEKLAGAERASHISLKVVVFDDIDFDYAKRVHQRYPGIPFYLQVGNADTAEADDSALRTQLLARLEWLVEKVAQSNELNDVRVLPQLHTLLWGNKRGV

SEQ ID NO: 32551 - protein, 245 aa, Parageobacillus thermantarcticus
  misc_feature (1)..(245): tr|A0A1I0T968|A0A1I0T968_9BACI 7-carboxy-7-deazaguanine synthase OS=Parageobacillus thermantarcticus OX=186116 GN=queE PE=3 SV=1
MIMAKKIPVLEIFGPTIQGEGMVIGQKTMFVRTAGCDYSCRWCDSAFTWDGSAKGEIRQMTAEQIWERLCELGGDRFRHVTISGGNPVLIQALEELVSLLKNKGIRVAVETQGSRWQDWLYDVDDVTISPKPPSSGMETDFAMLDRIIDKLVGAGRASHVSLKVVVFDDDDFAYAKMVHKRYPNISFYLQAGNDDTKETDVTALREKLLAKLEWLVEKVAQSNELNDVRVLPQLHALLWGNKRGV

SEQ ID NO: 32552 - protein, 243 aa, Parageobacillus thermoglucosidasius; identical to SEQ ID NO: 30335
  misc_feature (1)..(243): tr|A0A178TWV6|A0A178TWV6_PARTM 7-carboxy-7-deazaguanine synthase OS=Parageobacillus thermoglucosidasius OX=142 6 GN=queE PE=3 SV=1

SEQ ID NO: 32553 - protein, 243 aa, Parageobacillus thermoglucosidasius
  misc_feature (1)..(243): tr|A0A1B7KU40|A0A1B7KU40_PARTM 7-carboxy-7-deazaguanine synthase OS=Parageobacillus thermoglucosidasius OX=142 6 GN=queE PE=3 SV=1
MAKKIPVLEIFGPTIQGEGMVIGQKTMFVRTAGCDYSCRWCDSAFTWDGSAKEEIRQMTAEQIWERLCELGGDRFRHVTISGGNPVLIQALEELVLLLKNKGIRIAVETQGSRWQDWLYDIDDVTISPKPPSSGMETDFAVLDCIIDKLVSAGRAPHVSLKVVVFDDDDFDYAKMIHKRYPNISFYLQAGNDDIMEKDTAALREKLLAKLDWLVEKVAQSNELNDVRVLPQLHALLWGNKRGV

SEQ ID NO: 32554 - protein, 243 aa, Parageobacillus toebii
  misc_feature (1)..(243): tr|A0A150N6A9|A0A150N6A9_9BACI 7-carboxy-7-deazaguanine synthase OS=Parageobacillus toebii OX=153151 GN=queE P E=3 SV=1
MAKKIPVLEIFGPTIQGEGMVIGQKTMFVRTAGCDYRCRWCDSAFTWDGSAKEEIRQMTAEQIWERLYELGGDRFSHVTISGGNPVLIQALEELVVLLKNKGIRIAVETQGSRWQDWLYHIDDITISPKPPSSGMATDFAVLDDIIDKLVSAGRTSHVSLKVVVFDDDDFNYAKMVHKRYPNISFYLQVGNDDVLETDDMALRAKLLKKLEWLVEKVAQSNELNDVRVLPQLHTLLWGNKRGV

SEQ ID NO: 32555 - protein, 245 aa, Parageobacillus toebii
  misc_feature (1)..(245): tr|A0A3M0EYX3|A0A3M0EYX3_9BACI 7-carboxy-7-deazaguanine synthase OS=Parageobacillus toebii NBRC 107807 OX=1223 503 GN=queE PE=3 SV=1
MIMAKKIPVLEIFGPTIQGEGMVIGQKTMFVRTAGCDYRCRWCDSAFTWDGSAKEEIRQMTAEQIWERLYELGGDRFSHVTISGGNPVLIQALEELVVLLKNKGIRIAVETQGSRWQDWLYHIDDITISPKPPSSGMDTDFAMLDHIVGKLAGAGRASHMSLKVVVFDEIDFDYAKKVHRRYPDIPFYLQVGNADLAEADDAALRTQLLARLEWLVEKVAQSNELNDVRVLPQLHTLLWGNKRGV

SEQ ID NO: 32556 - protein, 246 aa, Paraglaciecola agarilytica
  misc_feature (1)..(246): tr|K6X100|K6X100_9ALTE 7-carboxy-7-deazaguanine synthas e OS=Paraglaciecola agarilytica NO2 OX=1125747 GN=queE PE=3 SV=1
MLSYPVDKSQITLSKTTGKLLNTYKINEVFESLQGEGAHTGVPSIFIRLQGCPVGCPWCDTKHTWEIDLNLKVEASVVMAQNVDTEQWFEHTPKQLLDLFTQHGYTASNIILTGGEPCMYDLTDLSSVLIENGYSVQIETSGTYEIMAHPDTWVTVSPKVNMPGKRDVLKSALLRANEIKHPVAMEKHIEELDQVLTLLEGSNTTKPLIYLQPISQQKRATELCIKTCIARNWRLSLQTHKFIGIE

SEQ ID NO: 32557 - protein, 224 aa, Paraglaciecola arctica
  misc_feature (1)..(224): tr|K6XCT8|K6XCT8_9ALTE 7-carboxy-7-deazaguanine synthas e OS=Paraglaciecola arctica BSs20135 OX=493475 GN=queE PE=3 SV=1
MNSYKINEVFESLQGEGSYTGLPSIFVRLQGCPVGCPWCDTKHTWVVSPELKTTSDAVMAETAESDSWFEHSTAQLLELFKLHGYVAKHIVITGGEPCLYDLTEITSSLITKGYSVQIETSGTYEIIAHPDTWVTVSPKVNMPGGRPVLSSAMRRANEIKHPIAMEKHIEELDQVLTLLGDQALPNIYLQPISQQKRATDLAIKTCIARNWRLSLQTHKFIGIE

SEQ ID NO: 32558 - protein, 224 aa, Paraglaciecola hydrolytica
  misc_feature (1)..(224): tr|A0A136A0B0|A0A136A0B0_9ALTE 7-carboxy-7-deazaguanine synthase OS=Paraglaciecola hydrolytica OX=1799789 GN=q ueE PE=3 SV=1
MSQYKINEVFESIQGEGSFTGVPSIFIRLQGCPVGCPWCDTKHTWTIDPMLERSRDVVMAEQAESEHWFTHSVEQLLALFAAQGYQAKHVVISGGEPCMYDLVPLTSHLITLGYSVQIETSGTYEILTHVDTWVTVSPKVNMPGGKPVLASAMQRANEIKHPVAMEKHIEELDQVLKLLPATNKPLIYLQPISQQKRATELAIKVCIQRNWRLSLQTHKFIGIE

SEQ ID NO: 32559 - protein, 246 aa, Paraglaciecola mesophila
  misc_feature (1)..(246): tr|K6Z527|K6Z527_9ALTE 7-carboxy-7-deazaguanine synthas e OS=Paraglaciecola mesophila KMM 241 OX=1128912 GN=que E PE=3 SV=1
MLSYPVDKSQITLSKTTGKLLNTYKINEVFESLQGEGAHTGVPSIFIRLQGCPVGCPWCDTKHTWEIDQNLKVAAPVVMAQNEDTAQWFEHTPEQLLALFEQHGYTASNIILTGGEPCMYDLTNLSSVLIENGFSVQIETSGTYEILTHPDTWVTVSPKVNMPGKRDVLKSAMHRANEIKHPVAMEKHIEELEHVLTLLVGSDNPKPLIYLQPISQQKRATELCIKTCIARNWRLSLQTHKFIGIE

SEQ ID NO: 32560 - protein, 227 aa, Paraglaciecola polaris
  misc_feature (1)..(227): tr|K6ZHA7|K6ZHA7_9ALTE 7-carboxy-7-deazaguanine synthas e OS=Paraglaciecola polaris LMG 21857 OX=1129793 GN=que E PE=3 SV=1
MLNTYKINEVFESLQGEGAHTGVPSIFIRLQGCPVGCPWCDTKHTWTVDENLQVEAAQVMAQNEDTEQWFSHTPQQLLSLFKAQGYTANNIILTGGEPCMYDLTELSTVLLDNGYSVQIETSGTYEILTHGDTWVTVSPKVNMPGKRNVLKSAMLRANEIKHPVAMQKHIDELEDVLLLLEGEGAPKPLIYLQPISQQKRATELCIKTCIARNWRLSLQTHKFIGIE

SEQ ID NO: 32561 - protein, 224 aa, Paraglaciecola psychrophila
  misc_feature (1)..(224): tr|K7AJ47|K7AJ47_9ALTE 7-carboxy-7-deazaguanine synthas e OS=Paraglaciecola psychrophila 170 OX=1129794 GN=queE PE=3 SV=1
MSTYKINEVFESLQGEGSYTGLPSIFVRLQGCPVGCPWCDTKHTWVVSPELKTTSNAVMAETAESDSWFEQTTEQLLGLFNLHGYVAKHIVITGGEPCLYDLTEITSSLIAKGYSVQIETSGTYEIIAHPDTWVTVSPKINMPGGRLVLRSAMRRANEIKHPIAMQKHIEELDEVLTLLGDQAVPNIYLQPISQQKRATDLAIKTCIARNWRLSLQTHKFIGIE

SEQ ID NO: 32562 - protein, 224 aa, Paraglaciecola sp.
  misc_feature (1)..(224): tr|A0A2N1DG81|A0A2N1DG81_9ALTE 7-carboxy-7-deazaguanine synthase OS=Paraglaciecola sp. MB-3u-78 OX=2058332 GN= queE PE=3 SV=1
MSSYKINEVFESLQGEGSYTGLPSIFVRLQGCPVGCPWCDTKHTWVVSPELQTTRDKVMSEKAESDSWFEHTTEQLLALFNLHGYVAKHIVITGGEPCLYDLTEITSSLIAKGYSVQIETSGTYEIIVHPDTWVTVSPKVNMPGGRAVLSSAMRRANEIKHPIAMEKHIEELDEVLTLLGDQAVPNIYLQPISQQKRATDLAIKTCIARNWRLSLQTHKFIGIE

SEQ ID NO: 32563 - protein, 230 aa, Parahaliea aestuarii
  misc_feature (1)..(230): tr|A0A5C9A1D2|A0A5C9A1D2_9GAMM 7-carboxy-7-deazaguanine synthase OS=Parahaliea aestuarii OX=1852021 GN=queE PE =3 SV=1
MNKPLPHSDGAPSAVAEGALRITEIFYSLQGEARTVGLPTVFVRLTGCPLRCVYCDTAYAFSGGEMMPLSAILGQVAGYAPRYVTVTGGEPLAQPDCLPLLRQLCDAGYEVSLETSGALPVAEVDPRVVKVLDLKTPASEEAHRNDYGNIAHLTQRDQVKFVICDRADYEWARFKLDEYQLAAKVSDVLFSPSHGSLPGRDLAEWILADNLPVRMQLQLHKYLWNDEPGH

SEQ ID NO: 32564 - protein, 215 aa, Parahaliea aestuarii
  misc_feature (1)..(215): tr|A0A5C9A738|A0A5C9A738_9GAMM 7-carboxy-7-deazaguanine synthase OS=Parahaliea aestuarii OX=1852021 GN=queE PE =3 SV=1
MEAALRITEIFYSLQGEARTVGLPTVFVRLTGCPLRCVYCDTAYAFSGGEIMSLDHIAGRVASYAPRYVTVTGGEPLAQPNCLPLLRQLCDAGYEVSLETSGALSVAGVDPRVVKVLDLKTPASEEVHRNDYGNIAHLNPRDQVKFVICDRGDYEWARFKLDEYQLAGRVSDVLFSPSHGALPGRQLAEWILEDNLPVRMQLQLHKYLWEDAPGH

SEQ ID NO: 32565 - protein, 211 aa, Paralcaligenes ureilyticus
  misc_feature (1)..(211): tr|A0A4R3MC40|A0A4R3MC40_9BURK 7-carboxy-7-deazaguanine synthase OS=Paralcaligenes ureilyticus OX=627131 GN=qu eE PE=3 SV=1
MTYSVKEIFYTLQGEGANAGRPAVFCRFAGCNLWTGREKDRKHAICQFCDTDFVGTDGDGGGKFANAKTLVDSIAHHWTPAGPAHRFVVLTGGEPLLQVDEPLIHELHAQNFTIAVETNGTQACPPGLDWVCVSPKAGSELKVFEGNELKLVFPQSGAGPEKFTGLSFDHFYLQPMDNASQRANIQLTTEYCLAHPQWKLSMQTHKLLGIR

SEQ ID NO: 32566 - protein, 219 aa, Paramaledivibacter caminithermalis
  misc_feature (1)..(219): tr|A0A1M6QZX7|A0A1M6QZX7_9CLOT 7-carboxy-7-deazaguanine synthase OS=Paramaledivibacter caminithermalis DSM 152 12 OX=1121301 GN=queE PE=3 SV=1
MKVSELFYSIQGETTLVGEPTYFIRLYGCNLRCNWCDTKYSYEKNSYIEYSVEQIYNLVKKENPTNICITGGEPLLQYEEVISVIDLFVNDNSVKTISIETNGSIDISKITERYNTSKLKIVMDYKLEGSYEINNMNTNNFKFLRDTDEIKFVISDYNDLISINKILECYYKKGKILIGFVAGTIQPKEIAKYILKNKLDWRINYQLHKLIWSSEERGV

SEQ ID NO: 32567 - protein, 240 aa, Paramesorhizobium deserti
  misc_feature (1)..(240): tr|A0A135HZB1|A0A135HZB1_9RHIZ 7-carboxy-7-deazaguanine synthase OS=Paramesorhizobium deserti OX=1494590 GN=qu eE PE=3 SV=1
MSTLRIAEIFGPTIQGEGALIGEPSVFVRAGGCDYRCRWCDSLHAVDSAFRHEWAAMETEEVWARVHALSGGVPLTVSLSGGNPAIQPFGPLIALGRAAGYRFALETQGSIARDWFAQLDMLVLSPKPPSSGEMVDWATFEDCLIAAGDGPKRVMKIIIFDEADYAFAREAAARYHALPLFLQPGNHTPPPPGAEDGEIDLDGIMQRMHWLTERTLADQWFTPRILPQLHVLMWGNRRGV

SEQ ID NO: 32568 - protein, 204 aa, Paramuribaculum intestinale
  misc_feature (1)..(204): tr|A0A2V1INU4|A0A2V1INU4_9BACT 7-carboxy-7-deazaguanine synthase OS=Paramuribaculum intestinale OX=2094151 GN= queE PE=3 SV=1
MTYKVNEIFYSLQGEGFHTGVPAVFLRFSGCNLKCPFCDTLHADGREMDADEIVRLISSYPSRHVVITGGEPAMQLDAALVDRLHENGWFVQVETNGTLPLPGNVDWVTCSPKTDRIACGRVDEIKLLYMADGYDAERMERFSAVEARSYSLQPCDCSVSDLHEDDGGAVECRNKFILEECIACLKANPQWRLSLQTHKLLDIR

SEQ ID NO: 32569 - protein, 207 aa, Parapedobacter composti
  misc_feature (1)..(207): tr|A0A1I1GHD8|A0A1I1GHD8_9SPHI 7-carboxy-7-deazaguanine synthase OS=Parapedobacter composti OX=623281 GN=queE PE=3 SV=1
MAHQIPDDGTRLPLMEAFYTIQGEGYHTGKAAYFIRLGGCDVGCHWCDVKESWDAELHPLTAADAIVEQAKQYPSKAVVVTGGEPLLYNLDYLTRGLQAAGIKTFIETSGAYPLSGHWDWICLSPKKFKWPLPDVIAAAGELKVIVFNKSDFEWAEKHAALVPPSCRLYLQPEWSREKEMTPLIVEYVKAHPKWEISLQTHKYLNIP

SEQ ID NO: 32570 - protein, 207 aa, Parapedobacter indicus
  misc_feature (1)..(207): tr|A0A1I3DZS0|A0A1I3DZS0_9SPHI 7-carboxy-7-deazaguanine synthase OS=Parapedobacter indicus OX=1477437 GN=queE PE=3 SV=1
MAHQVPEDGTLLPLMEEFYTIQGEGYHTGKAAYFIRLGGCDVGCHWCDVKESWDADLHPLTPADTIIEHAKQHPSKAVVVTGGEPLIYNLDYLTQGLHAAGIKTFVETSGAYPLSGHWDWICLSPKKFKGPLPDVIAAAGELKVIVFNKSDFAWAEKYAALVPSSCRLYLQPEWSKAQEMTPLIVDYVMQNPKWEISLQTHKYLNIP

SEQ ID NO: 32571 - protein, 207 aa, Parapedobacter koreensis
  misc_feature (1)..(207): tr|A0A1H7TRW0|A0A1H7TRW0_9SPHI 7-carboxy-7-deazaguanine synthase OS=Parapedobacter koreensis OX=332977 GN=queE PE=3 SV=1
MAHQVPDDGTRLPLMEEFYTIQGEGYHTGKAAYFIRLGGCDVGCHWCDVKESWDAELHPLTAADTIVEHAKQYPSKTVVVTGGEPLLYNLDYLTKGLQLAGIKTFIETSGAYPLSGHWDWVCLSPKKFKSPLPDVIAAAGELKVIVFNKSDFAWAEKHAALVPPTCRLYLQPEWSKAQEMTPLIVEYVKQNPKWEISLQTHKYLNIP

SEQ ID NO: 32572 - protein, 207 aa, Parapedobacter luteus
  misc_feature (1)..(207): tr|A0A1T5AWH2|A0A1T5AWH2_9SPHI 7-carboxy-7-deazaguanine synthase OS=Parapedobacter luteus OX=623280 GN=queE PE =3 SV=1
MAHQVPEDGSLLPLMEEFYTIQGEGYHTGKAAYFIRLGGCDVGCHWCDVKESWDAALHPLTAADTIIEHAKQYPSKTVVVTGGEPLLYNLDYLTRGLQAAGIKTFIETSGAYPLSGHWDWICLSPKKFKWPLPDVIAAAGELKVIVFNKSDFAWAEKHASLVPPACRLYLQPEWSKAAEITPLIVDYVKQHPKWEISLQTHKYLNIP

SEQ ID NO: 32573 - protein, 193 aa, Parapedobacter sp.
  misc_feature (1)..(193): tr|A0A3N7J1H6|A0A3N7J1H6_9SPHI 7-carboxy-7-deazaguanine synthase OS=Parapedobacter sp. OX=1958893 GN=queE PE=3 SV=1
MEEFYTIQGEGYHTGKAAYFIRLGGCDVGCHWCDVKESWDAEMHPLTAADTIIEHAKQHPSKAVVVTGGEPLIYNLDYLTRGLQAAGIKTFIETSGAYPLSGHWDWICLSPKKFKWPLPDVIAAAGELKVIVFNKSDFAWAEKHAALVPSSCKLYLQPEWSKAQEMTPLIVDYVMQNPKWEISLQTHKYLNIP

SEQ ID NO: 32574 - protein, 25 aa, Parapedobacter sp.
  misc_feature (1)..(25): tr|A0A3N7J2P2|A0A3N7J2P2_9SPHI 7-carboxy-7-deazaguanine synthase QueE (Fragment) OS=Parapedobacter sp. OX=1958 893 GN=EAS52_19410 PE=4 SV=1
MAHQIPEDGSWLPLMEEFYTIQGEG

SEQ ID NO: 32575 - protein, 213 aa, Paraperlucidibaca baekdonensis
  misc_feature (1)..(213): tr|A0A3E0H145|A0A3E0H145_9GAMM 7-carboxy-7-deazaguanine synthase OS=Paraperlucidibaca baekdonensis OX=748120 G N=queE PE=3 SV=1
MSLRLTEIFYSLQGEARTVGRPTVFVRLTGCPLRCSWCDSAYAFQGGTLWSEADVLAHVASFTPQYVTVTGGEPLAQPECLSLLTALCDAGYEVSLETSGALALEPVDPRVVKVMDLKAPGSGEVHRNRYENIACLSANDQVKFVISTREDYDWAKRQCDQYDLYSRVSDVLFSPTHELLEPRTLAEWILADRLPGRLQLQLHKYLWNNAPGH

SEQ ID NO: 32576 - protein, 221 aa, Paraphotobacterium marinum
  misc_feature (1)..(221): tr|A0A220VE05|A0A220VE05_9GAMM 7-carboxy-7-deazaguanine synthase OS=Paraphotobacterium marinum OX=1755811 GN=q ueE PE=3 SV=1
MYNINEIFETIQGEGHFTGKPSIFIRLQGCPVGCSWCDTKHSWFVNEENRIPFKELVNENSILNSWGQASESEILNFLAKKFNARHIVITGGEPCIYDLTSLTESLESQGYFCQIETSGTFEVKASSKSWVTLSPKINMKGKLKLNHKALSRANEIKHPIGTHKDIANLKNILASNLLKQQPKIYLQPISQKERATKLCVQECIKNNWNLSIQVHKYINID

SEQ ID NO: 32577 - protein, 221 aa, Pararheinheimera mesophila
  misc_feature (1)..(221): tr|A0A3P3QP72|A0A3P3QP72_9GAMM 7-carboxy-7-deazaguanine synthase OS=Pararheinheimera mesophila OX=1547515 GN=q ueE PE=3 SV=1
MYKVNEIFETIQGEGSYTGTPAIFLRLQGCPVGCSWCDTKQTWEIDPDLQLSPAAILEKKADSDHWCSFTAADLVQLFADKAYRAKHVVITGGEPCMYDLRPLCELLHQHGFSTQIETSGTFEILVPNSTWVTVSPKVNMKGGYQVLRTALERANEIKHPVAMEKHIDELLELLQGLDLTQTLVYLQPISQKAKATQLAIEFCKQYNWRLSVQVHKYLGIN

SEQ ID NO: 32578 - protein, 221 aa, Pararheinheimera tangshanensis
  misc_feature (1)..(221): tr|A0A5C8LVT1|A0A5C8LVT1_9GAMM 7-carboxy-7-deazaguanine synthase OS=Pararheinheimera tangshanensis OX=400153 G N=queE PE=3 SV=1
MYKVNEIFETIQGEGSYTGTPAIFLRLQGCPVGCSWCDTKQTWEIDPELQLSPAAILEKKADSDHWCSLTSEQIVQLFADKGYRAKHVVITGGEPCMYDLRPLCELLHARGFSTQIETSGTFEILAPVSTWVTVSPKINMKGGYEVLRTALERANEIKHPVAMEKHIDELLELLQGLDLSTTLVYLQPISQKAKATQLAIEFCKQYNWRLSVQVHKYLGIN

SEQ ID NO: 32579 - protein, 245 aa, Pararhizobium polonicum
  misc_feature (1)..(245): tr|A0A1C7P4P5|A0A1C7P4P5_9RHIZ 7-carboxy-7-deazaguanine synthase OS=Pararhizobium polonicum OX=1612624 GN=queE PE=3 SV=1
MSGVREAQIRVSEIFGPTIQGEGILIGLPTVFVRTGGCDYRCSWCDTLHAVDSAYRDQWRPMSADEIWQDVARLSGNKPLTVSLSGGNPAIQPLGPLIERGHREGYRFALETQGSVAKDWFADLDVLVLSPKPPSSGMETDWDAFDACLAMAAERPQIALKVVVFDDRDYAYARAAAAGYPDLPVYLQPGNHTPPPPDDDDARVDIDGVMDRMLWLVDKVTEDRWFEARVLPQLHVLLWGNKRGV

SEQ ID NO: 32580 - protein, 213 aa, Parasaccharibacter apium
  misc_feature (1)..(213): tr|A0A2C6J2A8|A0A2C6J2A8_9PROT 7-carboxy-7-deazaguanine synthase OS=Parasaccharibacter apium OX=1510841 GN=que E PE=3 SV=1
MAYIIKELFATLQGEGAHAGRAAIFCRFAGCNLWSGREEDRHKAQCNFCDTDFIGTNGPGGGRFAHADSLAEALESCWRAHTDDAAHRYVVFTGGEPLLQLDDALIKATKARGFTLAVETNGTLPAPAGLDWICVSPKPGQSLVQTHGHELKLVYPQPSLTPEQFAGLAFQHFWLQPMDGPERIANTRRAVQYCQAHPQWRLSLQTHKLIGIA

SEQ ID NO: 32581 - protein, 213 aa, Parasaccharibacter apium
  misc_feature (1)..(213): tr|A0A2S4PDC6|A0A2S4PDC6_9PROT 7-carboxy-7-deazaguanine synthase OS=Parasaccharibacter apium OX=1510841 GN=que E PE=3 SV=1
MPYIVKELFATLQGEGAHSGRAAIFCRFTGCNLWSGREEDRHKAQCTFCDTDFIGTDGPGGGRFATAEALAAALDDCWQAHTADVTRRYVVFTGGEPLLQLDAALIAATRARGFTIAVETNGSLPAPEGIDWVCVSPKPGQPLKQTHGHELKLVYPQDTLTPEQFAACDFQHFWLQPMDGPDRPANTEKAVRYCQTHPQWRLSLQTHKLIGIP

SEQ ID NO: 32582 - protein, 222 aa, Parashewanella curva
  misc_feature (1)..(222): tr|A0A3L8PZL4|A0A3L8PZL4_9GAMM 7-carboxy-7-deazaguanine synthase OS=Parashewanella curva OX=2338552 GN=queE PE =3 SV=1
MQYPVNEVFETIQGEGSHTGVPAIFVRLQGCPVGCSWCDTKQTWEQELHNQVAPEEVIQVDGTIGRWAMHSAESLMSAFQDKGFTAKLVVITGGEPCIHDLTELTQGLHANGYQAQIETSGTFAVKCDEQTYVTVSPKINMKGGYKVLDQALKRANEIKHPIAKQGHIDELDELLDGVDLSEKTICLQPISQKPRATELAMATCIKRNWRLSIQTHKYLDID

SEQ ID NO: 32583 - protein, 222 aa, Parashewanella spongiae
  misc_feature (1)..(222): tr|A0A3A6UMR4|A0A3A6UMR4_9GAMM 7-carboxy-7-deazaguanine synthase OS=Parashewanella spongiae OX=342950 GN=queE PE=3 SV=1
MNYPVNEVFETIQGEGSNTGVPAVFVRLQGCPVGCSWCDTKQTWDMTAENEVAAKDVIQVDGTIGRWANHSAESLITAFKSKGFTAKLIVITGGEPCMYDLTKLTNELNRAGYITQIETSGTFEVLCSSDTYVTVSPKINMKGGYDVLEQALNRANEIKHPIAKQSHIDELDELLADIDVTRKTICLQPISQIPRATELAMSTCIARNWRLSIQTHKYLDID

SEQ ID NO: 32584 - protein, 210 aa, Parasphingopyxis lamellibrachiae
  misc_feature (1)..(210): tr|A0A3D9FCA9|A0A3D9FCA9_9SPHN 7-carboxy-7-deazaguanine synthase OS=Parasphingopyxis lamellibrachiae OX=680125 GN=queE PE=3 SV=1
MSYAVKEMFLTLQGEGVQAGRRAVFLRFAGCNLWTGREADRAKAVCQFCDTDFVGTDGENGARYADAEAVAAKAGALWGADREHAYIVCTGGEPLLQLDGALIDALHDAGFEIAVESNGTIAAPDGIDWLCVSPKAGSEIIQRSGDELKLVWPQTDIDPDELVGWDFPNFLIQPMDCEDGEAALQAAMAYVRAHPRWRLTLQNHKMLGIP

SEQ ID NO: 32585 - protein, 192 aa, Parcubacteria group
  misc_feature (1)..(192): tr|A0A2D6FNK7|A0A2D6FNK7_9BACT 7-carboxy-7-deazaguanine synthase OS=Parcubacteria group bacterium OX=2026774 G N=queE PE=3 SV=1
MLKVNEYFYSLQGEGYRAGHASIFIRLSDCDQTCGFCDTEFESGQELSNEELLVKIQEYPCQWIVWTGGEPTLQLTQSHVDYFKGKGYSQAIETNGNNRAPNGLDWVCVSPKVADHVVEKNFPDGVDELRYVRHANQLGVPEPKVESKHLYLSPRFDGNDMNKKNLQKCTELILENPKWKLSLQSHKLLNVL

SEQ ID NO: 32586 - protein, 208 aa, Parcubacteria group
  misc_feature (1)..(208): tr|A0A1V5WH20|A0A1V5WH20_9BACT 7-carboxy-7-deazaguanine synthase OS=Parcubacteria group bacterium ADurb.Bin216 OX=1852939 GN=queE PE=3 SV=1
MKYPIQETFTSLKGEGLYTGQPMHFIRLAGCNLKCEFCDTEFNKGKDIELTELVAGIAPSPISRVVITGGEPCLHSLKPLTDALHNVGKLTHLETNGTLPIIKGLFDWIALSPKNMNCLSSSVAQADEIKFLVGFEGWKSFIDNFLASYPIKTGCILYVMPITIGLNQGQTRSSKDFIQENIDDAVEYCTLNPMFRYCIQLHKVLQIP

SEQ ID NO: 32587 - protein, 220 aa, Parendozoicomonas haliclonae
  misc_feature (1)..(220): tr|A0A1X7AJV8|A0A1X7AJV8_9GAMM 7-carboxy-7-deazaguanine synthase OS=Parendozoicomonas haliclonae OX=1960125 GN =queE PE=3 SV=1
MYSVKEMFYTLQGEGANAGRPAVFCRFSGCNLWSGLEKDRATAACTFCDTDFRGTDGDGGGKFANAEALAEAVAALWPRVIDSQAKPLVVCTGGEPLLQLDQPAIDALHQAGFEIAIETNGTLPIPEGIDWSVVSPKGLAEVVVTRCDELKLVYPQPEATPERFAHIQARHYYLSPMVNPHRDDTDPLYQNPETREAINYCLQHPRWRLNLQTHKIVNIA

SEQ ID NO: 32588 - protein, 242 aa, Parvibacter caecicola
  misc_feature (1)..(242): tr|A0A3N0ABS4|A0A3N0ABS4_9ACTN 7-carboxy-7-deazaguanine synthase OS=Parvibacter caecicola OX=747645 GN=queE PE =3 SV=1
MEHQPSAQFLPVAEKFVSVNGEGLAAGQLAAFIRFAGCNLWCSYCDTRWANHPLVEVEGWSIENLVAWVRETGVRCVTLTGGEPLLQPNLPHLVRALLEVREPYPLRVEIETNGSRPVEPLLQLRAQAQVEGLAGQLCLTVDWKTPSAGAEVSAAMLADNYPLLDGRDAVKFVVGSEEDLAFARDRCKEQGLFDSTNVLFSPVWGEITPAQIVDSMAANGLARARLQLQMHKIIWPNVEKGV

SEQ ID NO: 32589 - protein, 210 aa, Parvibaculum lavamentivorans
  misc_feature (1)..(210): tr|A7HXX2|A7HXX2_PARL1 7-carboxy-7-deazaguanine synthas e OS=Parvibaculum lavamentivorans (strain DS-1 / DSM 13 023 / NCIMB 13966) OX=402881 GN=queE PE=3 SV=1
MYSVKEIFYTLQGEGANAGRPSVFCRFSGCNLWSGREEDRADAVCTFCDTDFVGTNGEGGGKFRDVAALADAIEKTWESGAAHNRFVVCTGGEPLLQLDAPLIAALHSRGFEIAVETNGTIVAPEGIDWICVSPKADAELKQTSGHELKLVYPQHKAQPERFEQLDFRYFYLQPMDGADAEENTRAATAYCLAHPKWRLSLQTHKLIGIP

SEQ ID NO: 32590 - protein, 215 aa, Parvibaculum sp.
  misc_feature (1)..(215): tr|A0A2D8XBR8|A0A2D8XBR8_9RHIZ 7-carboxy-7-deazaguanine synthase OS=Parvibaculum sp. OX=2024848 GN=queE PE=3 S V=1
MYSVKEIFFTLQGEGKQAGRPAVFCRFSGCNLWTGREQDREKAACTFCDTDFVGTDGQGGGKFADAEALAAEVASHWPSDTASAYGDAVKYVVCTGGEPLLQLDTALIQAFHDHGFEIAVETNGTLAAPGGIDWICVSPKADAPLVQTSGSELKLVFPQDLNQPAQFEGLSFDNFLLQPLDGGDYQTNVRASVDYCLAHPRWQLSLQTHKYLGID

SEQ ID NO: 32591 - protein, 210 aa, Parvibaculum sp.
  misc_feature (1)..(210): tr|A0A2D4VFU3|A0A2D4VFU3_9RHIZ 7-carboxy-7-deazaguanine synthase OS=Parvibaculum sp. OX=2024848 GN=queE PE=3 S V=1
MYSVKELFYTLQGEGAQAGRPAVFCRFAGCNLWSGREQDRESAQCTFCDTDFVGTDGPGGGKFKTADELADAVAAAWEGDTDDTRYVVCTGGEPLLQLDSEAIAALHARGFEIAIETNGTLKAPEGIDWICVSPKADAPLAQLTGAELKLVFPQAAAMPERFETLAFRHFYLQPMDGPDREANTQAATAYCLKHPKWKLSLQTHKMIGIP

SEQ ID NO: 32592 - protein, 223 aa, Parvibium lacunae
  misc_feature (1)..(223): tr|A0A368L758|A0A368L758_9BURK 7-carboxy-7-deazaguanine synthase OS=Parvibium lacunae OX=1888893 GN=queE PE=3 SV=1
MSYSVKEIFYTLQGEGAQAGRPAVFCRFAGCNLWSGREADRASAACQFCDTDFVGTDGTLGGKYATAAALAAEIAGQWPSLTTAPIQRKAPPRKYVVCTGGEPLLQIDTALIEALHAQGFEIAIETNGTLPAPAGIDWICVSPKGNQPLLQPSGHELKVVYPQAETNLDALGQLDFQHFFIQPMAVLGDSSATQANIAAATAYCLAHPQWHLSLQTHKMINIR

SEQ ID NO: 32593 - protein, 213 aa, Parvularcula bermudensis
  misc_feature (1)..(213): tr|E0TC96|E0TC96_PARBH 7-carboxy-7-deazaguanine synthas e OS=Parvularcula bermudensis (strain ATCC BAA-594 / HT CC2503 / KCTC 12087) OX=314260 GN=queE PE=3 SV=1
MAGEPMSYAIKECYYTLQGEGAQAGRAAVFLRFAGCNLWSGREIDREEAICRFCDTDFVGTDGPGGGRFVAEELAAHVASFWPGGGSPYVVATGGEPLLQLDSPLIDALHDEGFEIGVETNGTIAAPAGLDWICVSPKSTAELVQTEGDELKLVFPQSDAPPDQFSGLAFDHFFLQPMDGPYQSIAIATTVDYCRANPLWRLSLQTHKLIGIP

SEQ ID NO: 32594 - protein, 210 aa, Parvularcula sp.
  misc_feature (1)..(210): tr|A0A357LC27|A0A357LC27_9PROT 7-carboxy-7-deazaguanine synthase OS=Parvularcula sp. OX=1979207 GN=queE PE=3 S V=1
MIYAVKECFLTLQGEGAQAGRAAVFLRFSGCNLWSGLERDRAAANCNFCDTDFIGVDGAGGGKFKDAASLAAHVRARWRGAGGDPLVVCTGGEPLLQLDTALIKALHEAGFKIAVETNGTIAAPPGVDWICVSPKADAQVRQISGDELKLVYPQDRAPPERFAALDFDHFFLQPMDGPCLAGNTAAAVAYCLAHPQWRLSVQSHKMIGID

SEQ ID NO: 32595 - protein, 209 aa, Parvularcula sp.
  misc_feature (1)..(209): tr|A0A371RLQ9|A0A371RLQ9_9PROT 7-carboxy-7-deazaguanine synthase OS=Parvularcula sp. SM1705 OX=2292771 GN=queE PE=3 SV=1
MTYSVKECYFTLQGEGAQTGRAAVFLRFAGCNLWTGREEDRAAAVCRFCDTDFVGTDGPGGGKFPTAAALAAHVASFWPKGGRPYVVCTGGEPLLQLDSQLIVAFHQIGFKVGVETNGTIPAPEGLDWICVSPKSTAPLVQTSGHELKLVYPQADAQPEQFAGLSFEHFFLQPMDGPDKEKATAETIAYCRSHPQWRLSLQTHKLIGIP

SEQ ID NO: 32596 - protein, 208 aa, Pasteurella aerogenes
  misc_feature (1)..(208): tr|A0A448K5J8|A0A448K5J8_PASAE 7-carboxy-7-deazaguanine synthase OS=Pasteurella aerogenes OX=749 GN=queE PE=3 SV=1
MSLRINEPSFPIVEIFESLQGEGANTGMPSIFVRLGKCNLACPWCDTNYNEFESWTLSQILAKVRSFSAKNIIITGGEPTIHPKVALLLDELKKDGYFLAIETNGLKEIPPQIDYIATSPKAMYAQKYQRRCIKTANEVRIVMDTEAHEFCEFIEGKISADYYFLSPCEVNGKMNLHETIQLLGELNARPNKPKWLLSIQTHKLIGIA

SEQ ID NO: 32597 - protein, 209 aa, Pasteurella bettyae
  misc_feature (1)..(209): tr|I3D6B2|I3D6B2_9PAST 7-carboxy-7-deazaguanine synthas e OS=Pasteurella bettyae CCUG 2042 OX=1095749 GN=queE P E=3 SV=1
MRNQLISNPSYPIVEIFQSLQGEGFNTGMSSIFVRFGKCNLACPWCDTNYEQFEMMSLQQILEKVRSFSAKNIIITGGEPSIQPKLSLLLEQLKAEGYFLAIETNGLKEIPAQIDYIATSPKAMYAQKYSRRCIPIANEVRIVVDADAKQFCQQIEQQIQAEHYYLSPCEIDGKMNLLETIQLLGALNQRKDKPKWQLSIQTHKLIGIE

SEQ ID NO: 32598 - protein, 209 aa, Pasteurella caecimuris
  misc_feature (1)..(209): tr|A0A4S2E544|A0A4S2E544_9PAST 7-carboxy-7-deazaguanine synthase OS=Pasteurella caecimuris OX=1796644 GN=queE PE=3 SV=1
MKNQAVLKPHFNIVEIFESLQGEGFNTGMPSIFVRFGKCNLACPWCDTPYNQFERWSASQILAKVRSFSAKNIIITGGEPTIVPKIELLLDQFKADGYFLAIETNGLKVIPPQIDYIATSPKRLYMHKYEQRCIESADEVRVVADENVLPFCELIEQKIRAQHYYLSPCDIDGKMNLLETITQLGKLNQRTNKPKWQLSLQTHKLVGIE

SEQ ID NO: 32599 - protein, 209 aa, Pasteurella canis
  misc_feature (1)..(209): tr|A0A379EUV7|A0A379EUV7_9PAST 7-carboxy-7-deazaguanine synthase OS=Pasteurella canis OX=753 GN=queE PE=3 SV=1
MQGQRVLQQKYNIVEIFESLQGEGFNTGMPSIFIRFGKCNLACPWCDTHYNQYSTWTLSQILNKVRSFSSKNIIITGGEPTIVPKLDVLLDHLKANGYFLAIETNGLKTIPRQIDYIATSPKRLYQYKYQQQCIPFAHEVRIVADENVLDFCQQIEQQIKAERYYLSPCEVNSEMNLLDTITQLGILNQRVNKPKWQLSIQVHKLVGIE

SEQ ID NO: 32600 - protein, 209 aa, Pasteurella dagmatis
  misc_feature (1)..(209): tr|C9PRY6|C9PRY6_9PAST 7-carboxy-7-deazaguanine synthas e OS=Pasteurella dagmatis ATCC 43325 OX=667128 GN=queE PE=3 SV=1
MQIREIFEPEYNIVEIFESLQGEGFNTGMPSIFVRFGKCNLACPWCDTNYNQYTTWSLSQILQKVRSFSAKNIIITGGEPTIVPKIEYLLDTLKAEGYFLAIETNGLKTIPSQIDYIATSPKRLYQHKYQQKCIPFANEVRIVADEDVFSFCEQIEQQIHADRYYLSPCEIDGEMNLLETITQIGLLNQRVNKPKWQLSIQTHKLIGIE

SEQ ID NO: 32601 - protein, 208 aa, Pasteurella langaaensis
  misc_feature (1)..(208): tr|A0A2U0SKJ3|A0A2U0SKJ3_9PAST 7-carboxy-7-deazaguanine synthase OS=Pasteurella langaaensis DSM 22999 OX=11229 35 GN=queE PE=3 SV=1
MNSLINEPKFPIVEIFESLQGEGMNTGMPSVFVRLGKCNLACPWCDTHYNDFELWSLSQIMEKVRSFSAKNVIITGGEPTLQPKLSLLLEALKQAGYFLAIETNGLKDIPAQIDFIATSPKAMYAEKYQRRCISTADEVRIVVDGDIQAFCEIIENKIHASGYFLSPCEKNGEMNLLETITLLGQLNARANKPKWQLSIQTHKLIGIE

SEQ ID NO: 32602 - protein, 208 aa, [Pasteurella] mairii
  misc_feature (1)..(208): tr|A0A379B6D4|A0A379B6D4_9PAST 7-carboxy-7-deazaguanine synthase OS=[Pasteurella] mairii OX=757 GN=queE PE=3 S V=1
MSLLINEPSFPIVEIFESLQGEGANTGMPSIFVRLGKCNLACPWCDTNYHEFEPWTLSQILVKVRSFSAKNVIITGGEPTIHPKVVLLLDELKKDGYFLAIETNGLKEIPPQIDYIATSPKGMYAEKYQRRCIKKANEVRIVMDAEAREFCEFIEGKISADYYFLSPCEVNGKMNLHETIQLLGELNARPNKPQWLLSIQTHKLIGIE

SEQ ID NO: 32603 - protein, 209 aa, Pasteurella multocida
  misc_feature (1)..(209): tr|A0A0E3ZR73|A0A0E3ZR73_PASMD 7-carboxy-7-deazaguanine synthase OS=Pasteurella multocida subsp. multocida OH4 807 OX=1304873 GN=queE PE=3 SV=1
MQIREILEPEYDIVEIFESLQGEGFNTGMPSIFVRFGKCNLACPWCDTHYNQYTTWSLSQIRQKVRSFSAKNIIITGGEPTIVPKIEHLLEALKAEGYFLAIETNGLKTIPSQIDYIATSPKRLYQHKYQQKCIPFANEVRIVADEDAFNFCEQIEQQIQAERYYLSPCEIDGEMNLLETITQIGLLNQRVNKPKWQLSIQTHKLIGIE

SEQ ID NO: 32604 - protein, 209 aa, Pasteurella multocida
  misc_feature (1)..(209): tr|A0A1D7R2Q5|A0A1D7R2Q5_PASMD 7-carboxy-7-deazaguanine synthase OS=Pasteurella multocida OX=747 GN=queE PE=3 SV=1
MQIQEIFEPEYAIVEIFESLQGEGFNTGMPSIFVRFGKCNLACPWCDTPYNQYTTWTLSKIVQKVRSFSAKNIIITGGEPTIVPKIGVLLDALKAEGYFLAIETNGLKSIPNQIDYIATSPKRLYQHKYQQKCIPFAHEVRIVADENVIAFCEQIEQQIRADHYYLSPCEVNGEMNLLETITQIGRLNQRVNKPKWQLSIQTHKLIGIE

SEQ ID NO: 32605 - protein, 209 aa, Pasteurella sp.
  misc_feature (1)..(209): tr|A0A4Y9GX69|A0A4Y9GX69_9PAST 7-carboxy-7-deazaguanine synthase OS=Pasteurella sp. WM03 OX=2558280 GN=queE PE =3 SV=1
MEKLTNFDPHFNIVEIFESLQGEGFNTGMPSIFVRFGKCNLACPWCDTPYNQFERWSASQILAKVRSFSAKNIIITGGEPTIVPKIELLLDQFKADGYFLAIETNGLKAIPPQIDYIATSPKRLYMYKYEQRCIESADEVRVVADENVLPFCELIEQKIRAKHYYLSPCDIDGKMNLLETITQLGKLNQRTNKPKWQLSLQTHKLMGIE

SEQ ID NO: 32606 - protein, 205 aa, Pasteurella testudinis
  misc_feature (1)..(205): tr|A0A1W1UL58|A0A1W1UL58_9PAST 7-carboxy-7-deazaguanine synthase OS=Pasteurella testudinis DSM 23072 OX=112293 8 GN=queE PE=3 SV=1
MSSDIHYNIVEIFESLQGEGFNTGMPSIFIRFGKCNLACPWCDTDYHRFERWTLDQIMQKVRSYTAKNIIITGGEPTIQPKLTMLLDELKAAGYFLAIETNGLKPIAPQIDYIATSPKRLYQHKYQQRCIPSADEVRIVNDGEILPFCEQIEQRIQAQHYYLSPCEQQGEMNLLDTIRKLGELNQRRNKPKWQLSLQTHKLVGIE

SEQ ID NO: 32607 - protein, 208 aa, Pasteurellaceae bacterium; identical to SEQ ID NO: 31366
  misc_feature (1)..(208): tr|A0A3S7N1H6|A0A3S7N1H6_9PAST 7-carboxy-7-deazaguanine synthase OS=Pasteurellaceae bacterium 12565 OX=2093222 GN=queE PE=3 SV=1

SEQ ID NO: 32608 - protein, 210 aa, Pasteurellaceae bacterium
  misc_feature (1)..(210): tr|A0A5C4QM73|A0A5C4QM73_9PAST 7-carboxy-7-deazaguanine synthase OS=Pasteurellaceae bacterium BK431 OX=2585026 GN=queE PE=3 SV=1
MSSEIHYNIVEIFESLQGEGFNTGMPSIFIRFGKCNLACPWCDTDYNRFTRWTLNQIIQKVRSYTAKNIIITGGEPTIQPRLSALLDQLKADGYFLAIETNGLKPIPPQIDYIATSPKRLYHHKYQQRGIPFAHEVRIVNDGDILPFCQQLEQQVQADHYYLSPCEQQGEMNLLDTIRKLGELNQRPESLSGKRPKWQLSLQTHKLVGIE

SEQ ID NO: 32609 - protein, 211 aa, Paucibacter aquatile
  misc_feature (1)..(211): tr|A0A2N8KZI4|A0A2N8KZI4_9BURK 7-carboxy-7-deazaguanine synthase OS=Paucibacter aquatile OX=2070761 GN=queE PE =3 SV=1
MTYAVKEIFYTLQGEGAQAGRASVFCRFAGCNLWSGREEDRARAVCNFCDTDFVGTDGQGGGKFATAEALADAIASRWPADRPGKPYVVCTGGEPLLQLDTPLIEALHARGFEIAVETNGTQPAPEGLDWICVSPKADAELVLTRGHELKLVYPQPLARPERFAGLDFQHFFLQPLDSVLKTQHTREVVDYCMQHPQWRMSVQMHKVIGIE

SEQ ID NO: 32610 - protein, 211 aa, Paucibacter sp.
  misc_feature (1)..(211): tr|A0A3N7EKV8|A0A3N7EKV8_9BURK 7-carboxy-7-deazaguanine synthase OS=Paucibacter sp. KBW04 OX=2153361 GN=queE P E=3 SV=1
MTYAVKEMFYTLQGEGAQAGRASVFCRFAGCNLWSGREQDRAEAVCSFCDTDFVGTDGQNGAKFASAEALADAVASHWPANTVGKPYVVCTGGEPLLQLDKALIDALHARGFEIAVETNGTQPAPEGLDWICVSPKADAEIVLTRGHELKLVYPQPLAQPERFAGLDFQHFFLQPMDSVLKTQHTREAVAYCMSHPQWRLSVQMHKVIGIE

SEQ ID NO: 32611 - protein, 211 aa, Paucibacter sp.
  misc_feature (1)..(211): tr|A0A0U3EMI0|A0A0U3EMI0_9BURK 7-carboxy-7-deazaguanine synthase OS=Paucibacter sp. KCTC 42545 OX=1768242 GN=q ueE PE=3 SV=1
MTYAVKEIFYTLQGEGAQAGRASVFCRFAGCNLWSGREQDRAEAVCSFCDTDFVGVDGQGGGKFASAADLAEAVAAQWPSGMPGKPYVVCTGGEPLLQLDAGLIAALHAKGFEIAVETNGTQPAPEGLDWICVSPKADAEIVLTKGHELKLVYPQPLAKPERFESMDFEHFFLQPLDSILKTQHTREAVAYCMSHPQWRLSVQMHKVIGIE

SEQ ID NO: 32612 - protein, 211 aa, Paucibacter toxinivorans
  misc_feature (1)..(211): tr|A0A4R6QJD0|A0A4R6QJD0_9BURK 7-carboxy-7-deazaguanine synthase OS=Paucibacter toxinivorans OX=270368 GN=queE PE=3 SV=1
MSYAVKEMFFTLQGEGAQAGRASVFCRFAGCNLWSGREQDRATAPCNFCDTDFVGMDGIGGGRFATPEALAQAVAALWPAGAGGKPYVVCTGGEPLLQLDQALVDALHGVGFEIAVETNGTQLPPKGLDWICVSPKADTEIVLTQGDELKLVFPQPQALPERFEGLNFTHFFLQPMDSVLRADNTRRAVEYCMAHPQWRLSVQMHKVIGIA

SEQ ID NO: 32613 - protein, 215 aa, Paucimonas lemoignei
  misc_feature (1)..(215): tr|A0A2X4AQ52|A0A2X4AQ52_PAULE 7-carboxy-7-deazaguanine synthase OS=Paucimonas lemoignei OX=29443 GN=queE_1 PE =3 SV=1
MQETLRITEVFYSLQGETRTAGLPTVFVRLTGCPLRCQYCDSAYAFTGGTIQTLDDILGQVAEYRPRYVCVTGGEPLAQPNAIPLLKRLCDAGYEVSLETSGALDISAVDTRVSRILDLKTPGSKEVARNRYENIDLLTPNDQVKFVICSREDYDWAVSKLIQYGLERRADEVLFSPSHHELNARDLADWIVADNLPVRLQMQLHKFLWNDEPGR

SEQ ID NO: 32614 - protein, 211 aa, Paucimonas lemoignei
  misc_feature (1)..(211): tr|A0A4R3I650|A0A4R3I650_PAULE 7-carboxy-7-deazaguanine synthase OS=Paucimonas lemoignei OX=29443 GN=queE PE=3 SV=1
MTYSVKEIFYTLQGEGAHAGRPAVFCRFSGCNLWSGRESDRASAVCKFCDTDFVGTDGERGGKFPDAARLANTIAGLWPSTYTASKYVVFTGGEPLLQLDAALIDAMHAAGFEIAIETNGTLPVPPGVDWVCVSPKMGSELVVKRGNELKVVIPQAAQSLKEYERLEFDHYYVQPMDGPDKEANTRLAIETCKANPRWKLSLQTHKLLQIP

SEQ ID NO: 32615 - protein, 235 aa, Pectinatus cerevisiiphilus
  misc_feature (1)..(235): tr|A0A4R3KBN4|A0A4R3KBN4_9FIRM 7-carboxy-7-deazaguanine synthase OS=Pectinatus cerevisiiphilus OX=86956 GN=que E PE=3 SV=1
MRAPISEIFSSIQGEGKYAGCRQLFIRFTGCNLECSYCDTDSMLTTKTCDLENEGILSNPVELAAILPYIKKTLLKRHQAISLTGGEPLLHTAFIHELAEYVDLPLLLETNGTLPEALAKVIDDISIVSMDFKMPDAVHTELWQQHAAFLRIAMQKDVYVKIVIAQETKIEDFKKAVDLLCGINKNIMLVLQPITPYGGYTAPAPKKMLAWQSMALEKINDVRVIAQMHVMMGQR

SEQ ID NO: 32616 - protein, 223 aa, Pectobacterium actinidiae
  misc_feature (1)..(223): tr|A0A1V2R423|A0A1V2R423_9GAMM 7-carboxy-7-deazaguanine synthase OS=Pectobacterium actinidiae OX=1507808 GN=qu eE PE=3 SV=1
MQYPINEMFQTLQGEGYFTGVPAVFVRLQGCPVGCSWCDTKHTWDKLAERETSLDQVLVKTEESDAWGAASADDILALMAQEGYTARHIVITGGEPCIHDLAPLTLQLEKQGFSCQIETSGTHDVRCSPKTWVTVSPKVNMRGGMKVLDQALQRADEIKHPVARERDIEALDALLARLDDDKPRIVALQPISQKDDATKLCIATCIARNWRLSMQTHKYLNIA

SEQ ID NO: 32617 - protein, 223 aa, Pectobacterium aquaticum
  misc_feature (1)..(223): tr|A0A3R8QLM6|A0A3R8QLM6_9GAMM 7-carboxy-7-deazaguanine synthase OS=Pectobacterium aquaticum OX=2204145 GN=que E PE=3 SV=1
MQYPINEMFQTLQGEGYFTGVPAVFVRLQGCPVGCSWCDTKHTWDKLAERETSLDQVLVKTEESDAWGAASADDILALMVQQGYTARHIVITGGEPCIHDLAPLTLQLEKQGFSCQIETSGTHDVRCSPKTWVTVSPKVNMRGGMKVLDQALQRADEIKHPVARERDIEALDALLARLDDDKSRIVALQPISQKDDATKLCIETCIARNWRLSMQTHKYLNIA

SEQ ID NO: 32618 - protein, 223 aa, Pectobacterium atrosepticum
  misc_feature (1)..(223): tr|Q6D194|Q6D194_PECAS 7-carboxy-7-deazaguanine synthas e OS=Pectobacterium atrosepticum (strain SCRI 1043 / AT CC BAA-672) OX=218491 GN=queE PE=3 SV=1
MQYPINEMFQTLQGEGYFTGVPAVFVRLQGCPVGCSWCDTKHTWDKLAERETSLDQVLVKTEESDAWGAASADDILALMAQQGYTARHIVITGGEPCIHDLAPLTLQLEKQGFSCQIETSGTHDVRCSPKTWVTVSPKVNMRGGMKVLDQALQRADEIKHPVARERDIEALDTLLARLDDDKPRIVALQPISQKDDATKLCIATCIARNWRLSMQTHKYLNIA

SEQ ID NO: 32619 - protein, 223 aa, Pectobacterium betavasculorum
  misc_feature (1)..(223): tr|A0A093VF76|A0A093VF76_9GAMM 7-carboxy-7-deazaguanine synthase OS=Pectobacterium betavasculorum OX=55207 GN= queE PE=3 SV=1
MQYPINEMFQTLQGEGYFTGVPAVFVRLQGCPVGCSWCDTKHTWDKLAERETSLDQVLVKTEESDAWGAASAEDILALMAQQGYTARHIVITGGEPCIHDLAPLTLQLEKQGFSCQIETSGTHDVRCSPKTWVTVSPKVNMRGGMKVLDQALQRADEIKHPVARERDIEALDALLARLDDDKPRIVALQPISQKDDATKLCIATCIARNWRLSMQTHKYLNIA

SEQ ID NO: 32620 - protein, 223 aa, Pectobacterium brasiliense
  misc_feature (1)..(223): tr|A0A086F2D1|A0A086F2D1_9GAMM 7-carboxy-7-deazaguanine synthase OS=Pectobacterium brasiliense OX=180957 GN=qu eE PE=3 SV=1
MQYPINEMFQTLQGEGYFTGVPAVFVRLQGCPVGCSWCDTKHTWDKLAERETSLDQVLVKTEESDAWGAASADDILALMVQQGYTARHIVITGGEPCIHDLAPLTLQLEKQGFSCQIETSGTHDVRCSPKTWVTVSPKVNMRGGMKVLDQALQRADEIKHPVARERDIEALDALLARLDDDKPRIVALQPISQKDDATKLCIETCIARNWRLSMQTHKYLNIA

SEQ ID NO: 32621 - protein, 223 aa, Pectobacterium brasiliense
  misc_feature (1)..(223): tr|A0A0M2EZG9|A0A0M2EZG9_9GAMM 7-carboxy-7-deazaguanine synthase OS=Pectobacterium brasiliense OX=180957 GN=qu eE PE=3 SV=1
MQYPINEMFQTLQGEGYFTGVPAVFVRLQGCPVGCSWCDTKHTWDKLAERETSLDQVLVKTEESDAWGAASADDILALMVQQGYTARHIVITGGEPCIHDLAPLTLQLEKQGFSCQIETSGTHDVRCSPKTWVTVSPKVNMRGGMKVLDQALQRADEIKHPVARERDIEALDALLARLDDDKPRIVALQPISQKDDATKLCIATCIARNWRLSMQTHKYLNIA

SEQ ID NO: 32622 - protein, 223 aa, Pectobacterium carotovorum
  misc_feature (1)..(223): tr|A0A419ACY1|A0A419ACY1_PECCA 7-carboxy-7-deazaguanine synthase OS=Pectobacterium carotovorum OX=554 GN=queE PE=3 SV=1
MQYPINEIFQTLQGEGYFTGVPAVFVRLQGCPVGCSWCDTKHTWDKLAERETSLDQVLVKTEESDAWGAASADDILALMVQQGYTARHIVITGGEPCIHDLAPLTLQLEKQGFSCQIETSGTHDVRCSPKTWVTVSPKVNMRGGMKVLDQALQRADEIKHPVARERDIEALDALLARLDDDKPRIVALQPISQKDDATKLCIETCIARNWRLSMQTHKYLNIA

SEQ ID NO: 32623 - protein, 223 aa, Pectobacterium carotovorum
  misc_feature (1)..(223): tr|A0A1M5MDK2|A0A1M5MDK2_PECCA 7-carboxy-7-deazaguanine synthase OS=Pectobacterium carotovorum OX=554 GN=queE PE=3 SV=1
MQYPINEMFQTLQGEGYFTGVPAVFVRLQGCPVGCSWCDTKHTWDKLAERETSLDQVLVKTEESDAWGAASADDILALMAQEGYTARHIVITGGEPCIHDLAPLTLQLEKQGFSCQIETSGTHDVRCSPKTWVTVSPKVNMRGGMKVLDQALQRADEIKHPVARERDIEALDALLARLDDDKPRIVALQPISQKDDATKLCIETCIARNWRLSMQTHKYLNIA

SEQ ID NO: 32624 - protein, 223 aa, Pectobacterium odoriferum
  misc_feature (1)..(223): tr|A0A094RSU0|A0A094RSU0_9GAMM 7-carboxy-7-deazaguanine synthase OS=Pectobacterium odoriferum OX=78398 GN=queE PE=3 SV=1
MQYPINEMFQTLQGEGYFTGVPAVFVRLQGCPVGCSWCDTKHTWDKLAERETSLDQVLVKTEESDAWGAASADDILALMAQEGYTARHIVITGGEPCIHDLAPLTLQLEKQGFSCQIETSGTHDVRCSPKTWVTVSPKVNMRGGMKVLDQALQRADEIKHPVARERDIEALDALLARLDDDKPRIVALQPISQKEDATKLCIATCIARNWRLSMQTHKYLNIA

SEQ ID NO: 32625 - protein, 223 aa, Pectobacterium parmentieri
  misc_feature (1)..(223): tr|A0A0H3I6X0|A0A0H3I6X0_PECPM 7-carboxy-7-deazaguanine synthase OS=Pectobacterium parmentieri OX=1905730 GN=q ueE PE=3 SV=1
MQYPINEMFQTLQGEGYFTGVPAVFVRLQGCPVGCSWCDTKHTWDKLAERETSLDLVLVKTGESDAWGAASADDILALMVQQGYTARHIVITGGEPCIHDLAPLTLQLEKQGFSCQIETSGTHDVRCSPKTWVTVSPKVNMRGGMKVLDQALQRADEIKHPVARERDIEALDALLARLDDDKPRIVALQPISQKEDATKLCIATCIARNWRLSMQTHKYLNIA

SEQ ID NO: 32626 - protein, 223 aa, Pectobacterium parmentieri
  misc_feature (1)..(223): tr|A0A3Q9JX36|A0A3Q9JX36_PECPM 7-carboxy-7-deazaguanine synthase OS=Pectobacterium parmentieri OX=1905730 GN=q ueE PE=3 SV=1
MQYPINEMFQTLQGEGYFTGVPAVFVRLQGCPVGCSWCDTKHTWDKLAERETSLDLVLVKTEESDAWGAASADDILALMVQQGYTARHIVITGGEPCIHDLAPLTLQLEKQGFSCQIETSGTHDVRCSPKTWVTVSPKVNMRGGMKVLDQALQRADEIKHPVARERDIEALDALLARLDDDKPRIVALQPISQKEDATKLCIATCIARNWRLSMQTHKYLNIA

SEQ ID NO: 32627 - protein, 223 aa, Pectobacterium peruviense
  misc_feature (1)..(223): tr|A0A0J6AH10|A0A0J6AH10_9GAMM 7-carboxy-7-deazaguanine synthase OS=Pectobacterium peruviense OX=2066479 GN=qu eE PE=3 SV=1
MQYPINEMFQTLQGEGYFTGVPAVFVRLQGCPVGCSWCDTKHTWDKLAERETSLDQVLVKTEESDAWGAASADDILALMAQQGYTARHIVITGGEPCIHDLAPLTLQLEKQGFSCQIETSGTHDVRCSPKTWVTVSPKVNMRGGMKVLDQALQRADEIKHPVARERDIEALDALLARLDDDKPRIVALQPISQKDDATKLCIATCIARNWRLSMQTHKYLNIA

SEQ ID NO: 32628 - protein, 223 aa, Pectobacterium polaris
  misc_feature (1)..(223): tr|A0A093STF3|A0A093STF3_9GAMM 7-carboxy-7-deazaguanine synthase OS=Pectobacterium polaris OX=2042057 GN=queE PE=3 SV=1
MQYPINEMFQTLQGEGYFTGVPAVFVRLQGCPVGCSWCDTKHTWDKLAERETSLDQVLVKTEESDAWGAASADDILARMAQQGYTARHIVITGGEPCIHDLAPLTLQLEKQCFSCQIETSGTHEVRCSPKTWVTVSPKVNMRGGMKVLDQALQRADEIKHPVARERDIEALDALLARLDDDKPRIVALQPISQKDDATKLCIETCIARNWRLSMQTHKYLNIA

SEQ ID NO: 32629 - protein, 234 aa, Pectobacterium polaris
  misc_feature (1)..(234): tr|A0A3S1ACL0|A0A3S1ACL0_9GAMM 7-carboxy-7-deazaguanine synthase OS=Pectobacterium polaris OX=2042057 GN=queE PE=3 SV=1
MHFYVNETVKTMQYPINEMFQTLQGEGYFTGVPAVFVRLQGCPVGCSWCDTKHTWDKLTERETSLDQVLVKTEESDAWGAASADDILARMAQQGYTARHIVITGGEPCIHDLAPLTLQLEKQGFSCQIETSGTHEVRCSPKTWVTVSPKVNMRGGMKVLDQALQRADEIKHPVARERDIEALDALLARLDDDKPRIVALQPISQKDDATKLCIETCIARNWRLSMQTHKYLNIA

SEQ ID NO: 32630 - protein, 223 aa, Pectobacterium polonicum
  misc_feature (1)..(223): tr|A0A4U7KE37|A0A4U7KE37_9GAMM 7-carboxy-7-deazaguanine synthase OS=Pectobacterium polonicum OX=2485124 GN=que E PE=3 SV=1
MQYPINEMFQTLQGEGYFTGVPAVFVRLQGCPVGCSWCDTKHTWDKLAERETSLDQVLVKTEESDAWGAASADDILALMAQQGYTARHIVITGGEPCIHDLAPLTLQLEKQGFSCQIETSGTHDVRCSPKTWVTVSPKVNMRGGMKVLDQALQRADEIKHPVARERDIEALDALLARLDDDKPRIVALQPISQKDDATKLCIETCIARNWRLSMQTHKYLNIA

SEQ ID NO: 32631 - protein, 223 aa, Pectobacterium punjabense
  misc_feature (1)..(223): tr|A0A2T3VYC6|A0A2T3VYC6_9GAMM 7-carboxy-7-deazaguanine synthase OS=Pectobacterium punjabense OX=2108399 GN=qu eE PE=3 SV=1
MQYPINEMFQTLQGEGYFTGVPAVFVRLQGCPVGCSWCDTKHTWDKLAERETSLDQVLVKTEESDAWGAASADDILALMAQQGYTARHIVITGGEPCIHDLAPLTLQLEKQGFSCQIETSGTHDVRCSPKTWVTVSPKVNMRGGMKVLDQALQRADEIKHPVARERDIEALDALLARLDDDKPRIVALQPISQKEDATKLCIATCIARNWRLSMQTHKYLNIA

SEQ ID NO: 32632 - protein, 223 aa, Pectobacterium wasabiae
  misc_feature (1)..(223): tr|A0A1D7YX52|A0A1D7YX52_9GAMM 7-carboxy-7-deazaguanine synthase OS=Pectobacterium wasabiae CFBP 3304 OX=11756 31 GN=queE PE=3 SV=1
MQYPINEMFQTLQGEGYFTGVPAVFVRLQGCPVGCSWCDTKHTWDKLAERETSLDQVLVKTEESDAWGAASADDILALMAQQGYTARHIVITGGEPCIHDLAPLTLQLEKQGFSCQIETSGTHDVRCSPKTWVTVSPKVNMRGGMRVLDQALQRADEIKHPVARERDIEALDALLARLDDDKPRIVALQPISQKEDATKLCIATCIARNWRLSMQTHKYLNIA

SEQ ID NO: 32633 - protein, 207 aa, Pedobacter africanus
  misc_feature (1)..(207): tr|A0A1W2DHR1|A0A1W2DHR1_9SPHI 7-carboxy-7-deazaguanine synthase OS=Pedobacter africanus OX=151894 GN=queE PE= 3 SV=1
MAHQIPEDGTLLPLMEEFYTIQGEGFNTGKAAYFIRLGGCDVGCHWCDVKESWDAELHPLTPTDAIVEKAAGFPGKAVVITGGEPLIYNLDYLTTALQQKGILTFIETSGAYPLSGNWDWICLSPKKFKAPRPDITPFANELKVIVFNKSDFDWAEKYAETVSPNCKLYLQPEWSKSKEITPLIIDYVMANPKWEISLQTHKFLNIP

SEQ ID NO: 32634 - protein, 207 aa, Pedobacter alluvionis
  misc_feature (1)..(207): tr|A0A497Y2R4|A0A497Y2R4_9SPHI 7-carboxy-7-deazaguanine synthase OS=Pedobacter alluvionis OX=475253 GN=queE PE =3 SV=1
MKQEIPEDGTLLPLMEEFYTIQGEGFNTGKAAYFIRLGGCDVGCHWCDVKESWNAEMHPLTPADVIVENADKFPGKAVVITGGEPLIYNLDYLTNKLKERGILTFIETSGAYPLSGNWDWICLSPKKFKAPRPDITPFAHELKVIVFNKSDFKWAEEYAAMVSPTCKLYLQPEWSKSTEITPLIIEYVMANPKWEISLQTHKFLNIP

SEQ ID NO: 32635 - protein, 207 aa, Pedobacter antarcticus
  misc_feature (1)..(207): tr|A0A081PI57|A0A081PI57_9SPHI 7-carboxy-7-deazaguanine synthase OS=Pedobacter antarcticus 4BY OX=1358423 GN=q ueE PE=3 SV=1
MAHNIPADGTLLPLMEEFYTIQGEGYNTGKAAYFIRLGGCDVGCHWCDVKESWDAELHPLTSSDDIVAKAETFPGKAVVITGGEPLIYNLDYLTAKLKEKNILTFIETSGAYPLSGHWDWICLSPKKFKAPRPDITPFANELKVIVFNKSDFEWAEKYAETVSPGCKLYLQPEWSKAQEITPLIVEYVMANPKWEISLQTHKYLNIP

SEQ ID NO: 32636 - protein, 207 aa, Pedobacter antarcticus; identical to SEQ ID NO: 32635
  misc_feature (1)..(207): tr|A0A1I2FAU8|A0A1I2FAU8_9SPHI 7-carboxy-7-deazaguanine synthase OS=Pedobacter antarcticus OX=34086 GN=queE PE =3 SV=1

SEQ ID NO: 32637 - protein, 207 aa, Pedobacter bauzanensis
  misc_feature (1)..(207): tr|A0A4R1LR46|A0A4R1LR46_9SPHI 7-carboxy-7-deazaguanine synthase OS=Pedobacter bauzanensis OX=653929 GN=queE P E=3 SV=1
MNNSVPEDGTLLPLMEEFYTIQGEGYNTGKAAYFIRLGGCDVGCHWCDVKESWDASIHPLTAADKIVEHAKQHPAKTVVVTGGEPLIYNMDYLTRKLKENGIQTFIETSGAYPLSGEWDWICLSPKKFKSPRPDITPFAHELKIIVFNKSDFQWAEDYAKLVSPGCKLYLQPEWSNAAKMTPLIIEYVMNNPKWEVSLQTHKFMNIP

SEQ ID NO: 32638 - protein, 207 aa, Pedobacter borealis
  misc_feature (1)..(207): tr|A0A4R8PA99|A0A4R8PA99_9SPHI 7-carboxy-7-deazaguanine synthase OS=Pedobacter borealis OX=475254 GN=queE PE=3 SV=1
MKQAIPEDGTLLPLMEEFYTIQGEGFNTGKAAYFIRLGGCDVGCHWCDVKESWDAEMHPLTASDVIVENASQFPGKAVVITGGEPLIYNLDYLTNKLKERGILTFIETSGAYPLSGNWDWICLSPKKFKAPRPDITPFANELKVIVFNKSDFKWAEEYAAMVSPNCKLYLQPEWSKSKEITPLIIEYVMANPKWEISLQTHKFLNIP

SEQ ID NO: 32639 - protein, 207 aa, Pedobacter caeni
  misc_feature (1)..(207): tr|A0A1M4WNL2|A0A1M4WNL2_9SPHI 7-carboxy-7-deazaguanine synthase OS=Pedobacter caeni OX=288992 GN=queE PE=3 SV =1
MAHQIPADGTLLPLMEEFYTIQGEGFNTGKAAYFIRLGGCDVGCHWCDVKESWDAELHPLTLSDDIVIKADSFPGKAVVITGGEPLIYNLDYLTQKLKERNILTFIETSGAYPLSGTWDWICLSPKKFKAPRPDITPFANELKVIVFNKSDFEWAEKYAESVSDSCKLYLQPEWSKSKEMTPLIIDYVMANPKWEISLQTHKYLNIP

SEQ ID NO: 32640 - protein, 207 aa, Pedobacter chitinilyticus
  misc_feature (1)..(207): tr|A0A3S3QHT9|A0A3S3QHT9_9SPHI 7-carboxy-7-deazaguanine synthase OS=Pedobacter chitinilyticus OX=2233776 GN=qu eE PE=3 SV=1
MAHQIPEDGTLLPLMEEFYTIQGEGFNTGKAAYFIRLGGCDVGCHWCDVKESWDAELHPLTTADDIAAKAATFPGKAVVVTGGEPLIYNLDYLTKKLQDQGILTFIETSGAYPLSGSWDWICLSPKKFKAPRPDITPFANELKVIVFNKSDFEWAEKYAEMVGPNCKLYLQPEWSKAKTVTPLIVDYVMANPKWEISLQTHKFLNIP

SEQ ID NO: 32641 - protein, 207 aa, Pedobacter cryoconitis
  misc_feature (1)..(207): tr|A0A127VAI9|A0A127VAI9_9SPHI 7-carboxy-7-deazaguanine synthase OS=Pedobacter cryoconitis OX=188932 GN=queE P E=3 SV=1
MAHNIPADGTLLPLMEEFYTIQGEGFNTGKAAYFIRLGGCDVGCHWCDVKESWDAELHPLTSADDIAEKADTFPGKAVVITGGEPLIYNMDYLTKKLQEKNILTFIETSGAYPLSGSWDWICLSPKKFKAPRPDITPFANELKVIVFNKSDFEWAEKYAETVSPACKLYLQPEWSKSKEITPMIIDYVMANPKWEISLQTHKYLNIP

SEQ ID NO: 32642 - protein, 207 aa, Pedobacter duraquae
  misc_feature (1)..(207): tr|A0A4R6IP36|A0A4R6IP36_9SPHI 7-carboxy-7-deazaguanine synthase OS=Pedobacter duraquae OX=425511 GN=queE PE=3 SV=1
MAHQIPTDGTLLPLMEEFYTIQGEGYNTGKAAYFIRLGGCDVGCHWCDVKESWDADLHPLTLSDDIAAKADTFPGKAVVITGGEPLIYNLDYLTARLKERNILTFIETSGAYPLSGSWDWICLSPKKFKAPRPDITPFANELKVIVFNKSDFAWAEQYAATVSDTCKLYLQPEWSKSKEITPLIIDYVMANPKWEISLQTHKYLNIP

SEQ ID NO: 32643 - protein, 207 aa, Pedobacter ginsengisoli
  misc_feature (1)..(207): tr|A0A2D1U4V2|A0A2D1U4V2_9SPHI 7-carboxy-7-deazaguanine synthase OS=Pedobacter ginsengisoli OX=363852 GN=queE PE=3 SV=1
MAHQIPADGTLLPLMEEFYTIQGEGFNTGKAAYFIRLGGCDVGCHWCDVKESWDAELHPLTLADDIVTKADTFPGKAVVITGGEPLIYNLDYLTQKLRERKILTFIETSGAYPLSGEWDWICLSPKKFKAPRPDITPFANELKVIVFNKSDFEWAEKYAETVSENCKLYLQPEWSKSKEITPMIIDYVMANPKWEISLQTHKFLNIP

SEQ ID NO: 32644 - protein, 207 aa, Pedobacter ginsenosidimutans
  misc_feature (1)..(207): tr|A0A0T5VJT0|A0A0T5VJT0_9SPHI 7-carboxy-7-deazaguanine synthase OS=Pedobacter ginsenosidimutans OX=687842 GN= queE PE=3 SV=1
MKQDIPEDGTLLPLMEEFYTIQGEGFNTGKAAYFIRLGGCDVGCHWCDVKESWDAEMHPLTASDVIVENADKFPGKAVVITGGEPLIYNLDYLTNKLKERGILTFIETSGAYPLSGNWDWICLSPKKFKAPRPDITPFAHELKVIVFNKSDFKWAEEYAAMVSPTCKLYLQPEWSKSKEITPLIIDYVMANPKWEISLQTHKFLNIP

SEQ ID NO: 32645 - protein, 207 aa, Pedobacter glucosidilyticus
  misc_feature (1)..(207): tr|A0A0B8YAY4|A0A0B8YAY4_9SPHI 7-carboxy-7-deazaguanine synthase OS=Pedobacter glucosidilyticus OX=1122941 GN= queE PE=3 SV=1
MKNFIPEDGTLLPLMEEFYTIQGEGFNTGKAAYFIRLGGCDVGCHWCDVKESWDADLHPLTPSDDIVNNATQYPGKAVVITGGEPLLYNLDYLTKKLKENDILTFIETSGAYPLSGNWDWICLSPKKFKAPNPSIAKFANELKIIVFNKSDFAWAEEHALLVGPNCKLYLQPEWSKANEMLPLIIDYVKNNPKWEISLQTHKYLNIP

SEQ ID NO: 32646 - protein, 207 aa, Pedobacter hartonius
  misc_feature (1)..(207): tr|A0A1H4HEP7|A0A1H4HEP7_9SPHI 7-carboxy-7-deazaguanine synthase OS=Pedobacter hartonius OX=425514 GN=queE PE= 3 SV=1
MAHNIPADGTLLPLMEEFYTIQGEGFNTGKAAYFIRLGGCDVGCHWCDVKESWDAELHPLTSADAIAEKADTFPGKAVVITGGEPLIYNMDYLTKKLQERNILTFIETSGAYPLSGSWDWICLSPKKFKAPRPDITPFANELKVIVFNKSDFEWAERYSETVSPTCKLYLQPEWSKSKEMTPLIIDYVMANPKWEISLQTHKYLNIP

SEQ ID NO: 32647 - protein, 207 aa, Pedobacter heparinus
  misc_feature (1)..(207): tr|C6XWX8|C6XWX8_PEDHD 7-carboxy-7-deazaguanine synthas e OS=Pedobacter heparinus (strain ATCC 13125 / DSM 2366 / CIP 104194 / JCM 7457 / NBRC 12017 / NCIMB 9290 / NR RL B-14731 / HIM 762-3) OX=485917 GN=queE PE=3 S
MAHQIPEDGTLLPLMEEFYTIQGEGFNTGKAAYFIRLGGCDVGCHWCDVKESWDAELHPLTPADAIVAKAESYPGKAVVITGGEPLIYNLDYLTRRLREKGILTFIETSGAYPLSGDWDWICLSPKKFKAPRPDITPYANELKVIVFNKSDFEWAEKYAETVSANCKLYLQPEWSKSKEITPLIIDYVMANPKWEISLQTHKFLNIP

SEQ ID NO: 32648 - protein, 207 aa, Pedobacter insulae
  misc_feature (1)..(207): tr|A0A1I3AIE6|A0A1I3AIE6_9SPHI 7-carboxy-7-deazaguanine synthase OS=Pedobacter insulae OX=414048 GN=queE PE=3 SV=1
MAHIIPENGSMLPLMEEFYTIQGEGFNTGKAAYFIRLGGCDVGCHWCDVKESWDAELHALTAVEEIVEKASSFPGKAVVVTGGEPLIYNLDYLTNKLQEQNMLTFIETSGAYPLSGSWDWICLSPKKFKAPRPDITAFANELKVIVFNKSDFEWAEKYAETVSPTCKLYLQPEWSKAKEMTPLIVDYVMANPKWEISLQTHKFLNIP

SEQ ID NO: 32649 - protein, 207 aa, Pedobacter jejuensis
  misc_feature (1)..(207): tr|A0A3N0BT72|A0A3N0BT72_9SPHI 7-carboxy-7-deazaguanine synthase OS=Pedobacter jejuensis OX=1268550 GN=queE PE =3 SV=1
MKQDIPEDGTLLPLMEEFYTIQGEGFNTGKAAYFIRLGGCDVGCHWCDVKESWDAEMHPLTPADVIVENADKFPGKAVVITGGEPLIYNLDYLTNKLKERGILTFIETSGAYPLSGNWDWICLSPKKFKAPRPDITPFAHELKVIVFNKSDFKWAEEYAAMVSPTCKLYLQPEWSKSKEITPMIIEYVMANPKWEISLQTHKFLNIP

SEQ ID NO: 32650 - protein, 207 aa, Pedobacter kyonggii
  misc_feature (1)..(207): tr|A0A4Q9H801|A0A4Q9H801_9SPHI 7-carboxy-7-deazaguanine synthase OS=Pedobacter kyonggii OX=1926871 GN=queE PE= 3 SV=1
MKQEIPEDGTLLPLMEEFYTIQGEGFNTGKAAYFIRLGGCDVGCHWCDVKESWDAEMHPLTPSDVIVENADKFPGKAVVITGGEPLIYNLDYLTNKLKERGILTFIETSGAYPLSGNWDWICLSPKKFKAPRPDITPFAHELKVIVFNKSDFKWAEEYAAMVSPTCKLYLQPEWSKAKEITPLIIDYVMANPKWEISLQTHKFLNIP

SEQ ID NO: 32651 - protein, 207 aa, Pedobacter kyungheensis
  misc_feature (1)..(207): tr|A0A0C1D569|A0A0C1D569_9SPHI 7-carboxy-7-deazaguanine synthase OS=Pedobacter kyungheensis OX=1069985 GN=queE PE=3 SV=1
MKQDIPEDGTLLPLMEEFYTIQGEGFNTGKAAYFIRLGGCDVGCHWCDVKESWDAEMHPLTASDVIVENADRFPGKAVVITGGEPLIYNLDYLTSKLKERGILTFIETSGAYPLSGNWDWICLSPKKFKAPRPDIAPFANELKVIVFNKSDFKWAEEYAAMVSPGCKLYLQPEWSKSKEITPMIIDYVMANPKWEISLQTHKFLNIP

SEQ ID NO: 32652 - protein, 207 aa, Pedobacter lusitanus
  misc_feature (1)..(207): tr|A0A0D0FSL3|A0A0D0FSL3_9SPHI 7-carboxy-7-deazaguanine synthase OS=Pedobacter lusitanus OX=1503925 GN=queE PE =3 SV=1
MAHNIPADGTLLPLMEEFYTIQGEGFNTGKAAYFIRLGGCDVGCHWCDVKESWDAELHPLTSADDIAEKADTFPGKAVVITGGEPLIYNMDYLTKKLQEKNILTFIETSGAYPLSGSWDWICLSPKKFKAPRPDITPFANELKVIVFNKSDFEWAEKYAETVSPTCKLYLQPEWSKSKEITPMIIDYVMANPKWEISLQTHKYLNIP

SEQ ID NO: 32653 - protein, 207 aa, Pedobacter luteus
  misc_feature (1)..(207): tr|A0A1T5ALQ1|A0A1T5ALQ1_9SPHI 7-carboxy-7-deazaguanine synthase OS=Pedobacter luteus OX=572036 GN=queE PE=3 S V=1
MAHQIPADGTLLPLMEEFYTIQGEGFHSGKAAYFIRLGGCDVGCHWCDVKESWDAELHPLTAADQIVKNAEKFPGKAVVVTGGEPLIYNLDYLTAELQARGIKTFIETSGAYPLSGSWDWICLSPKKFKAPRPDINPFAGELKVIVFNKSDFAWAEEHAQHVSENCKLYLQPEWSKSAEMTPLIIDYVMQNPKWEISLQTHKYLNIP

SEQ ID NO: 32654 - protein, 207 aa, Pedobacter metabolipauper
  misc_feature (1)..(207): tr|A0A4R6SZ94|A0A4R6SZ94_9SPHI 7-carboxy-7-deazaguanine synthase OS=Pedobacter metabolipauper OX=425513 GN=que E PE=3 SV=1
MAHQIPADGTLLPLMEEFYTIQGEGFNTGKAAYFIRLGGCDVGCHWCDVKESWDAELHPLTHADDIVAKADGFPGKAVVITGGEPLIYNLDYLTKKLHERKILTFIETSGAYPLSGDWDWICLSPKKFKAPRPDITPFANELKVIVFNKSDFDWAEKYAETVSDTCKLYLQPEWSKSKEITPLIIDYVMANPKWEISLQTHKYLNIP

SEQ ID NO: 32655 - protein, 207 aa, Pedobacter nutrimenti
  misc_feature (1)..(207): tr|A0A318UKK5|A0A318UKK5_9SPHI 7-carboxy-7-deazaguanine synthase OS=Pedobacter nutrimenti OX=1241337 GN=queE P E=3 SV=1
MAHQIPSDGTLLPLMEEFYTIQGEGFNTGKAAYFIRLGGCDVGCHWCDVKESWDAELHPLTSADDIVAKAETFPGKAVVITGGEPLIYNLDYLTAKLQQKKILTFIETSGAYPLSGSWDWICLSPKKFKAPRPDITPYANELKVIIFNKSDFKWAEQYAQTVSDNCKLYLQPEWSKSKEITPLIIDYVMANPKWEISLQTHKYLNIP

SEQ ID NO: 32656 - protein, 207 aa, Pedobacter nyackensis
  misc_feature (1)..(207): tr|A0A1W2DEK1|A0A1W2DEK1_9SPHI 7-carboxy-7-deazaguanine synthase OS=Pedobacter nyackensis OX=475255 GN=queE PE =3 SV=1
MAHQIPEDGTLLPLMEEFYTIQGEGFNTGKAAYFIRLGGCDVGCHWCDVKESWDAELHPLTHADEIVAKADSFPGRAVVITGGEPLIYNLDYLTKELRKKNILTFIETSGAYPLSGEWDWICLSPKKFKSPRPDITPFANELKVIVFNKSDFEWAEKYAETVSENCKLYLQPEWSKSKEMTPLIIDYVMANPRWEISLQTHKYLNIP

SEQ ID NO: 32657 - protein, 193 aa, Pedobacter psychrophilus
  misc_feature (1)..(193): tr|A0A179DGX8|A0A179DGX8_9SPHI 7-carboxy-7-deazaguanine synthase OS=Pedobacter psychrophilus OX=1826909 GN=que E PE=3 SV=1
MEEFYTIQGEGFNSGKAAYFIRLGGCDVGCHWCDVKESWDANLHPLTSTDKIVENAIQYPGKAVVVTGGEPLIYNLNNLTQQLKAKGIVTFIETSGAYPLSGNWDWICLSPKKFKAPRKDIAPFANELKVIVFNKSDFIWAEEHAAMVSPTCKLYLQPEWSKSAEMTPLIINYVMNNPKWEISLQTHKFLNIP

SEQ ID NO: 32658 - protein, 207 aa, Pedobacter psychrotolerans
  misc_feature (1)..(207): tr|A0A4R2HC08|A0A4R2HC08_9SPHI 7-carboxy-7-deazaguanine synthase OS=Pedobacter psychrotolerans OX=1843235 GN=q ueE PE=3 SV=1
MIQHIPEDGTLLPLMEEFYTIQGEGFNTGKAAYFIRLGGCDVGCHWCDVKESWDANMHPLTPADVIVANADKFPGKAVVITGGEPLIYNLDYLTNKLKERGILTFIETSGAYPLSGNWDWICLSPKKFKAPRPDITPFAHELKVIVFNKSDFKWAEEYAAMVSPTCKLYLQPEWSKSKEITPMIIEYVMANPKWEISLQTHKFLNIP

SEQ ID NO: 32659 - protein, 207 aa, Pedobacter rhizosphaerae
  misc_feature (1)..(207): tr|A0A1H9S2X3|A0A1H9S2X3_9SPHI 7-carboxy-7-deazaguanine synthase OS=Pedobacter rhizosphaerae OX=390241 GN=queE PE=3 SV=1
MKQQIPEDGTLLPLMEEFYTIQGEGFNTGKAAYFIRLGGCDVGCHWCDVKESWDAEMHPLTPSDVIVENADQFPGKAVVITGGEPLIYNLDYLTLKLKERGILTFIETSGAYPLSGHWDWICLSPKKFKAPRPDITPFANELKVIVFNKSDFKWAEEYAAMVSPTCKLYLQPEWSKSKEITPMIIDYVMANPKWEISLQTHKFLNIP

SEQ ID NO: 32660 - protein, 207 aa, Pedobacter ruber
  misc_feature (1)..(207): tr|A0A1G9S7J2|A0A1G9S7J2_9SPHI 7-carboxy-7-deazaguanine synthase OS=Pedobacter ruber OX=990371 GN=queE PE=3 SV =1
MAHQIPPDGTLLPLMEEFYTIQGEGFHSGKAAYFIRLGGCDVGCHWCDVKESWDAELHPLTSADQIVQNAEKFPGKAVVVTGGEPLIYNLDYLTAELQKRGIKTFIETSGAYPLSGSWDWICLSPKKFKSPRPDILPFAGELKVIVFNKSDFLWAEEHAAHVSDTCKLYLQPEWSKSAEITPLIIDYVMQNPKWEVSLQTHKYLNIP

SEQ ID NO: 32661 - protein, 207 aa, Pedobacter soli
  misc_feature (1)..(207): tr|A0A1G6IN98|A0A1G6IN98_9SPHI 7-carboxy-7-deazaguanine synthase OS=Pedobacter soli OX=390242 GN=queE PE=3 SV= 1
MKQEIPEDGTLLPLMEEFYTIQGEGFNTGKAAYFIRLGGCDVGCHWCDVKESWDAEMHPLTASDVIVENADRFPGKAVVITGGEPLIYNLDYLTNKLKERGILTFIETSGAYPLSGNWDWICLSPKKFKAPRPDIAPFANELKVIVFNKSDFKWAEEYAAMVSPGCKLYLQPEWSKSKEITPMIIDYVMANPKWEISLQTHKFLNIP

SEQ ID NO: 32662 - protein, 207 aa, Pedobacter sp.
  misc_feature (1)..(207): tr|A0A4R2ZEY9|A0A4R2ZEY9_9SPHI 7-carboxy-7-deazaguanine synthase OS=Pedobacter sp. CF074 OX=2135714 GN=queE PE =3 SV=1
MKQEIPEDGTLLPLMEEFYTIQGEGFNTGKAAYFIRLGGCDVGCHWCDVKESWNAEMHPLTSADVIVQNADKFPGKAVVITGGEPLIYNLDYLTNKLKERGILTFIETSGAYPLSGNWDWICLSPKKFKAPRPDITPFAHELKVIVFNKSDFKWAEEYAAMVSPTCKLYLQPEWSKSAEITPLIIEYVMANPKWEISLQTHKFLNIP

SEQ ID NO: 32663 - protein, 193 aa, Pedobacter sp.
  misc_feature (1)..(193): tr|A6E8F6|A6E8F6_9SPHI 7-carboxy-7-deazaguanine synthas e OS=Pedobacter sp. BAL39 OX=391596 GN=queE PE=3 SV=1
MEEFYTIQGEGFNTGKAAYFIRLGGCDVGCHWCDVKESWDAELHPLTAADDIVEKADSFPGKAVVITGGEPLIYNLDYLTRKLRERNILTFIETSGAYPLSGSWDWICLSPKKFKAPRPDITPFANELKVIIFNKSDFKWAEQYAETVSKNCKLYLQPEWSKSKEITPMIIEYVMANPKWEISLQTHKYLNIP

SEQ ID NO: 32664 - protein, 207 aa, Pedobacter steynii
  misc_feature (1)..(207): tr|A0A1G9KRA2|A0A1G9KRA2_9SPHI 7-carboxy-7-deazaguanine synthase OS=Pedobacter steynii OX=430522 GN=queE PE=3 SV=1
MAHQIPADGTLLPLMEEFYTIQGEGFNTGKAAYFIRLGGCDVGCHWCDVKESWDAELHPLTLSDDIVVKADSFPGKAVVITGGEPLIYNLDYLTQKLKERNILTFIETSGAYPLSGTWDWICLSPKKFKAPRPDITPFANELKVIVFNKSDFEWAEKYAESVSDTCKLYLQPEWSKSKEMTPLIIDYVMANPKWEISLQTHKYLNIP

SEQ ID NO: 32665 - protein, 207 aa, Pedobacter steynii
  misc_feature (1)..(207): tr|A0A1D7QNN4|A0A1D7QNN4_9SPHI 7-carboxy-7-deazaguanine synthase OS=Pedobacter steynii OX=430522 GN=queE PE=3 SV=1
MAHQIPADGTLLPLMEEFYTIQGEGFNTGKAAYFIRLGGCDVGCHWCDVKESWDAELHPLTLSDDIVTKADIFPGKAVVITGGEPLIYNLDYLTQKLKEKNILTFIETSGAYPLSGSWDWICLSPKKFKAPRPDITPFANELKVIVFNKSDFEWAEKYAETVSDTCKLYLQPEWSKSKEMTPLIIDYVMANPKWEISLQTHKYLNIP

SEQ ID NO: 32666 - protein, 207 aa, Pedobacter suwonensis; identical to SEQ ID NO: 32638
  misc_feature (1)..(207): tr|A0A1I0SI19|A0A1I0SI19_9SPHI 7-carboxy-7-deazaguanine synthase OS=Pedobacter suwonensis OX=332999 GN=queE PE =3 SV=1

SEQ ID NO: 32667 - protein, 207 aa, Pedobacter terrae
  misc_feature (1)..(207): tr|A0A1G7N6X7|A0A1G7N6X7_9SPHI 7-carboxy-7-deazaguanine synthase OS=Pedobacter terrae OX=405671 GN=queE PE=3 S V=1
MKQAIPEDGTLLPLMEEFYTIQGEGFNTGKAAYFIRLGGCDVGCHWCDVKESWDAEMHPLTSSDVIVENADRFPGKAVVITGGEPLIYNLDYLTYKLKERGILTFIETSGAYPLSGNWDWICLSPKKFKAPRPDITPFAHELKVIIFNKSDFKWAEEYAAMVSPTCKLYLQPEWSKSKEITPLIIEYVMANPKWEISLQTHKFLNIP

SEQ ID NO: 32668 - protein, 207 aa, Pedobacter terrae
  misc_feature (1)..(207): tr|A0A561G0I0|A0A561G0I0_9SPHI 7-carboxy-7-deazaguanine synthase OS=Pedobacter terrae OX=405671 GN=queE PE=3 S V=1
MKQEIPEDGTLLPLMEEFYTIQGEGFNTGKAAYFIRLGGCDVGCHWCDVKESWDAEMHPLTPADLIVENADKFPGKAVVITGGEPLIYNLDYLTNKLKERGILTFIETSGAYPLSGNWDWICLSPKKFKAPRPDITPFAHELKVIVFNKSDFKWAEEYAAMVSPTCKLYLQPEWSKSKEITPLIIEYVMANPKWEISLQTHKFLNIP

SEQ ID NO: 32669 - protein, 206 aa, Pedobacter tournemirensis
  misc_feature (1)..(206): tr|A0A4Q0MG59|A0A4Q0MG59_9SPHI 7-carboxy-7-deazaguanine synthase OS=Pedobacter tournemirensis OX=699437 GN=que E PE=3 SV=1
MTKVPEDGSLLPLMEEFYTIQGEGYHSGKAAYFIRLGGCDVGCHWCDVKESWDAELHPLTPADQIIENAAKYPGKAVVITGGEPLIYNLDYLTAGLHERGIKTFIETSGAYPLSGKWDWICLSPKKFKAPLPEIAPKAGELKIIVFNKSDLAWAEKYAGMVSPSCKLYLQPEWSKAGEVTSLIIDYVKENPKWEISLQTHKYLNIP

SEQ ID NO: 32670 - protein, 206 aa, Pedobacter tournemirensis
  misc_feature (1)..(206): tr|A0A543GYR3|A0A543GYR3_9SPHI 7-carboxy-7-deazaguanine synthase OS=Pedobacter tournemirensis OX=699437 GN=que E PE=3 SV=1
MTKVPEDGSLLPLMEEFYTIQGEGYHSGKAAYFIRLGGCDVGCHWCDVKESWDAELHPLTPADQIIENAAKYPGKAVVITGGEPLIYNLDYLTAGLHDRGIKTFIETSGAYPLSGEWDWICLSPKKFKAPLPEIAPKAGELKIIVFNKSDLAWAEKYAGMVSPSCKLYLQPEWSKAGEVTSLIIDYVKENPKWEISLQTHKYLNIP

SEQ ID NO: 32671 - protein, 207 aa, Pedobacter westerhofensis
  misc_feature (1)..(207): tr|A0A521FGM7|A0A521FGM7_9SPHI 7-carboxy-7-deazaguanine synthase OS=Pedobacter westerhofensis OX=425512 GN=que E PE=3 SV=1
MAHNIPADGTLLPLMEEFYTIQGEGFNTGKAAYFIRLGGCDVGCHWCDVKESWDAELHPLTAADAIAEKADTFPGKAVVITGGEPLIYNMDYLTKKLHERNILTFIETSGAYPLSGDWDWICLSPKKFKAPRPDITPFANELKVIVFNKSDFEWAERYAETVSPTCKLYLQPEWSKSREMTPLIIDYVMANPKWEISLQTHKYLNIP

SEQ ID NO: 32672 - protein, 207 aa, Pedobacter xixiisoli
  misc_feature (1)..(207): tr|A0A285ZTF5|A0A285ZTF5_9SPHI 7-carboxy-7-deazaguanine synthase OS=Pedobacter xixiisoli OX=1476464 GN=queE PE =3 SV=1
MAHHIPEDGTLLPLMEEFYTIQGEGYNTGKAAYFIRLGGCDVGCHWCDVKESWDAELHPLTSSDDIAAKADTFPGKAVVVTGGEPLIYNLDYLTKQLQDRGILTFIETSGAYPLSGSWDWICLSPKKFKAPRPDITPFANELKVIVFNKSDFEWAEKYAEMVGPNCKLYLQPEWSKASTVTPLIIEYVMANPKWEISLQTHKFLNIP

SEQ ID NO: 32673 - protein, 207 aa, Pedobacter yonginense
  misc_feature (1)..(207): tr|A0A317ESX7|A0A317ESX7_9SPHI 7-carboxy-7-deazaguanine synthase OS=Pedobacter yonginense OX=651869 GN=queE PE =3 SV=1
MKQEIPEDGTLLPLMEEFYTIQGEGFNTGKAAYFIRLGGCDVGCHWCDVKESWDANLHPLTPSDVIVDHADQYPGKAVVITGGEPLIYNLDYLTNKLKERGILTFIETSGAYPLSGNWDWICLSPKKFKAPRPDITPFAHELKVIVFNKSDFKWAEEYAAMVSPTCKLYLQPEWSKSKEITPLIIDYVMANPKWEISLQTHKFLNIP

SEQ ID NO: 32674 - protein, 207 aa, Pedobacter yulinensis
  misc_feature (1)..(207): tr|A0A2T3HKS0|A0A2T3HKS0_9SPHI 7-carboxy-7-deazaguanine synthase OS=Pedobacter yulinensis OX=2126353 GN=queE P E=3 SV=1
MAVQVPEDGSLLPLMEEFYTIQGEGFHTGKAAYFIRLGGCDVGCHWCDVKESWDAEMHPLTAVEQIVANAEKHPGKAVVITGGEPLIYNLDNLTAALQQKGIKTFIETSGAYPLSGHWDWICLSPKKFKAPRPDMTPFANELKVIVFNKSDFDWAEKYAETVSANCKLYLQPEWSRSKEVTPLIIDYVMQHPKWEISLQTHKFLNIP

SEQ ID NO: 32675 - protein, 244 aa, Pedosphaera parvula
  misc_feature (1)..(244): tr|B9XLJ7|B9XLJ7_PEDPL 7-carboxy-7-deazaguanine synthas e OS=Pedosphaera parvula (strain Ellin514) OX=320771 GN =queE PE=3 SV=1
MSETLVVNEIYLSLQGESTFAGLPCIFVRLTACNLRCSYCDTAYAFTEGAKQGMAEMLAEIRTLAASYSQTVGGHKMPLIELTGGEPLLQPNSLPLMKTLCDEGFTVLIETSGAHDISKIDSRVRRIMDLKCPSSGEVLRNRRENLRYLKNSDEIKFVIGTEQDYEWAKQQIVEHKLDAICPLLFSWVQPLTPEQQDKALKKVPAGQTPITRLQLVERIIADALPVRFQLQMHKIIWSPDQRGV

SEQ ID NO: 32676 - protein, 244 aa, Pedosphaera sp.
  misc_feature (1)..(244): tr|A0A2A2QNF0|A0A2A2QNF0_9BACT 7-carboxy-7-deazaguanine synthase OS=Pedosphaera sp. Tous-C6FEB OX=1982324 GN=q ueE PE=3 SV=1
MSDQLVVNEIYLSLQGESTFAGLPCIFVRLTGCNLRCSYCDTAYAFTEGTRRTLPEILAEVRRLAAAYAPAAASQPLPLVELTGGEPLLQPNTLPLMRQLCDAGFTVLLETSGALDISPVDVRVRRIMDLKCPSSGEVERNRWENLPHLQPTDEIKFVIGTVEDYEWAKAQIREHKLGAKCPLLFSWITPLQAHQQAKVLKPVPTGQTPLSRLDLVQRIIADALPVRFQLQMHKIVWAPDQRGV

SEQ ID NO: 32677 - protein, 252 aa, Pedosphaera sp.
  misc_feature (1)..(252): tr|A0A2D5VZ76|A0A2D5VZ76_9BACT 7-carboxy-7-deazaguanine synthase OS=Pedosphaera sp. OX=2024890 GN=queE PE=3 SV =1
  misc_feature (246)..(246): Xaa can be any naturally occurring amino acid
MSEAPTQEASLLVHEIYLSIQGESTYAGLPCIFIRLTGCDLRCSYCDTAYAFKGGKRMNVSLVLEEVNAMAERFARDPAHDGCRLPLVEITGGEPMLQRSTPALMAQLCDAGYRVLLETSGAHDVSSVDERVIRIVDLKCPSSGESERMVWENLDHLRGKDELKMVIATHEDYRWCREQIRDRKLAELCPILVSWCAPLSEGQQDEALKPGPSPQELISRKELVEQLVHDALPVRFQAQLHKIIWXADQKGV

SEQ ID NO: 32678 - protein, 236 aa, Pelagibaca sp.
  misc_feature (1)..(236): tr|A0A2D6BA87|A0A2D6BA87_9RHOB 7-carboxy-7-deazaguanine synthase OS=Pelagibaca sp. OX=1979400 GN=queE PE=3 SV= 1
MTTLRIAEIFGPTIQGEGALIGEPTLFVRAGGCDYRCSWCDSLHAVESAYRHQWAAMTPNAIWTELRRLSDGQPVTVSISGGNPAIQNFGPLIAMGRAAGYRFACETQGSVPRAWFSDLDTLVLSPKPPSSGETVDWSLFAECVEAGRGARETVMKIVIFDQRDYEWAKDTHSRHPELPLFLQPGNPEVDPAVSVDPQALADRLGWLTETAVADRWFAPRILPQLHVLIWGNKRGV

SEQ ID NO: 32679 - protein, 295 aa, Pelagibacteraceae bacterium
  misc_feature (1)..(295): tr|A0A3R7R8I2|A0A3R7R8I2_9PROT 7-carboxy-7-deazaguanine synthase OS=Pelagibacteraceae bacterium TMED232 OX=198 6813 GN=queE PE=3 SV=1
  misc_feature (191)..(191): Xaa can be any naturally occurring amino acid
MEKLRYSEIFYSVQGEGRFVGVPSVFFRVFGCNFNCHGFGQGRDKSKWLKPEEMPYMTQDLSHVKHVRDLPVVEIGCDASASWASRYKHLVNWDTVEEIADKIQQYTPNKRWTNANGSDIHFIITGGEPMLWQRETQQLLRQPQFSDLKNLTIETNCTQGFKADFQRFLQGLVAGDYTKEPVHITWSTSPXLSISGEQWHKAIKGEIAQQYANIPNSHLYFKFVIQDEQDLEEVEMARETYKKFGVEADIYLMAVGATVEGQAKTSKQVANIALQNGYKYSPRLHVDLFGNKWGT

SEQ ID NO: 32680 - protein, 210 aa, Pelagibacteraceae bacterium
  misc_feature (1)..(210): tr|A0A1Z8V152|A0A1Z8V152_9PROT 7-carboxy-7-deazaguanine synthase OS=Pelagibacteraceae bacterium TMED65 OX=1986 644 GN=queE PE=3 SV=1
MYKIKEIFKSIQGEGYNSGKTSVFVRFTGCNLWNGKNKDKKNAVCNFCDTDFIGTDGKNGGIYNIEKLVDKIEKVWNSTFSLQNKFVILTGGEPLLQVDDRLVKNLQRKNFIVAVETNGTINTMINFDWICVSPKDPRNWKLKKGDELKIIYPQRIFDLNKLLRFNFKYFFLQPKYDNFTRINLNKTLSYCKRNREWFPSLQLHKIIRVD

SEQ ID NO: 32681 - protein, 209 aa, Pelagibacterales bacterium
  misc_feature (1)..(209): tr|A0A2E6DYH2|A0A2E6DYH2_9PROT 7-carboxy-7-deazaguanine synthase OS=Pelagibacterales bacterium OX=2026776 GN=q ueE PE=3 SV=1
  misc_feature (83)..(83): Xaa can be any naturally occurring amino acid
  misc_feature (155)..(155): Xaa can be any naturally occurring amino acid
MTYNVKEIFYSIQGEGFHTGRPSIFCRFSGCNLWNGLERDREIAKCNFCDTDFVGTNGLGGNKFLNEDDLAKEIISYWPNSSXPFVILTGGEPMLQVDKKLIHALKSYKCHLAIETNGTIKVPNEIDWICVSPKAGNSLVQVYGDELKLVYPQKXITPEEYEKYSFKNFSLQPMDGELKLHNTNLAIEYCKNNPNWKISLQTHKIIGVR

SEQ ID NO: 32682 - protein, 210 aa, Pelagibacterales bacterium
  misc_feature (1)..(210): tr|A0A2E4X5Z5|A0A2E4X5Z5_9PROT 7-carboxy-7-deazaguanine synthase OS=Pelagibacterales bacterium OX=2026776 GN=q ueE PE=3 SV=1
MIYNVKEIFLTIQGEGYNSGKKATFCRFSGCNLWNGLENSKKTAKCNFCDTDFVGINGENGGKYTEVSLINKIEKISNCNNNIKKFIVFTGGEPLLQLNEQLIKKLKKKNYKIAVETNGTIKAPKGIDWICVSPKIKNKIVLNYGNEIKLVYPQRGLKLKNFENLNFDHYYLQPLYNDKYDQNLKKTLEIIMKYPKWKLSLQTHKFIGIK

SEQ ID NO: 32683 - protein, 245 aa, Pelagibacterium luteolum
  misc_feature (1)..(245): tr|A0A1G7W2B5|A0A1G7W2B5_9RHIZ 7-carboxy-7-deazaguanine synthase OS=Pelagibacterium luteolum OX=440168 GN=queE PE=3 SV=1
MKHVNAPTIRVSEIFGPTIQGEGLLIGLPTVFVRTGGCDYRCSWCDSLHAVENRFRGDWEAMTAEQIWERVRALSGGNPLTVSLSGGNPAIQPLGELIALGHQDGYRFALETQGSVAREWFSTLDSLVLSPKPPSSQMSTDWAAFDACLEAAQSGPTTVLKLVVFDDADYAYAKDAAARYLNLPIYLQPGNHTPPSPDADDVIVDVPGVMKRTEWLVDKVIQDRWFSARVLPQLHVLLWGNARGV

SEQ ID NO: 32684 - protein, 224 aa, Pelagibaculum spongiae
  misc_feature (1)..(224): tr|A0A2V1GNL2|A0A2V1GNL2_9GAMM 7-carboxy-7-deazaguanine synthase OS=Pelagibaculum spongiae OX=2080658 GN=queE PE=3 SV=1
MSYSVKEVFYTLQGEGAMTGRASVFCRFSGCNLWSGLEKHRAESPCHFCDTDFRGTDGPGGGKFTAAKTLANHIASFWPENAANTGNSQKPYVVITGGEPLLQLDQALVDALHQVGFEIGIETNGTQPAPSGIDWLCLSPKTKDIVLEYCDELKLVYPLQNIKPEDFANFPAKIYYLTPMADPKAADNNSTLYQDQITRQTIDYCHSHPQWRLNLQSHKLVNIP

SEQ ID NO: 32685 - protein, 164 aa, Pelagicola litorisediminis
  misc_feature (1)..(164): tr|A0A1Y5RC36|A0A1Y5RC36_9RHOB 7-carboxy-7-deazaguanine synthase OS=Pelagicola litorisediminis OX=1312363 GN=q ueE PE=4 SV=1
MVSLSGGNPAIQPLGGLIELGHAKGYRFALETQGSVARRWFADLDLLVLSPKPPSSGMETDWGLLQDCRNAAQGTDTILKVVVFDEADYAYAREVAKRHHDLPMYLQPGNHTPPPPDDDKAVVDQNGIDERMRWLVDRVTADKWFEARVLPQLHVMLWGNKRGV

SEQ ID NO: 32686 - protein, 239 aa, Pelagicola sp.
  misc_feature (1)..(239): tr|A0A2U2CUK2|A0A2U2CUK2_9RHOB 7-carboxy-7-deazaguanine synthase OS=Pelagicola sp. LXJ1103 OX=2175247 GN=queE PE=3 SV=1
MSEAIRVSEIFGPTIQGEGALIGLPTVFVRTGGCDFRCLWCDSLHAVDSEYRHTWAAMSASAVMGEVRRLAGGPLMVTLSGGNPAIQPLGDLITLGQAEGYGFAMETQGSVAKDWFANLDMLVLSPKPPSSGMQTDWEAFAACVAAAKSAQTVLKIVVFDEADYGYARDAAARFPDLAVYLQPGNHTPPPPEDDDAEVDLAGIEARMNWLIERAAQDHWHNARILPQLHVMLWGNKRGV

SEQ ID NO: 32687 - protein, 240 aa, Pelagivirga sediminicola
  misc_feature (1)..(240): tr|A0A2T7G7S1|A0A2T7G7S1_9RHOB 7-carboxy-7-deazaguanine synthase OS=Pelagivirga sediminicola OX=2170575 GN=que E PE=3 SV=1
MSDVIRVSEIFGPTIQGEGALIGVPTVFVRTGGCDYRCVWCDSLHAVDSEYRHTWAPMRAGAVMDEVRRLSGGVPLTVTLSGGNPAIQPLGDLIALGRAEGYGFAMETQGSVARDWFSQLDMLVLSPKPPSSGMQTDWTLLQDCIDAAAGVRTVLKIVVFDEADFAYARDVAARHPGLPVYLQPGNHTPPPPEDDTATVDQDGIDARMRWLVDRVIAGRWHGATVLPQLHVMLWGNKRGV

SEQ ID NO: 32688 - protein, 257 aa, Pelistega indica
  misc_feature (1)..(257): tr|V8FVY5|V8FVY5_9BURK 7-carboxy-7-deazaguanine synthas e OS=Pelistega indica OX=1414851 GN=queE PE=3 SV=1
MSVEHILQPAQQLAEPFSIDEQHPQYRIVEIFESLQGEGFNTGMPAIFIRLGKCSLACSWCDTDYLKFELKSLNDIFAMIDGYTAKNIIITGGEPTIHPYIEQLLDALKLKGYHLCIESNALHAIPLQIEYVAVSPKYCYSEKYAKECISHADEVRIVMDPDKLGSPEKGVLPLEKEQRVHTFIEWCEEIANKISAQHYYLSPLEVDGQMNILDTITAIGLLNERAKGRQKDTKNLANNFIPHWQLSLQTHKFAHIQ

SEQ ID NO: 32689 - protein, 248 aa, Pelobacter acetylenicus
  misc_feature (1)..(248): tr|A0A1L3GIT0|A0A1L3GIT0_PELAE 7-carboxy-7-deazaguanine synthase OS=Pelobacter acetylenicus OX=29542 GN=queE P E=3 SV=1
MPCNDAQLLEVFSSIQGEAELVGYRQIFIRLAGCNLHCAYCDTDYSLREHCRVEDAPGSGQFRGIANPVSLEVIASLVSAWVDASPGMHHSISLTGGEPLLQAPVLLNWAPVLREILPLHLETNGTCAAALEPLVPHLDMISMDVKLSSVTGVATPWKLHRAFLEIASRTKVCVKAVVGEETPVEEMIDLGRMVRQMSPDTSVYLQPVTQQGKIGMSSNHLLCLQAAVAKQHANVRVVPQMHVFMNLL

SEQ ID NO: 32690 - protein, 253 aa, Pelobacter carbinolicus
  misc_feature (1)..(253): tr|Q3A421|Q3A421_PELCD 7-carboxy-7-deazaguanine synthas e OS=Pelobacter carbinolicus (strain DSM 2380 / NBRC 10 3641 / GraBd1) OX=338963 GN=queE PE=3 SV=1
MPVPAIPSTDAQLLEIFSSIQGEGGLVGCRQVFIRLAGCNLDCAYCDTDFAPQDTCRIEDAPGSGQFRSVTNPVALEVVADILGAWTKRAPGMHHSISLTGGEPLLQGQLLRDWVPVLKEILPIHLETNGTCPDALAPLLPHLEWVSMDVKLASTTGMPTPWKLHRAFLEIAAQAHVWVKAVVCESTPAEEMHDLGRLVHQIAPHVTIFLQPATRQGKVDMSAERLLALQTALSRHHGKVRVVPQTHVFLGLL

SEQ ID NO: 32691 - protein, 249 aa, Pelobacter propionicus
  misc_feature (1)..(249): tr|A1APX7|A1APX7_PELPD 7-carboxy-7-deazaguanine synthas e OS=Pelobacter propionicus (strain DSM 2379 / NBRC 103 807 / OttBd1) OX=338966 GN=queE PE=3 SV=1
MSESLPIAEIFSSIQGEGYLAGRRQIFIRLTRCNLECSYCDTGFGEGESCLVENSPGSNVFEHFPRAVGLDRLMDILNAWTWALPRAHHSISLTGGEPLLFAPLLSDWLPRLRGILPVHLETNGTLPIELGRIIRLVDYVSMDMKLPSTAACGGELWDTHRRFLETARGKNVSVKIVVGEQSDAAEIEQVCRIIAQIRPDTPLFLQPLSLPDSHCGISAAHLLHLQALAAARLSDVRVIPQMHKLMGVL

SEQ ID NO: 32692 - protein, 248 aa, Pelobacter sp.
  misc_feature (1)..(248): tr|A0A1L3GM60|A0A1L3GM60_9DELT 7-carboxy-7-deazaguanine synthase OS=Pelobacter sp. SFB93 OX=1842532 GN=queE PE =3 SV=1
MSQTDGQLIELFSSIQGEGLLIGFRQIFIRLALCNLSCRYCDTPFDVADSCRVETAPGAGSFFALPNPVSLDVLSNLIADWLDRLPGGHHSISITGGEPLMQDKVLQGWLPVLGQLLPIHLETNGTLPDAFEPLVPFVDWVSMDIKLASLTGEPTPWLAHEDFLSLASDRGCCVKVVVGTETTVEEVQQAADLVHRKAPSAPLILQPITMAGQVGTAAAHLFRLQEQAARIHGLVRVIPQTHAFLGLL

SEQ ID NO: 32693 - protein, 197 aa, Pelobium manganitolerans
  misc_feature (1)..(197): tr|A0A419SB34|A0A419SB34_9SPHI 7-carboxy-7-deazaguanine synthase OS=Pelobium manganitolerans OX=1842495 GN=que E PE=3 SV=1
MLPLMEEFYTIQGEGYNSGKAAYFIRLGGCDVGCHWCDVKESWDADMHPLTATQTIVEHADQFPGKAVVVTGGEPLLYNLDELTKQLKARGIATFIETSGAYPLSGFWDWICLSPKKFKAPRKDIAPFANELKVIVFNKSDFAWAEEHAKLVSSDCKLYLQPEWSKAAEMTPLIIDYVMNNPKWEISLQTHKFLNIP

SEQ ID NO: 32694 - protein, 223 aa, Pelodictyon luteolum
  misc_feature (1)..(223): tr|A0A165LYK4|A0A165LYK4_PELLU 7-carboxy-7-deazaguanine synthase OS=Pelodictyon luteolum OX=1100 GN=queE PE=3 SV=1
MTGAMLQISEIFHSIQGESSFAGWPCTFIRLAGCSHGCRYCDTTYARTAERQLSIGDTIDEARRFRPHLIEVTGGEPLEQPLVHKLLCALCDGGGIIMLETGGFLSVRDVDPRVHKVIDLKPPSSGKDGENCMENIDLALSQGEKERNHYEFKIVAADRDDYLWARKLIKETRLAEACTVMMGPIAGTVHPYELAGWILEDRLHVRMQLQLHKYIWPDIERGV

SEQ ID NO: 32695 - protein, 223 aa, Pelodictyon luteolum
  misc_feature (1)..(223): tr|Q3B5R3|Q3B5R3_PELLD 7-carboxy-7-deazaguanine synthas e OS=Pelodictyon luteolum (strain DSM 273 / 2530) OX=31 9225 GN=queE PE=3 SV=1
MTGTILQISEIFHSIQGESSFAGWPCTFIRLAGCSHGCRYCDTTYAKTAERRLSIGDTIDEARRYHAHLIEVTGGEPLEQPAVHKLLHALCDGGGGVMLETGGFLSVRDVDPRVHKVIDLKPPSSGRDKENCMENIDIALNAGEGERKRYEFKIVAADREDYLWARGILKDTRLAEACTVMMGPIAGTIHPSELAGWILEDRLHVRMQLQLHRYIWPGMDRGV

SEQ ID NO: 32696 - protein, 223 aa, Pelodictyon phaeoclathratiforme
  misc_feature (1)..(223): tr|B4SE56|B4SE56_PELPB 7-carboxy-7-deazaguanine synthas e OS=Pelodictyon phaeoclathratiforme (strain DSM 5477 / BU-1) OX=324925 GN=queE PE=3 SV=1
MSAGTLNISEIFHSIQGESSFAGWPCAFIRLAGCGHGCIGCDTAYAEHDGIKLGIEVVVQRALAFRAPLIEVTGGEPLLQPAVYSLMRQLCDLEQKVLLETGGFLSVAEVDCRVHKIIDLKPPSSGVCDQNNPENIELALAAVLPHRQNFEFKIVVASREDYEWARALLQEHGLMDSFTIMMGVSFGKLDPAELAEWMLRDRLRARMQLQLHKYIWDPCRRGV

SEQ ID NO: 32697 - protein, 214 aa, Pelomonas puraquae
  misc_feature (1)..(214): tr|A0A254N5D8|A0A254N5D8_9BURK 7-carboxy-7-deazaguanine synthase OS=Pelomonas puraquae OX=431059 GN=queE PE=3 SV=1
MYSVKELFFTLQGEGAQAGRAAVFCRFAGCNLWSGREQDRATAVCTFCDTDFVGTDGQGGGKFATAEALADTIAQAWPHAADGSLPGKPYVVCTGGEPLLQLDAPLIDALHARGFEVAVETNGTQPAPPGLDWICVSPKADAPLVLTAGHELKLVYPQPLAQPERFAGLDFQHFFLQPMDSVLQREHTRAAVDYCMKHPQWRLSVQMHKVVGID

SEQ ID NO: 32698 - protein, 209 aa, Pelomonas saccharophila
  misc_feature (1)..(209): tr|A0A4R3VB98|A0A4R3VB98_PELSC 7-carboxy-7-deazaguanine synthase OS=Pelomonas saccharophila OX=304 GN=queE PE= 3 SV=1
MTYSVKELFYTLQGEGAQAGRAAVFCRFAGCNLWTGREQDRATAVCNFCDTDFVGTDGEGGGKFATAQALADTIAKAWPGGGKPYVVCTGGEPLLQLDEPLIDALHAHGFEVAVETNGTQPAPKGLDWICVSPKADAPLLLTSGHELKLVYPQPLAQPERFAHLDFQHFFLQPMDSVLKREHTQAAVDYCMTHPQWRLSVQMHKVVGIA

SEQ ID NO: 32699 - protein, 218 aa, Pelomonas sp.
  misc_feature (1)..(218): tr|A0A0Q7BF92|A0A0Q7BF92_9BURK 7-carboxy-7-deazaguanine synthase OS=Pelomonas sp. Root405 OX=1736529 GN=queE P E=3 SV=1
MTYSVKELFYTLQGEGAQAGRAAVFCRFAGCNLWTGREQDRATAVCTFCDTDFVGTDGEGGGKFATADALAGAIASAWPRGADGAASNDRGVPYVVCTGGEPLLQLDTPLIDALHARGFEVAVETNGTQPAPPGLDWICVSPKADAPLVLTSGHELKLVYPQPLARPERFAGLDFQNFFLQPMDSVLQREHTRAAVAYCMAHPQWRLSVQMHKVVGIA

SEQ ID NO: 32700 - protein, 205 aa, Pelomonas sp.
  misc_feature (1)..(205): tr|A0A2R7SCR1|A0A2R7SCR1_9BURK 7-carboxy-7-deazaguanine synthase (Fragment) OS=Pelomonas sp. HMWF004 OX=205684 1 GN=queE PE=3 SV=1
MYSVKELFYTLQGEGAQAGRAAVFCRFAGCNLWSGREQDRATAVCTFCDTDFIGTDGEGGGKFATAEALADAVAKAWPGGAEGAASHARGKPYVVCTGGEPLLQLDTPLIDALHARSFEIAVETNGTQPAPPGLDWICVSPKADAPLVLTSGHELKLVYPQPLAQPERFAGLNFQHFFLQPMDSVLQREHTKAAVAYCMQHPQWR

SEQ ID NO: 32701 - protein, 245 aa, Pelosinus fermentans
  misc_feature (1)..(245): tr|I9LCU2|I9LCU2_9FIRM 7-carboxy-7-deazaguanine synthas e OS=Pelosinus fermentans B4 OX=1149862 GN=queE PE=3 SV =1
MVSHKLNIVEVFSSIQGEGEFVGYRQVFVRLAGCNLECDFCDTPSSRTNVIEGQIEMTAGKRDFMTVKNPISIMDLSNYINKLLIVPHHSVSFTGGEPLCQAEGIAQLLPHIKGRIYLETNGTLPEKLKLVLPHIHIVSMDIKLPSIIHQDVWQQHRQFLSIANACSTFVKIVVTGKTNKMEFQKAVELIAAIDQKIPLIIQPVTPIHDCEGVTPDMMLLWQEQALIFLTDVRVIPQTHKFMGQL

SEQ ID NO: 32702 - protein, 245 aa, Pelosinus fermentans
  misc_feature (1)..(245): tr|I9DH68|I9DH68_9FIRM 7-carboxy-7-deazaguanine synthas e OS=Pelosinus fermentans JBW45 OX=1192197 GN=queE PE=3 SV=1
MVSHKLNIVEVFSSIQGEGEFVGYRQVFVRLAGCNLECDFCDTPSSRTNAMEGQIEMTAGKRDFKKTKNPISIVDLSNYINNLLIVPHHSVSFTGGEPLCQAEGIAQLLPHIKGRIYLETNGTLPEKLKLVLPHIHIVSMDIKLPSIIHQDVWQQHRQFLSIANACNTFVKIVVTGKTNRIEFQKAVELIAAIDQKIPLIIQPVTPIHDCEGVTPDMMLLWQEQALIFLTDVRVIPQTHKFMGQL

SEQ ID NO: 32703 - protein, 245 aa, Pelosinus propionicus
  misc_feature (1)..(245): tr|A0A1I4HC63|A0A1I4HC63_9FIRM 7-carboxy-7-deazaguanine synthase OS=Pelosinus propionicus DSM 13327 OX=1123291 GN=queE PE=3 SV=1
MISHELNIVEVFSSIQGEGTFVGYRQIFVRLAGCNLECDFCDTPSSRTNVIEGQIEMTAGKRDFKKVTNPISILDLADYINNLLIVPHHSVSFTGGEPLCQAEGIAQLLPHIKGRIYLETNGTLPEKLKLVLPHTHIISMDIKLPSIIHQDVWKQHRHFLSLANACNTFVKIVVTGKTNRIEFQKAVELIAAIDQKIPLIIQPVTPIYDCEGATPDMMLLWQERALMLLSDVRVIPQTHKFMGQL

SEQ ID NO: 32704 - protein, 244 aa, Pelosinus sp.
  misc_feature (1)..(244): tr|A0A075KCN4|A0A075KCN4_9FIRM 7-carboxy-7-deazaguanine synthase OS=Pelosinus sp. UFO1 OX=484770 GN=queE PE=3 SV=1
MSQNVNVVEIFSSIQGEGQFVGYRQVFVRLAGCNLECEFCDTPSSRTMVNAAQIEKTAGRRDFQTIVNPISVIELSNYINSLLVIPHHSVSFTGGEPLCQAKVLAEILPQIKGRIYLESNGTLPNELELVLPHIDIISMDIKLPSIIRQEMWQEHSEFLRLAATRNVFVKIVVTGSTNTTEFLKAVNLIASVDKNIPLIIQPVTPINNCEGVKPDTVLLYQEQALSSLNDVRVIPQTHKFIGQL

SEQ ID NO: 32705 - protein, 245 aa, Pelotomaculum propionicicum
  misc_feature (1)..(245): tr|A0A4Y7RME7|A0A4Y7RME7_9FIRM 7-carboxy-7-deazaguanine synthase OS=Pelotomaculum propionicicum OX=258475 GN=q ueE PE=3 SV=1
MGYPVSEIFSSAQGEGPLLGCRQIFIRVHGCNLNCAFCDTYSGETPAHCRIETEPGTGSFKLLPNPLRAEDIASAAAGLGLGWHDSVSFTGGEPLLYPDLIKESAPLLKGTRGGIYLETNGTLPDNLAQVINLIDIVAMDFKLPSVTGERQCWDLHRSFLTVAKSKRTFVKVVVSADTPFNEIETAAEIINNTAPGIPLIIQPVSGSAGINPVNAGYALELQQSALKILSDVRIIPQMHKVMGFL

SEQ ID NO: 32706 - protein, 244 aa, Pelotomaculum schinkii
  misc_feature (1)..(244): tr|A0A4Y7RD11|A0A4Y7RD11_9FIRM 7-carboxy-7-deazaguanine synthase OS=Pelotomaculum schinkii OX=78350 GN=queE PE =3 SV=1
MAVPVTEIFSSVQGEGLLVGRRQIFIRLYGCNLRCSYCDTVLTEEPAFCRVETAPGCGIFEYLPNPLGIEEIVKVLEGLAVGLHHSISLTGGEPLLHSNIIRELAPALRGSRRGIYLETNGTLPDELSRVIDLVDMVAMDFKLPSVSGLPPLWSKHGRFLEIAATKETYVKVVVAEQTPSREIEMAAGLIKSTAPGVPLVIQPLTTKGAMGISPARLSLLQRQALKVLDDVRVIPQTHKLMGML

SEQ ID NO: 32707 - protein, 245 aa, Pelotomaculum sp.
  misc_feature (1)..(245): tr|A0A1V4W4X2|A0A1V4W4X2_9FIRM 7-carboxy-7-deazaguanine synthase OS=Pelotomaculum sp. PtaB.Bin104 OX=1811693 G N=queE_1 PE=3 SV=1
MPCQIAEIFSSVQGEGLLVGCRQIFIRLQGCNINCSFCDTPVNESGFCKIEQNPGQKDFRQLPNPLSAEEVAAAVHSYDLSIHHSISLTGGEPLLWTSFIKELIPFIKGTRHGIYLETNGTLPEALSEVIEFIDIIGMDIKLPSISGLTPFWEEHRCFLKVAKKKQVFVKVVVGEDTTKEEIEQAAGLISDYGKSLTMIIQPVSPTAGGIKSVSPGRALYLQQLALKILANVLIIPQTHKIMGQL

SEQ ID NO: 32708 - protein, 245 aa, Pelotomaculum sp.
  misc_feature (1)..(245): tr|A0A1V5BQV7|A0A1V5BQV7_9FIRM 7-carboxy-7-deazaguanine synthase OS=Pelotomaculum sp. PtaU1.Bin065 OX=1811696 GN=queE PE=3 SV=1
MPCQVAEIFSSVQGEGLLVGCRQVFIRLLGCNINCSYCDTPAGESGFCRIEQHPGHKDFKQLPNPLSAAEVAAAAHAYDLSLHHSVSLTGGEPLLWTSFIKELVPLLQGTRHGIYLETNGTLPEKLSEVIELIDIVGMDIKLPSISGQPPFWEEHRLFLKVAAKKQVFVKVVVGEDTTGEEIEQAAGLISDFGTGLTMIIQPVSPAACGIKSVSPGQALYLQQLALKKLANVLIIPQTHKIMGQL

SEQ ID NO: 32709 - protein, 245 aa, Pelotomaculum thermopropionicum
  misc_feature (1)..(245): tr|A5D2D9|A5D2D9_PELTS 7-carboxy-7-deazaguanine synthas e OS=Pelotomaculum thermopropionicum (strain DSM 13744 / JCM 10971 / SI) OX=370438 GN=NrdG PE=3 SV=1
MRAYVSEIFSSVQGEGLLTGCRQVFIRFYGCNLNCSFCDTKYGGPPACCRIESLPAGGDFRYLPNPLKVGEAASAAASYDLSLHHSVSLTGGEPLLHTAFLKELIPLVKGTRHGIYLETNGTLPGNLLEVIDLIDMVSMDFKLPSVSGMPPFWEKHWDFLKIAASRKVLVKVVVGQNTAHEEIEKSASIIKSVSSNIPMVIQPVTGSDGTLGITASRVLELQKLALKFLNDVRVIPQTHKVIGYL

SEQ ID NO: 32710 - protein, 245 aa, Pelotomaculum thermopropionicum
  misc_feature (1)..(245): tr|A0A101HW69|A0A101HW69_9FIRM 7-carboxy-7-deazaguanine synthase OS=Pelotomaculum thermopropionicum OX=110500 GN=queE PE=3 SV=1
MSVNVTEIFSSVQGEGLLAGCRQIFIRLYGCNLKCSYCDTFYPQKPLYCRLEETPGHRNYKLIPNPLQPENAAAAAYTFDLSTHHSISLTGGEPLLHISFIRELVPLLKGTRRGIYLETNGTLPDELLKIIDLVDIVAMDFKLPSITGLPPFWEKHKEFLKIASSKNVYVKIVVGENTTYDEIEKTTELISGIRNDLPLIMQPVSTNGNVGRISPVYLLSLQEQALKKLFDVRIIPQTHKIMRQL

SEQ ID NO: 32711 - protein, 222 aa, Peptoclostridium acidaminophilum
  misc_feature (1)..(222): tr|W8U4V2|W8U4V2_PEPAC 7-carboxy-7-deazaguanine synthas e OS=Peptoclostridium acidaminophilum DSM 3953 OX=12861 71 GN=queE PE=3 SV=1
MEYNVVEKFASINGEGAKTGQLAVFIRFAGCNLSCSYCDTKWANEADVKAEKMSAQDIHEYIQSTGISNVTLTGGEPLNQYGIMELLQRLAEDSSIDVEIETNGSIDIEPFLNISPRRPSFTLDYKLGSSGMESYMDIENLTCVSKRDAVKFVVGSFDDIDRAKDVIEEYELDKKTRVYFSPVFGEIDPVEIVEYMKSHYMNGVSLQLQLHKFIWDSDKRGV

SEQ ID NO: 32712 - protein, 220 aa, Peptoclostridium litorale
  misc_feature (1)..(220): tr|A0A069RI14|A0A069RI14_PEPLI 7-carboxy-7-deazaguanine synthase OS=Peptoclostridium litorale DSM 5388 OX=1121 324 GN=queE PE=3 SV=1
MLKVVEKFISINGEGRRAGQLAIFIRFAGCNLGCSYCDTSWANRDDVHFEPMSAEDIYSYVKSTGVRNITLTGGEPLMQQGIHELLQLLSNDKSLYIEIETNGSISLEDFCDIPNAPSFTMDYKLPSSNMEHKMDTENFDTLTGTDTVKFVCGSHEDLKRAYDIIKKYDLSEKTAVYISPVFGNIEPEDIVEFMKKHNMNGVNLQLQLHKIIWSPDKKGV

SEQ ID NO: 32713 - protein, 245 aa, Peptococcaceae bacterium
  misc_feature (1)..(245): tr|A0A0F2N4M2|A0A0F2N4M2_9FIRM 7-carboxy-7-deazaguanine synthase OS=Peptococcaceae bacterium BRH_c4a OX=162971 6 GN=queE PE=3 SV=1
MKCHIREIFSSVQGEGPYLGIRQIFVRFEGCNLSCHYCDTKTHGKGAGCSVEVDPGNKKFIEADNPMSSSDLLGIITGSFDLSLHQWVSITGGEPLLQAGYLMELLPGLRDLGLKIYLETNGTLPDDLERIVDMVDVVAMDIKLPGTSGCQPMWNRHSQFLAIAGRTGVFVKIVMDDGADVSEYDTALDLLSRIDASITLVIQPVTLNGKCMLSPGRALYLQSMALKRLRDVRIIPQAHKMMDQL

SEQ ID NO: 32714 - protein, 207 aa, Peptococcaceae bacterium
  misc_feature (1)..(207): tr|A0A0J1F735|A0A0J1F735_9FIRM 7-carboxy-7-deazaguanine synthase OS=Peptococcaceae bacterium CEB3 OX=999898 GN =queE PE=3 SV=1
MYRLTEQYPVNEIFESIQGEGIWSGIPAAFVRLEGCNLRCRWCDTKEAWSGGNASRLTAAEILTAVNFELVIVTGGEPLLHDLTELFLTLQQAGKKVHVETNGTQPWRESYPPDIWLTVSPKEESGYMVQPSLAARAGEYKFVVDEAFRPEIIREFYTQLGHRQKEPLIFLSPENVRPEMVEKALQIVFQYPFCRLMLQMHKLIGIK

SEQ ID NO: 32715 - protein, 210 aa, Peptoniphilus asaccharolyticus
  misc_feature (1)..(210): tr|A0A1W1UK14|A0A1W1UK14_PEPAS 7-carboxy-7-deazaguanine synthase OS=Peptoniphilus asaccharolyticus DSM 20463 O X=573058 GN=queE PE=3 SV=1
MKYDINEIFYSIDGEGPNSGKLSVFIRLNYCNLRCVYCDTGYALGRKDNFYTLEEIVEQVESYGIKSVTITGGEPLEHDLKPLISRLLSLEYEIDIETNGSLDIRKYLLENVNIILDIKTPSSKMEKFNLYENLSKLRPNDVVKFVASENDMDFVLNIIQKYYTSAKIFISPIYGCNIDKIVEYIKEHRLEVRLQLQIHKYIWDPNMKGV

SEQ ID NO: 32716 - protein, 218 aa, Peptoniphilus indolicus
  misc_feature (1)..(218): tr|A0A379D8P2|A0A379D8P2_9FIRM 7-carboxy-7-deazaguanine synthase OS=Peptoniphilus indolicus OX=33030 GN=queE P E=3 SV=1
MKEMLQSMKYDVNEIFYSIDGEGPNSGKLSVFIRLNYCNLRCSYCDTEYAFKRVYNFMTVNEIIDEVESYKIKSVTITGGEPLAQDLEELISGLLKLGYEIDIETNGSKDVSKYLLNNVNIILDIKTPTSKMEDFNLYENLKLLRGNDVVKFVVADEFDMNFIVEVMKLYPTDAQIFLSPVYGTDIDKLVEYMKNYRINARLQLQIHKYIWDSEMRGV

SEQ ID NO: 32717 - protein, 206 aa, Peptoniphilus indolicus
  misc_feature (1)..(206): tr|G4D5E0|G4D5E0_9FIRM 7-carboxy-7-deazaguanine synthas e OS=Peptoniphilus indolicus ATCC 29427 OX=997350 GN=qu eE PE=3 SV=1
MKFFYSIDGEGPNSGKLSVFIRLNYCNLRCSYCDTEYAFKRVYNFMTVNEIIDEVESYKIKSVTITGGEPLAQDLEELISGLLKLGYEIDIETNGSKDVSKYLLNNVNIILDIKTPTSKMEDFNLYENLKLLRGNDVVKFVVADEFDMNFIVEVMKLYPTDAQIFLSPVYGTDIDKLVEYMKNYRINARLQLQIHKYIWDSEMRGV

SEQ ID NO: 32718 - protein, 245 aa, Peredibacter sp.; identical to SEQ ID NO: 30528
  misc_feature (1)..(245): tr|A0A2E5CA73|A0A2E5CA73_9PROT 7-carboxy-7-deazaguanine synthase OS=Peredibacter sp. OX=2024850 GN=queE PE=3 S V=1

SEQ ID NO: 32719 - protein, 214 aa, Perlucidibaca sp.
  misc_feature (1)..(214): tr|A0A2P6AV05|A0A2P6AV05_9GAMM 7-carboxy-7-deazaguanine synthase OS=Perlucidibaca sp. HR-E OX=2094561 GN=queE PE=3 SV=1
MVSLRLTEIFHSLQGEARTVGLPTVFVRLTGCPLRCVWCDTSYAFSGGRQWALDDILAEVAGYDTRHVTVTGGEPLAQPECLTLLTALCDRGHDVSLETSGALPIEKVDTRVSRVMDLKAPGSGESHRNLYENIPHLTPNDQVKFVVSSRSDYDWARLQCDQYELYGRVSDVLFSPGHETLKPRELAEWMLADRIPARLQVQLHKYLWNNEPGH

SEQ ID NO: 32720 - protein, 214 aa, Permianibacter aggregans
  misc_feature (1)..(214): tr|A0A4R6UX36|A0A4R6UX36_9GAMM 7-carboxy-7-deazaguanine synthase OS=Permianibacter aggregans OX=1510150 GN=que E PE=3 SV=1
MSERLRITEIFHSLQGEARTVGLPTVFVRLTGCPLRCHYCDSEYAFYGGEYREMDEVIASVQSFGARHVCVTGGEPLAQKACIPLLQKLCDLGYQVSLETSGAMDISDVDPRVSRVVDIKTPDSGEVDKNRWQNLPLLTTNDQIKFVLCSRQDYDWARMICDHHQLWDKTELLFSPSFQQLPLKSLAEWILADRLPVRMQVQLHKFIWGDVPGH

SEQ ID NO: 32721 - protein, 211 aa, Persephonella hydrogeniphila
  misc_feature (1)..(211): tr|A0A285NKR4|A0A285NKR4_9AQUI 7-carboxy-7-deazaguanine synthase OS=Persephonella hydrogeniphila OX=198703 GN= queE PE=3 SV=1
MTSIKIVEIFRTVEGEGKWVGLPVSFIRLEGCNLRCPWCDTSYSYDGKTFEEISIDSVIKEIEKLGLKRVCITGGEPFLTPQLPELVKKLINRGYKVLIETNGTLWIKELEDIKSKDLYITCSPKPPAYFIHPELLPFITELKYVVDEYLKIEDIINEKTLRIIKNDFVVLQPESNRPEMVRKALKLQEEILKTGYESRIIPQCHKILGLP

SEQ ID NO: 32722 - protein, 214 aa, Persephonella marina
  misc_feature (1)..(214): tr|C0QQZ3|C0QQZ3_PERMH 7-carboxy-7-deazaguanine synthas e OS=Persephonella marina (strain DSM 14350 / EX-H1) OX =123214 GN=queE PE=3 SV=1
MEKFNVVEIFPSIEGEGSLIGYPVTFIRLEGCNLRCEWCDTPYSYDGKTFSKLTSDEIISELKRYPNRKVCLTGGEPLICENVDKLMTEIIKEGYSLIIETNGTVLTEEVKNVLREFGESIYIVVSPKPDSFYFINKELIPSVDEFKFIVDETLRIKDILMYQIYYTEKPLILQPESNRKDMIDKALKLQRELLEKHSIEARVIPQVHKYMGIM

SEQ ID NO: 32723 - protein, 214 aa, Persephonella sp.
  misc_feature (1)..(214): tr|A0A432S9B5|A0A432S9B5_9AQUI 7-carboxy-7-deazaguanine synthase OS=Persephonella sp. OX=2060922 GN=queE PE=3 SV=1
MEYKFKIVEIFNSIEGEGSFIGYPTTFIRLEGCNLRCEWCDTTYSYDNKSFKLLSLKDILKEIKRYKTKKVCITGGEPFLTPNLPFLLINLYKEGYYLIIETNGTIFNEDLEIALREIYPKFYLVVSPKYEVKYIINKFLIKYINEFKFVVDKYISIEDILKYRNLYKVRPLILQPESNKKIFIKKALDLQKELLEFDIEARVIPQCQKFMGVK

SEQ ID NO: 32724 - protein, 214 aa, Persephonella sp.
  misc_feature (1)..(214): tr|A0A432S2Q8|A0A432S2Q8_9AQUI 7-carboxy-7-deazaguanine synthase OS=Persephonella sp. OX=2060922 GN=queE PE=3 SV=1
MEDIFNIVEIFYSVEGEGSFVGYPTVFVRLEGCNLRCEWCDTTYSYDGKTFKQLSLKKIIEEIKKYRTKRVCITGGEPLLTKNVDTLIKAVVKEGYYLIIETNGTVFNNRVEEALKSVYPNFYLVVSPKPEVKYNINQSLLKYINEFKFVVDEYITLKDILKYESLYKLKPLILQPERNKKEFIKKALKLQEELLKKDIEARVIPQCQKFMGLM

SEQ ID NO: 32725 - protein, 193 aa, Petrimonas mucosa
  misc_feature (1)..(193): tr|A0A1G4G3F0|A0A1G4G3F0_9PORP 7-carboxy-7-deazaguanine synthase OS=Petrimonas mucosa OX=1642646 GN=queE PE=3 SV=1
MNLTVNEIFYSLQGEGGRSGEPSLFIRLSKCNLACSFCDTDFAFGKRMTLDEIHDEISPYPCRWIIWTGGEPTLQLREEIVAYFKERGYRQAIETNGTRRVPAGIDYITCSPKQQFEKIRELIPEVDELRFPMAKGDPLPDISILPRSKRYLLSPIFDGMNVVQENVDYCVELIKQHPQWGLSLQMHKLIGIR

SEQ ID NO: 32726 - protein, 265 aa, Phaeobacter gallaeciensis
  misc_feature (1)..(265): tr|V9WHZ7|V9WHZ7_9RHOB 7-carboxy-7-deazaguanine synthas e OS=Phaeobacter gallaeciensis DSM 26640 OX=1423144 GN= queE PE=3 SV=1
MTDVLIPRAVRATADTSSLANRPEVGRSAPTTLRIAEIFGPTIQGEGALIGEPTVFVRAGGCDYRCSWCDSLHAVDSRYRDTWAPMDTEEIWQEVTRLSGAQPLTVSLSGGNPAIQNFAPLIALGKEAGYRFACETQGSISQPWFAALDTLVLSPKPPSSGHRVDWQKFDHCLAAAKGCDQIVLKIVIFDDCDYDWAKAVANRQPDLPLYLQPGNPEVDPETPVDLTAATERLHWLIEKVTADRWFAPRVLPQLHVLVWGNKRGV

SEQ ID NO: 32727 - protein, 235 aa, Phaeobacter gallaeciensis
  misc_feature (1)..(235): tr|A0A1B0ZMZ5|A0A1B0ZMZ5_9RHOB 7-carboxy-7-deazaguanine synthase OS=Phaeobacter gallaeciensis OX=60890 GN=queE PE=3 SV=1
MTLRIAEIFGPTIQGEGALIGEPTVFVRAGGCDYRCSWCDSLHAVDSAYRHTWTPMSDAEIWDEVLRLSGGQALTVSLSGGNPAIQDFAPLIARGRAAGYRFACETQGSVSRPWFGDLDTLVLSPKPPSSGESVDWAAFAACVKAGQTARQMVMKIVIFDEADYDWAKDAHARHPDLPLYLQPGNPDVDPESPVDPQDLADRLEWLTERAMTDGWFTPRILPQLHVLIWGNKRGV

SEQ ID NO: 32728 - protein, 233 aa, Phaeobacter inhibens
  misc_feature (1)..(233): tr|A0A135IHX5|A0A135IHX5_9RHOB 7-carboxy-7-deazaguanine synthase OS=Phaeobacter inhibens OX=221822 GN=queE PE= 3 SV=1
MRIAEIFGPTIQGEGALIGEPTVFVRAGGCDYRCSWCDSLHAVDSRYRDTWAPMATDEVWQEVTRLSGGQPLTVSLSGGNPAIQNFAPLIAQGKEAGYRFACETQGSISQPWFAALDTLVLSPKPPSSGHRVDWQKFDHCLAAAKGCDQIVLKIVIFDDCDYDWAKAVANRWPDLPLYLQPGNPEVDPDKPVDLTTATERLHWLIEKVTADRWFAPRVLPQLHVLVWGNKRGV

SEQ ID NO: 32729 - protein, 265 aa, Phaeobacter inhibens
  misc_feature (1)..(265): tr|A0A2I7K5S6|A0A2I7K5S6_9RHOB 7-carboxy-7-deazaguanine synthase OS=Phaeobacter inhibens OX=221822 GN=queE PE= 3 SV=1
MTEVLIPRAVRAAGDTSSPVNRQGASRSAPTTLRIAEIFGPTIQGEGALIGEPTVFVRAGGCDYRCSWCDSLHAVDSRYRDTWAPMATDEVWQEVTRLSGGQPLTVSLSGGNPAIQNFAPLIAQGREAGYRFACETQGSISQPWFAALDTLVLSPKPPSSGHRVDWQKFDHCLAAAKGCDQIVLKIVIFDDCDYDWAKAVANRWPDLPLYLQPGNPEVDPETPVDLTAATERLHWLIEKVTADRWFAPRVLPQLHVLVWGNKRGV

SEQ ID NO: 32730 - protein, 235 aa, Phaeobacter italicus
  misc_feature (1)..(235): tr|A0A0H5DG32|A0A0H5DG32_9RHOB 7-carboxy-7-deazaguanine synthase OS=Phaeobacter italicus OX=481446 GN=queE PE= 3 SV=1
MSLRIAEIFGPTIQGEGALIGEPTVFVRTGGCDYRCSWCDSLHAVDSKFRDTWMPMTTRDVWAEVTHLSGGQPLTVSLSGGNPAIQDFAELIAMGKEAGYRFACETQGSINQAWFSKLDTLVLSPKPPSSGHKVDWLKFGSCLAAAKDCPNVVLKIVVFDEVDYDWARVVADRYPELPLYLQPGNPTVDPETPVDLTETTARLRWLIDKVTADKWFAPRVLPQLHVLVWGNQRGV

SEQ ID NO: 32731 - protein, 265 aa, Phaeobacter piscinae
  misc_feature (1)..(265): tr|A0A291FKN3|A0A291FKN3_9RHOB 7-carboxy-7-deazaguanine synthase OS=Phaeobacter piscinae OX=1580596 GN=queE PE =3 SV=1
MTEVLIPRAVRATGDTSPPAHRQGASRSAPTTLRIAEIFGPTIQGEGALIGEPTVFVRAGGCDYRCSWCDSLHAVDSRYRDTWAPMATDEIWQEVTRLSGGQPLTVSLSGGNPAIQNFAPLIALGKEAGYRFACETQGSISQPWFAALDTLVLSPKPPSSGHRVDWQKFDHCLLAARGCDQIVLKIVIFDDCDYDWAKAVAHRYPDLPLYLQPGNPEVDPETPVDLTAATERLHWLIEKVTADRWFVPRVLPQLHVLVWGNKRGV

SEQ ID NO: 32732 - protein, 265 aa, Phaeobacter piscinae
  misc_feature (1)..(265): tr|A0A291FX23|A0A291FX23_9RHOB 7-carboxy-7-deazaguanine synthase OS=Phaeobacter piscinae OX=1580596 GN=queE PE =3 SV=1
MTEVLIPRAVRATGDTSSPAHRQGASRSAPTTLRIAEIFGPTIQGEGALIGEPTVFVRAGGCDYRCSWCDSLHAVDSRFRDTWTPMATDQIWQEVTRLSGGQPLTVSLSGGNPAIQNFAPLIALGKEAGYRFACETQGSISQPWFAALDTLVLSPKPPSSGHRVDWQKFDHCLLAAKGCDQIVLKIVIFDDCDYDWAKAVAHRYPDLPLYLQPGNPEVDPETPVDLTAATERLHWLIEKVTADRWFAPRVLPQLHVLVWGNKRGV

SEQ ID NO: 32733 - protein, 265 aa, Phaeobacter porticola
  misc_feature (1)..(265): tr|A0A1L3I7T5|A0A1L3I7T5_9RHOB 7-carboxy-7-deazaguanine synthase OS=Phaeobacter porticola OX=1844006 GN=queE P E=3 SV=1
MIHSQAPTATRAPIEADVPGSALKPMARAGTMLRIAEIFGPTIQGEGALIGEPTVFVRAGGCDYRCSWCDSLHAVDSRFRESWAPMTTSQIWQDVTRLSGGQPLTISLSGGNPAIQNFAPLIAKGKAEGYRFACETQGSIRQPWFADLDTLVLSPKPPSSGHRVDWQKFDHCLSAAKGCGQVVVKIVIFDDRDYDWARAVAKRLPDLPLYLQPGNPEVDPDVAVDLVAATERLHWLIEKVTGDLWFAPRVLPQLHVLVWGNKRGV

SEQ ID NO: 32734 - protein, 233 aa, Phaeobacter sp.
  misc_feature (1)..(233): tr|A0A384GSE4|A0A384GSE4_9RHOB 7-carboxy-7-deazaguanine synthase OS=Phaeobacter sp. S60 OX=1569353 GN=queE PE= 3 SV=1
MRIAEIFGPTIQGEGALIGEPTVFVRAGGCDYRCSWCDSLHAVDSRYRDTWAPMATDEVWQEVTRLSGGQPLTVSLSGGNPAIQNFAPLIALGKEAGYRFACETQGSISQPWFAALDTLVLSPKPPSSGHRVDWQKFDHCLLAARGCDQIVLKIVIFDDCDYDWAKAVAHRRPDLPLYLQPGNPEVDPETPVDLTAATERLHWLIEKVTADRWFAPRVLPQLHVLVWGNKRGV

SEQ ID NO: 32735 - protein, 235 aa, Phaeobacter sp.
  misc_feature (1)..(235): tr|A0A0N8FSV4|A0A0N8FSV4_9RHOB 7-carboxy-7-deazaguanine synthase OS=Phaeobacter sp. 11ANDIMAR09 OX=1225647 GN= queE PE=3 SV=1
MTLRIAEIFGPTIQGEGALIGEPTVFVRAGGCDYRCSWCDSLHAVDSQYRHSWAPMSAEAVWEQVRHLSGDRPLTVSLSGGNPAIQDFGPLIAMGRAAGYRFACETQGSIARPWFGDLDTLVLSPKPPSSGENVDWAAFDACRKLGSGARQQVMKIVIFDEADYRWARETHARYSDLPLYLQPGNSEVDPTTPVDLHALADRLGWLTDKAMADGWFAPRILPQLHVLIWGNKRGV

SEQ ID NO: 32736 - protein, 247 aa, Phaeodactylibacter luteus
  misc_feature (1)..(247): tr|A0A5C6S1Z9|A0A5C6S1Z9_9BACT 7-carboxy-7-deazaguanine synthase OS=Phaeodactylibacter luteus OX=1564516 GN=qu eE PE=3 SV=1
MKLAQPDQEPEIFYSIQGEGKNLGQPSIFVRTSLCNLHCSWCDTDYTWNWKGTRFRHDRDAEPGYEKFDKARHIAEMPLEKVAEAIAAFPCKNVVLTGGEPMLQQPQLTALMQMLGPDYWFEVETNGTLLPEPGFDERINQYNVSPKLANSNNSQKLRERPKVYRFFAQSPKAHFKFVLSDVQELEEVLALVRKYGLPPQSVYLMPEGTTAGRLAEKQAWLIEACKAHGFHFTSRLHILVYGNKRGV

SEQ ID NO: 32737 - protein, 249 aa, Phaeodactylibacter xiamenensis
  misc_feature (1)..(249): tr|A0A098SAM6|A0A098SAM6_9BACT 7-carboxy-7-deazaguanine synthase OS=Phaeodactylibacter xiamenensis OX=1524460 GN=queE PE=3 SV=1
MTIKIAKPDKEPEIFYSIQGEGKNMGQPSIFVRTSLCNLHCSWCDTDYTWNWEGTRFTHDNDVLPGYRKFKKEDVIAEMKLEEVVEAIQQYPCKNVILTGGEPMLQQPALAALMQALGRNYWFEVETNGTLLPDPAFEAAIHQYNVSPKLSNSNNSQKLRERPKVYRYFAQSDKAHFKFVVATPAELEEVQDLIDRYAIKPSRVYLMPEGTNTDRLAEKQAWLVEACKAHGFNFTSRLHIFIYGNMRGV

SEQ ID NO: 32738 - protein, 206 aa, Phaeospirillum fulvum
  misc_feature (1)..(206): tr|A0A1H6J4U8|A0A1H6J4U8_PHAFV 7-carboxy-7-deazaguanine synthase OS=Phaeospirillum fulvum OX=1082 GN=queE PE=3 SV=1
MSYLVREIFASLQGEGVQSGRVAVFLRFAECNLWSGREADRATARCRFCDTDFVGGERFADAETLADAVAAAWPVADSENRLAVVTGGEPGLQLDEALIAALHRRGFAIAVETNGTLPLPPGLDWICVSPKAGNRLVVVRGDELKLVFPQDGADPAEFESLAFAHFLLQPMDGAEREANTAAALDYCLSHPRWRLGLQLHKSLGLR

SEQ ID NO: 32739 - protein, 206 aa, Phaeospirillum fulvum
  misc_feature (1)..(206): tr|S9S4E8|S9S4E8_PHAFV 7-carboxy-7-deazaguanine synthas e OS=Phaeospirillum fulvum MGU-K5 OX=1316936 GN=queE PE =3 SV=1
MSYIVHEIFASLQGEGIQSGRVAVFLRFAGCNLWSGREADRATARCRFCDTDFVGGERFADAETLADAVAAAWPVAETAHRLAIVTGGEPGLQLDEALIAALHRRGFAIAVETNGTVPLPPGLDWICVSPKAGNRLVVVQGNELKLVFPQDGADPAEFEALAFDHFLLQPMDGPEQQANTAAALQYCLSHPRWRLGLQLHKSLGLR

SEQ ID NO: 32740 - protein, 206 aa, Phaeospirillum molischianum
  misc_feature (1)..(206): tr|H8FNB1|H8FNB1_PHAMO 7-carboxy-7-deazaguanine synthas e OS=Phaeospirillum molischianum DSM 120 OX=1150626 GN= queE PE=3 SV=1
MTYIVREIFASLQGEGVQSGRVAVFLRFAGCNLWSGREADRITARCRFCDTDFVGGERYGDAESLADAVAAAWPAQDGVNRLAIVTGGEPGLQLDDALIAALHRRGFAVAVETNGTLPLPSGLDWVCVSPKAGTDLVVTRGDELKLVYPQVGAAPEDFEHLDFTHFLLQPMDGPERAANTDAALRHCLSRPRWRLGLQLHKSLGLR

SEQ ID NO: 32741 - protein, 210 aa, Phenylobacterium deserti
  misc_feature (1)..(210): tr|A0A328AS69|A0A328AS69_9CAUL 7-carboxy-7-deazaguanine synthase OS=Phenylobacterium deserti OX=1914756 GN=que E PE=3 SV=1
MSYAVKEIFLTLQGEGGQAGKAAVFCRFAGCNLWSGREQDRATAVCTFCDTDFVGMDGPGGGRFPDAPSLAAAVEAAWTGGPHERLVVLTGGEPLLQVDEALIDALHARGFSIALESNGTIEAPPGVDWICISPKADAEVVQTHGQELKLVYPQRGVDPARFEHMAFERFLLQPMDGPDQAENTRAAIAYCLQHPRWRLSVQTHKYLGIA

SEQ ID NO: 32742 - protein, 210 aa, Phenylobacterium hankyongense
  misc_feature (1)..(210): tr|A0A328AX47|A0A328AX47_9CAUL 7-carboxy-7-deazaguanine synthase OS=Phenylobacterium hankyongense OX=1813876 G N=queE PE=3 SV=1
MSYAVKEIFLTLQGEGGQAGRPAVFCRFAGCNLWSGREQDRASAVCTFCDTDFVGMDGPEGGRFATPEALAEAVEAAWTGGPDDRLVVLTGGEPLLQLDEALIAALHARGFALALETNGTLPAPPGVDWICVSPKADAPLAQTSGQELKLVFPQSGVDPAQFEHLAFERFLLQPMDGPARAENTQAAIAYCLAHPRWRLSVQTHKYLGIA

SEQ ID NO: 32743 - protein, 210 aa, Phenylobacterium kunshanense
  misc_feature (1)..(210): tr|A0A328BEG8|A0A328BEG8_9CAUL 7-carboxy-7-deazaguanine synthase OS=Phenylobacterium kunshanense OX=1445034 GN =queE PE=3 SV=1
MSYAVKEIFLTLQGEGGQAGRPAVFCRFAGCNLWSGLERDRDKAVCTFCDTDFVGMDGPGGGRFADAEALAAAIEAAWTGGPDNRLTVLTGGEPLLQVDAALVDALHARGFSIALETNGTLPVPDGVDWICVSPKADAPVVQTRGQELKLVFPQEKAPPERFEHLDFERFLLQPMDGPDRDRNTQAAIAYCLAHPRWRLSVQTHKYLGIA

SEQ ID NO: 32744 - protein, 210 aa, Phenylobacterium sp.
  misc_feature (1)..(210): tr|A0A0Q7FBM7|A0A0Q7FBM7_9CAUL 7-carboxy-7-deazaguanine synthase OS=Phenylobacterium sp. Root1290 OX=1736445 G N=queE PE=3 SV=1
MSYAVKEIFLTLQGEGGQAGQPAVFCRFAGCNLWSGREEDRAKAVCTFCDTDFVGMDGEGGGRFATADDLARAVEAAWTGGPDHRLVVCTGGEPLLQVDPALIAALHARGFRIALETNGTLPVPQGVDWICVSPKADAEVVQTRGQELKLVFPQPLADPARFEHMDFERFLLQPMDGPARVENTQAAIAYCLAHPRWRLSVQTHKYLGIP

SEQ ID NO: 32745 - protein, 210 aa, Phenylobacterium sp.
  misc_feature (1)..(210): tr|A0A521PET1|A0A521PET1_9CAUL 7-carboxy-7-deazaguanine synthase OS=Phenylobacterium sp. OX=1871053 GN=queE PE =3 SV=1
MSYAVKEIFLTLQGEGGQAGRPAVFCRFAGCNLWSGLERDRAKAVCTFCDTDFVGMDGPGGGRFADADALAAAVEAAWRGGPDDRLTVLTGGEPLLQVDPALIAALHARGFSIALETNGTLPVPDGVDWICVSPKADAPVVQTRGQELKLVYPQEKAPPSRFEDLDFERFLLQPMDGPDRVVNTQAAIAYCLEHPRWRLSVQTHKYLGIA

SEQ ID NO: 32746 - protein, 241 aa, Phenylobacterium zucineum
  misc_feature (1)..(241): tr|B4RHW1|B4RHW1_PHEZH 7-carboxy-7-deazaguanine synthas e OS=Phenylobacterium zucineum (strain HLK1) OX=450851 GN=queE PE=3 SV=1
MGPRLRRLSGVRAAGPRLGGMGGGRPPRTRRMSYAVKEIFLTLQGEGGQAGRPAVFCRFAGCNLWSGREEDREKAVCTFCDTDFVGMDGPGGGRFADAAALAAAIEAQWAGGPNDRLVVLTGGEPLLQVDEALIEALHARGFSIALETNGTLPVPPGIDWICVSPKADAPVVQTRGQELKLVFPQEKALPERFEHLDFERFLLQPMDGPDRAANTRAAIAYCLAHPRWRLSVQTHKYLGIA

SEQ ID NO: 32747 - protein, 210 aa, Phenylobacterium zucineum
  misc_feature (1)..(210): tr|A0A2W5P6S0|A0A2W5P6S0_9CAUL 7-carboxy-7-deazaguanine synthase OS=Phenylobacterium zucineum OX=284016 GN=que E PE=3 SV=1
MSYAVKEIFLTLQGEGGQAGRPAVFCRFAGCNLWSGLERDRDKAVCTFCDTDFVGMDGEGGGRFADADALAAAIEAAWVGGPDDRLTVLTGGEPLLQVDPALIAALHARGFSIALETNGTLAVPDGVDWICVSPKADAPVVQTRGQELKLVFPQEKARPERFEDLDFERFLLQPMDGPDRVANTQAAIAYCLAHPRWRLSVQTHKYLGIA

SEQ ID NO: 32748 - protein, 222 aa, Phorcysia thermohydrogeniphila
  misc_feature (1)..(222): tr|A0A4R1GPX4|A0A4R1GPX4_9BACT 7-carboxy-7-deazaguanine synthase OS=Phorcysia thermohydrogeniphila OX=936138 G N=queE PE=3 SV=1
MRITLSETFVSIQGEGLDVGQPAFFIRTGRCSVGCKFCDTRYAWNSKKTAQVTEIVKEALKSKLPEVIITGGEPLEEENLPLLIRLLSKEERIKRITIETCGHIFRDDLPGEKLKIVLSPKPPTMGVTFPEESLKKFLKTYERAYIKFGVFSQKDFETIKTFAFKNSELIKEPIVIQPLETPFEDYIETCRRVTHMVVEDREFVNAFSVRIIPQVHKLIGLK

SEQ ID NO: 32749 - protein, 234 aa, Phormidesmis priestleyi
  misc_feature (1)..(234): tr|A0A2W4X0I5|A0A2W4X0I5_9CYAN 7-carboxy-7-deazaguanine synthase OS=Phormidesmis priestleyi OX=268141 GN=queE PE=3 SV=1
MPAVTVKQSPIQPLPSTLPSTVPSTLPTVETFHSIQGEGIWTGASAFFIRLAGCEVGCPWCDTKHSWPMQSHPQREIAALVEEALAAQPFMVVITGGEPLMHDLTHLCAALRQQGLRVHLETSGSSPLTGEFDWITLSPKRFKPPLDAIYSQIHELKIVVGDEADLGWAEWAATQLAAHASRPNDPSDHWLDGPKKMLQPEWNSEQGQTLVFDYVRLHPDWRVSLQTHKFLGIR

SEQ ID NO: 32750 - protein, 211 aa, Phormidesmis priestleyi
  misc_feature (1)..(211): tr|A0A2T1D748|A0A2T1D748_9CYAN 7-carboxy-7-deazaguanine synthase OS=Phormidesmis priestleyi ULC007 OX=1920490 GN=queE PE=3 SV=1
MIDFELTDRASTNQTTLPIVETFHSVQGEGAWTGTNAFFIRLGGCDVGCWFCDTKESWNPRRHPQRKIVDLVADAIAANPAIVVITGGEPLMHDLTELSHSLHDAGLRVHLETSGAHPFSGRFDWVTLSPKVSNPPQESVYAHASELKIVVANSQDLIWAEQQSAKVVASVICYLQAEWNTEGSRDLIFDYVLRHPQWRISVQTHKMLGVR

SEQ ID NO: 32751 - protein, 257 aa, Phormidium ambiguum
  misc_feature (1)..(257): tr|A0A1U7IQM5|A0A1U7IQM5_9CYAN 7-carboxy-7-deazaguanine synthase OS=Phormidium ambiguum IAM M-71 OX=454136 GN= queE PE=3 SV=1
MTDNFPKARLIELFSAIQGEGLNVGTRQIFIRFAICDLRCQFCDSAHTWQTPSACKIEQTAGKRDFATYPNPVELSSLLDWVEKLNQPGLHDSISLTGGEPLLHANFLVKFLPQLHSVTGLPIYLETGGHRPQELALVLPYLDSVGMDIKLPSVSGENHWSAHQEFLKLCHDANLEVFVKLIISSQTDPQELELTGELVAACDPQIPVFLQPVTPIANQPTILAPAPDLVLEWQSLMKKFVKQVRVIPQTHKMIGQL

SEQ ID NO: 32752 - protein, 269 aa, Phormidium sp.
  misc_feature (1)..(269): tr|A0A522XJW0|A0A522XJW0_9CYAN 7-carboxy-7-deazaguanine synthase OS=Phormidium sp. SL48-SHIP OX=2518363 GN=que E PE=3 SV=1
MSKGQTARLVEVFSAIQGEGANIGTRQIFVRFALCDLRCLYCDSAHTWHARAHCRVERTPGLRDFDEYDNPITVEVLTAWVERQNRPGLHDSLSLTGGEPLLHAPFLAEFLPEVRRRTQLPVYLETGGHRPDKLGPILPYLDLVGMDIKLPSTSGETWWEEHELFLRQCHEAGVSVFVKTIVCDRTPAQELERVAHLVARVSPDTPIYLQPVTPLNGVLRATNEALRRDSFRDAVVPDPEQILAWQTMMKRTIQQVRVVPQTHKMIGQL

SEQ ID NO: 32753 - protein, 269 aa, Phormidium sp.
  misc_feature (1)..(269): tr|A0A0P8A2X7|A0A0P8A2X7_9CYAN 7-carboxy-7-deazaguanine synthase OS=Phormidium sp. OSCR OX=1666905 GN=queE PE= 3 SV=1
MTKGQTARLVEVFSAIQGEGANIGTRQIFIRFALCDLRCLYCDSAHTWHAPARCRIERTPGLRDFDEYDNPITVEVLAAWVERQNRPGLHDSLSLTGGEPLLHAPFLAEFLPEVRRRTRLPVYLETGGHRPDKLEPILPYLDLVGMDIKLPSTSGETWWEEHELFLRQCHEAGVSVFVKTIVCDRTPAQELERVAHLVSRVSPDTPIYLQPVTPLNGVLRATNEALRRDSFRDAVVPDPEQVLAWQTMMKRTIRQVRVVPQTHKMIGQL

SEQ ID NO: 32754 - protein, 214 aa, Phormidium tenue
  misc_feature (1)..(214): tr|A0A1U7IZ46|A0A1U7IZ46_9CYAN 7-carboxy-7-deazaguanine synthase OS=Phormidium tenue NIES-30 OX=549789 GN=queE PE=3 SV=1
MTSPTTISQTAESPLLTLALPVVETFHSIQGEGMWAGTNAFFIRLAGCDVGCPWCDTKQSWNPKRHPLRTLEELVAEAQSANPQIVVITGGEPLMHDLSALTGQLKESGLQTHLETSGAHPFSGNFDWVTFSPKRFKPPHSSIYAHVSELKVVIQNEVDLEWAEQQATQVSSTVVKLLQPEWETPGSRDKVFAYVLKHPEWRVSLQTHKFLGVQ

SEQ ID NO: 32755 - protein, 269 aa, Phormidium willei
  misc_feature (1)..(269): tr|A0A168URE0|A0A168URE0_9CYAN 7-carboxy-7-deazaguanine synthase OS=Phormidium willei BDU 130791 OX=399101 GN= queE PE=3 SV=1
MSKGQTARLVEVFSAIQGEGANIGTRQIFIRFALCDLRCLYCDSAHTWQARTHCRVERTPGLRDFDEYDNPITVEVLAAWVERQNRPGLHDSLSLTGGEPLLHAPFLAEFLPEIRRRTQLPVYLETGGHRPDQLGLVLPYLDLVGMDIKLPSTSGETWWEEHELFLRQCHEAGVSVFVKTIVCDRTPAQELERVAHLVARVSPDTPIYLQPVTPLNGVLRATNEALRRDSFRDAVVPDPEQVLAWQTMMKRTVGQVRVVPQTHKMIGQL

SEQ ID NO: 32756 - protein, 222 aa, Photobacterium angustum
  misc_feature (1)..(222): tr|Q1ZQH6|Q1ZQH6_PHOAS 7-carboxy-7-deazaguanine synthas e OS=Photobacterium angustum (strain S14 / CCUG 15956) OX=314292 GN=queE PE=3 SV=1
MYKINEVFETIQGEGVFTGVPAIFVRLQVCPVGCSWCDTKQTWTAEPQDLVSLDQIMAKTGDSPLWTNLDANGVVQLLQDQKYTAKHVVITGGEPCIYDLRPLTQALEEAGFNCQIETSGTSEIQTSDNTWVTVSPKINMKAKLPVLASSLARANEIKHPVGTSKDIEQLDALIDGVTLKPDVTIALQPISQKTRATELCIETCIQRNWRLSIQTHKYLAIA

SEQ ID NO: 32757 - protein, 222 aa, Photobacterium angustum
  misc_feature (1)..(222): tr|A0A2T3LZA2|A0A2T3LZA2_PHOAN 7-carboxy-7-deazaguanine synthase OS=Photobacterium angustum OX=661 GN=queE PE= 3 SV=1
MYKINEVFETIQGEGVFTGVPAIFVRLQVCPVGCSWCDTKQTWTAEPQDLVSLDQIMAKTGDSPLWTNLDANGVVQLLQDQKYTAKHVVITGGEPCIYDLRPLTQALEEAGFNCQIETSGTSEIQTSDNTWVTVSPKINMKAKLPVLASSLARANEIKHPVGTSKDIEQLDTLIDGVTLKPDVTIALQPISQKTRATELCIETCIQRNWRLSIQTHKYLAIA

SEQ ID NO: 32758 - protein, 222 aa, Photobacterium aphoticum
  misc_feature (1)..(222): tr|A0A0J1GMM8|A0A0J1GMM8_9GAMM 7-carboxy-7-deazaguanine synthase OS=Photobacterium aphoticum OX=754436 GN=queE PE=3 SV=1
MYKINEMFETIQGEGVFTGVPAIFVRLQVCPVGCAWCDTKQTWSAEPQDETTIETIMAKTGDSPLWTTLDADGVVALLVDQQYTAKHVVITGGEPCIYDLRPLTMALETAGFQCQIETSGTSEVQVTDNTWVTVSPKINMKAKLPVLACALERADEIKHPVGTEKDIEQLDALLAGKALKPAVTIALQPISQKPRATELCIDTCIKRNWRLSIQTHKYLAIA

SEQ ID NO: 32759 - protein, 222 aa, Photobacterium aphoticum
  misc_feature (1)..(222): tr|A0A090RCB8|A0A090RCB8_9GAMM 7-carboxy-7-deazaguanine synthase OS=Photobacterium aphoticum OX=754436 GN=queE PE=3 SV=1
MYKINEVFETIQGEGVFTGVPAIFVRLQVCPVGCSWCDTKQTWSAEPQDETTIETIMAKTGDSPLWTTLDADGVVALLVDQQYTAKHVVITGGEPCIYDLRPLTMALEAAGFQCQIETSGTSEVQVTDNTWVTVSPKINMKAKLPVLACALKRADEIKHPVGTEKDIEQLDALLAGKALKPAVTIALQPISQKPRATELCIETCIKRNWRLSIQTHKYLAIA

SEQ ID NO: 32760 - protein, 222 aa, Photobacterium aquae
  misc_feature (1)..(222): tr|A0A0J1GZB1|A0A0J1GZB1_9GAMM 7-carboxy-7-deazaguanine synthase OS=Photobacterium aquae OX=1195763 GN=queE PE =3 SV=1
MYKINEVFETIQGEGVFTGMPAIFVRLQICPVGCSWCDTKQTWSAEPQDQTTIETVMAKRGDSPLWCELDADGVVKLLQDQKYTAKHVVITGGEPCIYDLIPLTTALENAGFHCQIETSGTSEILATADTWVTVSPKINMKGKLPVLASALARADEIKHPVGTEKDIEQLDALLAGKTLKPKVNIALQPISQKPRATELCIETCIKRNWRLSIQTHKYLAIA

SEQ ID NO: 32761 - protein, 222 aa, Photobacterium aquimaris
  misc_feature (1)..(222): tr|A0A1Y6KXZ0|A0A1Y6KXZ0_9GAMM 7-carboxy-7-deazaguanine synthase OS=Photobacterium aquimaris OX=512643 GN=queE PE=3 SV=1
MYKINEVFETIQGEGVFTGVPAIFVRLQVCPVGCSWCDTKQTWTAEPEDLVSVERIMVKTEDSPLWTQLDADGVVSLLIAQGYTAKHVVITGGEPCIYDLRPLTTALETAGFNCQIETSGTSAILTSNNTWVTVSPKINMKAKLPVLTSALARANEVKHPVGTQKDIDQLDALLATATLRNDVTIALQPISQKPRATELCISTCIARNWRLSIQTHKYLAIA

SEQ ID NO: 32762 - protein, 222 aa, Photobacterium aquimaris
  misc_feature (1)..(222): tr|A0A2T3I276|A0A2T3I276_9GAMM 7-carboxy-7-deazaguanine synthase OS=Photobacterium aquimaris OX=512643 GN=queE PE=3 SV=1
MYKINEVFETIQGEGVFTGVPAIFVRLQVCPVGCSWCDTKQTWTAEPEDLVSVDRIMVKTEDSPLWTQLDADGVVSLLIAQGYTAKHVVITGGEPCIYDLRPLTTALEAAGFNCQIETSGTSAILTSNNTWVTVSPKINMKAKLPVLTSALARANEVKHPVGTQKDIDQLDALLATATLRNDVTIALQPISQKPRATELCISTCIARNWRLSIQTHKYLAIA

SEQ ID NO: 32763 - protein, 222 aa, Photobacterium carnosum
  misc_feature (1)..(222): tr|A0A2N4UWW7|A0A2N4UWW7_9GAMM 7-carboxy-7-deazaguanine synthase OS=Photobacterium carnosum OX=2023717 GN=queE PE=3 SV=1
MYKINEVFETIQGEGVFTGVPAIFIRLQVCPVGCSWCDTKQTWTAEPENLVSIERIIVKTEDSPLWTQLDADGIVKLLIDQGYTAKHVVITGGEPCIYDLRPLSAALETAGFNCQIETSGTSEILTSDQTWVTVSPKINMKAKLPVLTSALVRANEIKHPVGTHKDIEQLDALLATAKLRNDVTIALQPISQKPRSTELCIETCITRNWRLSIQTHKYLAIA

SEQ ID NO: 32764 - protein, 222 aa, Photobacterium damsela
  misc_feature (1)..(222): tr|A0A1Q9H5L3|A0A1Q9H5L3_PHODP 7-carboxy-7-deazaguanine synthase OS=Photobacterium damsela subsp. piscicida OX =38294 GN=queE PE=3 SV=1
MYKLNEVFETIQGEGVFTGVPAIFVRLQICPVGCSWCDTKQTWSAEPQDFTTLDRIMAKTGDSPLWTEIDAQGIVSLLQDQGYTAKHVVITGGEPCIYDLRPLTQALEASSYQCQIETSGTSEIQATEATWVTVSPKINMKGKLPVLEKALSRANEIKHPVGTQKDLDQLDELLNGVALRSDVTIALQPISQKPRATELCIETCIKRNWRLSIQTHKYLAIA

SEQ ID NO: 32765 - protein, 222 aa, Photobacterium damselae
  misc_feature (1)..(222): tr|D0YYE4|D0YYE4_PHODD 7-carboxy-7-deazaguanine synthas e OS=Photobacterium damselae subsp. damselae CIP 102761 OX=675817 GN=queE PE=3 SV=1
MYKLNEVFETIQGEGVFTGVPAIFVRLQICPVGCSWCDTKQTWSAEPQDFTTLDRIMAKTGDSPLWTEIDAQGIVSLLQDQGYTAKHVVITGGEPCIYDLRPLTQALEASGYQCQIETSGTSEVQATEATWVTVSPKINMKGKLPVLEKALSRANEIKHPVGTQKDLDQLDELLNGVALRSDVTIALQPISQKPRATELCIETCIKRNWRLSIQTHKYLAIA

SEQ ID NO: 32766 - protein, 222 aa, Photobacterium damselae; identical to SEQ ID NO: 32765
  misc_feature (1)..(222): tr|A0A2T3QPF4|A0A2T3QPF4_9GAMM 7-carboxy-7-deazaguanine synthase OS=Photobacterium damselae OX=38293 GN=queE P E=3 SV=1

SEQ ID NO: 32767 - protein, 222 aa, Photobacterium frigidiphilum
  misc_feature (1)..(222): tr|A0A2T3JAF5|A0A2T3JAF5_9GAMM 7-carboxy-7-deazaguanine synthase OS=Photobacterium frigidiphilum OX=264736 GN= queE PE=3 SV=1
MYKINEVFETIQGEGTFTGVPAIFVRLQVCPVGCSWCDTKQTWDAEPTDYASLNDIMAKKGDSPLWTNIDAQGIVALLQDQGYTARHVVITGGEPCIYDLVPLTAALETAGFNCQIETSGTSEILATDNTWVTVSPKINMKAKLPVLASALSRADEIKHPVGTSKDIEQLDALIDGVTLKQNVTIALQPISQKPRATDLCIETCIKRNWRLSIQTHKYLAIA

SEQ ID NO: 32768 - protein, 226 aa, Photobacterium gaetbulicola
  misc_feature (1)..(226): tr|A0A0B9G1W4|A0A0B9G1W4_9GAMM 7-carboxy-7-deazaguanine synthase OS=Photobacterium gaetbulicola OX=1295392 GN= queE PE=3 SV=1
MRLTVYKINEVFETIQGEGVFTGVPAIFVRLQICPVGCAWCDTKQTWSAEPQDHGSIEDVMAKTGDSPIWTELNAQGIVNLLAQQHYTAKHVVITGGEPCIYDLLPLTTALEQAGFNCQIETSGTSEVLATDNTWVTVSPKINMKAKLPVLASALERADEIKHPVGTQNDIDQLDELLAGKQLKANVNIALQPISQKPRATELCIETCIKRNWRLSIQTHKYLAIA

SEQ ID NO: 32769 - protein, 222 aa, Photobacterium gaetbulicola
  misc_feature (1)..(222): tr|A0A0C5W9H5|A0A0C5W9H5_9GAMM 7-carboxy-7-deazaguanine synthase OS=Photobacterium gaetbulicola Gung47 OX=6584 45 GN=queE PE=3 SV=1
MYKINEVFETIQGEGVFTGVPAIFVRLQICPVGCAWCDTKQTWSAEPQDHGSIEDVMEKTGDSPIWTELDAQGIVNLLAQQHYTAKHVVITGGEPCIYDLLPLTTALEQAGFNCQIETSGTSEVQATDNTWVTVSPKINMKAKLPVLASALERADEIKHPVGTQKDIDQLDELLAGKQLKTNVNIALQPISQKPRATELCIETCIKRNWRLSIQTHKYLAIA

SEQ ID NO: 32770 - protein, 222 aa, Photobacterium galatheae
  misc_feature (1)..(222): tr|A0A066RXB0|A0A066RXB0_9GAMM 7-carboxy-7-deazaguanine synthase OS=Photobacterium galatheae OX=1654360 GN=que E PE=3 SV=1
MYKINEIFETIQGEGVFTGVPAIFVRLQVCPVGCAWCDTKQTWSAEPQDEVNVQTMIAKKEDTPTWTALDAAGVVQVLNDQGYTARHVVITGGEPCLYDLRPLTEQLEAHGFRCQIETSGTYEVLATEATWVTVSPKINMKGKLPVLTAALERANEIKHPVGTQKDIEQLDSLLAGVNLKKDVTIALQPISQKPRATALCIQTCIARNWRLSIQTHKYLSIA

SEQ ID NO: 32771 - protein, 222 aa, Photobacterium ganghwense
  misc_feature (1)..(222): tr|A0A0J1HGX2|A0A0J1HGX2_9GAMM 7-carboxy-7-deazaguanine synthase OS=Photobacterium ganghwense OX=320778 GN=que E PE=3 SV=1
MYKINEVFETIQGEGVFTGVPAIFVRLQICPVGCAWCDTKQTWSAEPQDHVSIAEIMAKKGDSPTWTELDAQGIVNLLHDQKYTAKHVVITGGEPCLYDLVPLTEALEQAGFRCQIETSGTSEVKATANTWVTVSPKINMKAKLPVLPSALERADEIKHPVGTTKDIEQLDDLLAGKNLKTNVSIALQPISQKPRATELCIETCIARNWRLSIQTHKYLAIA

SEQ ID NO: 32772 - protein, 222 aa, Photobacterium halotolerans
  misc_feature (1)..(222): tr|A0A0F5VGH5|A0A0F5VGH5_9GAMM 7-carboxy-7-deazaguanine synthase OS=Photobacterium halotolerans OX=265726 GN=q ueE PE=3 SV=1
MYKINEIFETIQGEGVFTGVPAIFVRLQVCPVGCAWCDTKQTWSAEPQDEVNVGAMLAKQGDSPSWTALDAAGVVDLLIEQGYTARHVVITGGEPCLYDLRPLTEQLEAKGFRCQIETSGTYEVLATENTWVTVSPKINMKGKLPVLPGALSRANEIKHPVGTQKDIDQLDALLVGVPLQSNVTIALQPISQKARATELCIQTCIARNWRLSVQTHKYLSIA

SEQ ID NO: 32773 - protein, 222 aa, Photobacterium iliopiscarium
  misc_feature (1)..(222): tr|A0A2T3MAA4|A0A2T3MAA4_9GAMM 7-carboxy-7-deazaguanine synthase OS=Photobacterium iliopiscarium OX=56192 GN=q ueE PE=3 SV=1
MYKINEVFETIQGEGVFTGVPAIFVRLQICPVGCSWCDTKQTWTAEPNDLVDVERIIIKTEDSPLWTQLDANGIVDLLIKQGYTAKHVVITGGEPCIYDLHPLTTALETAGFNCQIETSGTSEILTSDQTWVTVSPKINMKAKLPVLPSALARANEIKHPVGTHKDIEQLEALLTTATLRNDVTIALQPISQKPRATELCIETCIARNWRLSIQTHKYLAIA

SEQ ID NO: 32774 - protein, 222 aa, Photobacterium indicum
  misc_feature (1)..(222): tr|A0A2T3L4J9|A0A2T3L4J9_9GAMM 7-carboxy-7-deazaguanine synthase OS=Photobacterium indicum OX=81447 GN=queE PE =3 SV=1
MYKINEVFETIQGEGTFTGVPAIFVRLQVCPVGCSWCDTKQTWDAEPTDYASLDDIMAKKGDSPLWTNIDAQGIVTLLQDQGYTARHVVITGGEPCIYDLVPLTAALETAGFNCQIETSGTSEVLATENTWVTVSPKINMKAKLPVLASALSRADEIKHPVGTSKDIEQLDALIDGVTLKQNVTIALQPISQKPRATDLCIETCIKRNWRLSIQTHKYLAIA

SEQ ID NO: 32775 - protein, 222 aa, Photobacterium jeanii
  misc_feature (1)..(222): tr|A0A178KN65|A0A178KN65_9GAMM 7-carboxy-7-deazaguanine synthase OS=Photobacterium jeanii OX=858640 GN=queE PE =3 SV=1
MYKLNEVFETIQGEGVFTGVPAIFVRLQVCPVGCSWCDTKQTWYAEEGDFADLDVIMAKTQDSPKWTQIDEQGVVKLLQDQGYTARHVVITGGEPCIYDLRPLTEALEAAGFQCQIETSGTSEVQATSNTWVTVSPKINMKGKLPVLASALERANEIKHPVGTQKDIDQLDELLDGKTLRSDVTIALQPISQKPRATELCIETCVKRNWRLSIQTHKYLAIA

SEQ ID NO: 32776 - protein, 222 aa, Photobacterium kishitanii
  misc_feature (1)..(222): tr|A0A2T3R2A6|A0A2T3R2A6_9GAMM 7-carboxy-7-deazaguanine synthase OS=Photobacterium kishitanii OX=318456 GN=que E PE=3 SV=1
MYKINEVFETIQGEGVFTGVPAIFVRLQVCPVGCSWCDTKQTWTAEPEDLVSVERIMVKTEDSPLWTQLDADGVVDLLIKQGYTAKHVVITGGEPCIYDLRPLTAALETAGFNCQIETSGTSDILTSDNTWVTVSPKINMKAKLPVLTSALARANEVKHPVGTHKDIDQLDDLLATATLRNDVTIALQPISQKPRATELCISTCITRNWRLSIQTHKYLAIA

SEQ ID NO: 32777 - protein, 222 aa, Photobacterium kishitanii
  misc_feature (1)..(222): tr|A0A2T3KP90|A0A2T3KP90_9GAMM 7-carboxy-7-deazaguanine synthase OS=Photobacterium kishitanii OX=318456 GN=que E PE=3 SV=1
MYKINEVFETIQGEGVFTGVPAIFVRLQVCPVGCSWCDTKQTWAAEPEDLVSVERIMVKTEDSPLWTQLDANGVVDLLIKQGYTAKHVVITGGEPCIYDLRPLTAALETAGFNCQIETSGTSEILASDNTWVTVSPKINMKAKLPVLTSALARANEVKHPVGTHKDIDQLDALLATATLRNDVTIALQPISQKPRATELCISTCITRNWRLSIQTHKYLAIA

SEQ ID NO: 32778 - protein, 222 aa, Photobacterium leiognathi
  misc_feature (1)..(222): tr|A0A0U1P6G0|A0A0U1P6G0_PHOLE 7-carboxy-7-deazaguanine synthase OS=Photobacterium leiognathi lrivu.4.1 OX=124 8232 GN=queE PE=3 SV=1
MYKINEVFETIQGEGVFTGVPAIFVRLQVCPVGCSWCDTKQTWTAEPQDLASLEQIMAKTEDSPLWTQLDANGVVQLLIDQKYTAKHVVITGGEPCIYDLYPLTEALEAAGFNCQIETSGTSEIQASNNTWVTVSPKINMKAKLPVLASALERANEIKHPVGTSKDIEQLDALLEGKSLKSDVTIALQPISQKPRATELCIETCIARNWRLSIQTHKYLAIA

SEQ ID NO: 32779 - protein, 222 aa, Photobacterium leiognathi
  misc_feature (1)..(222): tr|A0A2T3MI84|A0A2T3MI84_PHOLE 7-carboxy-7-deazaguanine synthase OS=Photobacterium leiognathi OX=553611 GN=que E PE=3 SV=1
MYKINEVFETIQGEGVFTGVPAIFVRLQVCPVGCSWCDTKQTWTAEPQDLASLEQIMAKTEDSPLWTQLDANGVVELLIDQKYTAKHVVITGGEPCIYDLRPLTEALEAAGFNCQIETSGTSEIQASDNTWVTVSPKINMKAKLPVLASALERANEIKHPVGTSKDIEQLDALLEGKNLKSDVTIALQPISQKPRATELCIETCIARNWRLSIQTHKYLAIA

SEQ ID NO: 32780 - protein, 222 aa, Photobacterium lipolyticum
  misc_feature (1)..(222): tr|A0A2T3N447|A0A2T3N447_9GAMM 7-carboxy-7-deazaguanine synthase OS=Photobacterium lipolyticum OX=266810 GN=qu eE PE=3 SV=1
MYKINEVFETIQGEGVFTGVPAIFVRLQICPVGCSWCDTKQTWNAEPADYASVDDIMAKKGDSPLWTNIDAQGVVALLREHGYTAKHIVITGGEPCIYDLIPLTQALEQAGYRCQIETSGTAEIRATDDTWVTVSPKINMKAKLPVLPSALQRADEIKHPVGTAKDIEQLDNLLDGVPLKETVEVALQPISQKPRATELCIDTCIKRNWRLSIQTHKYLAIA

SEQ ID NO: 32781 - protein, 222 aa, Photobacterium lutimaris
  misc_feature (1)..(222): tr|A0A2T3J1W1|A0A2T3J1W1_9GAMM 7-carboxy-7-deazaguanine synthase OS=Photobacterium lutimaris OX=388278 GN=queE PE=3 SV=1
MYKINEVFETIQGEGVFTGVPAIFVRLQICPVGCAWCDTKQTWSAEPQDHGSVVDVMAKTGDSPIWTELDAQGIVNLLTEQQYTAKHVVITGGEPCIYDLRPLTEALEQAGFRCQIETSGTSEVQATENTWVTVSPKINMKAKLPVLESALERADEIKHPVGTQKDIEQLDELLAGKQLKTEVEIALQPISQKPRATELCIETCIKRNWRLSIQTHKYLAIA

SEQ ID NO: 32782 - protein, 222 aa, Photobacterium marinum
  misc_feature (1)..(222): tr|L8JJE3|L8JJE3_9GAMM 7-carboxy-7-deazaguanine synthas e OS=Photobacterium marinum OX=1056511 GN=queE PE=3 SV= 1
MYKINEVFETIQGEGVFTGVPAIFVRLQVCPVGCAWCDTKQTWTAEPQDFTSLEEIMAKKADSPLWTKLDAQGIVQLLKDQGYTAKHVVITGGEPCIYDLVPLTEALEEAGFRCQIETSGTSEIKATTDTWVTVSPKINMKAKLEVLPVALERADEIKHPVGTGKDIEQLDNLLEGVNLKSDVSIALQPISQKPRATELCIETCVKRNWRLSIQTHKYLAIA

SEQ ID NO: 32783 - protein, 222 aa, Photobacterium phosphoreum; identical to SEQ ID NO: 32777
  misc_feature (1)..(222): tr|A0A0B7J8Y1|A0A0B7J8Y1_PHOPO 7-carboxy-7-deazaguanine synthase OS=Photobacterium phosphoreum ANT-2200 OX=145 4202 GN=ygcF PE=3 SV=1

SEQ ID NO: 32784 - protein, 222 aa, Photobacterium phosphoreum
  misc_feature (1)..(222): tr|A0A2T3PKS2|A0A2T3PKS2_PHOPO 7-carboxy-7-deazaguanine synthase OS=Photobacterium phosphoreum OX=659 GN=queE PE=3 SV=1
MYKINEVFETIQGEGVFTGVPAIFVRLQVCPVGCSWCDTKQTWTAEPEDLVSVERIMVKTEDSPLWTQLDANGVVNLLVDQGYTAKHVVITGGEPCIYDLRPLTAALEAAGFNCQIETSGTSDILTSEQTWVTVSPKINMKAKLPVLTSALARANEIKHPVGTSKDIDQLDALLATATLRNDVTIALQPISQKPRATELCISTCITRNWRLSIQTHKYLAIA

SEQ ID NO: 32785 - protein, 222 aa, Photobacterium piscicola
  misc_feature (1)..(222): tr|A0A1T5HY83|A0A1T5HY83_9GAMM 7-carboxy-7-deazaguanine synthase OS=Photobacterium piscicola OX=1378299 GN=que E PE=3 SV=1
MYKINEVFETIQGEGVFTGVPAIFVRLQVCPVGCSWCDTKQTWTAETEDLVSVERIMIKTEDSPLWTQLDANGIVNLLVDQGYTAKHVVITGGEPCIYDLRPLTTALEKAGFNCQIETSGTSEILTSDQTWVTVSPKINMKAKLPVLSSALARANEIKHPVGTHKDIEQLETLLAPVTLRTDVTIALQPISQKPRATELCISTCIARNWRLSIQTHKYLAIA

SEQ ID NO: 32786 - protein, 222 aa, Photobacterium profundum
  misc_feature (1)..(222): tr|Q6LPQ8|Q6LPQ8_PHOPR 7-carboxy-7-deazaguanine synthas e OS=Photobacterium profundum (strain SS9) OX=298386 GN =STY3080 PE=3 SV=1
MYKINEVFETIQGEGTFTGVPAIFVRLQVCPVGCSWCDTKQTWDAEPTDYASLNDIMAKKGDSPLWTNIDAQGIVTLLQDQGYTARHVVITGGEPCIYDLVPLTAALETAGFNCQIETSGTSEILATENTWVTVSPKINMKAKLPVLASALSRADEIKHPVGTSKDIKQLDALIDGVILKQNVTIALQPISQKPRATDLCIETCIKRNWRLSIQTHKYLAIA

SEQ ID NO: 32787 - protein, 222 aa, Photobacterium profundum
  misc_feature (1)..(222): tr|Q1YXF7|Q1YXF7_9GAMM 7-carboxy-7-deazaguanine synthas e OS=Photobacterium profundum 3TCK OX=314280 GN=queE PE =3 SV=1
MYKINEVFETIQGEGTFTGVPAIFVRLQVCPVGCSWCDTKQTWDAEPTDYASLNDIMAKKGDSPLWTNIDAQGIVALLQDQGYTARHVVITGGEPCIYDLIPLTAALETAGFNCQIETSGTSEILATEDTWVTVSPKINMKAKLPVLASALSRADEIKHPVGTSKDIEQLDTLINGVTLKQNVTIALQPISQKPRATDLCIETCIKRNWRLSIQTHKYLAIA

SEQ ID NO: 32788 - protein, 222 aa, Photobacterium proteolyticum
  misc_feature (1)..(222): tr|A0A1Q9GFX8|A0A1Q9GFX8_9GAMM 7-carboxy-7-deazaguanine synthase OS=Photobacterium proteolyticum OX=1903952 GN =queE PE=3 SV=1
MYKINEVFETIQGEGVFTGVPAIFVRLQVCPVGCAWCDTKQTWTAEPQDFAPLEDIMAKTADSPLWTNLDAGGVVTLLKDQGYTARHVVITGGEPCIYDLIPLTQSLEDAGFRCQIETSGTSEIKATANTWVTVSPKINMKAKLAVLPSALERADEIKHPVGTAKDIEQLDNLIDGVALKHDVSIALQPISQKPRATALCIDTCVKRNWRLSIQTHKYLAIA

SEQ ID NO: 32789 - protein, 222 aa, Photobacterium rosenbergii
  misc_feature (1)..(222): tr|A0A2T3NH08|A0A2T3NH08_9GAMM 7-carboxy-7-deazaguanine synthase OS=Photobacterium rosenbergii OX=294936 GN=qu eE PE=3 SV=1
MYKINEVFETIQGEGVFTGVPAIFVRLQICPVGCAWCDTKQTWNAEPQDHGSIEDVMAKTGDSPIWTEIDADGIVNLLKKQGYTAKHVVITGGEPCIYDLLPLTTALEQAGFQCQIETSGTSDVLATVNTWVTVSPKINMKAKLPVLASALERADEIKHPVGTQKDIDQLDELIDGKNLKSDVNIALQPISQKPRATELCIETCIKRNWRLSIQTHKYLAIA

SEQ ID NO: 32790 - protein, 222 aa, Photobacterium sanctipauli
  misc_feature (1)..(222): tr|A0A2T3NY81|A0A2T3NY81_9GAMM 7-carboxy-7-deazaguanine synthase OS=Photobacterium sanctipauli OX=1342794 GN=q ueE PE=3 SV=1
MYKINEVFETIQGEGVFTGVPAIFVRLQVCPVGCAWCDTKQTWTAEPQDHVSINDVMAKKADSPRWTELDADGIVGLLQAQQYTAKHVVITGGEPCIYDLLPLTTALESAGFQCQIETSGTSEVKVTEQTWVTVSPKINMKAKLPVIKEALERANEIKHPVGTQKDIEQLDELMAGKNLKKDVVVALQPISQKPRATELCIETCIQRNWRLSIQTHKYLAIA

SEQ ID NO: 32791 - protein, 222 aa, Photobacterium sanguinicancri
  misc_feature (1)..(222): tr|A0A135ZQC3|A0A135ZQC3_9GAMM 7-carboxy-7-deazaguanine synthase OS=Photobacterium sanguinicancri OX=875932 GN =queE PE=3 SV=1
MYKLNEVFETIQGEGVFTGVPAIFVRLQVCPVGCSWCDTKQTWSAEPSDFTDLDTIMAKKEDSPLWTELDANGVVQLLIDQGYTARHVVITGGEPCIYDLLPLTQALESAGFQCQIETSGTSEVLTTEATWVTVSPKINMKAKLPVLASALERANEIKHPVGTQKDIDQLNALIEGKALRSDVTIALQPISQKPRATDLCIETCVKRNWRLSIQTHKYLAIA

SEQ ID NO: 32792 - protein, 222 aa, Photobacterium sp.
  misc_feature (1)..(222): tr|A0A1Y6M7L6|A0A1Y6M7L6_9GAMM 7-carboxy-7-deazaguanine synthase OS=Photobacterium sp. CECT 9192 OX=2006083 GN =queE PE=3 SV=1
MYKINEVFETIQGEGVFTGVPAIFVRLQVCPVGCSWCDTKQTWTAEPEDLVSVERIMVKTEDSPLWTQLDADGVVNLLIAQGYTAKHVVITGGEPCIYDLRPLTAALEVAGFNCQIETSGTSNILTSDNTWVTVSPKINMKAKLPVLTSALARANEIKHPVGTQKDIDQLDDLLATAALRNDVTIALQPISQKPRATELCISTCIARNWRLSIQTHKYLAIA

SEQ ID NO: 32793 - protein, 222 aa, Photobacterium sp.
  misc_feature (1)..(222): tr|A0A1Y6M7D6|A0A1Y6M7D6_9GAMM 7-carboxy-7-deazaguanine synthase OS=Photobacterium sp. CECT 9190 OX=2006084 GN =queE PE=3 SV=1
MYKINEVFETIQGEGVFTGVPAIFVRLQVCPVGCSWCDTKQTWTAEPEDLVNVERIMVKTEDSPLWTQLDADGVVSLLIAQGYTAKHVVITGGEPCIYDLRPLTAALETAGFNCQIETSGTSAILTTDNTWVTVSPKINMKAKLPVLTSALARANEVKHPVGTQKDIDQLDALLATATLRNDVTIALQPISQKPRATELCISTCIARNWRLSIQTHKYLAIA

SEQ ID NO: 32794 - protein, 222 aa, Photobacterium swingsii
  misc_feature (1)..(222): tr|A0A2T3PCS4|A0A2T3PCS4_9GAMM 7-carboxy-7-deazaguanine synthase OS=Photobacterium swingsii OX=680026 GN=queE PE=3 SV=1
MYKLNEVFETIQGEGVFTGVPAIFVRLQVCPVGCSWCDTKQTWSAEPSDFTDLDTIMAKKEDSPLWTELDANGVVQLLIDQGYTAKHVVITGGEPCIYDLMPLTQALENAGFQCQIETSGTSDVMATTATWVTVSPKINMKAKLPVLASALERANEIKHPVGTQKDVDQLDALLNGKTLRSDVTIALQPISQKPRATELCIETCVKRNWRLSIQTHKYLAIA

SEQ ID NO: 32795 - protein, 222 aa, Photobacterium toruni
  misc_feature (1)..(222): tr|A0A1T4M806|A0A1T4M806_9GAMM 7-carboxy-7-deazaguanine synthase OS=Photobacterium toruni OX=1935446 GN=queE P E=3 SV=1
MYKINEVFETIQGEGVFTGVPAIFVRLQVCPVGCSWCDTKQTWTAETEDLVSVERIMVKTEDSPLWTQLDANGIIKLLIVQGYTAKHVVITGGEPCIYDLRPLTIALEKAGFNCQIETSGTSEILASDQTWVTVSPKINMKAKLPVLPSALARANEIKHPVGTHKDIEQLDTLLAPVTLRNDVTIALQPISQKSRATELCIATCIARNWRLSIQTHKYLAIA

SEQ ID NO: 32796 - protein, 223 aa, Photorhabdus asymbiotica
  misc_feature (1)..(223): tr|C7BLC1|C7BLC1_PHOAA 7-carboxy-7-deazaguanine synthas e OS=Photorhabdus asymbiotica subsp. asymbiotica (strai n ATCC 43949 / 3105-77) OX=553480 GN=ygcF PE=3 SV=1
MFYPINEIFQTLQGEGFFTGVPAIFIRLQGCPVGCSWCDTKHTWEKKAEKQQMLETILLKTNESDEWGEASPKQIATLFVQQGYTARHVVITGGEPCIYDLIPLTEELENLGYQCQIETSGTYHVECSAATWVTVSPKVKMRGGYQVLQQALQRANEIKHPVARERDIEALDELLATLDNNSSRIIALQPISQKEDATRLCIETCIARNWRLSMQTHKYLNIA

SEQ ID NO: 32797 - protein, 223 aa, Photorhabdus australis
  misc_feature (1)..(223): tr|A0A1C0U9P2|A0A1C0U9P2_9GAMM 7-carboxy-7-deazaguanine synthase OS=Photorhabdus australis OX=286156 GN=queE P E=3 SV=1
MFYPINEIFQTLQGEGFFTGVPAIFIRLQGCPVGCGWCDTKHTWEKKAEKQRMLETILLKMNESDEWGEASPKQIATLFVQQGYTARHVVITGGEPCIYNLIPLTEELENLGYQCQIETSGTYHVKCSAATWVTVSPKVKMRGGYQVLQQALQRANEIKHPVARERDIEALDELLATLDNNSSRIIALQPISQKEDATRLCIETCIARNWRLSMQTHKYLNIA

SEQ ID NO: 32798 - protein, 223 aa, Photorhabdus bodei
  misc_feature (1)..(223): tr|A0A329X3S4|A0A329X3S4_9GAMM 7-carboxy-7-deazaguanine synthase OS=Photorhabdus bodei OX=2029681 GN=queE PE=3 SV=1
MFYPINEIFQTLQGEGFFTGVPAIFIRLQGCPVGCSWCDTKHTWEKEAEKQRTLETILLKTSESNEWSEASPKQIAALFVQQKYTARHVVITGGEPCLYDLTPLTEELESLGYQCQIETSGTYHVKCSVATWVTVSPKVNMRGGYQVLQQALQRANEIKYPVARERDIEVLDELLATLDGNSSRIIALQPISQKEDATRLCIETCIARNWRLSMQTHKYLNIA

SEQ ID NO: 32799 - protein, 223 aa, Photorhabdus heterorhabditis
  misc_feature (1)..(223): tr|A0A5B0W1J0|A0A5B0W1J0_9GAMM 7-carboxy-7-deazaguanine synthase OS=Photorhabdus heterorhabditis OX=880156 GN= queE PE=3 SV=1
MFYPINEVFQTLQGEGFFTGVPAIFIRLQGCPVGCSWCDTKHTWEKKSEKQRMLETVLLKTGESDEWGEASPKQIAALFVQQGYTARHVVITGGEPCIYDLVPLTEELENLGYQCQIETSGTYHVKCSAATWVTVSPKVKMRGGYQVLQQALQRANEIKHPVARERDIEALDELLATLDDNSSRIIALQPISQKEDATRLCIETCIARNWRLSMQTHKYLNIA

SEQ ID NO: 32800 - protein, 223 aa, Photorhabdus heterorhabditis
  misc_feature (1)..(223): tr|A0A0M9CXP7|A0A0M9CXP7_9GAMM 7-carboxy-7-deazaguanine synthase OS=Photorhabdus heterorhabditis OX=880156 GN= queE PE=3 SV=1
MFYPINEVFQTLQGEGFFTGVPAIFIRLQGCPVGCSWCDTKHTWEKKAEKQRMLETVLLKTGESDEWGEASPKQIAALFVQQGYTARHVVITGGEPCIYDLVPLTEELENLGYQCQIETSGTYHVKCSAATWVTVSPKVKMRGGYQVLQQALQRANEIKHPVARERDIEALDELLATLDDNSSRIIALQPISQKEDATRLCIETCIARNWRLSMQTHKYLNIA

SEQ ID NO: 32801 - protein, 223 aa, Photorhabdus khanii
  misc_feature (1)..(223): tr|W3V0T2|W3V0T2_9GAMM 7-carboxy-7-deazaguanine synthas e OS=Photorhabdus khanii NC19 OX=1004151 GN=queE PE=3 S V=1
MFYPINEIFQTLQGEGFFTGVPAIFIRLQGCPIGCSWCDTKHTWEKEAEKQRALETILLKTSESDKWGEASPKQIAALFVQQGYTARHVVITGGEPCLYDLTPLTEELESLGYQCQIETSGTYHVKCSAATWVTVSPKVKMRGGYQVLQQALQRANEIKHPVARERDIEALDELLAILDDNSSRIIALQPISQKEDATRLCIETCIARNWRLSMQTHKYLNIA

SEQ ID NO: 32802 - protein, 223 aa, Photorhabdus laumondii
  misc_feature (1)..(223): tr|A0A329VH46|A0A329VH46_9GAMM 7-carboxy-7-deazaguanine synthase OS=Photorhabdus laumondii subsp. clarkei OX=2 029685 GN=queE PE=3 SV=1
MFYPINEIFQTLQGEGFFTGVPAIFIRLQGCPVGCSWCDTKHTWEKEVEKQRTLETILLKTSESNEWSEASPKQITALFVQQKYTARHVVITGGEPCLYDLIPLTEELESLGYQCQIETSGTYHVKCSAATWVTVSPKVNMRGGYRILQQALQRANEIKYPVARERDIEALDELLATLNDNSSRIIALQPISQKEEATRLCIETCIARNWRFSMQTHKYLNIA

SEQ ID NO: 32803 - protein, 223 aa, Photorhabdus laumondii
  misc_feature (1)..(223): tr|Q7N8L8|Q7N8L8_PHOLL 7-carboxy-7-deazaguanine synthas e OS=Photorhabdus laumondii subsp. laumondii (strain DS M 15139 / CIP 105565 / TT01) OX=243265 GN=queE PE=3 SV= 1
MFYPINEIFQTLQGEGFFTGVPAIFIRLQGCPVGCSWCDTKHTWEKEVEKQRTLETILLKTSESNEWSKASPKQITALFVQQKYTARHVVITGGEPCLYDLIPLTEELESLGYQCQIETSGTYHVKCSAATWVTVSPKVNMRGGYRILQQALQRANEIKYPVARERDIEALDELLATLNDNSSRIIALQPISQKEEATRLCIETCIARNWRFSMQTHKYLNIA

SEQ ID NO: 32804 - protein, 223 aa, Photorhabdus luminescens
  misc_feature (1)..(223): tr|A0A5C4RDL1|A0A5C4RDL1_PHOLU 7-carboxy-7-deazaguanine synthase OS=Photorhabdus luminescens subsp. sonorensis OX=1173677 GN=queE PE=3 SV=1
MFYPINEIFQTLQGEGFFAGVPAIFIRLQGCPVGCSWCDTKHTWEKEAEKQRTLETILLKTSESNEWSEASPKQIAALFVQQKYTARHVVITGGEPCLYNLIPLIEELESLGYQCQIETSGTYHVKCPSATWVTVSPKVNMRGGYQILQQALQRANEIKYPVARERDIEALDELLATLDDNSSRIIALQPISQKEDATRLCIETCIARNWRFSMQTHKYLNIA

SEQ ID NO: 32805 - protein, 223 aa, Photorhabdus luminescens
  misc_feature (1)..(223): tr|A0A1G5RIU6|A0A1G5RIU6_PHOLU 7-carboxy-7-deazaguanine synthase OS=Photorhabdus luminescens OX=29488 GN=queE PE=3 SV=1
MFYPINEIFQTLQGEGFFAGVPAIFIRLQGCPVGCSWCDTKHTWEKEAEKQRTLETILLKTSESNEWSEASPKQIAELFVQQKYTARHVVITGGEPCLYDLIPLIEELESLGYQCQIETSGTYHVKCSVATWVTVSPKVNMRGGYQILQQALQRANEIKYPVARERDIEALDELLATLDDDSSRIIALQPISQKEDATRLCIETCIARNWRFSMQTHKYLNIA

SEQ ID NO: 32806 - protein, 223 aa, Photorhabdus namnaonensis
  misc_feature (1)..(223): tr|A0A1B8YIM0|A0A1B8YIM0_9GAMM 7-carboxy-7-deazaguanine synthase OS=Photorhabdus namnaonensis OX=1851568 GN=qu eE PE=3 SV=1
MFYPINEVFQTLQGEGFFAGVPAIFIRLQGCPVGCSWCDTKHTWEKEAEKQRTLETILLKTSESNEWSEASPKQIAALFVQQKYTARHVVITGGEPCLYDLIPLIEELESLGYQCQIETSGTYHVKCSDTTWVTVSPKVNMRGGYQVLQQALQRANEIKYPVARERDIEALDELLATLDDNSSRIIALQPISQKEDATRLCIETCIARNWRFSMQTHKYLNIA

SEQ ID NO: 32807 - protein, 223 aa, Photorhabdus sp.
  misc_feature (1)..(223): tr|A0A4R4IX63|A0A4R4IX63_9GAMM 7-carboxy-7-deazaguanine synthase OS=Photorhabdus sp. MEX47-22 OX=2100167 GN=qu eE PE=3 SV=1
MFYPINEIFQTLQGEGVFAGVPAIFVRLQGCPVGCSWCDTKHTWEKEAEKQRTLETILLKTSESNEWSEASPKQIAALFVQQKYTARHVVITGGEPCIYDLIPLIEELESLGYQCQIETSGTYHVKCSAATWVTVSPKVNMRGGYQILQQALQRANEIKYPVARERDIEALDELLATLDDNSSRIIALQPISQKEDATRLCIETCIARNWRFSMQTHKYLNIA

SEQ ID NO: 32808 - protein, 223 aa, Photorhabdus sp.
  misc_feature (1)..(223): tr|A0A4R4J2H6|A0A4R4J2H6_9GAMM 7-carboxy-7-deazaguanine synthase OS=Photorhabdus sp. MEX20-17 OX=2100166 GN=qu eE PE=3 SV=1
MFYPINEIFQTLQGEGFFTGVPAIFIRLQGCPIGCSWCDTKHTWEKEAEKQRMLETILLKTNESDEWGEASPKQIAALFVQQGYTARHVVITGGEPCLYDLTPLTEELESLGYQCQIETSGTYHVKCSSATWVTVSPKVKMRGGYQVLQQALQRANEIKHPVARERDIEALDELLATLDDNSSRMIALQPISQKEDATRLCIETCIARNWRLSMQTHKYLNIA

SEQ ID NO: 32809 - protein, 223 aa, Photorhabdus temperata
  misc_feature (1)..(223): tr|U7QVN6|U7QVN6_PHOTE 7-carboxy-7-deazaguanine synthas e OS=Photorhabdus temperata J3 OX=1389415 GN=queE PE=3 SV=1
MFYPINEIFQTLQGEGFFTGVPAIFIRLQGCPVGCSWCDTKHTWEKEAKNQRMLETILLKTSESDEWGEASPEQIAALFVQQGYTARHVVITGGEPCLYDLAPLTEELESLGYQCQIETSGTYHVKCSSATWVTVSPKVKMRGGYQVLQQALQRANEIKHPVARERDIEALDELLAALDDNSSRIIALQPISQKEDATRLCIETCIARNWRLSMQTHKYLNIA

SEQ ID NO: 32810 - protein, 223 aa, Photorhabdus temperata
  misc_feature (1)..(223): tr|T0P3Q1|T0P3Q1_PHOTE 7-carboxy-7-deazaguanine synthas e OS=Photorhabdus temperata subsp. temperata M1021 OX=1 221520 GN=queE PE=3 SV=1
MFYPINEIFQTLQGEGFFTGVPAIFIRLQGCPVGCSWCDTKHTWEKEAKKQRMLETILLKTSESDEWGEASPEQIAALFVQQGYTARHVVITGGEPCLYDLAPLTEELESLGYQCQIETSGTYHVKCSSATWVTVSPKVKMRGGYQVLQQALQRANEIKHPVARERDIEALDELLAALDDNSSRIIALQPISQKEDATRLCIETCIARNWRLSMQTHKYLNIA

SEQ ID NO: 32811 - protein, 223 aa, Photorhabdus thracensis
  misc_feature (1)..(223): tr|A0A0F7LV44|A0A0F7LV44_9GAMM 7-carboxy-7-deazaguanine synthase OS=Photorhabdus thracensis OX=230089 GN=queE PE=3 SV=1
MFYPINEIFQTLQGEGFFTGVPAIFIRLQGCPVGCSWCDTKHTWEKEAAKQRMLESILLKTRESDEWGEASPKQIAALFVQQGYTARHVVITGGEPCLYDLTPLTEEFESLGYQCQIETSGTYYVKCSSATWVTVSPKVKMRGGYQVLQQALQRANEIKHPVARERDIEALDELLAALDDNSSRIIALQPISQKEDATRLCIETCIARNWRLSMQTHKYLNIA

SEQ ID NO: 32812 - protein, 210 aa, Phreatobacter stygius
  misc_feature (1)..(210): tr|A0A4D7BH74|A0A4D7BH74_9PROT 7-carboxy-7-deazaguanine synthase OS=Phreatobacter stygius OX=1940610 GN=queE P E=3 SV=1
MSYAVKEIFLTLQGEGAQAGRAAVFCRFAGCNLWSGREADRASAQCRFCDTDFVGLDGTKGGRYATAQALARAIAAEWTGAPDRRFCVLTGGEPLLQVDAALIGALHAERFSIAVETNGTIAAPEGLDWICVSPKAGTELKQRHGHELKLVYPQPAAMPEQFADLSFDHFCLQPMDGPQQQDNTALAVAYCLAHPQWRLSVQTHKRIGIR

SEQ ID NO: 32813 - protein, 238 aa, Phycicoccus sp.
  misc_feature (1)..(238): tr|A0A444BRC9|A0A444BRC9_9MICO 7-carboxy-7-deazaguanine synthase OS=Phycicoccus sp. CMS6Z-2 OX=2502783 GN=queE PE=3 SV=1
MTASDVESVDQLLISEVFGPTLQGEGPSAGQTASFVRLGGCNLACSWCDTPYSWDASRYDLDRELRYSPVEDVVDRVLDMRTALTVISGGEPALQRAALLSLAQTLRGRERRVEIETNGTVPLGPLGNELDLVVVSPKLRNSGIPLRNRRRPEVLRELAALKHSVFKFVVTSRGDLAEVETAQRDLALRPSQVWVMPEGTDTELLTARLRELAGPVADRGWSLSHRLQIVLWGGARGR

SEQ ID NO: 32814 - protein, 228 aa, Phycisphaera mikurensis
  misc_feature (1)..(228): tr|I0IBM6|I0IBM6_PHYMF 7-carboxy-7-deazaguanine synthas e OS=Phycisphaera mikurensis (strain NBRC 102666 / KCTC 22515 / FYK2301M01) OX=1142394 GN=queE PE=3 SV=1
MDPAPLELAAAPASARDRAYRVKEMHLTLQGEGIHAGRAAVFLRFAGCNLWSGREADRATAACRFCDTDFVGTDGPGGGTFRGPEALADAAAECWGRRSEHRFVVCTGGEPLLQLDGPAIAALRARGFEVAVETNGTRPLPDPAPDWVTVSPKAGQPLALGGGDELKLVYPQPALRPESLNALGFRHRLLQPMDGPAQAENTQLAVAYCLANPAWRLSVQTHKVIGIA

SEQ ID NO: 32815 - protein, 246 aa, Phycisphaera sp.
  misc_feature (1)..(246): tr|A0A3R7RJU4|A0A3R7RJU4_9BACT 7-carboxy-7-deazaguanine synthase OS=Phycisphaera sp. TMED9 OX=1986611 GN=queE PE=3 SV=1
MPDPASEPSADLQADRTSPSTSSIRLNEIFHSIQGESSRAGEPCIFVRLSGCHLRCSWCDTEYAFREGGRREVASVLAEVLAIECDVVEITGGEPLLQKAVHQLERGLLDAGRTVMVETSGACDITACDPRTEVVMDMKAPSSGECGRNLDTNLEALRPHHEVKFVIGNREDYEWSRDAVERHGLAKRCRAVLFSPVFVQAKGLEIAGAPGLEPRSLAEWILEDRLSVRMQLQMHKFIWEPSTRGV

SEQ ID NO: 32816 - protein, 231 aa, Phycisphaera sp.
  misc_feature (1)..(231): tr|A0A1Z9H8M4|A0A1Z9H8M4_9BACT 7-carboxy-7-deazaguanine synthase OS=Phycisphaera sp. TMED151 OX=1986610 GN=que E PE=3 SV=1
MPIAETFDSIQGEGSLLGTPSFFIRTAGCNLRCTWCDTPYASWAAAGDQRSVASLVEEVQRSGRKHVVLTGGEPFMFPGLIELNDALREAGCHVTIETAGTLVLPLTCDLLSCSPKLSNSTPTNDPRDPTGQWAERHEARRWRPEILSKLIQQSVRTQWKFVVSNQQDLAEIDQMLAEVPPERPEDVFLMPEGVTVPKPERVRWVVELCQKRGWCYGHRLHIALFGNTRGT

SEQ ID NO: 32817 - protein, 231 aa, Phycisphaeraceae bacterium
  misc_feature (1)..(231): tr|A0A2D5Z9R2|A0A2D5Z9R2_9BACT 7-carboxy-7-deazaguanine synthase OS=Phycisphaeraceae bacterium OX=2026777 GN=q ueE PE=3 SV=1
MAKRKNDVLRVNEIFHSVQGEGTRAGDPCVFVRLTGCHLRCRYCDTEYAFHEGGSKTIDRVVADVTAFGCPLVEITGGEPLLQPNVHPLMTRLCDEGFEVLIETSGACDIGPCDERVARIVDLKTPGSGESHHNEWSNVGHLRPRDEVKFVICDRADYEWSRRQVREYGLCDRVAAVLFGPAERVAPGREIAGVEGLAIERLAGWILEDRLAVRLQTQLHKQIWGPTARGV

SEQ ID NO: 32818 - protein, 231 aa, Phycisphaeraceae bacterium; identical to SEQ ID NO: 32816
  misc_feature (1)..(231): tr|A0A520QDD3|A0A520QDD3_9BACT 7-carboxy-7-deazaguanine synthase OS=Phycisphaeraceae bacterium OX=2026777 GN=q ueE PE=3 SV=1

SEQ ID NO: 32819 - protein, 225 aa, Phycisphaerae bacterium
  misc_feature (1)..(225): tr|A0A5C5VRE4|A0A5C5VRE4_9BACT 7-carboxy-7-deazaguanine synthase OS=Phycisphaerae bacterium RAS1 OX=2528034 GN =queE PE=3 SV=1
MRINEIFHSIQGEGIRTGLRCVFIRLTGCHLRCTYCDTEYSFFEGDWMTLDDVLSQVAVFECGAVEVTGGEPLLQPGVYPLLARLADDYETVMLETSGAILMDRVDPRVIRILDLKTPSSGEVERNEYRNIDLLTPRDEVKFVIGTRGDYEWARDQVRERNLLQRCPVLFSPVVGHGLADAGGLKLYRGRLDPAELAAWILADRLDVRFMYQLHKLIWPATQRGV

SEQ ID NO: 32820 - protein, 233 aa, Phycisphaerae bacterium
  misc_feature (1)..(233): tr|A0A1Q2MDC6|A0A1Q2MDC6_9BACT 7-carboxy-7-deazaguanine synthase OS=Phycisphaerae bacterium SM-Chi-D1 OX=18511 48 GN=queE PE=3 SV=1
MEVVINEIFYSIQGEGRLAGRPSVFVRHAGCTLRCDFCDTPYAQSPDSGTRYSLNHVVEKVRSYKCPNLVITGGEPMANPVLERLVEMTWPLFETITIETNGTCFRQLDPRLDNVLMSISPKFNDRQRAGYQHSFDVEPESGLISQGTILRLVNSYDYQLKFVVGADTDIKKIRRTVEGLGCANQRDIFLMPEAKNRREYIRASRHVVDLCLKYGYSFSPRHHIMIWDTKIGV

SEQ ID NO: 32821 - protein, 226 aa, Phycisphaerales bacterium
  misc_feature (1)..(226): tr|A0A3D1F2Q1|A0A3D1F2Q1_9BACT 7-carboxy-7-deazaguanine synthase OS=Phycisphaerales bacterium OX=2052180 GN=qu eE PE=3 SV=1
MPRLQINEMFYSIQGESTWSGLRCVFIRLKGCHLRCSYCDTEYAFHEGQSFTVDEVLSQAIRHNCDLYEITGGEPLLQKTVHPLMTRLCDLGKTVLIETSGACDISVCDPRVIRIMDIKTPGSGEVDRNLWTNMDHLNTTDEIKFVLCDRADYDWAKKIMVDYDLANRVKAVLMSGVNAMHATKELAGCGALPMIDLAQWIIEDNLPVRMQSQLHKQIWDPSARGV

SEQ ID NO: 32822 - protein, 226 aa, Phycisphaerales bacterium
  misc_feature (1)..(226): tr|A0A3D3UT00|A0A3D3UT00_9BACT 7-carboxy-7-deazaguanine synthase OS=Phycisphaerales bacterium OX=2052180 GN=qu eE PE=3 SV=1
MRINEIFYSLQGEGFLAGVPSVFIRLAGCPLRCRWCDTKYAWDKEAGRPYGPDQIVRVMQKWPCKHVVITGGEPMVNSDLPQLARKLKAAGKHITIETAGIVYIPEISCDLMSISPKLSNSMPDEPKLAAIHKHSKLDLAVLGALIDNYNYQLKFVVDSETDLPEIQETIEELENVDKGKIMLMPQAATRQELSGKSPMAAELCKRTGYAFSQRLQVLIWNNQKGK

SEQ ID NO: 32823 - protein, 217 aa, Phyllobacterium bourgognense
  misc_feature (1)..(217): tr|A0A368YXF7|A0A368YXF7_9RHIZ 7-carboxy-7-deazaguanine synthase OS=Phyllobacterium bourgognense OX=314236 GN= queE PE=3 SV=1
MSYAVKEIYLTLQGEGNHTGRAAVFMRFAGCNLWSGLERDREEANCKFCDTDFIGVNGPGGGKFKTAAALADAVAAAWPQNAGGKPYVICTGGEPLLQLDTPLIKAFHARGFEVGIETNGTIAAPAEIDWICVSPKAAAPLVQTSGNELKLVYPQKEAETHPSRFEQLSFEHFYLQPLDVIGDPAQTAAHVASAAAYCLAHPLWRLSTQTHKILGLP

SEQ ID NO: 32824 - protein, 219 aa, Phyllobacterium brassicacearum
  misc_feature (1)..(219): tr|A0A2P7BJF7|A0A2P7BJF7_9RHIZ 7-carboxy-7-deazaguanine synthase OS=Phyllobacterium brassicacearum OX=314235 G N=queE PE=3 SV=1
MTYAVKEIYLTLQGEGNHTGRAAVFMRFAGCNLWSGLERDREEAVCQFCDTDFVGLNGPGGGKFKTADALADAVAAHWPDAHNSGGKPYVICTGGEPLLQLDLALIDAFHVRGFEVGVETNGTIAAPAGLDWICVSPKAAAPLVQTSGNELKLVFPQKEAETHPSRFEQLSFEHFYLQPLDVIGDPAQTASHVASAAAYCLAHPLWRLSTQTHKLIGLP

SEQ ID NO: 32825 - protein, 210 aa, Phyllobacterium endophyticum
  misc_feature (1)..(210): tr|A0A2P7ASL1|A0A2P7ASL1_9RHIZ 7-carboxy-7-deazaguanine synthase OS=Phyllobacterium endophyticum OX=1149773 GN =queE PE=3 SV=1
MTYAVKELFKTLQGEGAQAGRAAVFCRFAGCNLWSGREQDRHSAVCKFCDTDFIGIDGEGGGKFRDASELASAIARTWGSAESRRYVVFTGGEPLLQIDDALIVAVHEHGFEIAIETNGTIEPPEGIDWICVSPKAGAPFNLKFGSELKLVYPQAQLLPDDLPDVSFEHYFLQPMDGPEQIENIAAVTAFCLENPRWRLSLQTHKMIGIP

SEQ ID NO: 32826 - protein, 217 aa, Phyllobacterium endophyticum
  misc_feature (1)..(217): tr|A0A2P7AZ03|A0A2P7AZ03_9RHIZ 7-carboxy-7-deazaguanine synthase OS=Phyllobacterium endophyticum OX=1149773 GN =queE PE=3 SV=1
MTYAVKEIYLTLQGEGNHTGRAAVFMRFTGCNLWSGLERDREEAICKFCDTDFVGVNGPGGGKFKTADALADSVASAWPAGGGGQPYVICTGGEPLLQLDLPLLDAFHARGFEVGIETNGTIAAPADIDWICVSPKASAPLVQTSGNELKLVYPQKESEAHPSRFEQLSFQHFYLQPLDVIGDPAQTAAHVASAAAYCLAHPLWRLSTQTHKILGLP

SEQ ID NO: 32827 - protein, 243 aa, Phyllobacterium leguminum
  misc_feature (1)..(243): tr|A0A318T3N7|A0A318T3N7_9RHIZ 7-carboxy-7-deazaguanine synthase OS=Phyllobacterium leguminum OX=314237 GN=que E PE=3 SV=1
MTGQIIRTSEIFGPTIQGEGALIGLPTVFVRTGGCDYRCSWCDSLHAVDSAFRHEWTPMSPEAIFQEVTRLSGGIPLTVSLSGGNPAVQPLEPLIELGHSHGYRFALETQGSIARDWFADLDVLVLSPKPPSSGMRTDWDQLDACLTAGSAGQAQIALKIVVFDDEDYAFARRTAGRYPDTPIYLQPGNHTPPPPHDDAAHVDIDGIMDRMLWLVAKVTEDRWYAARILPQLHVLLWGNKRGV

SEQ ID NO: 32828 - protein, 219 aa, Phyllobacterium myrsinacearum
  misc_feature (1)..(219): tr|A0A2S9JJS7|A0A2S9JJS7_9RHIZ 7-carboxy-7-deazaguanine synthase OS=Phyllobacterium myrsinacearum OX=28101 GN= queE PE=3 SV=1
MTYAVKEIYLTLQGEGNHTGRAAVFMRFAGCNLWSGLERDRANAQCRFCDTDFVGVDGPGGGKFKTADALADAVAGAWPKSARSKGKPYVICTGGEPLLQLDQPLIDAFHARGFDIGVETNGTIAAPDGIDWICVSPKADTTLVQTSGHELKLVYPQAEAQTDPAHFEHLSFQHFYLQPLDVIGDPAQTARHVASAAAYCLAHPLWRLSTQTHKLIGLP

SEQ ID NO: 32829 - protein, 244 aa, Phyllobacterium salinisoli
  misc_feature (1)..(244): tr|A0A368JYQ9|A0A368JYQ9_9RHIZ 7-carboxy-7-deazaguanine synthase OS=Phyllobacterium salinisoli OX=1899321 GN=q ueE PE=3 SV=1
MSAGETQIRISEIFGPTIQGEGILIGLPTVFVRTGGCDYRCSWCDTLHAVASEYRDQWLPMSVDEIWREVTRLSGSRPLMVSLSGGNPAIQPLGALIERGHREGYRFALETQGSVARDWFANLDVLVLSPKPPSSGMETDWDAFDACLRMAAEAPQIALKIVVFDDGDYAYARAAAARYPTFPVYLQPGNHTPPPPDDESAKVDIDGIMDQMLWLVGKVTDNQWFEARVLPQLHVLLWGNRRGV

SEQ ID NO: 32830 - protein, 219 aa, Phyllobacterium sophorae
  misc_feature (1)..(219): tr|A0A2P7BKQ8|A0A2P7BKQ8_9RHIZ 7-carboxy-7-deazaguanine synthase OS=Phyllobacterium sophorae OX=1520277 GN=que E PE=3 SV=1
MTYAVKEIYLTLQGEGNHTGRAAVFMRFAGCNLWSGLERDREEAVCRFCDTDFIGVNGPGGGKFKTAEALADAVAAQWPDTDRSGGKPYVICTGGEPLLQLDAPLIEAFHAHGFEVGVETNGTIAAPAGLDWICVSPKATAPLVQTSGNELKLVFPQKEAETHPSRFEQLSFEHFYLQPLDVIGDPAQTASHVASAAAYCLAHPLWRLSTQTHKLIGLP

SEQ ID NO: 32831 - protein, 219 aa, Phyllobacterium sp.
  misc_feature (1)..(219): tr|A0A1H0LBG5|A0A1H0LBG5_9RHIZ 7-carboxy-7-deazaguanine synthase OS=Phyllobacterium sp. OV277 OX=1882772 GN=qu eE PE=3 SV=1
MTYAVKEIYLTLQGEGNHTGRAAVFMRFAGCNLWSGLERDRADAQCRFCDTDFVGVNGPGGGKFKTADALAGAVANAWPRGERSNGKPYVICTGGEPLLQLDKPLIDAFHARGFEVGVETNGTIAAPEGIDWICVSPKANTKLVQTSGHEIKLVYPQAEAATDPIHFERLPFQHFYLQPLDVIGDPAQTARHVASAAAYCLAHPLWRLSTQTHKLIGLP

SEQ ID NO: 32832 - protein, 217 aa, Phyllobacterium sp.
  misc_feature (1)..(217): tr|J3C715|J3C715_9RHIZ 7-carboxy-7-deazaguanine synthas e OS=Phyllobacterium sp. YR531 OX=1144343 GN=queE PE=3 SV=1
MTYAVKEIYLTLQGEGNHTGRAAVFMRFAGCNLWTGREQDRATATCQFCDTDFVGVDGPGGGKFKTADALADAVAAAWPQGGGGTPYVICTGGEPLLQLDEPLIEAFHARGFEVGIETNGTIEAPAGIDWICVSPKAAAPLVQTSGNELKLVFPQKEEETHPSRFEQLSFQHFYLQPLDVIGDPAQTAAHVASAAAYCLAHPLWRLSTQTHKMNGLP

SEQ ID NO: 32833 - protein, 219 aa, Phyllobacterium zundukense
  misc_feature (1)..(219): tr|A0A2N9VWS1|A0A2N9VWS1_9RHIZ 7-carboxy-7-deazaguanine synthase OS=Phyllobacterium zundukense OX=1867719 GN=q ueE PE=3 SV=1
MTYAVKEIYLTLQGEGNHTGRAAVFMRFAGCNLWSGLERDREEAVCQFCDTDFIGVNGPGGGKFKTAEALADAVAAQWPDADRSGGKPYVICTGGEPLLQLDAPLIDAFHARGFEIGVETNGTIAAPSGLDWICVSPKAAAPLVQTSGNELKLVFPQKEPETHPSRFEQLSFEHFYLQPLDVIGDPAQTASHVASAAAYCLAHPLWRLSTQTHKLIGLP

SEQ ID NO: 32834 - protein, 223 aa, Phytobacter diazotrophicus
  misc_feature (1)..(223): tr|A0A4R4BAB9|A0A4R4BAB9_9GAMM 7-carboxy-7-deazaguanine synthase OS=Phytobacter diazotrophicus OX=395631 GN=qu eE PE=3 SV=1
MQYPINEMFQTLQGEGYFTGVPAIFIRLQGCPIGCAWCDTKHTWDKLEDREVSLYSILAKTKESDKWGAASSEDLLAIIERQGWTARHVVITGGEPCIHDLIPLTHLLEKQGFSCQIETSGTHEVRTSHATWVTVSPKVNMRGGYDILQQALERADEIKHPVGRTRDIEALDELLTQLTDDKHRVIALQPISQKDDATRLCIETCIARNWRLSMQTHKYLNIA

SEQ ID NO: 32835 - protein, 223 aa, Phytobacter ursingii
  misc_feature (1)..(223): tr|A0A508UJH3|A0A508UJH3_9GAMM 7-carboxy-7-deazaguanine synthase OS=Phytobacter ursingii OX=1972431 GN=queE PE =3 SV=1
MQYPINEMFQTLQGEGYFTGVPAIFIRLQGCPVGCAWCDTKHTWDKLEDREVSLYSILAKTKESDKWGAASSEDLLAIIERQGWTARHVVITGGEPCIHDLIPLTHLLEKQGFSCQIETSGTHEVRTSHATWVTVSPKVNMRGGYDILQQALERADEIKHPVGRTRDIEALDELLAQLTDDKHRVIALQPISQKDDATRLCIETCIARNWRLSMQTHKYLNIA

SEQ ID NO: 32836 - protein, 223 aa, Phytobacter ursingii; identical to SEQ ID NO: 30456
  misc_feature (1)..(223): tr|A0A0G3Q9D0|A0A0G3Q9D0_9GAMM 7-carboxy-7-deazaguanine synthase OS=Phytobacter ursingii OX=1972431 GN=queE PE =3 SV=1

SEQ ID NO: 32837 - protein, 211 aa, Pigmentiphaga aceris
  misc_feature (1)..(211): tr|A0A5C0B4F9|A0A5C0B4F9_9BURK 7-carboxy-7-deazaguanine synthase OS=Pigmentiphaga aceris OX=1940612 GN=queE PE =3 SV=1
MTYSVKEMFYTLQGEGAQAGRPAVFCRFAGCNLWTGREKDRAKAICQFCDTDFVGTDGTGGGKFRDAQALAAAIAGFWPNADHANRFVVLTGGEPLMQVDTALIDALHAEGFVIAVETNGTVLAPEGIDWICVSPKAGSEWIQRSGHELKVVWPQPGLDFEALEAADFTHRYLQPMDNILRADNTELCIRTCMARPAWRLSLQTHKITGIR

SEQ ID NO: 32838 - protein, 234 aa, Pirellula sp.
  misc_feature (1)..(234): tr|A0A142XW39|A0A142XW39_9PLAN 7-carboxy-7-deazaguanine synthase OS=Pirellula sp. SH-Sr6A OX=1632865 GN=queE P E=3 SV=1
MVRISEIFHSIQGEGKLSGTPSVFVRTSGCNLRCWFCDTRYASWEPEGDTLSVSSILDRVDAFPCDHVVITGGEPAIFDEIGEVVQSCKARRKHVTIETAGTVDRDWDCDLWSISPKLSNSTPIGMASDEWVRNHDLRRHAPQVVESLMESSLNRQADYQLKFVVGSILDAEEVLEYLGELHAWDRDRVMMMPRGTTAEELQLHSTWLPSWCRTHGVRYCDRQHIYWFGNTRGT

SEQ ID NO: 32839 - protein, 228 aa, Pirellula staleyi
  misc_feature (1)..(228): tr|D2R4S1|D2R4S1_PIRSD 7-carboxy-7-deazaguanine synthas e OS=Pirellula staleyi (strain ATCC 27377 / DSM 6068 / ICPB 4128) OX=530564 GN=queE PE=3 SV=1
MLIAELYTSLQGEGRLTGTPSVFVRASGCNLRCWFCDTPFTSWQPEGEDWSLEEIVHQVQAKQTSHVVITGGEPMLYSEMVPLTQELKRLGLHITIETAGTLHLEVACDLMSISPKLASSTPSVARAGRWAARHERVRHQPHVIRKMIAEYDYQLKFVIDSESDFAELDSWLEEFPEVRPERVLLMPQGTKLEELAARSAWLAPFCAARGFQLCPRKHIEWYGATRGT

SEQ ID NO: 32840 - protein, 215 aa, Piscirickettsia litoralis
  misc_feature (1)..(215): tr|A0A1E3GDY5|A0A1E3GDY5_9GAMM 7-carboxy-7-deazaguanine synthase OS=Piscirickettsia litoralis OX=1891921 GN=qu eE PE=3 SV=1
MNKDSLRINELFYSLQGETCTVGLPTVFIRLTGCPLRCTYCDSAYAFSGGDRLSLDQIIAQVQGYKAWHVTVSGGEPLAQPAVFELMARLCDLGYEVSVETSGALPVNNIDVRVMKVVDIKTPGSGEQQRNLYENFKYITAKDQIKFVICHREDYDWAVACMSEYDLTSKCEVLFSPSYEELKGVELADWILTDQLNVRFQLQLHKILWGDVPGK

SEQ ID NO: 32841 - protein, 215 aa, Piscirickettsia salmonis
  misc_feature (1)..(215): tr|A0A0K2DVH9|A0A0K2DVH9_PISSA 7-carboxy-7-deazaguanine synthase OS=Piscirickettsia salmonis OX=1238 GN=queE P E=3 SV=1
MNKDSLRINELFYSLQGETRTVGLPTVFIRLTGCPLRCTYCDSAYAFTGGERLSLDQIIIQVQAYQVRHVTVSGGEPLAQPNVFELMRRLCDLGYEISVETSGALPIEEIDVRVMKVVDIKTPGSGEHQRNRYENFDYITRHDQIKFVICDRQDYDWAVACVNQYDLTSLCEVLFSPSYEQLKGAELADWILTDQLDVRFQLQLHKILWGDVPGK

SEQ ID NO: 32842 - protein, 215 aa, Piscirickettsia salmonis
  misc_feature (1)..(215): tr|A0A0K2L232|A0A0K2L232_PISSA 7-carboxy-7-deazaguanine synthase OS=Piscirickettsia salmonis OX=1238 GN=queE P E=3 SV=1
MNKDFLRINELFYSLQGEARTVGLPTVFIRLTGCPLRCTYCDSAYAFTGGERLSLDQIIIQVQAYQVRHVTVSGGEPLTQPNVFELMRRLCDLGYEVSVETSGALPIEEIDVRVMKVVDIKTPGSGEHQRNRYENFDYITRHDQIKFVICDRQDYDWAVVCVNQYDLSSLCEVLFSPSYEQLKGAELADWILTDQLDVRFQLQLHKILWGDVPGK

SEQ ID NO: 32843 - protein, 215 aa, Piscirickettsiaceae bacterium
  misc_feature (1)..(215): tr|A0A2A4SIZ0|A0A2A4SIZ0_9GAMM 7-carboxy-7-deazaguanine synthase OS=Piscirickettsiaceae bacterium OX=2030828 G N=queE PE=3 SV=1
MSKDSLRITEIFYSLQGEGKTVGLPTTFIRLTGCPLRCGYCDTEYAFHGGETRSIDSIIEEVRSLGSRYINVTGGEPLAQKRVLLLMQRLCEEGYNVSLETSGAIDVSGVDERVVKILDVKTPASGEVTKNLDKNYGYLSAQDQVKYVICNEADFHWSKEHMFEHKLHVKCEVLFSPVQGQLEPRQLADWLLHEKLPVRFQIQLHKYLWGDVPGK

SEQ ID NO: 32844 - protein, 215 aa, Piscirickettsiaceae bacterium
  misc_feature (1)..(215): tr|A0A2A4PMZ0|A0A2A4PMZ0_9GAMM 7-carboxy-7-deazaguanine synthase OS=Piscirickettsiaceae bacterium OX=2030828 G N=queE PE=3 SV=1
MSKDSLRITEIFYSLQGEGKTVGLPTTFVRLTGCPLRCGYCDTEYAFHGGETRSIDSILEEVAEFGAQYINVTGGEPLAQKRVHDLMNKLCDQGYHVSLETSGALDVSEVDSRVIKVIDVKTPGSGEVSKNLPSNYQYLSSEDQIKYVICDEADFVWSKQHMQKHTLNEQCEVLFSPVQGTLPAAELANWVLRDKLPVRFQIQLHKHLWGDVPGK

SEQ ID NO: 32845 - protein, 225 aa, Planctomicrobium piriforme
  misc_feature (1)..(225): tr|A0A1I3G430|A0A1I3G430_9PLAN 7-carboxy-7-deazaguanine synthase OS=Planctomicrobium piriforme OX=1576369 GN=q ueE PE=3 SV=1
MWISEVFESVQGEGRYVGVPSGFIRTSGCNLRCVFCDTPYTSWQPEGREQSLEQLLEQTGAMTCGHMVLTGGEPLLTPEIVPLSRELKDRGFVITIETAGTVFRPATADLMSISPKLTNSTPTGTNWEERHDARRHRPDVIRRLTTEYDYQLKFVIDRIEDLAEVDAYLAEFEHVVPEKVYLMPQGTDLVVLQPKMAWLQTEADRRGWQVTPRLHIELFGNSRGT

SEQ ID NO: 32846 - protein, 270 aa, Planctomyces sp.
  misc_feature (1)..(270): tr|A0A2E8F079|A0A2E8F079_9PLAN 7-carboxy-7-deazaguanine synthase OS=Planctomyces sp. OX=37635 GN=queE PE=3 SV= 1
MPPAEAATVVCCGPRDSPKPACLTQPSPAIGKVNPVLRLSRQSSGQPEIFHSLQGEGAAIGAATVFLRLALCNLSCTWCDTKYTWDWANYDYKKEVMALEAEDVRDAILAYDCPHLVITGGEPMLQQTELIPLVSSLKQQGFYFEVETNGTIPPLPEMERDIDQWNVSAKLGTSGNQEHRRLVPSTLESFSSIPGAYFKFVIVEPQDIEEVCELAEKYRIPPQRILLLPEGRDMEVLRTRNQWVSEACVKHGFRFSPRLHILLWGDERGT

SEQ ID NO: 32847 - protein, 241 aa, Planctomyces sp.
  misc_feature (1)..(241): tr|A0A2E3GQZ1|A0A2E3GQZ1_9PLAN 7-carboxy-7-deazaguanine synthase OS=Planctomyces sp. OX=37635 GN=queE PE=3 SV= 1
MFPDFVSLQESGQTSLFISEIFASIQGEGCYTGTPSVFVRTSGCNLRCHFCDTPYASWNPEGETLSIADIVARVNEWWHPHVVLTGGEPMMVRDLAELTSALKRQDRFITIETAGTVYQDIEADLMSISPKRANSTPTDHPDWAARHEERRHQPDVIRELVASYTCQFKFVIDTPDDVADVDDYLDEFPEIERGTVWLMPQAIEPDILKEKLLWLQPLALERGFHLATRLQIQQFGNRRGT

SEQ ID NO: 32848 - protein, 204 aa, Planctomycetaceae bacterium
  misc_feature (1)..(204): tr|A0A3R7SBG5|A0A3R7SBG5_9PLAN 7-carboxy-7-deazaguanine synthase OS=Planctomycetaceae bacterium TMED241 OX=198 6836 GN=queE PE=3 SV=1
MSPPDSLPVVETFHSLQGEGHHCGRSAFFIRLAGCKVGCTWCDTKHSWPLENHPRRSIDALAQEAVEAARNGAAFTVITGGEPLHHDLSRLTDVLAEHGNETHLETSGVDRLSGSPDWITLSPKRHSPPRRELLQRCDELKVIVHEQDDLSFAEEMASETGPGTVLLLQPGWQSEDGQRLSIEHVRCQRRWKLGLQTHKWLGLR

SEQ ID NO: 32849 - protein, 225 aa, Planctomycetaceae bacterium
  misc_feature (1)..(225): tr|A0A350CDI1|A0A350CDI1_9PLAN 7-carboxy-7-deazaguanine synthase OS=Planctomycetaceae bacterium OX=2026779 GN= queE PE=3 SV=1
MQIAEIFESIQGEGPWAGTPSLFIRTSGCNLRCSFCDTPYTSWKPEGNAWTVDDLVHKVAASNSPDVVLTGGEPLLVPELPELAQRCQSLGKRVTVETAGTVHSSTRCDLFAISPKLANSTPDDPRWNERHQTTRFQPAVVQTLIQQSPSILKFVIDQPDDIHEILTWVRLLPMLPPSAVWLMPQARTREQLRDKSQWVRQLALAHSFNFSPRLHLEMFGDVRGT

SEQ ID NO: 32850 - protein, 256 aa, Planctomycetales bacterium
  misc_feature (1)..(256): tr|A0A1W9TDZ0|A0A1W9TDZ0_9BACT 7-carboxy-7-deazaguanine synthase OS=Planctomycetales bacterium 4572_13 OX=1971 638 GN=queE PE=3 SV=1
MIVNELFYSLQGEGSLAGVPSVFIRLAGCPLRCCWCDTKYAWDETAGREMSCEQVLEALDGHPTRHVVLTGGEPMVHEGVSGLAAAIREKGYHLTIETAGICFIEGLEADLMSISPKLSNSLPENADRPAERLNLGVLRQLIAAYDYQIKFVVDEPDDLNEIADILEKLDELDLYSIYLMPQATQMDAYMEKSHWLAEYCKQTGFSFSPRLQVMLNFPKKGVDEEAEIDRLYFLGVGCDKGIVFGRSRRKISFQIF

SEQ ID NO: 32851 - protein, 214 aa, Planctomycetales bacterium
  misc_feature (1)..(214): tr|A0A354GRW6|A0A354GRW6_9BACT 7-carboxy-7-deazaguanine synthase OS=Planctomycetales bacterium OX=2053591 GN=q ueE PE=3 SV=1
MKNYQVKEIYYTLQGEGANTGRAAVFCRFTGCNLWTGLEEDREAAVCRFCDTDFVGVDGPGGGRFSSAQALAAAVAGHWPGDASSASRPLVVCTGGEPLLQLDEPFIHALHKAGFEVAVETNGTRLPPPGIDWICVSPKANAELVLKAGDELKLVFPQPGAEPDRYEALDFRWFFLQPMDGPERERNTQLAIRYCLEHPRWRLSLQTHKLLNLP

SEQ ID NO: 32852 - protein, 278 aa, Planctomycetes bacterium
  misc_feature (1)..(278): tr|A0A517SUV4|A0A517SUV4_9BACT 7-carboxy-7-deazaguanine synthase OS=Planctomycetes bacterium SV_7m_r OX=252802 5 GN=queE_1 PE=3 SV=1
MLQVRSKSTSPASPEEGNSTAPVPAIADPVQPPNSSGLPTVSQSLFISETFSSRQGEGKLTGQESFFIRTSGCNLRCWFCDTPYASWQPTGQRQSIESLVQDAQAVFADKPASHRHVVLTGGEPLLGAAIEPLCHLFHQAGFHVTLETAGTIQRELPCDLLSLSPKLASSAPDAKQHPRWHQLHEQRRMPLNTMRYLIETAKDHQLKFVVSDRSQFDEIQSLVEQLEVHPSNVFIMPQGVSIDDLDAALPWLQPWTEQVGYHYCDRMQIRWYGNRRGT

SEQ ID NO: 32853 - protein, 211 aa, Planctomycetes bacterium
  misc_feature (1)..(211): tr|A0A5C5WQE0|A0A5C5WQE0_9BACT 7-carboxy-7-deazaguanine synthase OS=Planctomycetes bacterium CA85 OX=2527987 G N=queE_2 PE=3 SV=1
MKYSVKEIYYTLQGEGANAGKPAVFCRFTGCNLWSGREEDRAAAVCQFCDTQFVGADGPGGGVFQSALELASAVAAMWPESWNANKLVVCTGGEPLLQLDEATVEALHDEGFEVAVETNGTRLPPPGIDWICVSPKANAECILRTGNELKLVYPQVGGDPARYEDFDFDRFFLQPMDGLSQEQNTKLAAQYCLEHPRWELSIQTHKLIGLP

SEQ ID NO: 32854 - protein, 235 aa, Planctomycetia bacterium
  misc_feature (1)..(235): tr|A0A3D3KLP8|A0A3D3KLP8_9BACT 7-carboxy-7-deazaguanine synthase OS=Planctomycetia bacterium OX=2052181 GN=que E PE=3 SV=1
MLKVNEIFKSIQGESTYAGLPCIFIRLTGCNLRCNYCDTVYAYENGVEMRIEEILSDIELLGGSLIEITGGEPLLQGETGELVSLLIKRGCRVLVETNGTLDINALPEGTIRIMDLKCPDSGMADKTDWKNVERLRPNDEVKFVLSSRRDYEWAKDVIGKYRLTKKVKVLIGVAFNKLDLKRVASWILEDGIDVRLQLQIHRYIWPPDTPEGIILRSTCRYESGSGSSTPKRRDG

SEQ ID NO: 32855 - protein, 218 aa, Planctomycetia bacterium
  misc_feature (1)..(218): tr|A0A1Z8SQI4|A0A1Z8SQI4_9BACT 7-carboxy-7-deazaguanine synthase OS=Planctomycetia bacterium TMED53 OX=1986839 GN=queE PE=3 SV=1
MVGRSGGTGLRVVEIYPSIQGESTRAGLPCVFIRLAGCPLRCRWCDTVYSFKGGDEMSLEEICDAAAEPGISLVELTGGEPLAHSEAPELLKMLCDRFTEVLLETSGAFPIGDLDPRVGIIMDLKAPGSGEEDRNLLENLDHLKSGDELKLVLADREDYEWAKRLVNSHEITVPILFSPVHGELDPALLSDWILEDKLAVRLQLQQHKFIWDPAERGR

SEQ ID NO: 32856 - protein, 260 aa, Planctopirus ephydatiae
  misc_feature (1)..(260): tr|A0A518GQR3|A0A518GQR3_9PLAN 7-carboxy-7-deazaguanine synthase OS=Planctopirus ephydatiae OX=2528019 GN=queE PE=3 SV=1
MPTDLSTLPSATRTGHSSARLRIAETFLSVQGEGALTGVQSFFIRTTGCNLRCWFCDTPYTSWTAEGTWQTIDELLAQALASGVQHVILTGGEPLLQPAIVELSHALKAAGLHITVETAGTADRPVVADLMSISPKLANSDPAYALEDSRSSVATLDLESTAALQHAHLRWNLKTLKRLTTDYPYQLKFVIDTPADLDALSEALAELPHVPPEHVWLMPQGITQEELASRGAWLKPLAESQGYNFCPRLHIEWFGHRRGV

SEQ ID NO: 32857 - protein, 240 aa, Planctopirus hydrillae
  misc_feature (1)..(240): tr|A0A1C3EI23|A0A1C3EI23_9PLAN 7-carboxy-7-deazaguanine synthase OS=Planctopirus hydrillae OX=1841610 GN=queE PE=3 SV=1
MRIAETFLSVQGEGALTGVRSFFIRTTGCNLRCWFCDTPYTSWSAEGNWQSVDELLSQAISSGVEHVILTGGEPLLQPAIVELSYAMKAAGLHITVETAGTVDRPVMADLMSISPKLANSDPAYAPNFTVNPTAGRGGSGAVARRHSELRWNIATLTRLTTDYPYQLKFVIDTPADLDALSEALAELPHVPPEHIWLMPQGITQEELAMRGAWLKPLAESQGYNFCPRLHIEWFGHRRGV

SEQ ID NO: 32858 - protein, 260 aa, Planctopirus limnophila
  misc_feature (1)..(260): tr|D5SXT6|D5SXT6_PLAL2 7-carboxy-7-deazaguanine synthas e OS=Planctopirus limnophila (strain ATCC 43296 / DSM 3 776 / IFAM 1008 / 290) OX=521674 GN=queE PE=3 SV=1
MPTDLSTLPSAKKTGHSSARLRIAETFLSVQGEGALTGVRSFFIRTTGCNLRCWFCDTPYTSWTAEGNWQTIDELLAQATASGAEHVILTGGEPLLQPAIVELSHALKAAGLHITVETAGTVDRPVMADLMSISPKLANSNPTAAPDFPVNPTAVRGSQGAVARRHSELRWNIATLTRLTTDYPYQLKFVIDTPADLDALSEALTELPHVPPEHVWLMPQGITQEELALRGAWLKPLAESQGYNFCPRLHIEWFGHRRGV

SEQ ID NO: 32859 - protein, 232 aa, Planifilum fimeticola
  misc_feature (1)..(232): tr|A0A2T0LIV1|A0A2T0LIV1_9BACL 7-carboxy-7-deazaguanine synthase OS=Planifilum fimeticola OX=201975 GN=queE PE =3 SV=1
MNPKEITIPLVEIFQTVEGEGNMAGFPTTFIRLYNCNLRCTWCDTPYSYAPHPPEKILTLGEILEQVKRYGNRHICLTGGEPLLYRDKALALLQELAPLPFLEDIHIETNGAIDLLPFHRWREASPHGGKVRFIMDFKLRSSGERDKMIPSNFLHLTDRDEIKFVISDREEFNEALSVVENAVRRGQILFSPEWNTLPPDRLVAWLLEGKRKDIRLNLQTHKYIWDPDRRGV

SEQ ID NO: 32860 - protein, 232 aa, Planifilum fulgidum
  misc_feature (1)..(232): tr|A0A1I2MC32|A0A1I2MC32_9BACL 7-carboxy-7-deazaguanine synthase OS=Planifilum fulgidum OX=201973 GN=queE PE=3 SV=1
MNPKEITLPLVEIFQTVEGEGGKAGFPTTFIRLYNCNLRCTWCDTPYSYAPHPPEKMLTVGEILEQVKRWGNRHICLTGGEPLLYRDKALALLQELAPLPFLEDIHIETNGAIDLLPFHRWRESSPHGWKIRFIMDFKLRSSGERDKMILSNFLHLTDRDEIKFVISDRAEFDEALSVVESAVRRGQILFSPEWNSLPPDRLVSWLLQQPRRDIRLNLQTHKYIWDPDRRGV

SEQ ID NO: 32861 - protein, 281 aa, Planktothricoides sp.
  misc_feature (1)..(281): tr|A0A0M1JQB5|A0A0M1JQB5_9CYAN 7-carboxy-7-deazaguanine synthase OS=Planktothricoides sp. SR001 OX=1705388 GN= queE PE=3 SV=1
MTETIKNLATARLIELFSAIQGEGLNVGTRQIFIRFAICDLRCHFCDSAHTWQPSDTCRIEQTPGKRDFVTYANPVTQSQLLGWVEQQMLPPGLHDSISLTGGEPLLHAPFLQEFLPVVKEKTGLPIYLETGGHRPQQLRMILKDLDLVGMDVKLPSVSGENCWAAHEEFLQVCGDGGVEVFVKIIISQDTNPDELIQARDLVAAQSPMIPVFLQPVTPLKPWEILPGKQGENLDKLQKDKLQKPMLPPTPEQVLEWQGLMKRELKQVRVVAQTHKMMNQL

SEQ ID NO: 32862 - protein, 204 aa, Planktothrix agardhii
  misc_feature (1)..(204): tr|A0A2Z6CG50|A0A2Z6CG50_PLAAG 7-carboxy-7-deazaguanine synthase OS=Planktothrix agardhii NIES-204 OX=282423 G N=queE PE=3 SV=1
MLEIPVHETFQSTIQGEGYWVGTPVDFIRLAGCPVRCPWCDTGYGDGGMNLPRKVRSFDSLIAELRSPRVVISGGEPLIYAQLPQLIQTIEATVRTVAIETSGSFWQDIPNSVWVTFSPKHHVSPNYPVIPLIWKRANEIKIVIETGSELEFYAEYLELNDQIPVFLQPEWNQRDRTLPLVLELLKKFPHYRLSVQIHKWLQVP

SEQ ID NO: 32863 - protein, 204 aa, Planktothrix agardhii; identical to SEQ ID NO: 32862
  misc_feature (1)..(204): tr|A0A073CEN5|A0A073CEN5_PLAAG 7-carboxy-7-deazaguanine synthase OS=Planktothrix agardhii NIVA-CYA 126/8 OX=38 8467 GN=queE PE=3 SV=1

SEQ ID NO: 32864 - protein, 204 aa, Planktothrix rubescens
  misc_feature (1)..(204): tr|A0A1J1L7D7|A0A1J1L7D7_PLARU 7-carboxy-7-deazaguanine synthase OS=Planktothrix rubescens OX=59512 GN=queE PE =3 SV=1
MFEIPVHETFQSTIQGEGYWVGTPVDFIRLAGCPVGCPWCDTGYGDGGMNLPRKVRSFDSLIAELRSPRVVISGGEPLIYAQLPQLIQTIEATVRTVAIETSGSFWQDIPNSVWVTFSPKHHVSPNYPVIPLIWKRANEIKIVIETGSELEFYAEYLELNDQIPVFLQPEWNQRDRTLPLVLELLKKFPHYRLSVQIHKWLQVP

SEQ ID NO: 32865 - protein, 204 aa, Planktothrix sp.
  misc_feature (1)..(204): tr|A0A3C1RMJ2|A0A3C1RMJ2_9CYAN 7-carboxy-7-deazaguanine synthase OS=Planktothrix sp. UBA8407 OX=2055758 GN=que E PE=3 SV=1
MLEIPVHETFQSTIQGEGYWVGTPVDFIRLAGCPVRCPWCDTGYGDGGMNLPRKVRSFDSLIAELRSPRVVISGGEPLIYAQLPRLIQTIEATGRTVAIETSGSFWQDIPNSVWVTLSPKHHVSPNYPVIPLIWKRANEIKLVIETGLELEFYAEYLELNDQIPVFLQPEWNQRDRTLPLVLELLKKFPHYRLSVQIHKWLQVP

SEQ ID NO: 32866 - protein, 204 aa, Planktothrix sp.
  misc_feature (1)..(204): tr|A0A1T4ZKJ9|A0A1T4ZKJ9_9CYAN 7-carboxy-7-deazaguanine synthase OS=Planktothrix sp. PCC 11201 OX=1729650 GN=q ueE PE=3 SV=1
MLEIPVHETFQSTIQGEGYWVGTPVDFIRLAGCPVRCPWCDTGYGDGGMSLPREVRSFDSLIAELRSPRVVISGGEPLIYAQLPRLIQTIEAIGRTVAVETSGSFWQDIPNSVWVTLSPKHHVSPNYPVVPLMWKRANEIKLVIETGSELEFYAEYLELNSQIPVFLQPEWNQRDRTLPLVLELLKKFPHYRLSVQIHKWLQVP

SEQ ID NO: 32867 - protein, 205 aa, Planktothrix tepida
  misc_feature (1)..(205): tr|A0A1J1LKZ8|A0A1J1LKZ8_9CYAN 7-carboxy-7-deazaguanine synthase OS=Planktothrix tepida PCC 9214 OX=671072 GN= queE PE=3 SV=1
MRLEIPVHETFQSTIQGEGYWAGTPVDFIRLAGCPVGCPWCDTGYANGGMNLPRQVRSFQDLITELRSPRVVISGGEPFIYAQLPALINTIEATGRSVSIETSGSFWQDISNSVWVTLSPKHHVNWKYPVVEFMWKRASEIKLVIETGKELEFYAEYLTLNPQIPVFLQPEWTQRDRTFPLVLDLLKQFPHYRLSVQLHKYLNVP

SEQ ID NO: 32868 - protein, 235 aa, Planococcus antarcticus
  misc_feature (1)..(235): tr|A0A1C7DJ41|A0A1C7DJ41_9BACL 7-carboxy-7-deazaguanine synthase OS=Planococcus antarcticus DSM 14505 OX=11856 53 GN=queE PE=3 SV=1
MRIPVMEIFGPTIQGEGMVMGQKTMFVRTAGCDYSCSWCDSKFTWDGTGTSISRQPKEIVEELIQTGGAAFSHVTISGGNPALHKGIGELVELCHQQGWKVAVETQASIWQEWLTEIDDITLSPKPPSSGMKTDYIKLDLFIEKLQSANVSLKVVVFDQDDFTYAERLHLRYPTVPFFLQTGNEDTATTDDTQLVADLLQRYEQLIDYHVQSPIMNDAKVLPQLHTLVWGNKRGV

SEQ ID NO: 32869 - protein, 235 aa, Planococcus citreus
  misc_feature (1)..(235): tr|A0A497YE55|A0A497YE55_9BACL 7-carboxy-7-deazaguanine synthase OS=Planococcus citreus OX=1373 GN=queE PE=3 S V=1
MKIPVMEVFGPTIQGEGMVMGQKTMFVRTAGCDYSCSWCDSKFTWDGTGKSTAMTADDIVRQLEALGKDTFSHVTISGGNPALHKGIAELVALCQEKGWRTAVETQGSIWQDWLLEIDEVTVSPKPPSSGMILDYSQLDAMLGRLSSSQASLKVVVFDEADFFFAEQLHLRYPSFPFFLQVGNDDTQTTEDEKLVQHLLGRYQWLIDRHLVSAPLNDAKVLPQLHTLLWGNKRGV

SEQ ID NO: 32870 - protein, 235 aa, Planococcus donghaensis
  misc_feature (1)..(235): tr|A0A1C7EI00|A0A1C7EI00_9BACL 7-carboxy-7-deazaguanine synthase OS=Planococcus donghaensis OX=414778 GN=queE PE=3 SV=1
MKIPVMEIFGPTVQGEGMVMGQKTMFVRTAGCDYSCSWCDSKFTWDGTGTSVSKQPADIIQELIHIGGKNFSHVTISGGNPALHKGIGELVELCHQQGWKVAVETQASIWQEWMTAIDDITLSPKPPSSGMKTDFTKLDLYLEKLQTANVSLKVVIFDQDDFAYAETLHQRYPNVPFFLQTGNDDTVTTDDAKLVSNLLERYEQLIDYHIQSPIMNDAKVLPQLHTLVWGNKRGV

SEQ ID NO: 32871 - protein, 235 aa, Planococcus donghaensis
  misc_feature (1)..(235): tr|E7RE91|E7RE91_9BACL 7-carboxy-7-deazaguanine synthas e OS=Planococcus donghaensis MPA1U2 OX=933115 GN=queE P E=3 SV=1
MKIPVMEIFGPTVQGEGMVMGQKTMFVRTAGCDYSCSWCDSKFTWDGTGTSVSKQPADIIEELIHIGGSNFSHVTISGGNPALHKGIGELVDLCHQQGWKVAVETQASIWQEWMPTIDDITLSPKPPSSGMKTDFAKLDLFLEKLQTANVSLKVVIFDQDDFSYAEFLHQRYPHVPFFLQTGNDDTVTTDDAKLVSNLLERYEQLIDYHVQSPIMNDAKVLPQLHTLVWGNKRGV

SEQ ID NO: 32872 - protein, 235 aa, Planococcus halocryophilus
  misc_feature (1)..(235): tr|A0A1C7DMU0|A0A1C7DMU0_9BACL 7-carboxy-7-deazaguanine synthase OS=Planococcus halocryophilus OX=1215089 GN=q ueE PE=3 SV=1
MKIPVMEIFGPTVQGEGMVMGQKTMFVRTAGCDYSCSWCDSKFTWDGTGTSVSKQPADIVEELIQTGGENFSHVTISGGNPALHKGIGELVELCHQQGWKVAVETQASIWQEWMPAIDDITLSPKPPSSGMKTDFAKLDLFLEKLQTANVSLKVVVFDQDDFAYAENLHQRYPNVPFFLQTGNEDTITTDDAQLVSNLLERYEQLIDYHVKSPIMNDAKVLPQLHTLVWGNKRGV

SEQ ID NO: 32873 - protein, 235 aa, Planococcus halotolerans
  misc_feature (1)..(235): tr|A0A365L6P0|A0A365L6P0_9BACL 7-carboxy-7-deazaguanine synthase OS=Planococcus halotolerans OX=2233542 GN=que E PE=3 SV=1
MKIPVMEVFGPTIQGEGMVIGQKTMFVRTAGCDYSCSWCDSSFTWDGTGKSTSRQPSEIIEELKGIGGSRFSHVTISGGNPLLHKGIGELISLCHEEKWKVAVETQATIWQDWLLEVNDITLSPKPPSSGMVTDFDKLDVFMEKLLDSNASLKIVVFDETDFEFAGQLHLRYPTVPFFLQVGNDDITTTDDARLVAGLLERYEWLIDLSTDSSIMNDVKVLPQLHALVWGNKRGV

SEQ ID NO: 32874 - protein, 235 aa, Planococcus kocurii
  misc_feature (1)..(235): tr|A0A0U2ZGD7|A0A0U2ZGD7_9BACL 7-carboxy-7-deazaguanine synthase OS=Planococcus kocurii OX=1374 GN=queE PE=3 S V=1
MRIPVMEIFGPTIQGEGMVMGQKTMFVRTAGCDYSCSWCDSKFTWDGTGTSVSKQPTEIVEELIQTGGKAFSHVTISGGNPALHKGIGELVDLCHLQGWKVAVETQASLWQEWMIEIDDITLSPKPPSSGMKTDVTKLDVFIEKLQNANVSLKVVIFDEIDFAYAEKLHQRYPAVPFFLQTGNEDTATTDDLQLVTTLLHRYEQLIDYHIQSPIMNDAKVLPQLHTLVWGNKRGV

SEQ ID NO: 32875 - protein, 235 aa, Planococcus maitriensis
  misc_feature (1)..(235): tr|A0A365K0Z3|A0A365K0Z3_9BACL 7-carboxy-7-deazaguanine synthase OS=Planococcus maitriensis OX=221799 GN=queE PE=3 SV=1
MKIPVMEVFGPTIQGEGMVMGQKTMFVRTAGCDYSCSWCDSKFTWDGTGKSVMMAAGEIARQLEELGKGAFSHVTISGGNPALHKGIAELVALCQEKGWRTAVETQGSIWQDWLSEIDEVTVSPKPPSSGMILDYSKLDAMLGRLSSAQASLKVVVFDEADFFFAEQLHLRYPSFPFFLQVGNDDTQTTEDEKLVQHLLGRYQWLIDRHLASAPLNDAKVLPQLHTLLWGNKRGV

SEQ ID NO: 32876 - protein, 235 aa, Planococcus maritimus
  misc_feature (1)..(235): tr|A0A150W5H1|A0A150W5H1_PLAMR 7-carboxy-7-deazaguanine synthase OS=Planococcus maritimus OX=192421 GN=queE PE =3 SV=1
MKIPVMEIFGPTIQGEGMVMGQKTMFVRTAGCDYSCSWCDSKFTWDGTGKSTAMAANDIVTQLKQLGKDAFSHVTISGGNPALHKGIADLVALCRENGWRTAVETQGSIWQDWLTEIDDVTVSPKPPSSGMILDYSKLDAMLGRLSAAQASLKVVVFDEADFFFAEQLHLRYPAFPFFLQVGNDDTQTTDDEQLVQHLLGRYQWLIDRHLSSAELNDAKVLPQLHTLLWGNKRGV

SEQ ID NO: 32877 - protein, 235 aa, Planococcus maritimus
  misc_feature (1)..(235): tr|A0A1C7DYU0|A0A1C7DYU0_PLAMR 7-carboxy-7-deazaguanine synthase OS=Planococcus maritimus OX=192421 GN=queE PE =3 SV=1
MKIPVMEVFGPTIQGEGMVMGQKTMFVRTAGCDYSCSWCDSKFTWDGTGKSTAMAPDDIVTQLKQLGKDAFSHVTISGGNPALHKGIAELVALCRENGWRTAVETQGSIWQDWLTEIDDVTVSPKPPSSGMILDYSKLDAMLGRLSAAQASLKVVVFDEADFFFAEQLHLRYPAFPFFLQVGNDDTQTTDDEQLVQHLLGRYQWLIDRHLTSAPLNDAKVLPQLHTLLWGNKRGV

SEQ ID NO: 32878 - protein, 373 aa, Planococcus massiliensis
  misc_feature (1)..(373): tr|A0A098EM34|A0A098EM34_9BACL 7-carboxy-7-deazaguanine synthase OS=Planococcus massiliensis OX=1499687 GN=que E PE=4 SV=1
MNTVLKLKEITPQYDPWEAYMDIEQHGRLTLSSIEFTTTYLCNMRCEHCAVGYMLQHKDPDALPIDLLIARLEEIPHLRTISITGGEPMFSKKSVEQIVLPLMKYAHERGIRTQMNSNLTMPLERYMLIAPYLDVLHISHNWGTIDDFVDGGFANMERQPPRERRAAQFKRMIDNSRALAEAGVMVSAETMLNKRTLPHLAKIHKQVIEEMKCARHEVHPMYPSDFASQLEVLPLDETRKAIHQLLDERNEDVWMLFGTLPFYPCSMDDEDIQLLNRIRSSKNVTVRNDPDGRSRLNVNVFTGEVIVTDFGDTPPMGNIQTDSLPEMLDRWLERPLAKTIACHCPAVKCLGPNLLVKDAYYADQDFTKNKARI

SEQ ID NO: 32879 - protein, 235 aa, Planococcus plakortidis
  misc_feature (1)..(235): tr|A0A1C7E546|A0A1C7E546_9BACL 7-carboxy-7-deazaguanine synthase OS=Planococcus plakortidis OX=1038856 GN=queE PE=3 SV=1
MKIPVMEVFGPTIQGEGMVMGQKTMFVRTAGCDYSCSWCDSKFTWDGTGKSVMMTADDIAQQLEDLGKDSFSHVTISGGNPALHKGIAELVALCQENGWRTAVETQGSIWQDWLSEIDEVTVSPKPPSSGMILDYSKLDAMLGKLSSSQASLKVVVFDEADFFFAEQLHLRYPSFPFFLQVGNDDTQTSEDEKLVQHLLGRYQWLIDRHLASVSLNDAKVLPQLHTLLWGNKRGV

SEQ ID NO: 32880 - protein, 235 aa, Planococcus rifietoensis
  misc_feature (1)..(235): tr|A0A0U2N3R9|A0A0U2N3R9_9BACL 7-carboxy-7-deazaguanine synthase OS=Planococcus rifietoensis OX=200991 GN=queE PE=3 SV=1
MKIPVMEVFGPTIQGEGMVMGQKTMFVRTAGCDYSCSWCDSKFTWDGTGKSTAMTAADIVRQLEELGKDAFSHVTISGGNPALHKGIAELVASCQEKGWRTAVETQGSVWQDWLLEIDEVTVSPKPPSSGMILDYSKLDAMLGKLSSSQASLKVVVFDEADFFFAEQLHLRYPSFPFFLQVGNDDTQTTEDDKLVQHLLGRYQWLIDRHLVSAPLNDAKVLPQLHTLLWGNKRGV

SEQ ID NO: 32881 - protein, 235 aa, Planococcus salinus
  misc_feature (1)..(235): tr|A0A3M8PAW0|A0A3M8PAW0_9BACL 7-carboxy-7-deazaguanine synthase OS=Planococcus salinus OX=1848460 GN=queE PE= 3 SV=1
MKIPVMEVFGPTIQGEGMVMGQKTMFVRTAGCDYSCSWCDSKFTWDGTGKSKAMKPAEIIEELERIGGHAFSHVTISGGNPALHKGIGELVELCHEQEWKVGIETQASIWQDWLTEIDDITLSPKPPSSGMKTDFEKLDLFIRNLTGRNASLKVVIFDENDFAYAENLHLRYPDVPFFLQVGNDDSATSDNTRLVSNLLECYEWLVNLTVQSSIMNNAKVLPQLHTLVWGNKRGV

SEQ ID NO: 32882 - protein, 235 aa, Planococcus sp.
  misc_feature (1)..(235): tr|A0A5C5T4P3|A0A5C5T4P3_9BACL 7-carboxy-7-deazaguanine synthase OS=Planococcus sp. CPCC 101016 OX=2599617 GN= queE PE=3 SV=1
MRIPVMEIFGPTIQGEGMVMGQKTMFVRTAGCDYSCSWCDSKFTWDGTGKSISKQPADIVEELLQIGGKAFSHVTISGGNPALHKGIGELVDLCHQQGWKVAVETQASIWQDWLVEIDDITLSPKPPSSGMKTDFAKLDLYIENLKNANVSLKVVVFDRNDFAYAEMLHQRYPNVPFFLQTGNEDTATTDDSQLVADLLQRYEQLIDYHVQSPIMNDAKVLPQLHTLVWGNKRGV

SEQ ID NO: 32883 - protein, 235 aa, Planococcus sp.; identical to SEQ ID NO: 32874
  misc_feature (1)..(235): tr|A0A5B0CUU1|A0A5B0CUU1_9BACL 7-carboxy-7-deazaguanine synthase OS=Planococcus sp. ANT_H30 OX=2597347 GN=queE PE=3 SV=1

SEQ ID NO: 32884 - protein, 235 aa, Planomicrobium glaciei
  misc_feature (1)..(235): tr|A0A518XPP6|A0A518XPP6_9BACL 7-carboxy-7-deazaguanine synthase OS=Planomicrobium glaciei OX=459472 GN=queE P E=3 SV=1
MRIPVMEVFGPTIQGEGMVMGQKTMFVRTAGCDYSCSWCDSKFTWDGTGKSVSKQPADIIEELKAIGGQAFSHVTISGGNPALHKGIAELVALCHENGWKVGVETQGSIWQDWMPAINDITISPKPPSSGMKTDFSKLDFFMDKLAGANASLKVVIFDEEDFKYAEDLHLRYPAVPFFLQTGNSDTATTDDAGLTAALLERYEWLIEQAVRSTIMNNAKVLPQLHTLVWGNKRGV

SEQ ID NO: 32885 - protein, 235 aa, Planomicrobium glaciei
  misc_feature (1)..(235): tr|A0A1G8GVS6|A0A1G8GVS6_9BACL 7-carboxy-7-deazaguanine synthase OS=Planomicrobium glaciei OX=459472 GN=queE P E=3 SV=1
MRIPVMEVFGPTIQGEGMVMGQKTMFVRTAGCDYSCSWCDSKFTWDGTGKSGSKEPEDIIGELKAIGGQAFSHVTISGGNPALHKGIAELVALCHENGWKVGVETQGSIWQDWMPAIDDITISPKPPSSGMKTDFSKLDFFMDKLAGANASLKVVIFDEDDFKYAEDLHLRYPAVPFFLQTGNSDTATTDDAGLTAALLERYEWLIEQAVRSTIMNNAKVLPQLHTLVWGNKRGV

SEQ ID NO: 32886 - protein, 235 aa, Planomicrobium soli
  misc_feature (1)..(235): tr|A0A2P8GAQ3|A0A2P8GAQ3_9BACL 7-carboxy-7-deazaguanine synthase OS=Planomicrobium soli OX=1176648 GN=queE PE= 3 SV=1
MKIPVMEVFGPTIQGEGMVMGQKTMFVRTAGCDYSCAWCDSSFTWDGTGKSVSKQPQEIIEELRQIGGESFSHVTISGGNPALHKGIGELVDLCHQNGWKVAVETQGSMWQEWLRNIDDITISPKPPSSGMKTDFGKLDFFMENLADANASLKVVIFDEEDFKYAEDVHLRYPMVPFFLQTGNSDTVTTDDARLVQDLLERYEWLIDISVNSTIMNDAKVLPQLHTLVWGNKRGV

SEQ ID NO: 32887 - protein, 235 aa, Planomicrobium sp.
  misc_feature (1)..(235): tr|A0A4Z1B3H0|A0A4Z1B3H0_9BACL 7-carboxy-7-deazaguanine synthase OS=Planomicrobium sp. Y50 OX=2213011 GN=queE PE=3 SV=1
MKIPVMEVFGPTIQGEGMVIGQKTMFVRTAGCDYSCSWCDSSFTWDGTGKSSSQQPSEIIEELKRIGGSRFSHVTISGGNPLLHKGIGELISLCHDEGLKVAVETQATIWQDWLLEVDDITLSPKPPSSGMVTDFDKLDVFMEKLLDSNASLKIVVFDETDFAFAGQLHLRYPAVPFFLQVGNDDISTTDDARLVTGLLERYEWLIDLSTNSSIMNDVKVLPQLHALVWGNKRGV

SEQ ID NO: 32888 - protein, 235 aa, Planomicrobium sp.
  misc_feature (1)..(235): tr|A0A5C5UM02|A0A5C5UM02_9BACL 7-carboxy-7-deazaguanine synthase OS=Planomicrobium sp. CPCC 101110 OX=2599619 GN=queE PE=3 SV=1
MKIPVMEVFGPTIQGEGMIMGQKTMFVRTAGCDYSCAWCDSSFTWDGTGKSVSKKPHEIIEELRQIGGEAFSHVTISGGNPALHKGIGELVDLCHENGWKVAVETQGSMWQDWLRSVDDITLSPKPPSSGMKTDFGKLDAIMEKLAESNASLKVVVFDEEDFKYAEDVHLRYPRVPFFLQTGNSDTVTTDDSRLVRDLLERYEWLIDHSVRSPIMNDAKVLPQLHTLVWGNKRGV

SEQ ID NO: 32889 - protein, 241 aa, Planomonospora sphaerica
  misc_feature (1)..(241): tr|A0A171DJ25|A0A171DJ25_9ACTN 7-carboxy-7-deazaguanine synthase OS=Planomonospora sphaerica OX=161355 GN=queE PE=3 SV=1
MTDLMTAPGTMGRQTLLVAERFGPTLQGEGPSSGVPAVFVRLSRCNLSCGYCDTPFTWDTSRFDLRAETTRMTVDDVTAWALDSGVGLVVITGGEPLLQQEELVPLVGTLTGAGRRVEIETNGTVLPHPRLLVDGVGFNVSPKLTNAHLPEGKRIIAEALEVLAASGRAVFKFVAAAVSDLEEIEQLQRRFGLGEVWVMPEGTTGEQVITRARLLVEEVIARGWSLSLRTHVVLWGDERGR

SEQ ID NO: 32890 - protein, 235 aa, Planomonospora sphaerica
  misc_feature (1)..(235): tr|A0A171DIQ5|A0A171DIQ5_9ACTN 7-carboxy-7-deazaguanine synthase OS=Planomonospora sphaerica OX=161355 GN=queE PE=3 SV=1
MSERRFGAQKLIVSEIFGPTFQGEGYSLGRRCGFLRLGHCNLACSWCDTPYTWDWHRFSPESELSRLDVTEVAARIENMAVPLLVISGGEPMLQQAGLVSLFAHLPPGLAVEIETNGTVAPEPAVTERVSRFTVSPKLTHAAMSRQRRIRPAVLHAFAATDKATFKFVAASPYDLDEIETLTRELDLPDVYVMPEGRDPDQLMERMRALAPAVQERSWSLTTRLHVLLWGDRRAV

SEQ ID NO: 32891 - protein, 234 aa, Plantibacter flavus
  misc_feature (1)..(234): tr|A0A4U3FMV0|A0A4U3FMV0_9MICO 7-carboxy-7-deazaguanine synthase OS=Plantibacter flavus OX=150123 GN=queE PE=3 SV=1
MTRSLFVNEVFRSLQGEGPSTGKPAVFLRLANCNLACVWCDTRYSWDWNMYPADQERHEEEPATVARRLLEHLREVPLLVVTGGEPLLQQPAIVALLENLRSVLPNLRVEIETNGTIAPSDGICDAIDLFVVSPKLSNSAMPEKRRIRLRALKGFPRSKLVLKFVVAKVEDFVEISAIVAAAQVDSRSVWVMPEGTDSETIVRGMKSLSGPAMDVGYSLSTRLHVLLWGDQRGR

SEQ ID NO: 32892 - protein, 213 aa, Plasticicumulans acidivorans
  misc_feature (1)..(213): tr|A0A317MZI3|A0A317MZI3_9GAMM 7-carboxy-7-deazaguanine synthase OS=Plasticicumulans acidivorans OX=886464 GN= queE PE=3 SV=1
MSYAVKEIFYTLQGEGAQAGRAAVFCRFAGCNLWSGREADRAGAVCRFCDTDFVGVDGDGGGKFASARELAAVIAMHWPWGGGGRPYVVCTGGEPLLQLDAELIAALHARGFEVAVETNGTQPAPAGLDWICVSPKAGAPLQLTRGDELKLVYPQREAQAQPECFAGLDFRHFFLQPLDDADRLAATAACVEYCREHPQWRVSLQTHKLLGIP

SEQ ID NO: 32893 - protein, 215 aa, Plasticicumulans lactativorans
  misc_feature (1)..(215): tr|A0A4R2L902|A0A4R2L902_9GAMM 7-carboxy-7-deazaguanine synthase OS=Plasticicumulans lactativorans OX=1133106 GN=queE PE=3 SV=1
MGYAVKEIFYTLQGEGVRSGRPAVFCRFSGCNLWSGREADRARATCRFCDTDFVGTDGPGGGRFAGAAALAAAIAAQWPRATHPKARPYVVCTGGEPLLQLDAALIEALHARGFEVAVETNGTLPAPPGLDWICVSPKADAALALRAGDELKLVHPQAEPEAQPERFVDLDFAHFLLQPLDGPQRAAATAACVAYCLAHPPWRVSLQTHKLLDIP

SEQ ID NO: 32894 - protein, 223 aa, Plautia stali
  misc_feature (1)..(223): tr|U3U5H9|U3U5H9_9ENTR 7-carboxy-7-deazaguanine synthas e OS=Plautia stali symbiont OX=891974 GN=queE PE=3 SV=1
MFYPINEMFQTLQGEGFYTGVPAIFIRLQGCPVGCSWCDTKHTWETRADLETSLGDILVKTVESDAWGSADAATLIETIQRQGWTARHLVITGGEPAIFDLRPLTEALETAGFQCQIETSGTHEVHCSAATWVTVSPKVNMRGGYDVLPQALQRADEIKHPVARERDVEALDALLAGLQDEKKRIVALQPISRGEAATRLCIETCIVRNWRLSMQTHKYLNIA

SEQ ID NO: 32895 - protein, 195 aa, Pleionea mediterranea
  misc_feature (1)..(195): tr|A0A316G1G7|A0A316G1G7_9GAMM 7-carboxy-7-deazaguanine synthase OS=Pleionea mediterranea OX=523701 GN=queE PE =3 SV=1
MGLPTVFIRLTGCPLRCHYCDTEYAFTGGEYMSLDEILSKVASFNPKYITVTGGEPLAQKAPCEELMTRLCDNGYSVSIETSGAMDISLVDPRVNVVLDLKTPDSGEMSKNLWSNIERLKPSDEVKFVICSRKDYDWARMKVNELCLAQKCDVLFSPSFGQQAATQLADWIVADNLPVRFQVQLHKILWNDEPGH

SEQ ID NO: 32896 - protein, 261 aa, Plesiocystis pacifica
  misc_feature (1)..(261): tr|A6G3T9|A6G3T9_9DELT 7-carboxy-7-deazaguanine synthas e OS=Plesiocystis pacifica SIR-1 OX=391625 GN=queE PE=3 SV=1
MGEHPAVADLKPERSPSLRVQERFVSIQGEGSLVGVRSSFVRVSGCNLRCVWCDTPRTSWAPEGERASLDALVDWCGAPGQPRHVVLTGGEPLLFPACAELSARLRAAGHHLTIETAGSLWCEGVEADLMSISPKLSHSTPWARAAAEGKPSLAQRHEDARLDLEVLARLMAAAPWQLKFVVRTASDEALLADLAEIDALVDALAVPPALRDRVLLMPEGRDLNALSSGYARVDAVTRERHSPYRLGLRLHIHLYGDTPGT

SEQ ID NO: 32897 - protein, 233 aa, Plesiomonas shigelloides
  misc_feature (1)..(233): tr|A0A2P1VN80|A0A2P1VN80_PLESH 7-carboxy-7-deazaguanine synthase OS=Plesiomonas shigelloides OX=703 GN=queE PE =3 SV=1
MLYPINEVFQTLQGEGVYTGVPAIFVRLQGCPVECSWCDTKHTWQLDADQRLSDPALILKTEDSASWCSMTISDLQTLFTEQGYTAKHVVITGGEPCLYDLTPLTTQLEAAGFQCQIETSGTYEIRCSEQTWVTVSPKVGMRGGCQVRTDALLRADEIKHPVARESDIEALDQLLTQREQSLGADAASAHSKTPVICLQPISQKPQATELCIRTCIARNWRLSVQTHKYLSIA

SEQ ID NO: 32898 - protein, 233 aa, Plesiomonas shigelloides
  misc_feature (1)..(233): tr|R8AUN8|R8AUN8_PLESH 7-carboxy-7-deazaguanine synthas e OS=Plesiomonas shigelloides 302-73 OX=1315976 GN=queE PE=3 SV=1
MLYPINEVFQTLQGEGVYTGVPAIFVRLQGCPVECSWCDTKHTWQLDADQRLSDPALILKTEDSASWCSMTISDLQTLFTEQGYTAKHVVITGGEPCLYDLTPLTTQLEAAGFQCQIETSGTYEIRCSEQTWVTVSPKVGMRGGCQVRTDALLRADEIKHPVARESDIEALDQLLAQREQSLGADAASAHSKTPVICLQPISQKPQATELCIRTCIARNWRLSVQTHKYLSIA

SEQ ID NO: 32899 - protein, 204 aa, Pleurocapsa sp.
  misc_feature (1)..(204): tr|A0A2T1CDH5|A0A2T1CDH5_9CYAN 7-carboxy-7-deazaguanine synthase OS=Pleurocapsa sp. CCALA 161 OX=2107688 GN=qu eE PE=3 SV=1
MNTATKSITYPIVETFHSLQGEGYWTGVNAFFIRLGGCDVHCPWCDTKHSWNSQSHPQQSASNLTSKAQAVNPAIVIITGGEPLMHDLFPLTTALKNAGLQVHLETSGAHALTGDFDWITFSPKQFKAPHFSIYDRASELKVVVTSEFDLKWAEQQASLVSKSTLCYLQPEWNSPESKSLIFDYILQHPQWRLSLQTHKLLNIQ

SEQ ID NO: 32900 - protein, 205 aa, Pleurocapsa sp.
  misc_feature (1)..(205): tr|K9T6E8|K9T6E8_9CYAN 7-carboxy-7-deazaguanine synthas e OS=Pleurocapsa sp. PCC 7327 OX=118163 GN=queE PE=3 SV =1
MKTTIIETITYPIVETFHSVQGEGAWTGVSAFFIRLGGCDVYCPWCDQKESWKAKRHPQRSLVELATEAKAANPAIIIITGGEPLMHDLNPLTRQLRKLGLRVHLETSGAHPFSGQFDWVTFSPKQYKLPHNSIYDRVSELKVVVTNPEDLQWAEQQATQIPPEALKYLQPEWNTPQSQQIIFDYVLQHPEWRISLQMHKFLGVR

SEQ ID NO: 32901 - protein, 223 aa, Pluralibacter gergoviae
  misc_feature (1)..(223): tr|A0A251ZJC1|A0A251ZJC1_PLUGE 7-carboxy-7-deazaguanine synthase OS=Pluralibacter gergoviae OX=61647 GN=queE P E=3 SV=1
MQYPINEMFQTLQGEGYFTGVPAIFIRLQGCPVGCAWCDTKHTWDKLSDREVSLFSVLAKTKENDKWGAAGAEELLTAIVRQGWTARHVVITGGEPCIHDLTPLTELLEQNGYSCQIETSGTHEVRCSRDTWVTVSPKVNMRGRYDVLSQALYRADEIKHPVGRTRDIEALDELLETIADDKPRIIALQPISQKEDATRLCIETCIARNWRLSMQTHKYLNIA

SEQ ID NO: 32902 - protein, 223 aa, Pluralibacter gergoviae
  misc_feature (1)..(223): tr|A0A089R0A4|A0A089R0A4_PLUGE 7-carboxy-7-deazaguanine synthase OS=Pluralibacter gergoviae OX=61647 GN=queE P E=3 SV=1
MQYPINEMFQTLQGEGYFTGVPAIFIRLQGCPVGCAWCDTKHTWDKLSDREVSLFSVLAKTKENDKWGAAGAEELLTAIVRQGWTARHVVITGGEPCIHDLTPLTELLEQNGYSCQIETSGTHEVRCSRDTWVTVSPKVNMRGGYDVLSQALYRADEIKHPVGRTRDIEALDELLETIADDKPRIIALQPISQKEDATRLCIETCIARNWRLSMQTHKYLNIA

SEQ ID NO: 32903 - protein, 215 aa, Pokkaliibacter plantistimulans
  misc_feature (1)..(215): tr|A0A318C136|A0A318C136_9GAMM 7-carboxy-7-deazaguanine synthase OS=Pokkaliibacter plantistimulans OX=1635171 GN=queE PE=3 SV=1
MAGKKRYQIKEAFYTLQGEGAHSGRPAVFCRFTGCNLWSGKEKHRATAVCQFCDTDFIGTDGQNGGQFDSADALARHIHGLWPITTEGQKYVVCTGGEPLLQLDPELIEAFHQLGFEIAIESNGTLAAPAGIDWICISPKADAELQQQTGHELKLVYPQLLAMPERFTHLDFQHFYLQPMDGPDREANTRAAIAYCLAHPQWRLSLQTHKYLGID

SEQ ID NO: 32904 - protein, 209 aa, Polaribacter atrinae
  misc_feature (1)..(209): tr|A0A176TB83|A0A176TB83_9FLAO 7-carboxy-7-deazaguanine synthase OS=Polaribacter atrinae OX=1333662 GN=queE PE =3 SV=1
MDKNTKDLVDKGIMLPLMEEFYTIQGEGAHTGTAAYFIRVGGCDVGCHWCDVKESWNAELHPPTLADTIVDNVKKYAETVVITGGEPLMWSMDYITDLLQKNNIRTHIETSGAYSFSGKWNWFCLSPKKTKMPLAECYPEADELKMIIHNTSDFAFAEQEAAKVGAKCQLYLQPEWSKKEKMTALIVDYVMKNPKWKISLQTHKYLNIP

SEQ ID NO: 32905 - protein, 209 aa, Polaribacter butkevichii
  misc_feature (1)..(209): tr|A0A2P6CFJ5|A0A2P6CFJ5_9FLAO 7-carboxy-7-deazaguanine synthase OS=Polaribacter butkevichii OX=218490 GN=queE PE=3 SV=1
MDKNTKDLVNKGIMLPLMEEFYTIQGEGAHTGTAAYFIRVGGCDVGCHWCDVKESWNAELHPPTLADTIVNNVKKHANTVVITGGEPLMWSMDYITESLQKNNIRTHIETSGAYSFSGKWNWFCLSPKKTKMPLAECYPEADELKMIIHNTSDFAFAEQEAAKVGPKCQLYLQPEWSKKEKMTALIVDYVMKNPKWKISLQTHKYLNIP

SEQ ID NO: 32906 - protein, 210 aa, Polaribacter dokdonensis
  misc_feature (1)..(210): tr|A0A0N0CFP7|A0A0N0CFP7_9FLAO 7-carboxy-7-deazaguanine synthase OS=Polaribacter dokdonensis DSW-5 OX=1300348 GN=queE PE=3 SV=1
MMDKKTKDLVDKGIMLPLMEEFYTIQGEGSHTGTAAYFIRVGGCDVGCHWCDVKESWNADLHPPTMAESIIDNVKKYTNTVVITGGEPLMWSMDYITELLQKNNIKTHIETSGAYSFSGKWDWFCLSPKKTKLPLAENYREADELKMIIHNKSDFDFAEEQAAKVGKKCQLFLQPEWSKKEKMTALIVDYVMKNPKWKVSLQTHKYLNIP

SEQ ID NO: 32907 - protein, 209 aa, Polaribacter filamentus
  misc_feature (1)..(209): tr|A0A2S7KUS6|A0A2S7KUS6_9FLAO 7-carboxy-7-deazaguanine synthase OS=Polaribacter filamentus OX=53483 GN=queE P E=3 SV=1
MDKKTKDLVDQGIMLPLMEEFYTIQGEGSHTGTAAYFIRVGGCDVGCHWCDVKESWNADLHPPTLADTIVKNVTKHANTVVITGGEPLMWSMDYITELLQKNNIKTHIETSGAYSFSGKWDWFCLSPKKNKLPLEEVYKEADELKMIIHNNSDFDFAEQEAAKVGKRCQLFLQPEWSKKEKMTPLIVDYVMKNPKWKISLQTHKYLNIP

SEQ ID NO: 32908 - protein, 209 aa, Polaribacter gangjinensis
  misc_feature (1)..(209): tr|A0A2S7WEP0|A0A2S7WEP0_9FLAO 7-carboxy-7-deazaguanine synthase OS=Polaribacter gangjinensis OX=574710 GN=que E PE=3 SV=1
MDTNTKELVNQGKMLPLMEAFYTIQGEGYHTGKAAYFIRVGGCDVGCHWCDVKESWNAELHPPTSVETIVENAKKYSDTIVITGGEPLMWSMDYLTNLLQKNNMKTHIETSGAYSFSGKWDWFCLSPKKTKLPLDEVYNEADELKMIIHNKSDFDFAEQQAAKVSEKCELFLQPEWSKKEKMTSEIVDYVMKNSKWKISLQTHKYLNIP

SEQ ID NO: 32909 - protein, 209 aa, Polaribacter glomeratus
  misc_feature (1)..(209): tr|A0A2S7WXM9|A0A2S7WXM9_9FLAO 7-carboxy-7-deazaguanine synthase OS=Polaribacter glomeratus OX=102 GN=queE PE= 3 SV=1
MDKKTKDLVNQGIMLPLMEEFYTIQGEGSHTGTAAYFIRLGGCDVGCHWCDVKESWNADLHPPTLADTIVNNVTKHANTVVITGGEPLMWSMDYITEKLQKNNIRTHIETSGAYSFSGKWDWFCLSPKKNKLPLEEVYKEADELKMIIHNNSDFDFAEQEAAKVGKKCQLYLQPEWSKKEKMTPLIVDYVMKNPKWKISLQTHKYLNIP

SEQ ID NO: 32910 - protein, 209 aa, Polaribacter irgensii
  misc_feature (1)..(209): tr|A4C271|A4C271_9FLAO 7-carboxy-7-deazaguanine synthas e OS=Polaribacter irgensii 23-P OX=313594 GN=queE PE=3 SV=1
MDTKTQDLVNKGIMLPLMEEFYTIQGEGCHTGTAAYFIRVGGCDVGCHWCDVKESWNADLHPPTLADTIVENVKKHANTVVITGGEPLMWSMDYITESLQKNSIKTHIETSGAYAFSGKWDWFCLSPKKTKMPLDECYPEADELKMIIHNKSDFIFAEQEAEKVGQKCQLYLQPEWSKKEKMTALIVAYVMKNPKWKISLQTHKFLNIP

SEQ ID NO: 32911 - protein, 209 aa, Polaribacter porphyrae
  misc_feature (1)..(209): tr|A0A2S7WTK1|A0A2S7WTK1_9FLAO 7-carboxy-7-deazaguanine synthase OS=Polaribacter porphyrae OX=1137780 GN=queE PE=3 SV=1
MDKETKELVDKGIMLPLMEEFYTIQGEGSHTGTAAYFIRVGGCDVGCHWCDVKESWNADLHPPTLADTIVDNVKKYADTVVITGGEPLMWSMDYITNLLLENNIKTHIETSGAYSFSGKWDWFCLSPKKTKLPLTENYREADELKMIIHNKSDFDFAEEQAAKVGKKCQLFLQPEWSKKEKMTEQIVDYVMKNPKWKISLQTHKYLNIP

SEQ ID NO: 32912 - protein, 209 aa, Polaribacter reichenbachii
  misc_feature (1)..(209): tr|A0A1B8TS07|A0A1B8TS07_9FLAO 7-carboxy-7-deazaguanine synthase OS=Polaribacter reichenbachii OX=996801 GN=qu eE PE=3 SV=1
MDKKTKDLVDKGIMLPLMEEFYTIQGEGSHTGTAAYFIRVGGCDVGCHWCDVKESWNADLHPPTLADTIVDNVKKYANTVVITGGEPLMWSMDYITENLQKNNIKTHIETSGAYSFSGKWDWFCLSPKKTKLPLDECYTQADELKMIIHNKSDFDFAEQEAAKVAEKCQLFLQPEWSKKEKMTEQIVDYVMKNPKWKISLQTHKYLNIP

SEQ ID NO: 32913 - protein, 209 aa, Polaribacter sejongensis
  misc_feature (1)..(209): tr|A0A2K8VN70|A0A2K8VN70_9FLAO 7-carboxy-7-deazaguanine synthase OS=Polaribacter sejongensis OX=985043 GN=queE PE=3 SV=1
MDKNTKDLVDKGIMLPLMEEFYTIQGEGAHTGTAAYFIRVGGCDVGCHWCDVKESWNAELHPPTLADTIVDNVKKYANTVVITGGEPLMWSMDYITENLQKNNIRTHIETSGAYSFSGKWNWFCLSPKKTKMPLAECYPEADELKMIIHNKSDFDFAEQEAAKVGAKCQLYLQPEWSKKEKMTAEIVDYVMKNPKWKISLQTHKYLNIP

SEQ ID NO: 32914 - protein, 209 aa, Polaribacter sp.
  misc_feature (1)..(209): tr|A0A395K273|A0A395K273_9FLAO 7-carboxy-7-deazaguanine synthase OS=Polaribacter sp. WD7 OX=2269061 GN=queE PE =3 SV=1
MDKNTQDLVDKGIMLPLMEEFYTIQGEGAHTGTAAYFIRVGGCDVGCHWCDVKESWNADLHPPTLADTIVKNVKKYANTVVITGGEPLMWSMDYITNLLQKNHIKTHIETSGAYSFSGKWDWFCLSPKKTKLPIQENYREADELKMIIHNNSDFHFAEQEAVKVGKKCQLFLQPEWSKKEKMTEEIVDYVMKNPKWRISLQTHKYLNIP

SEQ ID NO: 32915 - protein, 209 aa, Polaribacter sp.
  misc_feature (1)..(209): tr|A0A1Y0M4D3|A0A1Y0M4D3_9FLAO 7-carboxy-7-deazaguanine synthase OS=Polaribacter sp. SA4-10 OX=754397 GN=queE PE=3 SV=1
MDNKTRNLVDKGIMLPLMEEFYTIQGEGAHTGTAAYFIRVGGCDVGCHWCDVKESWNADLHPPTLTETIVDNVKKYATTVVITGGEPLMWSMDYITNLLQENNIKTHIETSGAYSFSGKWDWFCLSPKKNKLPLDEVYREANELKMIIHNQSDFIFAEEQAAKVGEKCQLFLQPEWSKKEKMTAQIVGYVMENPKWKISLQTHKYLNIP

SEQ ID NO: 32916 - protein, 209 aa, Polaribacter vadi
  misc_feature (1)..(209): tr|A0A1B8TZS2|A0A1B8TZS2_9FLAO 7-carboxy-7-deazaguanine synthase OS=Polaribacter vadi OX=1774273 GN=queE PE=3 SV=1
MDKNTQNLVDKGIMLPLMEEFYTIQGEGSHTGTAAYFIRVGGCDVGCHWCDVKESWNADLHPPTLADTIVENVKKFAKTVVITGGEPLMWSMDYITELLQKNYIKTHIETSGAYSFSGKWDWFCLSPKKTKLPLEENYREADELKMIIHNQSDFIFAEEQAAKVGKKCQLFLQPEWSKKEKMTEQIVEYVMKNPKWKISLQTHKYLNIP

SEQ ID NO: 32917 - protein, 211 aa, Polaromonas naphthalenivorans
  misc_feature (1)..(211): tr|A1VL34|A1VL34_POLNA 7-carboxy-7-deazaguanine synthas e OS=Polaromonas naphthalenivorans (strain CJ2) OX=3650 44 GN=queE PE=3 SV=1
MSYQVKEIFYTLQGEGSHAGRPAIFCRFAGCNLWSGREPDRATAVCRFCDTDFVGTDGTLGGKFKNAEALAGCIEAQWPAGDSAHRFVVMTGGEPLLQVDGALIAALHARGFVIAVETNGTIAAPPGIDWICVSPKAGAPWIQREGHELKVVWPQPALDWAELEAARFTHRYLQPMDNPAWRNNTEACIALCLENPAWRLSLQTHKITGIR

SEQ ID NO: 32918 - protein, 210 aa, Polaromonas sp.
  misc_feature (1)..(210): tr|A0A1S8FCD9|A0A1S8FCD9_9BURK 7-carboxy-7-deazaguanine synthase OS=Polaromonas sp. A23 OX=1944133 GN=queE PE= 3 SV=1
MSYQVKEIFYTLQGEGGNAGRPAVFCRFAGCNLWSGREQDRATAVCRFCDTDFVGTDGTLGGKFADAESLARQIEALWPASAGHRLVVMTGGEPLLQLDAALIAALHARSFEIAVETNGSIAAPAGIDWLCVSPKAGAPWVQREGQELKLVWPQPGFDLPELEAANFSQRYLQPMDNAQRADNTQACIALCMQRPAWRLSLQTHKITGIR

SEQ ID NO: 32919 - protein, 211 aa, Polaromonas sp.
  misc_feature (1)..(211): tr|A0A068YQB0|A0A068YQB0_9BURK 7-carboxy-7-deazaguanine synthase OS=Polaromonas sp. CG9_12 OX=1504672 GN=queE PE=3 SV=1
MGYQVKEIFYTLQGEGSHAGRPAVFCRFAGCNLWSGREQDRATAVCRFCDTDFVGTDGTLGGKFRDADALAGQIEAQWPVGDSAHRFVVMTGGEPLLQVDGALIEALHARGFQIAVETNGTIAAPPGIDWVCVSPKAGAPWVQREGDELKVVWPQPALDWAELQAARFTHRYLQPMDNPDRLRNTEACIALCLAQPAWRLSLQTHKITGIR

SEQ ID NO: 32920 - protein, 210 aa, [Polyangium] brachysporum
  misc_feature (1)..(210): tr|A0A0G3BBI5|A0A0G3BBI5_9BURK 7-carboxy-7-deazaguanine synthase OS=[Polyangium] brachysporum OX=413882 GN=que E PE=3 SV=1
MAYQVKEIFYTLQGEGANAGRPAVFCRFAGCNLWSGREADRASAVCRFCDTDFVGTDGTFGGRYADAAALAAAVAGQWTGRGGRRLVVLTGGEPLLQVDTALIDALHEAGFEIAIETNGSIAAPEGIDWICVSPKAGAPLHQTRGQELKVVVPQPGLDLDALATLPFEHRFLQAMDGPDRVRNTEWAVQHCLTDPRWRLSVQTHKVLNIR

SEQ ID NO: 32921 - protein, 217 aa, Polyangium fumosum
  misc_feature (1)..(217): tr|A0A4U1J8Q5|A0A4U1J8Q5_9DELT 7-carboxy-7-deazaguanine synthase OS=Polyangium fumosum OX=889272 GN=queE PE=3 SV=1
MKEDSLVIHEIYSSIQGESTFAGLPCTFVRLTGCNLRCAWCDTTQAFYGGKRMPRSEVREKALAFGTPLVELTGGEPLLQPGAIPLLQELCDAGRTVLVETSGEADISRVDPRVHKIMDLKAPGSGETHRNRWSNLTHITPRDEIKFVLSDRVDYEWMRSVIHERELAQLGCTLLASAVWGKLSPKDLVAWVLEDALLVRVQVQLHKVIWGADTQGV

SEQ ID NO: 32922 - protein, 217 aa, Polyangium sp.
  misc_feature (1)..(217): tr|A0A4U1HA83|A0A4U1HA83_9DELT 7-carboxy-7-deazaguanine synthase OS=Polyangium sp. SDU3-1 OX=2567896 GN=queE P E=3 SV=1
MKEDSLVVHEIYASIQGESTFAGLPCTFVRLTGCNLRCAWCDTTQAFKGGKRMRREDVRERALSFNTPLVELTGGEPLLQPGAIPLLAELCDAGRTVLVETSGEADVSRVDRRVHKIMDLKPPGSGESHRNRWSNLEHIGARDEIKFVLTDRRDYEWMRDTIAGRELGRLGCTLLASPVWGKLDPKNLVDWVLADGLLVRVQIQLHKVIWGAEAQGV

SEQ ID NO: 32923 - protein, 221 aa, Polycyclovorans sp.
  misc_feature (1)..(221): tr|A0A2E2J9L5|A0A2E2J9L5_9GAMM 7-carboxy-7-deazaguanine synthase OS=Polycyclovorans sp. OX=2024852 GN=queE PE= 3 SV=1
MSPASGEAGGRLKITEIFRSLQGESDSVGWPTVFVRLTGCPLRCHYCDTAYAFHGGAWKSLDEIVGTVRDLATRHVCVTGGEPLAQKPVLTLMTRLSDAGHAVSIETSGALDISGIDRRVRRVMDLKTPDSGEVARNRWENLSDLRMEDEVKFVICSRADYDWANQMIDQHRLLARTRVLYSPSADQLPARQLADWILEDRREVRFQTQLHKALWGATPGR

SEQ ID NO: 32924 - protein, 211 aa, Polymorphobacter sp.
  misc_feature (1)..(211): tr|A0A4Y9EQD0|A0A4Y9EQD0_9SPHN 7-carboxy-7-deazaguanine synthase OS=Polymorphobacter sp. DJ1R-1 OX=2511025 GN= queE PE=3 SV=1
MTYAVKELFLTLQGEGAQAGRRAVFLRFAGCNLWSGREADRATAVCRFCDTDFVGTGPDGGKFKTAQALADAAAASWGAAREHSLIVCTGGEPLLQLDAPLIDALHAHGFRIAVETNGTIAAPPGLDWICVSPKANAPLVQRSGQELKLVYPQAEPEAQPEAFTDLPFDHFFLQPMDGPDAAANTQAAIAYCLAHPRWRLGLQTHKLTGLR

SEQ ID NO: 32925 - protein, 217 aa, Polynucleobacter aenigmaticus
  misc_feature (1)..(217): tr|A0A254Q6L6|A0A254Q6L6_9BURK 7-carboxy-7-deazaguanine synthase OS=Polynucleobacter aenigmaticus OX=1743164 G N=queE PE=3 SV=1
MYTVKELFPTLQGEGAHTGRAAVFCRFAGCNLWSGREEDRSTAVCQFCDTDFVGSNGAGGGKFETAVLLADTIEEVWNSTSAGPQQRYVVFTGGEPLLQLDTALIDALHAKGFTVAIETNGTIKVPKGVDWVCISPKAGSDLLVLQADEIKVVIPQIGHSPIETLLARFEKMDYRNRFLQAMDGPNLQENMALAVRLCQKRPLWRLSVQTHKMIGIR

SEQ ID NO: 32926 - protein, 217 aa, Polynucleobacter asymbioticus
  misc_feature (1)..(217): tr|A0A1J0D6P8|A0A1J0D6P8_9BURK 7-carboxy-7-deazaguanine synthase OS=Polynucleobacter asymbioticus OX=576611 GN =queE PE=3 SV=1
MYTVKEIFPTLQGEGAHAGRAAVFCRFAGCNLWSGREEDRATAICQFCDTDFVGSDGLGGGKFETANDLANAIVLAWKSTSAGPQQRYVVFTGGEPLLQLDEVLIEVLHKKGFEVAIETNGTLKVPKGVDWVCVSPKAGAELIVLQANEMKLVVPQNGHESLEQLMGRFEKMDYRNRFLQPMDGPNLKSNTELAVGLCQKRPLWRLSIQSHKLIGIR

SEQ ID NO: 32927 - protein, 217 aa, Polynucleobacter asymbioticus
  misc_feature (1)..(217): tr|A4SYR8|A4SYR8_POLAQ 7-carboxy-7-deazaguanine synthas e OS=Polynucleobacter asymbioticus (strain DSM 18221 / CIP 109841 / QLW-P1DMWA-1) OX=312153 GN=queE PE=3 SV=1
MYTVKEIFPTLQGEGAHAGRAAVFCRFAGCNLWSGREEDRATAICQFCDTDFVGSDGLGGGKFETANDLANAIELAWKSTSAGPQQRYVVFTGGEPLLQLDEVLIEVLHKKGFEVAIETNGTLKVPKGVDWVCVSPKAGAELIVLQANEMKLVVPQNGHESLEQLMGRFEKMDYRNRFLQPMDGPNLKSNTELAVGLCQKRPLWRLSIQSHKLIGIR

SEQ ID NO: 32928 - protein, 218 aa, Polynucleobacter campilacus
  misc_feature (1)..(218): tr|A0A254PXA0|A0A254PXA0_9BURK 7-carboxy-7-deazaguanine synthase OS=Polynucleobacter campilacus OX=1743163 GN= queE PE=3 SV=1
MVYTVKELFPTLQGEGAHAGRAAVFCRFAGCNLWSGREEDRATATCKFCDTDFVGSDGDGGGKFETAQDLVNAIESSWTSTSAGPQQRYVVLTGGEPLLQLDEELIEKLHQKGFEIAIETNGTIKVPKGVDWVCVSPKAGSDLIVLQANELKLVIPQEGHDSLEKLLARFEKMDYRNRFLQPMDGANLKINTELAISLCQKRPLWRLSLQSHKLIGIR

SEQ ID NO: 32929 - protein, 217 aa, Polynucleobacter cosmopolitanus
  misc_feature (1)..(217): tr|A0A229FRF2|A0A229FRF2_9BURK 7-carboxy-7-deazaguanine synthase OS=Polynucleobacter cosmopolitanus OX=351345 GN=queE PE=3 SV=1
MTYSVKEIFLTLQGEGAHAGRAAVFCRFSGCNLWSGREEERASAVCQFCDTDFVGTDGEGGGKFESAELLAWAIDQMWGLGDPHHKYVVFTGGEPLLQLDDVLIEALHSHGFKIAIETNGTIRVPAGIDWICVSPKHGADLVQVQGDELKLVIPQAGHAGQLPQLLARFEKMSFKHHFLQALDGPNKEANTDLAIKICQSRPLWRLSTQTHKLLGIR

SEQ ID NO: 32930 - protein, 217 aa, Polynucleobacter duraquae
  misc_feature (1)..(217): tr|A0A0E3ZM08|A0A0E3ZM08_9BURK 7-carboxy-7-deazaguanine synthase OS=Polynucleobacter duraquae OX=1835254 GN=qu eE PE=3 SV=1
MYTVKELFPTLQGEGAHAGRAAVFCRFSGCNLWSGREEDRAAAVCQFCDTDFVGSDGAGGGKFETASLLADTIEDVWSSTSAGPQQRYVVFTGGEPLLQLDTALIDALHAKGFAIAIETNGTIKVPKGVDWVCVSPKAGSELIVLQADEMKLVIPQAGHASIETLLARFEKMDYRNRFLQAMDGPNLQENLALAVRLCQKRPLWRLSVQTHKIIGIR

SEQ ID NO: 32931 - protein, 218 aa, Polynucleobacter hirudinilacicola
  misc_feature (1)..(218): tr|A0A210RWX5|A0A210RWX5_9BURK 7-carboxy-7-deazaguanine synthase OS=Polynucleobacter hirudinilacicola OX=17431 66 GN=queE PE=3 SV=1
MVYTVKELFPTLQGEGTHTGRAAVFCRFAGCNLWSGREEDRATAICKFCDTDFVGSDGDGGGKFESAIDLANAIESAWKSTSAGPQQRYVVFTGGEPLLQLDDELIAKLHEKGFEIAIETNGTIKVPKGVDWVCVSPKAGSDLIVLQANELKLVIPQEGQDSLEKLLARFEKMDYRNRFLQPMDGPNLKTNTELAISLCQKRPLWRLSLQSHKLIGIR

SEQ ID NO: 32932 - protein, 217 aa, Polynucleobacter meluiroseus
  misc_feature (1)..(217): tr|A0A240E3B8|A0A240E3B8_9BURK 7-carboxy-7-deazaguanine synthase OS=Polynucleobacter meluiroseus OX=1938814 GN =queE PE=3 SV=1
MYTVKELFPTLQGEGAHAGRAAIFCRFAGCNLWSGREEDRATAVCQFCDTDFVGSDGAGGGKFENAELLANAIEDAWLSTGAGPQQRYVVFTGGEPLLQLDAALIEALHGKGFSIAIETNGTIKVPKGIDWVCVSPKAGSDLIVLQADEIKLVIPQSGHQALESLLARFEGMDYRNRFLQPMDGLTLKENTALAVRLCQKRPLWRLSVQAHKMIGIR

SEQ ID NO: 32933 - protein, 198 aa, Polynucleobacter necessarius
  misc_feature (1)..(198): tr|B1XTX4|B1XTX4_POLNS 7-carboxy-7-deazaguanine synthas e OS=Polynucleobacter necessarius subsp. necessarius (s train STIR1) OX=452638 GN=queE PE=3 SV=1
MYTVKEPFPILQGEGAHAGRAAVFCRFAGCNLWSGREEDRGAAICQFCDTDFVGSDGLGGGKFETANALADAIESSWRSTSAGPQQRYVVFTGGEPLLQLDDELIAALHQKGFAVAIETNGTIKIPKGIDWVCVSPKAGSELIVLQADELKLVVPQQDHSELEKIVARFEKMDYRNRFLQPMDGPGLKSNTELAVSLC

SEQ ID NO: 32934 - protein, 217 aa, Polynucleobacter paneuropaeus
  misc_feature (1)..(217): tr|A0A2Z4JT82|A0A2Z4JT82_9BURK 7-carboxy-7-deazaguanine synthase OS=Polynucleobacter paneuropaeus OX=2527775 G N=queE PE=3 SV=1
MYTIKELFPTLQGEGAHTGRAAVFCRFTGCNLWSGREEDRATAVCQFCDTDFVGFDGDGGGKFETAESLAAAIELAWLSTKAGPQQRYVVFTGGEPLLQLDKALIDALHHKAFEVAIETNGTLKVPAGVDWVCVSPKAGADLVVLQADEMKLVIPQVGHDNLENLLGRFEKMDYRNRFLQPMDGAQLAENTQLAIQLCQKRPLWRLSMQTHKIIGIR

SEQ ID NO: 32935 - protein, 218 aa, Polynucleobacter paneuropaeus
  misc_feature (1)..(218): tr|A0A2Z4JQ31|A0A2Z4JQ31_9BURK 7-carboxy-7-deazaguanine synthase OS=Polynucleobacter paneuropaeus OX=2527775 G N=queE PE=3 SV=1
MMYTVKELFPTLQGEGAHTGRAAVFCRFTGCNLWSGREEDRATAVCQFCDTDFVGFDGDGGGKFETAESLANAIELAWLSTKAGPQQRYVVFTGGEPLLQLDKALIDALHHKAFEVAIETNGTLKVPAGVDWVCVSPKAGADLVVLQADEMKLVIPQAGHDNLENLLGRFEKMDYRNRFLQPMDGAQLAENTQLAIQLCQKRPLWRLSVQTHKIIGIR

SEQ ID NO: 32936 - protein, 217 aa, Polynucleobacter sp.
  misc_feature (1)..(217): tr|A0A258X3Q1|A0A258X3Q1_9BURK 7-carboxy-7-deazaguanine synthase OS=Polynucleobacter sp. 16-46-70 OX=1970421 G N=queE PE=3 SV=1
MYTVKELFPTLQGEGAHAGRAAVFCRFAGCNLWSGREEDRATAVCQFCDTDFVGSDGDGGGKFATAPELADAIENAWTSTSAGPQQRYVVFTGGEPLLQLDAPLIDALHAKGFLIAIETNGTLKVPKGVDWVCVSPKAGSHLVVLQADEIKLVIPQQGHTAIEALLARFEKMDYRNRFLQAMDGPLQQKNLALAIRLCQKRPLWRLSLQTHKIVGIR

SEQ ID NO: 32937 - protein, 217 aa, Polynucleobacter sp.
  misc_feature (1)..(217): tr|A0A1G3CRD1|A0A1G3CRD1_9BURK 7-carboxy-7-deazaguanine synthase OS=Polynucleobacter sp. GWA2_45_21 OX=1801989 GN=queE PE=3 SV=1
MYTVKELFPTLQGEGAHAGRAAVFCRFAGCNLWSGREEDRATAVCQFCDTDFVGSDGVGGGKFETAPQLADAIEEVWTSTSAGPQQRYVVFTGGEPLLQLDTDLIDALHAKGFTVAIETNGTIKVPKGVDWVCVSPKTGSELIVLQADEIKLVIPQQGHVAIETLLARFEKMDYRNRFLQAMDGPNLQENLALAVRLCQKRPLWRLSVQTHKMIGIR

SEQ ID NO: 32938 - protein, 217 aa, Polynucleobacter sphagniphilus
  misc_feature (1)..(217): tr|A0A1R0HG18|A0A1R0HG18_9BURK 7-carboxy-7-deazaguanine synthase OS=Polynucleobacter sphagniphilus OX=1743169 GN=queE PE=3 SV=1
MYTVKELFPTLQGEGAHAGRAAVFCRFAGCNLWSGREEDRQTAICQFCDTDFVGSDGFGGGKFQTAQALADAIELSWKSTSAGPQQRYVVFTGGEPLLQIDQDLIEAVHAKGFSIAIETNGTIKVPKGIDWVCVSPKAGADLIVLQADEIKLVIPQAGHDALETLLARFEKMDYRNRFLQAMDGPNLKDNIQLAVRLCQKRPLWRLSVQTHKVIGIR

SEQ ID NO: 32939 - protein, 217 aa, Polynucleobacter victoriensis
  misc_feature (1)..(217): tr|A0A212T023|A0A212T023_9BURK 7-carboxy-7-deazaguanine synthase OS=Polynucleobacter victoriensis OX=2049319 G N=queE PE=3 SV=1
MTYSVKELFLTIQGEGAQTGRAAVFCRFSGCNLWTGREEDRSSAICQFCDTDFVGTDGDGGGKFETATQLASRINDTWGDGDPHHKYVVFTGGEPLLQLDKSLIDELHQLGFKIAIETNGTMRAPAGIDWICVSPKHGSDLLQVQGDELKLVIPQFGHEGKLPQLLARFEKMSFKHHFLQPLDGPNKAANTELAIKICQSRPLWRLSTQTHKILGIR

SEQ ID NO: 32940 - protein, 217 aa, Polynucleobacter wuianus
  misc_feature (1)..(217): tr|A0A191UE40|A0A191UE40_9BURK 7-carboxy-7-deazaguanine synthase OS=Polynucleobacter wuianus OX=1743168 GN=que E PE=3 SV=1
MYTVKELFPTLQGEGAHAGRAAVFCRFAGCNLWSGREEDRASAVCQFCDTDFVGSDGLGGGKFETPKDLADAIEAAWKSTSAGPQQRYVVFTGGEPLLQLDEELISALHQKGFEVAIETNGTIKVPKGVDWVCVSPKAGSDLIVLQANELKLVVPQAGHDSLEKLMARFEKMDYRNRFLQPMDGPMLKNNTELAVGLCQKRPLWRLSVQSHKLIGIR

SEQ ID NO: 32941 - protein, 238 aa, Pontibacillus chungwhensis
  misc_feature (1)..(238): tr|A0A0A2URT6|A0A0A2URT6_9BACI 7-carboxy-7-deazaguanine synthase OS=Pontibacillus chungwhensis BH030062 OX=138 5513 GN=queE PE=3 SV=1
MSKLPVLEIFGPTIQGEGMVVGRKTMFVRTAGCDYSCAWCDSAFTWDGSAKEDIRLLTAEEIFHELKQVGGGSFDHVTISGGNPGLLKHMGKLVDLLHENGCEVALETQGSKWQDWFTSIDDLTISPKPPSSMMKTDWQKLDDIIEQLDPQTTSLKVVVFDEEDLEYAKGVHKRYPGIPFFVQVGNDDTDEADDTKLMHHLLGKYEWLIEQVMASTELNRVRVLPQVHALLWGNRRGV

SEQ ID NO: 32942 - protein, 242 aa, Pontibacillus halophilus
  misc_feature (1)..(242): tr|A0A0A5IDP6|A0A0A5IDP6_9BACI 7-carboxy-7-deazaguanine synthase OS=Pontibacillus halophilus JSM 076056 = DSM 19796 OX=1385510 GN=queE PE=3 SV=1
MSSIPVLEIFGPTIQGEGMVVGRKTMFVRTAGCDYRCSWCDSAFTWDGSAKDDIRKLSAEDIYEELYTIGGDKFDHVTVSGGNPALLKDMGILVDLLHDKGCEVALETQGSRYQEWFTKIDDLTLSPKPPSSGMETNWVKLDGILHELEQAGRVDKASLKVVVFDEADLEYAKDVHARYPHVDFFLQVGNDDTEEQNDEVLMYKLLKKYEWLIERTMESDALNRVRVLPQVHALLWGNRRGV

SEQ ID NO: 32943 - protein, 243 aa, Pontibacillus marinus
  misc_feature (1)..(243): tr|A0A0A5GC15|A0A0A5GC15_9BACI 7-carboxy-7-deazaguanine synthase OS=Pontibacillus marinus BH030004 = DSM 16465 OX=1385511 GN=queE PE=3 SV=1
MSKLPVLEIFGPTIQGEGMVIGRKTMFVRTAGCDYRCSWCDSAFTWDGSAKDEIRKMSADDIFNELKELGGTRFNHVTISGGNPALLAGMDALVEQLHDHSIEVALETQGSKWQDWMGNIDDLTISPKPPSSMMKTDFGKLDAIINELRSQDRVEKHTSLKVVVFNDEDFEYAVHVHERYPDVPFFLQVGNDDTSTADDDNLTRDLLNKYEWLINKTMEDARMNNVRVLPQLHTFVWGNSRGV

SEQ ID NO: 32944 - protein, 242 aa, Pontibacillus yanchengensis
  misc_feature (1)..(242): tr|A0A0A2TRY3|A0A0A2TRY3_9BACI 7-carboxy-7-deazaguanine synthase OS=Pontibacillus yanchengensis Y32 OX=1385514 GN=queE PE=3 SV=1
MNKFPVLEIFGPTIQGEGMVVGRKTMFVRTAGCDYSCAWCDSAFTWDGSAKDEIQKLTAPEIINALEKNGGDCFDHVTISGGNPALLKHLNELIDRLHDKGCEVALETQGSKWQEWFLTIDDLTISPKPPSSGMSTNWEVLDGIIAKLEGAGRTSHTSLKVVIFNEEDLEYAKYVHKRYPNLAFFVQVGNEALDESDDQNLALHLLNQYEWLIDRVMHSRELNHVRVLPQVHALLWGNRRGV

SEQ ID NO: 32945 - protein, 217 aa, Pontibacter actiniarum
  misc_feature (1)..(217): tr|A0A1X9YQU2|A0A1X9YQU2_9BACT 7-carboxy-7-deazaguanine synthase OS=Pontibacter actiniarum OX=323450 GN=queE P E=3 SV=1
MEELKTVKTASIHQVPKDGSRLPLMEAFYTIQGEGGNTGTAAYFIRLGGCDVGCHWCDVKESWDAELHPLTPVADIVAAAAAYPGKAVVITGGEPLLYNLKPLTEQLQAQGIKTYIETSGAYPVSGSWDWICLSPKKFKAPDATVYPFANELKVIIFNKSDFKWAEEHAALVGPHCQLYLQPEWSKASEITPLIVEYVKNNPQWRVSLQTHKYMDIP

SEQ ID NO: 32946 - protein, 224 aa, Pontibacter akesuensis
  misc_feature (1)..(224): tr|A0A1I7FU49|A0A1I7FU49_9BACT 7-carboxy-7-deazaguanine synthase OS=Pontibacter akesuensis OX=388950 GN=queE P E=3 SV=1
MGEDESTLEEVKTTNTASIHQVPKDGSRLPLMEAFYTIQGEGGNTGVASFFIRLGGCDVGCHWCDVKESWDAEQHPLTEINAIVAAAEAYPGKNIVITGGEPLLYNLGPLTAHLQQQGFKNCIETSGAYPLSGTWDWICLSPKKFKAPHSSVYPFAHELKVVIFNKSDFKWAEEHAAQVGAHCQLYLQPEWSRATEMTPLIVEYVKNNPKWRVSLQTHKYMDIP

SEQ ID NO: 32947 - protein, 224 aa, Pontibacter chinhatensis
  misc_feature (1)..(224): tr|A0A1I2MFZ1|A0A1I2MFZ1_9BACT 7-carboxy-7-deazaguanine synthase OS=Pontibacter chinhatensis OX=1436961 GN=que E PE=3 SV=1
MALDFTALEELNVIKTASIHQVPKDGSELPLMEAFYTIQGEGGNTGTAAYFIRLGGCDVGCHWCDVKESWDAEAHPLTPIEAIVETAAAYPGKAVVITGGEPLLYNLGPLTEQLQARGIKTYIETSGAYPISGSWDWICLSPKKFKQPDPSVYPFAHELKVIIFNKSDFKWAEEHAASVGEHCRLYLQPEWSKAAEMTPLIVEYVKNNPKWRVSLQTHKYMDIP

SEQ ID NO: 32948 - protein, 215 aa, Pontibacter diazotrophicus
  misc_feature (1)..(215): tr|A0A3D8LHL7|A0A3D8LHL7_9BACT 7-carboxy-7-deazaguanine synthase OS=Pontibacter diazotrophicus OX=1400979 GN=q ueE PE=3 SV=1
MTKAYKTASIHTVPKDGSELPLMEAFYTIQGEGANSGTAAYFIRLGGCDVGCHWCDVKESWDAEQHPLTKTEEIVTMADAFPGKAVVITGGEPLLYNMQPLTEQLQARGIQTLIETSGAYPISGVWDWVCLSPKKFKAPDATVYPFANELKVIIFNRSDFKWAEEHAALVGEHCKLYLQPEWSKAHDIMPLIVEYVKENPKWRVSLQTHKYMDIP

SEQ ID NO: 32949 - protein, 217 aa, Pontibacter indicus
  misc_feature (1)..(217): tr|A0A1R3WVI8|A0A1R3WVI8_9BACT 7-carboxy-7-deazaguanine synthase OS=Pontibacter indicus OX=1317125 GN=queE PE= 3 SV=1
METTKAYKTASIHTVPKDGSELPLMEAFYTIQGEGGNTGTAAYFIRLGGCDVGCHWCDVKESWDAEQHPLTPIPEIVATAKTFPGKTVVVTGGEPLLYNLNPLTAGLQEAGIRTMIETSGAYPLSGYWDWVCLSPKKFKAPDASVYPFADELKVIIFNKSDFAWAEEHAARVGADCKLYLQPEWSKATQLMPLIVEYVKNNPQWRVSLQTHKYMDIP

SEQ ID NO: 32950 - protein, 217 aa, Pontibacter korlensis
  misc_feature (1)..(217): tr|A0A0E3ZIC5|A0A0E3ZIC5_9BACT 7-carboxy-7-deazaguanine synthase OS=Pontibacter korlensis OX=400092 GN=queE PE =3 SV=1
MEETKTFKTASIHQVPKDGSLLPLMEAFYTIQGEGGNTGTAAYFIRLGGCDVGCHWCDVKESWDAEQHPLTPIEDIVETAAAYPGKAVVITGGEPLLYNLAPLTEQLQARGIKTFIESSGAYAVSGNWDWFCLSPKKFKQPDPSVYPFADELKVVIFNKSDFKWAEEHAAKVGESCSLYLQPEWSKAQEITPLIVEYVKNNPKWRVSLQTHKYMDIP

SEQ ID NO: 32951 - protein, 217 aa, Pontibacter lucknowensis
  misc_feature (1)..(217): tr|A0A1N6WHU1|A0A1N6WHU1_9BACT 7-carboxy-7-deazaguanine synthase OS=Pontibacter lucknowensis OX=1077936 GN=que E PE=3 SV=1
METTKAYKTASIHSVPKDGSELPLMEAFYTIQGEGGNTGTAAYFIRLGGCDVGCHWCDVKESWDAEQHPLTPIGEIVTTAKTFPGKTVVVTGGEPLLYNLNPLTAGLQEAGIRTMIETSGAYPLSGYWDWVCLSPKKFKAPDASVYPFADELKVIIFNKSDFAWAEEHAARVGAECKLYLQPEWSKAGQLMPLIVEYVKNNPQWRVSLQTHKYMDIP

SEQ ID NO: 32952 - protein, 224 aa, Pontibacter mucosus
  misc_feature (1)..(224): tr|A0A2T5YM40|A0A2T5YM40_9BACT 7-carboxy-7-deazaguanine synthase OS=Pontibacter mucosus OX=1649266 GN=queE PE= 3 SV=1
MALDFTALEELNVIKTASIHQVPKDGSELPLMEAFYTIQGEGGNTGTAAYFIRLGGCDVGCHWCDVKESWDAEAHPLTPIESIVETAAAYPGKAVVITGGEPLLYNLGPLTEQLQARGIKTYIETSGAYPISGSWDWVCLSPKKFKQPDPSVYPFAHELKVIIFNKSDFKWAEEHAASVGEHCKLYLQPEWSKAAEMTPLIVEYVKNNPKWRVSLQTHKYMDIP

SEQ ID NO: 32953 - protein, 217 aa, Pontibacter ramchanderi
  misc_feature (1)..(217): tr|A0A2N3V2B2|A0A2N3V2B2_9BACT 7-carboxy-7-deazaguanine synthase OS=Pontibacter ramchanderi OX=1179743 GN=queE PE=3 SV=1
METTKAYKTASIHTVPKDGSELPLMEAFYTIQGEGGNTGTAAYFIRLGGCDVGCHWCDVKESWDAEQHPLTPIPDIVATAKTFPGKTVVVTGGEPLLYNLGPLTAGLQEEGIRTMIETSGAYPLIGHWDWVCLSPKKFKAPDASVYPFADELKVIIFNKSDFAWAEEHAARVGANCKLYLQPEWSKATQLMPLIVEYVKNNPQWRVSLQTHKYMDIP

SEQ ID NO: 32954 - protein, 217 aa, Pontibacter sp.
  misc_feature (1)..(217): tr|A0A364RFM1|A0A364RFM1_9BACT 7-carboxy-7-deazaguanine synthase OS=Pontibacter sp. 2b14 OX=2080288 GN=queE PE =3 SV=1
MEVTKAYKTASIHQVPKDGSELPLMEAFYTIQGEGANTGTAAYFIRLGGCDVGCHWCDVKESWDAESHPLTPTSEIVSMASPFPGKTVVITGGEPLLYNLLPLTSQLQQQGIRTMIETSGAHPVSGQWDWICLSPKKFKAPDLSVYPVADELKVIIFNKSDFAWAEEHAARVGEKCKLYLQPEWSKATELTPLIVEYVKNNPQWRVSLQTHKYMDIP

SEQ ID NO: 32955 - protein, 217 aa, Pontibacter sp.
  misc_feature (1)..(217): tr|A0A5C8KB59|A0A5C8KB59_9BACT 7-carboxy-7-deazaguanine synthase OS=Pontibacter sp. GY10130 OX=2603253 GN=queE PE=3 SV=1
MDSIKPLKTASIHQVPKDGSSLPLMEAFYTIQGEGANTGCAAYFIRLGGCDVGCHWCDVKESWDAELHPLTQVEEIVRTAEQFPGKAVVVTGGEPLLYNLNPLTSLLQEQGIQTFIETSGAYPLSGYWDWVCLSPKKFKAPDASVYPFADELKVIIFNKSDFAWAEEHAAKVGLKTRLYLQPEWSKAEQLMPQIVDYVKNNPKWRVSLQTHKYMDIP

SEQ ID NO: 32956 - protein, 193 aa, Pontibacter ummariensis
  misc_feature (1)..(193): tr|A0A239F8D9|A0A239F8D9_9BACT 7-carboxy-7-deazaguanine synthase OS=Pontibacter ummariensis OX=1610492 GN=queE PE=3 SV=1
MEAFYTIQGEGANTGTAAYFIRLGGCDVGCHWCDVKESWDAEQHPLTLTEDIVSAANSYPGKTVVITGGEPLLYNLAPLTSQLQQEGIKTLVETSGAYPVSGNWDWVCLSPKKFKAPDASVYPFADELKVVIFNKSDFKWAEAHAAQVGEHCKLYLQPEWSKAADLMPLIVEYVKQNPKWRVSLQTHKYMDIP

SEQ ID NO: 32957 - protein, 193 aa, Pontibacter virosus
  misc_feature (1)..(193): tr|A0A2U1AUV7|A0A2U1AUV7_9BACT 7-carboxy-7-deazaguanine synthase OS=Pontibacter virosus OX=1765052 GN=queE PE= 3 SV=1
MEAFYTIQGEGGNTGTAAYFIRLGGCDVGCHWCDVKESWDAELHPLTPINEIVETAKTFPGKTVVVTGGEPLLYNLHPLTAGLQDAGIRTMIETSGAYPLSGHWDWVCLSPKKFKAPDASVYPFADELKVIIFNKSDFAWAEEHAARVGATCKLYLQPEWSKAGQLMPLIVEYVKNNPQWRVSLQTHKYMDIP

SEQ ID NO: 32958 - protein, 210 aa, Ponticaulis sp.
  misc_feature (1)..(210): tr|A0A2E0U3H7|A0A2E0U3H7_9RHOB 7-carboxy-7-deazaguanine synthase OS=Ponticaulis sp. OX=2020902 GN=queE PE=3 SV =1
MAYAVKEIFKTLQGEGAHAGRTVVFCRFSGCNLWSGRDQDRASAQCSFCDTDFVGVDGTGGGRFADAELLAQTIANEWAGSNESRYVVLTGGEPLLQVDAPLVDALHRHGFEIGVETNGTRPAPEGIDWICVSPKGENELVLRSGNELKLVFPQAGAPPERFEDLEFEHFFLQPMDCAEAGQCLDDTIHYCLENPRWRLSLQSHKLVGIR

SEQ ID NO: 32959 - protein, 251 aa, Ponticaulis sp.
  misc_feature (1)..(251): tr|A0A2E0U7X6|A0A2E0U7X6_9RHOB 7-carboxy-7-deazaguanine synthase OS=Ponticaulis sp. OX=2020902 GN=queE PE=3 SV =1
MADDTLWLAVDDQGQPEIFASVQGEGPSLGSPRTFIRLSGCNLHCVWCDTAYTWNWEGTAFDHETGRKFAPENERIVQTIDEIVSRVADTSPSGIVITGGEPLMQKGRLAPLITAIKEACGPVWVEIETNGSVLPTRDLIPLINQFNVSPKLSHSGNDMAVAQREQSLTAFAALPSSWFKFVISEPGDVEEVLRISDRYKIAHDRVFLMPLGTSSKDIRDRSGWIIDKCLKHGFRFTDRLHIHIFGDTRGT

SEQ ID NO: 32960 - protein, 244 aa, Porphyrobacter dokdonensis
  misc_feature (1)..(244): tr|A0A1A7BFP1|A0A1A7BFP1_9SPHN 7-carboxy-7-deazaguanine synthase OS=Porphyrobacter dokdonensis DSW-74 OX=13003 49 GN=queE PE=3 SV=1
MNLVLATDDNAESEIFASLQGEGPSMGVPVAFVRLSRCNLACTWCDTAYTWRFEGDNRPHRDGIAYDRKANQVTLSPQETAARIAALGQNRLVITGGEPLLQAGALAEMLAHLPDMAVEIETNGTVAPPARLDIRVDQYNVSPKLAHSGNPAELALIPERLDAWATDPRAFLKFVIAAPEDVDEVVALHRRYRFRPERVFLMAEGTDSERLRERQAWLSDLCLKHGFRMSDRMHIHLYGDTRGT

SEQ ID NO: 32961 - protein, 243 aa, Porphyrobacter mercurialis
  misc_feature (1)..(243): tr|A0A0B2BZ57|A0A0B2BZ57_9SPHN 7-carboxy-7-deazaguanine synthase OS=Porphyrobacter mercurialis OX=1572751 GN=q ueE PE=3 SV=1
MLVLATTTPGEPEIFASLQGEGPSIGRSVAFVRLSRCNLACRWCDTPYTWHFSGDNRPHRDGVTHDRAANQLTLSEEEVARRIAAFGKPRLVVTGGEPLLQGKALARMLAHLPDMAVEVETNGTIAPHADLDPLIGQYNVSPKLAHSGNTADLALPPERLAQWAAEPRAIFKFVIAEPADLEEVLALAFRYAIPNQRIWLMAEGTDTVTLATRQRWLAELCLQHDMNLSPRLHIALYGDTRGT

SEQ ID NO: 32962 - protein, 244 aa, Porphyrobacter neustonensis
  misc_feature (1)..(244): tr|A0A192D046|A0A192D046_9SPHN 7-carboxy-7-deazaguanine synthase OS=Porphyrobacter neustonensis OX=1112 GN=que E PE=3 SV=1
MNLTLATDDTGGPEIFASLQGEGPSAGMPVAFVRLSRCNLACTWCDTAYTWHFEGDNRPHRDCVTFDRKANQVTLSPGETAARIAALGQNRLVITGGEPLLQAGALAEMLAHLPDHTVEIETNGTVAPPARLDIRVDQYNVSPKLSHSGNPADLALLPERLDAWAAEPRAFLKFVVAAPADVDEVLALQRRYRFRPERVFLMAEGTDSATQRERQAWLSDLCLKHGFRMSDRLHIHLYGDTRGT

SEQ ID NO: 32963 - protein, 244 aa, Porphyrobacter sanguineus
  misc_feature (1)..(244): tr|A0A1M7RYU2|A0A1M7RYU2_9SPHN 7-carboxy-7-deazaguanine synthase OS=Porphyrobacter sanguineus OX=198312 GN=que E PE=3 SV=1
MNLTLATDDTGGPEIFASLQGEGPSAGVPVGFVRLSRCNLACTWCDTAYTWRFEGDNRPHRDGIVFDRRANQVTLSPAEVAARIAALGQNRLVITGGEPLLQAGALAEMLEHLPDIAVEIETNGTVAPPVRLDIRVDQYNVSPKLAHSGNPGDLALIPERLDAWAADPRAFMKFVIAAPEDVAEVLELQRRYRFRPERVFLMAEGTDSAAQRERQAWLSGLCLQHGFRMSDRLHIHLYGDTRGT

SEQ ID NO: 32964 - protein, 244 aa, Porphyrobacter sp.
  misc_feature (1)..(244): tr|A0A0N1AYM3|A0A0N1AYM3_9SPHN 7-carboxy-7-deazaguanine synthase OS=Porphyrobacter sp. AAP60 OX=1523423 GN=que E PE=3 SV=1
MNLTLATDDTGGPEIFASLQGEGPSQGVPVAFVRLSRCNLACVWCDTAYTWHFEGDNRPHRDGTTFERRANQVTLSPAETATRIAALGQNRLVITGGEPLLQAGALAEMLAHLPDMSVEIETNGTVAPPARLDIRVDQYNVSPKLAHSGNPADLALIPERLDAWATDPRAFLKFVIAAPEDVAEVLELQRRYRFRPERVFLMAEGTSTAAQRERQAWLSDLCLQHGFRMSDRLHIHLYGDTRGT

SEQ ID NO: 32965 - protein, 244 aa, Porphyrobacter sp.
  misc_feature (1)..(244): tr|A0A2N4WS02|A0A2N4WS02_9SPHN 7-carboxy-7-deazaguanine synthase OS=Porphyrobacter sp. TH134 OX=2067450 GN=que E PE=3 SV=1
MNLTLATDDNGGPEIFASLQGEGPSAGMPVAFVRLSRCNLACTWCDTAYTWRFEGDNRPHRDGIAFDRRANQVTLTPAETAERIAALGQKRLVITGGEPLLQAGALAEMLAYLPDISVEIETNGTVAPPARLDVRVDQYNVSPKLAHSGNPADLALIPERLDAWATDPRAFLKFVIAAPDDVAEVLALQQRYRFRPKRVFLMAEGTDSAAQRERQVWLSDLCLKHGFRMSDRLHIHLYGDTRGT

SEQ ID NO: 32966 - protein, 193 aa, Porphyromonadaceae bacterium
  misc_feature (1)..(193): tr|A0A353QCE9|A0A353QCE9_9PORP 7-carboxy-7-deazaguanine synthase OS=Porphyromonadaceae bacterium OX=2049046 GN =queE PE=3 SV=1
MNLTVNELFYSLQGEGGRAGEASIFIRLTKCNLACSFCDTDFETGTKMSLDEIAAHIRPFAAKWIVWTGGEPTLQLTDEKVAFFKEKGYRQAIETNGTRRIPAGIDYITCSPKLHFERVKTIIPQADELRFPMQKGDPLPDISILPVAKRYFLSPIFDGQHVIEENVAYCVSLIKENPIWSLSLQIHKLIGIP

SEQ ID NO: 32967 - protein, 193 aa, Porphyromonadaceae bacterium; identical to SEQ ID NO: 32725
  misc_feature (1)..(193): tr|A0A1I7HRL9|A0A1I7HRL9_9PORP 7-carboxy-7-deazaguanine synthase OS=Porphyromonadaceae bacterium KHP3R9 OX=185 5398 GN=queE PE=3 SV=1

SEQ ID NO: 32968 - protein, 201 aa, Porphyromonas asaccharolytica
  misc_feature (1)..(201): tr|F4KJI7|F4KJI7_PORAD 7-carboxy-7-deazaguanine synthas e OS=Porphyromonas asaccharolytica (strain ATCC 25260 / DSM 20707 / BCRC 10618 / JCM 6326 / LMG 13178 / VPI 41 98) OX=879243 GN=queE PE=3 SV=1
MQPLPVNEIFYSLQGEGGQMGRAMLFVRLSGCNLTCDYCDTDFAGHQLMTASEILAQLGSYPCRDILWTGGEPTLALREEHIAFFHEHGYRQSIETNGTRPMPQGLDYVTCSPKPEAISGLRERFVDNYPDGIDEVRWPLQLGAPLPPPIEQLAEARRYYVSPVEETGVEMSAVVARCMDFVLAHPEWRLSVQLHKLLGFR

SEQ ID NO: 32969 - protein, 197 aa, Porphyromonas catoniae
  misc_feature (1)..(197): tr|L1NET0|L1NET0_9PORP 7-carboxy-7-deazaguanine synthas e OS=Porphyromonas catoniae F0037 OX=1127696 GN=queE PE =3 SV=1
MLVNEIFYSLQGEGLNMGRASIFIRLSKCNLSCSFCDTEFESGVEMTLEEVRDRIAQWPGKRIIWTGGEPTLQLTEEIVAYFKALGYHQSIETNGTRRPPRGLDYITCSPKKEAMCLLSRNFPDGVNEFRFPIGKDIDLPPNISDLPPAEAYLLSPIFVGETQGDVDSSAVELCVDYILKHPEWRLSIQMHKLIHIP

SEQ ID NO: 32970 - protein, 197 aa, Porphyromonas catoniae
  misc_feature (1)..(197): tr|Z4WWB4|Z4WWB4_9PORP 7-carboxy-7-deazaguanine synthas e OS=Porphyromonas catoniae ATCC 51270 OX=887901 GN=que E PE=3 SV=1
MLVNEIFYSLQGEGLNMGRASIFIRLSKCNLSCSFCDTEFESGVEMTLEEVRDRIAQWPGKRIIWTGGEPTLQLTEEIVAYFKALGYHQSIETNGTRRPPRGLDYITCSPKREAMRLLSHNFPDGVNEFRFPIGKDIDLPPNISDLPPAEAYLLSPIFVGETQGDVDSSAVELCVDYILKHPEWRLSIQMHKLIHIP

SEQ ID NO: 32971 - protein, 200 aa, Porphyromonas circumdentaria
  misc_feature (1)..(200): tr|A0A1T4Q273|A0A1T4Q273_9PORP 7-carboxy-7-deazaguanine synthase OS=Porphyromonas circumdentaria OX=29524 GN=q ueE PE=3 SV=1
MKLLINEIFYSLQGEGAQMGFPMIFIRFSMCNLRCSYCDTDFKEYTEMTLEELYQAISSYPARNILWTGGEPTLSLTEEIVEYFHQKGYRQSIETNGTHPVPQNLDYITCSPKPEAFHLLRKNFPNGVSEWRFPFGPETPLPPNIEELPKALNYFLSPIFSPEEGTITPYPIALNACIDYIKEHPEWRLSIQLHKLIGIQ

SEQ ID NO: 32972 - protein, 201 aa, Porphyromonas crevioricanis
  misc_feature (1)..(201): tr|A0A2X4SEP0|A0A2X4SEP0_9PORP 7-carboxy-7-deazaguanine synthase OS=Porphyromonas crevioricanis OX=393921 GN=q ueE PE=3 SV=1
MKPLLVKEIFYSLQGEGGRSGRPSVFVRLSGCNLDCSFCDTDFAHGRPMQVHEIAQAIATYPSREMIWTGGEPSLQLTDEHIAYFAVLGYYQAIETNGTHTLPQGLDYISCSPKHRDWSLLARIFPKGVSEWRFLIEATGELPPHESLLPAAHHYCVSPVFQTQPKGDMADPQALKRCIEYCLAHPRWQLSIQLHKLIGIA

SEQ ID NO: 32973 - protein, 201 aa, Porphyromonas crevioricanis
  misc_feature (1)..(201): tr|A0A0A2FPA0|A0A0A2FPA0_9PORP 7-carboxy-7-deazaguanine synthase OS=Porphyromonas crevioricanis OX=393921 GN=q ueE PE=3 SV=1
MKPLLVKEIFYSLQGEGGRSGRPSIFVRLSGCNLDCSFCDTDFAHGRPMQVHEIAQAIATYPSREMIWTGGEPSLQLTDEHIAYFAVLGYYQAIETNGTHTLPQGLDYISCSPKHRDWSLLARIFPKGVSEWRFLIEATGELPPHESLLPAAHHYCVSPVFQTQPKGDMADPQALKRCIEYCLAHPRWQLSIQLHKLIGIA

SEQ ID NO: 32974 - protein, 212 aa, Porphyromonas endodontalis
  misc_feature (1)..(212): tr|C3JCW4|C3JCW4_POREA 7-carboxy-7-deazaguanine synthas e OS=Porphyromonas endodontalis (strain ATCC 35406 / BC RC 14492 / JCM 8526 / NCTC 13058 / HG 370) OX=553175 GN =queE PE=3 SV=1
MPCVLPPIAMLDHLELPVNEIFYSLQGEGAQVGLPMVFIRLSSCNLRCSYCDTDFSSFTPMSLEAIVAELASFPTHNILWTGGEPTLHLTEEVVGFFHQKGYRQSIETNGTRPVPRGIDYITCSAKPESFPHLWENFPHGVDEWRFPFGASAPLPPAIESLPPARTYCLSPIYEPGEAILQPPHALEECIEYIKQHPTWRLSIQLHKIIGIQ

SEQ ID NO: 32975 - protein, 197 aa, Porphyromonas gingivalis
  misc_feature (1)..(197): tr|A0A212GB51|A0A212GB51_PORGN 7-carboxy-7-deazaguanine synthase OS=Porphyromonas gingivalis SJD12 OX=1297567 GN=queE PE=3 SV=1
MLVNEIFHSLQGEGANTGRAAVFVRLAGCNLACPYCDTDFAQGKKKSLEEIARSIEHYPTRFLIWTGGEPTLQLTEEATAYFHRLGYYQAIETNGTRPVPKGIDYISCSPKPEAIGKLKENFPDGVGEFRFPLGSDTPLPPPIDELPTAQHYLVSPIFAGDDAMEPDPSAITRCVEFVKAFPAWRLSIQMHKLIHIP

SEQ ID NO: 32976 - protein, 197 aa, Porphyromonas gingivalis
  misc_feature (1)..(197): tr|W1R7U1|W1R7U1_PORGN 7-carboxy-7-deazaguanine synthas e OS=Porphyromonas gingivalis SJD2 OX=1211023 GN=queE P E=3 SV=1
MLVNEIFHSLQGEGANTGRAAVFVRLAGCNLACPYCDTDFAQGKKMSLEEIARSIEHYPTRFLIWTGGEPTLQLTEEATAYFHRLGYYQAIETNGTRPVPKGIDYISCSPKPEAIGKLKENFPDGVGEFRFPLGSDTPLPPPIDELPTAQHYLVSPIFAGDDAMEPDPSAITRCVEFVKAFPAWRLSIQMHKLIHIP

SEQ ID NO: 32977 - protein, 200 aa, Porphyromonas gingivicanis
  misc_feature (1)..(200): tr|A0A0A2G6U9|A0A0A2G6U9_9PORP 7-carboxy-7-deazaguanine synthase OS=Porphyromonas gingivicanis OX=266762 GN=qu eE PE=3 SV=1
MKLHINEIFYSLQGEGAQMGLPMIFIRFSGCNLRCSYCDTDFEDYTEMTLDELSTAISVYPAHNILWTGGEPSLYLTEEIVDYFHKRGYRQSIETNGTHPVPTNLDYITCSPKPESLSLLHRNFPNGVNEWRFPFGTEAPLPPRINELPKAQNYFLSPIFSTDENTITQRPLALSACIEYIKQHPQWRLSIQLHKLIGIA

SEQ ID NO: 32978 - protein, 197 aa, Porphyromonas gulae
  misc_feature (1)..(197): tr|A0A0A2EEF3|A0A0A2EEF3_9PORP 7-carboxy-7-deazaguanine synthase OS=Porphyromonas gulae OX=111105 GN=queE PE=3 SV=1
MLVNEIFHSLQGEGANTGRAAVFVRLAGCNLVCPYCDTDFIQGKKMSLEEIARSIEHYPTRFLIWTGGEPTLQLTEEATAYFHRLGYYQAIETNGTRPVPKGIDYISCSPKPEAIGKLKENFPDGVGEFRFPLGSDTPLPPPIDELPTAQHYLVSPIFTGDDAMEPDPFAITRCVEFVKAFPAWRLSIQMHKLIHIP

SEQ ID NO: 32979 - protein, 202 aa, Porphyromonas levii
  misc_feature (1)..(202): tr|A0A4Y8WSD1|A0A4Y8WSD1_9PORP 7-carboxy-7-deazaguanine synthase OS=Porphyromonas levii OX=28114 GN=queE PE=3 SV=1
MKERTLKLVELFESLQGEGANTGRLVVFVRLTGCNLSCSFCDTAYNMMTLELTPSELLARIQTDFPHCKSIIWTGGEPTLQLTQEIVQLFKASGYWQALESNGLKAAPLGLDYITLSPKGNTRPQVLEQYRDRQVGEVRIAIADGDALPVIEELPQAEHYFLSPIFDGDTIIPANVSHCEALIRRDPRWRLSLQTHKLIGIR

SEQ ID NO: 32980 - protein, 197 aa, Porphyromonas loveana
  misc_feature (1)..(197): tr|A0A2U1F6J3|A0A2U1F6J3_9PORP 7-carboxy-7-deazaguanine synthase OS=Porphyromonas loveana OX=1884669 GN=queE P E=3 SV=1
MFVNEIFYSLQGEGANAGCAAVFVRLAGCNLACSYCDTDFVDGREMSPGAIAQHIGQYPARFLIWTGGEPTLQLTDEITAYFHELGYYQAIETNGTRPLPKGIDYISCSPKPEAIMLLDRNFPDGVDEFRFPLGIDTPLPPSVDALPPARHYLVSPIFVGDDAMQLDPAAVERCVAFVKATPPWRFSVQMHKLIHIP

SEQ ID NO: 32981 - protein, 200 aa, Porphyromonas macacae
  misc_feature (1)..(200): tr|A0A0A2E5S1|A0A0A2E5S1_9PORP 7-carboxy-7-deazaguanine synthase OS=Porphyromonas macacae OX=28115 GN=queE PE= 3 SV=1
MKKLNIKEIFYSLQGEGLNTGRAAIFIRLSGCNLKCSYCDTDFKNGIPMSVEEIEKVIDEYPGRLIIWTGGEPTLQLTDEITAYFKNAGYEQAIETNGTRTVPTGIDYITCSPKPEAIPFLKSNFPNGVDEFRFPVGSRGTLPPDIGVLPPARAYMVSPIFSGNKNMEIDQEAVERCLQFIMENPEWRLSIQLHKLLDFQ

SEQ ID NO: 32982 - protein, 200 aa, Porphyromonas macacae
  misc_feature (1)..(200): tr|A0A379DID5|A0A379DID5_9PORP 7-carboxy-7-deazaguanine synthase OS=Porphyromonas macacae OX=28115 GN=queE PE= 3 SV=1
MKKLNIKEIFYSLQGEGLNTGRAAIFIRLSGCNLKCSYCDTDFKNGIPMSVEEIEKVIDEYPGRLIIWTGGEPTLQLTDEITAYFKNAGYEQAIETNGTRTVPTGIDYITCSPKPEAIPFLKSNFPNGVDEFRFPVGSRGTLPPDIGVLPPARAYMVSPIFSGNKNMEIDREAVERCLQFIMENPKWRLSIQLHKLLDFQ

SEQ ID NO: 32983 - protein, 230 aa, Porphyromonas somerae
  misc_feature (1)..(230): tr|A0A134B1V5|A0A134B1V5_9PORP 7-carboxy-7-deazaguanine synthase OS=Porphyromonas somerae OX=322095 GN=queE PE =3 SV=1
MQDEGAVRGMPCLISGELRESSYLCTQITPTTFMLINEIFYSLQGEGVHMGKASIFIRLSRCNLRCSFCDTEFDSGTEMTIEELREAIAPYPGRRIIWTGGEPTLQLTEETVAYFKALGYHQSIETNGTRRPPAGLDYITCSPKKEAMQLLHRNFPDGVGEFRFPVGSPADLPPAVSELPPAGAYLLSPIFVGETQSEADKAAIELCVSHILEHPEWQLSLQMHKLIHIP

SEQ ID NO: 32984 - protein, 197 aa, Porphyromonas sp.
  misc_feature (1)..(197): tr|A0A0A2E4N8|A0A0A2E4N8_9PORP 7-carboxy-7-deazaguanine synthase OS=Porphyromonas sp. COT-239 OH1446 OX=151561 3 GN=queE PE=3 SV=1
MLINEIFYSLQGEGINVGRAAIFIRLSRCNLCCSFCDTDFDEGVEMSDEAIAKAIAPYPARFIIWTGGEPTLQLQRESVAYFKALGYTQAIETNGTRPVPEGIDYITCSPKAPAMQRLKSNFPQGVSELRFPVGKAEDLPPSIEELPHSEAYLLSPIFSGEDAMQLDPKAVELCVEYIKAHPEWRLSLQTHKLIHIR

SEQ ID NO: 32985 - protein, 181 aa, Porphyromonas sp.
  misc_feature (1)..(181): tr|A0A073IA71|A0A073IA71_9PORP 7-carboxy-7-deazaguanine synthase OS=Porphyromonas sp. 31_2 OX=658663 GN=queE P E=3 SV=1
MRKINEIFYSLQGEGFHTGTPAVFVRFSGCNLRCSFCDTRHEEGVMMTDEEIVEKVSSFPARIVILTGGEPSLWIDKALISRLREAGKQICIETNGTRPLPDGIDWVTCSPKENAPVVLERIDEIKVVYTGQDLSAYAEIPARYHFLQPCSCQNTKEVVDYILRHPRWRLSLQTHKLIDIQ

SEQ ID NO: 32986 - protein, 201 aa, Porphyromonas uenonis
  misc_feature (1)..(201): tr|C2M9Z6|C2M9Z6_9PORP 7-carboxy-7-deazaguanine synthas e OS=Porphyromonas uenonis 60-3 OX=596327 GN=queE PE=3 SV=1
MQSLPVNEIFYSLQGEGGQMGRAMLFVRLSGCNLACDYCDTDFAGHRLMTVAEILAKLESYPCRDILWTGGEPTLALREEHIAFFHEQGYRQSIETNGTRPVPRGLDYVTCSPKAEAISGLRERFVDNYPDGIDEVRWPLQLGAPLPPPIEQLVQARRYYVSPVEETGVEMSAVVARCMDFVLAHPEWRLSVQLHKLLGFR

SEQ ID NO: 32987 - protein, 215 aa, Porticoccaceae bacterium
  misc_feature (1)..(215): tr|A0A2E0VK14|A0A2E0VK14_9GAMM 7-carboxy-7-deazaguanine synthase OS=Porticoccaceae bacterium OX=2026782 GN=que E PE=3 SV=1
MNDSLRITEIFYSLQGETSTVGLPTVFVRLTGCPLRCVYCDTEYAFYGGERMGMDSIMEQVHALNASHVTVTGGEPLAQPNCQLLLTRLCDEGFEVSLETSGALTTEAVDTRVAVILDLKTPASGEVGRNLYDNIARLKARDEVKFVICDRRDYEWAKLKIDEYGLRDRAGNILFSPSHGTLKPRELADWIVEDRLAVRLQVQLHKLLWDDQPGY

SEQ ID NO: 32988 - protein, 213 aa, Porticoccaceae bacterium
  misc_feature (1)..(213): tr|A0A351NTG0|A0A351NTG0_9GAMM 7-carboxy-7-deazaguanine synthase OS=Porticoccaceae bacterium OX=2026782 GN=que E PE=3 SV=1
MSYAVKEIFYSLQGEGAHAGRPAIFCRFTGCNLWSGKEKHRAEAICQFCDTDFVGTDGDGGGTFVDAKSLASRVRSFWPESITDDVHPYVICTGGEPLLQLDEALVSAFHTEGIEVAIETNGTIVVPEGIDWVCVSPKFGADLVVESGNEIKLVYPQNGHQPSDFANLQFDYFFLQPMFEHQENNNVQLTVDYCLKHPRWSLSLQTHKLLGLQ

SEQ ID NO: 32989 - protein, 216 aa, Porticoccus sp.
  misc_feature (1)..(216): tr|A0A2E5C4Y0|A0A2E5C4Y0_9GAMM 7-carboxy-7-deazaguanine synthase OS=Porticoccus sp. OX=2024853 GN=queE PE=3 SV =1
MTPTSVRITEIFYSLQGESATVGLPTVFVRLTGCPLRCHYCDTEYAFYGGERRSIEQILEEVSTFKASRVCVTGGEPLAQKSCLLLLTALCDKGYQVSLETAGALSIAEVDPRVTKVMDLKTPASGEVNRNLYENIAYLKPSDQIKFVICDRQDYEWARMKLDEFSLSDCVTDILFSPSFGQQDATELAEWVLNDRLPVRFQLQLHKLLWKDAPGH

SEQ ID NO: 32990 - protein, 216 aa, Porticoccus sp.
  misc_feature (1)..(216): tr|A0A2E2VYV4|A0A2E2VYV4_9GAMM 7-carboxy-7-deazaguanine synthase OS=Porticoccus sp. OX=2024853 GN=queE PE=3 SV =1
MNPTSVRITEIFYSLQGESSTVGLPTVFVRLTGCPLRCHYCDTEYAFYGGERRSIEQILEEVSTFKASRVCVTGGEPLAQKSCLSLLTALCDKGYQVSLETAGALSIAEVDPRVTKVVDLKTPASGEVNRNLYENIAYLKPSDQIKFVICDRRDYEWARMKLDELSLPGCVTDILFSPSFGQQDATELAEWVLNDRLPVRFQLQLHKLLWKDAPGH

SEQ ID NO: 32991 - protein, 222 aa, Pradoshia eiseniae
  misc_feature (1)..(222): tr|A0A2S7N066|A0A2S7N066_9BACI 7-carboxy-7-deazaguanine synthase OS=Pradoshia eiseniae OX=2064768 GN=queE PE=3 SV=1
MFRVIERFISIDGEGPTSGELAAFIRFEGCNLRCTWCDTAYSWDGSCPHEEQSTEDIYHYIKESGARNVTLTGGEPLLQKDIIPLLDLLSSDRTLHIHIETNGAIDIGQYKDRYPSGNIHFIVDYKLPASGMQMTMKEKNFEYVSRDDVYKFVIASDNDLRETWRIVNKHELTKRCRVFLSPVVESIEPKRIVEFMISRKWHDIKLQVQVHKVIWPKDMRGV

SEQ ID NO: 32992 - protein, 223 aa, Pragia fontium
  misc_feature (1)..(223): tr|A0A0G3CR16|A0A0G3CR16_9GAMM 7-carboxy-7-deazaguanine synthase OS=Pragia fontium OX=82985 GN=queE PE=3 SV=1
MSYPVNELFQTLQGEGYFTGVPAIFIRLQSCPVGCSWCDTKHTWEKLADRQRPIGEILVKTVESDQWSEVSAHELLAILQQPHYTARHVVITGGEPCLYDLKPLTELLEQHGFSCQIETSGTQQIKCSDDTWVTVSPKINMRGGLPVISQALHRADEIKHPVARERDIEELDQLLTMLNDSKQRVIALQPISQGKRATELCIETCIARNWRLSMQTHKYLGIE

SEQ ID NO: 32993 - protein, 223 aa, Pragia fontium
  misc_feature (1)..(223): tr|A0A379DP02|A0A379DP02_9GAMM 7-carboxy-7-deazaguanine synthase OS=Pragia fontium OX=82985 GN=queE PE=3 SV=1
MSYPVNELFQTLQGEGYFTGVPAIFIRLQSCPVGCSWCDTKHTWEKLADRQRPIGEILVKTVESDQWSEVSAHELLAILQQPHYTARHVVITGGEPCLYDLKPLTELLEQHGFSCQIETSGTQPIKCSDDTWVTVSPKINMRGGLPVISQALHRADEIKHPVARERDIEELDQLLTMLNDSKQRVIALQPISQGKRATELCIETCIARNWRLSMQTHKYLGIE

SEQ ID NO: 32994 - protein, 223 aa, Pragia sp.
  misc_feature (1)..(223): tr|A0A411WLW2|A0A411WLW2_9GAMM 7-carboxy-7-deazaguanine synthase OS=Pragia sp. CF-458 OX=2498113 GN=queE PE=3 SV=1
MSYPVNELFQTLQGEGFFTGVPAIFIRLQACPVGCSWCDTKHTWEKIADRQQSMDDILAKTQESDSWGEASASQLLAILQQPHYTARHVVITGGEPCLYDLLPLTSLLELHGFQCQIETSGTQPVICSTNTWVTVSPKVDMRGGLNVIPQALIRADEIKHPVARERDIEQLDELLATLSDNKKRVIALQPISQNPRATELCIKTCIERNWRLSMQTHKYLGIE

SEQ ID NO: 32995 - protein, 219 aa, Prauserella endophytica
  misc_feature (1)..(219): tr|A0A4U2IN71|A0A4U2IN71_9PSEU 7-carboxy-7-deazaguanine synthase OS=Prauserella endophytica OX=1592324 GN=queE PE=3 SV=1
MLTERFESFQGEGPWTGQRCVFVRFSRCNLRCGFCDTPESWDWSRYNPAEVSDRVPIAELVSWVRERGVDMMVITGGEPMLQRTAMTALARGLANVRVQVETNGTIAPTPELASLVDLWVVSPKLANSGMTYSARIKPEALSALAATDRAVFKFVVVEPDRDLDEIAQLVEEHQLAPVWVMPEGTTQEKVLAGMDALYGPATDRGWNVSTRLHILTGAR

SEQ ID NO: 32996 - protein, 240 aa, Prauserella sp.
  misc_feature (1)..(240): tr|A0A318LUR7|A0A318LUR7_9PSEU 7-carboxy-7-deazaguanine synthase OS=Prauserella sp. YIM 121212 OX=1477506 GN=q ueE PE=3 SV=1
MKLPVVPDAERDLVINEMFGPTFQGEGPSTGRYARFIRLFGCHISCVWCDSAQTHDQRRYDLAAEQRIVSIEDVLSWLSGGPAGLVVITGGEPLLQPRVVERLVNAIRERQLATDIEIETSGTIAPTALIASAVTRFNVSPKLAHSRLRRHQRIRPTVLKDLTASGKASWKFVAQDVDDLDEIQELVSTYDLHPVWVMPEGTDSTTVLARMRVLADPVLAHGWNLSTRLHTLLWENDRGR

SEQ ID NO: 32997 - protein, 229 aa, Prauserella sp.
  misc_feature (1)..(229): tr|A0A318LFU4|A0A318LFU4_9PSEU 7-carboxy-7-deazaguanine synthase OS=Prauserella sp. YIM 121212 OX=1477506 GN=q ueE PE=3 SV=1
MAPERVEGSAILTEKFESFQGEGPWTGQRCVFVRFSRCNLRCGYCDTPESWDWSRYNPVEVSDRVPVAELVSWVRERGVDMMVITGGEPMLQQPAMTALARGLADIRVQVETNGTVAPTPELTSLVDLWVVSPKLANSGMTYSTRIKPEALSALVATDRAVFKFVVTEPDRDLDEIAQLVEEHHLAPVWVMPEGTTQEKVLAGMDALYGRATERGWNVSTRLHILTGAR

SEQ ID NO: 32998 - protein, 194 aa, Prevotella bivia
  misc_feature (1)..(194): tr|A0A096ABT6|A0A096ABT6_9BACT 7-carboxy-7-deazaguanine synthase OS=Prevotella bivia DNF00320 OX=1401068 GN=qu eE PE=3 SV=1
MKINEIFYSIQGEGFYAGTPAIFVRFAQCNLNCAFCDTDFVRFTEMAEEEIVAEVCRIGNPATHVILTGGEPSLQVTASLCDKLHEAGKVIHIETNGTHAVAEGIDFITCSPKLEYCKHAELCVQRIDELKVVFTGKNDMALYENIQAQHYFLQPCDVGNDAENGRIIAATVGYCKANPKWNISVQIHKVLAIR

SEQ ID NO: 32999 - protein, 194 aa, Prevotella bivia
  misc_feature (1)..(194): tr|A0A137ST60|A0A137ST60_9BACT 7-carboxy-7-deazaguanine synthase OS=Prevotella bivia OX=28125 GN=queE PE=3 SV= 1
MKINEIFYSIQGEGFYAGTPAIFVRFAQCNLNCAFCDTDFVRFTEMTEEEIVAEVCRIGNPATHVILTGGEPSLQVTASLCDKLHEAGKVIHIETNGTHAVAEGIDFITCSPKLEYCKHAELCVQRIDELKVVFTGKNDMALYENIQAQHYFLQPCDVGNDAENGRIIAATVGYCKANPKWNISVQIHKVLAIR

SEQ ID NO: 33000 - protein, 196 aa, Prevotella bryantii
  misc_feature (1)..(196): tr|D8DYC1|D8DYC1_PREBR 7-carboxy-7-deazaguanine synthas e OS=Prevotella bryantii B14 OX=752555 GN=queE PE=3 SV= 1
MKKINEIFYSLQGEGRHTGRAAIFIRFSGCNLKCSFCDTDFKDYQEMSDEDILYKVEELRKDKIKDAGQPKPMIILTGGEPTMQVDGAFIDMFHAAGYFVAMESNGTKEPPKQLDWLTVSPKEHVKVAQCDELKCIFDGEHQVDTFGIKAYYYYLQPCDTGDAQKNQEILSACVAYIEQHPKWRLSLQTHKLIGFK

SEQ ID NO: 33001 - protein, 196 aa, Prevotella bryantii
  misc_feature (1)..(196): tr|A0A255STX7|A0A255STX7_PREBR 7-carboxy-7-deazaguanine synthase OS=Prevotella bryantii OX=77095 GN=queE PE=3 SV=1
MKKINEIFYSLQGEGRHTGRAAIFIRFSGCNLKCSFCDTDFKDYQEMSDEDILYKVEELRKDKIKDAGQPKPMIILTGGEPTMQVDGAFIDMFHAAGYFVAMESNGTKEPPKQLDWLTVSPKEHVKVAQCDELKCIFDGEHQVDTFGIKAYYYYLQPCDTGDAQRNQEILSACVAYIEQHPKWRLSLQTHKLIGFK

SEQ ID NO: 33002 - protein, 206 aa, Prevotella buccae
  misc_feature (1)..(206): tr|D3HV37|D3HV37_9BACT 7-carboxy-7-deazaguanine synthas e OS=Prevotella buccae D17 OX=575611 GN=queE PE=3 SV=1
MKRYRINEIFYSLQGEGRNTGRAAVFVRFSGCNLACSFCDTDFRAYREMTSDEVVNTVKGILPSFVDNRSGEGVGTARSSVLVVLTGGEPTLQVDFDLIDALHHAGFPEVAMESNGTKEPPPNLDWLTVSPKEQVSVNRCNELKCLFDESGRADDCGIRADFYYLQPCDTGDPVRNAEIIAACTEYIKQHPKWQLSLQTHKLIGFK

SEQ ID NO: 33003 - protein, 210 aa, Prevotella buccae
  misc_feature (1)..(210): tr|E6K736|E6K736_9BACT 7-carboxy-7-deazaguanine synthas e OS=Prevotella buccae ATCC 33574 OX=873513 GN=queE PE= 3 SV=1
MSRAMKRYRINEIFYSLQGEGRNTGRAAVFVRFSGCNLACSFCDTDFRAYREMTSDEVVNTVKGILPSFVDNRSGEGVGTARSSVLVVLTGGEPTLQVDFDLIDALHHAGFPEVAMESNGTKEPPPNLDWLTVSPKEQVSVNRCNELKCLFDESGRADDCGIRADFYYLQPCDTGDPVRNAEIIAACTEYIKQHPKWQLSLQTHKLIGFK

SEQ ID NO: 33004 - protein, 199 aa, Prevotella buccalis
  misc_feature (1)..(199): tr|D1W7N4|D1W7N4_9BACT 7-carboxy-7-deazaguanine synthas e OS=Prevotella buccalis ATCC 35310 OX=679190 GN=queE P E=3 SV=1
MNCDARTYKVNEIFYSLQGEGHHAGRAAVFVRFAKCNLHCWFCDTNFDTFTEMSAQQIIENVQQYAPCHFVVITGGEPTLQVTPELLQLFHIHGYYVSMETNGTHPIPKGVDWVTCSPKKAFIEAGDVHIKQANEIKVVYDGIHPISTFGIESEERYVQPCDVGDELRNKEIMQQAIQFVKTHPQWKLSLQLHKLIGIQ

SEQ ID NO: 33005 - protein, 199 aa, Prevotella buccalis
  misc_feature (1)..(199): tr|A0A095ZNS5|A0A095ZNS5_9BACT 7-carboxy-7-deazaguanine synthase OS=Prevotella buccalis DNF00853 OX=1401074 GN =queE PE=3 SV=1
MNRDVRTYKVNEIFYSLQGEGHHAGRAAVFVRFAKCNLNCWFCDTNFDTFTEMSAQQIIENVQQYAPCNFVVITGGEPTLQVTPELLQLFHVHGYYVSMETNGTHPIPKGVDWVTCSPKKAFIEAGNVHIKQANEIKVVYDGIHPISTFGIEAEERYVQPCDVGDELRNKEIMQQAIQFVKTHPQWKLSLQLHKLIGIQ

SEQ ID NO: 33006 - protein, 195 aa, Prevotella colorans
  misc_feature (1)..(195): tr|A0A2U0UID5|A0A2U0UID5_9BACT 7-carboxy-7-deazaguanine synthase OS=Prevotella colorans OX=1703337 GN=queE PE= 3 SV=1
MTSYKINEIFYSLQGEGRWAGRAALFVRFSKCNLACPFCDTDFVTYRELSGADIVAALGRYPLCRFVVLTGGEPTLQVDPELLRRLHERGYYVAMETNGTNPIPEGVDWVTCSPKAAFVKGGLPRVGAVDELKVVFDGRQEVSDFGIEAAVRYVQPCDTGDARRNKAILAEAVAFVKDHPEWQLSLQQHKLIGIR

SEQ ID NO: 33007 - protein, 194 aa, Prevotella copri
  misc_feature (1)..(194): tr|A0A229I979|A0A229I979_9BACT 7-carboxy-7-deazaguanine synthase OS=Prevotella copri OX=165179 GN=queE PE=3 SV =1
MYKVNEIFYSLQGEGRWSGRPAVFVRMSGCNLKCPFCDTDFKGYKEMSAEDILAACQEKGGDCRFIVLTGGEPTLQVDAELIHLLHQKGYYLSMETNGTHMVPEGIDWITCSPKLDFTEGGELALKKVDELKLVFDGAHEVSNYGLEATCQYLQPCDVGNDARNRFILSGCIDYVKRHPEWQLSLQMHKIVGIR

SEQ ID NO: 33008 - protein, 187 aa, Prevotella maculosa
  misc_feature (1)..(187): tr|H1HIZ2|H1HIZ2_9BACT 7-carboxy-7-deazaguanine synthas e OS=Prevotella maculosa OT 289 OX=999422 GN=queE PE=3 SV=1
MYRVNEIFYSLQGEGRNTGRAAVFIRFSGCNLKCSFCDTDFDAYREISVEDIVAAIRQWKQAAFIVLTGGEPTLQADKKLIDSLHAEGFCVAMESNGTKQPPPGLDWLTVSPKVRPVVTRCNELKCIFDGRKPVDDFGIEADYYYLQPCDTGDDVQNKALTQACIHYIISHPKWRLSLQTHKMIGFK

SEQ ID NO: 33009 - protein, 196 aa, Prevotella multisaccharivorax
  misc_feature (1)..(196): tr|F8NB11|F8NB11_9BACT 7-carboxy-7-deazaguanine synthas e OS=Prevotella multisaccharivorax DSM 17128 OX=688246 GN=queE PE=3 SV=1
MSKTYRVNDIFYSLQGEGRNTGRAAVFVRFSGCNLRCPFCDTDFTNYEELTASKILSRMKELSYLCTEGMPMVVLTGGEPTLQADEALIDYIHAAGFSFVAMESNGTHEPPKNLDWLTVSPKGNVTIKHCNELKVLFDGSTDPQRYEINAGLYYLQPLDSGEKKVNVRIMRQCVDYIMRHPQWRLSLQTHKLIGVK

SEQ ID NO: 33010 - protein, 190 aa, Prevotella oris
  misc_feature (1)..(190): tr|D7ND70|D7ND70_9BACT 7-carboxy-7-deazaguanine synthas e OS=Prevotella oris C735 OX=563008 GN=queE PE=3 SV=1
MKKTYKVNEIFYSLQGEGRNTGRAAVFIRFSGCNLKCSFCDTDFKLYHEMTAEAIVDAVREWKTAGFVVLTGGEPTLQVDSQLIDALHAEGFYVAMESNGTNVPPANLDWLTISPKEHVVVTECNELKCIFDGQKPVDDLGIEADYYYLQPCDVGNDVQNRAITQACIRYIASHPKWRLSLQTHKMIGFQ

SEQ ID NO: 33011 - protein, 190 aa, Prevotella oris
  misc_feature (1)..(190): tr|A0A3S4T492|A0A3S4T492_9BACT 7-carboxy-7-deazaguanine synthase OS=Prevotella oris OX=28135 GN=queE PE=3 SV=1
MKKTYKVNEIFYSLQGEGRNTGRAAVFIRFSGCNLKCSFCDTDFKLYHEMTAEAIVDAVREWKTAGFVVLTGGEPTLQVDSKLIDALHAEDFYVAMESNGTNVPPPNLDWLTISPKEHVVVTECNELKCIFDGQKPVDDLGIEADYYYLQPCDVGNDVQNRAITQACIRYIASHPKWRLSLQTHKMIGFQ

SEQ ID NO: 33012 - protein, 190 aa, Prevotella salivae
  misc_feature (1)..(190): tr|U2KTW9|U2KTW9_9BACT 7-carboxy-7-deazaguanine synthas e OS=Prevotella salivae F0493 OX=1395125 GN=queE PE=3 S V=1
MRKTYNVNEIFFSLQGEGRNTGRCAVFIRFSGCNLKCSFCDTDFKSYREMTVDDIISAISKWKKAGFVVLTGGEPTLQVDDKLIDALHASGFYVAMESNGTRVPPQNLDWLTVSPKGSVVVTKCNELKCIFDGESMVDDAGIQADYYYLQPCDVGDKTKNQVILQACISYILSHPKWRLSLQTHKMIGIQ

SEQ ID NO: 33013 - protein, 199 aa, Prevotella sp.
  misc_feature (1)..(199): tr|A0A1H4E968|A0A1H4E968_9BACT 7-carboxy-7-deazaguanine synthase OS=Prevotella sp. tc2-28 OX=1761888 GN=queE P E=3 SV=1
MNMIEKEYMVNEIFYSLQGEGRWAGRAAIFIRFSGCNLKCPFCDTDFASYKKMKAKDILKELLEYSQCNFVVLTGGEPTLQVTEDFVDMLHANGYYVAMETNATREVPRNINWITASPKKAYVSGGSVWLTKADEVKVVYDAVQEPDAFGISAKEYYIQPCDTGDKEMNDYIIKKCVEWVKNHPKWKLSLQQQKILKVR

SEQ ID NO: 33014 - protein, 194 aa, Prevotella sp.
  misc_feature (1)..(194): tr|A0A255T4X6|A0A255T4X6_9BACT 7-carboxy-7-deazaguanine synthase OS=Prevotella sp. P3-122 OX=2024223 GN=queE P E=3 SV=1
MRTYRVNDIFYSLQGEGHNAGRAAVFVRLSGCNLACPFCDTDFTSYETLTAAEIVGRVQALVPAGSVRPMVVLTGGEPTLQADEALVGAFHGAGFGTVAMETNGTMLPPASIDWLTVSPKTPVTVDRCDELKCIFGPDGILCDADIEATYRYVQPCDTGDAAANAEIIARCVDFVRLNPQWRLSLQTHKLAGFK

SEQ ID NO: 33015 - protein, 199 aa, Prevotella timonensis
  misc_feature (1)..(199): tr|A0A2K0XNI4|A0A2K0XNI4_9BACT 7-carboxy-7-deazaguanine synthase OS=Prevotella timonensis OX=386414 GN=queE PE =3 SV=1
MNHDVRTYKVNEIFYSLQGEGHHAGKAAVFVRFAKCNLHCSFCDTNFDEYTEMSAQQIIENVQQYAPCNFVVITGGEPTLQVTATLLQIFHVHGYYVSMETNGTHPIPKGVDWITCSPKKAFIEAGDVQIKQANEIKVVYDGIHPISTFGIEAEERYVQPCDVGDESRNKEILQEAIQFVKTHPQWKLSLQLHKLIGIQ

SEQ ID NO: 33016 - protein, 199 aa, Prevotella timonensis
  misc_feature (1)..(199): tr|A0A098YRX1|A0A098YRX1_9BACT 7-carboxy-7-deazaguanine synthase OS=Prevotella timonensis S9-PR14 OX=1401062 G N=queE PE=3 SV=1
MNHDVRTYKVNEIFYSLQGEGHHAGKAAVFVRFAKCNLHCSFCDTNFDEYTEMSTQQIIENVQQYAPCNFVVITGGEPTLQVTATLLQLFHVHGYYVSMETNGTHPIPKGVDWITCSPKKAFIEAGDVQIKQANEIKVVYDGIHPISTFGIEAEERYVQPCDVGDESRNKEILQKAIQFVKTHPQWKLSLQLHKLIGIQ

SEQ ID NO: 33017 - protein, 232 aa, Prevotellaceae bacterium
  misc_feature (1)..(232): tr|A0A316NVW1|A0A316NVW1_9BACT 7-carboxy-7-deazaguanine synthase OS=Prevotellaceae bacterium OX=2049047 GN=que E PE=3 SV=1
MYRVNTIYPAFMGEQNCFGIGQCCVFVRFSGCNIRCYESTLGVTCDTPEALCGTCGTDMTTKEIIERLREYNIRTICLTGGEPLLQKPIELLSALSKNGFAVVVETNGTLSIEPYRHVENISFVMDYKAPSAGVKSFCHENFYYLRKRDYIKFVLYDDADYEDMKIICERMKGKVNLVAGLFWGAKIGYVELANRILRDRLPLNLNMQVHKMMVLYDEYPEAVRTLAVPKEL

SEQ ID NO: 33018 - protein, 190 aa, Prevotellaceae bacterium
  misc_feature (1)..(190): tr|A0A316NLJ9|A0A316NLJ9_9BACT 7-carboxy-7-deazaguanine synthase OS=Prevotellaceae bacterium OX=2049047 GN=que E PE=3 SV=1
MSKFYKVNDIFYTLQGEGFYTGVPAIFIRFAECNLRCDFCDTDFKESLEMTLGDLEMTLAQYPAKHVVLTGGEPSLQTDEELLQMLHAEGYYVQIETNGTNELPENIDWITMSPKSLNPKLKECDELKVIYEGQPLEKYFAIKAKHYFLQPCSSGDVKNDGEITHATVNVCLKDPRWRLSLQTQNYIGIK

SEQ ID NO: 33019 - protein, 215 aa, Pricia antarctica
  misc_feature (1)..(215): tr|A0A1G7A391|A0A1G7A391_9FLAO 7-carboxy-7-deazaguanine synthase OS=Pricia antarctica OX=641691 GN=queE PE=3 S V=1
MVKNEVSAHEVSELVDQGLLLPLMEEFYTIQGEGFHKGTAAYFIRIGGCDVGCHWCDVKESWNAETHPPTEIYKIVENAAKYSDTIVVTGGEPLMWDMQPLTEALKAKNLNIHIETSGAYPLTGIWDWICLSPKKNKLPEGRIYDEAHELKVIVYNKHDLIFAEQEAAKSNKNCILYLQPEWSVRDKVTPMIVDYVMANPKWKVSLQTHKYLNIP

SEQ ID NO: 33020 - protein, 225 aa, Prochlorococcus marinus
  misc_feature (1)..(225): sp|Q7V9H9|QUEE_PROMA 7-carboxy-7-deazaguanine synthase OS=Prochlorococcus marinus (strain SARG / CCMP1375 / SS 120) OX=167539 GN=queE PE=3 SV=1
MSTCLPIVERFHSLQGEGLHFGKSAFFIRLGGCKVGCPWCDTKESWSIATHQEATVEELSKEAAIAQSQGAAILVITGGEPLHHNLNALCKTIQDFTSHNSRETMPIHLETSGVDEITGLINWITLSPKRHALPKKSLLRACDEIKVVIHQKEDLLFAEEMANQSIKERQISKKTSDENHKISQPHLFLQPGWNSKEGTQLTIEYIKSHPQWRLSLQTHKWLGVL

SEQ ID NO: 33021 - protein, 226 aa, Prochlorococcus marinus
  misc_feature (1)..(226): tr|A2CDX9|A2CDX9_PROM3 7-carboxy-7-deazaguanine synthas e OS=Prochlorococcus marinus (strain MIT 9303) OX=59922 GN=nrdG PE=3 SV=1
MTGNLPVVETFHSIQGEGAHVGRSAFFIRLAGCDVGCSWCDTKHSWNSRNHPQIAVEQLAVETATAAKNGAAFVVLTGGEPLQHNIAPLCEALHRATETNPDGPLPIHLETSGVNQLSGVPTWITLSPKRHAPPRTDLLAACHELKVVVHERGDLNFAESMAQAALAARKNDDASQSRLSNASKEPLLFLQPGWATTTGQQLAFEHVQSHPHWRLSMQTHKWLGIR

SEQ ID NO: 33022 - protein, 227 aa, Prochlorococcus sp.
  misc_feature (1)..(227): tr|A0A0A2CG84|A0A0A2CG84_9PROC 7-carboxy-7-deazaguanine synthase OS=Prochlorococcus sp. MIT 0701 OX=1499502 GN =queE PE=3 SV=1
MHSTLPVVESFHSIQGEGAHAGRSAFFIRLAGCDVGCSWCDTKHSWNSRNHPEIALEQLAEETATAAKNGAAFVVLTGGEPLHHNIDPLCAALRKATAGENNKALAIHLETSGVNPLSGKPNWITLSPKRHAPPHPELLAHCHELKVVINNQEDIHFAEAMAAAALKARKLPNSPEDISADDQGDELLLLLQPSWNNPEAQQVAINFVKAHCQWRLSVQTHKWLGVR

SEQ ID NO: 33023 - protein, 226 aa, Prochlorococcus sp.
  misc_feature (1)..(226): tr|A0A163AK01|A0A163AK01_9PROC 7-carboxy-7-deazaguanine synthase OS=Prochlorococcus sp. MIT 1306 OX=1799667 GN =queE PE=3 SV=1
MTGNLPVVETFHSIQGEGAHVGRSAFFIRLAGCDVGCSWCDTKHSWNSRNHPEITLEQLAVETATAAKDGAAFVVLTGGEPLQHNIAPLCEALHRATETNPDGPLAIHLETSGVNQLSGVPTWITLSPKRHAPPRTDLLAACHELKVVVHETDDLNFAEVMAKAALEARKNDNASQSRLSNTSKEPLLFLQPGWATTTGQQLAFEHVQSHPYWRLSMQTHKWLGIR

SEQ ID NO: 33024 - protein, 186 aa, Prochlorothrix hollandica
  misc_feature (1)..(186): tr|A0A0M2Q448|A0A0M2Q448_PROHO 7-carboxy-7-deazaguanine synthase OS=Prochlorothrix hollandica PCC 9006 = CALU 1027 OX=317619 GN=queE PE=3 SV=1
MQGEGHWAGHSAFFIRLGGCDVGCSWCDTKHSWDASRHRSRSIAELVAAAAAVPSAHVIVTGGEPTLHDLQPLTQALRAAGCQPHLETSGAYPLRGDFQWVTLSPKTVRSPHPSLYGQVHELKVVVADRSDLEWAESQAALVSPTVVKFLQPEWSSPQSQALVYDYVLHHPTWRISLQTHKILKVR

SEQ ID NO: 33025 - protein, 236 aa, Prolinoborus fasciculus; identical to SEQ ID NO: 27386
  misc_feature (1)..(236): tr|A0A2U3MED3|A0A2U3MED3_9NEIS 7-carboxy-7-deazaguanine synthase OS=Prolinoborus fasciculus OX=1056810 GN=queE PE=3 SV=1

SEQ ID NO: 33026 - protein, 289 aa, Prolixibacter denitrificans
  misc_feature (1)..(289): tr|A0A2P8CGE8|A0A2P8CGE8_9BACT 7-carboxy-7-deazaguanine synthase OS=Prolixibacter denitrificans OX=1541063 GN= queE PE=3 SV=1
MAASLLLVNNGIFPITRDAEGKLLTDVPATGLQHPGTIQGEGKLVGTASLFIRLSGCNLRCMWNIPGGGVSACDTPDSSFDVSKNQLWKVDEIIETVRHNLGDMCHVVITGGEPTIQHRSLKELCRRLKEEFDVLITIETNGTLFDEELARHIDLFSISPKLSDSLVTEEKLKQLPQQLAEKVAAAPSQKTPCPDVIQQYIDVCLNSNGEKDFQLKFVMSGSENTESIHEEVLNHISGWKPSDILAMPLGGNHQTLGKTSLRVLETAIQHGWRYCPRIHIDLFGDKPGV

SEQ ID NO: 33027 - protein, 285 aa, Prolixibacteraceae bacterium
  misc_feature (1)..(285): tr|A0A4U2LF50|A0A4U2LF50_9BACT 7-carboxy-7-deazaguanine synthase OS=Prolixibacteraceae bacterium JC036 OX=2528 631 GN=queE PE=3 SV=1
MKQITLVKNGVFPITHDENGDILSDRPKTELSIAGTIQGEGKLAGVPSLFVRTAGCNLRCMWSLDDGNVSPCDTWNSSFDIQGAETIDVDKVVNLLRENKNNIQHLVITGGEPMLQTYPLITLCRQIKEEQGLHITLETNATIFNEELAQYIDLFSLSPKLKNSIPTQAKSSRLGLELNSQQERHAILYRQIEVIQQFIDYSNTHQKDIQIKFVVGNSDDEHEINNEFLKELSDWKSEDILIMNLGGNTEEIGQSVSPAIEMSIRNGWRYTPRLHIDLFGNKEGV

SEQ ID NO: 33028 - protein, 235 aa, Prolixibacteraceae bacterium
  misc_feature (1)..(235): tr|A0A3C2D7H2|A0A3C2D7H2_9BACT 7-carboxy-7-deazaguanine synthase OS=Prolixibacteraceae bacterium OX=2053594 GN =queE PE=3 SV=1
MLTDDTYYVSEYFQSIQGEGNYSGVNSLFIRFQHCNLRCSWCDTKYTWNKHSGAYKLFTQTELKEIITGNMGTNVIFTGGEPTLYRLDQLVVSDMKFHVESNGTIIPNQALNIQMEDGSVFSRMAMDEKVISEFNWVISPKLSNSFQEINEEAIAFWANNDWCIFKFIARNRKDLIEINAFADKYAIARKKVFVGIEGTTLASQIKPELVDDIINFGFNFSPRLHVMIWRNVHGK

SEQ ID NO: 33029 - protein, 244 aa, Propionispira arboris
  misc_feature (1)..(244): tr|A0A1H6W5U2|A0A1H6W5U2_9FIRM 7-carboxy-7-deazaguanine synthase OS=Propionispira arboris OX=84035 GN=queE PE= 3 SV=1
MIVQANIVEVFSSIQGEGKYVGYRQVFVRFSGCNLKCKYCDTLVSHAPYKYCMTEKDAGLRQFIQLKNPVPVALLAEHINHLLLTPHHSISFTGGEPLYRADFIHALAAHLDCKLFLETNGTLVGELAKVIDDIAIISMDIKLPSITGKELWNEHRDFLMLARQKELYIKLVVSAETTWEEFHKAIDLIKDIDSSIPFIIQPVTPVNGCNACSADDVLQYQKCALEVLQDVRVIPQTHKMIGQM

SEQ ID NO: 33030 - protein, 241 aa, Propionispora hippei
  misc_feature (1)..(241): tr|A0A1M6AV42|A0A1M6AV42_9FIRM 7-carboxy-7-deazaguanine synthase OS=Propionispora hippei DSM 15287 OX=1123003 GN=queE PE=3 SV=1
MNTLQLIELFSSIQGEGPYIGYRQLFLRLAGCNAACIFCDTSESRSIPTTCMLEQTPGQRDFTVLPNPVPVDALAHRVNRLSQTGHHSVSITGGEPLCQSEALLQLLPLLQGRIYLETNGTLPEELAKVLPYIDIVSMDIKLPSTSGREYWQEHRRFLTLASQKEVFVKIVVSSLTGEKEFLEAIHLIGSADVMLPLILQPVTHAALAVETEQIVKWQERALDYLPNVRVIPQTHKYLGVL

SEQ ID NO: 33031 - protein, 197 aa, Propionispora sp.
  misc_feature (1)..(197): tr|A0A0K8JDB8|A0A0K8JDB8_9FIRM 7-carboxy-7-deazaguanine synthase OS=Propionispora sp. 2/2-37 OX=1677858 GN=que E PE=3 SV=1
MSGSYPVIELFESIQGEGYFQGLGAGFIRLAGCNLRCSWCDTRQALTLEKAALMTIDEILRAGRFTQPRVIITGGEPTLHDLGPLVKALKSVGKYVCLETNGTNPVPAEWGIDWITASPKPDSNYVLRCRADELKYVVDSTFAAAVVSAGAVPAERIYLQIEGGKAESAAKAYQIVMENPHLQLRVGTQLHKMIHVE

SEQ ID NO: 33032 - protein, 241 aa, Propionispora vibrioides
  misc_feature (1)..(241): tr|A0A1H8NK57|A0A1H8NK57_9FIRM 7-carboxy-7-deazaguanine synthase OS=Propionispora vibrioides OX=112903 GN=queE PE=3 SV=1
MNTLQLIESFSSIQGEGPYIGYRQLFLRLAGCNAACIFCDTSESRGIPATCMLEQTPGQRDFTVLPNPVPVDALAHRVNHLSKAGHHSVSITGGEPLCQSEALLQLLPLLQGRIYLETNGTLPEELAKVLPYIDIVSMDIKLPSTSGREYWQEHHRFLTLASQKEVFVKIVVSSLTGEGEFLEAIHLISSVDVMLPLILQPVTHAALAIETERIVKWQERALDYLPNVRVIPQTHKYLGVL

SEQ ID NO: 33033 - protein, 219 aa, Propionivibrio dicarboxylicus
  misc_feature (1)..(219): tr|A0A1G8LGQ3|A0A1G8LGQ3_9RHOO 7-carboxy-7-deazaguanine synthase OS=Propionivibrio dicarboxylicus OX=83767 GN= queE PE=3 SV=1
MVARDESLTLRVSEIFYSLQGEASRIGLPTVFVRLTGCPLRCSWCDTTHAFTGGARMSLDAILHRVAEFGTRHVCVTGGEPLAQTACLVLLTALCDAGYDVSLETSGALDVSAVDSRVSRIVDLKAPSSGETEKNLWANLACLTAADEIKFVVADRQDYEWTRQVIRDNRLEGVCPLLISPVQGAIGPQMLAEWVLADRLPVRFQLQLHKLLWGNMQGK

SEQ ID NO: 33034 - protein, 232 aa, Prosthecobacter debontii
  misc_feature (1)..(232): tr|A0A1T4WKX8|A0A1T4WKX8_9BACT 7-carboxy-7-deazaguanine synthase OS=Prosthecobacter debontii OX=48467 GN=queE PE=3 SV=1
MRISEIFYSVQGEGSLTGVPSVFVRTSGCNLRCTWCDTPYASWKPEGPEMPTAEIMAEVLRHPARHVVVTGGEPLIAKGIHELLAAFHQAGKHITIETAGTILPEGIPVDLASISPKLANSTPSVEKAGAAWVQRHEQTRLQPAVLKAWLEHAPDYQLKFVISSEADLQEAQTVIDSIGLPVPPEKVLLMPEGTSMEAMRSRYSLLVAACLSHGYRLSPRLHIELFGNKRGT

SEQ ID NO: 33035 - protein, 231 aa, Prosthecobacter fusiformis
  misc_feature (1)..(231): tr|A0A4R7S5V0|A0A4R7S5V0_9BACT 7-carboxy-7-deazaguanine synthase OS=Prosthecobacter fusiformis OX=48464 GN=que E PE=3 SV=1
MRISEIFYSVQGEGSLTGVPSVFVRTSGCNLRCTWCDTPYASWQPEGPEMTLDAILAEVMKHPARHVVVTGGEPMVAKDIREFLTRLHQAGKHITVETAGTVSPADLHVDLASISPKLANSTPTVEKAGPWAARHEQTRLQPAVLREWLEQAVDYQLKFVISTEADLAEAQAVVANIGLPVPPDKVLLMPEGVSMEAMRSRYDLLVHACLTHGYRLSPRLHIELFGNTRGT

SEQ ID NO: 33036 - protein, 222 aa, Prosthecochloris aestuarii
  misc_feature (1)..(222): tr|B4S3I1|B4S3I1_PROA2 7-carboxy-7-deazaguanine synthas e OS=Prosthecochloris aestuarii (strain DSM 271 / SK 41 3) OX=290512 GN=queE PE=3 SV=1
MNRTLLINEIFLSIQGESSRAGYPCVFVRLTGCSSRCTWCDTRYAMTNGTTTSLQNIIDTIAGFKTPLVEITGGEPLEQENVYPLMQQLCNRGYNVMLETGGFHPVSRVDHRVHKIIDLKPPSSGSSSNNHETNIRIALKAPPAEQALFEFKIVIAGKEDYEWATRLLQRTRINEHCPVVMGTVFSELSPAILASWILKDHLNVRMQLQLHKYIWPPDMRGV

SEQ ID NO: 33037 - protein, 223 aa, Prosthecochloris marina
  misc_feature (1)..(223): tr|A0A317T5V5|A0A317T5V5_9CHLB 7-carboxy-7-deazaguanine synthase OS=Prosthecochloris marina OX=2017681 GN=queE PE=3 SV=1
MSETLLVNEIFLSIQGESTYAGWPCIFTRLSGCDSSCTWCDTRYASGKEGKNMTITEIINQIESYDTPLIEITGGEPLLQENVYALMRQLCDRGHTLLLETGGFVPVDRVDPRVHKIIDLKAPSSGESEKNCLKNIEYVIASSVLQKKTFEFKLIIASRQDYEWAKNLLSSWGLTDHCTVLMGTVFGRLDPAELAKWILEDHLHVKLQLQLHKYIWNPDTRGV

SEQ ID NO: 33038 - protein, 224 aa, Prosthecochloris sp.
  misc_feature (1)..(224): tr|A0A1B1Q3Z1|A0A1B1Q3Z1_9CHLB 7-carboxy-7-deazaguanine synthase OS=Prosthecochloris sp. CIB 2401 OX=1868325 G N=queE PE=3 SV=1
MNGQTLRVNELFGSIQGESRHAGWPCAFVRLSGCSADCRWCDTRYAVTEEGILMTLEEIVGQVTSMDFPLVEVTGGEPLEQEHTPELLRLLADKGFRVLLETGGLHQVRGIDPRVYPVIDLKPPSSGISHRIEQDNLHLALGRKPGRPQDMEFKIVVADREDYLWAKELLARHHLTEHATVSMGTVFGALPPSELASWIIQDRLPVRMQLQIHKYIWPPHSRGK

SEQ ID NO: 33039 - protein, 222 aa, Prosthecochloris sp.; identical to SEQ ID NO: 33036
  misc_feature (1)..(222): tr|A0A369R4Q6|A0A369R4Q6_9CHLB 7-carboxy-7-deazaguanine synthase OS=Prosthecochloris sp. ZM OX=2283143 GN=queE PE=3 SV=1

SEQ ID NO: 33040 - protein, 224 aa, Prosthecochloris vibrioformis; identical to SEQ ID NO: 33038
  misc_feature (1)..(224): tr|A0A5C4S3P0|A0A5C4S3P0_PROVB 7-carboxy-7-deazaguanine synthase OS=Prosthecochloris vibrioformis OX=1098 GN=q ueE PE=3 SV=1

SEQ ID NO: 33041 - protein, 193 aa, Proteiniphilum saccharofermentans
  misc_feature (1)..(193): tr|A0A1R3SRW4|A0A1R3SRW4_9BACT 7-carboxy-7-deazaguanine synthase OS=Proteiniphilum saccharofermentans OX=16426 47 GN=queE PE=3 SV=1
MNLNVNEIFYSLQGEGGRSGQPSIFIRLAKCNLTCSFCDTDFERGVKMTTDEVLREIEQYSCKWIIWTGGEPTLQLNDAVVALFKEKGYLQAIETNGTRRVPEGIDYITCSPKQQFEKVRELIPEVDELRFPIQKGDPLPDVTILPKAKHHFLSPIFDNHNIIQENIDYCVSLVKENPLWALSLQIHKLIGIR

SEQ ID NO: 33042 - protein, 193 aa, Proteiniphilum sp.
  misc_feature (1)..(193): tr|A0A3M8EFT1|A0A3M8EFT1_9BACT 7-carboxy-7-deazaguanine synthase OS=Proteiniphilum sp. X52 OX=2382159 GN=queE PE=3 SV=1
MNLNVNEIFYSLQGEGGRSGQPSIFIRLAKCNLSCSFCDTDFERGVKLTTDELLREIEQYGCKWIIWTGGEPTLQLNDAVVALFKEKGYLQAIETNGTRRVPEGIDYITCSPKQQFEKVRELIPEVDELRFPIQKGDPLPDISILPKARYHFLSPIFDNHCIIRENIDYCVSLVKENPMWALSLQIHKLIGIR

SEQ ID NO: 33043 - protein, 209 aa, Proteobacteria bacterium
  misc_feature (1)..(209): tr|A0A1W9HM37|A0A1W9HM37_9PROT 7-carboxy-7-deazaguanine synthase OS=Proteobacteria bacterium SG_bin6 OX=182738 3 GN=queE PE=3 SV=1
MSYAVKEMFLTLQGEGVHAGRRAVFIRFAGCNLWSGREADRASAVCRFCDTDFVGTDGDGGGKFVDATGLAGAAARLWGDAEGAFCVLTGGEPMLQVDDALVEALHAAGFTIAIETNGTLPVHPGIDWVCVSPKAGSAVVQRRGDELKLVWPQPGSNLDVIEAWDFRHWLIQPMDSDTAVANREAAIALVLSRPKWRLSLQTHKLLGLR

SEQ ID NO: 33044 - protein, 209 aa, Proteobacteria bacterium
  misc_feature (1)..(209): tr|A0A1W9INF4|A0A1W9INF4_9PROT 7-carboxy-7-deazaguanine synthase OS=Proteobacteria bacterium HN_bin10 OX=18273 86 GN=queE PE=3 SV=1
MTYSVKEVFYTLQGEGARAGRAAVFVRFAGCNLWSGREQDRASAICQFCDTEFVGTDGDGGGKFETAEALADAAAALWPGGGAPYVVCTGGEPLLQLDAPLIAALHARGFEIAIETNGTISAPAGIDWVCVSPKANAELVQRTGNELKLVYPQSGCDPSQFEDMPFEHFFLSPMDNVAREANTQAAIAYCLAHPRWRLSLQTHKFIGVR

SEQ ID NO: 33045 - protein, 223 aa, Proteus hauseri
  misc_feature (1)..(223): tr|V6MIK7|V6MIK7_PROHU 7-carboxy-7-deazaguanine synthas e OS=Proteus hauseri ZMd44 OX=1312367 GN=queE PE=3 SV=1
MQYPINEVFQTLQGEGVFTGVPALFVRLQGCPVGCSWCDTKHTWEKEDEKKVPLGDIPIKTQESDAWGEASVTQILSLFQQQGYSAKHVVITGGEPCLYDLRPLTEGLEQAGFGCQIETSGTHDILCSEKTWVTLSPKVGMKGGFTVLPSAINRANEIKHPVGREKDIEALDALLVLRTEHPAPVVALQPISCKESATALCIKTCIERNWRFSMQTHKYLNIA

SEQ ID NO: 33046 - protein, 223 aa, Proteus hauseri
  misc_feature (1)..(223): tr|A0A410X718|A0A410X718_PROHU 7-carboxy-7-deazaguanine synthase OS=Proteus hauseri OX=183417 GN=queE PE=3 SV= 1
MQYPINEMFQTLQGEGIFTGVPALFVRLQGCPVGCSWCDTKHTWEKEEEKKVPIGDIPIKTQESDAWGNATVDEILALFQQQGYSARHVVITGGEPCLYDLRPLTEGLEQAGFNCQIETSGTHDILCSEQTWVTLSPKVGMRGGFTVLPSAINRANEIKHPVGRQKDIEALDALLTLRTSLPAPVVALQPISCKNSATKLCIETCIARNWRFSMQTHKYLNIA

SEQ ID NO: 33047 - protein, 223 aa, Proteus mirabilis
  misc_feature (1)..(223): tr|A0A379GE03|A0A379GE03_PROMI 7-carboxy-7-deazaguanine synthase OS=Proteus mirabilis OX=584 GN=queE PE=3 SV=1
MQYPINEVFQTLQGEGVFTGVPALFVRLQGCPVGCSWCDTKHTWEKEESKKVPLGDIPIKTQESDTWGIATVEDILSLFRQQRYSAKHVVITGGEPCLYDLRPLTEGLEKAGFDCQIETSGTHDILCSEATWVTLSPKVGMRGGLNVLSSAINRANEIKHPVAREKDIEALDDLLRLRTQQPMAIVALQPISCKESATALCIKTCIERNWRFSMQTHKYLNIA

SEQ ID NO: 33048 - protein, 223 aa, Proteus mirabilis
  misc_feature (1)..(223): tr|A0A1Z1SS28|A0A1Z1SS28_PROMI 7-carboxy-7-deazaguanine synthase OS=Proteus mirabilis OX=584 GN=queE PE=3 SV=1
MQYPINEVFQTLQGEGVFTGVPALFVRLQGCPVGCSWCDTKHTWEKEESKKVPLGDIPIKTQESDTWGIATVEDILSLFRQQRYSAKHVVITGGEPCLYDLRPLTEGLEKAGFDCQIETSGTHDILCSEATWVTLSPKVGMRGGLSVLSSAINRANEIKHPVAREKDIEALDDLLRLRTQQPMAIVALQPISCKESATALCIKTCIERNWRFSMQTHKYLNIA

SEQ ID NO: 33049 - protein, 223 aa, Proteus penneri
  misc_feature (1)..(223): tr|A0A379EQB8|A0A379EQB8_9GAMM 7-carboxy-7-deazaguanine synthase OS=Proteus penneri OX=102862 GN=queE PE=3 SV= 1
MQYPINEVFQTLQGEGVFTGVPALFVRLQGCPVGCSWCDTKHTWEKEDEKKVLLGDIPIKTQESDTWGEASVAQILSLFQQQGYSAKHVVITGGEPCLYDLRPLTEGLEQAGFACQIETSGTHDILCSEKTWVTLSPKVGMKGGFTVLPSAINRANEIKHPVGREKDIEALDTLLTLRTEHPAPVVALQPISCKESATALCIKTCIERNWRFSMQTHKYLNIA

SEQ ID NO: 33050 - protein, 152 aa, Proteus penneri
  misc_feature (1)..(152): tr|C0AXF1|C0AXF1_9GAMM 7-carboxy-7-deazaguanine synthas e OS=Proteus penneri ATCC 35198 OX=471881 GN=queE PE=3 SV=1
MQYPINEVFQTLQGEGVFTGVPALFVRLQGCPVGCSWCDTKHTWEKEDEKKVLLGDIPIKTQESDTWGEASVAQILSLFQQQGYSAKHVVITGGEPCLYDLRPLTEGLEQAGFACQIETSGTHDILCSEKTWVTLSPKVGMKGGIYSITQCH

SEQ ID NO: 33051 - protein, 223 aa, Proteus sp.
  misc_feature (1)..(223): tr|A0A5J6RSJ3|A0A5J6RSJ3_9GAMM 7-carboxy-7-deazaguanine synthase QueE OS=Proteus sp. CD3 OX=1921565 GN=BTA34_1 3080 PE=4 SV=1
MQYPINEVFQTLQGEGVFTGVPALFVRLQGCPVGCSWCDTKHTWEKEDDKKVPLGDIPIKTQESDTWGEASVAQILSLFQQQGYSAKHVVITGGEPCLYDLRPLTEGLEQAGFACQIETSGTHDILCSEKTWVTLSPKVGMKGGFTVLPSAINRANEIKHPVGRAKDIEALDALLTLRTEHPAPVVALQPISCKESATALCIKTCIERNWRFSMQTHKYLNIA

SEQ ID NO: 33052 - protein, 223 aa, Proteus sp.; identical to SEQ ID NO: 30867
  misc_feature (1)..(223): tr|A0A1F2H5N3|A0A1F2H5N3_9GAMM 7-carboxy-7-deazaguanine synthase OS=Proteus sp. HMSC10D02 OX=1581079 GN=queE P E=3 SV=1

SEQ ID NO: 33053 - protein, 223 aa, Proteus vulgaris
  misc_feature (1)..(223): tr|A0A292C979|A0A292C979_PROVU 7-carboxy-7-deazaguanine synthase OS=Proteus vulgaris OX=585 GN=queE PE=3 SV=1
MQYPINEVFQTLQGEGVFTGVPALFVRLQGCPVGCSWCDTKHTWEKEDQKKVPLGDISIKTQESDAWGEASVAQILSLFQQQGYSAKHVVITGGEPCLYDLRPLTEGLEQAGFACQIETSGTHDILCSEKTWVTLSPKVGMKGGFKVLTSAINRANEIKHPVGREKDIEALDALLTLRTEHPAPVVALQPISCKESATALCIKTCIERNWRFSMQTHKYLNIA

SEQ ID NO: 33054 - protein, 223 aa, Proteus vulgaris
  misc_feature (1)..(223): tr|A0A0G4QF26|A0A0G4QF26_PROVU 7-carboxy-7-deazaguanine synthase OS=Proteus vulgaris OX=585 GN=queE PE=3 SV=1
MQYPINEVFQTLQGEGVFTGVPALFVRLQGCPVGCSWCDTKHTWEKEDEKKVPLGDIPIKTQESDTWGEASVAEILSLFQQQGYSAKHVVITGGEPCLYDLRPLTQGLEQAGFACQIETSGTHDILCSEKTWVTLSPKVGMRGGFRVLSSAINRANEIKHPVGREKDIEALDTLLALRTEQPAPVVALQPISCKESATALCIKTCIERNWRFSMQTHKYLNIA

SEQ ID NO: 33055 - protein, 223 aa, Providencia alcalifaciens
  misc_feature (1)..(223): tr|A0A4R3NIP1|A0A4R3NIP1_9GAMM 7-carboxy-7-deazaguanine synthase OS=Providencia alcalifaciens OX=126385 GN=que E PE=3 SV=1
MKYPINEIFQTLQGEGVFTGVPAVFIRLQGCPVGCSWCDTKQTWDKEPAKESTLGDIALKTQDSDLWAMSDVESLIQLMQQNGYTAKHIVITGGEPCIYDLTNLTQSLEANGFQCQIETSGTYPIICTENTWVTVSPKVGMKGGLQVLEQAINRANEIKHPVAREKDIEALDQLLSLRTQGEPPIVALQPISQKVSATKLCIDTCIQRNWRLSIQAHKYLNIQ

SEQ ID NO: 33056 - protein, 223 aa, Providencia alcalifaciens
  misc_feature (1)..(223): tr|X6QF20|X6QF20_9GAMM 7-carboxy-7-deazaguanine synthas e OS=Providencia alcalifaciens F90-2004 OX=1256987 GN=q ueE PE=3 SV=1
MKYPINEIFQTLQGEGVFTGVPAVFIRLQGCPVGCSWCDTKQTWDKEPAKESTLGDIALKTQDSDFWAMSDAESLIQLMLQNGYTAKHIVITGGEPCIYDLTALTQTLEANGFQCQIETSGTYPILCTENTWVTVSPKVGMKGGLQVLEQAINRANEIKHPVAREKDIEALDQLLSLRTQGQLPIVALQPISQKTSATKLCIDTCIQRNWRLSIQTHKYLNIQ

SEQ ID NO: 33057 - protein, 223 aa, Providencia burhodogranariea
  misc_feature (1)..(223): tr|K8X782|K8X782_9GAMM 7-carboxy-7-deazaguanine synthas e OS=Providencia burhodogranariea DSM 19968 OX=1141662 GN=queE PE=3 SV=1
MKYPINEIFQTLQGEGVFTGVPAVFIRLQGCPVGCSWCDTKHTWEKEENKETTLGDIALKNMDIDTWALANTYDLLNLMAKQGYTAKHIVITGGEPCIYDLGPLTSELEAQGFQCQIETSGTYPIQCSNQTWVTVSPKVGMKGGLQVLTESINRANEIKHPVARERDIEELDNLLSRRTEKVQPVVALQPISQKQSATKLCIDTCIARNWRLSIQTHKYLNIA

SEQ ID NO: 33058 - protein, 223 aa, Providencia heimbachae
  misc_feature (1)..(223): tr|A0A4D7JCQ5|A0A4D7JCQ5_9GAMM 7-carboxy-7-deazaguanine synthase OS=Providencia heimbachae OX=333962 GN=queE P E=3 SV=1
MKYPINEIFQTLQGEGVFTGVPAIFIRLQGCPVGCSWCDTKQTWEVETNKETVLGDIALKTLDNDEWAMADATALIALMTAKNYSAKHIVITGGEPCIYDLTPLTQLLELNGYQCQIETSGTYPIQCSETTWVTVSPKVGMKGGLQVLSQAVNRANEIKHPVAREKDIEALDNILALRTTKPAPIVALQPISQKASATRLCIDTCIERNWRLSIQTHKYLAIP

SEQ ID NO: 33059 - protein, 223 aa, Providencia heimbachae
  misc_feature (1)..(223): tr|A0A1B7JNN2|A0A1B7JNN2_9GAMM 7-carboxy-7-deazaguanine synthase OS=Providencia heimbachae ATCC 35613 OX=13542 72 GN=queE PE=3 SV=1
MKYPINEIFQTLQGEGVFTGVPAIFIRLQGCPVGCSWCDTKQTWEVETNKETVLGDIALKTLDNDEWAMADATALIALMTAKNYSAKHIVITGGEPCIYDLTPLTQLLELNGYQCQIETSGTYPIQCSETTWVTVSPKVGMKGGLQVLSQAVNRANEIKHPVAREKDIEALDNILALRTIKPAPIVALQPISQKASATRLCIDTCIERNWRLSIQTHKYLAIP

SEQ ID NO: 33060 - protein, 223 aa, Providencia rettgeri
  misc_feature (1)..(223): tr|A0A2A5PZV8|A0A2A5PZV8_PRORE 7-carboxy-7-deazaguanine synthase OS=Providencia rettgeri OX=587 GN=queE PE=3 S V=1
MKYPINEIFQTIQGEGVFTGVPAVFIRLQGCPVGCSWCDTKQTWEKEQDKESTLGDIALKTIDSDAWAMADGEALVQLMKEKHFSAQHIVITGGEPCIYDLQPLTGILEQHGYQCQIETSGTYPIQCTDNTWVTVSPKVGMKGGLQVISQAVNRANEIKHPVAREKDIEALEKILALRTVETPPVVALQPISQKAAATKLCIETCIQRNWRLSIQTHKYLDIQ

SEQ ID NO: 33061 - protein, 223 aa, Providencia rettgeri; identical to SEQ ID NO: 33060
  misc_feature (1)..(223): tr|D4BZ97|D4BZ97_PRORE 7-carboxy-7-deazaguanine synthas e OS=Providencia rettgeri DSM 1131 OX=521000 GN=queE PE =3 SV=1

SEQ ID NO: 33062 - protein, 230 aa, Providencia rustigianii
  misc_feature (1)..(230): tr|D1P4S3|D1P4S3_9GAMM 7-carboxy-7-deazaguanine synthas e OS=Providencia rustigianii DSM 4541 OX=500637 GN=queE PE=3 SV=1
MDHFRSDMKYPINEIFQTLQGEGVFTGVPAVFIRLQGCPVGCSWCDTKQTWDKEPAKESTLGDIALKTQDNDLWAMADAEALIQLMQQSGYTAKHIVITGGEPCIYDLNPLTETLETNGFQCQIETSGTYPILCTEKTWVTVSPKVGMKGGLKVLNQAVDRANEIKHPVAREKDIEALDQLLARRTNNAPLIVALQPISQKVSATKLCIDTCIQRNWRLSIQTHKYLNIQ

SEQ ID NO: 33063 - protein, 223 aa, Providencia rustigianii
  misc_feature (1)..(223): tr|A0A379G6H6|A0A379G6H6_9GAMM 7-carboxy-7-deazaguanine synthase OS=Providencia rustigianii OX=158850 GN=queE PE=3 SV=1
MKYPINEIFQTLQGEGVFTGVPAVFIRLQGCPVGCSWCDTKQTWDKEPAKESTLGDIALKTQDNDLWAMADAEALIQLMQQSGYTAKHIVITGGEPCIYDLTPLTETLETNGFQCQIETSGTYPILCTEKTWVTVSPKVGMKGGLKVLNQAVDRANEIKHPVAREKDIEALDQLLARRTNNAPLIVALQPISQKVSATKLCIDTCIQRNWRLSIQTHKYLNIQ

SEQ ID NO: 33064 - protein, 223 aa, Providencia sneebia
  misc_feature (1)..(223): tr|K8W0U6|K8W0U6_9GAMM 7-carboxy-7-deazaguanine synthas e OS=Providencia sneebia DSM 19967 OX=1141660 GN=queE P E=3 SV=1
MKYPINEIFQTLQGEGVFTGVPAVFIRLQGCPVGCSWCDTKHTWEKEHDKETTLGDIALKNLDVDTWALADAKELVNLMKQQGYTAKHIVITGGEPCIYDLTVLTNTLEEYGYQCQIETSGTYPIQCSSKTWVTVSPKVGMKGGLEVLTTSINRANEIKHPVARERDIEQLESLLARRTEGAEPIIALQPISQKASATKLCIDTCIARNWRLSIQTHKYLNIA

SEQ ID NO: 33065 - protein, 223 aa, Providencia sp.
  misc_feature (1)..(223): tr|A0A345M1R1|A0A345M1R1_9GAMM 7-carboxy-7-deazaguanine synthase OS=Providencia sp. WCHPHu000369 OX=2027290 GN =queE PE=3 SV=1
MKYPINEIFQTIQGEGVFTGVPAVFIRLQGCPVGCSWCDTKQTWEIEQDKESTLGDIALKTIDSDAWAMSDSEALIQLMKEKHFSAQHIVITGGEPCIYDLQPLTEALEQHGYQCQIETSGTYPIQCTNKTWVTVSPKVGMKGGLQVISQAVNRANEIKHPVAREKDIEALEKILALRTVEMPPVVALQPISQKTAATKLCIETCIQRNWRLSIQTHKYLDIQ

SEQ ID NO: 33066 - protein, 223 aa, Providencia sp.
  misc_feature (1)..(223): tr|A0A356DB25|A0A356DB25_PROSP 7-carboxy-7-deazaguanine synthase OS=Providencia sp. OX=589 GN=queE PE=3 SV=1
MKYPINEIFQTLQGEGVFTGVPAVFIRLQGCPVGCSWCDTKQTWEKDPSKETTLGDIALKTLDSDEWAMSDTNTLIDLMREKKYSAKHIVITGGEPCIYDLTLLTNELELNGYQCQIETSGTYPIQCSDNTWVTVSPKVGMKGGLKVLKQAVNRANEIKHPVAREKDIQALDELLAMRTLETPPVVALQPISQKASATKLCIDTCIERNWRLSIQTHKYLAIP

SEQ ID NO: 33067 - protein, 223 aa, Providencia stuartii
  misc_feature (1)..(223): tr|A0A140NK61|A0A140NK61_PROSM 7-carboxy-7-deazaguanine synthase OS=Providencia stuartii (strain MRSN 2154) OX =1157951 GN=queE PE=3 SV=1
MNYPINEIFQTLQGEGVFTGVPAVFIRLQGCPVGCSWCDTKHTWEKEESKATTLGDIALKTVDTDTWALADSHELINLMKKQGYTAKHIVITGGEPCIYDLLPLTCELENQGYQCQIETSGTYPIQCSDKTWVTVSPKVGMKGGLQVLTESINRANEIKHPVAREKDIEELDKLLAKRTEKHAPVVALQPISQKSLATKLCIDTCIARNWRLSIQTHKYLNIA

SEQ ID NO: 33068 - protein, 223 aa, Providencia stuartii; identical to SEQ ID NO: 33067
  misc_feature (1)..(223): tr|A0A379GJM9|A0A379GJM9_PROST 7-carboxy-7-deazaguanine synthase OS=Providencia stuartii OX=588 GN=queE PE=3 S V=1

SEQ ID NO: 33069 - protein, 215 aa, Unknown
  misc_feature (1)..(215): tr|A0A368DYG3|A0A368DYG3_9PROT 7-carboxy-7-deazaguanine synthase OS=PS1 clade bacterium OX=2175152 GN=queE PE= 3 SV=1
MTYSVKEIYYTLQGEGAQSGRPAVFCRFAGCNLWSGLEADRAEAVCTFCDTDFIGTDGENGGKFTTAEELADKIATLWPDKDALADAYVVFTGGEPLLQLDTTLLEACKAHGFETAVETNGTQIAPANLDWICVSPKPNSPLAQDRGHELKFVYPQDTLSPYEFADYDFEHFFIQPMEVEDEEAYHHNIQASIVFCLQNPQWRLSLQTHKIIGIS

SEQ ID NO: 33070 - protein, 211 aa, Pseudacidovorax intermedius
  misc_feature (1)..(211): tr|A0A147H7I6|A0A147H7I6_9BURK 7-carboxy-7-deazaguanine synthase OS=Pseudacidovorax intermedius OX=433924 GN=q ueE PE=3 SV=1
MAYAVKEIFYTLQGEGAQAGRPAVFCRFAGCNLWSGREEDRATAQCRFCDTDFVGTDGTLGGKFATAELLADRIAACWPAPAHDHRFVVLTGGEPLLQVDDALVAALHAQGFAIAVETNGTLPAPAGIDWVCVSPKAGNPLVQRRGDELKLVWPQAGIDLAELESLDFGRRYLQPLDDPRRDTHTRECIDLCLARPLWRLSTQTHKVIGIR

SEQ ID NO: 33071 - protein, 211 aa, Pseudacidovorax intermedius
  misc_feature (1)..(211): tr|A0A370F8F0|A0A370F8F0_9BURK 7-carboxy-7-deazaguanine synthase OS=Pseudacidovorax intermedius OX=433924 GN=q ueE PE=3 SV=1
MAYAVKEIFYTLQGEGAQAGRPAVFCRFAGCNLWSGREEDRAGAQCRFCDTDFVGTDGTLGGKFATAELLADQVAACWPAPAHDHRFVVLTGGEPLLQVDDALVAALHARGFAIAIETNGTLPAPKGIDWICVSPKAGNALVQRRGDELKLVWPQAGIDLAQMEALDFGRHYLQPLDDPQRAAHTRACIDVCLQRPQWRLSTQTHKVIGIR

SEQ ID NO: 33072 - protein, 204 aa, Pseudanabaena biceps
  misc_feature (1)..(204): tr|L8MUL7|L8MUL7_9CYAN 7-carboxy-7-deazaguanine synthas e OS=Pseudanabaena biceps PCC 7429 OX=927668 GN=queE PE =3 SV=1
MNRVNFANSLPIVETFHSLQGEGTWMGTNAFFIRLAGCDVGCPWCDTKISWNMKRHPQIAIADLVKQAIVVKPAIVVITGGEPLMHDLTELTAELKTQGLRVHLETSGSHPFSGNFDWVTFSPKRFKPPHASIYERVNELKIVVKDASDLIWAEHNAEKVAINVMKYLQAEWETPSSKDLVLQYVLSHANWCVSIQTHKLLGVR

SEQ ID NO: 33073 - protein, 204 aa, Pseudanabaena frigida
  misc_feature (1)..(204): tr|A0A2W4W688|A0A2W4W688_9CYAN 7-carboxy-7-deazaguanine synthase OS=Pseudanabaena frigida OX=945775 GN=queE PE =3 SV=1
MDKVQQIDRLPIVETFHSVQGEGTWMGVNAFFIRLAGCDVGCPWCDTKISWNVKRHPEIAIADLVSKAVNAKPAMVVITGGEPLMHDLTELTQQLKNQGLRVHLETSGSHLFSGNFDWVTFSPKQFKHPHASIYEKVSELKVVVKDESDLMWAEQNAARLLPNVVKYLQAEWETTSSKDLVMQYVLSHADWRVSIQTHKLLGVR

SEQ ID NO: 33074 - protein, 204 aa, Pseudanabaena sp.
  misc_feature (1)..(204): tr|A0A256BJR9|A0A256BJR9_9CYAN 7-carboxy-7-deazaguanine synthase OS=Pseudanabaena sp. SR411 OX=1980935 GN=queE PE=3 SV=1
MDKVNCLNHLPIVETFHSVQGEGAWMGTNAFFIRLAGCDVGCPWCDTKISWNLKRHPEIAIADLVDEAVNAKPAMVVITGGEPLMHDLNDLTRELKAQGLQIHLETSGSHPFSGIFDWVTFSPKQFKHPHASIYEHVSELKVVVKDASDLLWAEQNAARVPSHMVKYLQAEWETASSKDLVLQYVLSHPDWRVSIQTHKLLGVR

SEQ ID NO: 33075 - protein, 204 aa, Pseudanabaena sp.
  misc_feature (1)..(204): tr|A0A352JDC4|A0A352JDC4_9CYAN 7-carboxy-7-deazaguanine synthase OS=Pseudanabaena sp. OX=1153 GN=queE PE=3 SV= 1
MTQIHHLTHLPVVETFHSVQGEGTWMGVNAFFIRLAGCDVGCPWCDTKISWNIKRHHQIEISDLVIEAVNAHPAIVIITGGEPLMHDLTELTRQLKDQGLRVHLETSGSHPFSGHFDWVTFSPKKFKFPHTSIYHQVSELKVIIKDASDLSWAEQNAARVPLSVVKYLQAEWETESSNELVMQYVLNHADWRISVQTHKLLGVR

SEQ ID NO: 33076 - protein, 208 aa, Pseudarcicella hirudinis
  misc_feature (1)..(208): tr|A0A1I5RZC7|A0A1I5RZC7_9BACT 7-carboxy-7-deazaguanine synthase OS=Pseudarcicella hirudinis OX=1079859 GN=que E PE=3 SV=1
MEMLKESPTQTLPVMEAFYTLQGEGFHQGKAAYFIRLGGCDVGCHWCDVKESWDINAHPHFSIEQIVAEAAQHEGRLAVVTGGEPLMHNLDELTKALHQAGIQTNIETSGVCETVSGDWDWICFSPKKFKSPNPDIFRKAHELKVIVYNQSDFEWAESFAEKVSENCILYLQPEWGRQEVMLPQIIEYIKHNPAWRISLQVHKFMNIP

SEQ ID NO: 33077 - protein, 215 aa, Pseudarcicella sp.
  misc_feature (1)..(215): tr|A0A2S2DUA0|A0A2S2DUA0_9BACT 7-carboxy-7-deazaguanine synthase OS=Pseudarcicella sp. HME7025 OX=2183547 GN=q ueE PE=3 SV=1
MQSNSKDIKSVLKRDAFEYPVMESFYTIQGEGKFQGHAAYFIRLGGCDVGCHWCDVKESWPIDTHPIKTVAELVQEASQFLGRIVVITGGEPLMHNLNPLTEALQEAGFRTHIETSGVGKQITGVWDWVCFSPKKFKEPNPGIFSLVDELKVVIFHPSDIAWSQTWTDKLPSESLWLMQPEWSKQADMNPLIVDFVKENPRWQISVQTHKFLQIP

SEQ ID NO: 33078 - protein, 223 aa, Pseudescherichia vulneris
  misc_feature (1)..(223): tr|A0A090UXJ3|A0A090UXJ3_PSEVU 7-carboxy-7-deazaguanine synthase OS=Pseudescherichia vulneris NBRC 102420 OX=1 115515 GN=ygcF PE=3 SV=1
MQYPINEMFQTLQGEGYFTGVPAIFIRLQGCPVGCAWCDTKHTWDKLADREVSLYSVLAKTKESDKWGPASSEDLLAIIERQGYTARHVVITGGEPCIHDLIPLTMLLEKNGFSCQIETSGTHEVRTSTNTWVTVSPKVNMRGGYDILQQALDRADEIKHPVGRMRDVEALDELLATLHDDKPRVIALQPISQKEDATRLCIETCIARNWRLSMQTHKYLNIA

SEQ ID NO: 33079 - protein, 230 aa, Pseudidiomarina sp.
  misc_feature (1)..(230): tr|A0A443YXL1|A0A443YXL1_9GAMM 7-carboxy-7-deazaguanine synthase OS=Pseudidiomarina sp. R04H25 OX=2487740 GN=q ueE PE=3 SV=1
MLENPISTLYPINEIFQTIQGEGVFTGVPAIFIRLQGCPVGCPWCDTQHTWEQRESDQVEATEVVEKQQPSSNWASMTADEMVKLIEAKGYTAKHVVITGGEPAMFNLIPLGQALEQKGYQLQIETSGTFAIQVTPSTWVTVSPKLDMPGGYLVRPDCMKRANEIKYPVAMQKHIEQFDKLLKACPPRAEAIIALQPISQRPRATELAIKVCIERNWRLSAQLHKYLKIE

SEQ ID NO: 33080 - protein, 221 aa, Pseudoalteromonadaceae bacterium
  misc_feature (1)..(221): tr|A0A2D6VN69|A0A2D6VN69_9GAMM 7-carboxy-7-deazaguanine synthase OS=Pseudoalteromonadaceae bacterium OX=202678 3 GN=queE PE=3 SV=1
MYKINEVFETIQGEASFTGTPSIFLRLQGCPVGCAWCDTKQTWDVDNVYKVSLDDTVEKKADSDHWAEATAEQVLALFKERGYNAKHVVITGGEPCMYDLNPVCELLHANGYSTQIETSGTFEILVPEQTWVTVSPKINMRGGYKVLRSAMQRADEIKHPVAMQKHVEELEDLFLKTGVNPRLVYLQPISQKISATKLAIETCIAKNWRLSVQVHKYLGIS

SEQ ID NO: 33081 - protein, 221 aa, Pseudoalteromonadaceae bacterium
  misc_feature (1)..(221): tr|A0A2D7MVY6|A0A2D7MVY6_9GAMM 7-carboxy-7-deazaguanine synthase OS=Pseudoalteromonadaceae bacterium OX=202678 3 GN=queE PE=3 SV=1
MYKINEVFETIQGEASFTGTPSIFLRLQGCPVGCAWCDTKQTWEVDNVYKVSLDETVEKKADSDHWADASAEQVLELFKSRGYTAKHVVITGGEPCMYDLNPVCKLLHDNGFTTQIETSGTFEILAPEQTWVTVSPKINMRGGYEVLTSAMKRANEIKHPVAMQKHVEELEALFAKTGVNPKLVYLQPISQKVSATKLAIDTCIAKNWRLSVQVHKYLGIS

SEQ ID NO: 33082 - protein, 221 aa, Pseudoalteromonas agarivorans
  misc_feature (1)..(221): tr|A0A290RXG7|A0A290RXG7_9GAMM 7-carboxy-7-deazaguanine synthase OS=Pseudoalteromonas agarivorans DSM 14585 OX =1312369 GN=queE PE=3 SV=1
MYKINEVFETIQGEASFTGTPSIFLRLQGCPVGCAWCDTKQTWEVDNVYKVSLDETVEKKADSDHWADASAEQVLELFKSRGYTAKHVVITGGEPCMYDLNPVCKLLHDNGFTTQIETSGTFEILAPEQTWVTVSPKINMRGGYEVLTSAMKRANEIKHPVAMQKHVEELEELFAKTGVNPKLVYLQPISQKVSATKLAIDTCIAKNWRLSVQVHKYLGIS

SEQ ID NO: 33083 - protein, 221 aa, Pseudoalteromonas agarivorans; identical to SEQ ID NO: 33081
  misc_feature (1)..(221): tr|N6VTA5|N6VTA5_9GAMM 7-carboxy-7-deazaguanine synthas e OS=Pseudoalteromonas agarivorans S816 OX=1307437 GN=q ueE PE=3 SV=1

SEQ ID NO: 33084 - protein, 221 aa, Pseudoalteromonas aliena
  misc_feature (1)..(221): tr|A0A1Q2H2V8|A0A1Q2H2V8_9GAMM 7-carboxy-7-deazaguanine synthase OS=Pseudoalteromonas aliena OX=247523 GN=queE PE=3 SV=1
MYKINEVFETIQGEASFTGTPSIFLRLQGCPVGCSWCDTKQTWDVDNVYKVSLDETVEKKADSDHWANASAEQILALFQSRGYTAKHVVITGGEPCMFDLNPVCNLLHEHGFSTQIETSGTFEILAPEQTWVTVSPKINMRGGYEVLTSAMKRANEIKHPVAMQKHVEELEELFAKTGVNPKLVYLQPISQKVSATKLAIDTCIAKNWRLSIQVHKYLGIS

SEQ ID NO: 33085 - protein, 221 aa, Pseudoalteromonas amylolytica
  misc_feature (1)..(221): tr|A0A1S1MS07|A0A1S1MS07_9GAMM 7-carboxy-7-deazaguanine synthase OS=Pseudoalteromonas amylolytica OX=1859457 G N=queE PE=3 SV=1
MYKINEIFETIQGEASYTGVPSIFLRLQGCPVGCAWCDTKQTWEIDPTYKISLDGTVEKKTDSQWWAEANAEQIIELFQQRGYLAKHVVITGGEPCMFDLVPLCERLHQQGYSTQIETSGTFEIKVPEQTWVTVSPKINMRGGYEVLASAMQRADEIKHPVAMQKHVEELEALFEQTGVTPKLVYLQPISQKAKATKLAIDTCMKKNWRLSVQVHKYIGIN

SEQ ID NO: 33086 - protein, 221 aa, Pseudoalteromonas arctica
  misc_feature (1)..(221): tr|A0A290S1I5|A0A290S1I5_9GAMM 7-carboxy-7-deazaguanine synthase OS=Pseudoalteromonas arctica A 37-1-2 OX=1117 313 GN=queE PE=3 SV=1
MYKINEVFETIQGEASFTGTPSIFLRLQGCPVGCSWCDTKQTWDVDNVYKVSLDETVEKKADSDHWANASAEQILALFQSRGYTAKHVVITGGEPCMFDLNPVCNLLHEHGFSTQIETSGTFEILAPEQTWVTVSPKINMRGGYEVLTSTMKRANEIKHPVAMQKHVEELEELFAKTGVNPKLVYLQPISQKVSATKLAIDTCIAKNWRLSIQVHKYLGIS

SEQ ID NO: 33087 - protein, 248 aa, Pseudoalteromonas atlantica
  misc_feature (1)..(248): tr|Q15RM0|Q15RM0_PSEA6 7-carboxy-7-deazaguanine synthas e OS=Pseudoalteromonas atlantica (strain T6c / ATCC BAA -1087) OX=342610 GN=queE PE=3 SV=1
MLMLSYPVDKSQITLSKTTGKLLNTYKINEVFESLQGEGAHTGVPSIFIRLQGCPVGCPWCDTKHTWEIDQNLKVAAPVVMAQNEDTAQWFEHTPEQLLALFKQHEYTASNIILTGGEPCMYDLTDLSSVLIENGFSVQIETSGTYEILTHPDTWVTVSPKVNMPGKRDVLKSAMHRANEIKHPVAMEKHIEELEHVLTLLVGSDNPKPLIYLQPISQQKRATELCIKTCIARNWRLSLQTHKFIGIE

SEQ ID NO: 33088 - protein, 221 aa, Pseudoalteromonas atlantica
  misc_feature (1)..(221): tr|A0A510ZRR8|A0A510ZRR8_PSEAF 7-carboxy-7-deazaguanine synthase OS=Pseudoalteromonas atlantica OX=288 GN=queE PE=3 SV=1
MYKINEVFETIQGEASFTGTPSIFLRLQGCPVGCAWCDTKQTWEVDNVYKVSLDETVEKKADSDHWADASAEQVLELFKSRGYTAKHVVITGGEPCMYDLNPVCKLLHDNGFTTQIETSGTFEILAPEQTWVTVSPKINMRGGYEVLTSAMKRANEIKHPVAMQKHVDELEALFAKTGVNPKLVYLQPISQKVSATKLAIDTCIAKNWRLSVQVHKYLGIS

SEQ ID NO: 33089 - protein, 221 aa, Pseudoalteromonas byunsanensis
  misc_feature (1)..(221): tr|A0A1S1N4G3|A0A1S1N4G3_9GAMM 7-carboxy-7-deazaguanine synthase OS=Pseudoalteromonas byunsanensis OX=327939 G N=queE PE=3 SV=1
MYKINEIFETIQGEASYTGVPSIFLRLQGCPVGCAWCDTKQTWEVDSTYKISLDGTVEKKTDSQWWAEANAEQILELFQMRGYLAKHVVITGGEPCMFDLVPLCELLHQHGYSTQIETSGTFEIKVPEQTWVTVSPKINMRGGYEVLASAMQRANEIKHPVAMQKHVEELEALFEQTGVTPKLVYLQPISQKAKATKLAIDTCMKKNWRLSVQVHKYIGIN

SEQ ID NO: 33090 - protein, 225 aa, Pseudoalteromonas carrageenovora
  misc_feature (1)..(225): tr|A0A2K4X804|A0A2K4X804_PSEVC 7-carboxy-7-deazaguanine synthase OS=Pseudoalteromonas carrageenovora IAM 12662 OX=1314868 GN=ygcF PE=3 SV=1
MRSLLYKINEVFETIQGEASFTGTPSIFLRLQGCPVGCSWCDTKQTWDVDNVYKVSLDETVEKKADSDHWADASAEQVLELFKSRGYTAKHVVITGGEPCMFDLNPVCNLLHEQGFTTQIETSGTFEILAPEQTWVTVSPKINMRGGYEVLTSAMKRANEIKHPVAMQKHVEELEALFAKTGVNPKLVYLQPISQKVSATKLAIDTCIAKNWRLSIQVHKYLGIS

SEQ ID NO: 33091 - protein, 221 aa, Pseudoalteromonas citrea
  misc_feature (1)..(221): tr|U1KSL2|U1KSL2_9GAMM 7-carboxy-7-deazaguanine synthas e OS=Pseudoalteromonas citrea DSM 8771 OX=1117314 GN=qu eE PE=3 SV=1
MYKINEVFETIQGEASFTGVPSIFLRLQGCPVGCSWCDTKQTWDLNTEYLVSLDKTVEKKADSELWTEATSEQIVTLFKDKEYLAKHVVITGGEPCMYDLIPLCELLHDEGFSTQIETSGTFEIKAPAETWVTVSPKINMRGGYEVLTSAMKRADEIKHPVAMQKHVDELEALFTETGVTPRLVYLQPISQKAKATKLAIDTCMKKNWRLSVQVHKYIGIN

SEQ ID NO: 33092 - protein, 221 aa, Pseudoalteromonas denitrificans
  misc_feature (1)..(221): tr|A0A1I1IV26|A0A1I1IV26_9GAMM 7-carboxy-7-deazaguanine synthase OS=Pseudoalteromonas denitrificans DSM 6059 O X=1123010 GN=queE PE=3 SV=1
MYKINEIFQTIQGEASFTGTPSIFIRLQGCPVGCSWCDTKQTWEASDVYKVDLQKTVEKKADSELWADSSAQQVIDLIESKGYQAKHIVITGGEPCMFDLIPLCDLLHGNGFSTQLETSGTFEIKVPEKTWVTVSPKINMRGGYPVLKQAMLRANEIKHPIAMMKHVEELEALLTDMDIQPELIYLQPISQKAKATRLAVDICIAKNWRLSVQVHKYLGIN

SEQ ID NO: 33093 - protein, 221 aa, Pseudoalteromonas distincta; identical to SEQ ID NO: 33086
  misc_feature (1)..(221): tr|F3BKC1|F3BKC1_9GAMM 7-carboxy-7-deazaguanine synthas e OS=Pseudoalteromonas distincta OX=77608 GN=queE PE=3 SV=1

SEQ ID NO: 33094 - protein, 221 aa, Pseudoalteromonas distincta
  misc_feature (1)..(221): tr|A0A5B0UJY6|A0A5B0UJY6_9GAMM 7-carboxy-7-deazaguanine synthase OS=Pseudoalteromonas distincta OX=77608 GN=qu eE PE=3 SV=1
MYKINEVFETIQGEASFTGTPSIFLRLQGCPVGCSWCDTKQTWDVDNVYKVSLDETVGKKADSDHWANASAEQILALFQSRGYTAKHVVITGGEPCMFDLNPVCNLLHEHGFSTQIETSGTFEILAPEQTWVTVSPKINMRGGYEVLTSAMKRANEIKHPVAMQKHVEELEELFAKTGVNPKLVYLQPISQKVSATKLAIDTCIAKNWRLSIQVHKYLGIS

SEQ ID NO: 33095 - protein, 221 aa, Pseudoalteromonas elyakovii; identical to SEQ ID NO: 33086
  misc_feature (1)..(221): tr|A0A558I5Y2|A0A558I5Y2_9GAMM 7-carboxy-7-deazaguanine synthase OS=Pseudoalteromonas elyakovii OX=81037 GN=qu eE PE=3 SV=1

SEQ ID NO: 33096 - protein, 221 aa, Pseudoalteromonas espejiana
  misc_feature (1)..(221): tr|A0A510XWM6|A0A510XWM6_9GAMM 7-carboxy-7-deazaguanine synthase OS=Pseudoalteromonas espejiana OX=28107 GN=qu eE PE=3 SV=1
MYKINEVFETIQGEASFTGTPSIFLRLQGCPVGCAWCDTKQTWEVDNVYKVSLDETVEKKADSDHWADASAEQVLELFKSRGYNAKHVVITGGEPCMFDLNPVCNLLHDNGFTTQIETSGTFEILAPEQTWVTVSPKINMRGGYEVLTSAMKRANEIKHPIAMQKHVEELEALFAKTGVNPKLVYLQPISQKVSATKLAIDTCIAKNWRLSVQVHKYLGIS

SEQ ID NO: 33097 - protein, 221 aa, Pseudoalteromonas fuliginea; identical to SEQ ID NO: 33086
  misc_feature (1)..(221): tr|A0A063KLM4|A0A063KLM4_9GAMM 7-carboxy-7-deazaguanine synthase OS=Pseudoalteromonas fuliginea OX=1872678 GN= queE PE=3 SV=1

SEQ ID NO: 33098 - protein, 215 aa, Pseudoalteromonas haloplanktis
  misc_feature (1)..(215): tr|Q3IKE7|Q3IKE7_PSEHT 7-carboxy-7-deazaguanine synthas e OS=Pseudoalteromonas haloplanktis (strain TAC 125) OX =326442 GN=queC PE=3 SV=1
MFETIQGEASYTGTPSIFLRLQGCPVGCSWCDTKQTWDVDNVYKVSLDETVEKKADSDHWAQASAANILALFQSRGYTAKHVVITGGEPCMYDLNPVCNLLHENGFSTQIETSGTFEILAPAQTWVTVSPKINMRGGFEVLTTAMQRANEIKHPVAMQKHVEELEELFVKTGVNPKLVYLQPISQKESATKLAIKTCIAKNWRLSIQVHKYLGIS

SEQ ID NO: 33099 - protein, 221 aa, Pseudoalteromonas issachenkonii
  misc_feature (1)..(221): tr|A0A290SG56|A0A290SG56_9GAMM 7-carboxy-7-deazaguanine synthase OS=Pseudoalteromonas issachenkonii OX=152297 GN=queE PE=3 SV=1
MYKINEVFETIQGEASFTGTPSIFLRLQGCPVGCSWCDTKQTWDVDNVYKVSLDDTVEKKADSDHWAEASAAQVLELFKSRGYTAKHVVITGGEPCMYDLNPVCNLLHDHGFSTQIETSGTFEILAPAQTWVTVSPKINMRGGYKVLSSAMQRADEIKHPVAMQKHVEELEELFVATGVNPKLVYLQPISQKTSATKLAIDTCIAKNWRLSIQVHKYLGIS

SEQ ID NO: 33100 - protein, 221 aa, Pseudoalteromonas lipolytica
  misc_feature (1)..(221): tr|A0A0P7ECF5|A0A0P7ECF5_9GAMM 7-carboxy-7-deazaguanine synthase OS=Pseudoalteromonas lipolytica OX=570156 GN= queE PE=3 SV=1
MYKINEVFETIQGEASFTGTPSIFLRLQGCPVGCAWCDTKQTWDVDNVYKVSLDDTVEKKADSDHWAEATAEQVLALFKKRGYNAKHVVITGGEPCMYDLNPVCELLHANGYSTQIETSGTFEILVPEQTWVTVSPKINMRGGYKVLRSAMQRADEIKHPVAMQKHVEELEDLFLKTGVNPRLVYLQPISQKISATKLAIETCIAKNWRLSVQVHKYLGIS

SEQ ID NO: 33101 - protein, 221 aa, Pseudoalteromonas lipolytica
  misc_feature (1)..(221): tr|Z5XN01|Z5XN01_9GAMM 7-carboxy-7-deazaguanine synthas e OS=Pseudoalteromonas lipolytica SCSIO 04301 OX=145272 1 GN=queE PE=3 SV=1
MYKINEVFETIQGEASFTGTPSIFLRLQGCPVGCAWCDTKQTWDVDNVYRVSLDDTVEKKADSDHWAEASAEQILALFKERGYNAKHVVITGGEPCMYDLNPVCELLHANGYSTQIETSGTFEILVPEQTWVTVSPKINMRGGYKVLRSAMQRADEIKHPVAMQKHVEELEDLFLKTGVNPRLVYLQPISQKTSATKLAIETCIAKNWRLSVQVHKYLGIS

SEQ ID NO: 33102 - protein, 221 aa, Pseudoalteromonas luteoviolacea
  misc_feature (1)..(221): tr|A0A161ZH26|A0A161ZH26_9GAMM 7-carboxy-7-deazaguanine synthase OS=Pseudoalteromonas luteoviolacea DSM 6061 O X=1365250 GN=queE PE=3 SV=1
MYKINEVFETIQGEASFTGTPSIFVRLQGCPVGCAWCDTKQTWDVNPTYLVSLDKTVEKKSDSEWWANATAEEIVELLNVRGYTAKHIVITGGEPCMYDLTSLCETLHQAGYSTQVETSGTFEILVPDETWVTVSPKINMRGGYDVLTSAMQRADEIKHPVAMQKHIDELEALFDQTGVRPKLIYLQPISQKAKATKLAIDTCVKKNWRLSIQVHKYIGIN

SEQ ID NO: 33103 - protein, 221 aa, Pseudoalteromonas luteoviolacea
  misc_feature (1)..(221): tr|A0A0C1MUE5|A0A0C1MUE5_9GAMM 7-carboxy-7-deazaguanine synthase OS=Pseudoalteromonas luteoviolacea OX=43657 G N=queE PE=3 SV=1
MYKINEVFETIQGEASFTGTPSIFVRLQGCPVGCAWCDTKQTWDVNPTYLVSLDKTVEKKADSEWWANATPQEIIAIFEARNYTAKHIVITGGEPCMYDLNDLCNTLHQAGYTTQVETSGTFEVLVPKETWVTVSPKINMRGGYDVLTSAMQRADEIKHPVAMQKHIDELEALFEQTGVRPKLIYLQPISQKAKATKLAIDTCVKKNWRLSIQVHKYIGIN

SEQ ID NO: 33104 - protein, 221 aa, Pseudoalteromonas marina; identical to SEQ ID NO: 29390
  misc_feature (1)..(221): tr|U1KVJ9|U1KVJ9_9GAMM 7-carboxy-7-deazaguanine synthas e OS=Pseudoalteromonas marina DSM 17587 OX=1117316 GN=q ueE PE=3 SV=1

SEQ ID NO: 33105 - protein, 221 aa, Pseudoalteromonas neustonica
  misc_feature (1)..(221): tr|A0A558IJD2|A0A558IJD2_9GAMM 7-carboxy-7-deazaguanine synthase OS=Pseudoalteromonas neustonica OX=1840331 GN =queE PE=3 SV=1
MYKINEIFETIQGEASFTGTPSIFLRLQGCPVGCAWCDTKQTWEVDNVYKVSLDDTVEKKADSDHWADASAEQIFNLFVDRAYRAKHVVITGGEPCMYDLNPVCELLHANGYSTQIETSGTFEILAPAQTWVTVSPKINMRGGYDVLTSAMQRADEIKHPIAMQKHVVELEELFAKTGVTPKLVYLQPISQKVSATKLAIETCIEKNWRLSVQVHKYLGIN

SEQ ID NO: 33106 - protein, 221 aa, Pseudoalteromonas nigrifaciens
  misc_feature (1)..(221): tr|A0A379HC71|A0A379HC71_9GAMM 7-carboxy-7-deazaguanine synthase OS=Pseudoalteromonas nigrifaciens OX=28109 GN =queE PE=3 SV=1
MYKINEVFETIQGEASYTGTPSIFLRLQGCPVGCSWCDTKQTWDVDNVYKVSLDETVEKKADSDHWAQASAANILALFQSRGYTAKHVVITGGEPCMYDLNPVCNLLHENGFSTQIETSGTFEILAPAQTWVTVSPKINMRGGFEVLTTAMQRANEIKHPVAMQKHVEELEELFVKTGVNPKLVYLQPISQKESATKLAIKTCIAKNWRLSIQVHKYLGIN

SEQ ID NO: 33107 - protein, 221 aa, Pseudoalteromonas peptidolytica
  misc_feature (1)..(221): tr|A0A510UEP8|A0A510UEP8_9GAMM 7-carboxy-7-deazaguanine synthase OS=Pseudoalteromonas peptidolytica OX=61150 G N=queE PE=3 SV=1
MYKVNEIFETIQGEASFTGTPSIFLRLQGCPVGCSWCDTKQTWETNDTFIVSLSETVEKKADSEFWANASADDILATFESRGYQAKHVVITGGEPCMFDLKPLCTLLHDKGYSTQIETSGTFEILAPQETWVTVSPKINMRGGYKVLPSAMARADEIKHPVAMQKHIEELERLFKDTNIEPKLVYLQPISQKAKATKLAIDNCKAKNWRLSVQVHKYLGIN

SEQ ID NO: 33108 - protein, 221 aa, Pseudoalteromonas phenolica
  misc_feature (1)..(221): tr|A0A4Q7IH37|A0A4Q7IH37_9GAMM 7-carboxy-7-deazaguanine synthase OS=Pseudoalteromonas phenolica OX=161398 GN=q ueE PE=3 SV=1
MYKVNEIFETIQGEASFTGVPSIFLRLQGCPVGCAWCDTKQTWETNDIYLVTLGETVEKKADSEKWANASIDDIINLFKERGYLAKHVVITGGEPCMYDLVPLCEQLHEAGYTTQIETSGTFEILAPESTWVTVSPKINMRGGYDVLTSAMQRANEIKHPIAMQKHVDELEALFEQTGVRPELIYLQPISQKAKATKLAIETCLKKNWRLSVQVHKYIGIN

SEQ ID NO: 33109 - protein, 221 aa, Pseudoalteromonas phenolica
  misc_feature (1)..(221): tr|A0A0S2K0M6|A0A0S2K0M6_9GAMM 7-carboxy-7-deazaguanine synthase OS=Pseudoalteromonas phenolica OX=161398 GN=q ueE PE=3 SV=1
MYKVNEIFETIQGEASFTGVPSIFLRLQGCPVGCAWCDTKQTWETNGTYLVTLGETVEKKADSEKWANASIDDIINLFKERGYLAKHVVITGGEPCMYDLVPLCEQLHVAGYTTQIETSGTFEILAPESTWVTVSPKINMRGGYDVLTSAMQRANEIKHPIAMQKHVDELEALFEQTGVRPELIYLQPISQKAKATKLAIETCLKKNWRLSVQVHKYIGIN

SEQ ID NO: 33110 - protein, 221 aa, Pseudoalteromonas piratica
  misc_feature (1)..(221): tr|A0A0A7EFB9|A0A0A7EFB9_9GAMM 7-carboxy-7-deazaguanine synthase OS=Pseudoalteromonas piratica OX=1348114 GN=q ueE PE=3 SV=1
MYKINEVFETIQGEASFTGCPSIFIRLQGCPVGCAWCDTKQTWHTDDTYLVDLADTVEKKADSDYFANCNAEQILALIRDKKYQAKHIVITGGEPCMYDLNPLCELLHENGFTTQIETSGTFEILAPSETWVTVSPKINMRGGYEVLKSAIHRANEIKHPVAMMRHVEELEDLFEAAGHTPALVYLQPISQKAKATRLAIEVCKAKNWRLSVQVHKYIGIA

SEQ ID NO: 33111 - protein, 221 aa, Pseudoalteromonas piscicida
  misc_feature (1)..(221): tr|A0A1Z3NIK3|A0A1Z3NIK3_PSEO7 7-carboxy-7-deazaguanine synthase OS=Pseudoalteromonas piscicida OX=43662 GN=qu eE PE=3 SV=1
MYKVNEIFETIQGEASFTGTPSIFLRLQGCPVGCAWCDTKQTWETNDTFIVSLDNTVEKKADSEWWANASADEILAIFESRGYQAKHVVITGGEPCMFDLRPLCELLHSKGYSTQIETSGTFEILAPAETWVTVSPKINMRGGYKVLPSAMARADEIKHPVAMQKHIEELEALFAQTGVEPKLVYLQPISQKAKATKLAIDNCKAKNWRLSVQVHKYLGIN

SEQ ID NO: 33112 - protein, 221 aa, Pseudoalteromonas piscicida
  misc_feature (1)..(221): tr|A0A2A5JP63|A0A2A5JP63_PSEO7 7-carboxy-7-deazaguanine synthase OS=Pseudoalteromonas piscicida OX=43662 GN=qu eE PE=3 SV=1
MYKVNEIFETIQGEASFTGTPSIFLRLQGCPVGCAWCDTKQTWETKDTFIVSLDNTVEKKADSEWWANASAEEILAIFEARGYQAKHVVITGGEPCMFDLVPLCNLLHAKGFSTQIETSGTFEILAPKETWVTVSPKINMRGGYKVLPSAMARADEIKHPVAMQKHIEELEALFAETGVQPKLVYLQPISQKAKATKLAIDNCKAKNWRLSVQVHKYLGIN

SEQ ID NO: 33113 - protein, 221 aa, Pseudoalteromonas porphyrae
  misc_feature (1)..(221): tr|A0A0N0LYU3|A0A0N0LYU3_9GAMM 7-carboxy-7-deazaguanine synthase OS=Pseudoalteromonas porphyrae OX=187330 GN=q ueE PE=3 SV=1
MYKINEIFETIQGEASFTGTPSIFLRLQGCPVGCAWCDTKQTWEVDNVFKVSLDETVEKKADSDHWADASAEQILALFAARGYRAKHVVITGGEPCMYDLNPVCNLLHENGFSTQIETSGTFEILAPAQTWVTVSPKINMRGGYEVLSAAMKRADEIKHPIAMQKHVEELEELFAKTGVSPKLVYLQPISQKVSATKLAIEICIEKNWRLSVQVHKYLGIS

SEQ ID NO: 33114 - protein, 221 aa, Pseudoalteromonas profundi
  misc_feature (1)..(221): tr|A0A3A3EJK4|A0A3A3EJK4_9GAMM 7-carboxy-7-deazaguanine synthase OS=Pseudoalteromonas profundi OX=1774956 GN=q ueE PE=3 SV=1
MYKINEVFETIQGEASFTGTPSIFLRLQGCPVGCAWCDTKQTWDVDNVYKVSLDETVEKKADSDHWAEATAEQVLALFKERGYNAKHVVITGGEPCMYDLNPVCELLHANGYSTQIETSGTFEILVPEQTWVTVSPKINMRGGYNVLRSAMQRADEIKHPVAMQKHVEELEDLFLKTGVNPRLVYLQPISQKTSATKLAIETCIAKNWRLSVQVHKYLGIS

SEQ ID NO: 33115 - protein, 221 aa, Pseudoalteromonas rubra
  misc_feature (1)..(221): tr|A0A4Q7E488|A0A4Q7E488_9GAMM 7-carboxy-7-deazaguanine synthase OS=Pseudoalteromonas rubra OX=43658 GN=queE P E=3 SV=1
MYKINEVFETIQGEASHTGVPSIFVRLQGCPVGCAWCDTKQTWEVDPVYLVSLEQTVEKKADSDYWANATPEQLLALFEERGYTAKHVVITGGEPCMYDLNPLCDALHANGYHTQVETSGTFEILVPKETWVTVSPKINMRGGYKVLTSAMQRADEIKHPVAMEKHVEELEALFEQTGVQPKLVYLQPISQKAKATKLAIDTCKQKNWRLSVQVHKYIGIS

SEQ ID NO: 33116 - protein, 215 aa, Pseudoalteromonas rubra
  misc_feature (1)..(215): tr|U1KLH0|U1KLH0_9GAMM 7-carboxy-7-deazaguanine synthas e OS=Pseudoalteromonas rubra DSM 6842 OX=1117318 GN=que E PE=3 SV=1
MFETIQGEASHTGVPSIFVRLQGCPVGCAWCDTKQTWEVDPVYLVSLDQTVEKKADSDFWANATPEQLLALFEARGYTAKHVVITGGEPCMYDLNPLCDKLHAEGYQTQVETSGTFEILVPAQTWVTVSPKINMRGGYKVLASAMQRADEIKHPVAMEKHVEELEALFEETGVQPKLVYLQPISQKAKATKLAIDTCKQKNWRLSVQVHKYIGIS

SEQ ID NO: 33117 - protein, 221 aa, Pseudoalteromonas ruthenica
  misc_feature (1)..(221): tr|A0A0F4PT27|A0A0F4PT27_9GAMM 7-carboxy-7-deazaguanine synthase OS=Pseudoalteromonas ruthenica OX=151081 GN=q ueE PE=3 SV=1
MYQINEIFETIQGEASYTGTPSIFVRLQGCPVGCAWCDTKQTWDASDSYVVSLEQTVEKKADSQHWAHASAEDVLALFQQRGYLAKHVVITGGEPCLFDLNPLCELLHEHGYSTQIETSGTFAIKAPAQTWVTVSPKINMRGGYDVLASAMQRADEIKHPVAMQKHVDELEALFAQTGVAPKLVYLQPISQKAKATKLAIDTCIQKNWRLSVQVHKYIGIN

SEQ ID NO: 33118 - protein, 221 aa, Pseudoalteromonas sp.; identical to SEQ ID NO: 33117
  misc_feature (1)..(221): tr|A0A4Q6YCR5|A0A4Q6YCR5_9GAMM 7-carboxy-7-deazaguanine synthase OS=Pseudoalteromonas sp. CO325X OX=1777262 GN =queE PE=3 SV=1

SEQ ID NO: 33119 - protein, 221 aa, Pseudoalteromonas sp.
  misc_feature (1)..(221): tr|A0A4S1F6F4|A0A4S1F6F4_9GAMM 7-carboxy-7-deazaguanine synthase OS=Pseudoalteromonas sp. MEBiC 03607 OX=25636 01 GN=queE PE=3 SV=1
MYKINEVFETIQGEASFTGTPSIFLRLQGCPVGCAWCDTKQTWDVDNVYKVSLDDTVEKKADSDHWAEASAEQVLALFKERGYNAKHVVITGGEPCMYDLNPVCELLHANGYSTQIETSGTFEILAPEQTWVTVSPKINMRGGYKVLRSAMQRADEIKHPVAMQKHVEELEDLFLKTGVNPRLVYLQPISQKQSATKLAIETCIEKNWRLSVQVHKYLGIS

SEQ ID NO: 33120 - protein, 221 aa, Pseudoalteromonas spongiae
  misc_feature (1)..(221): tr|A0A290T1Z3|A0A290T1Z3_9GAMM 7-carboxy-7-deazaguanine synthase OS=Pseudoalteromonas spongiae UST010723-006 O X=1117319 GN=queE PE=3 SV=1
MYKINEVFETIQGEASYTGCPSIFIRLQGCPVGCAWCDTKQTWHTDDTYLVDLSDTVEKKADSDYFANCTAEQILALIRDKQYQAKHIVITGGEPCMYDLNPLCDLLHENGFSTQIETSGTFDILAPATTWVTVSPKINMRGGYKVLKSAMQRANEIKHPVAMMRHVEELEELFAEAGHTPELVYLQPISQKAKATRLAIEVCKAKNWRLSVQVHKYIGIA

SEQ ID NO: 33121 - protein, 221 aa, Pseudoalteromonas tetraodonis
  misc_feature (1)..(221): tr|A0A290TJL6|A0A290TJL6_9GAMM 7-carboxy-7-deazaguanine synthase OS=Pseudoalteromonas tetraodonis OX=43659 GN= queE PE=3 SV=1
MYKINEVFETIQGEASFTGTPSIFLRLQGCPVGCSWCDTKQTWDVDNVYKVSLDDTVEKKADSDHWAEASASQVLELFKSRGYTAKHVVITGGEPCMYDLNPVCNLLHDHGFSTQIETSGTFEILAPAQTWVTVSPKINMRGGYKVLSSAMQRADEIKHPVAMQKHVEELEELFTATGVNPKLVYLQPISQKTSATKLAIDTCIVKNWRLSIQVHKYLGIS

SEQ ID NO: 33122 - protein, 221 aa, Pseudoalteromonas tetraodonis
  misc_feature (1)..(221): tr|A0A1E3WXZ5|A0A1E3WXZ5_9GAMM 7-carboxy-7-deazaguanine synthase OS=Pseudoalteromonas tetraodonis OX=43659 GN= queE PE=3 SV=1
MYKINEVFETIQGEASFTGTPSIFLRLQGCPVGCSWCDTKQTWDVDNVYKVSLDDTVEKKADSDHWAEASAAQVLELFKSRGYTAKHVVITGGEPCMYDLNPVCNLLHDHGFSTQIETSGTFEILAPAQTWVTVSPKINMRGGYKVLSSAMQRADEIKHPVAMQKHVEELEELFTATGVNPKLVYLQPISQKASATKLAIDTCIAKNWRLSIQVHKYLGIS

SEQ ID NO: 33123 - protein, 221 aa, Pseudoalteromonas translucida
  misc_feature (1)..(221): tr|A0A0U2WGZ4|A0A0U2WGZ4_9GAMM 7-carboxy-7-deazaguanine synthase OS=Pseudoalteromonas translucida KMM 520 OX=1 315283 GN=queE PE=3 SV=1
MYKINEVFETIQGEASFTGTPSIFLRLQGCPVGCSWCDTKQTWDVDNVYKVSLDETVEKKADSDHWAQASAANILALFQSRGYTAKHVVITGGEPCMYDLNPVCNLLHENGFSTQIETSGTFEILAPAQTWVTVSPKINMRGGFEVLTTAMQRADEIKHPIAMQKHVEELEELFAKTGVNPKLVYLQPISQKESATKLAIKTCIAKNWRLSIQVHKYLGIS

SEQ ID NO: 33124 - protein, 221 aa, Pseudoalteromonas tunicata
  misc_feature (1)..(221): tr|A4CBB3|A4CBB3_9GAMM 7-carboxy-7-deazaguanine synthas e OS=Pseudoalteromonas tunicata D2 OX=87626 GN=queE PE= 3 SV=1
MYKINEIFETIQGEASFTGMPSIFVRLQGCPVGCAWCDTKQTWETSDTYKVDLQKTVEKKADSELWADVTVAQLLALFVEKGYQAKHIVITGGEPCMYDLVPLCEGLHAAGYGTQVETSGTFEIKVPAETWVTVSPKINMRGGYAVLKSAMQRANEIKHPIAMQRHVDELEQLMAECGVTPKLIYLQPISQKAKATQLAIEVCKAKNWRLSVQVHKYLGIN

SEQ ID NO: 33125 - protein, 221 aa, Pseudoalteromonas ulvae
  misc_feature (1)..(221): tr|A0A244CVE6|A0A244CVE6_9GAMM 7-carboxy-7-deazaguanine synthase OS=Pseudoalteromonas ulvae OX=107327 GN=queE PE=3 SV=1
MYKINEIFETIQGEASFTGVPAIFVRLQGCPVGCAWCDTKQTWETSDTYKVDLEKTVEKKADSELWADVSVAQLLAIFTEKGYRAKHIVITGGEPCMYDLNPLCEGLHAAGYDTQVETSGTFEIKVPAKTWVTVSPKINMRGGYPVLKSAMERANEIKHPIAMMKHVEELEQLIEACGVSPKLIYLQPISQKAKATQLAIEVCTQKNWRLSVQVHKYLGIN

SEQ ID NO: 33126 - protein, 254 aa, Pseudoarcobacter caeni
  misc_feature (1)..(254): tr|A0A363D0Z1|A0A363D0Z1_9PROT 7-carboxy-7-deazaguanine synthase OS=Pseudoarcobacter caeni OX=1912877 GN=queE PE=3 SV=1
MLEINEIFGPTIQGEGKLVGTPSIFIRFGKCNFKCEGFSVEYETPSGIKKCACDSFYAVDMEFRDTWTKYKSYEEIVSKVDTLLSKYPNNYKIDIVITGGEPLLYWNKEEFQKLLKHYINDGHKVTIETNASLNLNFEFDYQKYILFSMSVKLSNSLEPFKKRINKETIAKILTNTSESYLKFVIGKDFLQEANSEIQEILKDIPKCEVYLMPLGDTANEINKNCEDVINMAIENGFKYCDRLHIRVWDNKRGV

SEQ ID NO: 33127 - protein, 204 aa, Pseudobacter ginsenosidimutans
  misc_feature (1)..(204): tr|A0A4Q7MML9|A0A4Q7MML9_9BACT 7-carboxy-7-deazaguanine synthase OS=Pseudobacter ginsenosidimutans OX=661488 G N=queE PE=3 SV=1
MSTIVTTQLPVMEYFYTLQGEGYHQGRAAYFIRLGGCDVGCVWCDVKESWDASKHPLLSLETIVEGAAQFPGRIAIITGGEPLMHDLGPLTDALHDAGFQTHIETSGAHPLSGEWDWICLSPKKFKTPLPEILPLANELKVVVYNKSDFEWAEKYAAQVGPNCKLYLQPEWSKSQQVTPLIIDYIKDHPQWEFSLQLHKYIHVP

SEQ ID NO: 33128 - protein, 220 aa, Pseudobacteriovorax antillogorgiicola
  misc_feature (1)..(220): tr|A0A1Y6B6E8|A0A1Y6B6E8_9PROT 7-carboxy-7-deazaguanine synthase OS=Pseudobacteriovorax antillogorgiicola OX=1 513793 GN=queE PE=3 SV=1
MNHTVESQSLVITEIYRSVQGESSYAGLPCTFVRLTGCPLRCRWCDTVYGFEGGQERSIGELVDDIKALGVPLVEITGGEPLAQKNTVGLMKALIEAGFQVICETGGSEPVEGVPPEVTLIMDLKCPGSGMADRNLWENLNHLKPSDEIKFVIANRDDFDWACHVISRHDLTSRFHCLMSVAFGLLAPAELVDWILDADINVRLNLQQHKYIWSPKKKGV

SEQ ID NO: 33129 - protein, 209 aa, Pseudobacteroides cellulosolvens
  misc_feature (1)..(209): tr|A0A0L6JN83|A0A0L6JN83_9FIRM 7-carboxy-7-deazaguanine synthase OS=Pseudobacteroides cellulosolvens ATCC 3560 3 = DSM 2933 OX=398512 GN=queE PE=3 SV=1
MKVNEIFLSIQGESIYAGFPTVFVRFSGCNLRCSYCDTAYAYEDGTDMEPEEVFEEIKKHYYKRVCVTGGEPLLQGDLEKLLVLLEDYSVTIETNGSMDIGLFKLDLKHSYVMDVKCPSSGASKEMNLLNFGLLSDRDEIKFVIGGKEDYEWAKAIIKEYYRKGIITFSPVFGKIEYCDLVDWMLRDKLNARFQIQLHKVIWGVDKRGV

SEQ ID NO: 33130 - protein, 222 aa, Pseudobutyrivibrio ruminis
  misc_feature (1)..(222): tr|A0A285RDV1|A0A285RDV1_9FIRM 7-carboxy-7-deazaguanine synthase OS=Pseudobutyrivibrio ruminis DSM 9787 OX=112 3011 GN=queE PE=3 SV=1
MSVFNVVEKFVSINGEGQHAGELAVFIRLRGCNLSCSYCDTRWACTADAPAEEMTETQIVDYVISTGVKRVTLTGGEPLLSPHVIDLLKAFAANPDIFVEIETNGSVDIHPFACIDNPPAFTLDYKLAGSGMEDKMLLSNFDVLTAKDTVKFVCSDVSELDKVCKIVDDYRISDKCTCLISPVFGRIEPADMVDYLIDHKRNDIRLQLQLHKFIWDPNKRGV

SEQ ID NO: 33131 - protein, 222 aa, Pseudobutyrivibrio ruminis
  misc_feature (1)..(222): tr|A0A2G3DYJ7|A0A2G3DYJ7_9FIRM 7-carboxy-7-deazaguanine synthase OS=Pseudobutyrivibrio ruminis OX=46206 GN=que E PE=3 SV=1
MAVFNVVEKFVSINGEGQHAGELAVFIRLRGCNLSCSYCDTRWACTDEADAEAMSEDEIISYVKSTGVRRVTLTGGEPLLAEDIRVLLEAFSSEKNILVEIETNGSVFVGDFAKIDNPPAFTLDYKLAGSGMEDKMDLSNFKYLQKKDTVKFVCSNVSELDKVCEIVDEFSLSEKCTVLISPVFGRIEPADMVDYLIEHKRNDIRLQLQLHKFIWDPNKRGV

SEQ ID NO: 33132 - protein, 222 aa, Pseudobutyrivibrio sp.
  misc_feature (1)..(222): tr|A0A1I5D4C5|A0A1I5D4C5_9FIRM 7-carboxy-7-deazaguanine synthase OS=Pseudobutyrivibrio sp. JW11 OX=1855302 GN= queE PE=3 SV=1
MSVFNVVEKFVSINGEGQHAGELAVFIRLRGCNLSCSYCDTRWACTADAPAEEMTETQIVDYVISTGVKRVTLTGGEPLLSPHVIDLLKAFAENPDIFVEIETNGSVDIHPFACIDNPPAFTLDYKLAGSGMEDKMLLSNFDVLTAKDTVKFVCSDVSELDKVCKIVDDYRISDKCTCLISPVFGRIEPADMVDYLIDHKRNDIRLQLQLHKFIWDPNKRGV

SEQ ID NO: 33133 - protein, 222 aa, Pseudobutyrivibrio sp.
  misc_feature (1)..(222): tr|A0A1H3ZWZ0|A0A1H3ZWZ0_9FIRM 7-carboxy-7-deazaguanine synthase OS=Pseudobutyrivibrio sp. ACV-2 OX=1520801 GN =queE PE=3 SV=1
MAVFYVVEKFVSINGEGQHAGELAVFIRLRGCNLNCSYCDTRWAGSYDAPAEAMTEEEIIEYIKSTGVKRVTITGGEPLKARDIKDLLRALAAEHKLKVEIETNGSVSILEYAAIHNAPAFTLDYKLPGSGMEDKMDLSNFTFLQPKDTVKFVVSEVSELDRVCSLVDTYGLSDKCTVLISPVFGRIEPADMVNYLIEHKRNDIRLQLQLHKFIWDPNKRGV

SEQ ID NO: 33134 - protein, 222 aa, Pseudobutyrivibrio xylanivorans
  misc_feature (1)..(222): tr|A0A1G5S2C1|A0A1G5S2C1_PSEXY 7-carboxy-7-deazaguanine synthase OS=Pseudobutyrivibrio xylanivorans OX=185007 GN=queE PE=3 SV=1
MSVFFVVEKFVSINGEGQHAGELAVFIRLRGCNLACSYCDTRWACSYEAPAEQMTETEIIDYVKSTGINRVTLTGGEPLKARDIKDLLRAFAAEPELKVEIETNGSVNIVPFAAIPNAPAFTLDYKLAGSGMEDKMDLSNFAFLQPKDTVKFVCSDVSELDKVCELVDTYGLAMKCTVLISPVFGRIDPADMVNYLIEHKRNDIRLQLQLHKFIWDPDKRGV

SEQ ID NO: 33135 - protein, 222 aa, Pseudobutyrivibrio xylanivorans
  misc_feature (1)..(222): tr|A0A1M6FNF6|A0A1M6FNF6_PSEXY 7-carboxy-7-deazaguanine synthase OS=Pseudobutyrivibrio xylanivorans DSM 14809 OX=1123012 GN=queE PE=3 SV=1
MATYFVVEKFVSINGEGQHAGELAVFIRLRGCNLACSYCDTRWACSYEAPAEQMTETEIIDYVKSTGINRVTLTGGEPLKARDIKDLLRAFAAEPDIKVEIETNGSVNIVPFAAIPNAPAFTLDYKLAGSGMEDKMDLSNFAFLQPKDTVKFVCSDVSELDKVCELVDTYGLAMKCTVLISPVFGRIDPADMVDYLIKHKRNDIRLQLQLHKFIWDPEKRGV

SEQ ID NO: 33136 - protein, 223 aa, Pseudocitrobacter faecalis
  misc_feature (1)..(223): tr|A0A366FD55|A0A366FD55_9ENTR 7-carboxy-7-deazaguanine synthase OS=Pseudocitrobacter faecalis OX=1398493 GN=q ueE PE=3 SV=1
MQYPINEMFQTLQGEGYFTGVPAIFIRLQGCPVGCAWCDTKHTWEKLSDREVSLFSILAKTKESDKWGAAGEDDLLTAITRQGWTAKHVVITGGEPCIHDLIPLTTLLEQHGYSCQIETSGTHEVRCTHTTWVTVSPKVNMRGGYDVLSQALERADEIKHPVGRVRDIEALDELLETLTDDKQRVIALQPISQKEDATRLCIDTCIARNWRLSMQTHKYLNIA

SEQ ID NO: 33137 - protein, 223 aa, Pseudocitrobacter sp.
  misc_feature (1)..(223): tr|A0A5B0KCU5|A0A5B0KCU5_9ENTR 7-carboxy-7-deazaguanine synthase OS=Pseudocitrobacter sp. 73 OX=2605731 GN=que E PE=3 SV=1
MQYPINEMFQTLQGEGYFTGVPAIFIRLQGCPVGCAWCDTKHTWEKLSDREVSLFSILAKTKESDKWGAAGEDDLLTAIARQGWTAKHVVITGGEPCIHDLTPLTTLLEQNGYSCQIETSGTHEVRCTHTTWVTVSPKVNMRGGYDVLSQALERADEIKHPVGRVRDIEALDELLETLTDDKQRVIALQPISQKEDATRLCIDTCIARNWRLSMQTHKYLNIA

SEQ ID NO: 33138 - protein, 227 aa, Pseudodesulfovibrio hydrargyri
  misc_feature (1)..(227): tr|A0A1J5MYJ6|A0A1J5MYJ6_9DELT 7-carboxy-7-deazaguanine synthase OS=Pseudodesulfovibrio hydrargyri OX=2125990 GN=queE PE=4 SV=1
MSEPTGVWSYVRGFENMSLCDWPGRTSCIIFLGGCNLRCPTCHNFQLAWDMQSLPVLDPLRVKAYLRDRAGWLDGVTISGGEPTTVPGVGELAFEIKKTGMPVKMDSNGMRPEVVAELLEEKLVDTFAVDVKGPYAKYPALTGKAVSEIAARANMARIFAMAEAKPGAFYFRITQVPGLTQADIDVARSYLPPNHELKIQKYVPPRRTPEHAKPNHEERRPAGNLVD

SEQ ID NO: 33139 - protein, 193 aa, Pseudoflavitalea sp.
  misc_feature (1)..(193): tr|A0A3B7MV94|A0A3B7MV94_9BACT 7-carboxy-7-deazaguanine synthase OS=Pseudoflavitalea sp. 5GH32-13 OX=2315862 G N=queE PE=3 SV=1
MESFYTIQGEGYYQGKAAYFIRLGGCDVGCVWCDVKDSWDASRHPQQSIDEIVSAAAAYPGRMAVITGGEPLMHNLDTLTAALHEAGFQTNIETSGSSPLSGEWDWICLSPKKFKFPLPEILPLAHELKVVIFNKSDFAWAEKYAAQVSPTCKLYLAPEWDKSKEMTPLLIEYIKENPQWELSLQIHKYINVP

SEQ ID NO: 33140 - protein, 222 aa, Pseudofulvimonas gallinarii
  misc_feature (1)..(222): tr|A0A4S3KUC8|A0A4S3KUC8_9GAMM 7-carboxy-7-deazaguanine synthase OS=Pseudofulvimonas gallinarii OX=634155 GN=q ueE PE=3 SV=1
MDAAVEGRSAERLRITEIFHSLQGEADAVGWRTVFVRLTGCPLRCTWCDTTYSFHGGEWRDLDGILAEVASYDARHVCVTGGEPLAQKRCLLLLQRLCDAGYEVSLETSGALDVAAVDPRVRKVVDFKAPASGEQSRNLWANVEHLLPHDQVKFVLANRDDYDWAVDCLRAQALAERCQVLFSPVQGQLAPAALAEWILADRLPVRFQMQLHKLLWGDAKGR

SEQ ID NO: 33141 - protein, 211 aa, Pseudogulbenkiania ferrooxidans
  misc_feature (1)..(211): tr|U1AMR7|U1AMR7_9NEIS 7-carboxy-7-deazaguanine synthas e OS=Pseudogulbenkiania ferrooxidans EGD-HP2 OX=1388764 GN=queE PE=3 SV=1
MTTYTVKEIFYTLQGEGRQAGRAAVFCRFAGCNLWSGREEDRAKAVCQFCDTDFVGAGPDGGKFDGAAALAAHIAAEWPKDAGGAPYVVCTGGEPLLQLDAELVDALHAEGFEIAVETNGTVAAPAGLDWICVSPKAGSELKQRAGDELKLVYPQVAQMPETVAHLDFGTFYLQPMDGPDLAANTRAAIAYCMAHPQWRLSVQTHKVVNIR

SEQ ID NO: 33142 - protein, 209 aa, Pseudogulbenkiania ferrooxidans
  misc_feature (1)..(209): tr|B9Z1F9|B9Z1F9_9NEIS 7-carboxy-7-deazaguanine synthas e OS=Pseudogulbenkiania ferrooxidans 2002 OX=279714 GN= queE PE=3 SV=1
MYTVKEIFYTLQGEGRQAGRAAVFCRFAGCNLWSGKERHRAKAICQFCDTDFVGTGPDGGKFKTAEQLAERIAGAWPAGAGGTPFVVCTGGEPLLQLDAPLIDALHARGFEIAVETNGTVAAPPGIDWLCVSPKAGAPLLQTSGHELKLVYPQPTLMPESVAGLAFQNFYLQPMDGPDVAANTRAAIAYCMAQPQWRLSVQTHKVLNIR

SEQ ID NO: 33143 - protein, 209 aa, Pseudogulbenkiania sp.
  misc_feature (1)..(209): tr|G2IYU5|G2IYU5_PSEUL 7-carboxy-7-deazaguanine synthas e OS=Pseudogulbenkiania sp. (strain NH8B) OX=748280 GN= queE PE=3 SV=1
MYTVKEIFYTLQGEGRQAGRAAVFCRFAGCNLWSGKERHRTKAICQFCDTDFVGTGPDGGKFKSAEQLAERIASAWPAGAGGTPFVVCTGGEPLLQLDAPLIDALHARGFEIAVETNGTVAAPPGIDWLCVSPKAGAPLLQTSGHELKLVYPQPTLMPESVAGLAFQNFYLQPMDGPDVAANTRAAIAYCMAQPQWRLSVQTHKVLNIR

SEQ ID NO: 33144 - protein, 209 aa, Pseudogulbenkiania subflava
  misc_feature (1)..(209): tr|A0A1Y6BDJ8|A0A1Y6BDJ8_9NEIS 7-carboxy-7-deazaguanine synthase OS=Pseudogulbenkiania subflava DSM 22618 OX=1 123014 GN=queE PE=3 SV=1
MYTVKEIFYTLQGEGRQAGRAAVFCRFAGCNLWSGKERHRAKAICQFCDTDFVGTGPDGGKFKTTEQLAERIAREWPAGAGGTPFVVCTGGEPLLQLDAALIDALHARGFEIAVETNGTVAAPPGIDWLCVSPKAGAPLLQTTGHELKLVYPQPTLPPESVAGLAFQNFYLQPMDGPDVVANTRAAIAYCMAQPQWRLSVQTHKVLQIR

SEQ ID NO: 33145 - protein, 222 aa, Pseudohaliea rubra
  misc_feature (1)..(222): tr|A0A095XSH4|A0A095XSH4_9GAMM 7-carboxy-7-deazaguanine synthase OS=Pseudohaliea rubra DSM 19751 OX=1265313 GN =queE PE=3 SV=1
MTAAVQPGATTLRLTEIFHSLQGEARTVGLPTVFVRLTGCPLRCVYCDTAYAFSGGELWDLPQVLDTVAGYGARYVTVTGGEPLAQPACLPLLSALCDAGYEVSLETSGAMPVGEVDARVVKVLDLKTPASGELARNDYGNIVHLTRNDQVKFVICDRADYDWACFKVDEYRLVERAGDVLFSPSHGQQDARELAEWILTDRLPVRLQLQLHKLLWNDEPGR

SEQ ID NO: 33146 - protein, 217 aa, Pseudohongiella acticola
  misc_feature (1)..(217): tr|A0A1E8CGK6|A0A1E8CGK6_9GAMM 7-carboxy-7-deazaguanine synthase OS=Pseudohongiella acticola OX=1524254 GN=que E PE=3 SV=1
MNKPLSLRINEIFFSLQGESSTVGLPTTFVRLTGCPLRCGYCDTEYAFHDGTVMPLTDILAQVEATGARYITVTGGEPLAQPGCLALLRELCDRGLRVSLETSGAMDIAEVDPRVTVVMDLKTPGSGECDRNLESNIGRLKRVDEVKFVICDRRDYEWSKAKIDQYDLGSRVQEILLSPSFEQLAYRDLAAWVLADRLPVRMQVQLHKIIWGDAPGH

SEQ ID NO: 33147 - protein, 213 aa, Pseudohongiella sp.
  misc_feature (1)..(213): tr|A0A355V965|A0A355V965_9GAMM 7-carboxy-7-deazaguanine synthase OS=Pseudohongiella sp. OX=1979412 GN=queE PE= 3 SV=1
MNLRINEIFHSLQGESSTVGLPTTFVRLTGCPLRCGYCDTEYAFHEGQQKSLSDILEQVSANRAKHVCVTGGEPLAQPNCLPLLTLLCDNGFTVSLETSGAMDISAVDQRVNIVMDLKTPGSDECDRNLESNIAHLKSSDEVKFVICDRRDYEWAKAKIDQYDLRHRVREILLSPSYEQVKYAELAQWILEDKLAVRMQVQLHKIIWGEEPGR

SEQ ID NO: 33148 - protein, 213 aa, Pseudohongiella spirulinae
  misc_feature (1)..(213): tr|A0A0S2KE94|A0A0S2KE94_9GAMM 7-carboxy-7-deazaguanine synthase OS=Pseudohongiella spirulinae OX=1249552 GN=q ueE PE=3 SV=1
MNLRINEIFHSLQGESSTVGLPTTFVRLTGCPLRCGYCDTEYAFHEGRQLSFEQILQQVDDYGARHVCVTGGEPLAQPNCLPLLTALCDKGLQVSLETSGAMDIASVDSRVHVVMDLKTPGSNECDRNLESNIGCLKPIDEVKFVICDRRDYEWAKAKIDQYDLRNRVAEILLSPSFGQVAYRDLAQWIIDDRLPVRMQVQLHKIIWGEEPGR

SEQ ID NO: 33149 - protein, 215 aa, Pseudomonadaceae bacterium
  misc_feature (1)..(215): tr|A0A2E8IFT5|A0A2E8IFT5_9GAMM 7-carboxy-7-deazaguanine synthase OS=Pseudomonadaceae bacterium OX=1914538 GN=q ueE PE=3 SV=1
MQNTLRITEIFYSLQGETRTAGLPTVFVRLTGCPLRCQYCDTAYAFTGGEIMSLDSILARVAAYNPRYICVTGGEPLAQPNSIALLQQLCDAGYEVSLETSGALDVSSVDPRVSKVLDLKTPGSAEVARNRYDNIQWLSRNDQVKFVICSREDYSWAVSKLIEYRLNERAGEVLFSPSHAQVSARDLADWIVADNLPVRLQLQLHKILWDDAAGH

SEQ ID NO: 33150 - protein, 211 aa, Pseudomonadaceae bacterium
  misc_feature (1)..(211): tr|A0A4Q9R789|A0A4Q9R789_9GAMM 7-carboxy-7-deazaguanine synthase OS=Pseudomonadaceae bacterium P17C OX=2211397 GN=queE PE=3 SV=1
MTYSVKEIFYTLQGEGAQAGRPAVFCRFSGCNLWSGRERDRGTSICRFCDTDFIGTDGPGGGKFRQAEALASAIDAQWPGHAARNKYVVLTGGEPLLQVDQALTDALHARGFTIAVETNGTLALPDGIDWVCVSPKSSAELLITRGNELKLVYPQHDAMPDRFEALDFEVFYLQPMDAHGRQQNTLDAIDYCKSHPQWRLGLQQHKILMIP

SEQ ID NO: 33151 - protein, 224 aa, Pseudomonadales bacterium
  misc_feature (1)..(224): tr|A0A1G3D499|A0A1G3D499_9GAMM 7-carboxy-7-deazaguanine synthase OS=Pseudomonadales bacterium GWC2_63_15 OX=18 17754 GN=queE PE=3 SV=1
MACLAVTPVADMTLRITEIFYSLQGETRTSGLPTVFVRLTGCPLRCQYCDTAYAFSGGELMTLDAIVERVASYNPRYVCVTGGEPLAQPNCAPLLQRLCDAGYEVSLETSGALDISVVDERVSRVVDLKTPGSAEVARNRYENIACITRNDQVKFVICSREDYDWAVSKLIEYGLDRRAGEVLFSPSHGQVDVRALADWIVADNLPVRLQLQLHKIIWNDAPGH

SEQ ID NO: 33152 - protein, 236 aa, Pseudomonadales bacterium; identical to SEQ ID NO: 27348
  misc_feature (1)..(236): tr|A0A1G3DMK9|A0A1G3DMK9_9GAMM 7-carboxy-7-deazaguanine synthase OS=Pseudomonadales bacterium RIFCSPHIGHO2_12_ FULL_40_16 OX=1802006 GN=queE PE=3 SV=1

SEQ ID NO: 33153 - protein, 226 aa, Pseudomonas abietaniphila
  misc_feature (1)..(226): tr|A0A1G8ARP1|A0A1G8ARP1_9PSED 7-carboxy-7-deazaguanine synthase OS=Pseudomonas abietaniphila OX=89065 GN=queE PE=3 SV=1
MACLAVTPVAPMQDTLRITEVFYSLQGETRTAGLPTVFVRLTGCPLRCGYCDSEYAFTGGTLQTLDSLMEQVAGYRPRYVCVTGGEPLAQPNAIPLLKRLCDAGYEVSLETSGALDISKVDPRVSRVVDLKTPGSKEVTRNRYENIDLLTANDQVKFVICSREDYDWAVSKIIQYGLDRRAGEVLFSPVHRDLNVRDLADWIVADNLPVRLQLQLHKILWDDEPGR

SEQ ID NO: 33154 - protein, 210 aa, Pseudomonas acidophila
  misc_feature (1)..(210): tr|A0A2A4EYX7|A0A2A4EYX7_9PSED 7-carboxy-7-deazaguanine synthase OS=Pseudomonas acidophila OX=1912599 GN=queE PE=3 SV=1
MAYAVKEIFYTLQGEGANAGRPAVFCRFAGCNLWSGREEDRAAAVCRFCDTDFVGTDGENGGKYRSADELVAMIAAQWPQGEANRFVVCTGGEPMLQIDPPFVDALHAAGFEIAIETNGSLPVLETIDWICVSPKADAPLVVTKGNELKVVVPQDNQRLADYAKLEFDYFLVQPMDGPSRDINTKLAIDWCKRHPQWRLSMQTHKYLNIP

SEQ ID NO: 33155 - protein, 215 aa, Pseudomonas aeruginosa
  misc_feature (1)..(215): tr|A0A3M8IYY2|A0A3M8IYY2_PSEAI 7-carboxy-7-deazaguanine synthase OS=Pseudomonas aeruginosa OX=287 GN=queE PE=3 SV=1
MQQTLRITEIFYSLQGETRTAGLPTVFVRLTGCPLRCHYCDTAYAFSGGDVVSLDAIFERVAAYKPRYICVTGGEPLAQPNCISLLERLCDAGYEVSLETSGALDVSRVDPRVSKVLDLKTPGSGEVGRNRYENIPLLTDNDQVKFVVCSREDYDWAVSKLIEYRLDQRAGEVLFSPSHHQVSARELADWIVADNLPVRLQLQLHKILWNDEPGH

SEQ ID NO: 33156 - protein, 264 aa, Pseudomonas aeruginosa
  misc_feature (1)..(264): tr|A0A0A8RJ16|A0A0A8RJ16_PSEAI 7-carboxy-7-deazaguanine synthase OS=Pseudomonas aeruginosa OX=287 GN=queE PE=3 SV=1
MVSARLIFVPLHARPSGISSATTGYVPWRSFIYRNGGGRPVQSSRPWLNMQQTLRITEIFYSLQGETRTAGLPTVFVRLTGCPLRCHYCDTAYAFSGGDVVSLDAIFERVAAYKPRYICVTGGEPLAQPNCISLLERLCDAGYEVSLETSGALDVSRVDPRVSKVLDLKTPGSGEVGRNRYENIPLLTDNDQVKFVVCSREDYDWAVSKLIEYRLDQRAGEVLFSPSHHQVSARELADWIVADNLPVRLQLQLHKILWNDEPGH

SEQ ID NO: 33157 - protein, 215 aa, Pseudomonas agarici
  misc_feature (1)..(215): tr|A0A0X1T8R0|A0A0X1T8R0_PSEAA 7-carboxy-7-deazaguanine synthase OS=Pseudomonas agarici OX=46677 GN=queE PE=3 SV=1
MQDTLRITEIFYSLQGEARTAGLPTVFVRLTGCPLRCQYCDSAYAFSGGTLMTLDGILDQVAGYRPRYVCVTGGEPLAQPNVIPLLQRLCDAGYEVSLETSGSLDISAVDTRVSRVVDLKTPGSKEAHRNRYENIERLTANDQVKFVICSREDYDWSVSKLIQYGLEKRAGEVLFSPSHHDLPPRDLADWIVADNLPVRLQMQLHKYLWNDEPGR

SEQ ID NO: 33158 - protein, 215 aa, Pseudomonas alcaligenes
  misc_feature (1)..(215): tr|A0A142IWS7|A0A142IWS7_PSEAC 7-carboxy-7-deazaguanine synthase OS=Pseudomonas alcaligenes OX=43263 GN=queE P E=3 SV=1
MQTNLRITEIFYSLQGETNTSGLPTVFVRLTGCPLRCQYCDTAYAFSGGEIMSLEAILERVAAFKPRYVCVTGGEPLAQPNCIPLLEQLCDAGYRVSLETSGAMDIAPTDRRVSRVVDLKTPGSQEVARNLYGNLDQLTGNDQVKFVICSREDYDWAVSKLIEYRLEQRAGEVLFSPSHGQVDARALADWIVADNLPVRFQLQLHKILWNDEPGH

SEQ ID NO: 33159 - protein, 226 aa, Pseudomonas alcaligenes
  misc_feature (1)..(226): tr|U2Z478|U2Z478_PSEA4 7-carboxy-7-deazaguanine synthas e OS=Pseudomonas alcaligenes (strain ATCC 14909 / DSM 5 0342 / JCM 20561 / NBRC 14159 / NCIMB 9945 / NCTC 10367 / 1577) OX=1215092 GN=queE PE=3 SV=1
MACFAVTPGALMQTNLRITEIFYSLQGETNTSGLPTVFVRLTGCPLRCQYCDTAYAFSGGEIMSLEAILERVAAFKPRYVCVTGGEPLAQPNCIPLLEQLCDAGYRVSLETSGAMDIASTDRRVSRVVDLKTPGSQEVARNLYSNLDELTGNDQVKVVICSREDYDWAVSKLIEYRLEQRAGEVLFSPSHGQVDARALADWIVSDNLPVRFQLQLHKILWNDEPGH

SEQ ID NO: 33160 - protein, 226 aa, Pseudomonas alcaliphila
  misc_feature (1)..(226): tr|A0A1G6VN38|A0A1G6VN38_9PSED 7-carboxy-7-deazaguanine synthase OS=Pseudomonas alcaliphila OX=101564 GN=queE PE=3 SV=1
MACFVITLVATMQETLRITEIFYSLQGETRTAGLPTVFVRLTGCPLRCQYCDTAYAFSGGEIVTLDSILDQVAAYRPRYVCVTGGEPLAQPNCIGLLTRLCDAGYEVSLETSGALDVSAVDPRVSKVLDLKTPGSAEVQRNRYENVQWLTRNDQVKFVICSREDYDWAVSKLIEYDLAARAGEVLFSPSHKQVDARALADWIVADNLPVRLQLQLHKILWNDEPGH

SEQ ID NO: 33161 - protein, 215 aa, Pseudomonas alcaliphila
  misc_feature (1)..(215): tr|A0A1L7G6W2|A0A1L7G6W2_9PSED 7-carboxy-7-deazaguanine synthase OS=Pseudomonas alcaliphila JAB1 OX=741155 GN= queE PE=3 SV=1
MQETLRITEIFYSLQGETRTAGLPTVFVRLTGCPLRCQYCDTAYAFSGGEIVTLDSILDQVAAYRPRYICVTGGEPLAQPNCIPLLARLCDAGYEVSLETSGALDVSAVDPRVSKVLDLKTPGSAEVQRNRYENVQWLTRNDQVKFVICSREDYDWAVSKLIEYDLAARAGEVLFSPSHKQVDARALADWIVADNLPVRLQLQLHKILWNDEPGH

SEQ ID NO: 33162 - protein, 215 aa, Pseudomonas alkylphenolica
  misc_feature (1)..(215): tr|A0A077FCT7|A0A077FCT7_9PSED 7-carboxy-7-deazaguanine synthase OS=Pseudomonas alkylphenolica OX=237609 GN=qu eE PE=3 SV=1
MQDTLRITEVFYSLQGETRTAGLPTVFVRLTGCPLRCQYCDSEYAFSGGTVRTLDSILEQVAGFKPRYVCVTGGEPLAQPNAIPLLTQLCDAGYEVSLETSGALDISRVDPRVSRVVDLKTPGSEEAHRNRYENIELLTANDQVKFVICSREDYDWAVSKLIQYGLEKRAGEVLFSPSHHQVSATDLADWIVADNLPVRFQMQLHKLLWNDEPGR

SEQ ID NO: 33163 - protein, 215 aa, Pseudomonas alkylphenolica
  misc_feature (1)..(215): tr|A0A443ZW34|A0A443ZW34_9PSED 7-carboxy-7-deazaguanine synthase OS=Pseudomonas alkylphenolica OX=237609 GN=qu eE PE=3 SV=1
MQDTLRITEVFYSLQGETRTAGLPTVFVRLTGCPLRCQYCDSEYAFSGGSIRTLDSILEQVAGFKPRYVCVTGGEPLAQPNAIPLLKQLCDAGYDVSLETSGALDISKVDARVSRVVDLKTPGSEEVHRNRYENIELLTANDQVKFVICSREDYDWAVSKLIQYGLEKRAGEVLFSPSHHQVSATDLADWIVADNLPVRFQMQLHKLLWNDEPGR

SEQ ID NO: 33164 - protein, 218 aa, Pseudomonas amygdali
  misc_feature (1)..(218): tr|A0A3M2WFZ3|A0A3M2WFZ3_PSEA0 7-carboxy-7-deazaguanine synthase OS=Pseudomonas amygdali pv. morsprunorum OX=1 29138 GN=queE PE=3 SV=1
MADMQETLRITEIFHSLQGETRTAGLPTVFVRLTGCPLRCQYCDSAYAFSGGTIQTLDDIVGQVASYRPRYVCVTGGEPLAQPNAIPLLKRLCDAGYEVSLETSGALDISAVDPRVSRVVDLKTPGSKEVARNRYENMELLTPNDQVKFVICSREDYDWAVSKLIQYGLDRRAGEVLFSASHHELKGRDLADWIVADNLPVRLQMQLHKILWDDEPGR

SEQ ID NO: 33165 - protein, 218 aa, Pseudomonas amygdali
  misc_feature (1)..(218): tr|A0A0P9SBZ8|A0A0P9SBZ8_PSEA0 7-carboxy-7-deazaguanine synthase OS=Pseudomonas amygdali pv. eriobotryae OX=12 9137 GN=queE PE=3 SV=1
MADMQDTLRITEIFHSLQGETRTAGLPTVFVRLTGCPLRCQYCDSAYAFSGGTIQTLDDIVGQVAAYRPRYVCVTGGEPLAQPNAIPLLKRLCDAGYEVSLETSGALDISAVDPRVSRVVDLKTPGSKEVSRNRYENIELLTRNDQVKFVICSREDYDWAVSKLIQYGLERRAGEVLFSASHHELKGRDLADWIVADNLPVRLQMQLHKILWDDEPGR

SEQ ID NO: 33166 - protein, 215 aa, Pseudomonas anguilliseptica
  misc_feature (1)..(215): tr|A0A1H5EME0|A0A1H5EME0_PSEAG 7-carboxy-7-deazaguanine synthase OS=Pseudomonas anguilliseptica OX=53406 GN=qu eE PE=3 SV=1
MQDTLRITEIFYSLQGETRTAGLPTVFVRLTGCPLRCQYCDTAYAFSGGEIMSLDAIFEQVAGYKPRYICVTGGEPLAQPNCIALLKRLCDAGYEVSLETSGALDVSAVDPRVSKVLDLKTPGSVEVARNRYENIELLTPNDQVKFVICSREDYDWAVSKLIQYRLAERVSEVLMSPSHHELDARSLAEWIIADNLPVRLQMQLHKILWNDEPGH

SEQ ID NO: 33167 - protein, 215 aa, Pseudomonas antarctica
  misc_feature (1)..(215): tr|A0A172Z6V3|A0A172Z6V3_9PSED 7-carboxy-7-deazaguanine synthase OS=Pseudomonas antarctica OX=219572 GN=queE P E=3 SV=1
MQDTLRITEVFYSLQGETRTAGLPTVFVRLTGCPLRCQYCDSAYAFSGGTVRTLDDILEQVAGFKPRYVCVTGGEPLAQPNAIPLLKQLCDAGYEVSLETSGALDISAVDSRVSRVVDLKTPGSKEAHRNLYENIDLLTANDQVKFVICSRDDYDWAASKLIQYGLDRRAGEVLFSPSHHDLNARDLADWVVADNLPVRLQLQLHKYLWNDEPGR

SEQ ID NO: 33168 - protein, 215 aa, Pseudomonas antarctica
  misc_feature (1)..(215): tr|A0A1G9XVH7|A0A1G9XVH7_9PSED 7-carboxy-7-deazaguanine synthase OS=Pseudomonas antarctica OX=219572 GN=queE P E=3 SV=1
MQDTLRITEVFYSLQGETRTAGLPTVFVRLTGCPLRCQYCDSAYAFSGGTVRTLDDILEQVAGFKPRYVCVTGGEPLAQPNAIPLLKQLCDAGYEVSLETSGALDISAVDPRVSRVVDLKTPGSKEAHRNLYDNMDLLTANDQVKFVICSRDDYDWAASKLIQYGLDRRAGEVLFSPSHHDLNARDLADWVVADNLPVRLQLQLHKYLWNDEPGR

SEQ ID NO: 33169 - protein, 226 aa, Pseudomonas argentinensis
  misc_feature (1)..(226): tr|A0A1I3K797|A0A1I3K797_9PSED 7-carboxy-7-deazaguanine synthase OS=Pseudomonas argentinensis OX=289370 GN=que E PE=3 SV=1
MACFAVTPVAPMKDTLRITEIFFSLQGEARTAGLPTVFVRLTGCPLRCQYCDTAYAFSGGELLTLDAILEQVASYRPRYVCVTGGEPLAQPNCIPLLEKLCDAGYEVSLETSGALDVSAVDPRVSKVVDLKTPGSAEMGRNRYENIVHLRPHDQVKFVICSREDYDWSVSKVIQYGLAERVSEVLFSPSHGQVSGRQLAEWVIADNLPVRMQLQLHKILWNDEPGH

SEQ ID NO: 33170 - protein, 210 aa, Pseudomonas argentinensis
  misc_feature (1)..(210): tr|A0A1I3GKS8|A0A1I3GKS8_9PSED 7-carboxy-7-deazaguanine synthase OS=Pseudomonas argentinensis OX=289370 GN=que E PE=3 SV=1
MTYSVKEIFYTLQGEGLRAGRPAVFCRFAGCNLWSGREIDRSRAVCQFCDTDFVGTNGTLGGKYLTAEALAERVSSLWPVAQEHRYVVLTGGEPLMQVDETLIASLHDQGFEIAVETNGTILAPAGIDWICVSPKAGADWVQRSGHELKLVYPQPGLLPDAISDSDFQYYLLQPMDGPMQKQNTRSAIAYCQANTKWRLSVQTHKILEIR

SEQ ID NO: 33171 - protein, 215 aa, Pseudomonas arsenicoxydans
  misc_feature (1)..(215): tr|A0A502HZQ2|A0A502HZQ2_9PSED 7-carboxy-7-deazaguanine synthase OS=Pseudomonas arsenicoxydans OX=702115 GN=qu eE PE=3 SV=1
MQDTLRITEVFYSLQGETRTAGLPTVFVRLTGCPLRCQYCDSAYAFTGGTLRPLDDILEQVAGFRPRYVCVTGGEPLAQPNAIPLLKQLCDAGYEVSLETSGALDISAVDSRVSRVVDLKTPGSKEAHRNRYENIELLTPNDQVKFVICSREDYDWAVSKLIQYGLDRRAGEVLFSPSHHDLNARDLADWVVADNLPVRLQLQLHKYLWNDEPGR

SEQ ID NO: 33172 - protein, 215 aa, Pseudomonas arsenicoxydans
  misc_feature (1)..(215): tr|A0A4P6G9U6|A0A4P6G9U6_9PSED 7-carboxy-7-deazaguanine synthase OS=Pseudomonas arsenicoxydans OX=702115 GN=qu eE PE=3 SV=1
MQDTLRITEVFYSLQGETRTAGLPTVFVRLTGCPLRCQYCDSAYAFTGGTVRTLDDILEQVAGFRPRYVCVTGGEPLAQPNAIPLLKQLCDAGYEVSLETSGALDISAVDSRVSRVVDLKTPGSKEAHRNRYENIELLTPNDQVKFVICSREDYDWAVSKLIQYGLDQRAGEVLFSPSHHDLNARDLADWVVADNLPVRLQLQLHKYLWNDEPGR

SEQ ID NO: 33173 - protein, 215 aa, Pseudomonas asplenii
  misc_feature (1)..(215): tr|A0A2J7UYJ3|A0A2J7UYJ3_9PSED 7-carboxy-7-deazaguanine synthase OS=Pseudomonas asplenii OX=53407 GN=queE PE=3 SV=1
MQDTLRITEVFYSLQGETRTAGLPTVFVRLTGCPLRCQYCDSAYAFSGGTVRTLDDILEQVAGFRPRYVCVTGGEPLAQPNAIPLLKQLCDAGYEVSLETSGALDVSAVDPRVSRVVDLKTPDSKEAHRNRYENIELLTPNDQVKFVICSRDDYDWAVSKLIQYGLDRRAGEVLFSPSHHDLNARDLADWVVADNLPVRLQLQLHKYLWNDEPGR

SEQ ID NO: 33174 - protein, 215 aa, Pseudomonas asplenii
  misc_feature (1)..(215): tr|A0A438LD65|A0A438LD65_9PSED 7-carboxy-7-deazaguanine synthase OS=Pseudomonas asplenii OX=53407 GN=queE PE=3 SV=1
MQDTLRITEVFYSLQGETRTAGLPTVFVRLTGCPLRCQYCDSAYAFSGGTLMTLDSLLTQVADYRPRYVCVTGGEPLAQPNAIPLLKQLCDAGYSVSLETSGALDISAVDTRVSRVLDLKTPGSKESHRNRYENIELLTPNDQVKFVICSREDYDWAVSKLIQYGLERRAGEVLFSPSHHDLPARELADWIVADNLPVRLQMQLHKYLWNDEPGR

SEQ ID NO: 33175 - protein, 215 aa, Pseudomonas asturiensis
  misc_feature (1)..(215): tr|A0A1M7LY46|A0A1M7LY46_9PSED 7-carboxy-7-deazaguanine synthase OS=Pseudomonas asturiensis OX=1190415 GN=queE PE=3 SV=1
MQDTLRITEIFHSLQGETRTAGLPTVFVRLTGCPLRCQYCDSAYAFTGGTIQSLDDIMGQVAAYRPRYVCVTGGEPLAQPNAIALLKRLCDEGYEVSLETSGALDISAVDPRVSRVVDLKTPGSKEVTRNRYENMELLTPNDQVKFVICSREDYDWAVSKLIQYGLDRRAGEVLFSASHHELKSRELADWIVADNLPVRLQMQLHKYLWDDEPGR

SEQ ID NO: 33176 - protein, 215 aa, Pseudomonas avellanae
  misc_feature (1)..(215): tr|A0A261WL40|A0A261WL40_9PSED 7-carboxy-7-deazaguanine synthase OS=Pseudomonas avellanae OX=46257 GN=queE PE= 3 SV=1
MQETLRITEIFHSLQGETRTAGLPTVFVRLTGCPLRCQYCDSAYAFSGGTIQTLDDIVGQVASYRPRYVCVTGGEPLAQPNAIPLLKRLCDAGYEVSLETSGALDISAVDPRVSRVVDLKTPGSKEVARNRYENMELLTPNDQVKFVICSREDYDWAVSKLIQYGLDRRAGEVLFSASHHELKGRDLADWIVADNLPVRLQMQLHKILWDDEPGR

SEQ ID NO: 33177 - protein, 218 aa, Pseudomonas avellanae
  misc_feature (1)..(218): tr|A0A3M5T3M1|A0A3M5T3M1_9PSED 7-carboxy-7-deazaguanine synthase OS=Pseudomonas avellanae OX=46257 GN=queE PE= 3 SV=1
MADMQETLRITEIFHSLQGETRTAGLPTVFVRLTGCPLRCQYCDSAYAFSGGTIQTLDDILGQVASYRPRYVCVTGGEPLAQPNAIPLLKRLCDAGYEVSLETSGALDISAVDPRVSRVVDLKTPGSKEVARNRYENMALLTPNDQVKFVICSREDYDWAVSKLIQYGLDRRAGEVLFSASHHELKGRDLADWIVADNLPVRLQMQLHKILWDDEPGR

SEQ ID NO: 33178 - protein, 215 aa, Pseudomonas azotoformans
  misc_feature (1)..(215): tr|A0A127HQV6|A0A127HQV6_PSEAZ 7-carboxy-7-deazaguanine synthase OS=Pseudomonas azotoformans OX=47878 GN=queE PE=3 SV=1
MQDTLRITEVFYSLQGETRTAGLPTVFVRLTGCPLRCQYCDSAYAFSGGTVRTLDDILEQVAGYKPRYVCVTGGEPLAQPNAIPLLKQLCDAGYEVSLETSGALDISAVDPRVSRVVDLKTPDSKEAHRNRYENIELLTANDQVKFVICSRDDYDWANSKLIQYGLDRRAGEVLFSPSHHDLNARDLADWVVADNLPVRLQLQLHKYLWNDEPGR

SEQ ID NO: 33179 - protein, 215 aa, Pseudomonas azotoformans
  misc_feature (1)..(215): tr|A0A4Q0HSN9|A0A4Q0HSN9_PSEAZ 7-carboxy-7-deazaguanine synthase OS=Pseudomonas azotoformans OX=47878 GN=queE PE=3 SV=1
MQDTLRITEVFYSLQGETRTAGLPTVFVRLTGCPLRCQYCDSAYAFSGGTVRTLDDILEQVAGYRPRYVCVTGGEPLAQPNAIPLLKQLCDAGYEVSLETSGALDISAVDPRVSRVVDLKTPDSKEAHRNRYENMDLLTANDQVKFVICSRDDYDWATSKLIQYGLERRAGEVLFSPSHHDLNARDLADWVVADNLPVRLQLQLHKYLWNDEPGR

SEQ ID NO: 33180 - protein, 215 aa, Pseudomonas baetica
  misc_feature (1)..(215): tr|A0A2N0DIG2|A0A2N0DIG2_9PSED 7-carboxy-7-deazaguanine synthase OS=Pseudomonas baetica OX=674054 GN=queE PE=3 SV=1
MQDTLRITEVFYSLQGETRTAGLPTVFVRLTGCPLRCQYCDSAYAFSGGTIRTLDDILEQVAGVRPRYVCVTGGEPLAQPNAIPLLKQLCDAGYEVSLETSGALDISAVDTRVSRVVDLKTPGSKEAHRNRYENIELLTPNDQVKFVICSREDYDWAVSKLIQYGLDRRAGEVLFSPSHHDLNARDLADWVVADNLPVRLQLQLHKYLWNDEPGR

SEQ ID NO: 33181 - protein, 226 aa, Pseudomonas balearica
  misc_feature (1)..(226): tr|A0A1G9QH85|A0A1G9QH85_9PSED 7-carboxy-7-deazaguanine synthase OS=Pseudomonas balearica DSM 6083 OX=1123016 GN=queE PE=3 SV=1
MACLAVTPVADMQQTLRITEIFYSLQGETRTSGLPTVFVRLTGCPLRCHYCDTAYAFSGGETMTLDAIVDEVARHRPRYVCVTGGEPLAQPNCVPLLQRLCEAGYEVSLETSGALDISATDRRVSRVLDLKTPGSGEVRRNRYENIAELTANDQVKFVICSREDYDWAVSKLIEYGLDRRAGEVLFSPSHGQVDVRDLADWIVADNLPVRLQLQLHKIIWNDEPGH

SEQ ID NO: 33182 - protein, 215 aa, Pseudomonas batumici
  misc_feature (1)..(215): tr|A0A0C2ETR2|A0A0C2ETR2_9PSED 7-carboxy-7-deazaguanine synthase OS=Pseudomonas batumici OX=226910 GN=queE PE= 3 SV=1
MQDTLRITEVFYSLQGETRTAGLPTVFVRLTGCPLRCQYCDSAYAFSGGTLMTLDSLLEQVAGYRPRYVCVTGGEPLAQPNAIPLLKQLCDAGYSVSLETSGALDISAVDTRVSRVLDLKTPGSKESHRNRYENIELLTPNDQVKFVICSREDYDWAVSKLIQYGLDKRAGEVLFSPSHHDLPARELADWIVADNLPVRLQMQLHKYLWNDEPGR

SEQ ID NO: 33183 - protein, 238 aa, Pseudomonas bauzanensis
  misc_feature (1)..(238): tr|A0A4U0YN74|A0A4U0YN74_9PSED 7-carboxy-7-deazaguanine synthase OS=Pseudomonas bauzanensis OX=653930 GN=queE PE=3 SV=1
MIAVSEIFGPTIQGEGALIGLPTVFVRTGGCDFRCSWCDTLYAVEPRFKKDWQSMDAKAILAEVNQLSGGEPILVTLSGGNPALQPLEELLQLGHRQGHRFAMETQGSKAQTWFNQLDHLTLSPKPPSSDMPFRRERFESCLAAAGADTNVSLKLVIADEVDYQWARALAADYPHLPLYLQPCNTAPATPEQPERETDLDALNTQLRWLVERVTTDHWYRPRVLPQLHVLIWNNERGV

SEQ ID NO: 33184 - protein, 238 aa, Pseudomonas bauzanensis
  misc_feature (1)..(238): tr|A0A1I4P3Z2|A0A1I4P3Z2_9PSED 7-carboxy-7-deazaguanine synthase OS=Pseudomonas bauzanensis OX=653930 GN=queE PE=3 SV=1
MIAVSEIFGPTIQGEGALIGLPTVFVRTGGCDFRCSWCDTLYAVEPRFKKDWQSMDAEAILTEVNQLSGGEPILVTLSGGNPALQPLEELLQLGHRQGHRFAMETQGSKAQTWFNQLDHLTLSPKPPSSDMPFRRERFESCLAAAGADTNVSLKLVIADEVDYQWARALAADYPHLPLYLQPCNTAPATPEQPERETDLDALNTQLRWLVERVTTDHWYRPRVLPQLHVLIWNNERGV

SEQ ID NO: 33185 - protein, 226 aa, Pseudomonas benzenivorans
  misc_feature (1)..(226): tr|A0A1G7WFY0|A0A1G7WFY0_9PSED 7-carboxy-7-deazaguanine synthase OS=Pseudomonas benzenivorans OX=556533 GN=que E PE=3 SV=1
MACLAVTPVADMQETLRITEIFYSLQGETRTAGLPTVFVRLTGCPLRCQYCDTAYAFSGGEIMSLDAILERVAGYKPRYICVTGGEPLAQPNCIPLLERLCDAGYQVSLETSGALDVSAVDPRVSKVLDLKTPGSAEVARNRYENIERLTSNDQVKFVICSREDYDWAVTKLIQYRLHERAGEVLFSPSHHELSARALADWIVTDNLPVRLQMQLHKILWDDEPGH

SEQ ID NO: 33186 - protein, 226 aa, Pseudomonas borbori
  misc_feature (1)..(226): tr|A0A1I5LH10|A0A1I5LH10_9PSED 7-carboxy-7-deazaguanine synthase OS=Pseudomonas borbori OX=289003 GN=queE PE=3 SV=1
MACLAVTPVADMQDTLRITEIFYSLQGETRTAGLPTVFVRLTGCPLRCQYCDTAYAFSGGEVMSLDAIVEQIAGYQPRYICVTGGEPLAQPNCIPLLKRLCDAGYQVSLETSGALDVSAVDPRVSKVLDLKTPGSAEVARNRYENIELLTVNDQVKFVICSREDYDWAVTKLIQYRLHQRAGEVLFSPSHHELSARLLADWIVADNLPVRLQMQLHKILWNDEPGH

SEQ ID NO: 33187 - protein, 215 aa, Pseudomonas brassicacearum
  misc_feature (1)..(215): tr|F2KKW0|F2KKW0_PSEBN 7-carboxy-7-deazaguanine synthas e OS=Pseudomonas brassicacearum (strain NFM421) OX=9944 84 GN=queE PE=3 SV=1
MQDTLRITEVFYSLQGETRTAGLPTVFVRLTGCPLRCQYCDSAYAFSGGTLRTLDDILEQVASYRPRYVCVTGGEPLAQPNAIPLLKQLCDAGYEVSLETSGALDISAVDPRVSRVVDLKTPGSKEAHRNRYENIELLTPNDQVKFVICSREDYDWAVSKLIQYGLDQRAGEVLLSPSHHDLSARDLADWVVADNLPVRLQLQLHKYLWNDEPGR

SEQ ID NO: 33188 - protein, 215 aa, Pseudomonas brassicacearum
  misc_feature (1)..(215): tr|A0A423GMB6|A0A423GMB6_9PSED 7-carboxy-7-deazaguanine synthase OS=Pseudomonas brassicacearum OX=930166 GN=qu eE PE=3 SV=1
MQDTLRITEVFYSLQGETRTAGLPTVFVRLTGCPLRCQYCDSAYAFTGGTVRPLDDILEQVAGFRPRYVCVTGGEPLAQPNAIPLLKQLCDAGYEVSLETSGALDISAVDPRVSRVLDLKTPGSKEAHRNLYENIALLTANDQVKFVICSREDYDWAVSKLIQYGLDQRAGEVLFSPSHHDLSARELADWIVADNLPVRLQLQLHKYLWNDEPGR

SEQ ID NO: 33189 - protein, 215 aa, Pseudomonas brenneri
  misc_feature (1)..(215): tr|A0A4R6YXS6|A0A4R6YXS6_9PSED 7-carboxy-7-deazaguanine synthase OS=Pseudomonas brenneri OX=129817 GN=queE PE= 3 SV=1
MQDTLRITEVFYSLQGETRTAGLPTVFVRLTGCPLRCQYCDSAYAFSGGTIRTLDDILEQVAGYKPRYVCVTGGEPLAQPNAIPLLKQLCDAGYEVSLETSGALDISAVDPRVSRVVDLKTPDSKEAHRNRYENIELLTANDQVKFVICSRDDYDWANSKLIQYGLDRRAGEVLFSPSHHDLNARDLADWVVADNLPVRLQLQLHKYLWNDEPGR

SEQ ID NO: 33190 - protein, 215 aa, Pseudomonas brenneri
  misc_feature (1)..(215): tr|A0A5B2UTM5|A0A5B2UTM5_9PSED 7-carboxy-7-deazaguanine synthase OS=Pseudomonas brenneri OX=129817 GN=queE PE= 3 SV=1
MQDTLRITEVFYSLQGETRTAGLPTVFVRLTGCPLRCQYCDSAYAFSGGTIRTLDDILEQVAGFRPRYVCVTGGEPLAQPNAIPLLKQLCDAGYEVSLETSGALDISAVDPRVSRVVDLKTPDSKEAHRNRYENIDLLTANDQVKFVICSRDDYDWANSKLIQYGLDRRAGEVLFSPSHHDLNARDLADWVVADNLPVRLQLQLHKYLWNDEPGR

SEQ ID NO: 33191 - protein, 215 aa, Pseudomonas canadensis; identical to SEQ ID NO: 33178
  misc_feature (1)..(215): tr|A0A423EVX0|A0A423EVX0_9PSED 7-carboxy-7-deazaguanine synthase OS=Pseudomonas canadensis OX=915099 GN=queE P E=3 SV=1

SEQ ID NO: 33192 - protein, 218 aa, Pseudomonas cannabina
  misc_feature (1)..(218): tr|A0A0P9MKW6|A0A0P9MKW6_PSECA 7-carboxy-7-deazaguanine synthase OS=Pseudomonas cannabina OX=86840 GN=queE PE= 3 SV=1
MADMQDTLRITEIFHSLQGETRTAGLPTVFVRLTGCPLRCQYCDSAYAFSGGTVQALDDIIEQVACYRPRYVCVTGGEPLAQPNAIPLLKRLCDAGYEVSLETSGALDISAVDPRVSRVVDLKTPGSKEVARNRYENIELLTANDQVKFVLCSREDYDWAVSKLIQYGLDRRAGEVLFSASHHELKGRDLADWIVADNLPVRLQMQLHKILWDDEPGR

SEQ ID NO: 33193 - protein, 218 aa, Pseudomonas cannabina
  misc_feature (1)..(218): tr|A0A3M3R295|A0A3M3R295_PSECA 7-carboxy-7-deazaguanine synthase OS=Pseudomonas cannabina OX=86840 GN=queE PE= 3 SV=1
MADMQDTLRITEIFHSLQGETRTAGLPTVFVRLTGCPLRCQYCDSAYAFSGGTVQALDDIIEQVASYRPRYVCVTGGEPLAQPNAIPLLKRLCDAGYEVSLETSGALDISAVDPRVSRVVDLKTPGSKEVARNRYENIELLTPNDQVKFVLCSREDYDWAVSKLIQYGLDRRAGEVLFSASHHELKGRDLADWIVADNLPVRLQMQLHKILWDDEPGR

SEQ ID NO: 33194 - protein, 215 aa, Pseudomonas capeferrum
  misc_feature (1)..(215): tr|A0A084CJC9|A0A084CJC9_9PSED 7-carboxy-7-deazaguanine synthase OS=Pseudomonas capeferrum OX=1495066 GN=queE PE=3 SV=1
MQDTLRITEVFYSLQGETRTAGLPTVFVRLTGCPLRCQYCDSAYAFSGGTLRTLDSIMEQVAGFKPRYVCVTGGEPLAQPNALPLLQQLCDAGYEVSLETSGALDISGTDTRVSRVVDLKTPGSEESHRNRYENIEHLTRNDQVKFVICSREDYDWAVSKLIQYNLAERAGEVLFSPSHHQVRASDLADWIIADNLPVRFQLQLHKLLWNDEPGR

SEQ ID NO: 33195 - protein, 218 aa, Pseudomonas caricapapayae
  misc_feature (1)..(218): tr|A0A3M6GE40|A0A3M6GE40_9PSED 7-carboxy-7-deazaguanine synthase OS=Pseudomonas caricapapayae OX=46678 GN=queE PE=3 SV=1
MADMQDTLRITEIFHSLQGETRTAGLPTVFVRLTGCPLRCQYCDSAYAFSGGTIQTLDDIVGQVASYRPRYVCVTGGEPLAQPNAIPLLKRLCDAGYEVSLETSGALDISAVDPRVSRVVDLKTPGSKEVARNRYENMALLTPNDQVKFVICSREDYDWAVSKLIQYGLDGRAGEVLFSASHHELKSRDLADWIVADNLPVRLQMQLHKILWDDEPGR

SEQ ID NO: 33196 - protein, 218 aa, Pseudomonas caricapapayae
  misc_feature (1)..(218): tr|A0A0P9PDH5|A0A0P9PDH5_9PSED 7-carboxy-7-deazaguanine synthase OS=Pseudomonas caricapapayae OX=46678 GN=queE PE=3 SV=1
MADMQDTLRITEIFHSLQGETRTAGLPTVFVRLTGCPLRCQYCDSAYAFSGGTIQTLDDIVGQVASYRPRYVCVTGGEPLAQPNAIPLLKRLCDAGYEVSLETSGALDSSAVDPRVSRVVDLKTPGSKEVARNRYENMALLTPNDQVKFVICSREDYDWAVSKLIQYGLDGRAGEVLFSASHHELKSRDLADWIVADNLPVRLQMQLHKILWDDEPGR

SEQ ID NO: 33197 - protein, 215 aa, Pseudomonas caspiana
  misc_feature (1)..(215): tr|A0A1Y3NTH3|A0A1Y3NTH3_9PSED 7-carboxy-7-deazaguanine synthase OS=Pseudomonas caspiana OX=1451454 GN=queE PE =3 SV=1
MQETLRITEVFYSLQGETRTAGLPTVFVRLTGCPLRCQYCDSAYAFSGGTIQTLDDILGQVADYRPRYVCVTGGEPLAQPNAIPLLKRLCDAGYEVSLETSGALDISAVDPRVSRVVDLKTPGSMEVTRNRYENIELLTPNDQVKFVLCSREDYDWAVSKLIQYGLERRAGEVLFSPSHHQLNARDLADWIVADNLPVRLQMQLHKFLWNDEPGR

SEQ ID NO: 33198 - protein, 215 aa, Pseudomonas caspiana
  misc_feature (1)..(215): tr|A0A502J4C0|A0A502J4C0_9PSED 7-carboxy-7-deazaguanine synthase OS=Pseudomonas caspiana OX=1451454 GN=queE PE =3 SV=1
MQDTLRITEVFYSLQGETRTAGLPTVFVRLTGCPLRCQYCDSAYAFTGGTIRTLDDILEQVAGFRPRYVCVTGGEPLAQPNAIPLLKQLCDAGYEVSLETSGALDISAVDPRVSRVVDLKTPGSKEAHRNRYENIELLTPNDQVKFVICSREDYDWAVSKLIQYGLDQRAGEVLFSPSHHDLNARDLADWVVADNLPVRLQLQLHKYLWNDEPGR

SEQ ID NO: 33199 - protein, 215 aa, Pseudomonas cedrina; identical to SEQ ID NO: 33179
  misc_feature (1)..(215): tr|A0A2S9DB23|A0A2S9DB23_PSECE 7-carboxy-7-deazaguanine synthase OS=Pseudomonas cedrina OX=651740 GN=queE PE=3 SV=1

SEQ ID NO: 33200 - protein, 215 aa, Pseudomonas cedrina
  misc_feature (1)..(215): tr|A0A1V2KJH8|A0A1V2KJH8_PSECE 7-carboxy-7-deazaguanine synthase OS=Pseudomonas cedrina subsp. cedrina OX=7676 2 GN=queE PE=3 SV=1
MQDTLRITEVFYSLQGETRTAGLPTVFVRLTGCPLRCQYCDSAYAFSGGTVRTLDDILEQVAGYKPRYVCVTGGEPLAQPNAIPLLKQLCDAGYEVSLETSGALDISAVDPRVSRVVDLKTPGSKEAHRNRYENIDLLTANDQVKFVICSRDDYDWANSKLIQYGLDRRAGEVLFSPSHHDLNARDLADWVVADNLPVRLQLQLHKYLWNDEPGR

SEQ ID NO: 33201 - protein, 215 aa, Pseudomonas cerasi
  misc_feature (1)..(215): tr|A0A193SLV1|A0A193SLV1_9PSED 7-carboxy-7-deazaguanine synthase OS=Pseudomonas cerasi OX=1583341 GN=queE PE=3 SV=1
MQDTLRITEIFHSLQGETRTAGLPTVFVRLTGCPLRCQYCDSAYAFSGGTIQTLDDILGQVASYRPRYVCVTGGEPLAQPNAIPLLKRLCDAGYEVSLETSGALDISAVDPRVSRVVDLKTPGSKEVSRNRYENMELLTAKDQVKFVICSREDYDWAVSKLIQYGLDRRAGEVLFSASHHELKGRDLADWIVADNLPVRLQMQLHKILWDDEPGR

SEQ ID NO: 33202 - protein, 226 aa, Pseudomonas chengduensis
  misc_feature (1)..(226): tr|A0A1G6MKM3|A0A1G6MKM3_9PSED 7-carboxy-7-deazaguanine synthase OS=Pseudomonas chengduensis OX=489632 GN=queE PE=3 SV=1
MACFVITLVATMQETLRITEIFYSLQGETRTAGLPTIFVRLTGCPLRCQYCDTAYAFSGGEIVTLDSILDQVAAYRPRYVCVTGGEPLAQPNCIPLLARLCDAGYEVSLETSGALDVSAVDARVSKVLDLKTPGSAEVQRNRYENVQWLTRNDQVKFVICSREDYDWAVSKLIEYDLAARAGEVLFSPSHKQVDARALADWIVADNLPVRLQLQLHKILWNDEPGH

SEQ ID NO: 33203 - protein, 213 aa, Pseudomonas chloritidismutans
  misc_feature (1)..(213): tr|V4Q5P7|V4Q5P7_PSECO 7-carboxy-7-deazaguanine synthas e OS=Pseudomonas chloritidismutans AW-1 OX=1263865 GN=q ueE PE=3 SV=1
MTLRITEIFYSLQGETRTSGLPTVFVRLTGCPLRCQYCDTAYAFSGGELMTLDAIVERVASYNPRYVCVTGGEPLAQPNCVPLLQRLCDAGYEVSLETSGALDISVVDERVSRVVDLKTPGSAEVARNRYENIACITRNDQVKFVICSREDYDWAVSKLIEYGLDRRAGEVLFSPSHGQVDVRALADWIVADNLPVRLQLQLHKIIWNDAPGH

SEQ ID NO: 33204 - protein, 215 aa, Pseudomonas chlororaphis
  misc_feature (1)..(215): tr|A0A1E1G2T9|A0A1E1G2T9_9PSED 7-carboxy-7-deazaguanine synthase OS=Pseudomonas chlororaphis subsp. aurantiaca OX=86192 GN=queE PE=3 SV=1
MQDTLRITEVFYSLQGETRTAGLPTVFVRLTGCPLRCQYCDSAYAFSGGTIRTLESILEQVAGFRPRYVCVTGGEPLAQPNAIPLLKQLCDAGYEVSLETSGALDISAVDPRVSRVLDLKTPGSQEAQRNRYENIELLTPNDQVKFVICSREDYDWAVSKLIQYGLERRAGEVLFSPSHHDLNARDLADWIVADNLPVRLQLQLHKYLWNDEPGR

SEQ ID NO: 33205 - protein, 215 aa, Pseudomonas chlororaphis
  misc_feature (1)..(215): tr|A0A3G7FDX0|A0A3G7FDX0_9PSED 7-carboxy-7-deazaguanine synthase OS=Pseudomonas chlororaphis subsp. piscium OX =1513890 GN=queE PE=3 SV=1
MQDTLRITEVFYSLQGETRTAGLPTVFVRLTGCPLRCQYCDSAYAFSGGTIRTLESILEQVAGFRPRYVCVTGGEPLAQPNAIPLLKQLCDAGYEVSLETSGALDISAVDPRVSRVLDLKTPGSEEVQRNRYENIELLTPNDQVKFVICSREDYDWAVSKLIQYGLERRAGEVLFSPSHHDLNARDLADWIVADNLPVRLQLQLHKYLWNDEPGR

SEQ ID NO: 33206 - protein, 215 aa, Pseudomonas cichorii
  misc_feature (1)..(215): tr|A0A3M4MC20|A0A3M4MC20_PSECI 7-carboxy-7-deazaguanine synthase OS=Pseudomonas cichorii OX=36746 GN=queE PE=3 SV=1
MQDTLRITEIFYSLQGETRTAGLPTVFVRLTGCPLRCQYCDSAYAFTGGKIQTLDDILEQVAAYRPRYVCVTGGEPLAQPNAIPLLERLCDAGYQVSLETSGALDISAVDTRVSRVVDLKTPGSKEVTRNRYENMELLTPNDQVKFVICSRDDYDWAVSKLIQYGLDKRAGEVLFSASHHELKGRDLADWIVADNLPVRLQMQLHKILWDDEPGR

SEQ ID NO: 33207 - protein, 218 aa, Pseudomonas cichorii
  misc_feature (1)..(218): tr|A0A3M3TJA2|A0A3M3TJA2_PSECI 7-carboxy-7-deazaguanine synthase OS=Pseudomonas cichorii OX=36746 GN=queE PE=3 SV=1
MAHMQDTLRITEIFYSLQGETRTAGLPTVFVRLTGCPLRCQYCDSAYAFSGGKILTLDDILEQVAAYRPRYVCVTGGEPLAQPNAIPLLERLCDAGYEVSLETSGALDISAVDSRVSRVVDLKTPGSKEVARNRYENMELLTPNDQVKFVICSRDDYDWAVSKLIQYGLDKRAGEVLFSASHHELKGRDLADWIVADNLPVRLQMQLHKILWDDEPGR

SEQ ID NO: 33208 - protein, 215 aa, Pseudomonas citronellolis
  misc_feature (1)..(215): tr|A0A1A9K943|A0A1A9K943_9PSED 7-carboxy-7-deazaguanine synthase OS=Pseudomonas citronellolis OX=53408 GN=queE PE=3 SV=1
MQQTLRITEIFYSLQGEARTVGLPTVFVRLTGCPLRCQYCDSAYAFSGGEIRSLDSILETVAGYRPRYVCVTGGEPLAQPNCLPLLQRLCDAGYSVSLETSGALDIAATDRRVSRVLDLKTPGSGEVRRNRYENVAELTGNDQVKFVLCSREDYDWAVSKLIEYRLDERAGEVLFSPSHHQMAPRELADWIVADNLPVRFQMQLHKILWNDEPGR

SEQ ID NO: 33209 - protein, 226 aa, Pseudomonas citronellolis
  misc_feature (1)..(226): tr|A0A4Z0IEK3|A0A4Z0IEK3_9PSED 7-carboxy-7-deazaguanine synthase OS=Pseudomonas citronellolis OX=53408 GN=queE PE=3 SV=1
MACVAVTPVADMQQTLRITEIFYSLQGEARTVGLPTVFVRLTGCPLRCQYCDSAYAFSGGEIRSLDSILETVAGYRPRYVCVTGGEPLAQPNCLPLLQRLCDAGYSVSLETSGALDIAATDRRVSRVLDLKTPGSGEVRRNRYENIAELTGNDQVKFVLCSREDYDWAVSKLIEYRLDERAGEVLFSPSHHQLAPRELADWIVADNLPVRFQMQLHKILWNDEPGR

SEQ ID NO: 33210 - protein, 215 aa, Pseudomonas coleopterorum
  misc_feature (1)..(215): tr|A0A1H5F332|A0A1H5F332_9PSED 7-carboxy-7-deazaguanine synthase OS=Pseudomonas coleopterorum OX=1605838 GN=qu eE PE=3 SV=1
MQDTLRITEVFYSLQGETRTAGLPTVFVRLTGCPLRCQYCDSAYAFSGGTQRTLDSLMEQVASYKPRYVCVTGGEPLAQPNAIPLMQRLCDAGYEVSVETSGALDISAVDTRVSRVLDLKTPGSLEVHRNRYENIELLTRNDQVKFVLCSREDYDWAVSKLIQYGLDQRAGEVLFSPSKDQLRATDLADWIVADNLPVRLQMQLHKLLWNDEPGR

SEQ ID NO: 33211 - protein, 210 aa, Pseudomonas coleopterorum
  misc_feature (1)..(210): tr|A0A1H5DYE1|A0A1H5DYE1_9PSED 7-carboxy-7-deazaguanine synthase OS=Pseudomonas coleopterorum OX=1605838 GN=qu eE PE=3 SV=1
MTYSIKEIFYTLQGEGLRAGRPAVFCRFSGCNLWSGREADRSQAVCQFCDTDFAGTNGTLGGKYLTAENLVEQIASQWPVGQAHRYVVLTGGEPLLQVDDALIDALHNQDFEVAVETNGTIAAPTGIDWICVSPKAGTEWVQRSGDELKLVYPQPGLLPDTITTNDFKYYLLQPMDGPLQRQNTRSAIAYCQANTTWRLSVQTHKILEIR

SEQ ID NO: 33212 - protein, 226 aa, Pseudomonas composti
  misc_feature (1)..(226): tr|A0A1I5NBR9|A0A1I5NBR9_9PSED 7-carboxy-7-deazaguanine synthase OS=Pseudomonas composti OX=658457 GN=queE PE= 3 SV=1
MACFVITHVATMQETLRITEIFYSLQGETRTAGLPTVFVRLTGCPLRCQYCDTAYAFSGGEIVTLDSILDQVSAYRPRYVCVTGGEPLAQPNCIPLLTRLCDAGYEVSLETSGALDVSAVDPRVSKVLDLKTPGSAEVQRNRYENIQWLTRNDQVKFVICSREDYDWAVSKLIEHGLAARADEVLFSPSHQQVDARALAEWIVVDNLPVRLQLQLHKILWNDEPGH

SEQ ID NO: 33213 - protein, 218 aa, Pseudomonas congelans
  misc_feature (1)..(218): tr|A0A0N8R127|A0A0N8R127_9PSED 7-carboxy-7-deazaguanine synthase OS=Pseudomonas congelans OX=200452 GN=queE PE =3 SV=1
MADMQDTLRITEIFHSLQGETRTAGLPTVFVRLTGCPLRCQYCDSAYAFSGGTIQTLDDILGQVASYRPRYVCVTGGEPLAQPNAIPLLKRLCDAGYEVSLETSGALDISAVDPRVSRVVDLKTPGSKEVSRNRYENMELLTANDQVKFVICSREDYDWAVSKLIQYGLDRRAGEVLFSASHHELKGRDLADWIVADNLPVRLQMQLHKILWDDEPGR

SEQ ID NO: 33214 - protein, 218 aa, Pseudomonas coronafaciens
  misc_feature (1)..(218): tr|A0A0P9KQB3|A0A0P9KQB3_9PSED 7-carboxy-7-deazaguanine synthase OS=Pseudomonas coronafaciens pv. atropurpurea OX=129135 GN=queE PE=3 SV=1
MADMQDTLRITEIFHSLQGETRTAGLPTVFVRLTGCPLRCQYCDSAYAFSGGTIQTLNDIVGQVASYRPRYVCVTGGEPLAQPNAIPLLKRLCDAGYEVSLETSGALDISAVDPRVSRVVDLKTPGSKEVSRNRYENMELLTPNDQVKFVICSREDYDWAVSKLIQYGLERRAGEVLFSASHHELKGRDLADWIVADNLPVRLQMQLHKILWDDEPGR

SEQ ID NO: 33215 - protein, 218 aa, Pseudomonas coronafaciens
  misc_feature (1)..(218): tr|A0A0Q0DSU7|A0A0Q0DSU7_9PSED 7-carboxy-7-deazaguanine synthase OS=Pseudomonas coronafaciens pv. zizaniae OX= 251700 GN=queE PE=3 SV=1
MADMQDTLRITEIFHSLQGETRTAGLPTVFVRLTGCPLRCQYCDSAYAFSGGTIQTLDDIVGQVASYRPRYVCVTGGEPLAQPNAIPLLKRLCDAGYEVSLETSGALDISAVDPRVSRVVDLKTPGSKEVSRNRYENMELLTPNDQVKFVICSREDYDWAVSKLIQYGLERRAGEVLFSASHHELKGRDLADWIVADNLPVRLQMQLHKILWDDEPGR

SEQ ID NO: 33216 - protein, 218 aa, Pseudomonas corrugata
  misc_feature (1)..(218): tr|A0A3M3EXG9|A0A3M3EXG9_9PSED 7-carboxy-7-deazaguanine synthase OS=Pseudomonas corrugata OX=47879 GN=queE PE= 3 SV=1
MATMQDTLRITEVFYSLQGETRTAGLPTVFVRLTGCPLRCQYCDSAYAFSGGTLRTLDDILEQVASYRPRYVCVTGGEPLAQPNAIPLLKQLCDAGYEVSLETSGALDISAVDPRVSRVVDLKTPGSKEAHRNRYENIELLTPNDQVKFVICSREDYDWAVSKLIQYGLDQRAGEVLVSPSHHDLNARDLADWVVADNLPVRLQLQLHKYLWNDEPGR

SEQ ID NO: 33217 - protein, 215 aa, Pseudomonas costantinii
  misc_feature (1)..(215): tr|A0A1S2V1X7|A0A1S2V1X7_9PSED 7-carboxy-7-deazaguanine synthase OS=Pseudomonas costantinii OX=168469 GN=queE PE=3 SV=1
MQDTLRITEVFYSLQGETRTAGLPTVFVRLTGCPLRCQYCDSAYAFSGGTVRTLDDILEQVAGFKPRYVCVTGGEPLAQPNAIPLLKQLCDAGYEVSLETSGALDISAVDPRVSRVVDLKTPDSKEAHRNLYTNLDLLTPNDQVKFVICSRDDYDWAASKLIQYGLERRAGEVLFSPSHHDLNARDLADWVVADNLPVRLQLQLHKYLWNDEPGR

SEQ ID NO: 33218 - protein, 215 aa, Pseudomonas cremoricolorata
  misc_feature (1)..(215): tr|A0A089WML9|A0A089WML9_9PSED 7-carboxy-7-deazaguanine synthase OS=Pseudomonas cremoricolorata OX=157783 GN=q ueE PE=3 SV=1
MQDTLRITEVFYSLQGETRTAGLPTVFVRLTGCPLRCQYCDSAYAFTGGTQRTLDSLMEQVASFKPRHVCVTGGEPLAQPNALPLLQRLCDAGYEVNLETSGALDISATDVRVSRVVDLKTPGSLECHRNRYENMQHLTPNDQVKFVICSREDYDWAVSKLIEFDLAQRAGEVLFSPSHVQVNARDLADWIVADNLPVRFQLQLHKLLWNDEPGR

SEQ ID NO: 33219 - protein, 226 aa, Pseudomonas cuatrocienegasensis
  misc_feature (1)..(226): tr|A0A1H9LY55|A0A1H9LY55_9PSED 7-carboxy-7-deazaguanine synthase OS=Pseudomonas cuatrocienegasensis OX=543360 GN=queE PE=3 SV=1
MACFAVTPVAHMLDTLRITEIFYSLQGETRTAGLPTVFVRLTGCPLRCQYCDTAYAFSGGELMPLDTIVERVAGYRPRYVCVTGGEPLAQPGCIALLTRLCDAGYEVSLETSGALDVSAVDPRVSKVLDLKTPGSAEVGRNRYDNIALLTLNDQVKFVICSREDYDWAVSKLIEYRLAERAGEVLFSPSHQQVSARALADWIVADNLPVRLQLQLHKLLWNDEPGH

SEQ ID NO: 33220 - protein, 215 aa, Pseudomonas daroniae
  misc_feature (1)..(215): tr|A0A4Q9QIY6|A0A4Q9QIY6_9PSED 7-carboxy-7-deazaguanine synthase OS=Pseudomonas daroniae OX=2487519 GN=queE PE =3 SV=1
MKDTLRITEIFFSLQGETRTAGLPTVFVRLTGCPLRCQYCDTAYAFSGGEVLTLDAILEQVASYRPRYVCVTGGEPLAQPNCIPLLERLCDAGYDVSLETSGALDVSAVDARVSKVIDLKTPGSAEVARNRYENIEYLQPRDQVKFVICSREDYDWSVSKIIQYGLAERAGELLFSPSHQQVSGRELAEWVIADNLPVRMQLQLHKILWNDEPGH

SEQ ID NO: 33221 - protein, 215 aa, Pseudomonas deceptionensis
  misc_feature (1)..(215): tr|A0A0J6J7X1|A0A0J6J7X1_PSEDM 7-carboxy-7-deazaguanine synthase OS=Pseudomonas deceptionensis OX=882211 GN=qu eE PE=3 SV=1
MQDTLRITEVFYSLQGETRTAGLPTVFVRLTGCPLRCGYCDSAYAFSGGTVRPLDDILEQVASFRPRYVCVTGGEPLAQPNAIPLLKQLCDAGYEVSIETSGALDISAVDPRVSRVLDLKTPGSKESHRNLYENIALLTPNDQVKFVICSREDYDWAVSKLIEYGLERRAGEVLFSPSHHDLPARDLADWIVADNLPVRLQMQLHKYLWNDEPGR

SEQ ID NO: 33222 - protein, 226 aa, Pseudomonas delhiensis
  misc_feature (1)..(226): tr|A0A239MW69|A0A239MW69_9PSED 7-carboxy-7-deazaguanine synthase OS=Pseudomonas delhiensis OX=366289 GN=queE P E=3 SV=1
MACTAVTPVADMQQTLRITEIFYSLQGEARTVGLPTVFVRLTGCPLRCQYCDSAYAFSGGEIRSLDSILETVAGYRPRHVCVTGGEPLAQPNCLPLLQRLCDAGYAVSLETSGALDISATDRRVSRVLDLKTPGSGEVRRNRYENIAQLTGNDQVKFVLCSREDYDWAVSKLIEYRLDERAGEVLFSPSHHQLAPRELADWIVADNLPVRFQMQLHKLLWNDEPGR

SEQ ID NO: 33223 - protein, 215 aa, Pseudomonas denitrificans
  misc_feature (1)..(215): tr|A0A5J6R1T0|A0A5J6R1T0_PSEDE 7-carboxy-7-deazaguanine synthase QueE OS=Pseudomonas denitrificans OX=43306 GN =queE PE=4 SV=1
MQQTLRITEIFYSLQGETRTAGLPTVFVRLTGCPLRCNYCDTAYAFSGGEIQSLDAILDQVAQYRPRYVCVTGGEPLAQPNCIPLLERLCDAGYEVSLETSGALDISATDRRVSRILDLKTPGSGEVVRNRYENIGELTSNDQVKFVICSREDYDWAVSKLIEYRLEQRAGEVLFSPSHREVHARELAAWIVSDNLPVRLQLQLHKILWNDEPGH

SEQ ID NO: 33224 - protein, 215 aa, Pseudomonas donghuensis
  misc_feature (1)..(215): tr|A0A2M9VH80|A0A2M9VH80_9PSED 7-carboxy-7-deazaguanine synthase OS=Pseudomonas donghuensis OX=1163398 GN=queE PE=3 SV=1
MQDTLRITEVFYSLQGETRTAGLPTVFVRLTGCPLRCQYCDSEYAFSGGSIRTLDSILDQVAGYKPRYVCVTGGEPLAQPNAIPLLKQLCDAGYDVSLETSGALDISKVDTRVSRVVDLKTPGSEEVHRNRYENIELLTPNDQVKFVICSREDYDWAVSKLIQYGLEKRAGEVLFSPSHHQVNATDLADWIVADNLPVRFQMQLHKLLWNDEPGR

SEQ ID NO: 33225 - protein, 215 aa, Pseudomonas dryadis
  misc_feature (1)..(215): tr|A0A4Q9QY40|A0A4Q9QY40_9PSED 7-carboxy-7-deazaguanine synthase OS=Pseudomonas dryadis OX=2487520 GN=queE PE= 3 SV=1
MKDTLRITEIFFSLQGETRTAGLPTVFVRLTGCPLRCQYCDTAYAFSGGEIMTLDAILDQVAKYRPRYVCVTGGEPLAQPNCLPLLERLCDAGYDVSLETSGALDVSQVDGRVSKVIDLKTPGSAEVARNRYENIQYLQPRDQVKFVICSREDYDWSVSKIIQYGLAERAGELLFSPSHQQVNGRELAEWVIADNLPVRMQLQLHKILWNDEPGH

SEQ ID NO: 33226 - protein, 227 aa, Pseudomonas duriflava
  misc_feature (1)..(227): tr|A0A562QPC1|A0A562QPC1_9PSED 7-carboxy-7-deazaguanine synthase OS=Pseudomonas duriflava OX=459528 GN=queE PE =3 SV=1
MACIAVTPVAFMQPNTLRITEIFYSLQGETRTAGLPTVFVRLTGCPLRCQYCDTAYAFSGGEILSLETILEKVASYRPRYVCVTGGEPLAQPNCLPLLSRLCDAGYEVSLETSGALDVEPVDARVVKVIDLKTPGSAEVSRNLYSNLEHVTSNDQVKFVICSREDYEWAVSKLIQYQLSDRVGEVLFSPSHQQVTPRQLAEWIVADNLPVRFQLQLHKLLWNDEPGH

SEQ ID NO: 33227 - protein, 210 aa, Pseudomonas duriflava
  misc_feature (1)..(210): tr|A0A562PZ10|A0A562PZ10_9PSED 7-carboxy-7-deazaguanine synthase OS=Pseudomonas duriflava OX=459528 GN=queE PE =3 SV=1
MTYSVKEIFYTLQGEGLRAGRPAVFCRFAGCNLWSGRETDRSKAVCQFCDTDFVGTNGTLGGKYQTAEILVEQISSLWPSGQEHRYVVLTGGEPLMQVDEAFIEALHDQGFEIAVETNGTIPVPQGIDWICVSPKAGSEWVQRSGHELKLVYPQPGLLPMAALDSNFHYYLLQPMDGPMQRQNTRSAIAYCQENTKWRLSVQTHKILEIR

SEQ ID NO: 33228 - protein, 215 aa, Pseudomonas endophytica
  misc_feature (1)..(215): tr|A0A0Q0XAQ0|A0A0Q0XAQ0_9PSED 7-carboxy-7-deazaguanine synthase OS=Pseudomonas endophytica OX=1563157 GN=queE PE=3 SV=1
MQDTLRITEVFYSLQGETRTAGLPTVFVRLTGCPLRCQYCDSAYAFSGGAVRALDSILQEVADFRPRYVCVTGGEPLAQPNAIPLLKQLCDAGYEVSIETSGALDISAVDPRVSRVLDLKTPGSKESHRNLYENIALLTPHDQIKFVICSREDYDWAVSKLIEYGLERRAGEVLFSPSHHDLKARDLADWIVADNLPVRLQMQLHKYLWNDEPGR

SEQ ID NO: 33229 - protein, 215 aa, Pseudomonas entomophila
  misc_feature (1)..(215): tr|A0A3Q8U2Q0|A0A3Q8U2Q0_9PSED 7-carboxy-7-deazaguanine synthase OS=Pseudomonas entomophila OX=312306 GN=queE PE=3 SV=1
MQDTLRITEVFYSLQGETRTAGLPTVFVRLTGCPLRCQYCDSAYAFSGGTLRSLDSILEQVAGFKPRYVCVTGGEPLAQPNALPLLRSLCDAGYEVSLETSGALDISGVDTRVSRVVDLKTPGSEESHRNRYENIELLTRNDQVKFVICSREDYDWAVSKLIQYNLTERAGEVLFSPSHHQVKASDLADWIVADNLPVRFQLQLHKLLWNDEPGR

SEQ ID NO: 33230 - protein, 215 aa, Pseudomonas entomophila
  misc_feature (1)..(215): tr|Q1I6F7|Q1I6F7_PSEE4 7-carboxy-7-deazaguanine synthas e OS=Pseudomonas entomophila (strain L48) OX=384676 GN= queE PE=3 SV=1
MQDTLRITEVFYSLQGETRTAGLPTVFVRLTGCPLRCQYCDSAYAFSGGTVRTLDSILEQVAGFKPRYVCVTGGEPLAQPNALPLLQRLCDAGYEVSLETSGALDIAGTDTRVSRVVDLKTPGSEESHRNRYENIELLTRNDQVKFVICSREDYDWAVSKLIQFNLAERAGEVLFSPSHHQVSATDLADWIVADNLPVRFQLQLHKLLWNDEPGR

SEQ ID NO: 33231 - protein, 215 aa, Pseudomonas extremaustralis
  misc_feature (1)..(215): tr|A0A5C5QG14|A0A5C5QG14_9PSED 7-carboxy-7-deazaguanine synthase OS=Pseudomonas extremaustralis OX=359110 GN=q ueE PE=3 SV=1
MQDTLRITEVFYSLQGETRTAGLPTVFVRLTGCPLRCQYCDSAYAFSGGTVRSLDDILEQVAGYRPRYVCVTGGEPLAQPNAIPLLKQLCDAGYEVSLETSGALDISAVDPRVSRVVDLKTPGSKEAHRNRYENIELLTANDQVKFVICSREDYDWANSKLIQYGLDRRAGEVLYSPSHHDLNARDLADWVVADNLPVRLQLQLHKYLWNDEPGR

SEQ ID NO: 33232 - protein, 215 aa, Pseudomonas extremorientalis
  misc_feature (1)..(215): tr|A0A1H0PT74|A0A1H0PT74_9PSED 7-carboxy-7-deazaguanine synthase OS=Pseudomonas extremorientalis OX=169669 GN= queE PE=3 SV=1
MQDTLRITEVFYSLQGETRTAGLPTVFVRLTGCPLRCQYCDSAYAFSGGTVRTLDDILEQVAGYKPRYVCVTGGEPLAQPNAIPLLKQLCDAGYEVSLETSGALDISAVDPRVSRVVDLKTPDSKESHRNRYENIELLTANDQVKFVICSRDDYEWANSKLIQYGLDRRAGEVLFSPSHHDLNARDLADWVVADNLPVRLQLQLHKYLWNDEPGR

SEQ ID NO: 33233 - protein, 218 aa, Pseudomonas ficuserectae; identical to SEQ ID NO: 33165
  misc_feature (1)..(218): tr|A0A0P9SPU0|A0A0P9SPU0_9PSED 7-carboxy-7-deazaguanine synthase OS=Pseudomonas ficuserectae OX=53410 GN=queE PE=3 SV=1

SEQ ID NO: 33234 - protein, 226 aa, Pseudomonas flavescens
  misc_feature (1)..(226): tr|A0A1G8JE32|A0A1G8JE32_9PSED 7-carboxy-7-deazaguanine synthase OS=Pseudomonas flavescens OX=29435 GN=queE PE =3 SV=1
MACFAVTPVALMKDTLRITEIFFSLQGETRTAGLPTVFVRLTGCPLRCQYCDTAYAFSGGDVMTLDAILEQVAGYRPRYVCVTGGEPLAQPNCMPLLERLCDAGFEVSLETSGALDVSRVDARVSKVVDLKTPGSAEVGRNRYENIEYLQPRDQVKFVICSREDYDWSVSKIIQYGLADRVDELLFSPSHQEVSGRQLAEWVIADNLPVRMQLQLHKILWNDEPGH

SEQ ID NO: 33235 - protein, 238 aa, Pseudomonas flexibilis
  misc_feature (1)..(238): tr|A0A1N6RB44|A0A1N6RB44_9PSED 7-carboxy-7-deazaguanine synthase OS=Pseudomonas flexibilis OX=706570 GN=queE P E=3 SV=1
MIAISEIFGPTIQGEGALIGMPTVFVRTGGCDFRCSWCDTRYAVDPVFRADWQPMDAEAILAEINRLSGGEPILVTLSGGNPALQPLEPLLLLGQLQGHRFAMETQGSKAQPWFDALDYLTLSPKPPSSGMPFRQDRFDACLAAAGAETQVSLKLVIVDEADYQWARTLAANYPQLPLFLQPCNPTPATTEQPEREADTQALNAQLRWLVERIAADRWYRPRVLPQLHVLIWSNERGV

SEQ ID NO: 33236 - protein, 238 aa, Pseudomonas flexibilis
  misc_feature (1)..(238): tr|A0A0B3BYL9|A0A0B3BYL9_9PSED 7-carboxy-7-deazaguanine synthase OS=Pseudomonas flexibilis OX=706570 GN=queE P E=3 SV=1
MIAISEIFGPTIQGEGALIGMPTVFVRTGGCDFRCSWCDTRYAVDPAFRADWQPMDAEAILAEINRLSGGEPILVTLSGGNPALQPLEPLLLLGQLQGHRFAMETQGSKAQPWFDALDYLTLSPKPPSSGMPFRQDRFDACLAAAGAETQVSLKLVIVDEADYQWARALAANYPQLQLFLQPCNPTPATPEQPAREADTQALNAQLRWLVERIAADRWYRPRVLPQLHVLIWNNERGV

SEQ ID NO: 33237 - protein, 215 aa, Pseudomonas floridensis
  misc_feature (1)..(215): tr|A0A1X0MZ80|A0A1X0MZ80_9PSED 7-carboxy-7-deazaguanine synthase OS=Pseudomonas floridensis OX=1958950 GN=queE PE=3 SV=1
MQDTLRITEIFHSLQGETRTAGLPTVFVRLTGCPLRCQYCDSAYAFSGGTIQTLDDIMGQVAAYRPRYVCVTGGEPLAQPNAIPLLKRLCDEGYEVSLETSGALDISAVDPRVSRVVDLKTPGSMEVTRNRYENMELLTPNDQVKFVICSREDYDWAVSKLIQYGLDRRAGEVLFSASHHELKGRDLADWIVADNLPVRLQMQLHKFLWDDEPGR

SEQ ID NO: 33238 - protein, 215 aa, Pseudomonas fluorescens
  misc_feature (1)..(215): tr|A0A0D0TEF2|A0A0D0TEF2_PSEFL 7-carboxy-7-deazaguanine synthase OS=Pseudomonas fluorescens OX=294 GN=queE_1 P E=3 SV=1
MQDTLRITEVFYSLQGETRTAGLPTVFVRLTGCPLRCQYCDSAYAFSGGTVRTLDDILEQVAGYRPRYVCVTGGEPLAQPNAIPLLKRLCDAGYEVSLETSGALDISAVDPRVSRVVDLKTPDSKEAHRNRYENIDLLTANDQVKFVICSRDDYDWASSKLIQYGLERRAGEVLFSPSHHDLNARDLADWVVADNLPVRLQLQLHKYLWNDEPGR

SEQ ID NO: 33239 - protein, 215 aa, Pseudomonas fluorescens; identical to SEQ ID NO: 33179
  misc_feature (1)..(215): tr|A0A120G2T1|A0A120G2T1_PSEFL 7-carboxy-7-deazaguanine synthase OS=Pseudomonas fluorescens OX=294 GN=queE PE= 3 SV=1

SEQ ID NO: 33240 - protein, 215 aa, Pseudomonas fragi
  misc_feature (1)..(215): tr|A0A1H2H5Q6|A0A1H2H5Q6_PSEFR 7-carboxy-7-deazaguanine synthase OS=Pseudomonas fragi OX=296 GN=queE PE=3 SV=1
MQDTLRITEVFYSLQGETRTAGLPTVFVRLTGCPLRCGYCDSAYAFSGGTVRPLDDILEQVASYRPRYVCVTGGEPLAQPNAIPLLKQLCDAGYEVSIETSGALDISAVDPRVSRVLDLKTPGSKESHRNLYENIALLTPNDQVKFVICSREDYDWAVSKLIEYGLERRAGEVLFSPSHHDLSARDLADWIVADNLPVRLQMQLHKYLWNDEPGR

SEQ ID NO: 33241 - protein, 215 aa, Pseudomonas fragi
  misc_feature (1)..(215): tr|A0A266LTN2|A0A266LTN2_PSEFR 7-carboxy-7-deazaguanine synthase OS=Pseudomonas fragi OX=296 GN=queE PE=3 SV=1
MQDTLRITEVFYSLQGETRTAGLPTVFVRLTGCPLRCGYCDSAYAFSGGTVRPLDDILEQVASFRPRYVCVTGGEPLAQPNAIPLLKQLCDAGYEVSIETSGALDISAVDPRVSRVLDLKTPGSKESHRNLYENIALLTPNDQVKFVICSREDYDWAVSKLIEYGLERRAGEVLFSPSHHDLSARDLADWIVADNLPVRLQMQLHKYLWNDEPGR

SEQ ID NO: 33242 - protein, 215 aa, Pseudomonas frederiksbergensis
  misc_feature (1)..(215): tr|A0A2S8HCD8|A0A2S8HCD8_9PSED 7-carboxy-7-deazaguanine synthase OS=Pseudomonas frederiksbergensis OX=104087 G N=queE PE=3 SV=1
MQDTLRITEVFYSLQGETRTAGLPTVFVRLTGCPLRCQYCDSAYAFTGGTLRTLDDILEQVAGFRPRYVCVTGGEPLAQPNAIPLLKQLCDAGYEVSLETSGALDISAVDPRVSRVVDLKTPGSKEAHRNRYENIELLTPNDQVKFVICSREDYDWAVSKLIQYGLSERAGEVLFSPSHHDLNARDLADWVVADNLPVRLQLQLHKYLWNDEPGR

SEQ ID NO: 33243 - protein, 215 aa, Pseudomonas frederiksbergensis
  misc_feature (1)..(215): tr|A0A423KEP3|A0A423KEP3_9PSED 7-carboxy-7-deazaguanine synthase OS=Pseudomonas frederiksbergensis OX=104087 G N=queE PE=3 SV=1
MQDTLRITEVFYSLQGETRTAGLPTVFVRLTGCPLRCQYCDSAYAFTGGTIRPLDDILEQVAGFRPRYVCVTGGEPLAQPNAIPLLKRLCDAGYEVSLETSGALDISAVDSRVSRVVDLKTPGSKEAHRNRYENIELLTPNDQVKFVICSREDYDWAVSKLIQYGLDRRAGEVLFSPSHHDLNARDLADWVVADNLPVRLQLQLHKYLWNDEPGR

SEQ ID NO: 33244 - protein, 226 aa, Pseudomonas fulva
  misc_feature (1)..(226): tr|F6AGX5|F6AGX5_PSEF1 7-carboxy-7-deazaguanine synthas e OS=Pseudomonas fulva (strain 12-X) OX=743720 GN=queE PE=3 SV=1
MACLAVTPGAPMKDTLRITEIFFSLQGEARTAGLPTVFVRLTGCPLRCQYCDTAYAFSGGELLSLDAILEQVASYRPRYVCVTGGEPLAQPNCIPLLEKLCDAGYDVSLETSGALDVAAVDPRVSKVVDLKTPGSAEIGRNRYENIVHLQPRDQVKFVICSREDYDWSVSKVIQYDLPTRVGEVLFSPSHGQVSGRQLAEWVIADNLPVRMQLQLHKILWNDEPGH

SEQ ID NO: 33245 - protein, 215 aa, Pseudomonas fulva
  misc_feature (1)..(215): tr|A0A2V4JV29|A0A2V4JV29_9PSED 7-carboxy-7-deazaguanine synthase OS=Pseudomonas fulva OX=47880 GN=queE PE=3 SV =1
MQDTLRITEVFYSLQGETRTAGLPTVFVRLTGCPLRCQYCDSGYAFSGGTLRSLDSILEQVAGFKPRYVCVTGGEPLAQPNALPLLQRLCDAGYEVSLETSGALDIAGTDTRVSRVVDLKTPGSEESHRNRYENIEHLTPNDQVKFVICSREDYDWAVSKLIQYNLAERAGEVLFSPSHHQVSATDLADWIVADNLPVRFQLQLHKLLWNDEPGR

SEQ ID NO: 33246 - protein, 215 aa, Pseudomonas furukawaii
  misc_feature (1)..(215): tr|L8MFH4|L8MFH4_PSEFK 7-carboxy-7-deazaguanine synthas e OS=Pseudomonas furukawaii OX=1149133 GN=queE PE=3 SV= 1
MHQTLRITEIFYSLQGETRTAGLPTVFVRLTGCPLRCQYCDTAYAFSGGDMITLDDILERVASYKPRYVCVTGGEPLAQPNCIPLLQRLCDAGYEVSLETSGALDVSSVDPRVSKVLDLKTPGSAEVGRNRYENIVHLTPNDQVKFVICSREDYDWAVSKLIEYRLEKRAGEVLFSPSHKQVNARDLADWIVADNLPVRLQLQLHKILWNDEPGH

SEQ ID NO: 33247 - protein, 215 aa, Pseudomonas fuscovaginae
  misc_feature (1)..(215): tr|A0A0N0E267|A0A0N0E267_9PSED 7-carboxy-7-deazaguanine synthase OS=Pseudomonas fuscovaginae OX=50340 GN=queE PE=3 SV=1
MQDTLRITEVFYSLQGETRTAGLPTVFVRLTGCPLRCQYCDSAYAFSGGSILSLDSILDQVASYRPRYVCVTGGEPLAQPNAIPLLKRLCDAGYEVSLETSGSMDISPVDTRVSRVVDLKTPGSKEVHRNRYENIELLTRNDQVKFVICSREDYDWSVSKLIQYGLEKRAGEVLFSPSHHDLSARDLADWIVADNLPVRLQMQLHKYLWNDEPGR

SEQ ID NO: 33248 - protein, 215 aa, Pseudomonas fuscovaginae
  misc_feature (1)..(215): tr|A0A1H6PFV8|A0A1H6PFV8_9PSED 7-carboxy-7-deazaguanine synthase OS=Pseudomonas fuscovaginae OX=50340 GN=queE PE=3 SV=1
MQDTLRITEVFYSLQGETRTAGLPTVFVRLTGCPLRCQYCDSAYAFSGGSLLSLDDILDQVAGYRPRYVCVTGGEPLAQPNVIPLLKRLCDAGYEVSLETSGSMDISAVDTRVSRVVDLKTPGSKEVHRNRYENIEQLTRNDQVKFVICSREDYDWSVSKLIQYGLEKRAGEVLFSPSHHDLPARELADWIVADNLPVRLQMQLHKYLWNDEPGR

SEQ ID NO: 33249 - protein, 233 aa, [Pseudomonas] geniculata
  misc_feature (1)..(233): tr|A0A0L8A687|A0A0L8A687_9GAMM 7-carboxy-7-deazaguanine synthase OS=[Pseudomonas] geniculata N1 OX=1167641 GN= queE PE=3 SV=1
MTAVTPSSAAATPSEIVQSPLPRLKITEIFTSLQGEADTAGWPTVFVRLTGCPLRCQYCDTAYAFHGGTWWDIDDIVAEVLAQGVRHVCVTGGEPLAQKRCLVLLQKLCDAGMDVSLETSGALDVSAVDPRVSRVVDIKTPGSAEVARNRWDNLPLLTARDQIKFVICSREDYDWAKSLLAEHDLVKRCTVFFSPSKGEITARQLADWIVEDRLPVRFQMQLHKILWNDEPGR

SEQ ID NO: 33250 - protein, 215 aa, Pseudomonas gessardii
  misc_feature (1)..(215): tr|A0A1V2JNV9|A0A1V2JNV9_9PSED 7-carboxy-7-deazaguanine synthase OS=Pseudomonas gessardii OX=78544 GN=queE PE= 3 SV=1
MQDTLRITEVFYSLQGETRTAGLPTVFVRLTGCPLRCQYCDSAYAFSGGTIRTLDDILEQVAGFRPRYVCVTGGEPLAQPNAIPLLKQLCDAGYEVSLETSGALDISAVDPRVSRVVDLKTPDSKEAHRNRYENIELLTANDQVKFVICSRDDYDWANSKLIQYGLDRRAGEVLFSPSHHDLNARDLADWVVADNLPVRLQLQLHKYLWNDEPGR

SEQ ID NO: 33251 - protein, 215 aa, Pseudomonas gingeri
  misc_feature (1)..(215): tr|A0A2K1F647|A0A2K1F647_9PSED 7-carboxy-7-deazaguanine synthase OS=Pseudomonas gingeri NCPPB 3146 = LMG 5327 OX=707248 GN=queE PE=3 SV=1
MQDTLRITEVFYSLQGETRTAGLPTVFVRLTGCPLRCQYCDSAYAFSGGTLMSLDSILDQVAGYRPRYVCVTGGEPLAQPNAIPLLKRLCDAGYEVSLETSGSLDISAVDTRVSRVVDLKTPGSREAHRNRYENIELLTANDQVKFVICSREDYDWSVSKLIQYGLEKRAGEVLFSPSHHDLPARELADWIVADNLPVRLQMQLHKYLWNDEPGR

SEQ ID NO: 33252 - protein, 226 aa, Pseudomonas graminis
  misc_feature (1)..(226): tr|A0A4R7VYT5|A0A4R7VYT5_9PSED 7-carboxy-7-deazaguanine synthase OS=Pseudomonas graminis OX=158627 GN=queE PE= 3 SV=1
MACLAVTPVAPMQDTLRITEVFYSLQGETRTAGLPTVFVRLTGCPLRCGYCDSEYAFTGGTIQTLDSLMEQVASYRPRYVCVTGGEPLAQPNAIPLLQRLCDAGYEVSLETSGALDISKVDPRVSRVVDLKTPGSKEVARNRYENIDLLTPNDQIKFVICSREDYDWAVSKIIQYGLDRRAGEVLFSPVHRDLNVRDLADWIVADNLPVRLQLQLHKILWNDEPGR

SEQ ID NO: 33253 - protein, 215 aa, Pseudomonas graminis
  misc_feature (1)..(215): tr|A0A1X0VLV6|A0A1X0VLV6_9PSED 7-carboxy-7-deazaguanine synthase OS=Pseudomonas graminis OX=158627 GN=queE PE= 3 SV=1
MQDTLRITEIFHSLQGETRTAGLPTVFVRLTGCPLRCQYCDSAYAFSGGALQTLDDILGQVASYRPRYVCVTGGEPLAQPNAIPLLKRLCDAGYEVSLETSGALDISAVDPRVSRVVDLKTPGSKEVARNRYENMELLTSNDQVKFVICSREDYDWAVSKLIQYGLDRRAGEVLFSASHHELKGRDLADWIVADNLPVRLQMQLHKILWDDEPGR

SEQ ID NO: 33254 - protein, 215 aa, Pseudomonas grimontii
  misc_feature (1)..(215): tr|A0A1H1BGT6|A0A1H1BGT6_9PSED 7-carboxy-7-deazaguanine synthase OS=Pseudomonas grimontii OX=129847 GN=queE PE =3 SV=1
MQDTLRITEVFYSLQGETRTAGLPTVFVRLTGCPLRCQYCDSAYAFSGGTVRTLEDILEQVASYRPRYVCVTGGEPLAQPNAIPLLKQLCDAGYEVSLETSGALDISAVDPRVSRVVDLKTPGSKEVHRNRYENIELLTPNDQVKFVICSREDYDWANSKLIQYGLDRRAGEVLFSPSHHDLNARDLADWVVADNLPVRLQLQLHKYLWNDEPGR

SEQ ID NO: 33255 - protein, 215 aa, Pseudomonas guangdongensis
  misc_feature (1)..(215): tr|A0A1H2DUD6|A0A1H2DUD6_9PSED 7-carboxy-7-deazaguanine synthase OS=Pseudomonas guangdongensis OX=1245526 GN=q ueE PE=3 SV=1
MNQTLRITEIFYSLQGETRSAGLPTVFVRLTGCPLRCQYCDTAYAFSGGEIMTLEEILAQVAGYRPRYVCVTGGEPLAQPNCIALLTALCDAGYEVSLETSGALDIAPVDVRVSRVVDLKTPGSAEVGRNRYENMAELTRNDQVKFVACSREDYDWAVSKIIEYRLDARAGEVLMSPSHKELDARTLADWIVADNLPVRMQLQLHKYLWNDEPGH

SEQ ID NO: 33256 - protein, 215 aa, Pseudomonas guariconensis
  misc_feature (1)..(215): tr|A0A1G6XI44|A0A1G6XI44_9PSED 7-carboxy-7-deazaguanine synthase OS=Pseudomonas guariconensis OX=1288410 GN=qu eE PE=3 SV=1
MQDTLRITEVFYSLQGETRTAGLPTVFVRLTGCPLRCQYCDSAYAFSGGTVRTLDDILKQVAGFRPRYVCVTGGEPLAQPNALPLLQRLCDAGYEVSLETSGALDIAQVDPRVSRVVDLKTPGSEESHRNLYENIEHLTRNDQVKFVICSREDYDWAVSKLIQYNLAQRAGEVLFSPSHHQVSATDLADWIVADNLPVRFQLQLHKLLWNDEPGR

SEQ ID NO: 33257 - protein, 215 aa, Pseudomonas guariconensis
  misc_feature (1)..(215): tr|A0A2N5Q899|A0A2N5Q899_9PSED 7-carboxy-7-deazaguanine synthase OS=Pseudomonas guariconensis OX=1288410 GN=qu eE PE=3 SV=1
MQDTLRITEVFYSLQGETRTAGLPTVFVRLTGCPLRCQYCDSAYAFSGGTVRTLDDILEQVAGFRPRYVCVTGGEPLAQPNALPLLQRLCDAGYEVSLETSGALDIAQVDRRVSRVVDLKTPGSEESHRNLYENIEHLTRNDQVKFVICSREDYDWAVSKLIQYNLAQRAGEVLFSPSHHQVSATDLADWIVADNLPVRFQLQLHKLLWNDEPGR

SEQ ID NO: 33258 - protein, 226 aa, Pseudomonas guguanensis
  misc_feature (1)..(226): tr|A0A1H0XG06|A0A1H0XG06_9PSED 7-carboxy-7-deazaguanine synthase OS=Pseudomonas guguanensis OX=1198456 GN=queE PE=3 SV=1
MTCFVITPVATMQETLRITEIFYSLQGETRTAGLPTVFVRLTGCPLRCQYCDTAYAFSGGEIVTLDSILDQVAAYRPRYVCVTGGEPLAQPNCIPLLTRLCDAGYEVSLETSGALDVSAVDPRVSKVLDLKTPGSAEVQRNRYENIEWLTANDQVKFVICSREDYDWAVSRLIQYDLAARAGEVLFSPSHKQVDARALADWIVADNLPVRLQLQLHKILWNDEPGH

SEQ ID NO: 33259 - protein, 215 aa, Pseudomonas guineae
  misc_feature (1)..(215): tr|A0A1I3CCG9|A0A1I3CCG9_9PSED 7-carboxy-7-deazaguanine synthase OS=Pseudomonas guineae OX=425504 GN=queE PE=3 SV=1
MQDTLRITEIFYSLQGETRTAGLPTVFVRLTGCPLRCQYCDTAYAFSGGEMMSLDAIVEQVAGYKPRYICVTGGEPLAQPNCIALLKRLCDAGYEVSLETSGALDVSAVDPRVSKVLDLKTPGSAEVARNRYENIAMLTPNDQVKFVICSREDYDWAVSKLIQYGLDARVNEVLMSPSHHELEARALAEWIVADNLPVRLQMQLHKILWNDEPGH

SEQ ID NO: 33260 - protein, 215 aa, Pseudomonas helleri
  misc_feature (1)..(215): tr|A0A0J6J2Q6|A0A0J6J2Q6_9PSED 7-carboxy-7-deazaguanine synthase OS=Pseudomonas helleri OX=1608996 GN=queE PE= 3 SV=1
MQDTLRITEVFYSLQGETRTAGLPTVFVRLTGCPLRCQYCDSAYAFSGGTVRSLDSILEQVADFRPRYVCVTGGEPLAQPNAIPLLKQLCDAGYDVSIETSGALDISAVDPRVSRVLDLKTPGSKESHRNLYENIALLTPHDQVKFVICSREDYDWAVSKLIEYGLERRAGEVLFSPSHHDLAARDLADWIVADNLPVRLQMQLHKYLWNDEPGR

SEQ ID NO: 33261 - protein, 215 aa, Pseudomonas helmanticensis; identical to SEQ ID NO: 33173
  misc_feature (1)..(215): tr|A0A4R7V3P1|A0A4R7V3P1_9PSED 7-carboxy-7-deazaguanine synthase OS=Pseudomonas helmanticensis OX=1471381 GN=q ueE PE=3 SV=1

SEQ ID NO: 33262 - protein, 215 aa, Pseudomonas hunanensis
  misc_feature (1)..(215): tr|A0A2I0C7Q4|A0A2I0C7Q4_9PSED 7-carboxy-7-deazaguanine synthase OS=Pseudomonas hunanensis OX=1247546 GN=queE PE=3 SV=1
MQDTLRITEVFYSLQGETRTAGLPTVFVRLTGCPLRCQYCDSAYAFSGGTIRTLDSILEQVAGFKPRYVCVTGGEPLAQPNALPLLQRLCDAGYEVSLETSGALDIAGTDTRVSRVVDLKTPGSEESHRNRYENIEQLTRNDQVKFVICSREDYDWAVSKLIQYNLAERAGEVLFSPSHHQVNASDLADWIVADNLPVRFQLQLHKLLWNDEPGR

SEQ ID NO: 33263 - protein, 215 aa, Pseudomonas hussainii
  misc_feature (1)..(215): tr|A0A1H7PSB2|A0A1H7PSB2_9PSED 7-carboxy-7-deazaguanine synthase OS=Pseudomonas hussainii OX=1429083 GN=queE P E=3 SV=1
MKDTLRITEVFYSLQGETRTLGLPTVFVRLTGCPLRCQYCDTAYAFAGGELMSLEAIVAKVASFNPRYVCVTGGEPLAQPNALPLLRLLCDAGYEVSLETSGAIDVTGVDPRVVKVLDLKTPGSAEVARNRYDNIALLNPHDQVKFVICSREDYDWAVSKLIEYRLAERVQDVLFSPSFSELDSRALADWIVSDNLPVRFQLQLHKILWQDEPGH

SEQ ID NO: 33264 - protein, 226 aa, Pseudomonas indica
  misc_feature (1)..(226): tr|A0A1G8W2M3|A0A1G8W2M3_9PSED 7-carboxy-7-deazaguanine synthase OS=Pseudomonas indica OX=137658 GN=queE PE=3 SV=1
MACFAVTPVADMQETLRITEIFYSLQGETRTAGLPTVFVRLTGCPLRCQYCDTAYAFSGGEIMTLDAILERVASYKPRYVCVTGGEPLAQPNCIPLLERLCDAGYEVSLETSGALDIAGVDSRVSRVVDLKTPGSAEVARNRYENLGLINRNDQVKFVLCSREDYDWAVSKLIEYRLDQRAGEVLFSPSHHELDARSLADWIVSDNLPVRLQLQLHKLLWNDEPGH

SEQ ID NO: 33265 - protein, 215 aa, Pseudomonas indoloxydans
  misc_feature (1)..(215): tr|A0A2T5PHB6|A0A2T5PHB6_9PSED 7-carboxy-7-deazaguanine synthase OS=Pseudomonas indoloxydans OX=404407 GN=queE PE=3 SV=1
MQETLRITEIFHSLQGETRTAGLPTVFVRLTGCPLRCQYCDTAYAFSGGEIVTLDSILDQVAAYRPRYVCVTGGEPLAQPNCITLLARLCDAGYEVSLETSGALDVSAVDARVSKVLDLKTPGSAEVQRNRYENVQWLTRNDQVKFVICSREDYDWAVSKLIEYDLAARAGEVLFSPSHKQVDVRALADWIVADNLPVRLQLQLHKILWNDEPGH

SEQ ID NO: 33266 - protein, 215 aa, Pseudomonas japonica
  misc_feature (1)..(215): tr|A0A239FIW6|A0A239FIW6_9PSED 7-carboxy-7-deazaguanine synthase OS=Pseudomonas japonica OX=256466 GN=queE PE= 3 SV=1
MQDTLRITEVFYSLQGETRTAGLPTVFVRLTGCPLRCQYCDSAYAFNGGTIRTLDSILEQVASYRPRYVCVTGGEPLAQPNAIPLLQRLCDAGYDVSLETSGSIDISAVDTRVSRVVDLKTPGSAEVHRNRYENIELLTPNDQVKFVLCSREDYDWAVSKLIQYGLDKRAGEVLFSPSHHQLNATDLADWIVADNLPVRLQMQLHKLLWNDEPGR

SEQ ID NO: 33267 - protein, 215 aa, Pseudomonas jessenii
  misc_feature (1)..(215): tr|A0A2W0EKG3|A0A2W0EKG3_9PSED 7-carboxy-7-deazaguanine synthase OS=Pseudomonas jessenii OX=77298 GN=queE PE=3 SV=1
MQDTLRITEVFYSLQGETRTAGLPTVFVRLTGCPLRCQYCDSAYAFTGGTIRTLDDILEQVAGFRPRYVCVTGGEPLAQPNAIPLLKRLCDAGYEVSLETSGSIDISAVDSRVSRVVDLKTPGSKEAHRNRYENIELLTPNDQVKFVICSREDYDWSVSKLIQYGLDQRAGEVLFSPSHHDLNARDLADWVVADNLSVRLQLQLHKYLWNDEPGR

SEQ ID NO: 33268 - protein, 215 aa, Pseudomonas jessenii; identical to SEQ ID NO: 33173
  misc_feature (1)..(215): tr|A0A2V4KR85|A0A2V4KR85_9PSED 7-carboxy-7-deazaguanine synthase OS=Pseudomonas jessenii OX=77298 GN=queE PE=3 SV=1

SEQ ID NO: 33269 - protein, 226 aa, Pseudomonas jinjuensis
  misc_feature (1)..(226): tr|A0A1H0A6B9|A0A1H0A6B9_9PSED 7-carboxy-7-deazaguanine synthase OS=Pseudomonas jinjuensis OX=198616 GN=queE P E=3 SV=1
MACFAVTPVADMQQTLRITEIFYSLQGETRTAGLPTVFVRLTGCPLRCQYCDTAYAFNGGDIMSVDAILERVAAFKPRHVCVTGGEPLAQPNCIPLLQRLCDAGYEVSLETSGALDISATDRRVSRVVDLKTPGSGEVRRNRYENLDQLTGNDQVKFVICSRDDYDWAVSKLIEYRLEQRAGEVLFSPSHRQVDARALADWIVSDNLPVRLQLQLHKILWNDEPGH

SEQ ID NO: 33270 - protein, 215 aa, Pseudomonas kairouanensis
  misc_feature (1)..(215): tr|A0A4Z0ATS4|A0A4Z0ATS4_9PSED 7-carboxy-7-deazaguanine synthase OS=Pseudomonas kairouanensis OX=2293832 GN=qu eE PE=3 SV=1
MQDTLRITEVFYSLQGETRTAGLPTVFVRLTGCPLRCQYCDSAYAFSGGTVRTLDDILEQVAGYRPRYVCVTGGEPLAQPNAIPLLKQLCDAGYEVSLETSGALDISAVDPRVSRVVDLKTPDSKESHRNRYENMDLLTSNDQVKFVICSRDDYDWANSKLIQYGLDRRAGEVLFSPSHHDLNARDLADWVVADNLPVRLQLQLHKYLWNDEPGR

SEQ ID NO: 33271 - protein, 215 aa, Pseudomonas kilonensis
  misc_feature (1)..(215): tr|A0A1H5CT41|A0A1H5CT41_9PSED 7-carboxy-7-deazaguanine synthase OS=Pseudomonas kilonensis OX=132476 GN=queE P E=3 SV=1
MQDTLRITEVFYSLQGETRTAGLPTVFVRLTGCPLRCQYCDSAYAFSGGTLRTLDDILEQVASYRPRYVCVTGGEPLAQPNAIPLLKQLCDAGYQVSLETSGALDISAVDPRVSRVVDLKTPGSKEAHRNRYENIELLTPNDQVKFVICSREDYDWAVSKLIQYGLDQRAGEVLLSPSHHDLSARDLADWVVADNLPVRLQLQLHKYLWNDEPGR

SEQ ID NO: 33272 - protein, 215 aa, Pseudomonas kilonensis; identical to SEQ ID NO: 33187
  misc_feature (1)..(215): tr|A0A0F4XTI5|A0A0F4XTI5_9PSED 7-carboxy-7-deazaguanine synthase OS=Pseudomonas kilonensis OX=132476 GN=queE P E=3 SV=1

SEQ ID NO: 33273 - protein, 226 aa, Pseudomonas knackmussii
  misc_feature (1)..(226): tr|A0A024HE64|A0A024HE64_PSEKB 7-carboxy-7-deazaguanine synthase OS=Pseudomonas knackmussii (strain DSM 6978 / LMG 23759 / B13) OX=1301098 GN=queE PE=3 SV=1
MACSAVTPVADMQQTLRITEIFYSLQGEARTVGLPTVFVRLTGCPLRCQYCDSAYAFSGGEIQSLDAILEMVASYRPRYVCVTGGEPLAQPNCIPLLQRLCDAGYSVSLETSGALDISAVDPRVSRVLDLKTPGSAEVARNRYENIGLLTANDQVKFVLCSREDYDWAVSKLIEYRLDERAGEVLFSPSHHQLAPRDLADWIVADNLPVRFQMQLHKVLWNDEPGR

SEQ ID NO: 33274 - protein, 215 aa, Pseudomonas koreensis
  misc_feature (1)..(215): tr|A0A4Q4L9Q0|A0A4Q4L9Q0_9PSED 7-carboxy-7-deazaguanine synthase OS=Pseudomonas koreensis OX=198620 GN=queE PE =3 SV=1
MQDTLRITEVFYSLQGETRTAGLPTVFVRLTGCPLRCQYCDSAYAFSGGTVRTLDDILEQVAGYRPRYVCVTGGEPLAQPNAIPLLERLCDAGYEVSLETSGALDVSAVDPRVSRVVDLKTPGSKEAHRNRYENVELLTRNDQVKFVICSREDYDWAVSKLIQYGLDQRAGEVLFSPSHHDLNARELADWVVADNLPVRLQLQLHKYLWNDEPGR

SEQ ID NO: 33275 - protein, 215 aa, Pseudomonas koreensis
  misc_feature (1)..(215): tr|A0A1A9JIP8|A0A1A9JIP8_9PSED 7-carboxy-7-deazaguanine synthase OS=Pseudomonas koreensis OX=198620 GN=queE PE =3 SV=1
MQDTLRITEVFYSLQGETRTAGLPTVFVRLTGCPLRCQYCDSAYAFTGGTIRTLDDILEQVAGFRPRYVCVTGGEPLAQPNAIPLLKRLCDAGYEVSLETSGALDVSAVDPRVSRVVDLKTPGSKEAHRNRYENIELLTPNDQVKFVICSREDYDWAVSKLIQYGLDRRAGEVLFSPSHHDLNARDLADWVVADNLPVRLQLQLHKYLWNDEPGR

SEQ ID NO: 33276 - protein, 215 aa, Pseudomonas kribbensis
  misc_feature (1)..(215): tr|A0A345RUV8|A0A345RUV8_9PSED 7-carboxy-7-deazaguanine synthase OS=Pseudomonas kribbensis OX=1628086 GN=queE PE=3 SV=1
MQDTLRITEVFYSLQGETRTAGLPTVFVRLTGCPLRCQYCDSAYAFSGGTIRTLDDILEQVAGFRPRYVCVTGGEPLAQPNAIPLLKQLCDAGYEVSLETSGALDISAVDPRVSRVVDLKTPDSKEAHRNRYENIELLTPNDQVKFVICSRDDYDWAVSKLIQYGLDRRAGEVLFSPSHHDLNARDLADWVVADNLPVRLQLQLHKYLWNDEPGR

SEQ ID NO: 33277 - protein, 224 aa, Pseudomonas kunmingensis
  misc_feature (1)..(224): tr|A0A2N8SF21|A0A2N8SF21_9PSED 7-carboxy-7-deazaguanine synthase OS=Pseudomonas kunmingensis OX=1211807 GN=que E PE=3 SV=1
MACLAVTPVADMTLRITEIFYSLQGETRTSGLPTVFVRLTGCPLRCQYCDTAYAFSGGELMTLDAIVERVASYNPRYVCVTGGEPLAQPNCVPLLQRLCDAGYEVSLETSGALDISVVDERVSRVVDLKTPGSAEVARNRYENIACITRNDQVKFVICSREDYDWAVSKLIEYGLDRRAGEVLFSPSHGQVDVRALADWIVADNLPVRLQLQLHKIIWNDAPGH

SEQ ID NO: 33278 - protein, 215 aa, Pseudomonas lactis; identical to SEQ ID NO: 33179
  misc_feature (1)..(215): tr|A0A0R3CK50|A0A0R3CK50_9PSED 7-carboxy-7-deazaguanine synthase OS=Pseudomonas lactis OX=1615674 GN=queE PE=3 SV=1

SEQ ID NO: 33279 - protein, 215 aa, Pseudomonas lactis
  misc_feature (1)..(215): tr|I4K9M8|I4K9M8_9PSED 7-carboxy-7-deazaguanine synthas e OS=Pseudomonas lactis OX=1615674 GN=queE PE=3 SV=1
MQDTLRITEVFYSLQGETRTAGLPTVFVRLTGCPLRCQYCDSAYAFSGGTVRTLDDILEQVAGYRPRYVCVTGGEPLAQPNAIPLLKQLCDAGYEVSLETSGALDISAVDSRVSRVVDLKTPDSKEAHRNRYENIDLLTANDQVKFVICSRDDYDWATSKLIQYGLERRAGEVLFSPSHHDLNARELADWVVADNLPVRLQLQLHKYLWNDEPGR

SEQ ID NO: 33280 - protein, 215 aa, Pseudomonas laurylsulfatiphila
  misc_feature (1)..(215): tr|A0A2S6FMQ6|A0A2S6FMQ6_9PSED 7-carboxy-7-deazaguanine synthase OS=Pseudomonas laurylsulfatiphila OX=2011015 GN=queE PE=3 SV=1
MQDTLRITEVFYSLQGETRTAGLPTVFVRLTGCPLRCQYCDSAYAFTGGTIRTLDDILEQVAGFRPRYVCVTGGEPLAQPNAIPLLKRLCDAGYEVSLETSGSIDISPVDSRVSRVVDLKTPGSKEAHRNRYENIELLTPNDQVKFVICSREDYDWSVSKLIQYGLDQRAGEVLFSPSHHDLNARELADWVVADNLPVRLQLQLHKYLWNDEPGR

SEQ ID NO: 33281 - protein, 211 aa, Pseudomonas laurylsulfatiphila
  misc_feature (1)..(211): tr|A0A2S6FJJ8|A0A2S6FJJ8_9PSED 7-carboxy-7-deazaguanine synthase OS=Pseudomonas laurylsulfatiphila OX=2011015 GN=queE PE=3 SV=1
MTYSIKEMFYTLQGEGNQAGRPAVFCRFSGCNLWSGREQDRANAICTFCDTDFVGSDGEGGNKFKTAEDLAYAIELLWPISHQRYKYVVLTGGEPLLQVDDALITALHNLEFTIAVETNGTISPPPGIDWICVSPKSTAQLKITKGDELKLVFPQPDSMPNQFEHLDFKNFYLQPMDGQNVKKNTEATIKYCKNNPKWRLGLQQHKILQIP

SEQ ID NO: 33282 - protein, 215 aa, Pseudomonas laurylsulfativorans
  misc_feature (1)..(215): tr|A0A2S3VH91|A0A2S3VH91_9PSED 7-carboxy-7-deazaguanine synthase OS=Pseudomonas laurylsulfativorans OX=1943631 GN=queE PE=3 SV=1
MQDTLRITEVFYSLQGETRTAGLPTVFVRLTGCPLRCQYCDSAYAFTGGTIRTLDDILEQVAGYRPRYVCVTGGEPLAQPNAIPLLRRLCDAGYEVSLETSGSIDISAVDSRVSRVVDLKTPGSKEAHRNRYENIELLTPNDQVKFVICSREDYDWSVSKLIQYGLDQRAGEVLFSPSHHDLNARDLADWVVADNLPVRLQLQLHKYLWNDEPGR

SEQ ID NO: 33283 - protein, 215 aa, Pseudomonas libanensis
  misc_feature (1)..(215): tr|A0A0R2Y8K8|A0A0R2Y8K8_9PSED 7-carboxy-7-deazaguanine synthase OS=Pseudomonas libanensis OX=75588 GN=queE PE =3 SV=1
MQDTLRITEVFYSLQGETRTAGLPTVFVRLTGCPLRCQYCDSAYAFSGGTVRTLDDILEQVASYRPRYVCVTGGEPLAQPNAIPLLKQLCDAGYEVSLETSGALDISAVDPRVSRVVDLKTPGSKEAHRNLYANMDLLTANDQVKFVICSRDDYDWASSKLIQYGLDRRAGEVLFSPSHHDLNARDLADWVVADNLPVRLQLQLHKYLWNDEPGR

SEQ ID NO: 33284 - protein, 215 aa, Pseudomonas lini; identical to SEQ ID NO: 33198
  misc_feature (1)..(215): tr|A0A423IXH4|A0A423IXH4_9PSED 7-carboxy-7-deazaguanine synthase OS=Pseudomonas lini OX=163011 GN=queE PE=3 SV =1

SEQ ID NO: 33285 - protein, 215 aa, Pseudomonas lini
  misc_feature (1)..(215): tr|A0A0J6K900|A0A0J6K900_9PSED 7-carboxy-7-deazaguanine synthase OS=Pseudomonas lini OX=163011 GN=queE PE=3 SV =1
MQDTLRITEVFYSLQGETRTAGLPTVFVRLTGCPLRCQYCDSAYAFTGGTIRTLDDILEQVAGFRPRYVCVTGGEPLAQPNAIPLLKQLCDAGYEVSLETSGALDISAVDPRVSRVVDLKTPGSKEAHRNRYENIELLTPNDQVKFVICSREDYDWAVSKLIQYGLDQRAGEVLFSPSHHDLNARHLADWVVADNLPVRLQLQLHKYLWNDEPGR

SEQ ID NO: 33286 - protein, 215 aa, Pseudomonas linyingensis
  misc_feature (1)..(215): tr|A0A1H7B4M6|A0A1H7B4M6_9PSED 7-carboxy-7-deazaguanine synthase OS=Pseudomonas linyingensis OX=915471 GN=queE PE=3 SV=1
MNQTLRITEIFHSLQGETRTVGLPTVFVRLTGCPLRCQYCDTAYAFSGGEVMTLEQILAQVASYKPRYVCVTGGEPLAQPNCIPLLEALCDAGYQVSLETSGALDIAPVDTRVSRVVDLKTPGSAEVGRNRYENMAELTGNDQVKFVICSREDYDWAVSKIIEYRLDQRAGELLMSPSHHELEARSLAEWIIADNLPVRLQLQLHKYLWNDEPGH

SEQ ID NO: 33287 - protein, 215 aa, Pseudomonas lundensis
  misc_feature (1)..(215): tr|A0A1D9IQ42|A0A1D9IQ42_9PSED 7-carboxy-7-deazaguanine synthase OS=Pseudomonas lundensis OX=86185 GN=queE PE= 3 SV=1
MQDTLRITEVFYSLQGETRTAGLPTVFVRLTGCPLRCGYCDSAYAFSGGTVRPLEDILEQVASYRPRYVCVTGGEPLAQPNAIPLLTQLCDAGYEVSIETSGALDISAVDPRVSRVLDLKTPGSKESHRNLYENIALLTSNDQVKFVICSRDDYDWAVSKLIEYGLERRAGEVLFSPSHHDLSARDLADWIVADNLPVRLQMQLHKYLWNDEPGR

SEQ ID NO: 33288 - protein, 215 aa, Pseudomonas lundensis
  misc_feature (1)..(215): tr|A0A2C8ENW4|A0A2C8ENW4_9PSED 7-carboxy-7-deazaguanine synthase OS=Pseudomonas lundensis OX=86185 GN=queE PE= 3 SV=1
MQDTLRITEVFYSLQGETRTAGLPTVFVRLTGCPLRCGYCDSAYAFSGGTVRPLEDILEQVASYRPRYVCVTGGEPLAQPNAIPLLTQLCDAGYEVSLETSGALDISAVDPRVSRVLDLKTPGSKESHRNLYENIALLTSNDQVKFVICSRDDYDWAVSKLIEYGLERRAGEVLFSPSHHDLSARDLADWIVADNLPVRLQMQLHKYLWNDEPGR

SEQ ID NO: 33289 - protein, 215 aa, Pseudomonas lurida
  misc_feature (1)..(215): tr|A0A2A9DIM1|A0A2A9DIM1_9PSED 7-carboxy-7-deazaguanine synthase OS=Pseudomonas lurida OX=244566 GN=queE PE=3 SV=1
MQDTLRITEVFYSLQGETRTAGLPTVFVRLTGCPLRCQYCDSAYAFSGGTVRTLDDILEQVAGYKPRYVCVTGGEPLAQPNAIPLLKQLCDAGYEVSLETSGALDISAVDPRVSRVVDLKTPGSKEAHRNRYENIELLTANDQVKFVICSRDDYDWANSKLIQYGLDRRAGEVLFSPSHHDLNARDLADWVVADNLPVRLQLQLHKYLWNDEPGR

SEQ ID NO: 33290 - protein, 215 aa, Pseudomonas lutea
  misc_feature (1)..(215): tr|A0A098STP8|A0A098STP8_9PSED 7-carboxy-7-deazaguanine synthase OS=Pseudomonas lutea OX=243924 GN=queE PE=3 S V=1
MQDTLRITEVFYSLQGETRTAGLPTVFVRLTGCPLRCGYCDSEYAFSGGTVQTLDSLMEQVASYRPRYVCVTGGEPLAQPNAIPLLQRLCDAGYEVSLETSGALDISKVDTRVSRVVDLKTPGSKEVARNRYENIELLTPNDQVKFVICSREDYDWAVSKIIQYGLERRAGEVLFSPVHRDLNVTDLADWIVADNLPVRLQLQLHKILWNDEPGR

SEQ ID NO: 33291 - protein, 216 aa, Pseudomonas luteola
  misc_feature (1)..(216): tr|A0A3R8YHM3|A0A3R8YHM3_PSELU 7-carboxy-7-deazaguanine synthase OS=Pseudomonas luteola OX=47886 GN=queE PE=3 SV=1
MQQNTLRITEIFYSLQGETRTAGLPTVFVRLTGCPLRCQYCDTAYAFSGGQIMSLDEIVERVAQYKPRYVCVTGGEPLAQPNCLPLLERLCDAGYEVSLETSGALDVAPVDRRVVKVVDLKTPGSAEVSRNLYDNIDHLTPSDQVKFVICSREDYEWAVSKLIQYRLDERVDEVLFSPSHQQVTPRQLAEWIVEDNLPVRFQLQLHKILWNDEPGH

SEQ ID NO: 33292 - protein, 216 aa, Pseudomonas luteola
  misc_feature (1)..(216): tr|A0A2X2C607|A0A2X2C607_PSELU 7-carboxy-7-deazaguanine synthase OS=Pseudomonas luteola OX=47886 GN=queE PE=3 SV=1
MQQNTLRITEIFYSLQGETRTAGLPTVFVRLTGCPLRCQYCDTAYAFSGGQIMSLDEIVERVAQYKPRYVCVTGGEPLAQPNCLPLLERLCDAGYEVSLETSGALDVAPVDRRVVKVVDLKTPGSAEVSRNLYDNIDHLTPNDQVKFVICSREDYEWAVSKLIQYRLDERVDEVLFSPSHQQVTPRQLAEWIVEDNLPVRFQLQLHKILWNDEPGH

SEQ ID NO: 33293 - protein, 215 aa, Pseudomonas mandelii; identical to SEQ ID NO: 33198
  misc_feature (1)..(215): tr|A0A502IMZ5|A0A502IMZ5_9PSED 7-carboxy-7-deazaguanine synthase OS=Pseudomonas mandelii OX=75612 GN=queE PE=3 SV=1

SEQ ID NO: 33294 - protein, 215 aa, Pseudomonas mandelii
  misc_feature (1)..(215): tr|A0A059L227|A0A059L227_9PSED 7-carboxy-7-deazaguanine synthase OS=Pseudomonas mandelii PD30 OX=1419583 GN=qu eE PE=3 SV=1
MQDTLRITEVFYSLQGETRTAGLPTVFVRLTGCPLRCQYCDSAYAFTGGTIRTLDDILEQVAGFRPRYVCVTGGEPLAQPNAIPLLKQLCDAGYEVSLETSGALDISAVDSRVSRVVDLKTPGSKEAHRNRYENIELLTPNDQVKFVICSREDYDWAVSKLIQYGLDQRAGEVLFSPSHHDLNARDLADWVVADNLPVRLQLQLHKYLWNDEPGR

SEQ ID NO: 33295 - protein, 218 aa, Pseudomonas marginalis
  misc_feature (1)..(218): tr|A0A3M4AS07|A0A3M4AS07_PSEMA 7-carboxy-7-deazaguanine synthase OS=Pseudomonas marginalis pv. marginalis OX=9 7473 GN=queE PE=3 SV=1
MATMQDILRITEVFYSLQGETRTAGLPTVFVRLTGCPLRCQYCDSAYAFSGGTVRTLDDILEQVAGYKPRYVCVTGGEPLAQPNAIPLLKQLCDAGYEVSLETSGALDISAVDPRVSRVVDLKTPGSKEAHRNRYENIELLTANDQVKFVICSRDDYDWANSKLIQYGLDRRAGEVLFSPSHHDLNARDLADWVVADNLPVRLQLQLHKYLWNDEPGR

SEQ ID NO: 33296 - protein, 215 aa, Pseudomonas marginalis
  misc_feature (1)..(215): tr|A0A0W0LTF8|A0A0W0LTF8_PSEMA 7-carboxy-7-deazaguanine synthase OS=Pseudomonas marginalis ICMP 11289 OX=11983 18 GN=queE PE=3 SV=1
MQDTLRITEIFHSLQGETRTAGLPTVFVRLTGCPLRCQYCDSAYAFTGGTIHTLDDIMGQVATYRPRYVCVTGGEPLAQPNAIPLLKRLCDEGYEVSLETSGALDISAVDPRVSRVVDLKTPGSKEVTRNRYENMELLTPNDQVKFVICSREDYDWAVSKLIQYGLDRRAGEVLFSASHHELKGRDLADWIVADNLPVRLQMQLHKFLWDDEPGR

SEQ ID NO: 33297 - protein, 226 aa, Pseudomonas marincola
  misc_feature (1)..(226): tr|A0A1I7E7R1|A0A1I7E7R1_9PSED 7-carboxy-7-deazaguanine synthase OS=Pseudomonas marincola OX=437900 GN=queE PE =3 SV=1
MACLAVTPVALMQNTLRITEIFYSLQGETRTAGLPTVFVRLTGCPLRCQYCDTAYAFTGGEIMSLDNILARVAAYNPRYICVTGGEPLAQPNSIALLQQLCDAGYEVSLETSGALDVSSVDPRVSKVLDLKTPGSAEVARNRYDNIQWLSRNDQVKFVICSREDYSWAVSKLIEYRLNERAGEVLFSPSHAQVSARDLANWIVADNLPVRLQLQLHKILWDDAAGH

SEQ ID NO: 33298 - protein, 215 aa, Pseudomonas mediterranea
  misc_feature (1)..(215): tr|A0A0A4HRR6|A0A0A4HRR6_9PSED 7-carboxy-7-deazaguanine synthase OS=Pseudomonas mediterranea CFBP 5447 OX=1348 058 GN=queE PE=3 SV=1
MQDTLRITEVFYSLQGETRTAGLPTVFVRLTGCPLRCQYCDSAYAFSGGTLRTLDDILEQVAGYRPRYVCVTGGEPLAQPNAIPLLKQLCDAGYEVSLETSGALDISAVDPRVSRVVDLKTPGSKEAHRNRYENIELLTPNDQVKFVICSREDYDWAVSKLIQYGLDKRAGEVLVSPSHHDLNARDLADWVVADNLPVRLQLQLHKYLWNDEPGR

SEQ ID NO: 33299 - protein, 218 aa, Pseudomonas meliae; identical to SEQ ID NO: 33165
  misc_feature (1)..(218): tr|A0A0P9YXT5|A0A0P9YXT5_9PSED 7-carboxy-7-deazaguanine synthase OS=Pseudomonas meliae OX=86176 GN=queE PE=3 S V=1

SEQ ID NO: 33300 - protein, 226 aa, Pseudomonas mendocina
  misc_feature (1)..(226): tr|A4XRS9|A4XRS9_PSEMY 7-carboxy-7-deazaguanine synthas e OS=Pseudomonas mendocina (strain ymp) OX=399739 GN=qu eE PE=3 SV=1
MTCFVITPVATMQETLRITEIFYSLQGETRTAGLPTVFVRLTGCPLRCQYCDTAYAFSGGEIVTLDSILDQVAAYRPRYVCVTGGEPLAQPNCIPLLTRLCDAGYEVSLETSGALDVSAVDPRVSKVLDLKTPGSAEVQRNRYENIEWLTANDQVKFVICSREDYDWAVSKLIQYDLPARAGEVLFSPSHKQVEARALADWIVADNLPVRLQLQLHKILWNDEPGH

SEQ ID NO: 33301 - protein, 215 aa, Pseudomonas mendocina
  misc_feature (1)..(215): tr|A0A2R3QX80|A0A2R3QX80_PSEME 7-carboxy-7-deazaguanine synthase OS=Pseudomonas mendocina OX=300 GN=queE PE=3 SV=1
MQETLRITEIFYSLQGETRTAGLPTVFVRLTGCPLRCQYCDTAYAFSGGEIVTLDSIVDQVAAYRPRYVCVTGGEPLAQPNCIPLLTRLCDAGYEVSLETSGALDVSAVDSRVSKVLDLKTPGSAEVQRNRYENIQWLTRNDQVKFVICSREDYDWAVSKLIGHDLAARAGEVLFSPSHQQVDARALADWIIADNLPVRLQLQLHKILWNDEPGH

SEQ ID NO: 33302 - protein, 210 aa, [Pseudomonas] mesoacidophila
  misc_feature (1)..(210): tr|A0A2A4FE85|A0A2A4FE85_9BURK 7-carboxy-7-deazaguanine synthase OS=[Pseudomonas] mesoacidophila OX=265293 GN= queE PE=3 SV=1
MTYAVKEIFYTLQGEGANAGRPAVFCRFAGCNLWSGREEDRAEAACRFCDTDFVGTDGENGGKFKDAAALAAQVASLWPDGEAHRFVVCTGGEPMLQLDQPLVDALHAAGFEIAIETNGSLPVLDSIDWICVSPKADAPLVVTKGNELKVVIPQDNQRLADYAKLDFDYFLVQPMDGPSRDLNTKLAIDWCKRHPQWRLSMQTHKYLNIP

SEQ ID NO: 33303 - protein, 215 aa, Pseudomonas migulae
  misc_feature (1)..(215): tr|A0A1H5MIF9|A0A1H5MIF9_9PSED 7-carboxy-7-deazaguanine synthase OS=Pseudomonas migulae OX=78543 GN=queE PE=3 SV=1
MQDTLRITEVFYSLQGETRTAGLPTVFVRLTGCPLRCQYCDSAYAFSGGTVRTLDDILEQVAGFRPRYVCVTGGEPLAQPNAIPLLKQLCDAGYEVSLETSGALDISAVDSRVSRVVDLKTPGSKEAHRNRYENIELLTPNDQVKFVICSREDYDWAVSKLIQYGLDQRAGEVLFSPSHHDLNARDLADWVVADNLPVRLQLQLHKYLWNDEPGR

SEQ ID NO: 33304 - protein, 215 aa, Pseudomonas mohnii
  misc_feature (1)..(215): tr|A0A1H4RKR5|A0A1H4RKR5_9PSED 7-carboxy-7-deazaguanine synthase OS=Pseudomonas mohnii OX=395600 GN=queE PE=3 SV=1
MQDTLRITEVFYSLQGETRTAGLPTVFVRLTGCPLRCQYCDSAYAFTGGTIRTLDDILEQVAGFRPRYVCVTGGEPLAQPNAIPLLKRLCDAGYEVSLETSGSLDISAVDSRVSRVVDLKTPGSNEAHRNRYENIELLTPNDQVKFVICSREDYDWSVSKLIQYGLDRRAGEVLFSPSHHDLNARDLADWVVADNLPVRLQLQLHKYLWNDEPGR

SEQ ID NO: 33305 - protein, 215 aa, Pseudomonas monteilii
  misc_feature (1)..(215): tr|V9V3E1|V9V3E1_9PSED 7-carboxy-7-deazaguanine synthas e OS=Pseudomonas monteilii SB3101 OX=1435058 GN=queE PE =3 SV=1
MQDTLRITEVFYSLQGETRTAGLPTVFVRLTGCPLRCQYCDSAYAFSGGTVRTLDSILEQVAGFKPRYVCVTGGEPLAQPNALPLLQRLCDAGYEVSLETSGALDIAGTDTRVSRVVDLKTPGSEESHRNRYENIEQLTRNDQVKFVICSREDYDWAVSKLIQYNLAERAGEVLFSPSHHQVNASELADWIVADNLPVRFQLQLHKLLWNDEPGR

SEQ ID NO: 33306 - protein, 215 aa, Pseudomonas monteilii; identical to SEQ ID NO: 33305
  misc_feature (1)..(215): tr|A0A136QD00|A0A136QD00_9PSED 7-carboxy-7-deazaguanine synthase OS=Pseudomonas monteilii OX=76759 GN=queE PE= 3 SV=1

SEQ ID NO: 33307 - protein, 215 aa, Pseudomonas moorei; identical to SEQ ID NO: 33304
  misc_feature (1)..(215): tr|A0A4Q7HAG1|A0A4Q7HAG1_9PSED 7-carboxy-7-deazaguanine synthase OS=Pseudomonas moorei OX=395599 GN=queE PE=3 SV=1

SEQ ID NO: 33308 - protein, 215 aa, Pseudomonas moorei
  misc_feature (1)..(215): tr|A0A1H1HKR9|A0A1H1HKR9_9PSED 7-carboxy-7-deazaguanine synthase OS=Pseudomonas moorei OX=395599 GN=queE PE=3 SV=1
MQDTLRITEVFYSLQGETRTAGLPTVFVRLTGCPLRCQYCDSAYAFTGGTLRTLDDILEQVAGFRPRYVCVTGGEPLAQPNAIPLLKRLCDAGYQVSLETSGSLDISAVDSRVSRVVDLKTPGSKEAHRNRYENIELLTPNDQVKFVICSREDYDWSVSKLIQYGLDQRAGEVLFSPSHHDLNARDLADWVVADNLPVRLQLQLHKYLWNDEPGR

SEQ ID NO: 33309 - protein, 215 aa, Pseudomonas moraviensis
  misc_feature (1)..(215): tr|V8R658|V8R658_9PSED 7-carboxy-7-deazaguanine synthas e OS=Pseudomonas moraviensis R28-S OX=1395516 GN=queE P E=3 SV=1
MQDTLRITEVFYSLQGETRTAGLPTVFVRLTGCPLRCQYCDSAYAFSGGTVRTLDDILEQVAGYRPRYVCVTGGEPLAQPNAIPLLERLCDAGYEVSLETSGALDVSAVDPRVSRVVDLKTPGSKEAHRNRYENIELLTRNDQVKFVICSREDYDWAVSKLIQYGLDQRAGEVLFSPSHHDLNARELADWVVADNLPVRLQLQLHKYLWNDEPGR

SEQ ID NO: 33310 - protein, 215 aa, Pseudomonas moraviensis; identical to SEQ ID NO: 33309
  misc_feature (1)..(215): tr|A0A3R8WJ92|A0A3R8WJ92_9PSED 7-carboxy-7-deazaguanine synthase OS=Pseudomonas moraviensis OX=321662 GN=queE PE=3 SV=1

SEQ ID NO: 33311 - protein, 215 aa, Pseudomonas mosselii
  misc_feature (1)..(215): tr|A0A2V4KGU3|A0A2V4KGU3_9PSED 7-carboxy-7-deazaguanine synthase OS=Pseudomonas mosselii OX=78327 GN=queE PE=3 SV=1
MQDTLRITEVFYSLQGETRTAGLPTVFVRLTGCPLRCQYCDSAYAFSGGTLRTLDSILEQVAGFRPRYVCVTGGEPLAQPNALPLLQRLCDAGYDVSLETSGALDISGVDIRVSRVVDLKTPGSEESHRNRYENIELLTGNDQVKFVICSREDYDWAVSKLIQYNLAERAGEVLFSPSHHQVSATDLADWIVADNLPVRFQLQLHKLLWNDEPGR

SEQ ID NO: 33312 - protein, 215 aa, Pseudomonas mosselii
  misc_feature (1)..(215): tr|A0A290HR44|A0A290HR44_9PSED 7-carboxy-7-deazaguanine synthase OS=Pseudomonas mosselii OX=78327 GN=queE PE=3 SV=1
MQDTLRITEVFYSLQGETRTAGLPTVFVRLTGCPLRCQYCDSAYAFSGGTIRTLDSILEQVAGFRPRYVCVTGGEPLAQPNALPLLQRLCDAGYDVSLETSGALDISGVDTRVSRVVDLKTPGSEESHRNRYENIELLTGNDQVKFVICSREDYDWAVSKLIQYNLVERAGEVLFSPSHHQVSATDLADWIVADNLPVRFQLQLHKLLWNDEPGR

SEQ ID NO: 33313 - protein, 215 aa, Pseudomonas mucidolens
  misc_feature (1)..(215): tr|A0A1H2LVI0|A0A1H2LVI0_9PSED 7-carboxy-7-deazaguanine synthase OS=Pseudomonas mucidolens OX=46679 GN=queE PE =3 SV=1
MQDTLRITEVFYSLQGETRTAGLPTVFVRLTGCPLRCQYCDSAYAFTGGTVRTLDDILEQVASYRPRYVCVTGGEPLAQPNAIALLKQLCDAGYEVSLETSGALDISAVDPRVSRVVDLKTPGSKEVNRNRYENLDLLTANDQVKFVICSREDYDWASSKLIQYGLDRRAGEVLFSPSHHDLNARDLADWVVADNLPVRLQLQLHKYLWNDEPGR

SEQ ID NO: 33314 - protein, 215 aa, Pseudomonas nabeulensis
  misc_feature (1)..(215): tr|A0A4Z0B980|A0A4Z0B980_9PSED 7-carboxy-7-deazaguanine synthase OS=Pseudomonas nabeulensis OX=2293833 GN=queE PE=3 SV=1
MQDTLRITEVFYSLQGETRTAGLPTVFVRLTGCPLRCQYCDSAYAFSGGTVRTLDDILEQVAGYRPRYVCVTGGEPLAQPNAIPLLKQLCDAGYEVSLETSGALDISAVDPRVSRVVDLKTPDSKESHRNRYENMDLLTANDQVKFVICSRDDYDWANSKLIQYGLDRRAGEVLFSPSHHDLNARDLADWVVADNLPVRLQLQLHKYLWNDEPGR

SEQ ID NO: 33315 - protein, 215 aa, Pseudomonas nitroreducens
  misc_feature (1)..(215): tr|A0A246FB65|A0A246FB65_9PSED 7-carboxy-7-deazaguanine synthase OS=Pseudomonas nitroreducens OX=46680 GN=queE PE=3 SV=1
MQQTLRITEIFYSLQGETRTAGLPTVFVRLTGCPLRCNYCDTAYAFSGGEIQTLDAILEQVAQYRPRYVCVTGGEPLAQPNCILLLERLCNAGYDVSLETSGALDISASDRRVSRILDLKTPGSGEVMRNRYENIGELTANDQVKFVICSREDYDWAVSKLIEYRLEQRAGEVLFSPSHREVDARALADWIVSDNLPVRLQLQLHKILWNDEPGH

SEQ ID NO: 33316 - protein, 226 aa, Pseudomonas nitroreducens
  misc_feature (1)..(226): tr|A0A239BSC2|A0A239BSC2_9PSED 7-carboxy-7-deazaguanine synthase OS=Pseudomonas nitroreducens OX=46680 GN=queE PE=3 SV=1
MACIAVTPVADMQQTLRITEIFYSLQGETRTAGLPTVFVRLTGCPLRCNYCDTAYAFSGGEIQSLDAILDQVARYRPRYICVTGGEPLAQPNCIPLLERLCHAGYEVSLETSGALDISATDRRVSRILDLKTPGSGEVARNRYENIGELTLNDQVKFVICSREDYDWAVSKLIEYRLDERAGEVLFSPSHRQVDARALADWIVSDNLPVRLQLQLHKILWNDEPGH

SEQ ID NO: 33317 - protein, 227 aa, Pseudomonas oleovorans
  misc_feature (1)..(227): tr|A0A3D9EG67|A0A3D9EG67_PSEOL 7-carboxy-7-deazaguanine synthase OS=Pseudomonas oleovorans OX=301 GN=queE PE=3 SV=1
MACVAVTPVASMQKDTLRLTEIFYSLQGEARTAGLPTVFVRLTGCPLRCHYCDTAYAFTGGEIHHLDAILEQVASYRPRHICVTGGEPLAQPNCLKLLEQLCDAGYEVSLETSGALDVSGVDGRVSKVVDLKTPGSGEVGRNLYANLDHLTPNDQVKFVICSREDYDWAVSKLIEYRLEQRAGEVLFSPSHGQVVPRELAEWIVADNLPVRFQLQLHKILWNDEPGH

SEQ ID NO: 33318 - protein, 215 aa, Pseudomonas oleovorans
  misc_feature (1)..(215): tr|A0A2S7FQ18|A0A2S7FQ18_PSEOL 7-carboxy-7-deazaguanine synthase OS=Pseudomonas oleovorans OX=301 GN=queE PE=3 SV=1
MQETLRITEIFYSLQGETRTAGLPTVFVRLTGCPLRCQYCDTAYAFSGGEIVTLDSILDQVAAYRPRYVCVTGGEPLAQPNCITLLARLCDAGYEVSLETSGALDVSAVDARVSKVLDLKTPGSAEVQRNRYENVQWLTRNDQVKFVICSREDYDWAVSKLIEYDLAARAGEVLFSPSHKQVDARALADWIVADNLPVRLQLQLHKILWNDEPGH

SEQ ID NO: 33319 - protein, 215 aa, Pseudomonas orientalis
  misc_feature (1)..(215): tr|A0A3G7X597|A0A3G7X597_9PSED 7-carboxy-7-deazaguanine synthase OS=Pseudomonas orientalis OX=76758 GN=queE PE =3 SV=1
MQDTLRITEVFYSLQGETRTAGLPTVFVRLTGCPLRCQYCDSAYAFSGGTVRALDDILEQVAGYRPRYVCVTGGEPLAQPNAIPLLKQLCDAGYEVSLETSGALDISAVDPRVSRVVDLKTPDSKEAHRNRYENMDLLTANDQVKFVICSRDDYDWATSKLIQYGLERRAGEVLFSPSHHDLNARDLADWVVADNLPVRLQLQLHKYLWNDEPGR

SEQ ID NO: 33320 - protein, 215 aa, Pseudomonas orientalis; identical to SEQ ID NO: 33179
  misc_feature (1)..(215): tr|A0A0R2ZWC0|A0A0R2ZWC0_9PSED 7-carboxy-7-deazaguanine synthase OS=Pseudomonas orientalis OX=76758 GN=queE PE =3 SV=1

SEQ ID NO: 33321 - protein, 215 aa, Pseudomonas oryzae
  misc_feature (1)..(215): tr|A0A1H1UPW7|A0A1H1UPW7_9PSED 7-carboxy-7-deazaguanine synthase OS=Pseudomonas oryzae OX=1392877 GN=queE PE=3 SV=1
MNQTLRITEIFFSLQGEARTVGLPTVFVRLTGCPLRCDYCDTAYAFSGGEIMTLEAILARVADYRPRHVCVTGGEPLAQPNCIPLLEALCDAGYEVSLETSGALDIAPVDTRVSRVVDLKTPGSGEVGRNRYENMAELTGNDQVKFVICSREDYDWAVSKLIEYRLDQRAGEVLLSPSHHQLQPRTLAEWIIADNLPVRLQLQLHKYLWNDEPGH

SEQ ID NO: 33322 - protein, 227 aa, Pseudomonas oryzihabitans
  misc_feature (1)..(227): tr|A0A0U4VQA0|A0A0U4VQA0_9PSED 7-carboxy-7-deazaguanine synthase OS=Pseudomonas oryzihabitans OX=47885 GN=queE PE=3 SV=1
MACVAVTPVASMQKDTLRLTEIFYSLQGEARTAGLPTVFVRLTGCPLRCQYCDTAYAFTGGEIHHLDAILEQVASYRPRHICVTGGEPLAQPNCLKLLEQLCDAGYEVSLETSGALDVSGVDVRVSKVMDLKTPASGEVGRNLYANIAQLTPNDQVKFVICSREDYDWAVSKLIEYRLDQRVGEVWFSPSHGQVVPRELAEWIVADNLPVRFQLQLHKILWNDEPGH

SEQ ID NO: 33323 - protein, 216 aa, Pseudomonas oryzihabitans
  misc_feature (1)..(216): tr|A0A178LE15|A0A178LE15_9PSED 7-carboxy-7-deazaguanine synthase OS=Pseudomonas oryzihabitans OX=47885 GN=queE PE=3 SV=1
MQKDTLRLTEIFYSLQGEARTVGLPTVFVRLTGCPLRCQYCDTAYAFTGGEIHHLDAILEQVASYRPRHVCVTGGEPLAQPNCLKLLEQLCDAGYEVSLETSGALDVSGVDVRVSKVVDLKTPGSGEMGRNLYANIAHLTPNDQVKFVICSREDYDWAVSKLIEYRLDQRAGEVWFSPSHGQVVPRELAEWIVADNLPVRFQLQLHKILWNDEPGH

SEQ ID NO: 33324 - protein, 226 aa, Pseudomonas otitidis
  misc_feature (1)..(226): tr|A0A1I0UKM1|A0A1I0UKM1_9PSED 7-carboxy-7-deazaguanine synthase OS=Pseudomonas otitidis OX=319939 GN=queE PE= 3 SV=1
MACFAVTPVALMQQTLRITEIFYSLQGETRTAGLPTVFVRLTGCPLRCQYCDTAYAFNGGQLQSLDDILEQVAAYRPRHVCVTGGEPLAQPNCIPLLARLCDAGYEVSLETSGALDIAAVDTRVSRVLDFKTPGSAEVARNRYENIAQLTPNDQVKFVICSREDYDWAVSKLIEYRLEQRAGEVLFSPSHHQVDARQLADWIVADNLPVRLQLQLHKILWNDEPGH

SEQ ID NO: 33325 - protein, 215 aa, Pseudomonas palleroniana
  misc_feature (1)..(215): tr|A0A2L1JAE8|A0A2L1JAE8_9PSED 7-carboxy-7-deazaguanine synthase OS=Pseudomonas palleroniana OX=191390 GN=queE PE=3 SV=1
MQDTLRITEVFYSLQGETRTAGLPTVFVRLTGCPLRCQYCDSAYAFSGGTVRTLDDILEQVAGFKPRYVCVTGGEPLAQPNAIPLLKQLCDAGYEVSLETSGALDISAVDPRVSRVVDLKTPGSKEAHRNLYANMDLLTPNDQVKFVICSREDYDWATSKLIQYGLERRAGEVLFSPSHHDLNARDLADWVVADNLPVRLQLQLHKYLWNDEPGR

SEQ ID NO: 33326 - protein, 215 aa, Pseudomonas palleroniana
  misc_feature (1)..(215): tr|A0A1H5MEI9|A0A1H5MEI9_9PSED 7-carboxy-7-deazaguanine synthase OS=Pseudomonas palleroniana OX=191390 GN=queE PE=3 SV=1
MQDTLRITEVFYSLQGETRTAGLPTVFVRLTGCPLRCQYCDSAYAFSGGTVRTLADILEQVAGFKPRYVCVTGGEPLAQPNAIPLLKQLCDAGYEVSLETSGALDISAVDPRVSRVVDLKTPGSKEAHRNLYANMDLLTPNDQVKFVICSREDYDWATSKLIQYGLERRAGEVLFSPSHHDLNARDLADWVVADNLPVRLQLQLHKYLWNDEPGR

SEQ ID NO: 33327 - protein, 215 aa, Pseudomonas panacis
  misc_feature (1)..(215): tr|A0A1H4IMV5|A0A1H4IMV5_PSEPA 7-carboxy-7-deazaguanine synthase OS=Pseudomonas panacis OX=307251 GN=queE PE=3 SV=1
MQDTLRITEVFYSLQGETRTAGLPTVFVRLTGCPLRCQYCDSAYAFSGGTVRTLEDILEQVAGYRPRYVCVTGGEPLAQPNAIPLLKQLCDAGYEVSLETSGALDISAVDPRVSRVVDLKTPGSKEAHRNLYENLDLLTANDQVKFVICSRDDYDWASSKLIQYGLDRRAGEVLFSPSHHDLNARDLADWVVADNLPVRLQLQLHKYLWNDEPGR

SEQ ID NO: 33328 - protein, 226 aa, Pseudomonas panipatensis
  misc_feature (1)..(226): tr|A0A1G8GP23|A0A1G8GP23_9PSED 7-carboxy-7-deazaguanine synthase OS=Pseudomonas panipatensis OX=428992 GN=queE PE=3 SV=1
MACFAVMPVADMQQTLRITEIFYSLQGEARTVGLPTVFVRLTGCPLRCQYCDSAYAFSGGDIIALDAILERVAAYRPRYVCVTGGEPLAQPNCIPLLQRLCDAGYSVSLETSGALDISATDRRVSRILDLKTPGSGEVARNRYENIAELTPNDQVKFVICSREDYDWAVSKLIEYRLQERAGEVLFSPSYQQVEGRTLADWIVADNLPVRFQLQLHKILWNDEPGR

SEQ ID NO: 33329 - protein, 215 aa, Pseudomonas parafulva
  misc_feature (1)..(215): tr|A0A147GF69|A0A147GF69_9PSED 7-carboxy-7-deazaguanine synthase OS=Pseudomonas parafulva OX=157782 GN=queE PE =3 SV=1
MQDTLRITEVFYSLQGETRTAGLPTVFVRLTGCPLRCQYCDSAYAFSGGTLRSLDSILEQVAGFKPRYVCVTGGEPLAQPNALPLLQRLCDAGYEVSLETSGALDIAGTDTRVSRVVDLKTPGSEESHRNRYENIEHLTRNDQVKFVICSREDYDWAVSKLIQYNLAERAGEVLFSPSHHQVSATDLADWIVADNLPVRFQLQLHKLLWNDEPGR

SEQ ID NO: 33330 - protein, 215 aa, Pseudomonas parafulva
  misc_feature (1)..(215): tr|A0A0A7JXL5|A0A0A7JXL5_9PSED 7-carboxy-7-deazaguanine synthase OS=Pseudomonas parafulva OX=157782 GN=queE PE =3 SV=1
MQDTLRITEVFYSLQGETRTAGLPTVFVRLTGCPLRCQYCDSAYAFSGGTVRTLDDILEQVAGYRPRYVCVTGGEPLAQPNALPLLKRLCDAGFEVSLETSGALDISQVDTRVSRVVDLKTPGSQEAHRNLYANIDHLTANDQVKFVICSREDYDWAVSKLIQYNLDQRVSEVLFSPSHHQVSATDLADWIIADNLPVRFQLQLHKLLWNDEPGR

SEQ ID NO: 33331 - protein, 215 aa, Pseudomonas paralactis
  misc_feature (1)..(215): tr|A0A0R3A7N8|A0A0R3A7N8_9PSED 7-carboxy-7-deazaguanine synthase OS=Pseudomonas paralactis OX=1615673 GN=queE PE=3 SV=1
MQDTLRITEVFYSLQGETRTAGLPTVFVRLTGCPLRCQYCDSAYAFSGGTVRTLDDILEQVAGYRPRYVCVTGGEPLAQPNAIPLLKQLCDAGYEVSLETSGALDISAVDPRVSRVVDLKTPDSKEAHRNRYENIDLLTVNDQVKFVICSRDDYDWATSKLIQYGLERRAGEVLFSPSHHDLNARDLADWVVADNLPVRLQLQLHKYLWNDEPGR

SEQ ID NO: 33332 - protein, 219 aa, Pseudomonas pelagia
  misc_feature (1)..(219): tr|A0A2A4AVX0|A0A2A4AVX0_9PSED 7-carboxy-7-deazaguanine synthase OS=Pseudomonas pelagia OX=553151 GN=queE PE=3 SV=1
MTIDSSATLRMTEIFYSIQGESRSLGLPTVFVRLTGCPLRCQYCDTAYAFSGGELMSLEQILLQVASYRPRYVCVTGGEPLAQPSAIPLLQALCEAGYKVSLETSGALDVSTVDERVSRVVDIKTPDSDEMGRNLYANLALLGQHDQVKFVICSRSDYEWARFKLDEYALADSVGEVLFSPSHAQLTPRQLAEWIVEDNLPVRFQMQLHKYLWNDEPGH

SEQ ID NO: 33333 - protein, 252 aa, Pseudomonas peli
  misc_feature (1)..(252): tr|A0A1G4S807|A0A1G4S807_9PSED 7-carboxy-7-deazaguanine synthase OS=Pseudomonas peli OX=592361 GN=queE PE=3 SV =1
MLCNVKNFTRKFFRIQSAPLFPQRRRTACLAVTPVADMQDTLRITEIFYSLQGETRTAGLPTVFVRLTGCPLRCQYCDTAYAFSGGEIMSLDAIAQQVAGYKPRYICVTGGEPLAQPNCIPLLKRLCDAGYEVSLETSGALDVSAVDPRVSKVLDLKTPGSAEVARNRYENIDLLTPNDQVKFVICSREDYDWAVSKLIQYRLAERAGEVLMSPSHHELDARSLAEWIIADNLPVRLQMQLHKILWNDEPGH

SEQ ID NO: 33334 - protein, 215 aa, Pseudomonas plecoglossicida
  misc_feature (1)..(215): tr|S2KVH2|S2KVH2_9PSED 7-carboxy-7-deazaguanine synthas e OS=Pseudomonas plecoglossicida NB2011 OX=1330531 GN=q ueE PE=3 SV=1
MQDTLRITEVFYSLQGETRTAGLPTVFVRLTGCPLRCQYCDSAYAFSGGTVRTLDSIMEQVAGFKPRYVCVTGGEPLAQPNALPLLQRLCDAGYEVSLETSGALDISATDVRVSRVVDLKTPGSEESHRNLYANIEHLTRNDQVKFVICSREDYDWAVSKLIQYNLAERAGEVLFSPSHHQVKASDLADWIVADNLPVRFQLQLHKLLWNDEPGR

SEQ ID NO: 33335 - protein, 215 aa, Pseudomonas plecoglossicida; identical to SEQ ID NO: 33305
  misc_feature (1)..(215): tr|A0A2A3LZH2|A0A2A3LZH2_9PSED 7-carboxy-7-deazaguanine synthase OS=Pseudomonas plecoglossicida OX=70775 GN=qu eE PE=3 SV=1

SEQ ID NO: 33336 - protein, 215 aa, Pseudomonas poae
  misc_feature (1)..(215): tr|A0A3Q9D693|A0A3Q9D693_9PSED 7-carboxy-7-deazaguanine synthase OS=Pseudomonas poae OX=200451 GN=queE PE=3 SV =1
MQDTLRITEVFYSLQGETRTAGLPTVFVRLTGCPLRCQYCDSAYAFSGGTVRTLDDILQQVAGYRPRYVCVTGGEPLAQPNAIPLLKQLCDAGYEVSLETSGALDISAVDPRVSRVVDLKTPGSKESHRNLYENMDLLTANDQVKFVICSRDDYDWASSKLIQYGLDRRAGEVLFSPSHHDLNARDLADWVVADNLPVRLQLQLHKYLWNDEPGR

SEQ ID NO: 33337 - protein, 215 aa, Pseudomonas poae
  misc_feature (1)..(215): tr|A0A423F8X3|A0A423F8X3_9PSED 7-carboxy-7-deazaguanine synthase OS=Pseudomonas poae OX=200451 GN=queE PE=3 SV =1
MQDTLRITEVFYSLQGETRTAGLPTVFVRLTGCPLRCQYCDSAYAFSGGTVRTLDDILAQVAGYKPRYVCVTGGEPLAQPNAIPLLKQLCDAGYEVSLETSGALDISAVDSRVSRVVDLKTPGSKEAHRNLYANLDLLTPNDQVKFVICSREDYDWATSKLIQYGLERRAGEVLFSPSHHDLNARDLADWVVADNLPVRLQLQLHKYLWNDEPGR

SEQ ID NO: 33338 - protein, 215 aa, Pseudomonas pohangensis
  misc_feature (1)..(215): tr|A0A1H2G3K5|A0A1H2G3K5_9PSED 7-carboxy-7-deazaguanine synthase OS=Pseudomonas pohangensis OX=364197 GN=queE PE=3 SV=1
MSETLRITEIFYSLQGETRTAGLPTVFVRLTGCPLRCQYCDTAYAFSGGELCTLQEILAQVATYQPRYVCVTGGEPLAQPNCIPLLQQLCDAGYQVSLETSGALDIAAVDPRVSRVLDLKTPDSQEVARNRYENIALLTAHDQVKFVICSRKDYDWAVSKLIEYRLEQRAGEVLFSPSQHELPARQLADWIIADNLPVRLQLQLHKILWNDVPGH

SEQ ID NO: 33339 - protein, 215 aa, Pseudomonas prosekii
  misc_feature (1)..(215): tr|A0A1H1ZXI4|A0A1H1ZXI4_9PSED 7-carboxy-7-deazaguanine synthase OS=Pseudomonas prosekii OX=1148509 GN=queE PE =3 SV=1
MQDTLRITEVFYSLQGETRTAGLPTVFVRLTGCPLRCQYCDSAYAFTGGTIRTLDDILEQVAGYRPRYVCVTGGEPLAQPNAIPLLKQLCDAGYEVSLETSGSIDISAVDSRVSRVVDLKTPGSKEAHRNRYENIDLLTPNDQVKFVICSREDYDWSVSKLIQYGLERRAGEVLFSPSHHDLNARELADWVVADNLPVRLQLQLHKYLWNDEPGR

SEQ ID NO: 33340 - protein, 215 aa, Pseudomonas protegens
  misc_feature (1)..(215): tr|A0A2T6GJ16|A0A2T6GJ16_9PSED 7-carboxy-7-deazaguanine synthase OS=Pseudomonas protegens OX=380021 GN=queE PE =3 SV=1
MQDTLRITEVFYSLQGETRTAGLPTVFVRLTGCPLRCQYCDSAYAFSGGTQRTLDSLLEQVAGFRPRYVCVTGGEPLAQPNAIPLLKQLCDAGYEVSLETSGALDISEVDQRVSRVLDLKTPGSKEAHRNRYENIELLTANDQVKFVICSREDYDWAVSKLIQYGLERRAGEVLFSPSHHDLSARDLADWIVADNLPVRLQLQLHKYLWNDEPGR

SEQ ID NO: 33341 - protein, 215 aa, Pseudomonas protegens
  misc_feature (1)..(215): tr|A0A423DN60|A0A423DN60_9PSED 7-carboxy-7-deazaguanine synthase OS=Pseudomonas protegens OX=380021 GN=queE PE =3 SV=1
MQDTLRITEVFYSLQGETRTAGLPTVFVRLTGCPLRCQYCDSAYAFSGGTQRTLDSLLEQVAGFRPRYVCVTGGEPLAQPNAIPLLKQLCDAGYEVSLETSGALDISAVDPRVSRILDLKTPGSEESHRNRYENIELLTANDQVKFVICSREDYDWAVSKLIQYGLERRAGEVLFSPSHHDLNARDLADWIVADNLPVRLQLQLHKYLWNDEPGR

SEQ ID NO: 33342 - protein, 226 aa, Pseudomonas pseudoalcaligenes
  misc_feature (1)..(226): tr|W6R051|W6R051_PSEP5 7-carboxy-7-deazaguanine synthas e OS=Pseudomonas pseudoalcaligenes (strain CECT 5344) O X=1182590 GN=queE PE=3 SV=1
MACFVITLVATMQETLRITEIFYSLQGETRTAGLPTVFVRLTGCPLRCQYCDTAYAFSGGEIVTLDSILDQVAAYRPRYVCVTGGEPLAQPNCIALLARLCDAGYEVSLETSGALDVSAVDARVSKVLDLKTPGSAEVQRNRYENVQWLTRNDQVKFVICSREDYDWAVSKLIEYDLAARAGEVLFSPSHKQVDARALADWIVADNLPVRLQLQLHKILWNDEPGH

SEQ ID NO: 33343 - protein, 215 aa, Pseudomonas psychrophila
  misc_feature (1)..(215): tr|S6HYC4|S6HYC4_9PSED 7-carboxy-7-deazaguanine synthas e OS=Pseudomonas psychrophila OX=122355 GN=queE PE=3 SV =1
MQDTLRITEVFYSLQGETRTAGLPTVFVRLTGCPLRCGYCDSAYAFSGGTVRPLDDILQQVADFRPRYVCVTGGEPLAQPNAISLLKQLCDAGYEVSIETSGALDISAVDPRVSRVLDLKTPGSKESHRNLYENIALLTPNDQVKFVICSREDYDWAVSKLIEYGLERRAGEVLFSPSHHDLPARDLADWIVADNLPVRLQMQLHKYLWNDEPGR

SEQ ID NO: 33344 - protein, 215 aa, Pseudomonas psychrophila
  misc_feature (1)..(215): tr|A0A3N2AAM2|A0A3N2AAM2_9PSED 7-carboxy-7-deazaguanine synthase OS=Pseudomonas psychrophila OX=122355 GN=queE PE=3 SV=1
MQDTLRITEVFYSLQGETRTAGLPTVFVRLTGCPLRCQYCDSAYAFSGGTVRSLDSILEQVADFRPRYVCVTGGEPLAQPNAIPLLKQLCDAGYDVSIETSGALDISAVDPRVSRVLDLKTPGSKESHRNLYENIALLTPHDQVKFVICSREDYDWAVSKLIEYGLEHRAGEVLFSPSHHDLPARDLADWIVADNLPVRLQMQLHKYLWNDEPGR

SEQ ID NO: 33345 - protein, 227 aa, Pseudomonas psychrotolerans
  misc_feature (1)..(227): tr|A0A147H6E0|A0A147H6E0_9PSED 7-carboxy-7-deazaguanine synthase OS=Pseudomonas psychrotolerans OX=237610 GN=q ueE PE=3 SV=1
MACLAVTPVASMQKDTLRLTEIFYSLQGEARTAGLPTVFVRLTGCPLRCQYCDTAYAFTGGEIHHLDAILEQVASYRPRHICVTGGEPLAQPNCLTLLEKLCDAGYEVSLETSGALDVSGVDPRVSKVVDLKTPGSGEVGRNLYANMAHLTSNDQVKFVICSREDYDWAVSKLIEYRLEQRAGEVLFSPSHGQVVPRELAEWIVADNLPVRFQLQLHKILWNDEPGH

SEQ ID NO: 33346 - protein, 227 aa, Pseudomonas psychrotolerans
  misc_feature (1)..(227): tr|A0A4Y5W331|A0A4Y5W331_9PSED 7-carboxy-7-deazaguanine synthase OS=Pseudomonas psychrotolerans OX=237610 GN=q ueE PE=3 SV=1
MACLAVTPVASMQKDTLRLTEIFYSLQGEARTAGLPTVFVRLTGCPLRCQYCDTAYAFTGGEIHHLDAILEQVASYRPRHICVTGGEPLAQPNCLTLLERLCDAGYEVSLETSGALDVSGVDTRVSKVVDLKTPGSGEMGRNLYANLDHLTSNDQVKFVICSREDYDWAVSKLIEYRLEQRAGEVLFSPSHGQVVPRELAEWIVADNLPVRFQLQLHKILWNDEPGH

SEQ ID NO: 33347 - protein, 226 aa, Pseudomonas punonensis
  misc_feature (1)..(226): tr|A0A1M7G169|A0A1M7G169_9PSED 7-carboxy-7-deazaguanine synthase OS=Pseudomonas punonensis OX=1220495 GN=queE PE=3 SV=1
MACFAVTPVAHMKDTLRITEIFFSLQGEARTAGLPTVFVRLTGCPLRCQYCDTAYAFSGGELLSLETILERVASYRPRYICVTGGEPLAQPNCIPLLEKLCDAGYEVSLETSGALDVSAVDPRVSKVVDLKTPGSAEMGRNRYENIEHLQPHDQVKFVICSREDYDWSVSKVIQYGLAERVDEVLFSPSHGQVSGRQLAEWVIADNLPVRMQLQLHKILWNDEPGH

SEQ ID NO: 33348 - protein, 215 aa, Pseudomonas putida
  misc_feature (1)..(215): tr|A0A2C5W845|A0A2C5W845_PSEPU 7-carboxy-7-deazaguanine synthase OS=Pseudomonas putida OX=303 GN=queE PE=3 SV= 1
MQDTLRITEVFYSLQGETRTAGLPTVFVRLTGCPLRCQYCDSAYAFSGGTIRTLDDILEQVAEFRPRYVCVTGGEPLAQPNAIPLLKQLCDAGYVVSLETSGALDISAVDSRVSRVVDLKTPDSKEAHRNRYENIELLTPNDQVKFVICSRDDYDWAVSKLIQYGLDQRAGEVLFSPSHHDLNARDLADWVVADNLPVRLQLQLHKYLWNDEPGR

SEQ ID NO: 33349 - protein, 215 aa, Pseudomonas putida
  misc_feature (1)..(215): tr|Q88NI4|Q88NI4_PSEPK 7-carboxy-7-deazaguanine synthas e OS=Pseudomonas putida (strain ATCC 47054 / DSM 6125 / NCIMB 11950 / KT2440) OX=160488 GN=queE PE=3 SV=1
MQDTLRITEVFYSLQGETRTAGLPTVFVRLTGCPLRCQYCDSAYAFSGGTVRTLDSILEQVAGFKPRYVCVTGGEPLAQPNALPLLQRLCDAGYEVSLETSGALDIAGTDTRVSRVVDLKTPGSEESHRNRYENIEQLTRNDQVKFVICSREDYDWAVSKLIQYNLAERAGEVLFSPSHHQVNASDLADWIVADNLPVRFQLQLHKLLWNDEPGR

SEQ ID NO: 33350 - protein, 215 aa, Pseudomonas reidholzensis
  misc_feature (1)..(215): tr|A0A383RYS4|A0A383RYS4_9PSED 7-carboxy-7-deazaguanine synthase OS=Pseudomonas reidholzensis OX=1785162 GN=qu eE PE=3 SV=1
MQDTLRITEVFYSLQGETRTAGLPTVFVRLTGCPLRCQYCDSAYAFTGGTVRTLDSIVEQVAGFRPRYVCVTGGEPLAQPNALPLLTRLCDAGYEVSLETSGALDIARVDPRVSRVVDLKTPGSEESHRNRYENIELLTRNDQVKFVICSREDYDWAVSKLIQYNLEQRAGEVLFSPSHHQVSASDLADWIVADNLPVRFQMQLHKHLWNDEPGR

SEQ ID NO: 33351 - protein, 215 aa, Pseudomonas reinekei
  misc_feature (1)..(215): tr|A0A1H0S478|A0A1H0S478_9PSED 7-carboxy-7-deazaguanine synthase OS=Pseudomonas reinekei OX=395598 GN=queE PE= 3 SV=1
MQDTLRITEVFYSLQGETRTAGLPTVFVRLTGCPLRCQYCDSAYAFTGGTIRTLDDILEQVAGYRPRYVCVTGGEPLAQPNAIPLLKRLCDAGYEVSLETSGSIDISAVDSRVSRVVDLKTPGSKEAHRNRYENIELLTPNDQVKFVICSREDYDWSVSKLIQYGLDQRAGEVLFSPSHHDLNARDLADWVVADNLPVRLQLQLHKYLWNDEPGR

SEQ ID NO: 33352 - protein, 215 aa, Pseudomonas resinovorans
  misc_feature (1)..(215): tr|S6BLM4|S6BLM4_PSERE 7-carboxy-7-deazaguanine synthas e OS=Pseudomonas resinovorans NBRC 106553 OX=1245471 GN =queE PE=3 SV=1
MHQTLRITEIFYSLQGETRTAGLPTVFVRLTGCPLRCQYCDTAYAFSGGELMTLDAILERVAAYKPRYICVTGGEPLAQPNCIPLLQRLCDAGYDVSIETSGALDVSAVDPRVSKVVDLKTPGSAEVGRNRYENIAHLTANDQVKFVICSREDYDWAVSKLIEYRLEQRAGEVLFSPSHKEVSARDLADWIVADNLPVRLQLQLHKILWNDEPGH

SEQ ID NO: 33353 - protein, 215 aa, Pseudomonas rhizosphaerae; identical to SEQ ID NO: 33210
  misc_feature (1)..(215): tr|A0A089YSZ9|A0A089YSZ9_9PSED 7-carboxy-7-deazaguanine synthase OS=Pseudomonas rhizosphaerae OX=216142 GN=que E PE=3 SV=1

SEQ ID NO: 33354 - protein, 215 aa, Pseudomonas rhodesiae
  misc_feature (1)..(215): tr|A0A5C5NRG9|A0A5C5NRG9_9PSED 7-carboxy-7-deazaguanine synthase OS=Pseudomonas rhodesiae OX=76760 GN=queE PE= 3 SV=1
MQDTLRITEVFYSLQGETRTAGLPTVFVRLTGCPLRCQYCDSAYAFSGGTVRTLDDILEQVAGFKPRYVCVTGGEPLAQPNAIPLLKQLCDAGYEVSLETSGALDISAVDPRVSRVVDLKTPDSKEAHRNRYENMDLLSVNDQVKFVICSRDDYDWAVSKLIQYGLERRAGEVLFSPSHHDLNARDLADWIVADNLPVRLQLQLHKYLWNDEPGR

SEQ ID NO: 33355 - protein, 215 aa, Pseudomonas sagittaria
  misc_feature (1)..(215): tr|A0A1I5VCE1|A0A1I5VCE1_9PSED 7-carboxy-7-deazaguanine synthase OS=Pseudomonas sagittaria OX=1135990 GN=queE PE=3 SV=1
MNQTLRITEIFHSLQGETRTVGLPTVFVRLTGCPLRCQYCDTAYAFSGGELMTLEQILEQVAGYRPRYVCVTGGEPLAQPNCIPLLKALCDAGYQVSLETSGALDIAPVDVRVSRVVDLKTPGSAEVGRNRYENMAELTRNDQVKFVICSREDYDWAVSKIIEYRLDQRAGELLMSPSHHELEARSLAEWIIADNLPVRLQLQLHKYLWNDEPGH

SEQ ID NO: 33356 - protein, 219 aa, Pseudomonas salegens
  misc_feature (1)..(219): tr|A0A1H2G177|A0A1H2G177_9PSED 7-carboxy-7-deazaguanine synthase OS=Pseudomonas salegens OX=1434072 GN=queE PE =3 SV=1
MTTELSSTLRITEIFHSLQGESRTIGLPTVFVRLTGCPLRCQYCDSAYAFNGGESMPLEHILQQVGAYRPRYVCVTGGEPLAQPGCLRLLRQLCDAGYQVSLETSGAMDVSAVDPRVSRVVDLKTPGSAEVGRNLYSNIALLGPQDQVKFVLCNRADYDWARFKLDEYGLAEQVGEVLFSPSHAELDARELADWIVADNLPVRFQLQLHKYLWNDQPGH

SEQ ID NO: 33357 - protein, 211 aa, Pseudomonas salomonii
  misc_feature (1)..(211): tr|A0A1H3U1S0|A0A1H3U1S0_9PSED 7-carboxy-7-deazaguanine synthase OS=Pseudomonas salomonii OX=191391 GN=queE PE =3 SV=1
MTYSIKEMFYTLQGEGNQAGRPSVFCRFSGCNLWSGREQDRANAVCTFCDTDFVGTDGEGGGKFKNAEALAHAIDSFWPISHQDHKYVVLTGGEPLLQVDDALINALYNLNFCIAVETNGTIVAPLGIDWLCVSPKSNAALKITTGDELKLVYPQKNSTPSMFEHLDFKHFYLQPMDGLKIVENTETAIRYCKSNPKWKLSLQCHKILAIP

SEQ ID NO: 33358 - protein, 215 aa, Pseudomonas salomonii
  misc_feature (1)..(215): tr|A0A1H3T049|A0A1H3T049_9PSED 7-carboxy-7-deazaguanine synthase OS=Pseudomonas salomonii OX=191391 GN=queE PE =3 SV=1
MQDTLRITEVFYSLQGETRTAGLPTVFVRLTGCPLRCQYCDSAYAFSGGTVRTLDDIIEQVAGFKPRYVCVTGGEPLAQPNAIPLLKRLCDAGYEVSLETSGALDISAVDARVSRVVDLKTPGSKEAHRNLYDNMDLLTANDQVKFVICSRDDYDWAASKLIQYNLDRRAGEVLFSPSHHDLNARDLADWVVADNLPVRLQLQLHKYLWNDEPGR

SEQ ID NO: 33359 - protein, 215 aa, Pseudomonas saponiphila
  misc_feature (1)..(215): tr|A0A1H4KGL6|A0A1H4KGL6_9PSED 7-carboxy-7-deazaguanine synthase OS=Pseudomonas saponiphila OX=556534 GN=queE PE=3 SV=1
MQDTLRITEVFYSLQGETRTAGLPTVFVRLTGCPLRCQYCDSAYAFSGGTQRTLDSLLEQVAGFRPRYVCVTGGEPLAQPNAIPLLKQLCDAGYEVSLETSGALDISEVDRRVSRVLDLKTPGSKEAHRNRYENIELLTVNDQVKFVICSREDYDWAVSKLIQYGLERRAGEVLFSPSHHDLSARDLADWIVADNLPVRLQLQLHKYLWNDEPGR

SEQ ID NO: 33360 - protein, 215 aa, Pseudomonas saudiphocaensis
  misc_feature (1)..(215): tr|A0A427EGP3|A0A427EGP3_9PSED 7-carboxy-7-deazaguanine synthase OS=Pseudomonas saudiphocaensis OX=1499686 GN= queE PE=3 SV=1
MQNTLRITEIFYSLQGEARTSGLPTVFVRLTGCPLRCQYCDSAYAFSGGEIMSLQAILERVASFNPRYICVTGGEPLAQPGCLPLLQQLCDAGYEVSLETSGALDISAVDERVSRVVDLKTPGSAEVGRNLYENINWLTSNDQVKFVICSREDYDWAVSKLIEYRLDERAGEVLFSPSYGQVDARALAEWIISDNLPVRMQLQLHKILWDDAPGH

SEQ ID NO: 33361 - protein, 215 aa, Pseudomonas saudiphocaensis
  misc_feature (1)..(215): tr|A0A078LQV2|A0A078LQV2_9PSED 7-carboxy-7-deazaguanine synthase OS=Pseudomonas saudiphocaensis OX=1499686 GN= queE PE=3 SV=1
MQNTLRITEIFYSLQGEARTSGLPTVFVRLTGCPLRCQYCDSAYAFSGGEIMSLQAILERVASFNPRYICVTGGEPLAQPGCLPLLQQLCDAGYEVSLETSGALDISAVDERVSRVVDLKTPGSAEVGRNLYENINWLTSNDQVKFVICSREDYDWAASKLIEYRLHERAGEVLFSPSYGQVDARALAEWIISDNLPVRMQLQLHKILWDDAPGH

SEQ ID NO: 33362 - protein, 218 aa, Pseudomonas savastanoi
  misc_feature (1)..(218): tr|A0A3M3TMK2|A0A3M3TMK2_PSESH 7-carboxy-7-deazaguanine synthase OS=Pseudomonas savastanoi pv. phaseolicola OX =319 GN=queE PE=3 SV=1
MADMQDTLRITEIFHSLQGETRTAGLPTVFVRLTGCPLRCQYCDSAYAFSGGTIQTLDDIVGQVAAYRPRYVCVTGGEPLAQPNAIPLLKRLCDAGYEVSLETSGALDISAIDPRVSRVVDLKTPGSKEVSRNRYENIELLTRNDQVKFVICSREDYDWAVSKLIQYGLERRAGEVLFSASHHELKGRDLADWIVADNLPVRLQMQLHKILWDDEPGR

SEQ ID NO: 33363 - protein, 218 aa, Pseudomonas savastanoi
  misc_feature (1)..(218): tr|A0A3M4RGW0|A0A3M4RGW0_PSESG 7-carboxy-7-deazaguanine synthase OS=Pseudomonas savastanoi pv. glycinea OX=318 GN=queE PE=3 SV=1
MAHMQETLRITEVFYSLQGETRTAGLPTVFVRLTGCPLRCQYCDSAYAFTGGTIQTLDDILGQVADYRPRYVCVTGGEPLAQPNAIPLLKRLCDAGYEVSLETSGALDIAAVDPRVSRVVDLKTPGSMEVTRNRYENIELLTPNDQVKFVLCSREDYDWAVSKLIQYGLERRAGEVLFSPSHHQLNARDLADWIVADNLPVRLQMQLHKFLWNDEPGR

SEQ ID NO: 33364 - protein, 215 aa, Pseudomonas segetis
  misc_feature (1)..(215): tr|A0A238ZPX1|A0A238ZPX1_9PSED 7-carboxy-7-deazaguanine synthase OS=Pseudomonas segetis OX=298908 GN=queE PE=3 SV=1
MQKTLRITEIFFSLQGETRTAGLPTVFVRLTGCPLRCQYCDTAYAFNGGELMSLDAIIEKVASYSPRYVCVTGGEPLAQPNCIALLERLCDAGFEVSLETSGALDVSAVDGRVSKVLDLKTPGSAEVARNRYENIDLLTPNDQVKFVICSREDYDWATTKLIQYRLNERAGEVLYSPSHHQVSARDLADWIVADNLPVRLQLQLHKILWNDEQGR

SEQ ID NO: 33365 - protein, 226 aa, Pseudomonas seleniipraecipitans
  misc_feature (1)..(226): tr|A0A1G7H7T7|A0A1G7H7T7_9PSED 7-carboxy-7-deazaguanine synthase OS=Pseudomonas seleniipraecipitans OX=640205 GN=queE PE=3 SV=1
MACFAVTPVALMKDTLRITEIFFSLQGETRTAGLPTVFVRLTGCPLRCQYCDTAYAFSGGEVLSLDDILEQVASYRPRYVCVTGGEPLAQPNCIPLLERLCDAGYEVSLETSGALDVSAVDTRVSKVVDLKTPGSAEMARNRYENIQYLQPRDQVKFVICSREDYDWSVSKLIQYGLADRVDEVLFSPSHQEVSGRQLAEWVIADNLPVRMQLQLHKILWNDEPGH

SEQ ID NO: 33366 - protein, 226 aa, Pseudomonas sihuiensis
  misc_feature (1)..(226): tr|A0A1H2L4U5|A0A1H2L4U5_9PSED 7-carboxy-7-deazaguanine synthase OS=Pseudomonas sihuiensis OX=1274359 GN=queE PE=3 SV=1
MACFVITLVATMQETLRITEIFYSLQGETRTAGLPTVFVRLTGCPLRCQYCDTAYAFSGGEIVTLDSILDQVAAYRPRYVCVTGGEPLAQPNCIPLLARLCDAGYEVSLETSGALDVSAVDARVSKVLDLKTPGSAEVQRNRYENVQWLTRNDQVKFVICSREDYDWAVSKLIEYDLAARAGEVLFSPSHKQVDARALADWIVADNLPVRLQLQLHKILWNDEPGH

SEQ ID NO: 33367 - protein, 215 aa, Pseudomonas silesiensis
  misc_feature (1)..(215): tr|A0A191Z306|A0A191Z306_9PSED 7-carboxy-7-deazaguanine synthase OS=Pseudomonas silesiensis OX=1853130 GN=queE PE=3 SV=1
MQDTLRITEVFYSLQGETRTAGLPTVFVRLTGCPLRCQYCDSAYAFTGGTVRPLDDILEQVAGFRPRYVCVTGGEPLAQPNAIPLLKQLCDAGYEVSLETSGALDISAVDPRVSRVVDLKTPGSKEAHRNRYENIELLTRNDQVKFVICSREDYDWAVSKLIQYGLDQRAGEVLFSPSHHDLNARDLADWVVADNLPVRLQLQLHKYLWNDEPGR

SEQ ID NO: 33368 - protein, 215 aa, Pseudomonas simiae
  misc_feature (1)..(215): tr|U1TQV0|U1TQV0_9PSED 7-carboxy-7-deazaguanine synthas e OS=Pseudomonas simiae OX=321846 GN=queE PE=3 SV=1
MQDTLRITEVFYSLQGETRTAGLPTVFVRLTGCPLRCQYCDSAYAFSGGTVRTLDDILEQVAGYKPRYVCVTGGEPLAQPNAIPLLKQLCDAGYEVSLETSGALDISAVDPRVSRVVDLKTPDSKEAHRNRYENIELLTANDQVKFVICSRDDYDWANSKLIQYGLDRRAGEVLFSPSHHDLSARDLADWVVADNLPVRLQLQLHKYLWNDEPGR

SEQ ID NO: 33369 - protein, 215 aa, Pseudomonas simiae; identical to SEQ ID NO: 33178
  misc_feature (1)..(215): tr|A0A1N7UEB9|A0A1N7UEB9_9PSED 7-carboxy-7-deazaguanine synthase OS=Pseudomonas simiae OX=321846 GN=queE PE=3 SV=1

SEQ ID NO: 33370 - protein, 215 aa, Pseudomonas soli
  misc_feature (1)..(215): tr|A0A1H9A9X2|A0A1H9A9X2_9PSED 7-carboxy-7-deazaguanine synthase OS=Pseudomonas soli OX=1306993 GN=queE PE=3 S V=1
MQDTLRITEVFYSLQGETRTAGLPTVFVRLTGCPLRCQYCDSAYAFNGGTIRTLESILEQVAGFKPRYVCVTGGEPLAQPNALPLLQQLCDAGYEVSLETSGALDISGVDTRVSRVVDLKTPGSEESHRNRYENIELLTGNDQVKFVICSREDYDWAVSKLIQYNLAERAGEVLFSPSHHQVSATDLADWIVADNLPVRFQLQLHKLLWNDEPGR

SEQ ID NO: 33371 - protein, 215 aa, Pseudomonas soli
  misc_feature (1)..(215): tr|A0A2V4I7M2|A0A2V4I7M2_9PSED 7-carboxy-7-deazaguanine synthase OS=Pseudomonas soli OX=1306993 GN=queE PE=3 S V=1
MQDTLRITEVFYSLQGETRTAGLPTVFVRLTGCPLRCQYCDSAYAFSGGTVRTLDSIVEQVAGFKPRYVCVTGGEPLAQPNALPLLQRLCDAGYDVSLETSGALDISGVDTRVSRVVDLKTPGSEESHRNRYENIELLTGNDQVKFVICSREDYDWAVSKLIQYNLAERAGEVLFSPSHHQVSATDLADWIVADNLPVRFQLQLHKLLWNDEPGR

SEQ ID NO: 33372 - protein, 224 aa, Pseudomonas songnenensis
  misc_feature (1)..(224): tr|A0A482UF76|A0A482UF76_9PSED 7-carboxy-7-deazaguanine synthase OS=Pseudomonas songnenensis OX=1176259 GN=que E PE=3 SV=1
MACLAVTPVADMTLRITEIFYSLQGETRTSGLPTVFVRLTGCPLRCQYCDTAYAFSGGELMSIDAIVERVAAYKPRYVCVTGGEPLAQPNCVPLLQRLCDAGYEVSLETSGALDIAVVDERVSRVVDLKTPGSAEVARNRYENIASLTRNDQVKFVICSREDYDWAVSKLIEYGLDRRAGEVLFSPSHGQVDVRALADWIVADNLPVRLQLQLHKIIWNDAPGH

SEQ ID NO: 33373 - protein, 215 aa, Pseudomonas sp.; identical to SEQ ID NO: 33171
  misc_feature (1)..(215): tr|A0A0S4HYI8|A0A0S4HYI8_9PSED 7-carboxy-7-deazaguanine synthase OS=Pseudomonas sp. URMO17WK12:I11 OX=1283291 GN=queE_1 PE=3 SV=1

SEQ ID NO: 33374 - protein, 215 aa, Pseudomonas sp.
  misc_feature (1)..(215): tr|A0A1T1HUE9|A0A1T1HUE9_9PSED 7-carboxy-7-deazaguanine synthase OS=Pseudomonas sp. MF4836 OX=1960827 GN=queE PE=3 SV=1
MQDTLRITEVFYSLQGETRTAGLPTVFVRLTGCPLRCQYCDSAYAFSGGTLRTLDSILEQVAEFRPRYVCVTGGEPLAQPNAIPLLKQLCDAGYEVSLETSGALDISAVDSRVSRVLDLKTPGSEEVRRNRYENIDLLTPNDQVKFVICSREDYDWAVSKLIQYGLERRAGEVLFSPSHHDLNARDLADWVVADNLPVRLQLQLHKYLWNDEPGR

SEQ ID NO: 33375 - protein, 226 aa, Pseudomonas straminea
  misc_feature (1)..(226): tr|A0A1I1U6P8|A0A1I1U6P8_PSEOC 7-carboxy-7-deazaguanine synthase OS=Pseudomonas straminea OX=47882 GN=queE PE= 3 SV=1
MACLAVTPGAPMKDTLRITEIFFSLQGEARTAGLPTVFVRLTGCPLRCQYCDTAYAFSGGELLTLDAILEQVASYRPRYVCVTGGEPLAQPNCIPLLEKLCDAGYDVSLETSGALDVAAVDPRVSKVVDLKTPGSAEMGRNRYENIVHLQPRDQVKFVICSREDYDWSVSKVIQYDLPARVGEVLFSPSHGQVSGRQLAEWVIADNLPVRMQLQLHKILWNDEPGH

SEQ ID NO: 33376 - protein, 224 aa, Pseudomonas stutzeri
  misc_feature (1)..(224): tr|L0GL61|L0GL61_PSEST 7-carboxy-7-deazaguanine synthas e OS=Pseudomonas stutzeri RCH2 OX=644801 GN=queE PE=3 S V=1
MACLAVTPVADMTLRITEIFYSLQGETRTSGLPTVFVRLTGCPLRCQYCDTAYAFSGGELMSIDAIVERVAAYNPRYVCVTGGEPLAQPNCVPLLQRLCDAGYEVSLETSGALDISVVDERVSRVVDLKTPGSAEVARNRYENIASLTQNDQVKFVICSREDYDWAVSKLIEYGLDRRAGEVLFSPSHGQVDVRALADWIVADNLPVRLQLQLHKIIWNDAPGH

SEQ ID NO: 33377 - protein, 215 aa, Pseudomonas stutzeri
  misc_feature (1)..(215): tr|I4JI26|I4JI26_PSEST 7-carboxy-7-deazaguanine synthas e OS=Pseudomonas stutzeri TS44 OX=477228 GN=queE PE=3 S V=1
MHQTLRITEIFYSLQGETRTSGLPTVFVRLTGCPLRCQYCDTAYAFNGGELMTLEAILERVAAYSPRYVCVTGGEPLAQPNCLPLLQRLCDVGYAVSLETSGALDIAGVDERVSRVLDLKTPGSAEVGRNRYENIALLTPSDQVKFVICSREDYDWAVSKLIEYRLEQRAGEVLFSPSHGQVDVRALADWIVSDNLPVRLQLQLHKIIWNDAPGH

SEQ ID NO: 33378 - protein, 215 aa, Pseudomonas synxantha
  misc_feature (1)..(215): tr|I4L4B3|I4L4B3_9PSED 7-carboxy-7-deazaguanine synthas e OS=Pseudomonas synxantha BG33R OX=96901 GN=queE PE=3 SV=1
MQDTLRITEVFYSLQGETRTAGLPTVFVRLTGCPLRCQYCDSAYAFSGGTVRTLDDILEQVAGYRPRYVCVTGGEPLAQPNAIPLLKQLCDAGYEVSLETSGALDISAVDPRVSRVVDLKTPDSKEAHRNRYENIDLLTANDQVKFVICSRDDYDWATSKLIQYGLERRAGEVLFSPSHHDLNARELADWVVADNLPVRLQLQLHKYLWNDEPGR

SEQ ID NO: 33379 - protein, 215 aa, Pseudomonas synxantha; identical to SEQ ID NO: 33283
  misc_feature (1)..(215): tr|A0A0E3K4G8|A0A0E3K4G8_9PSED 7-carboxy-7-deazaguanine synthase OS=Pseudomonas synxantha OX=47883 GN=queE PE= 3 SV=1

SEQ ID NO: 33380 - protein, 215 aa, Pseudomonas syringae
  misc_feature (1)..(215): tr|W0MZ43|W0MZ43_PSESX 7-carboxy-7-deazaguanine synthas e OS=Pseudomonas syringae CC1557 OX=1357279 GN=queE PE= 3 SV=1
MQDTLRITEIFHSLQGETRTAGLPTVFVRLTGCPLRCQYCDSAYAFSGGTLQTLDDIVEQVASYRPRYVCVTGGEPLAQPNAIPLLKRLCDAGYEVSLETSGALDISAVDPRVSRVVDLKTPGSKEVTRNRYENMELLTPNDQVKFVICSREDYDWAVSKLIQYGLDRRAGEVLFSASHHELKGRDLADWIVADNLPVRLQMQLHKILWDDEPGR

SEQ ID NO: 33381 - protein, 218 aa, Pseudomonas syringae
  misc_feature (1)..(218): tr|A0A0P9Y2E3|A0A0P9Y2E3_PSEYM 7-carboxy-7-deazaguanine synthase OS=Pseudomonas syringae pv. maculicola OX=595 11 GN=queE PE=3 SV=1
MADMQETLRITEIFHSLQGETRTAGLPTVFVRLTGCPLRCQYCDSAYAFSGGTIQTLDDIIGQVASYRPRYVCVTGGEPLAQPNAIPLLKRLCDAGYEVSLETSGALDISAVDPRVSRVVDLKTPGSKEVARNRYENMALLTPNDQVKFVICSREDYDWAVSKLIQYGLDRRAGEVLFSASHHELKGRDLADWIVADNLPVRLQMQLHKILWDDEPGR

SEQ ID NO: 33382 - protein, 215 aa, Pseudomonas taeanensis
  misc_feature (1)..(215): tr|A0A0A1YFE2|A0A0A1YFE2_9PSED 7-carboxy-7-deazaguanine synthase OS=Pseudomonas taeanensis MS-3 OX=1395571 GN= queE PE=3 SV=1
MQKNLRITEIFYSLQGETRTAGLPTVFVRLTGCPLRCQYCDTAYAFSGGEVMSLDAIVEQIAGYKPRYICVTGGEPLAQPNCIPLLERLCDAGYEVSLETSGALDVSAVDPRVSKVLDLKTPGSAEVARNRYENIELLTPNDQVKFVICSREDYDWAVSKLIQYRLDQRAGEVWFSPSHQQLNARALADWIVADNLPVRLQMQLHKILWNDEPGH

SEQ ID NO: 33383 - protein, 211 aa, Pseudomonas taeanensis
  misc_feature (1)..(211): tr|A0A0A1YED9|A0A0A1YED9_9PSED 7-carboxy-7-deazaguanine synthase OS=Pseudomonas taeanensis MS-3 OX=1395571 GN= queE PE=3 SV=1
MTYSIKEMFYTLQGEGNQAGRPAVFCRFSGCNLWSGREQDRASAICTFCDTDFVGMDGMGGGKFTTANILALAIDSLWPISHQDHKYVVLTGGEPLLQVDDSLVEALHEHGFIVAVETNGTIIPPNGIDWVCVSPKSTAELKITQGDELKLVFPQTEALPEKFEHLTFNHFYLQPMDGPKAHRNTKLTIEYCKAHPKWKLGLQMHKALMIP

SEQ ID NO: 33384 - protein, 215 aa, Pseudomonas taetrolens
  misc_feature (1)..(215): tr|A0A0J6JR33|A0A0J6JR33_PSETA 7-carboxy-7-deazaguanine synthase OS=Pseudomonas taetrolens OX=47884 GN=queE PE =3 SV=1
MQDTLRITEVFYSLQGETRTAGLPTVFVRLTGCPLRCGYCDSAYAFSGGTIRTLDSILEQVADFRPRYVCVTGGEPLAQPNAIPLLKQLCDAGYEVSIETSGALDISAVDQRVSRVLDLKTPGSKESHRNLYENIALLTPNDQVKFVICSREDYDWAVSKLIEYGLERRAGEVLFSPSHHDLPARDLADWIVADNLPVRLQMQLHKYLWNDEPGR

SEQ ID NO: 33385 - protein, 218 aa, Pseudomonas taiwanensis
  misc_feature (1)..(218): tr|V7D5F3|V7D5F3_9PSED 7-carboxy-7-deazaguanine synthas e OS=Pseudomonas taiwanensis SJ9 OX=1388762 GN=queE PE= 3 SV=1
MASMQDTLRITEVFYSLQGETRTAGLPTVFVRLTGCPLRCQYCDSAYAFSGGTVRTLDSILEQVAGFKPRYVCVTGGEPLAQPNALPLLQRLCDAGYEVSLETSGALDIAGTDTRVSRVVDLKTPGSEESHRNRYENIEQLTRNDQVKFVICSREDYDWAVSKLIQYNLAERAGEVLFSPSHHQVNASELADWIVADNLPVRFQLQLHKLLWNDEPGR

SEQ ID NO: 33386 - protein, 215 aa, Pseudomonas thivervalensis
  misc_feature (1)..(215): tr|A0A176NRN0|A0A176NRN0_9PSED 7-carboxy-7-deazaguanine synthase OS=Pseudomonas thivervalensis OX=86265 GN=que E PE=3 SV=1
MQDTLRITEVFYSLQGETRTAGLPTVFVRLTGCPLRCQYCDSAYAFSGGTVRTLDDILEQVAGYRPRYVCVTGGEPLAQPNAIPLLKQLCDAGYEVSLETSGALDISAVDPRVSRVVDLKTPGSKEAHRNRYENIELLTPNDQVKFVICSREDYDWAVSKLIQYGLDQRAGEVLLSPSHHDLSARDLADWVVADNLPVRLQLQLHKYLWNDEPGR

SEQ ID NO: 33387 - protein, 215 aa, Pseudomonas tolaasii
  misc_feature (1)..(215): tr|A0A2N0DZU5|A0A2N0DZU5_PSETO 7-carboxy-7-deazaguanine synthase OS=Pseudomonas tolaasii NCPPB 2192 OX=564423 GN=queE PE=3 SV=1
MQDTLRITEVFYSLQGETRTAGLPTVFVRLTGCPLRCQYCDSAYAFSGGTVRTLDDILEQVAGFKPRYVCVTGGEPLAQPNAIPLLKQLCDAGYEVSLETSGALDISAVDPRVSRVVDLKTPGSKEAHRNLYDNMDLLTANDQVKFVICSRDDYDWAASKLIQYGLDRRAGEVLFSPSHHDLNARELADWVVADNLPVRLQLQLHKYLWNDEPGR

SEQ ID NO: 33388 - protein, 226 aa, Pseudomonas toyotomiensis
  misc_feature (1)..(226): tr|A0A1I5MSV9|A0A1I5MSV9_9PSED 7-carboxy-7-deazaguanine synthase OS=Pseudomonas toyotomiensis OX=554344 GN=que E PE=3 SV=1
MACFVITLVATMQETLRITEIFYSLQGETRTAGLPTVFVRLTGCPLRCQYCDTAYAFSGGEIVTLDSILDQVAAYRPRYICVTGGEPLAQPNCIPLLARLCDAGYEVSLETSGALDVSAVDARVSKVLDLKTPGSAEVQRNRYENIEWLTDNDQVKFVICSREDYDWAVSKLIEYDLAARAGEVLFSPSHKQVDARALADWIVADNLPVRLQLQLHKILWNDEPGH

SEQ ID NO: 33389 - protein, 215 aa, Pseudomonas toyotomiensis
  misc_feature (1)..(215): tr|A0A2G5G4R5|A0A2G5G4R5_9PSED 7-carboxy-7-deazaguanine synthase OS=Pseudomonas toyotomiensis OX=554344 GN=que E PE=3 SV=1
MQETLRITEIFYSLQGETRTAGLPTVFVRLTGCPLRCQYCDTAYAFSGGEIVTLDSILDQVAAYRPRYICVTGGEPLAQPNCIPLLARLCDAGYEVSLETSGALDVSAVDARVSKVLDLKTPGSAEVQRNRYENIEWLTDNDQVKFVICSREDYDWAVSKLIEYDLAARAGEVLFSPSHKQVDARALADWIVADNLPVRLQLQLHKILWNDEPGH

SEQ ID NO: 33390 - protein, 218 aa, Pseudomonas tremae; identical to SEQ ID NO: 33215
  misc_feature (1)..(218): tr|A0A0Q0BYB2|A0A0Q0BYB2_9PSED 7-carboxy-7-deazaguanine synthase OS=Pseudomonas tremae OX=200454 GN=queE PE=3 SV=1

SEQ ID NO: 33391 - protein, 215 aa, Pseudomonas trivialis
  misc_feature (1)..(215): tr|A0A0H5AE83|A0A0H5AE83_9PSED 7-carboxy-7-deazaguanine synthase OS=Pseudomonas trivialis OX=200450 GN=queE PE =3 SV=1
MQDTLRITEVFYSLQGETRTAGLPTVFVRLTGCPLRCQYCDSAYAFSGGTVRTLDDILKQVAGYKPRYVCVTGGEPLAQPNAIPLLKQLCDAGYEVSLETSGALDISAVDPRVSRVVDLKTPGSKEAHRNRYENIDLLTANDQVKFVICSRDDYDWANSKLIQYGLDRRAGEVLFSPSHHDLNARDLADWVVADNLPVRLQLQLHKYLWNDEPGR

SEQ ID NO: 33392 - protein, 215 aa, Pseudomonas trivialis
  misc_feature (1)..(215): tr|A0A0R2ZMN8|A0A0R2ZMN8_9PSED 7-carboxy-7-deazaguanine synthase OS=Pseudomonas trivialis OX=200450 GN=queE PE =3 SV=1
MQDTLRITEVFYSLQGETRTAGLPTVFVRLTGCPLRCQYCDSAYAFSGGTVRTLDDILEQVAGYRPRYVCVTGGEPLAQPNAIPLLKQLCDAGYEVSLETSGALDISTVDPRVSRVVDLKTPGSREAHRNLYENLDLLTANDQVKFVICSREDYDWANSKLIQYGLDRRAGEVLFSPSHHDLNARDLADWVVADNLPVRLQLQLHKYLWNDEPGR

SEQ ID NO: 33393 - protein, 215 aa, Pseudomonas umsongensis
  misc_feature (1)..(215): tr|A0A1H2C720|A0A1H2C720_9PSED 7-carboxy-7-deazaguanine synthase OS=Pseudomonas umsongensis OX=198618 GN=queE PE=3 SV=1
MQDTLRITEVFYSLQGETRTAGLPTVFVRLTGCPLRCQYCDSAYAFTGGTLRTLDDILEQVAGFRPRYVCVTGGEPLAQPNAIPLLKRLCDAGYEVSLETSGSIDISAVDSRVSRVVDLKTPGSKEAHRNRYENIELLTPNDQVKFVICSREDYDWSVSKLIQYGLDQRAGEVLFSPSHHDLNARDLADWVVADNLPVRLQLQLHKYLWNDEPGR

SEQ ID NO: 33394 - protein, 215 aa, Pseudomonas vancouverensis
  misc_feature (1)..(215): tr|A0A1H2P7C3|A0A1H2P7C3_9PSED 7-carboxy-7-deazaguanine synthase OS=Pseudomonas vancouverensis OX=95300 GN=que E PE=3 SV=1
MQDTLRITEVFYSLQGETRTAGLPTVFVRLTGCPLRCQYCDSAYAFTGGTIRTLDDILEQVAGFRPRYVCVTGGEPLAQPNAIPLLKRLCDAGYEVSLETSGSIDISAVDSRVSRVVDLKTPGSKEAHRNRYENIELLTPNDQVKFVICSREDYDWSVSKLIQYGLDQRAGEVLFSPSHHDLNARDLADWVVADNLPVRLQLQLHKYLWNDEPGR

SEQ ID NO: 33395 - protein, 215 aa, Pseudomonas veronii; identical to SEQ ID NO: 33327
  misc_feature (1)..(215): tr|A0A1D3K2R2|A0A1D3K2R2_9PSED 7-carboxy-7-deazaguanine synthase OS=Pseudomonas veronii 1YdBTEX2 OX=1295141 GN =queE PE=3 SV=1

SEQ ID NO: 33396 - protein, 215 aa, Pseudomonas veronii; identical to SEQ ID NO: 33327
  misc_feature (1)..(215): tr|A0A0R3B9D5|A0A0R3B9D5_9PSED 7-carboxy-7-deazaguanine synthase OS=Pseudomonas veronii OX=76761 GN=queE PE=3 SV=1

SEQ ID NO: 33397 - protein, 215 aa, Pseudomonas versuta
  misc_feature (1)..(215): tr|A0A0M4QQY6|A0A0M4QQY6_9PSED 7-carboxy-7-deazaguanine synthase OS=Pseudomonas versuta OX=1788301 GN=queE PE= 3 SV=1
MQDTLRITEVFYSLQGETRTAGLPTVFVRLTGCPLRCQYCDSAYAFSGGTVRTLDSILEQVAGFRPRYVCVTGGEPLAQPNAIPLLKQLCDAGYEVSIETSGALDISAVDPRVSRVLDLKTPGSKESHRNLYENIALLTPNDQVKFVICSREDYDWAVSKLIEYGLERRAGEVLFSPSHHDLKASDLADWIVADNLPVRLQMQLHKYLWNDEPGR

SEQ ID NO: 33398 - protein, 215 aa, Pseudomonas viridiflava
  misc_feature (1)..(215): tr|A0A1Y6JNM7|A0A1Y6JNM7_PSEVI 7-carboxy-7-deazaguanine synthase OS=Pseudomonas viridiflava OX=33069 GN=queE P E=3 SV=1
MQDTLRITEIFHSLQGETRTAGLPTVFVRLTGCPLRCQYCDSAYAFTGGTIHTLDDIMGQVAAYRPRYVCVTGGEPLAQPNAIPLLKRLCDEGYEVSLETSGALDISAVDPRVSRVVDLKTPGSKEVTRNRYENMELLTPNDQVKFVICSREDYDWAVSKLIQYGLDRRAGEVLFSASHHELKGRELADWIVADNLPVRLQMQLHKFLWDDEPGR

SEQ ID NO: 33399 - protein, 215 aa, Pseudomonas viridiflava
  misc_feature (1)..(215): tr|A0A2G0YHJ6|A0A2G0YHJ6_PSEVI 7-carboxy-7-deazaguanine synthase OS=Pseudomonas viridiflava OX=33069 GN=queE P E=3 SV=1
MQDTLRITEIFHSLQGETRTAGLPTVFVRLTGCPLRCQYCDSAYAFTGGTIQTLDDIMGQVAAYRPRYVCVTGGEPLAQPNAIPLLKRLCDEGYEVSLETSGALDISAVDPRVSRVVDLKTPGSKEVTRNRYENMELLTPNDQVKFVICSREDYDWAVSKLIQYGLDRRAGEVLFSASHHELKGRDLADWIVADNLPVRLQMQLHKFLWDDEPGR

SEQ ID NO: 33400 - protein, 210 aa, Pseudomonas vranovensis
  misc_feature (1)..(210): tr|A0A423DU80|A0A423DU80_9PSED 7-carboxy-7-deazaguanine synthase OS=Pseudomonas vranovensis OX=321661 GN=queE PE=3 SV=1
MTYSVKEIFYTLQGEGLQAGRPAVFCRFTGCNLWSGREADRSQAVCQFCDTDFVGTNGTLGGKYLTAEALVERIFSQWPVGQTHRYVVLTGGEPLLQVDDDLINALHNQDFEVAVETNGTITAPSGIDWICVSPKAGTEWVQRSGDELKLVYPQPGLLPDTITANDFKYYLLQPMDGPLQRQNTRSAIAYCQANTKWRLSVQTHKILEIR

SEQ ID NO: 33401 - protein, 215 aa, Pseudomonas vranovensis
  misc_feature (1)..(215): tr|A0A423DSQ2|A0A423DSQ2_9PSED 7-carboxy-7-deazaguanine synthase OS=Pseudomonas vranovensis OX=321661 GN=queE PE=3 SV=1
MQDTLRITEVFYSLQGETRTAGLPTVFVRLTGCPLRCQYCDSEYAFSGGSIRSLDSILEQVAGFKPRYVCVTGGEPLAQPNAIPLLKQLCDAGYEVSLETSGALDISRVDTRVSRVVDLKTPGSEEVHRNRYENIELLTPNDQVKFVICSREDYDWAVSKLIQYGLEKRAGDVLFSPSHHQVSATDLADWIVADNLPVRFQMQLHKLLWNDEPGR

SEQ ID NO: 33402 - protein, 215 aa, Pseudomonas wadenswilerensis
  misc_feature (1)..(215): tr|A0A380T5P2|A0A380T5P2_9PSED 7-carboxy-7-deazaguanine synthase OS=Pseudomonas wadenswilerensis OX=1785161 GN =queE PE=3 SV=1
MQDTLRITEVFYSLQGETRTAGLPTVFVRLTGCPLRCQYCDSEYAFSGGSIRTLDSILEQVAGFKPRYVCVTGGEPLAQPNAIPLLKQLCDAGYDVSLETSGALDISRVDTRVSRVVDLKTPGSEEVHRNRYENIELLTRNDQVKFVICSREDYDWAVSKLIQYGLEKRAGEVLFSPSHHQVSATDLADWIVADNLPVRFQMQLHKLLWNDEPGR

SEQ ID NO: 33403 - protein, 215 aa, Pseudomonas weihenstephanensis
  misc_feature (1)..(215): tr|A0A0J6J4F2|A0A0J6J4F2_9PSED 7-carboxy-7-deazaguanine synthase OS=Pseudomonas weihenstephanensis OX=1608994 GN=queE PE=3 SV=1
MQDTLRITEVFYSLQGETRTAGLPTVFVRLTGCPLRCGYCDSAYAFSGGTVRSLDSILEQVAGFRARYVCVTGGEPLAQPNAIPLLKQLCDAGYEVSIETSGALDISAVDPRVSRVLDLKTPDSKESHRNLYDNIALLTRHDQVKFVICSRDDYDWAVSKLIEYGLERRAGEVLFSPSHHDLPARDLADWIVADNLPVRLQMQLHKYLWNDEPGR

SEQ ID NO: 33404 - protein, 215 aa, Pseudomonas xanthomarina
  misc_feature (1)..(215): tr|A0A1C2DQT4|A0A1C2DQT4_9PSED 7-carboxy-7-deazaguanine synthase OS=Pseudomonas xanthomarina OX=271420 GN=queE PE=3 SV=1
MHHTLRITEIFYSLQGETRTSGLPTVFVRLTGCPLRCQYCDSAYAFSGGEIMSLETILERVAAYKPRYVCVTGGEPLAQPACQALLQRLCDAGYEVSLETSGALSIAEIDQRVSRVVDLKTPGSGEVGRNLYANVEHLSRNDQVKFVICSREDYDWAVSKLIEYRLDARAGEVLFSPSYGQIDLRALADWIVSDNLPVRLQLQLHKILWNDAPGH

SEQ ID NO: 33405 - protein, 224 aa, Pseudomonas xanthomarina; identical to SEQ ID NO: 33277
  misc_feature (1)..(224): tr|A0A098FT09|A0A098FT09_9PSED 7-carboxy-7-deazaguanine synthase OS=Pseudomonas xanthomarina OX=271420 GN=queE PE=3 SV=1

SEQ ID NO: 33406 - protein, 219 aa, Pseudomonas xinjiangensis
  misc_feature (1)..(219): tr|A0A1H1UGX7|A0A1H1UGX7_9PSED 7-carboxy-7-deazaguanine synthase OS=Pseudomonas xinjiangensis OX=487184 GN=que E PE=3 SV=1
MPDQSNPTLRLTEIFYSIQGESRTLGLPTVFVRLTGCPLRCNYCDTAYAFSGGEVMSLDAILDKVRSFSPRYICVTGGEPLAQPNCLTLLQQLCDAGYEVSLETSGALDVSGVDTRISRVMDLKTPDSGEAHRNLYTNVEHLGLNDQVKFVICSRDDYDWARFQTDRFQLPGRVGEVLFSPSHGQVEARQLAEWIVADNLPVRFQMQLHKYLWNDEPGH

SEQ ID NO: 33407 - protein, 215 aa, Pseudomonas yamanorum
  misc_feature (1)..(215): tr|A0A143GCJ0|A0A143GCJ0_9PSED 7-carboxy-7-deazaguanine synthase OS=Pseudomonas yamanorum OX=515393 GN=queE PE =3 SV=1
MQDTLRITEVFYSLQGETRTAGLPTVFVRLTGCPLRCQYCDSAYAFSGGTVRTLDDILEQVAGYRPRYVCVTGGEPLAQPNAIPLLKQLCDAGYEVSLETSGALDISAVDPRVSRVVDLKTPGSKEAHRNRYENIELLTANDQVKFVICSREDYDWATSKLIQYGLDRRAGEVLFSPSHHDLNARDLADWVVADNLPVRLQLQLHKYLWNDEPGR

SEQ ID NO: 33408 - protein, 216 aa, Pseudomonas zeshuii; identical to SEQ ID NO: 33292
  misc_feature (1)..(216): tr|A0A1M6AHW8|A0A1M6AHW8_9PSED 7-carboxy-7-deazaguanine synthase OS=Pseudomonas zeshuii OX=1076620 GN=queE PE= 3 SV=1

SEQ ID NO: 33409 - protein, 215 aa, Pseudomonas zhaodongensis
  misc_feature (1)..(215): tr|A0A365PXQ5|A0A365PXQ5_9PSED 7-carboxy-7-deazaguanine synthase OS=Pseudomonas zhaodongensis OX=1176257 GN=qu eE PE=3 SV=1
MDHTLRITEIFHSLQGETRTTGLPTVFVRLTGCPLRCQYCDTAYAFGGGEVIPLDAILARVAAYRPRYVCVTGGEPLAQPSCIPLLRHLCDAGYEVSLETSGALDISATDVRVSRVVDLKTPGSAEVARNRYENIGHLTRNDQVKFVICSREDYDWAVTKLIEYRLETRAGEVLFSPSHGQVEARALADWIVADNLPVRLQLQLHKILWNDAAGH

SEQ ID NO: 33410 - protein, 215 aa, Pseudomonas zhaodongensis
  misc_feature (1)..(215): tr|A0A3M2HVT8|A0A3M2HVT8_9PSED 7-carboxy-7-deazaguanine synthase OS=Pseudomonas zhaodongensis OX=1176257 GN=qu eE PE=3 SV=1
MHHTLRITEIFFSLQGETRTSGLPTVFVRLTGCPLRCQYCDTAYAFSGGEIMPLDVILQQVASYNPRYVCVTGGEPLAQPNCLPLLRQLCDAGYEVSLETSGALDISNTDERVSRVVDLKTPGSAESGRNLYDNIGHLTANDQIKFVICSREDYDWAVSKLIEYRLDARVAEVLFSPSQGQLDARLLAEWIVADNLPVRLQLQLHKILWNDAPGH

SEQ ID NO: 33411 - protein, 241 aa, Pseudonocardia autotrophica
  misc_feature (1)..(241): tr|A0A1Y2MGK1|A0A1Y2MGK1_PSEAH 7-carboxy-7-deazaguanine synthase OS=Pseudonocardia autotrophica OX=2074 GN=que E PE=3 SV=1
MTAYRGVLRPGASELLVSEVFGPTLQGEGPSAGRAAVFLRLGMCNLACAWCDTSYTWDRSSHDLAAELRTTAVVDLVRDVLSRAAPLVVVTGGEPLLQRTTLLSFVRAVSAAGRRVEFETSGSVAPGGLATLVDRFVVSPKLSNSRQSERARLRWGVLHEFAALRSTEFKFVVSSPSDLAEVDEIAARLALAPQRIWVMPEGTTREAVIDGLAALAPGVNRRGWSLSGRMHVLLWGNERAR

SEQ ID NO: 33412 - protein, 239 aa, Pseudonocardia sp.
  misc_feature (1)..(239): tr|A0A1B1ZWJ8|A0A1B1ZWJ8_9PSEU 7-carboxy-7-deazaguanine synthase OS=Pseudonocardia sp. HH130630-07 OX=1690815 GN=queE PE=3 SV=1
MAAPSGRPARAADPGQGELLLAERFVSVQGEGPLCGQRCAFVRLSRCNLACTWCDTPETWDWRRYDPAAVTVRAGVGEVADWVGGVGVDLLVLTGGEPLLQQPGLGALLDQVSAQVRVQVETNGTRVPEPGLADRVDLWVVSPKLANSGMPIERRLVPAALEALRATGRAAFKFVVSDPAVDVAEIAALVGRYGLGPVWVMPEATTPSAVVEGTAALLETAAEHGWNLSTRLHVLAGAR

SEQ ID NO: 33413 - protein, 147 aa, Pseudopedobacter saltans
  misc_feature (1)..(147): tr|A0A2W5F7H8|A0A2W5F7H8_9SPHI 7-carboxy-7-deazaguanine synthase QueE (Fragment) OS=Pseudopedobacter saltans O X=151895 GN=DI598_01750 PE=3 SV=1
MESFYTIQGEGFYQGHAAYFIRLGGCDVGCVWCDVKDSWDADIHPKFSIEEIVSKALEEVGGNAQNIVAVVTGGEPLMHQLDGLTDALQAAGFQTNIETSGAHPLSGHWDWICLSPKKFKAPLEEVIQAANELKVIVYNKSDFAWAE

SEQ ID NO: 33414 - protein, 207 aa, Pseudopedobacter saltans
  misc_feature (1)..(207): tr|F0SBI7|F0SBI7_PSESL 7-carboxy-7-deazaguanine synthas e OS=Pseudopedobacter saltans (strain ATCC 51119 / DSM 12145 / JCM 21818 / LMG 10337 / NBRC 100064 / NCIMB 136 43) OX=762903 GN=queE PE=3 SV=1
MKNNIPEDGSMLPLMEEFYTIQGEGFNTGKAAYFIRLGGCDVGCHWCDVKESWDAELHPLTSADKIVENAEKYPGKAVVITGGEPLLYNLDYLTAKLKEKGILTFIETSGAYPISGSWDWVCLSPKKFKSPSPNIAQHADELKIIVFNKSDFEWAEAHARTVGDKCKLYLQPEWSKSQDMLPLIIEYVKENPKWEISLQTHKYLNIP

SEQ ID NO: 33415 - protein, 207 aa, Pseudosphingobacterium domesticum
  misc_feature (1)..(207): tr|A0A1H7HNA1|A0A1H7HNA1_9SPHI 7-carboxy-7-deazaguanine synthase OS=Pseudosphingobacterium domesticum OX=40702 2 GN=queE PE=3 SV=1
MSNQVPADGTLLPLMEEFYTIQGEGYHTGKAAYFIRLGGCDVGCHWCDVKESWDADLHPLTKADTIIEHATRHPAKTVVITGGEPLIYNLDYLTKGLQEAGIKTFMETSGAYPLSGFWDWICLSPKKFKEARPDVIAAAGELKVIVFNKSDFDWAEQYAAQIPIGRKLYLQPEWSKAAQMTPLIIEYVKANPKWEISLQTHKYLNIP

SEQ ID NO: 33416 - protein, 240 aa, Pseudovibrio axinellae
  misc_feature (1)..(240): tr|A0A165UN78|A0A165UN78_9RHOB 7-carboxy-7-deazaguanine synthase OS=Pseudovibrio axinellae OX=989403 GN=queE P E=3 SV=1
MTKLSISEIFGPTIQGEGALIGEPTIFVRAGGCDYRCSWCDTLHAVDSAYRHTWQQMDSLDAWQRIEELSSGQPITISLSGGNPAIQDFSELIRLGKAKGYKFAIETQGSVARDWFAELDTLVLSPKPPSSGETVDWNKFDACLDAALNTVACVIKIVIFNNADYEWAKTVSERYSYMPIYLQPGNHTPPEPEDDDATIDMDGIMDRMHWLVEKTVADKWFKPRILPQLHVLLWGNKRGV

SEQ ID NO: 33417 - protein, 240 aa, Pseudovibrio denitrificans
  misc_feature (1)..(240): tr|A0A1I6XPK4|A0A1I6XPK4_9RHOB 7-carboxy-7-deazaguanine synthase OS=Pseudovibrio denitrificans OX=258256 GN=qu eE PE=3 SV=1
MSKLSISEIFGPTIQGEGALIGEPTVFVRAGGCDYRCSWCDTLHAVDSAYRHTWDQMDSEDVWKKVEELSCGQPITVSLSGGNPAIQDFSKLIALGKAKGYKFAIETQGSVARDWFADLDTLVLSPKPPSSGEIVNWDKFDACLDAALNTATCVIKVVVFDDVDYDWAKDVSERYPYLPMYLQPGNHTPPPPEDDDATIDMDGIMDRMHWLVDKTVSDQWFKPRILPQLHVLLWGNKRGV

SEQ ID NO: 33418 - protein, 240 aa, Pseudovibrio sp.
  misc_feature (1)..(240): tr|A0A1H1FAI9|A0A1H1FAI9_9RHOB 7-carboxy-7-deazaguanine synthase OS=Pseudovibrio sp. Tun.PSC04-5.I4 OX=1798213 GN=queE PE=3 SV=1
MTKLSISEIFGPTIQGEGALMGEPTVFVRTGGCDYRCVWCDTLHAVDSAYRHTWRPMEPEDVWSEVETLTGHTPLTVSLSGGNPAIQDFSKLIEMGKSKGYRFALETQGSVAKDWFAQLDTLVLSPKPPSSGETVDWIKFELCLTKAGDDTNSLLKIVVFDEVDYNWARKVHERFPHLPLYLQPGNHTPPPPDDEDARIDMDGVMERMHWLIEKTLADRWFTPRILPQLHVLLWGNKRGV

SEQ ID NO: 33419 - protein, 240 aa, Pseudovibrio sp.
  misc_feature (1)..(240): tr|A0A165UC62|A0A165UC62_9RHOB 7-carboxy-7-deazaguanine synthase OS=Pseudovibrio sp. Ad26 OX=989410 GN=queE PE =3 SV=1
MSKLSISEIFGPTIQGEGALIGEPTVFVRAGGCDYRCSWCDTLHAVDSAYRHTWDQMDSADVWHKIEELSGHQPITVSLSGGNPAIQDFSQVISLGKAKGYKFAVETQGSVARDWFADLDTLVLSPKPPSSGETVNWDKFDACLDAAINSATCVIKVVVFDDVDYDWAKQVGERYPYLPMYLQPGNHTPPPPEDDDAQIDMDGIMDRMHWLVDKTVSDQWFKPRILPQLHVLLWGNKRGV

SEQ ID NO: 33420 - protein, 227 aa, Pseudoxanthomonas composti
  misc_feature (1)..(227): tr|A0A4Q1JVS7|A0A4Q1JVS7_9GAMM 7-carboxy-7-deazaguanine synthase OS=Pseudoxanthomonas composti OX=2137479 GN=q ueE PE=3 SV=1
MNAAAIPSEIVQSPLDRLKITEIFLSLQGEADAAGWPTVFVRLTGCPLRCQYCDTAYAFHGGTWWEIEDILAEVARHGVRHVCVTGGEPLAQKRCIGLLQRLCDAGLDVSLETSGALDIGAVDPRVSRVLDIKTPGSAEEHRNRWENLPLLTARDQVKFVLCSRADYEWARELVLREALHQRCMVLFSPSKSEVTPRELADWIVADRLPVRFQMQLHKLLWNDEPGR

SEQ ID NO: 33421 - protein, 226 aa, Pseudoxanthomonas dokdonensis
  misc_feature (1)..(226): tr|A0A0R0CY80|A0A0R0CY80_9GAMM 7-carboxy-7-deazaguanine synthase OS=Pseudoxanthomonas dokdonensis OX=344882 GN =queE PE=3 SV=1
MNAVAPPAVATPAADRLKLTEIFLSLQGEANTAGWPTVFVRLTGCPLRCQYCDTAYAFQGGQWWNIDDILAEVARHGVRHVCVTGGEPLAQKRCIQLLQKLCDAGYQVSLETSGALDISEVDTRVSRVVDLKTPDSLEMHRNLLDNIAQLTPHDQVKFVLCSRGDYEWAKQMLQQHQLPQRCDVLFSPSKSELSPRELADWIVADRLPVRFQMQLHKLLWNDEPGR

SEQ ID NO: 33422 - protein, 229 aa, Pseudoxanthomonas indica
  misc_feature (1)..(229): tr|A0A1T5LH98|A0A1T5LH98_9GAMM 7-carboxy-7-deazaguanine synthase OS=Pseudoxanthomonas indica OX=428993 GN=queE PE=3 SV=1
MSAVDPTEPAVPPASSQERLKLTEIFLSLQGEANAVGWPTVFVRLTGCPLRCQYCDTEYAFYGGQWWDIDAILAEVARHGVRHVCVTGGEPLSQKRCLVLLRRLCDAGYDVSLETSGAIDIAEVDSRVSRVVDLKTPGSREMARNRLENLPLLTARDQVKFVLCGREDYEWARDMLTEHRLAERCDVLFSPSKSELAPRDLADWIVADRLPVRFQMQLHKLLWNDEPGR

SEQ ID NO: 33423 - protein, 227 aa, Pseudoxanthomonas sp.
  misc_feature (1)..(227): tr|A0A4Q8LGE3|A0A4Q8LGE3_9GAMM 7-carboxy-7-deazaguanine synthase OS=Pseudoxanthomonas sp. NML171200 OX=2480816 GN=queE PE=3 SV=1
MNAAAVPSHIEQSPQDRLKITEIFVSLQGEADAAGWPTVFVRLTGCPLRCQYCDTAYAFHGGTWWEIEDILAEVARAGVRHVCVTGGEPLAQKRCIGLLARLCDAGYDVSLETSGALDVSQVDPRVSRVVDIKTPGSAEEHRNRWDNLPLLTARDQVKFVLCSRADYEWARQVVREHALDQRCAVLLSPSKDQVSPRALADWIVEDRLPVRFQMQLHKLLWNDEPGR

SEQ ID NO: 33424 - protein, 145 aa, Pseudoxanthomonas sp.
  misc_feature (1)..(145): tr|A0A426H5B8|A0A426H5B8_9GAMM 7-carboxy-7-deazaguanine synthase QueE (Fragment) OS=Pseudoxanthomonas sp. SGD- 10 OX=2493089 GN=EIM50_24365 PE=4 SV=1
TDTIVEHAAQYPGKAVVVTGGEPLIYNLDYLTSKLKDRGILTFIETSGAYPLSGNWDWICLSPKKFKSPIANIAQHANELKIIVFNKSDFAWAEEHAKAVSNDCKLYLQPEWSKSQEMLPLIIDYVKNNPKWEISLQTHKYLNIP

SEQ ID NO: 33425 - protein, 229 aa, Pseudoxanthomonas spadix
  misc_feature (1)..(229): tr|G7UPU5|G7UPU5_PSEUP 7-carboxy-7-deazaguanine synthas e OS=Pseudoxanthomonas spadix (strain BD-a59) OX=104585 5 GN=queE PE=3 SV=1
MNATAAALPGDIEQSPQERLKITEIFLSLQGEADAVGWPTVFVRLTGCPLRCSYCDTAYAFHGGTWWEIDDILAEVARQGVRHVCVTGGEPLAQKRCIGLLERLCDAGHEVSLETSGAIDVSQVDPRVSRVVDIKTPGSGELHRNRWQNLALLSARDQLKFVLCGRSDYEWARALVREHALSGRCSVLFSPSKDQLSPRDLADWIVEDRLPVRFQMQLHKLLWNDEPGR

SEQ ID NO: 33426 - protein, 229 aa, Pseudoxanthomonas spadix
  misc_feature (1)..(229): tr|A0A3M6PX17|A0A3M6PX17_9GAMM 7-carboxy-7-deazaguanine synthase OS=Pseudoxanthomonas spadix OX=415229 GN=queE PE=3 SV=1
MNATAAALPGDIEQSPQERLKITEIFLSLQGEADAVGWPTVFVRLTGCPLRCSYCDTAYAFHGGTWWEIDDILAEVARQGVRHVCVTGGEPLAQKRCIGLLERLCDAGHEVSLETSGAIDVSQVDPRVSRVVDIKTPGSGELHRNRWENLALLSARDQLKFVLCGRSDYEWARALVREHALSGRCSVLFSPSKDQLSPRDLADWIVEDRLPVRFQMQLHKLLWNDEPGR

SEQ ID NO: 33427 - protein, 219 aa, Pseudoxanthomonas suwonensis
  misc_feature (1)..(219): tr|E6WQT3|E6WQT3_PSEUU 7-carboxy-7-deazaguanine synthas e OS=Pseudoxanthomonas suwonensis (strain 11-1) OX=7437 21 GN=queE PE=3 SV=1
MNTQLPQDRLRITEIFLSLQGEANAAGWPTVFVRLTGCPLRCQYCDTAYAFHGGQWWEIDAILAEVARHGVRHVCVTGGEPLAQKRCLDLLRRLCDAGHDVSLETSGALDIAGVDPRVSRVVDLKTPGSAEMARNRLENIPLLTARDQVKFVLCGRADYEWARDMVAEHGLSARCDVLFSPSKGQLEARDLADWIVADRLPVRFQMQLHKILWNDEPGR

SEQ ID NO: 33428 - protein, 219 aa, Pseudoxanthomonas suwonensis
  misc_feature (1)..(219): tr|A0A0E3Z385|A0A0E3Z385_9GAMM 7-carboxy-7-deazaguanine synthase OS=Pseudoxanthomonas suwonensis OX=314722 GN= queE PE=3 SV=1
MDTAAPQNRLRLTEIFLSLQGEANAAGWPTVFVRLTGCPLRCQYCDTAYAFHGGQWWEIDDILAEVARHGVRHVCVTGGEPLAQKRCLDLLRRLCDAGYDVSLETSGALDIAGVDPRVSRVVDLKTPGSAEMARNRLENLPLLTARDQVKFVLCGRGDYEWARDMLAEHRLAERCDVLFSPSKSELAPRELADWIVADRLPVRFQMQLHKLLWNDEPGR

SEQ ID NO: 33429 - protein, 230 aa, Pseudoxanthomonas taiwanensis
  misc_feature (1)..(230): tr|A0A562CX12|A0A562CX12_9GAMM 7-carboxy-7-deazaguanine synthase OS=Pseudoxanthomonas taiwanensis J19 OX=93556 9 GN=queE PE=3 SV=1
MATGPWAYNCPMNTPTPQNRLRITEIFLSLQGEANAAGWPTVFVRLTGCPLRCQYCDTAYAFHGGQWWEIDDILAEVARHGVRHVCVTGGEPLAQKRCLDLLRRLCDAGYDVSLETSGALDIAGVDPRVSRVVDLKTPGSAEMARNRLENLPLLTARDQVKFVLCGRADYEWARDMVAEHGLAARCDVLFSPSKGQLEARDLADWIVADRLPVRFQMQLHKILWNDEPGR

SEQ ID NO: 33430 - protein, 227 aa, Pseudoxanthomonas wuyuanensis
  misc_feature (1)..(227): tr|A0A286D4K9|A0A286D4K9_9GAMM 7-carboxy-7-deazaguanine synthase OS=Pseudoxanthomonas wuyuanensis OX=1073196 G N=queE PE=3 SV=1
MNAASIPSEIVQSSSDRLKITEIFLSLQGEANAAGWPTVFVRLTGCPLRCQYCDTAYAFHGGQWWDIDAILAEVAGHGVRHVCVTGGEPLSQKRCLGLLRRLCDAGYDVSLETSGAIDITGVDARVSRVLDLKTPGSKEMARNRLENLALLTPRDQVKFVLCGRADYEWARDMVAQHRLAERCDVLFSPSKSELPPRELADWIVADRLPVRFQMQLHKLLWDDEPGR

SEQ ID NO: 33431 - protein, 210 aa, Pseudozobellia sp.
  misc_feature (1)..(210): tr|A0A3B0C3C5|A0A3B0C3C5_9FLAO 7-carboxy-7-deazaguanine synthase OS=Pseudozobellia sp. CCMM003 OX=2419782 GN=q ueE PE=3 SV=1
MVKDEVMTLVDKGLMLPLMEEFYTIQGEGYHKGTAAYFIRVGGCDVGCHWCDVKESWNADTHPPTAVESIVENAVKYSDTIVITGGEPLTWDMTPLTRALKNKNLKIHIETSGAYTLTGVWDWICLSPKKNKLPKPEIYGVAHELKVIVYNKHDFLFAEQEAAKVNENCILYLQPEWSVREKMIPLIVDYVMKDPKWIVSLQTHKYLNIP

SEQ ID NO: 33432 - protein, 210 aa, Pseudozobellia sp.
  misc_feature (1)..(210): tr|A0A2E5BL94|A0A2E5BL94_9FLAO 7-carboxy-7-deazaguanine synthase OS=Pseudozobellia sp. OX=2024854 GN=queE PE=3 SV=1
MLQEDVLREVDKGTLLPLMEEFYTIQGEGFHKGTAAYFIRVGGCDVGCHWCDVKESWNAGTHPPTAIESIVENAAKYSNTIVVTGGEPLTWNMEPLTTALKANNLTTHIETSGAYPLTGIWDWICLSPKKNKLPEERIYDVAHELKVIVYNKHDLIFAEEQAAKVNGECILYLQPEWSVRDKVVPLIVDYVMKNPKWKVSLQTHKYLNIP

SEQ ID NO: 33433 - protein, 210 aa, Pseudozobellia thermophila
  misc_feature (1)..(210): tr|A0A1M6MA74|A0A1M6MA74_9FLAO 7-carboxy-7-deazaguanine synthase OS=Pseudozobellia thermophila OX=192903 GN=qu eE PE=3 SV=1
MLEDEVLREVDKGRLLPLMEEFYTIQGEGFHKGTAAYFIRVGGCDVGCHWCDVKESWNAATHPPTPVEAIVENAAKYSNTIVVTGGEPLTWNMKPLTDALKAKNLQIHIETSGAYPLTGTWDWICLSPKKNKLPHKEVYDRAHELKVIVYNRHDLIFAEQEAAKVNDDCILYLQPEWSVRDKVTPLIVDYVMQHPKWKVSLQTHKYLNIP

SEQ ID NO: 33434 - protein, 221 aa, Psychrilyobacter sp.
  misc_feature (1)..(221): tr|A0A369Y0H4|A0A369Y0H4_9FUSO 7-carboxy-7-deazaguanine synthase OS=Psychrilyobacter sp. S5 OX=2283384 GN=queE PE=3 SV=1
MKHYNVVEKFISINGEGQRSGELAVFIRLAKCNLRCNYCDTMWANEENAPVTAMTKEDIYNYILDTKVKNITLTGGEPLLDREVKDLIEYIVKDKSLFLEIETNGSIDLNLFRSDAKNLSFTMDYKGPSSEMEKFMFIKNFETISHKDTVKFVVGDYNDLLKAKEIMEKYDLMNRCSVYFSSVYKKIELDEIVEFMKKFNLNGVRLQLQMHKFIWGNKQGV

SEQ ID NO: 33435 - protein, 236 aa, Psychrobacillus insolitus
  misc_feature (1)..(236): tr|A0A2W7MGN1|A0A2W7MGN1_9BACI 7-carboxy-7-deazaguanine synthase OS=Psychrobacillus insolitus OX=1461 GN=queE PE=3 SV=1
MEIFGPTIQGEGMVVGQKTMFVRTAGCDYSCSWCDSSFTWDGSGKHLIVQMTAEEIWSELKRLGGSGFSFVTISGGNPALLRNLDALIAILKENNIKIGVETQGSRWQEWLYDIDELTISPKPPSSGMTTDFSVLSDIFEKLNNQNNEQHTSLKIVVFNQVDYDYAKQVHLRYPTIPFYLQTGNDDITTTDNPQLISRLLGKYQELIDWVIEDEELRDVKVLPQLHALVWGNKRGV

SEQ ID NO: 33436 - protein, 242 aa, Psychrobacillus lasiicapitis
  misc_feature (1)..(242): tr|A0A544T6Y1|A0A544T6Y1_9BACI 7-carboxy-7-deazaguanine synthase OS=Psychrobacillus lasiicapitis OX=1636719 GN =queE PE=3 SV=1
MSKVPVMEIFGPTIQGEGMVVGQKTMFVRTAGCDYSCSWCDSSFTWDGSGKHLIVQMTAEEIWAELKRLGGDGFSFVTISGGNPVLLRNLEALIVLLKANNIKIGVETQGSKWQEWLYEIDELTISPKPPSSGMTTDFSVLSSIIEKLNNRNSEQHISLKIVIFNEEDYEYAKQVHLRYPAIPFYFQVGNDDSTTTDNPSLVNHLLKKYEELIDRVVGDQELRDVKVLPQLHTLVWGNKRGV

SEQ ID NO: 33437 - protein, 236 aa, Psychrobacillus psychrodurans
  misc_feature (1)..(236): tr|A0A1I4X821|A0A1I4X821_9BACI 7-carboxy-7-deazaguanine synthase OS=Psychrobacillus psychrodurans OX=126157 GN =queE PE=3 SV=1
MEIFGPTIQGEGMVVGQKTMFVRTAGCDYSCSWCDSSFTWDGSGKHLIVQMTAEEIWSELVRLGGNGFSFVTVSGGNPALLRKLDELIAILKENNIKIGVETQGSRWQEWLCDIDELTISPKPPSSGMITDFSVLSDIIEKLNARNSKQHISLKIVVFNKEDYEYAKQVHLRYSTIPFYLQIGNDDITTTDNPQLISHLLEKYQELIDWVIKDEELRDVKVLPQLHALVWGNKRGV

SEQ ID NO: 33438 - protein, 242 aa, Psychrobacillus soli
  misc_feature (1)..(242): tr|A0A544TGM1|A0A544TGM1_9BACI 7-carboxy-7-deazaguanine synthase OS=Psychrobacillus soli OX=1543965 GN=queE PE =3 SV=1
MSKVPVMEIFGPTIQGEGMVVGQKTMFVRTAGCDYSCSWCDSSFTWDGSGKHLIVQMTAEEIWSELKRLGGNGFSFVTISGGNPALLRNLESLIAVLKENDIKIGVETQGSKWQEWLHEIDELTISPKPPSSGMITDFSVLSDIIRKLKNRNSEQHISLKIVVFNQADYEYAKQVHLRYPTIPFYLQVGNDEITSTDNPQLISHLLEKYGVLIDRVIADEQLRDVKVLPQLHALVWGNKRGV

SEQ ID NO: 33439 - protein, 242 aa, Psychrobacillus sp.
  misc_feature (1)..(242): tr|A0A1H9VVW5|A0A1H9VVW5_9BACI 7-carboxy-7-deazaguanine synthase OS=Psychrobacillus sp. OK032 OX=1884358 GN=qu eE PE=3 SV=1
MSKVPVMEIFGPTIQGEGMVVGQKTMFVRTAGCDYSCSWCDSSFTWDGSGKHLIVQMTAEEIWSELKRLGGNGFSYVTLSGGNPALLRNLESVIAILKENDIKIGVETQGSKWQEWLHDIDELTISPKPPSSGMLTDFTVLTDILGKLKNRNSEQHISLKIVVFDQADYEYAKQVHLRYPTIPFYLQVGNDDITATDNPRLVNHLLEKYEELIDWVIADEELRDVKVLPQLHALVWGNKRGV

SEQ ID NO: 33440 - protein, 242 aa, Psychrobacillus sp.
  misc_feature (1)..(242): tr|A0A544TMJ0|A0A544TMJ0_9BACI 7-carboxy-7-deazaguanine synthase OS=Psychrobacillus sp. Z8 OX=2325572 GN=queE PE=3 SV=1
MSKVPVMEIFGPTIQGEGMVVGQKTMFVRTAGCDYSCTWCDSSFTWDGSGKHLIVQMTAEEIWSELKRLGGNGFSFVTISGGNPVLLRNLEALIAILKENEIKIGVETQGSKWQEWLYDIDELTISPKPPSSGMTTDFSVLTNIFEKLNNRNSEQHTSLKIVVFNQEDYEYAKQVHLRYPTIPFYLQVGNDDITTTDNPRLIHHLLEKYEALIDKVIADDELRDVKVLPQLHALVWGNKRGV

SEQ ID NO: 33441 - protein, 241 aa, Psychrobacter alimentarius
  misc_feature (1)..(241): tr|A0A144PP44|A0A144PP44_9GAMM 7-carboxy-7-deazaguanine synthase OS=Psychrobacter alimentarius OX=261164 GN=qu eE PE=3 SV=1
MSILRNATIPVTDPEAGLRLTEIFYSLQGEALTSGLPTIFVRLTGCPLRCVYCDTEYAFTGGERQSLDTIISMIKSHPCKRICLTGGEPLAQPNAIELMKRLLSEDYEISLETAGALTVENVPPAVSKVMDLKTPSSGEVDKNLWSNLDYLTQHDQIKFVIMNREDYEWAKAKLAEHKLNERVGTVWFSPMFNVGEDVDEDIGPDVPVLARELAEWILVDALPVRFQLQLHKIIWADAKGK

SEQ ID NO: 33442 - protein, 248 aa, Psychrobacter aquaticus
  misc_feature (1)..(248): tr|U4TBE9|U4TBE9_9GAMM 7-carboxy-7-deazaguanine synthas e OS=Psychrobacter aquaticus CMS 56 OX=1354303 GN=queE PE=3 SV=1
MSESLLRTAAIPVTDPEAGLRLTEIFYSLQGEALTSGLPTIFVRLTGCPLRCVYCDTEYAFTGGERQSLEAIIATIKSYPCLRICLTGGEPLAQPNAIELMKRLLSEDYEISLETAGALTVENVPPAVSKVMDLKTPSSGEVDKNLWSNLDYLTQHDQIKFVIMNREDYDWAKAKLSEHQLDKRVGTVWFSPMFNVADDVDKAANREMSSPDVPVLARELAEWILKDALPVRFQLQLHKIIWADAKGK

SEQ ID NO: 33443 - protein, 244 aa, Psychrobacter arcticus
  misc_feature (1)..(244): tr|Q4FTR8|Q4FTR8_PSYA2 7-carboxy-7-deazaguanine synthas e OS=Psychrobacter arcticus (strain DSM 17307 / 273-4) OX=259536 GN=queE PE=3 SV=1
MSELSLRTAAIPVTDPEAGLRLTEIFYSLQGEALTSGLPTIFVRLTGCPLRCVYCDTEYAFSGGERQSLETMMATIASFPCKRICLTGGEPLAQPNAIELMKRLLNDGYEISLETAGALTVENVPPTVSKVMDLKTPSSGEVDKNLWSNLDYLTQHDQIKFVIMNRADYDWAKAKLVEYKLNELVGTVWFSPMFNVAHEDTVNDNSPEVPVLARELAEWMLADALPVRFQLQLHKIIWADAKGK

SEQ ID NO: 33444 - protein, 244 aa, Psychrobacter cryohalolentis
  misc_feature (1)..(244): tr|Q1QCU6|Q1QCU6_PSYCK 7-carboxy-7-deazaguanine synthas e OS=Psychrobacter cryohalolentis (strain K5) OX=335284 GN=queE PE=3 SV=1
MSELSLRTAAIPVTDPEAGLRLTEIFYSLQGEALNSGLPTIFVRLTGCPLRCVYCDTEYAFSGGERQSLETIMATIASFPCKRICLTGGEPLAQPNAIELMKRLLNEGYEISLETAGALTVENVPPAVSKVMDLKTPSSGEVDKNLWSNLDYLTQHDQIKFVIMNRTDYDWAKAKLIDYKLNDLVGTVWFSPMFNVAHEDTANDNSPEVPVLARELAEWMLTDALPVRFQLQLHKIIWADAKGK

SEQ ID NO: 33445 - protein, 248 aa, Psychrobacter fozii
  misc_feature (1)..(248): tr|A0A2V4V306|A0A2V4V306_9GAMM 7-carboxy-7-deazaguanine synthase OS=Psychrobacter fozii OX=198480 GN=queE PE=3 SV=1
MSESLLRTAAIPVTDPEAGLRLTEIFYSLQGEAITSGLPTIFVRLTGCPLRCVYCDTEYAFTGGERQSLETIIETIKGYPCKRICLTGGEPLAQPNAIELMKRLLSDDYEISLETAGALTVENVPPAVSKVMDLKTLSSGEVDKNLWSNLDYLTQHDQIKFVIMNRADYDWAKEKLFEHKLNELVGTVWFSPMFNVADDISEDASKNFPSPEVPVLARELAEWMLADALPVRFQLQLHKIIWADAKGK

SEQ ID NO: 33446 - protein, 240 aa, Psychrobacter frigidicola
  misc_feature (1)..(240): tr|A0A5C7A727|A0A5C7A727_9GAMM 7-carboxy-7-deazaguanine synthase OS=Psychrobacter frigidicola OX=45611 GN=queE PE=3 SV=1
MSELSLRTSAIPVTDPEAGLRMTEIFYSLQGEALTSGLPTIFVRLTGCPLRCVYCDTEYAFSGGERQSLETIMATIGSYPCKRVCITGGEPLAQPNAIELIKRLLADDYEISLETAGALSVQNVPPAVSKVMDLKTPSSGESAKNLWSNLDYLTQHDQLKFVIMNRADYDWAKAKLFEYKLDKLVGTVWFSPMFNVAENDSSPDVPELARELAEWMLADALPVRFQLQLHKIIWADAKGK

SEQ ID NO: 33447 - protein, 243 aa, Psychrobacter immobilis
  misc_feature (1)..(243): tr|A0A2V2A5E6|A0A2V2A5E6_PSYIM 7-carboxy-7-deazaguanine synthase OS=Psychrobacter immobilis OX=498 GN=queE PE= 3 SV=1
MSESLLRTAAIPVTDPEAGLRLTEIFYSLQGEALTSGLPTIFVRLTGCPLRCVYCDTEYAFTGGERQSLETIIETIKSYPCKRICLTGGEPLAQPNAIELMKRLLSDGYEISLETAGALTVANVPKAVSKVMDLKTPSSGEVDKNLWSNLDHLTQHDQIKFVIMNREDYDWAKTKLSEHKLNELVDTVWFSPMFNVAEDIDEEVSPDVPVLARELAEWMLADALPVRFQLQLHKIIWADAKGK

SEQ ID NO: 33448 - protein, 243 aa, Psychrobacter pacificensis
  misc_feature (1)..(243): tr|A0A1G6VMY8|A0A1G6VMY8_9GAMM 7-carboxy-7-deazaguanine synthase OS=Psychrobacter pacificensis OX=112002 GN=qu eE PE=3 SV=1
MSESLLRTAAIPVTDPEAGLRLTEIFYSLQGEALTSGLPTIFVRLTGCPLRCVYCDTEYAFTGGERQSLETIIDTIKNYPCKRICLTGGEPLAQPNAIELMKRLLSDGYEISLETAGALSVQNVPPAVSKVMDLKTPSSGEVDKNLWSNLDHLTEHDQIKFVIMNRTDYDWAKEKLVEHKLNELVGTVWFSPMFNVADDVDEALSPEVPVLARELAEWMLADALPVRFQLQLHKIIWADAKGK

SEQ ID NO: 33449 - protein, 245 aa, Psychrobacter pasteurii
  misc_feature (1)..(245): tr|A0A1R4EGY1|A0A1R4EGY1_9GAMM 7-carboxy-7-deazaguanine synthase OS=Psychrobacter pasteurii OX=1945520 GN=queE PE=3 SV=1
MTQNTPLRSQAIPVTDPESGLRMTEIFYSLQGEALTSGLPTVFVRLTGCPLRCVYCDTTYSFTGGERFSLDAIMADIGQYPCKRVCVTGGEPLAQPNCIALIKRLLEEGYEVSLETAGALSVAEVPDAVSKVMDIKTPSSGESDKNLWSNLEHLTQHDQLKFVIMNRSDYEWSKQKVAEYQLDKKVGTVWFSPMFNVHEDAQGDVAAVDVPSLARELAEWILEDALPVRLQLQLHKIIWADAKGK

SEQ ID NO: 33450 - protein, 242 aa, Psychrobacter phenylpyruvicus
  misc_feature (1)..(242): tr|A0A379LL32|A0A379LL32_9GAMM 7-carboxy-7-deazaguanine synthase OS=Psychrobacter phenylpyruvicus OX=29432 GN= queE PE=3 SV=1
MSNLRTTTIPVTDPEAGLRLTEIFYSLQGEALTSGLPTVFVRLTGCPLRCVYCDTTYSFSGGERFSLDEIMADIGQYPCKRVCVTGGEPLAQPNCIALIKRLLDEGYEVSLETAGALSVAEVPNAVSKVMDIKTPSSGESDKNLWSNLQYLTQNDQLKFVIMNRDDYEWSKQKVEEYQLDKKVGTVWFSPMFNVHQDAEGDVAAVDVPNLARELAEWILEDAIPVRLQLQLHKIIWADAKGK

SEQ ID NO: 33451 - protein, 242 aa, Psychrobacter piechaudii
  misc_feature (1)..(242): tr|A0A1R4GX84|A0A1R4GX84_9GAMM 7-carboxy-7-deazaguanine synthase OS=Psychrobacter piechaudii OX=1945521 GN=que E PE=3 SV=1
MSNLRTTTIPVTDPEAGLRMTEIFYSLQGEALTSGLPTVFVRLTGCPLRCVYCDTTYSFTGGERFSLDAIMADIGQYPCKRVCVTGGEPLAQPNCIALIKRLLDEDYEVSLETAGALSVAEVPDAVSKVMDIKTPSSGESDKNLWSNLEHLTQHDQLKFVIMNRDDYEWSKQKVEEYQLDKKVGTVWFSPMFNVHEDAAGDIAAVDVPNLARELAEWILEDAIPVRLQLQLHKIIWADAKGK

SEQ ID NO: 33452 - protein, 243 aa, Psychrobacter piscatorii
  misc_feature (1)..(243): tr|A0A0T6DQB8|A0A0T6DQB8_9GAMM 7-carboxy-7-deazaguanine synthase OS=Psychrobacter piscatorii OX=554343 GN=queE PE=3 SV=1
MSESLLRTAAIPVTDPEAGLRLTEIFYSLQGEALTSGLPTIFVRLTGCPLRCVYCDTEYAFTGGERQSLETIIDTIKNYPCKRICLTGGEPLAQPNAIELMKRLLSDGYEISLETAGALSVQNVPPAVSKVMDLKTPSSGEVDKNLWSNLDHLTEHDQIKFVIMNRTDYDWAKETLNQHQLNKLVGTVWFSPMFNVADDIDEALSPDVPVLARELAEWILADALPVRFQLQLHKIIWADAKGK

SEQ ID NO: 33453 - protein, 243 aa, Psychrobacter sp.
  misc_feature (1)..(243): tr|A0A1D9CXF6|A0A1D9CXF6_9GAMM 7-carboxy-7-deazaguanine synthase OS=Psychrobacter sp. AntiMn-1 OX=1720344 GN=q ueE PE=3 SV=1
MSESLLRTAAIPVTDPEAGLRLTEIFYSLQGEALTSGLPTIFVRLTGCPLRCVYCDTEYAFTGGERQSLETIIDTIKSYPCKRICLTGGEPLAQPNAIELMKRLLSDGYEISLETAGALSVQNVPPAVSKVMDLKTPSSGEVDKNLWSNLDHLTEHDQIKFVIMNRTDYDWAKEKLVEHKLNELVGTVWFSPMFNVADDVDETLSPEVPVLARELAEWMLADALPVRFQLQLHKIIWADAKGK

SEQ ID NO: 33454 - protein, 248 aa, Psychrobacter sp.
  misc_feature (1)..(248): tr|X0QTT5|X0QTT5_9GAMM 7-carboxy-7-deazaguanine synthas e OS=Psychrobacter sp. JCM 18903 OX=1298610 GN=queE PE= 3 SV=1
MSESLLRTAAIPVTDPEAGLRLTEIFYSLQGEALTSGLPTIFVRLTGCPLRCVYCDTEYAFTGGERQSLETIIETIKSYPCKRICLTGGEPLAQPNAIELMKRLLSDGYEISLETAGALTVANVPKAVSKVMDLKTPSSGEVDKNLWSNLDYLTQHDQIKFVIMNREDYDWAKTKLSEHKLNELVDTVWFSPMFNVAEDIDEEVSPDVPVLARELAEWMLADALPVRFQLQLHKIIWQMLKVNNSLII

SEQ ID NO: 33455 - protein, 244 aa, Psychrobacter urativorans
  misc_feature (1)..(244): tr|A0A0M4U7T6|A0A0M4U7T6_9GAMM 7-carboxy-7-deazaguanine synthase OS=Psychrobacter urativorans OX=45610 GN=queE PE=3 SV=1
MTKPSLRTSAIPVTDPEAGLRLTEIFYSLQGEAITSGLPTIFVRLTGCPLRCVYCDTEYAFTGGERQSLEAIMATIANFPCKRICLTGGEPLAQPNAIELMKRLLADGYEISLETAGALTVENVPTTVSKVMDLKTPSSGEVDKNLWSNLNYLTQHDQIKFVIMNRTDYDWAKSKLFEHNLDKLVGTVWFSPMFNVAQDDTLNDNSPEVPVLARELAEWMLADALPVRFQLQLHKIIWADAKGK

SEQ ID NO: 33456 - protein, 210 aa, Psychroflexus gondwanensis
  misc_feature (1)..(210): tr|N1WUV6|N1WUV6_9FLAO 7-carboxy-7-deazaguanine synthas e OS=Psychroflexus gondwanensis ACAM 44 OX=1189619 GN=q ueE PE=3 SV=1
MQNEKIEDLVQKGVMLPLMEEFYTIQGEGYHTGTAAYFIRIGGCDVGCHWCDVKESWDPERHPPTQIGSIIENAKKYSNTIVITGGEPLTWDMSMLTQGLKDNGLSIHIETSGAYDLTGVWDWICLSPKKIKLPKPEIYSKVDELKVIIFNKHDFKFAEEQASQVGEDCELFLQPEWSVREKMTPQIVEYVMNHPQWRISLQTHKYLNIP

SEQ ID NO: 33457 - protein, 210 aa, Psychroflexus halocasei
  misc_feature (1)..(210): tr|A0A1H4ARY4|A0A1H4ARY4_9FLAO 7-carboxy-7-deazaguanine synthase OS=Psychroflexus halocasei OX=908615 GN=queE PE=3 SV=1
MLKKEIENLVDKGEMLPLMEQFYTIQGEGHHTGKAAYFIRVGGCDVGCHWCDVKESWNPDTHPPTHIDEIVSQAKSYSNTIVITGGEPLTWNMQPITSALKKEGLDIHIETSGAYPLTGIWDWICLSPKKMKLPQPEVYEKADELKVIVFNKHDFKFAEEQAAKISGNCQLYLQPEWSVREKMMPLIVDYVMKNPKWKISLQTHKYLEIP

SEQ ID NO: 33458 - protein, 211 aa, Psychroflexus salarius
  misc_feature (1)..(211): tr|A0A1M4U1C1|A0A1M4U1C1_9FLAO 7-carboxy-7-deazaguanine synthase OS=Psychroflexus salarius OX=1155689 GN=queE PE=3 SV=1
MLEKETKELVNKGEMLPLMEQFYTIQGEGHHTGTAAYFIRIGGCDVGCHWCDVKESWNPNTHPPTAISEIVNSAKLYSDTIVITGGEPLTWNMNPLTTQLKSLGLKVHIETSGAYQLTGYWDWICLSPKKIKLPKPEIYEVANELKVIIYNKHDLKFAEQQAELIKNSSCQLYLQPEWSVREKMMPMIVEYVMKYPKWKISLQTHKYLNIP

SEQ ID NO: 33459 - protein, 210 aa, Psychroflexus sediminis
  misc_feature (1)..(210): tr|A0A1G7WC28|A0A1G7WC28_9FLAO 7-carboxy-7-deazaguanine synthase OS=Psychroflexus sediminis OX=470826 GN=queE PE=3 SV=1
MQNSNIEKLVQKGVMLPLMEEFYTIQGEGYHTGTAAYFIRIGGCDVGCHWCDVKESWDPERHPPTQIGSIIENAKKYSNTIVITGGEPLTWDMTSLTEGLKANGLMIHIETSGAYDMTGVWDWICLSPKKIKLPKPEIYARVDELKVIIYNKHDFKFAEEQAEKVNDTCELFLQPEWSVREKMIPEIVEYVMKNPKWRISLQTHKYLNIP

SEQ ID NO: 33460 - protein, 210 aa, Psychroflexus sp.
  misc_feature (1)..(210): tr|A0A2M9TRE4|A0A2M9TRE4_9FLAO 7-carboxy-7-deazaguanine synthase OS=Psychroflexus sp. S27 OX=1982757 GN=queE P E=3 SV=1
MLKKEIENLVDKGEMLPLMEQFYTIQGEGHHSGKAAYFIRVGGCDVGCHWCDVKESWSPDTHPPTHIDEIVSQAKANSNTIVITGGEPLTWDMSPLTSALKNEGLDIHIETSGAYPLTGIWDWICLSPKKMKLPESEIYSKADELKVIVFNKHDLKFAEEQAAKLSGKCELYLQPEWSVREKMMPLIVDYVMKNPKWKISLQTHKYLEIP

SEQ ID NO: 33461 - protein, 210 aa, Psychroflexus sp.
  misc_feature (1)..(210): tr|A0A2I0D7B9|A0A2I0D7B9_9FLAO 7-carboxy-7-deazaguanine synthase OS=Psychroflexus sp. MES1-P1E OX=2058320 GN=q ueE PE=3 SV=1
MQNEKIEDLVQKGVMLPLMEEFYTIQGEGYHTGTAAYFIRIGGCDVGCHWCDVKESWDPERHPPTQIGSIIENAKKYSNTIVITGGEPLTWDMSMLTQGLKDNELSIHIETSGAYDLTGVWDWICLSPKKNKLPKPEIYPKVDELKVIIFNKHDFKFAEEQASQVGDDCELFLQPEWSVREKMTPQIVEYVMKHPQWRISLQTHKYLNIP

SEQ ID NO: 33462 - protein, 223 aa, Psychroflexus torquis
  misc_feature (1)..(223): tr|K4IWB3|K4IWB3_PSYTT 7-carboxy-7-deazaguanine synthas e OS=Psychroflexus torquis (strain ATCC 700755 / ACAM 6 23) OX=313595 GN=queE PE=3 SV=1
MFYFEKSFQYLCSMQNEKIEDLVQKGVMLPLMEEFYTIQGEGYHTGTAAYFIRIGGCDVGCHWCDVKESWDPERHPPTRIGSIIENAKKYSNTIVITGGEPLTWDMSMLTQGLKDNQLSIHIETSGAYDLTGVWDWICLSPKKNKLPKPEIYPKVDELKVIIFNKHDFKFAEEHASQVGEDCELFLQPEWSVREKMTPQIVEYVMKHPKWRISLQTHKYLNIP

SEQ ID NO: 33463 - protein, 246 aa, Psychromonas ingrahamii
  misc_feature (1)..(246): tr|A1STX4|A1STX4_PSYIN 7-carboxy-7-deazaguanine synthas e OS=Psychromonas ingrahamii (strain 37) OX=357804 GN=q ueE PE=3 SV=1
MFTYLLRYTDKILLPIEHNKAMNQNYKVNELFQTIQGEGFNTGVPAIFLRLQGCDVGCAWCDTKHTWEINPDKQTELILLTGSSNESTRWANVNAREIVAEIKRLGYSANLVVITGGEPCLADLRELTTVLHEFDFKTQIETSGTYPVLVAPPTWVTLSPKVNMRAGKVVLQSALERADEIKHPVGTEKDIEQLDALLENLKSIEDKVICLQPISQKVKATLLCSQVCIERNWRLSVQMHKYLGID

SEQ ID NO: 33464 - protein, 225 aa, Psychromonas sp.
  misc_feature (1)..(225): tr|A0A4Y7ZXV8|A0A4Y7ZXV8_9GAMM 7-carboxy-7-deazaguanine synthase OS=Psychromonas sp. RZ22 OX=2555643 GN=queE P E=3 SV=1
MIQNYKVNELFQTIQGEGFYTGVPAIFVRLQGCDVGCAWCDTKHTWEIDLAKKSDLILLTDKSNESDRWADVSAVDIVNEIKRLGYTANLIVITGGEPCMFDLRELTQVLHQFGFQTQVETSGTYPILVDVETWVTLSPKVNMRGKKVVLKEALQRANEIKHPVGTERDIEQLDILLSQLSSVKDKTICLQPISQKVNATALCMKTCIERNWRLSVQVHKYLQID

SEQ ID NO: 33465 - protein, 225 aa, Psychromonas sp.
  misc_feature (1)..(225): tr|A0A366WCL2|A0A366WCL2_9GAMM 7-carboxy-7-deazaguanine synthase OS=Psychromonas sp. B3M02 OX=2267226 GN=queE PE=3 SV=1
MSQNYKVNELFQTIQGEGFYTGVPAIFVRLQGCDVGCAWCDTKHTWEIDPDKKSDLVIVTDKSNESDRWADCSAKEIVDEIKRLGYTANLIVITGGEPCMYDLRELTQVLHEFGFSIQIETSGTYPVLVDQQTWVTLSPKVNMRGKKEVLKEALQRANEIKHPVGTEKDIEQLDALLAKLKSVDDKTISLQPISQKAKATALCMQVCIERNWRLSVQMHKYLQID

SEQ ID NO: 33466 - protein, 210 aa, Psychroserpens burtonensis
  misc_feature (1)..(210): tr|A0A5C7B523|A0A5C7B523_9FLAO 7-carboxy-7-deazaguanine synthase OS=Psychroserpens burtonensis OX=49278 GN=que E PE=3 SV=1
MTRTEQQDLIDKGLLLPLMEEFYTIQGEGFHKGTAAYFIRIGGCDVGCHWCDVKESWLAELHPPTETEKIVSNAVKYSNTIVVTGGEPLMWDMNPLTAQLKAKGLQTHIETSGAYKLSGTWDWICLSPKKMKLPTEKVYEKAHELKCIIYNKDDFRFAEEQAAKVNKDCILYLQPEWSKRDKVVPQIVNYVMKNPKWKVSLQTHKYLNIP

SEQ ID NO: 33467 - protein, 209 aa, Psychroserpens sp.
  misc_feature (1)..(209): tr|A0A4P7WXK5|A0A4P7WXK5_9FLAO 7-carboxy-7-deazaguanine synthase OS=Psychroserpens sp. NJDZ02 OX=2570561 GN=qu eE PE=3 SV=1
MKQEIQDLVNKGLMLPLMEEFYTIQGEGFHKGTAAYFIRIGGCDVGCHWCDVKESWNANLHPPTSTDVIVANAKKYSDTVVVTGGEPLTWDMTALTDKLKAEGCKIHIETSGAYQLTGQWDWICLSPKKMKLPTQGVYDKAHELKCIIYNKDDFKFAEEQAAKVNGDCILYLQPEWSKRDTMIPMIVDYVMANPKWKVSLQTHKYLNIP

SEQ ID NO: 33468 - protein, 224 aa, Psychrosphaera saromensis
  misc_feature (1)..(224): tr|A0A2S7UY48|A0A2S7UY48_9GAMM 7-carboxy-7-deazaguanine synthase OS=Psychrosphaera saromensis OX=716813 GN=que E PE=3 SV=1
MSKYKINEIFETIQGEGQYTGTASIFVRLQGCPVGCSWCDTKQTWDQLESDKQPLSTIIVKTSDDPTWCDVDDSTILNTFVEQAYRAKHVVITGGEPCMFDLNPLCELLHSKGYSTQIETSGTFEIQAPEQTWVTVSPKINMKGGYKILASCMQRANEIKHPIARQVHVDELEQLLIEAPIKENTLIYLQPISQKISSTELAIETCKEKNWRLSVQVHKYIGIS

SEQ ID NO: 33469 - protein, 236 aa, Puniceibacterium antarcticum
  misc_feature (1)..(236): tr|A0A2G8RET0|A0A2G8RET0_9RHOB 7-carboxy-7-deazaguanine synthase OS=Puniceibacterium antarcticum OX=1206336 GN =queE PE=3 SV=1
MSQLRIAEIFGPTIQGEGALIGEPTVFVRTGGCDYRCVWCDSLHAVDPAYRRTWAAMTTDGVWAEITRLSKGKPLTISLSGGNPAIQDFTQLILRGHSAGYRFACETQGSISKPWFADLDTLVLSPKPPSSGETVDWEAFEACLTAAEGAGLIVLKIVIFDDRDYAWAQMAAERYPALPLYLQPGNLEVDPAVPVDPQDLSDKLLWLVEKVMADGWFAPRVLPQLHVLLWGNKRGV

SEQ ID NO: 33470 - protein, 229 aa, Puniceicoccaceae bacterium; identical to SEQ ID NO: 32259
  misc_feature (1)..(229): tr|A0A2D7F4B3|A0A2D7F4B3_9BACT 7-carboxy-7-deazaguanine synthase OS=Puniceicoccaceae bacterium OX=2026784 GN=q ueE PE=3 SV=1
  misc_feature (46)..(46): Xaa can be any naturally occurring amino acid
  misc_feature (61)..(61): Xaa can be any naturally occurring amino acid
  misc_feature (139)..(139): Xaa can be any naturally occurring amino acid
  misc_feature (163)..(163): Xaa can be any naturally occurring amino acid
  misc_feature (178)..(178): Xaa can be any naturally occurring amino acid

SEQ ID NO: 33471 - protein, 222 aa, Puniceicoccaceae bacterium
  misc_feature (1)..(222): tr|A0A2E9IW68|A0A2E9IW68_9BACT 7-carboxy-7-deazaguanine synthase OS=Puniceicoccaceae bacterium OX=2026784 GN=q ueE PE=3 SV=1
MLPIHEQFYTFQGEGAHAGRAAYFIRTFGCPVHCPWCDSAGTWHPDYIPKKVQRSSVESLVTEVAKTKAEFVVITGGEPAIHNLQALVDALHAIGQTVHLETSGAFEIKGNFDWITLSPKRWKLPLAVNLERASEFKIIVDQAAEIEEYSEVIGATTKPVWLHPEWSKHNDAATLDAITEWVKTQGAPYRAGWQMHKHYAADLKDSRSAPAAPLGGDPKLGF

SEQ ID NO: 33472 - protein, 210 aa, Pusillimonas sp.
  misc_feature (1)..(210): tr|A0A4V6NF07|A0A4V6NF07_9BURK 7-carboxy-7-deazaguanine synthase OS=Pusillimonas sp. YR330 OX=2135726 GN=queE PE=3 SV=1
MTYSVKEIFLTLQGEGAQAGRPAVFCRFSGCNLWSGREEDRSTAQCRFCDTDFVGTDGTLGGKYKTAEQLADLIQGTWGGQKQHRFVVFTGGEPLLQLDAALIDALHDRGFEIAVETNGTVQPPAGIDWLCTSPKAGTEWIVRQGQELKLVFPQPGIDPADMEHLPFDEFWLQPMDGPDQAANTQAAIAYCLAHPRWRLSVQTHKLIGIR

SEQ ID NO: 33473 - protein, 210 aa, Pusillimonas sp.
  misc_feature (1)..(210): tr|A0A2N4UBE9|A0A2N4UBE9_9BURK 7-carboxy-7-deazaguanine synthase OS=Pusillimonas sp. JR1/69-2-13 OX=2045209 GN =queE PE=3 SV=1
MTYSVKEIFLTLQGEGGQAGRPAVFCRFSGCNLWSGREQDRSTAQCQFCDTDFIGTDGTLGGKYKTADLLADRIESVWGEQQRFRFVVFTGGEPLLQLDAPLIDAIHARGFEIAVETNGTVNPPAGIDWLCTSPKVGTDWIVRQGQELKLVFPQPGIDPAHLEDLPFDEFWLQPMDGPDQVANTQAAIEYCLAHPRWRLSIQTHKLIGIR

SEQ ID NO: 33474 - protein, 210 aa, Pustulibacterium marinum
  misc_feature (1)..(210): tr|A0A1I7F8G6|A0A1I7F8G6_9FLAO 7-carboxy-7-deazaguanine synthase OS=Pustulibacterium marinum OX=1224947 GN=que E PE=3 SV=1
MSKEEQLALVEKGEWLPLMEEFYTIQGEGFYKGTAAYFIRVGGCDVGCHWCDVKESWNADLHPPTAVSTIVENAASYSDTIVITGGEPLSWNMNPITKALKEKGLKIHIETSGAYELSGEWDWICLSPKKMKLPTEEVYKKANELKVIIYNQHDFKFAEEQAAQVSEDCILYMQPEWSKRDKMIPEIVEYVMKNPRWKVSLQTHKYLNIP

SEQ ID NO: 33475 - protein, 210 aa, Unknown
  misc_feature (1)..(210): tr|A0A1E4ZK00|A0A1E4ZK00_9BACT 7-carboxy-7-deazaguanine synthase OS=PVC group bacterium (ex Bugula neritina AB 1) OX=1868283 GN=queE PE=3 SV=1
MLYVSEIYKSIQGESSHAGLPCVFIRLSGCHLRCNYCDTEHAFSKGDKFSIEDILKKVFEMKTRVVELTGGEPLLQQESLSLLRELCDRDYTVLLETSGSLSIKDLPKKVHVIMDIKTPSSDEGESFMMNNLSYLKHGDEVKFVLADRMDYDWAVETFEAYDIDVPILFSPVHGVLDPKILAGWILEDNLKVRMQIQIHKYIWGEDVEGV

SEQ ID NO: 33476 - protein, 219 aa, Pyrinomonas methylaliphatogenes
  misc_feature (1)..(219): tr|A0A0B6WXU8|A0A0B6WXU8_9BACT 7-carboxy-7-deazaguanine synthase OS=Pyrinomonas methylaliphatogenes OX=454194 GN=queE PE=3 SV=1
MVTMSTLRVTEIFRSIQGESTHAGRPCAFVRLTGCPMRCVWCDSTYTFTGGERMTIDAILEQVRAFDCRLVEVTGGEPLAQRASLELIRRLCDEGYEVLIETGGYFSTEEVDPRAAIILDVKCPASGEAERNHWPNLERLRADKDEVKFVIADRGDWDFARDIIARYDLERRAHAILISPVWGAVDLQMMAEWIISSGLDVRMQLQMHKIIWGPEARGV

SEQ ID NO: 33477 - protein, 240 aa, Quasibacillus thermotolerans
  misc_feature (1)..(240): tr|A0A0F5I983|A0A0F5I983_9BACI 7-carboxy-7-deazaguanine synthase OS=Quasibacillus thermotolerans OX=1221996 GN =queE PE=3 SV=1
MRKIPVLEIFGPTVQGEGAVIGRKTMFVRTAGCDYRCAWCDSAFTWDGSAKDQIRLLTPEETWSELVRLAGRSCDHVTISGGNPALLPQIADLAALLKKEGVQTALETQGSRWQDWFYDIDDLTISPKPPSSGMDTDFEQLTAIIGQLKKREKAVSLKVVIFDEQDLSFAKKVHELYPEVPFFLQTGNGQLSEQDSSALLPYLVNRYEWLIDQVMSDADWKNVRVLPQLHTFVWGNKQGV

SEQ ID NO: 33478 - protein, 212 aa, Quisquiliibacterium sp.
  misc_feature (1)..(212): tr|A0A5C8NS34|A0A5C8NS34_9BURK 7-carboxy-7-deazaguanine synthase OS=Quisquiliibacterium sp. CC-CFT501 OX=24988 47 GN=queE PE=3 SV=1
MTYSVKEMFYTLQGEGAQAGRPAVFCRFAGCNLWSGREEDRADAVCTFCDTDFVGTDGQGGGKFRTAAELARAIAAKWPADDDSGRRYVVCTGGEPLLQLDEPLIDALHAEGFEVAVETNGTQPAPKGLDWICVSPKAGAPVVLTEGDELKLVYPQPLAMPERFESLGFTHFFLQPMDGPDQEANTRAAIAYCLAHPRWRLSLQTHKIVGID

SEQ ID NO: 33479 - protein, 223 aa, Rahnella aquatilis
  misc_feature (1)..(223): tr|H2IV81|H2IV81_RAHAC 7-carboxy-7-deazaguanine synthas e OS=Rahnella aquatilis (strain ATCC 33071 / DSM 4594 / JCM 1683 / NBRC 105701 / NCIMB 13365 / CIP 78.65) OX=7 45277 GN=queE PE=3 SV=1
MQYPINEMFETLQGEGYFTGVPAIFVRLQGCPVGCSWCDTKHTWDKIADREVDMQRILVKTEESDAWGNATSEQLLDIIARQGYTARHVVITGGEPCIYDLTELTSLLEKSGFSCQIETSGTHEVRCSVNTWVTVSPKVNMRGGYDILPQALKRADEVKHPVARQRDIDALDALLETLTDSKARIIALQPISQKEEATRLCIATCIARNWRLSMQTHKYLNIA

SEQ ID NO: 33480 - protein, 223 aa, Rahnella aquatilis
  misc_feature (1)..(223): tr|H8NR46|H8NR46_RAHAQ 7-carboxy-7-deazaguanine synthas e OS=Rahnella aquatilis HX2 OX=1151116 GN=queE PE=3 SV= 1
MQYPINEMFETLQGEGYFTGVPAIFVRLQGCPVGCSWCDTKHTWDKIADREVDMQRILVKTEESDAWGNATSEQLLEVIAQQGYTARHVVITGGEPCIYDLTELTSLLEKSGFSCQIETSGTHEVRCSVNTWVTVSPKVNMRGGYDILPQALKRADEVKHPVARQRDIDALDALLETLTDSKARIIALQPISQKEEATRLCIATCIARNWRLSMQTHKYLNIA

SEQ ID NO: 33481 - protein, 223 aa, Rahnella inusitata
  misc_feature (1)..(223): tr|A0A419M5F9|A0A419M5F9_9GAMM 7-carboxy-7-deazaguanine synthase OS=Rahnella inusitata OX=58169 GN=queE PE=3 S V=1
MQYPINEMFETLQGEGYFTGVPAIFVRLQGCPVGCSWCDTKHTWDKIADREVDMQRILVKTEESDAWGNSTSEQLLDIIAQQGYTARHIVITGGEPCIYDLMPLTMLLEKNGFSCQIETSGTHEVRCSVNTWVTVSPKVNMRGGYDILPQALKRADEVKHPVARQRDIDALDALLETLTDSKARIIALQPISQKEEATKLCIATCIARNWRLSMQTHKYLNIA

SEQ ID NO: 33482 - protein, 223 aa, Rahnella sp.
  misc_feature (1)..(223): tr|A0A2N0VZX0|A0A2N0VZX0_9GAMM 7-carboxy-7-deazaguanine synthase OS=Rahnella sp. AA OX=2057180 GN=queE PE=3 SV =1
MQYPINEMFETLQGEGYFTGVPAIFVRLQGCPVGCSWCDTKHTWDKIADREVDMQRILVKTEESDAWGNATSEQLLDVIAQQGYTARHVVITGGEPCIYDLTELTSLLEKNGFSCQIETSGTHEVRCSVNTWVTVSPKVNMRGGYDILPQALKRADEVKHPVARQRDIDALEALLETLTDSKSRIIALQPISQKEEATKLCIATCIAKNWRLSMQTHKYLNIA

SEQ ID NO: 33483 - protein, 223 aa, Rahnella sp.
  misc_feature (1)..(223): tr|A0A4R2YWX3|A0A4R2YWX3_9GAMM 7-carboxy-7-deazaguanine synthase OS=Rahnella sp. JUb53 OX=2485128 GN=queE PE=3 SV=1
MQYPINEMFETLQGEGYFTGVPAIFVRLQGCPVGCSWCDTKHTWDKIADREVDMQRILVKTEESDAWGNATSEQLLEVIAQQGYTARHVVITGGEPCIYDLTELTSLLEKNGFSCQIETSGTHEVRCSVNTWVTVSPKVNMRGGYDILPQALKRADEVKHPVARQRDIDALDALLETLTDSKARIIALQPISQKEEATRLCIATCIARNWRLSMQTHKYLNIA

SEQ ID NO: 33484 - protein, 223 aa, Rahnella woolbedingensis
  misc_feature (1)..(223): tr|A0A419N4U5|A0A419N4U5_9GAMM 7-carboxy-7-deazaguanine synthase OS=Rahnella woolbedingensis OX=1510574 GN=que E PE=3 SV=1
MQYPINEMFETLQGEGYFTGVPAIFVRLQGCPVGCSWCDTKHTWDKIADREVDMQRILVKTQESDAWGNATSEQLLDVIVQQGYTARHVVITGGEPCIYDLTELTSLLEKNGFSCQIETSGTHEVRCSVNTWVTVSPKVNMRGGYDIVLQALKRADEVKHPVARQRDIDALDELLETLTDSKARIIALQPISQKEEATRLCIATCIARNWRLSMQTHKYLNIA

SEQ ID NO: 33485 - protein, 251 aa, Raineya orbicola
  misc_feature (1)..(251): tr|A0A2N3ID87|A0A2N3ID87_9BACT 7-carboxy-7-deazaguanine synthase OS=Raineya orbicola OX=2016530 GN=queE PE=3 S V=1
MLQIAQLDKKPEIFYSIQGEGKSIGKPSIFIRLSLCNLYCFWCDTDYTWNWEGTNYPHLNDKNPNYQKFNKADSIIKLTEKQIIAEIQKYNCHRLIFTGGEPLVQQKKLLSLLAQLKKQNPQYHIEFETNGTIIPIPELEALTNQYNVSLKLENSKVRLQERLKPKAIHFFAQNDKANFKFVVDSPKDLDEILEIIQKYAIFHDKVYLMPQGTKPAILRKKQQWLVEICKQYQFNYTDRLHILIYGDKRGI

SEQ ID NO: 33486 - protein, 212 aa, Ralstonia insidiosa
  misc_feature (1)..(212): tr|A0A191ZWP1|A0A191ZWP1_9RALS 7-carboxy-7-deazaguanine synthase OS=Ralstonia insidiosa OX=190721 GN=queE PE=3 SV=1
MTYAVKEIFYTLQGEGANTGRAAVFCRFAGCNLWSGREADRATAVCKFCDTDFVGTDGTQGGKYTTADALADAVVAEWPADATGGKPLVICTGGEPLLQLDKPLIDALHARGFEIAIETNGTIAVPEGIDWVCVSPKMGSELVVTRGDELKVVIPQDGQDLDAYERLDFQHLFLQAMDGPLARQNTALAVELCQRRPRWRLSLQTHKMLGIR

SEQ ID NO: 33487 - protein, 212 aa, Ralstonia mannitolilytica
  misc_feature (1)..(212): tr|A0A2N5LAM2|A0A2N5LAM2_9RALS 7-carboxy-7-deazaguanine synthase OS=Ralstonia mannitolilytica OX=105219 GN=que E PE=3 SV=1
MTYAVKEIFYTLQGEGANTGRAAVFCRFAGCNLWSGREADRATAVCQFCDTDFVGTDGTQGGKYATADALADTVAAEWPASATGGKPLVICTGGEPLLQLDTPLIDALHARGFEIAIETNGTIAVPEGIDWVCVSPKMGSELVVTRGDELKVVIPQDGQDLDAYERLDFQHFFLQAMDGPLARQNTAAAVELCQRRPRWRLSLQTHKMLGIR

SEQ ID NO: 33488 - protein, 212 aa, Ralstonia mannitolilytica
  misc_feature (1)..(212): tr|A0A160BPL7|A0A160BPL7_9RALS 7-carboxy-7-deazaguanine synthase OS=Ralstonia mannitolilytica OX=105219 GN=que E PE=3 SV=1
MTYAVKEIFYTLQGEGANTGRAAVFCRFAGCNLWSGREADRATAVCQFCDTDFVGTDGTQGGKYTTADALADTVAAEWPASATGGKPLVICTGGEPLLQLDKPLIDALHARGFEIAIETNGTIAVPDGIDWVCVSPKMGSELVVTRGDELKVVIPQDGQDLDAYERLDFQHFFLQAMDGPLARQNTAAAVELCQRRPRWRLSLQTHKMLGIR

SEQ ID NO: 33489 - protein, 212 aa, Ralstonia pickettii
  misc_feature (1)..(212): tr|R0CUB5|R0CUB5_RALPI 7-carboxy-7-deazaguanine synthas e OS=Ralstonia pickettii OR214 OX=1264675 GN=queE PE=3 SV=1
MTYAVKEIFYTLQGEGANTGRAAVFCRFAGCNLWSGREADRATAVCQFCDTDFVGTDGTQGGKYTTAEALADTVAAEWPANATGGKPLVICTGGEPLLQLDKPLIDALHARGFEIAIETNGTIAMPEGIDWVCVSPKMGSELVVTRGDELKVVIPQDGQDLDAYERLDFQHFFLQAMDGPLARQNTAAAVELCQRRPRWRLSLQTHKMLGIR

SEQ ID NO: 33490 - protein, 212 aa, Ralstonia pickettii
  misc_feature (1)..(212): tr|C6BHS5|C6BHS5_RALP1 7-carboxy-7-deazaguanine synthas e OS=Ralstonia pickettii (strain 12D) OX=428406 GN=queE PE=3 SV=1
MTYAVKEIFYTLQGEGANTGRAAVFCRFAGCNLWSGREADRATAVCQFCDTDFVGTDGTQGGKYTTADALADTVAAEWPASATGGKPLVICTGGEPLLQLDKPLIDALHARGFEIAIETNGTITVPEGIDWVCVSPKMGSELVVTRGDELKVVIPQDGQDLDAYERLDFQHFFLQAMDGPLARQNTAAAVELCQRRPRWRLSLQTHKMLGIR

SEQ ID NO: 33491 - protein, 212 aa, Ralstonia pseudosolanacearum
  misc_feature (1)..(212): tr|A0A454TLK3|A0A454TLK3_9RALS 7-carboxy-7-deazaguanine synthase OS=Ralstonia pseudosolanacearum OX=1310165 GN =queE PE=3 SV=1
MTYAVKEIFYTLQGEGANTGRAAVFCRFAGCNLWSGREADRAAAICQFCDTDFVGTDGTLGGKYPTADALANAVAAQWPAAATGGRPLVVCTGGEPLLQLDRPLIDALHARGFEIAIETNGTLAVPDGIDWVCVSPKMGAELVVTRGDELKVVIPQSGQDLDAYERLDFRHFFLQPMDGPLARQNTALAVELCQRRPRWHLSLQTHKMLGIR

SEQ ID NO: 33492 - protein, 212 aa, Ralstonia pseudosolanacearum
  misc_feature (1)..(212): tr|A0A223GLX8|A0A223GLX8_9RALS 7-carboxy-7-deazaguanine synthase OS=Ralstonia pseudosolanacearum OX=1310165 GN =queE PE=3 SV=1
MTYAVKEIFYTLQGEGANTGRAAVFCRFAGCNLWSGREADRAAAICQFCDTDFVGTDGTLGGKYPTADALADTVAAQWPAAATGGRPLVVCTGGEPLLQLDRPLIDALHARGFEIAIETNGTLAVPDGIDWVCVSPKMGAELVVTRGDELKVVIPQPGQDLDAYERLDFRHFFLQPMDGPLARRNTALAVELCQRRPRWHLSLQTHKMLGIR

SEQ ID NO: 33493 - protein, 212 aa, Ralstonia solanacearum
  misc_feature (1)..(212): tr|F6G1S0|F6G1S0_RALS8 7-carboxy-7-deazaguanine synthas e OS=Ralstonia solanacearum (strain Po82) OX=1031711 GN =nrdG PE=3 SV=1
MTYAVKEIFYTLQGEGANTGRAAVFCRFAGCNLWSGREADRAAAVCQFCDTDFVATDGTLGGKYATANALADLVAAQWPADATGGQPLVVCTGGEPLLQLDRPLIDALHARGFEIAVETNGTVAVPEGIDWVCVSPKMGAELVVTRGDELKVVIPQPGQDLDAYERLDFRHFFLQPMDGPLARQNTALAVELCQRRPRWHLSLQTHKMLGIR

SEQ ID NO: 33494 - protein, 212 aa, Ralstonia solanacearum
  misc_feature (1)..(212): tr|A0A0S4UDR0|A0A0S4UDR0_RALSL 7-carboxy-7-deazaguanine synthase OS=Ralstonia solanacearum OX=305 GN=queE PE=3 SV=1
MTYAVKEIFYTLQGEGANTGRAAVFCRFAGCNLWSGREADRAAAICQFCDTDFVGTDGTLGGKYPTADALADTVAAQWPAAATGGRPLVVCTGGEPLLQLDRPLIDALHARGFEIAIETNGTLAVPDGIDWVCVSPKMGAELVVTRGDELKVVIPQPGQDLDAYERLDFRHFFLQPMDGPLARQNTALAVELCQRRPRWHLSLQTHKMLGIR

SEQ ID NO: 33495 - protein, 211 aa, Ralstonia sp.
  misc_feature (1)..(211): tr|A0A1H0SE00|A0A1H0SE00_9RALS 7-carboxy-7-deazaguanine synthase OS=Ralstonia sp. 25mfcol4.1 OX=1761899 GN=que E PE=3 SV=1
MTYAVKEIFYTLQGEGANAGRAAVFCRFSGCNLWTGREEDRARAVCQFCDTDFVGTDGTRGGKYKTADELAAVVASEWPQGAGGTPLVVCTGGEPLLQLDAPLIDALHAQGFEIAIETNGTIEVPAGIDWVCVSPKMGSELVVKKGDELKVVMPQAGQDFAAYEQLDFRYFLVQAMDGPLARQNTAAAVDFCQRHPRWRLSLQTHKLLGIR

SEQ ID NO: 33496 - protein, 212 aa, Ralstonia sp.
  misc_feature (1)..(212): tr|A0A100HX90|A0A100HX90_9RALS 7-carboxy-7-deazaguanine synthase OS=Ralstonia sp. NT80 OX=1218247 GN=nrdG PE=3 SV=1
MTYAVKEIFYTLQGEGANTGRAAVFCRFAGCNLWSGREADRATAVCKFCDTDFVGTDGTQGGKYTTADALADTVAAEWPADAKGGKPLVICTGGEPLLQLDKPLIDALHARGFEIAIETNGTIAVPEGIDWVCVSPKMGSELVVTRGDELKVVIPQDGQDLDAYERLDFQHLFLQAMDGPLARQNTALAVELCQRRPRWRLSLQTHKMLGIR

SEQ ID NO: 33497 - protein, 212 aa, Ralstonia syzygii
  misc_feature (1)..(212): tr|G3A8B5|G3A8B5_9RALS 7-carboxy-7-deazaguanine synthas e OS=Ralstonia syzygii R24 OX=907261 GN=queE PE=3 SV=1
MTYAVKEIFYTLQGEGANTGRAAVFCRFAGCNLWSGREADRATAICQFCDTDFVGTDGTQGGKYPTADALADTVAAQWPADATGGRPLVVCTGGEPLLQLDRLLIDALHARGFEIAIETNGTLAVPDGIDWVCVSPKMGAELVVTRGDELKVVIPQQDQDLDAYERLDFRHFFLQPMDGPLAHQNTALAVDLCQRRPRWHLSLQTHKMLGIR

SEQ ID NO: 33498 - protein, 223 aa, Raoultella electrica
  misc_feature (1)..(223): tr|A0A514EM96|A0A514EM96_9ENTR 7-carboxy-7-deazaguanine synthase OS=Raoultella electrica OX=1259973 GN=queE PE =3 SV=1
MQYPINEMFQTLQGEGYFTGVPAIFIRLQGCPVGCAWCDTKHTWDKLADREVSLFSILAKTKESDKWGPASGEDLLAIIGRQDWTARHVVITGGEPCIHDLTPLTMLLEQNGFSCQIETSGTHEVRCSPNTWVTVSPKVNMRGGYDVLSQALLRADEIKHPVGRVRDIEALDELLETLTDDKPRIIALQPISQKEDATRLCIETCIARNWRLSMQTHKYLNIA

SEQ ID NO: 33499 - protein, 223 aa, Raoultella ornithinolytica
  misc_feature (1)..(223): tr|A0A4R2XRS2|A0A4R2XRS2_RAOOR 7-carboxy-7-deazaguanine synthase OS=Raoultella ornithinolytica OX=54291 GN=que E PE=3 SV=1
MQYPINEMFQTLQGEGYFTGVPAIFIRLQGCPVGCAWCDTKHTWDKLADREVSLFSILAKTKESDKWGPASGEDLLAIVGRQGWTARHVVITGGEPCIHDLTPLTTLLEHNGFSCQIETSGTHEVRCSPRAWVTVSPKVNMRGGYDVLSQALLRADEIKHPVGRVRDIEALDELLETLTDDKPRIIALQPISQKEDATRLCIETCIARNWRLSMQTHKYLNIA

SEQ ID NO: 33500 - protein, 223 aa, Raoultella ornithinolytica
  misc_feature (1)..(223): tr|A0A1Y6GCS5|A0A1Y6GCS5_RAOOR 7-carboxy-7-deazaguanine synthase OS=Raoultella ornithinolytica OX=54291 GN=que E PE=3 SV=1
MQYPINEMFQTLQGEGYFTGVPAIFIRLQGCPVGCAWCDTKHTWDKLADREVSLFSILAKTKESDKWGPASGEDLLAIIGRQDWTARHVVITGGEPCIHDLTPLTMLLEQNGFSCQIETSGTHEVRCSPRTWVTVSPKVNMRGGYDVLSQALLRADEIKHPVGRVRDIEALDELLETLSDDKPRIIALQPISQKEDATRLCIETCIARNWRLSMQTHKYLNIA

SEQ ID NO: 33501 - protein, 223 aa, Raoultella planticola
  misc_feature (1)..(223): tr|A0A2X2EAG6|A0A2X2EAG6_RAOPL 7-carboxy-7-deazaguanine synthase OS=Raoultella planticola OX=575 GN=queE PE=3 SV=1
MQYPINEMFQTLQGEGYFTGVPAIFIRLQGCPVGCAWCDTKHTWDKLADREVSLFSILAKTKESDKWGPASGEDLLAIIGRQDWTARHVVITGGEPCIHDLTPLTTLLEQNGFSCQIETSGTHEVRCSPNTWVTVSPKVNMRGGYDVLSQALLRADEIKHPVGRVRDIEALDELLETLSDEKPRIIALQPISQKDDATRLCIETCIARNWRLSMQTHKYLNIA

SEQ ID NO: 33502 - protein, 83 aa, Raoultella planticola
  misc_feature (1)..(83): tr|A0A485BQU2|A0A485BQU2_RAOPL 7-carboxy-7-deazaguanine synthase OS=Raoultella planticola OX=575 GN=queE_3 PE= 4 SV=1
MRGGYDVLSQALLRADEIKHPVGRVRDIEALDELLETLSDEKPRIIALQPISQKDDATRLCIETCIARNWRLSMQTHKYLNIA

SEQ ID NO: 33503 - protein, 223 aa, Raoultella sp.
  misc_feature (1)..(223): tr|A0A3N2EGN6|A0A3N2EGN6_9ENTR 7-carboxy-7-deazaguanine synthase OS=Raoultella sp. BIGb0399 OX=2485119 GN=queE PE=3 SV=1
MQYPINEMFQTLQGEGYFTGVPAIFIRLQGCPVGCAWCDTKHTWDKLADREVSLFSILAKTKESDKWGPASGEDLLAIIGRQGWTARHVVITGGEPCIHDLTPLTVLLEQNGFSCQIETSGTHEVRCSPHTWVTVSPKVNMRGGYDVLSQALQRADEIKHPVGRVRDIEALDELLETLTDDKPRIIALQPISQKEDATRLCIETCIARNWRLSMQTHKYLNIA

SEQ ID NO: 33504 - protein, 223 aa, Raoultella sp.
  misc_feature (1)..(223): tr|A0A4R3ZDF6|A0A4R3ZDF6_9ENTR 7-carboxy-7-deazaguanine synthase OS=Raoultella sp. BIGb0138 OX=2485115 GN=queE PE=3 SV=1
MQYPINEMFQTLQGEGYFTGVPAIFIRLQGCPVGCAWCDTKHTWDKLADREVSLFSILAKTKESDKWGPASGEDLLAIVGRQDWTARHVVITGGEPCIHDLTPLTALFEQNGFSCQIETSGTHEVRCTPNTWVTVSPKVNMRGGYDVLSQALQRADEIKHPVGRVRDIEALDELLATLSDEKSRIIALQPISQKDDATRLCIETCIARNWRLSMQTHKYLNIA

SEQ ID NO: 33505 - protein, 120 aa, Raoultella terrigena
  misc_feature (1)..(120): tr|A0A3P8KTJ2|A0A3P8KTJ2_RAOTE 7-carboxy-7-deazaguanine synthase OS=Raoultella terrigena OX=577 GN=queE_2 PE=4 SV=1
MTTLLEHNGFSCQIETSGTHEVRCSPRAWVTVSPKVNMRGGYDVLSQALLRADEIKHPVGRVRDIEALDELLETLTDDKPRIIALQPISQKEDATRLCIETCIARNWRLSMQTHKYLNIA

SEQ ID NO: 33506 - protein, 223 aa, Raoultella terrigena
  misc_feature (1)..(223): tr|A0A1V2BPW6|A0A1V2BPW6_RAOTE 7-carboxy-7-deazaguanine synthase OS=Raoultella terrigena OX=577 GN=queE PE=3 S V=1
MQYPINEMFQTLQGEGYFTGVPAIFIRLQGCPVGCAWCDTKHTWDKLADREVSLFSILAKTKESDKWGPASGEDLLAIIGRQGWTARHVVITGGEPCIHDLTPLTTLLEHNGFSCQIETSGTHEVRCSPRAWVTVSPKVNMRGGYDVLSQALLRADEIKHPVGRVRDIEALDELLETLTDDKPRIIALQPISQKEDATRLCIETCIARNWRLSMQTHKYLNIA

SEQ ID NO: 33507 - protein, 208 aa, Raphidiopsis brookii; identical to SEQ ID NO: 29543
  misc_feature (1)..(208): tr|D4TM47|D4TM47_9CYAN 7-carboxy-7-deazaguanine synthas e OS=Raphidiopsis brookii D9 OX=533247 GN=queE PE=3 SV= 1

SEQ ID NO: 33508 - protein, 208 aa, Raphidiopsis curvata
  misc_feature (1)..(208): tr|A0A1Z4VCN9|A0A1Z4VCN9_9CYAN 7-carboxy-7-deazaguanine synthase OS=Raphidiopsis curvata NIES-932 OX=1973482 G N=queE PE=3 SV=1
MSILEIKLPIHETFQSTVQGEGYWTGSLVDFIRLSGCPLSCPWCDTGYGDGGANLPRFERTIGELLAEIKSPRIVISGGEPFIHKHLPELVEALLDAGKQVSIETSGSFWQEVPLSAWITLSPKEHINPKYPVQNQFWSRANEAKIVIETGQEIEFYQEQLSAHPDLCVYLQPEWNSSSKSLALILQLLQQQPDYKLSLQTHKYIGLQ

SEQ ID NO: 33509 - protein, 206 aa, Reichenbachiella agariperforans
  misc_feature (1)..(206): tr|A0A1M6R652|A0A1M6R652_9BACT 7-carboxy-7-deazaguanine synthase OS=Reichenbachiella agariperforans OX=156994 GN=queE PE=3 SV=1
MSYVPKISEKLPIMEIFYSIQGEGYYAGTPAIFIRLGGCDVGCVWCDVKESWDEKDHPFFTVKEIIEQIQDYPCKTIIVTGGEPLMYDMTELTTALKEKGYQLNIETSGAYPMSGVWDWVCFSPKKFKAPDQSVYAAASELKAIAFNKSDFKFAEEHAEQVNDRCKLYLQPEWSKADKMTPEIIEYVKAHSQWNISLQTHKYLDIR

SEQ ID NO: 33510 - protein, 206 aa, Reichenbachiella faecimaris
  misc_feature (1)..(206): tr|A0A1W2GJQ8|A0A1W2GJQ8_9BACT 7-carboxy-7-deazaguanine synthase OS=Reichenbachiella faecimaris OX=692418 GN=q ueE PE=3 SV=1
MAFVPKISEKLPIMEIFYSIQGEGFHSGKPAVFVRLGGCDVGCVWCDVKESWNEEDHPFFTIDEILVELSQYPCKTLIITGGEPLMYDLKELTEKLKSEGYQLHIETSGAYPMTGTWDWVCFSPKKFKAPHKSVYSQAHELKAIVFNKSDFKFAEEHAANVEEKCMLYLQPEWGKADQMTEKIIDYAKAHPQWNISLQTHKYLNIP

SEQ ID NO: 33511 - protein, 206 aa, Reichenbachiella sp.
  misc_feature (1)..(206): tr|A0A2G5KYT1|A0A2G5KYT1_9BACT 7-carboxy-7-deazaguanine synthase OS=Reichenbachiella sp. 5M10 OX=1889772 GN=qu eE PE=3 SV=1
MSYVPKISEKLPIMEIFYSIQGEGYYAGTPAIFIRLGGCDVGCVWCDVKESWDEKDHPFFTVKEIVDQIQDYPCKTIIVTGGEPLMYDMTELTTALKAKEYQLNIETSGAYPMSGVWDWVCFSPKKFKAPDQSVYAAASELKAIAFNKSDFKFAEEHAEQVNDRCKLYLQPEWSKADKMTPEIIEYVKAHSQWNISLQTHKYLDIR

SEQ ID NO: 33512 - protein, 217 aa, Reinekea blandensis
  misc_feature (1)..(217): tr|A4BJS1|A4BJS1_9GAMM 7-carboxy-7-deazaguanine synthas e OS=Reinekea blandensis MED297 OX=314283 GN=queE PE=3 SV=1
MTYSVKEMFYTLQGEGFHTGRPAVFCRFSGCNLWNGREKDRATSICRFCDTDFVGTDGQNGGKFREARELAQRIADFWPADQAHRFVVFTGGEPALQLDETLIAALHDVGFECAVESNGTLPLPPSLDWVCISPKGSAEVVIEACDELKLVFPQADAQPERFSHIHAQHRFLSPLNDWTQAQLSPAQNNNTQACVQYCLEHPQWRLTLQTHKVLNID

SEQ ID NO: 33513 - protein, 210 aa, Reinekea forsetii
  misc_feature (1)..(210): tr|A0A2K8KRI2|A0A2K8KRI2_9GAMM 7-carboxy-7-deazaguanine synthase OS=Reinekea forsetii OX=1336806 GN=queE PE=3 SV=1
MFYTLQGEGFHTGRPAVFCRFTGCNLWSGREQDRAQSVCQFCDTDFVGTDGQNGGKFKQPADLAQAIATQWPSGRGHRFVVFTGGEPALQLDDRLIAELHRLDFVCAVETNGTLALPDAVDWVCISPKGVAQVALTRCNELKLVYPQVDAPPERFTELQADYRYLSPINDYREQTIVPARNHATQACIDYCLSHPEWHLTLQAHKIVNID

SEQ ID NO: 33514 - protein, 217 aa, Reinekea marinisedimentorum
  misc_feature (1)..(217): tr|A0A4R3I9J6|A0A4R3I9J6_9GAMM 7-carboxy-7-deazaguanine synthase OS=Reinekea marinisedimentorum OX=230495 GN=q ueE PE=3 SV=1
MTYSVKEMFYSLQGEGHHSGRPSVFCRFAGCNLWNGKEASRATSVCTFCDTDFIGTDGQNGGKFKTEAALAEAIESLWPENAGNRFVVFTGGEPALQLTPALIRELQQRGFECAVESNGTLPLPTELDWVCISPKGSSEVVITECDELKLVYPQQNALPERFAAVKARYRYLSPLNDWTQSSLLASSHGNTQQCIEYCLQNPQWRLTLQSHKILNID

SEQ ID NO: 33515 - protein, 215 aa, Reinekea sp.
  misc_feature (1)..(215): tr|A0A5C8Z6M0|A0A5C8Z6M0_9GAMM 7-carboxy-7-deazaguanine synthase OS=Reinekea sp. SSH23 OX=2593301 GN=queE PE=3 SV=1
MAYSVKEMFYSLQGEGHHSGRPSIFCRFAGCNLWNGKEASREQSVCSFCDTDFIGTDGQNGGKFRTEQALVEAIEALWPEQAEHKYVVFTGGEPALQLTNELIIALQKRGFECAVESNGTLPLPSQLDWVCISPKGSAEITVTECDELKLVFPQEAAMPERFTDIKARYRYLSPLNDWQQSTLIFNSNTQATIDYCLAHPQWRLTLQSHKILHID

SEQ ID NO: 33516 - protein, 241 aa, Reyranella sp.
  misc_feature (1)..(241): tr|A0A522Z8K2|A0A522Z8K2_9PROT 7-carboxy-7-deazaguanine synthase OS=Reyranella sp. OX=1929291 GN=queE PE=3 SV= 1
MSAIRISEIFGPTVQGEGALIGKPTVFVRTGGCDYRCTWCDTLYAVLPEYRHDWRPMEPEAILAKVDDLTGGAPVLVTISGGNPAIQPLGPLIEQGHARGHRFAMETQGSVAAAWFATLDHLVLSPKPPSSGMETDWSAFHACLAAAQGGPQTVLKVAVFDEADYAFARAASARHPSLPVYLSIGNHTPGEPNEAGRDGVDQKGLMARFRWLVDRVAQDRWFAATVLPQLHVLAWGNERGV

SEQ ID NO: 33517 - protein, 221 aa, Rheinheimera nanhaiensis
  misc_feature (1)..(221): tr|I1E1P3|I1E1P3_9GAMM 7-carboxy-7-deazaguanine synthas e OS=Rheinheimera nanhaiensis E407-8 OX=562729 GN=ygcF PE=3 SV=1
MYKVNEVFETIQGEGSFTGAPAIFIRLQGCPVGCSWCDTKHTWEIKPELKQSLGDIVIKTAETEHWAAVTPADLLQLFVAKGYQAKHVVITGGEPCMFDLNPLCEALHNAGYSTQIETSGTFDIKAPAQTWVTVSPKVNMAGGYKVLQSALDRANEIKHPVAMQKHIDELLQLLQHTDTAAKLIYLQPISQQQRATELAIAMCKQHNWRLSVQVHKYIGIS

SEQ ID NO: 33518 - protein, 221 aa, Rheinheimera pacifica
  misc_feature (1)..(221): tr|A0A1H6NIP1|A0A1H6NIP1_9GAMM 7-carboxy-7-deazaguanine synthase OS=Rheinheimera pacifica OX=173990 GN=queE PE =3 SV=1
MYKVNEVFETIQGEGSFTGAAAIFIRLQGCPVGCSWCDTKHTWDIKDELAMPLGDIVIKTAETEHWAQVTAAELLARFIQEGYQAKHVVITGGEPCMYDLNPLCELLHQNGYSTQIETSGTFTIKAPAQTWVTVSPKVNMAGGYKVLQSALDRANEIKHPVAMEKHVDELLQLLQHTDTKAKLIYLQPISQQRRATELAIAMCKKHNWRLSVQVHKYLGIS

SEQ ID NO: 33519 - protein, 221 aa, Rheinheimera salexigens
  misc_feature (1)..(221): tr|A0A1E7Q6Q3|A0A1E7Q6Q3_9GAMM 7-carboxy-7-deazaguanine synthase OS=Rheinheimera salexigens OX=1628148 GN=queE PE=3 SV=1
MYKVNEIFQTIQGEGSFTGIAAIFIRLQGCPVGCSWCDTKQTWHIDPQLSQSITQVVAKTAETAHWASQTAEQILDLFKNQEYQAKHVVITGGEPCMYDLIPLCQLLHDNGYSTQIETSGTFEIKAPAKTWVTVSPKVNMAGGYKVLQSALDRADEIKHPVAMEKHVDELIALLVDTNISDKLIYLQPISQQRRATELAIAMCTKHNWRLSVQVHKYLGIS

SEQ ID NO: 33520 - protein, 221 aa, Rheinheimera sp.
  misc_feature (1)..(221): tr|A0A3S2TNQ5|A0A3S2TNQ5_9GAMM 7-carboxy-7-deazaguanine synthase OS=Rheinheimera sp. YQF-1 OX=2499626 GN=queE PE=3 SV=1
MYKVNEIFETIQGEGSYTGTPAIFLRLQGCPVGCSWCDTKQTWEIDPELQLSPAAILEKKADSDHWCSLTSAEVVQLFADKSYRAKHVVITGGEPCMYDLRPLCELLHSQGFSTQIETSGTFEVLAPDSTWVTVSPKVNMKGGYQVLRTAMERANEIKHPVAMEKHVEELLALLQGLDLTNKLVYLQPISQKAKATQLAIEFCKQHNWRLSVQVHKYLGIN

SEQ ID NO: 33521 - protein, 221 aa, Rheinheimera sp.
  misc_feature (1)..(221): tr|A0A486XMS1|A0A486XMS1_9GAMM 7-carboxy-7-deazaguanine synthase OS=Rheinheimera sp. BAL341 OX=1708203 GN=queE PE=3 SV=1
MYKVNEVFETIQGEGSFTGAPAIFIRLQGCPVGCSWCDTKHTWEIKDELRQPLGDIVIKTAETEHWASVRAEDIVALFSKEGYQAKHVVITGGEPCMYDLNPLCELLHQAGYSTQIETSGTFEIKAPAQTWVTVSPKVNMAGGYKVLQSALDRANEIKHPVAMEKHIDELLQLLQHTDAAAKLIYLQPISQQRRATELAIAKCKQHNWRLSVQIHKYLGIS

SEQ ID NO: 33522 - protein, 222 aa, Rheinheimera tuosuensis
  misc_feature (1)..(222): tr|A0A285IT05|A0A285IT05_9GAMM 7-carboxy-7-deazaguanine synthase OS=Rheinheimera tuosuensis OX=1323745 GN=queE PE=3 SV=1
MLYKVNEIFETIQGEGSFTGVPAIFVRLQGCPVGCAWCDTKHTWLVNPELEVKLDKVMAKAADTEQWTSLSAEQMLTLFESEGYQARHVVITGGEPCMYDLKPLCNTLHNAGYQTQIETSGTFEILVPPESWVTVSPKVNMKGGYKVLQSALDRADEIKHPVAMDKHIEQLLQLLNDTDTGNKLIYLQPISQQAKATALAIAYCKKYNWRLSVQVHKYLGIE

SEQ ID NO: 33523 - protein, 212 aa, Rhizobacter sp.
  misc_feature (1)..(212): tr|A0A0Q6X0Q3|A0A0Q6X0Q3_9BURK 7-carboxy-7-deazaguanine synthase OS=Rhizobacter sp. Root1221 OX=1736433 GN=que E PE=3 SV=1
MATYSVKEIFYTLQGEGANAGRPAVFCRFAGCNLWTGREADRANATCRFCDTDFVGTDGVGGGKFAGAQALADRIASFWPDPSHANRFVVLTGGEPLLQVDPVLLDALHGHGFTIAMETNGTLPAPDGIDWLCVSPKAGADWVQRRGSELKVVWPQPGLDLDVLEQADFTHRYLQPMDGPLQARHIELCIAQCLARPAWRLSLQTHKVTGIR

SEQ ID NO: 33524 - protein, 211 aa, Rhizobacter sp.
  misc_feature (1)..(211): tr|A0A1M7NPR6|A0A1M7NPR6_9BURK 7-carboxy-7-deazaguanine synthase OS=Rhizobacter sp. OV335 OX=1500264 GN=queE P E=3 SV=1
MTYAVKEIFYTLQGEGAQAGRPAVFCRFAGCNLWSGREQDRASAVCQFCDTDFVGTNGVGGGKFDTALALAQAVASHWPVPHTGRPFVVCTGGEPLLQLDDALVDAFHAQGFEIAVETNGTQPAPKGLDWICVSPKADAELVLTHGHELKLVFPQAKAMPERFTSLQFEHFFLQPMDGLERKRNTEQAVAYCLAHPLWHLSVQTHKYIGIA

SEQ ID NO: 33525 - protein, 244 aa, Rhizobiaceae bacterium
  misc_feature (1)..(244): tr|A0A4U5ZK35|A0A4U5ZK35_9RHIZ 7-carboxy-7-deazaguanine synthase OS=Rhizobiaceae bacterium LC148 OX=1120689 GN =queE PE=3 SV=1
MTGADARIRISEIFGPTIQGEGVLIGQPTVFVRTGGCDYRCGWCDTLHAVDSAYRDEWKPMSVEAIWAEVERLSGGVPLTVSLSGGNPAIQPLGPLIEHGNRRGYRFALETQGSIAKGWFENLDTLVLSPKPPSSGMETDWHALQNCLDMAASKPQTVLKIVVFDDADYAFARHAAARFPHLPVYLQPGNHTPPPPDDDEAVVDIDGVMDRMLWLVGKVTEDRWFAARVLPQLHVLLWGNRRGV

SEQ ID NO: 33526 - protein, 215 aa, Rhizobiales bacterium
  misc_feature (1)..(215): tr|A0A424IJP5|A0A424IJP5_9RHIZ 7-carboxy-7-deazaguanine synthase OS=Rhizobiales bacterium TMED83 OX=1986857 GN =queE PE=3 SV=1
MSYAVKEIFYTLQGEGAQAGRPTVFCRFAGCNLWSGLERDRATAQCRFCDTDFVGTDGQNGGKFADAESLAQAIAAQWPEATPGADALIVFTGGEPCLQLDTALLEAVAAQGFETAVETNGTLAVPRQIDWICVSPKPETVLEQTSGHELKFVYPQETLSPEQFAHLDFEHFFLQPMDVEDAQTRWHNVQAAIAYCLQNPQWRLSLQTHKIIGLD

SEQ ID NO: 33527 - protein, 211 aa, Rhizobiales bacterium
  misc_feature (1)..(211): tr|A0A259K6L9|A0A259K6L9_9RHIZ 7-carboxy-7-deazaguanine synthase OS=Rhizobiales bacterium 39-66-18 OX=1970553 GN=queE PE=3 SV=1
MAYAVKEMFKTLQGEGAQAGRAAVFCRFAGCNLWSGREQDRDTAICRFCDTDFIGMDGDGGGRFADAEALADALVRVWGAGGYERRYVVFTGGEPLLQLDSALVAAAHARGFEIAIETNGTLAPPDGIDWICVSPKAGADLVLKRGQELKLVYPQSGIVPDTLDGLDFAHFFLQPMDGPRRVENTAAAVAYCLDHPRWRLSVQTHKMVGIP

SEQ ID NO: 33528 - protein, 242 aa, Rhizobium acidisoli
  misc_feature (1)..(242): tr|A0A0N1MDU2|A0A0N1MDU2_9RHIZ 7-carboxy-7-deazaguanine synthase OS=Rhizobium acidisoli OX=1538158 GN=queE PE= 3 SV=1
MSGETIRVSEIFGPTIQGEGALIGLPTVFVRTGGCDYRCSWCDSLHAVDSAFRDQWLPMSVEAVWQEVTKLSGGRPLTVSLSGGNPAIQPLGPLIEFGHSQGYRFALETQGSVARDWFRDLDMLVLSPKPPSSGMLTDWDEVDNCLRLAAGGPDIVLKIVVFDDADYAFAREAGERYPAIPLFLQPGNRTPPPPDDDDARIDIDGVMDRMHWLVEKVTADRWFAPRVLPQLHVLLWGNKRGV

SEQ ID NO: 33529 - protein, 242 aa, Rhizobium aethiopicum
  misc_feature (1)..(242): tr|A0A1C3YCI7|A0A1C3YCI7_9RHIZ 7-carboxy-7-deazaguanine synthase OS=Rhizobium aethiopicum OX=1138170 GN=queE P E=3 SV=1
MSAETIRVSEIFGPTIQGEGALIGLPTVFVRTGGCDYRCSWCDSLHAVDSAFRDQWASMSVEAIWREVTKLSDGKPMTVSLSGGNPAIQPLGPLIELGHSEGYRFALETQGSVARNWFRDLDILVLSPKPPSSGMQTHWGEVDNCLRLAAGGPEIALKIVVFDDVDYAFAREVGQRYPYIPLYLQPGNHTPPPPEDDDARIDIDGVMDRMHWLVEKVTADRWFAPRVLPQLHVLLWGNKRGV

SEQ ID NO: 33530 - protein, 210 aa, Rhizobium album
  misc_feature (1)..(210): tr|A0A2U2DK55|A0A2U2DK55_9RHIZ 7-carboxy-7-deazaguanine synthase OS=Rhizobium album OX=2182425 GN=queE PE=3 SV =1
MSYAVKELFKTLQGEGAQAGRAAVFCRFAGCNLWSGREEDRHKAVCQFCDTDFIGTDGDGGGKFRDAEQLASAIARTWGDAETRRYVVFTGGEPLLQLDQTLIAAVHSYGFEIAIETNGTIEPPEGIDWICVSPKAGAPLNLKTGSELKLVYPQASLLPDDLPDLAFEHYFLQPMDGPDRVENIAAVTAFCLENPRWRLSLQTHKMIGIP

SEQ ID NO: 33531 - protein, 245 aa, Rhizobium altiplani
  misc_feature (1)..(245): tr|A0A109JB75|A0A109JB75_9RHIZ 7-carboxy-7-deazaguanine synthase OS=Rhizobium altiplani OX=1864509 GN=queE PE= 3 SV=1
MSGAREAQIRVSEIFGPTIQGEGVLIGLPTVFVRTGGCDYRCSWCDSLHAVDSEYRDQWLPMTVDGIWAEVTRLSGGKPLMVSLSGGNPAIQPLGGLIAHGHEQGYRFALETQGSVAKEWFADLDVLVLSPKPPSSGMATDWDAFEVCLKMAACGPDIALKIVVFDDRDYAYAREAAARYQDLPVYLQPGNHTPPPPDDDDARVDIDGIMDRMLWLVDKVTEDRWFEARVLPQLHVLLWGNKRGV

SEQ ID NO: 33532 - protein, 242 aa, Rhizobium anhuiense
  misc_feature (1)..(242): tr|A0A3S0RWK4|A0A3S0RWK4_9RHIZ 7-carboxy-7-deazaguanine synthase OS=Rhizobium anhuiense OX=1184720 GN=queE PE= 3 SV=1
MSGGTIRVSEIFGPTIQGEGALIGLPTVFVRTGGCDYRCSWCDSLHAVDSAFRDQWIPMSPEAIWHKVTELSGAKPLTVSLSGGNPAIQPLRPLIELGHSQGYRFALETQGSIAQAWFRDLDVLVISPKPPSSGMPTDWDQVDNCLRLAAGGPEIALKIVVFDDADYAFAQRAGERYPQIPLFLQPGNHTPPPPDDDDARIDIDGVMDRMHWLVDKVTADQWFAARVLPQLHVLLWGNKRGV

SEQ ID NO: 33533 - protein, 245 aa, Rhizobium azibense
  misc_feature (1)..(245): tr|A0A4R7ZPI8|A0A4R7ZPI8_9RHIZ 7-carboxy-7-deazaguanine synthase OS=Rhizobium azibense OX=1136135 GN=queE PE=3 SV=1
MTVAREAQIRVSEIFGPTIQGEGVLIGLPTVFVRTGGCDYRCSWCDTLHAVDGEYRDQWRPMSVDDIWNEVLRLSGNKPLTVSLSGGNPAIQPLGPLIERGHSQGFRFALESQGSIAKDWFADLDVLVLSPKPPSSGMETDWRAFETCLKMAAEKPQLALKFVVFDDGDYLFARTAAARYPTLPVYLQPGNHTPPLPTDEEARVDIDGIMDRMLWLIDKVTEDQWFEARVLPQLHVLLWGNKRGV

SEQ ID NO: 33534 - protein, 245 aa, Rhizobium azibense
  misc_feature (1)..(245): tr|A0A4R3RXL5|A0A4R3RXL5_9RHIZ 7-carboxy-7-deazaguanine synthase OS=Rhizobium azibense OX=1136135 GN=queE PE=3 SV=1
MTIARTPEIRVSEIFGPTIQGEGILIGLPTVFVRTGGCDYRCSWCDTLHAVDSDYRDQWRPMSVDDIWQEVLRLSGNKPLTVSLSGGNPAIQPLGPLIERGHSQGFRFALESQGSIAKEWFSALDVLVLSPKPPSSGMETDWHSFEACLKMAAEKPQLALKIVVFDDRDYLFARTAAARYPTLPVYLQPGNHTPPAPGDEEARVDLDGIMDRMLWLVDKVTEDRWFEARVLPQLHVLMWGNKRGV

SEQ ID NO: 33535 - protein, 242 aa, Rhizobium esperanzae
  misc_feature (1)..(242): tr|A0A246DNM0|A0A246DNM0_9RHIZ 7-carboxy-7-deazaguanine synthase OS=Rhizobium esperanzae OX=1967781 GN=queE PE =3 SV=1
MSVETIRVSEIFGPTIQGEGALIGLPTVFVRTGGCDYRCSWCDSLHAVDSAFRDQWLPMSVEAIWQEVTKLSGGNPLTVSLSGGNPAIQPLGPLIELGHSKGYRFALETQGSFAQNWFRDLDVLVLSPKPPSSGMHTDWDQVDNCVRLSAGGPEIALKVVIFDDVDYAFAREVGQRYPYIPLYLQPGNHTPPPPEDEDARIDIDGVMDRMHWLVEKVTVDRWFAPRVLPQLHVLLWGNKRGV

SEQ ID NO: 33536 - protein, 242 aa, Rhizobium etli
  misc_feature (1)..(242): tr|F2AEZ0|F2AEZ0_RHIET 7-carboxy-7-deazaguanine synthas e OS=Rhizobium etli CNPAF512 OX=993047 GN=queE PE=3 SV= 1
MSGESIRVSEIFGPTIQGEGALIGLPTVFVRTGGCDYRCSWCDSLHAVDSAFREQWIPMSTEAIWQEVTKLSAGRPMTVSLSGGNPAIQPLGPLIEFGHSQGYRFALETQGSIARNWFRDLDVLVLSPKPPSSGMLTDWDQVDNCLRLAAGGPEIALKIVVFDDDDYAFAREAGRRYPYIPLYLQPGNHTPPPPDDDDARIDIDGVMDRMHWLVEKVTADGWFAPRVLPQLHVLLWGNKRGV

SEQ ID NO: 33537 - protein, 242 aa, Rhizobium etli
  misc_feature (1)..(242): tr|A0A0A8GH12|A0A0A8GH12_RHIET 7-carboxy-7-deazaguanine synthase OS=Rhizobium etli bv. phaseoli str. IE4803 OX =1432049 GN=queE PE=3 SV=1
MSGETIRVSEIFGPTIQGEGALIGVPTVFVRTGGCDYRCSWCDSLHAVDSAFRDQWSPMSAEAIWQEVTKLSGGRPMTVSLSGGNPAIQPLGPLIELGHSQGYRFALETQGSVARNWFRDLDVLVLSPKPPSSGMSTNWGELGNCLRLTAGGPEIALKIVVFDDADYAFARQVGERYPYIPLYLQPGNHTPPPPDDDDARIDIDGVMDRMHWLVEKVTTDRWFAPRVLPQLHVLLWGNKRGV

SEQ ID NO: 33538 - protein, 245 aa, Rhizobium favelukesii
  misc_feature (1)..(245): tr|W6RFT0|W6RFT0_9RHIZ 7-carboxy-7-deazaguanine synthas e OS=Rhizobium favelukesii OX=348824 GN=exsD PE=3 SV=1
MSGARETQIRVSEIFGPTIQGEGILIGLPTVFVRTGGCDYRCSWCDSLHAVDSAYREQWLPMTVDGIWAEVTRLSGGKPLMVSLSGGNPAIQPLGGLIAHGHERGYRFALETQGSVAKEWFADLDVLVLSPKPPSSGMATDFDAFENCLGMAADGPEIALKIVVFDDRDYAYAREAATRYPDLPVYLQPGNHTPPPPDDDDARVDIDGIMDRMLWLVDKVTEDRWFEARVLPQLHVLLWGNKRGV

SEQ ID NO: 33539 - protein, 245 aa, Rhizobium fredii
  misc_feature (1)..(245): tr|A0A2L0HEJ7|A0A2L0HEJ7_RHIFR 7-carboxy-7-deazaguanine synthase OS=Rhizobium fredii OX=380 GN=queE PE=3 SV=1
MTVTRPAEIRVSEIFGPTIQGEGALIGLPTVFVRTGGCDYRCSWCDSLHAVDSAYRDEWRAMTVEEVWSEVTRLSGGVPVMVSLSGGNPAIQPLGPLIDRGHREGYRFALETQGSVARDWFANLDMLVLSPKPPSSGMETDWEAFDACLRSSRGKPQTALKIVVFDEVDYAYARSAAARHPQLPVYLQPGNHTPPPPDDEVAPIDIEGVMERMRWLVDRVSADKWFEVRVLPQLHVLIWGNRRGV

SEQ ID NO: 33540 - protein, 245 aa, Rhizobium fredii
  misc_feature (1)..(245): tr|A0A2A6M551|A0A2A6M551_RHIFR 7-carboxy-7-deazaguanine synthase OS=Rhizobium fredii OX=380 GN=queE PE=3 SV=1
MTGMRPAEIRVSEIFGPTIQGEGALTGLPTVFVRTGGCDYRCSWCDSLHAVDSAYRDQWRAMTTEEVWNEVTRLSGGLPVMVSLSGGNPAIQPLGALIARGHREGYRFALETQGSVARDWFAELDMLVLSPKPPSSGMETDWEAFDACLRMAEGKPQTVMKIVVFDEADYAYARAAAARCPHLPIYLQPGNHTPPPPEDDDAPIDIEGVMERMRWLVDRVIEDKWFEARVLPQLHVLIWGNRRGV

SEQ ID NO: 33541 - protein, 242 aa, Rhizobium freirei
  misc_feature (1)..(242): tr|N6V388|N6V388_9RHIZ 7-carboxy-7-deazaguanine synthas e OS=Rhizobium freirei PRF 81 OX=363754 GN=exbD PE=3 SV =1
MSEARIRISEIFGPTIQGEGILIGLPTIFVRTGGCDYRCSWCDTLHAVDSDYRDQWQPMSVDQIWQEVTRLSGGKPLTISLSGGNPAIQPLGPLIARGHAEGYRFALETQGSVAKEWFAELDVLVLSPKPPSSGMMTDWAVFEDCLCMAGGKPQIALKIVVFDDLDYAYAQEAASRYPSLPLYLQPGNHTPPPADADDALVDIDGIVERMRWLVDKVSDDRWFEARVLPQLHVLIWGNKRGV

SEQ ID NO: 33542 - protein, 245 aa, Rhizobium gallicum
  misc_feature (1)..(245): tr|A0A1L5NXP5|A0A1L5NXP5_9RHIZ 7-carboxy-7-deazaguanine synthase OS=Rhizobium gallicum OX=56730 GN=queE PE=3 S V=1
MTVARKAEIRVSEIFGPTIQGEGILIGLPTVFVRTGGCDYRCSWCDTLHAVDSEYRDQWRAMSVDDIWQEVLRLSGNKPLTVSLSGGNPAIQPLGPLIERGHSEGFRFALESQGSIAKDWFADLDVLVLSPKPPSSGMETDWCAFEACLKMAAEKPQLALKIVVFDDRDYLFARTAAARYPTLPVYLQPGNHTPPPPADEEASVDIDGIMDRMLWLIDKVTEDRWFEARVLPQLHVLLWGNKRGV

SEQ ID NO: 33543 - protein, 245 aa, Rhizobium gallicum
  misc_feature (1)..(245): tr|A0A0B4XHK4|A0A0B4XHK4_9RHIZ 7-carboxy-7-deazaguanine synthase OS=Rhizobium gallicum bv. gallicum R602 OX=14 18105 GN=queE PE=3 SV=1
MTVAREAQIRVSEIFGPTIQGEGVLIGLPTVFVRTGGCDYRCSWCDTLHAVDGEYRDQWRPMSVDDVWEEVLRLSGNKPLTVSLSGGNPAIQPLGPLIERGHSQGFRFALESQGSIAKNWFADLDVLVLSPKPPSSGMETDWRAFETCLKMATEKPQLALKFVVFDDGDYLFARTAAARYPTLPVYLQPGNHTPPLPTDEEARVDIDGIMDRMLWLIDKVTEDQWFEARVLPQLHVLLWGNKRGV

SEQ ID NO: 33544 - protein, 245 aa, Rhizobium grahamii
  misc_feature (1)..(245): tr|A0A370KLD3|A0A370KLD3_9RHIZ 7-carboxy-7-deazaguanine synthase OS=Rhizobium grahamii OX=1120045 GN=queE PE=3 SV=1
MSGAREAQIRVSEIFGPTIQGEGILIGLPTVFVRTGGCDYRCSWCDSLHAVDSEYRDQWLPMTVDGIWAEVTRLSGGKPLMVSLSGGNPAIQPLGGLIAHGHAQGYKFALETQGSVAKEWFADLDVLVLSPKPPSSGMATDWDAFEDCLRLAGNGPAIALKIVVFDDRDYAYAREAAARYPDLSVYLQPGNHTPPPPDDDDARVDIDGIMDRMLWLVDKVTEDRWFEARVLPQLHVLLWGNKRGV

SEQ ID NO: 33545 - protein, 245 aa, Rhizobium grahamii
  misc_feature (1)..(245): tr|S3HPW7|S3HPW7_9RHIZ 7-carboxy-7-deazaguanine synthas e OS=Rhizobium grahamii CCGE 502 OX=990285 GN=queE PE=3 SV=1
MSGARQAQIRVSEIFGPTIQGEGVLIGLPTVFVRTGGCDYRCSWCDSLHAVDSEYRDQWLPMTVDGIWADVTRLSRGKPLMVSLSGGNPAIQPLGGLIAHGHAQGYKFALETQGSVTKEWFADLDVLVLSPKPPSSGMATDWDAFEDCLRLAGNGPAIALKIVVFDDRDYAYAREASARYPDLSVYLQPGNHTPPPPDDDDARVDIDGIMDRMLWLVDKVTEDRWFEARVLPQLHVLLWGNKRGV

SEQ ID NO: 33546 - protein, 210 aa, Rhizobium hainanense
  misc_feature (1)..(210): tr|A0A1C3WCG9|A0A1C3WCG9_9RHIZ 7-carboxy-7-deazaguanine synthase OS=Rhizobium hainanense OX=52131 GN=queE PE=3 SV=1
MSYAVKELFKTLQGEGAQAGRAAVFCRFAGCNLWSGREEDRHKAICQFCDTDFIGTDGDGGDKFRDAKELASAIARTWGGGTTGRYVVFTGGEPLLQIDEALIAAVHDHGFEIAIETNGTIEPPEGIDWICVSPKAGAPFNLRSGSELKLVYPQSALLPSDLPDLNFEHYFLQPMDGPAQLENIAAVTAFCLENPRWRLSLQTHKMIGIP

SEQ ID NO: 33547 - protein, 242 aa, Rhizobium hainanense
  misc_feature (1)..(242): tr|A0A1C3W2A8|A0A1C3W2A8_9RHIZ 7-carboxy-7-deazaguanine synthase OS=Rhizobium hainanense OX=52131 GN=queE PE=3 SV=1
MSEARIRVSEIFGPTIQGEGILIGLPTIFVRTGGCDYRCSWCDTLHAVDSDYRDQWQPMSVDEIWQEVMRLSGGKPLTISLSGGNPAIQLLGPLIARGHAEGYRFALETQGSLAKEWFAELDVLVLSPKPPSSGMATNWAAFDDCLRMAGERPQIALKIVIFDDLDYEYAREAATRYSHLPVYLQPGNHTPPPADAEDALVDIDGIVERMRWLVEKVGNDRWFEARVLPQLHVIIWGNRRGV

SEQ ID NO: 33548 - protein, 242 aa, Rhizobium hidalgonense
  misc_feature (1)..(242): tr|A0A2A6K464|A0A2A6K464_9RHIZ 7-carboxy-7-deazaguanine synthase OS=Rhizobium hidalgonense OX=1538159 GN=queE PE=3 SV=1
MSAGTIRVSEIFGPTIQGEGVLIGLPTVFVRTGGCDYRCSWCDSLHAVDSAYRDQWIPMAVDAIWQEVTRLSGGRPMTISLSGGNPAIQPLGPLIELGHSQGYRFALETQGSVARDWFRDLDVLVLSPKPPSSGMLTDWGEIDNCLRHAAGGPEIALKIVVFDDVDYAFAQRVGERYPYIPLFLQPGNHTPPPPDDDDARIDIDGLMDRMHWLIDKVTADGWFAPRVLPQLHVLLWGNKRGV

SEQ ID NO: 33549 - protein, 231 aa, Rhizobium ipomoeae
  misc_feature (1)..(231): tr|A0A4S8NT06|A0A4S8NT06_9RHIZ 7-carboxy-7-deazaguanine synthase OS=Rhizobium ipomoeae OX=1210932 GN=queE PE=3 SV=1
MKGKNPLRRQERDDGQTLWIQEVFYTLQGEGPYSGQPSVFVRTCGCNLRCYWCDTDFESSTWRPSLEDLLQAIDAVCPAFCDLIVITGGEPFRQNIGPLVETLLTRGKRVQIETNGTLWLDLPLSDRLTIVCSPKTSSLHPKLVPRISAYKYVVAAGDADPQDGLPINSTQKQDAEMRLFRHDGHVGAIYVMPRDDNDEVLNRRNRDFCAELALQHGYRLCLQTHKLLNLR

SEQ ID NO: 33550 - protein, 245 aa, Rhizobium jaguaris
  misc_feature (1)..(245): tr|A0A387FXI9|A0A387FXI9_9RHIZ 7-carboxy-7-deazaguanine synthase OS=Rhizobium jaguaris OX=1312183 GN=queE PE=3 SV=1
MSEARETRIRVSEIFGPTIQGEGILIGLPTVFVRTGGCDYRCFWCDTLHAVDRDYRDQWQPMSVDEIWQEVTRLSGGKPLTVSLSGGNPAIQPLGPLIARGHDHGYSFALETQASIAKEWFADLDVLVLSPKPPSSGMATDWDAFDDCLRQAADRPQIALKIVVFDDRDYAYARDASARYPRLPVYLQPGNHTPPPPETDDAAIDIDGILDRMRWLVDRVTADGWFEARVLPQLHVLLWGNKRGV

SEQ ID NO: 33551 - protein, 210 aa, Rhizobium jaguaris
  misc_feature (1)..(210): tr|A0A387G0C9|A0A387G0C9_9RHIZ 7-carboxy-7-deazaguanine synthase OS=Rhizobium jaguaris OX=1312183 GN=queE PE=3 SV=1
MSYIVKELFKTLQGEGAQAGRAAVFCRFSGCNLWSGREEDRHKALCQFCDTDFVGTDGYGGGKFQDAASLAGAIAATWGKIERNRYVVFTGGEPLLQLDAALIGAVRAVGFAIAIETNGTMEPPKGIDWICVSPKAGAPLELRSGSELKLVYPQVDLFPDDLPDVHFDQYFLQPMDGPDRARNTAAVTEFCLQNPHWRLSLQTHKMIGMP

SEQ ID NO: 33552 - protein, 242 aa, Rhizobium laguerreae
  misc_feature (1)..(242): tr|A0A4R3PXI2|A0A4R3PXI2_9RHIZ 7-carboxy-7-deazaguanine synthase OS=Rhizobium laguerreae OX=1076926 GN=queE PE =3 SV=1
MSGGTIRVSEIFGPTIQGEGALIGLPTVFVRTGGCDYRCSWCDSLHAVDSAFRNQWIPMSVETIWHEVMKLSGGKPLTVSLSGGNPAIQPLRPLIELGHSQGYRFALETQGSVAQAWFRDLDILVISPKPPSSGMLTDWDQVDNCLQLAAGGPEVALKIVVFDDADYAFAQQAGQRYPQIPLFLQPGNHTPPPPEDDDARIDLDGVMDRMHWLVERVTADQWFEVRVLPQLHVLLWGNKRGV

SEQ ID NO: 33553 - protein, 242 aa, Rhizobium laguerreae
  misc_feature (1)..(242): tr|A0A1S9H2M9|A0A1S9H2M9_9RHIZ 7-carboxy-7-deazaguanine synthase OS=Rhizobium laguerreae OX=1076926 GN=queE PE =3 SV=1
MSGGTIRVSEIFGPTIQGEGALIGLPTVFVRTGGCDYRCSWCDSLHAVDSAFRNQWIPMSVETIWQEVMKLSGGKPLTVSLSGGNPAIQPLRPLIELGHTQGYRFALETQGSVAQGWFRDLDTLVISPKPPSSGMLTDWDQVDNCLQLAAGGPEVALKVVVFDEPDYAFAQQAGQRYPQIPLFLQPGNHTPPPPEDDDARIDLDGVMDRMHWLVERVTADQWFEVRVLPQLHVLLWGNKRGV

SEQ ID NO: 33554 - protein, 242 aa, Rhizobium leguminosarum
  misc_feature (1)..(242): tr|A0A2K9Z8K3|A0A2K9Z8K3_RHILE 7-carboxy-7-deazaguanine synthase OS=Rhizobium leguminosarum OX=384 GN=queE PE= 3 SV=1
MSVGSIRVSEIFGPTIQGEGALIGLPTVFVRTGGCDYRCSWCDSLHAVDSAFRDQWIPMSTEAVWHKVTELSGGKPLTVSLSGGNPAIQPLRPLIELGHSQGYRFALETQGSVAQAWFRDLDILVISPKPPSSGMLTDWGQVDHCLQLASGEPEVALKIVVFDDTDYEFAQRAGQRYPQIPLFLQPGNHTPPPPDDDDARIDIDGVMDRMHWLVAKVTADQWFTARVLPQLHVLLWGNKRGV

SEQ ID NO: 33555 - protein, 242 aa, Rhizobium leguminosarum
  misc_feature (1)..(242): tr|A0A2Z4YJ39|A0A2Z4YJ39_RHILE 7-carboxy-7-deazaguanine synthase OS=Rhizobium leguminosarum OX=384 GN=queE PE= 3 SV=1
MSVGSIRVSEIFGPTIQGEGALIGLPTVFVRTGGCDFRCSWCDSLHAVDSAFRDQWIPMSTEAVWHKVTELSGGKPLTVSLSGGNPAIQPLRPLIELGHSQGYRFALETQGSVAQAWFRDLDILVISPKPPSSGMLTDWDQVDHCLQLAAGGPEVALKIVVFDDADYEFAQRAGRRYPQIPLFLQPGNHTPPPPDDEDARIDIDGVMDRMHWLVERVTADQWFAVRVLPQLHVLLWGNKRGV

SEQ ID NO: 33556 - protein, 245 aa, Rhizobium loessense
  misc_feature (1)..(245): tr|A0A1G4UAV3|A0A1G4UAV3_9RHIZ 7-carboxy-7-deazaguanine synthase OS=Rhizobium loessense OX=158890 GN=queE PE=3 SV=1
MTVARKAEIRVSEIFGPTIQGEGILIGLPTVFVRTGGCDYRCSWCDTLHAVDSEYRDQWRAMSVDDIWQEVLRLSGNKPLTVSLSGGNPAIQPLGPLIERGHSEGFRFALESQGSIAKDWFADLDVLVLSPKPPSSGMETDWRAFEACLTMAAEKPQLALKIVVFDDRDYLFARTAAARYPTLPVYLQPGNHTPPPPADEEASVDIDGIMDRMLWLIDKVTEDRWFEARVLPQLHVLLWGNKRGV

SEQ ID NO: 33557 - protein, 211 aa, Rhizobium loti
  misc_feature (1)..(211): tr|A0A1B4YSM5|A0A1B4YSM5_RHILI 7-carboxy-7-deazaguanine synthase OS=Rhizobium loti OX=381 GN=queE PE=3 SV=1
MSYAVKEIFYTLQGEGRNAGRAAVFCRFAGCNLWSGREGDRAKAFCGFCDTDFVGVDGPGGGHFDTARELALAVEQAWRGSGTGQRPVVLTGGEPLLQIDEELLEALHSLAFEIAVETNGTIPTLAGIDWLCVSPKCNARLVVMAGDELKLVYPQIGAEPEHFEVLAFEHLLLQPMDGPEREANTAAAVAYCLANPRWRLSLQTHKFLGIP

SEQ ID NO: 33558 - protein, 245 aa, Rhizobium loti
  misc_feature (1)..(245): tr|M5AM43|M5AM43_RHILI 7-carboxy-7-deazaguanine synthas e OS=Rhizobium loti OX=381 GN=queE PE=3 SV=1
MTCALHPGIRVSEIFGPTIQGEGVLIGLPTVFVRTGGCDYRCSWCDSLHAVDRRFRHDWEMMTPEAVWQKVIALSGGQPVMVSLSGGNPAIQPLGHLIDRGHGEGYRFALESQGSVSKQWFADLDVLVLSPKPPSSEMTTDWAAFDACLEAAQAKPQMALKLVVFDEDDYAYAKDAAARYPQLPVYLQPGNHTPPRPGNEDGFIDFAGVMRRMEWLVEKVTRDRWFEARVLPQLHVLLWGNKRGV

SEQ ID NO: 33559 - protein, 242 aa, Rhizobium lusitanum
  misc_feature (1)..(242): tr|A0A1C3WJH8|A0A1C3WJH8_9RHIZ 7-carboxy-7-deazaguanine synthase OS=Rhizobium lusitanum OX=293958 GN=queE PE=3 SV=1
MSEARIRVSEIFGPTIQGEGILIGLPTIFVRTGGCDYRCSWCDTLHAVDSDYRDQWRPMSVEEVWLEVTRLSGGRPLTISLSGGNPAIQPLGPLIAHGHREGYRFALETQGSVAKEWFAELDTLVLSPKPPSSGMVTDWDAFDDCLRMAAEKPQVALKIVVFDDVDYAYARSAASRYPQLPVYLQPGNHTPPPPDADDAIVDIEGVMERMRWLVDKVSDDRWFEARVLPQLHVFIWGNKRGV

SEQ ID NO: 33560 - protein, 245 aa, Rhizobium meliloti
  misc_feature (1)..(245): tr|A0A437GFL7|A0A437GFL7_RHIML 7-carboxy-7-deazaguanine synthase OS=Rhizobium meliloti OX=382 GN=queE PE=3 SV= 1
MIHTRSDEIRVSEIFGPTIQGEGVLIGLPTVFVRSGGCDFRCSWCDSLHAVDSSYRHEWQKMSTEEVWQEIVRLSGGEAVMVSLSGGNPAIQPFGDLIARGLEKGYRFALETQGSLARDWFAALDVLVLSPKPPSSGMETDWEALDDCRRSAGSKPQTVLKFVVFDETDYAYARAAAARQPDLPVYLQPGNHTPPPADQADAPIDIDGVMERMRWLVDRVVADRWFGARVLPQLHVLIWGNRRGV

SEQ ID NO: 33561 - protein, 245 aa, Rhizobium meliloti
  misc_feature (1)..(245): tr|A0A222HXI1|A0A222HXI1_RHIML 7-carboxy-7-deazaguanine synthase OS=Rhizobium meliloti OX=382 GN=queE PE=3 SV= 1
MIHTRSNEIRVSEIFGPTIQGEGVLIGLPTVFVRSGGCDYRCSWCDSLHAVDSNYRHEWQTMSTEEVWQEIVRLSGGEAVMVSLSGGNPAIQPLGDLIGRGHEKGYRFALETQGSVARDWFAALDVLVLSPKPPSSGMETDWEALDDCLRSAGNKPQTVLKFVVFDEADYAYAMTAAARHPHLPVYLQPGNHTPPPAEEADAPIDIDGVMERMRWLVDRVVADRWFEARVLPQLHVLIWGNRRGV

SEQ ID NO: 33562 - protein, 245 aa, Rhizobium mesoamericanum
  misc_feature (1)..(245): tr|K0PRE7|K0PRE7_9RHIZ 7-carboxy-7-deazaguanine synthas e OS=Rhizobium mesoamericanum STM3625 OX=1211777 GN=que E PE=3 SV=1
MSGTREAQIRVSEIFGPTIQGEGVLIGLPTVFVRMGGCDYRCSWCDSLHAVDSEYRDQWLPMTVDGIWAEVTRLSGGKPLMVSLSGGNPAIQPLGGLIAHGHDHGYSFALETQGSVAKQWFADLDVLVLSPKPPSSGMATDWNAFEDCLEMAADGPNIALKIVVFDDRDYAYAREAAARYPDLYVYLQPGNHTPPPPNDDGARVDTDGIMDRMLWLVDKVTKDRWFEARVLPQLHVLLWGNKRGV

SEQ ID NO: 33563 - protein, 242 aa, Rhizobium miluonense
  misc_feature (1)..(242): tr|A0A1C3VMR0|A0A1C3VMR0_9RHIZ 7-carboxy-7-deazaguanine synthase OS=Rhizobium miluonense OX=411945 GN=queE PE= 3 SV=1
MSEARIRVSEIFGPTIQGEGILIGLPTIFVRTGGCDYRCSWCDTLHAVDSDYRDQWQPMSVDEIWQEVTRLSGGKPLTISLSGGNPAIQPLGPLIARGHTEGYRFALETQGSVAKEWFAELDVLVLSPKPPSSGMATSWADFDDCLRMAGGKPQIALKIVVFDDVDYAYARDASLRYPHLPLYLQPGNHTPPPADADDALVDIDGIVERMRWLVDKVGDDKWFEARVLPQLHVLIWGNKRGV

SEQ ID NO: 33564 - protein, 245 aa, Rhizobium mongolense
  misc_feature (1)..(245): tr|A0A559TH42|A0A559TH42_9RHIZ 7-carboxy-7-deazaguanine synthase OS=Rhizobium mongolense USDA 1844 OX=1079460 GN=queE PE=3 SV=1
MTVAREAGIRVSEIFGPTIQGEGILIGLPTVFVRTGGCDYRCSWCDTLHAVDSEYRDQWRAMSVDAIWQEVLRLSGNKPLTVSLSGGNPAIQPLGPLIERGHSEGFRFALESQGSIAKDWFADLDVLVLSPKPPSSGMETDWRAFEACLKMAAEKPQLALKIVVFDDRDYLFARTAAARYPTLPVYLQPGNHTPPPPADEEASVDINGIMDRMLWLIDKVTEDRWFEARVLPQLHVLLWGNKRGV

SEQ ID NO: 33565 - protein, 242 aa, Rhizobium multihospitium
  misc_feature (1)..(242): tr|A0A1C3XAG9|A0A1C3XAG9_9RHIZ 7-carboxy-7-deazaguanine synthase OS=Rhizobium multihospitium OX=410764 GN=queE PE=3 SV=1
MSGALIRVSEIFGPTIQGEGILIGLPTIFVRTGGCDYRCTWCDTLHAVDSDYRDQWRPMPVDEIWQEVTRLSGGKPLTISLSGGNPAIQPLGSLIVRGHAEGYRFALETQGSLAKEWFAELDVLVLSPKPPSSGMTTDWTAFDDCLRMAGNGPQIALKIVIFDDLDYEYAREAAARYPQLPVYLQPGNHTPPPADAEDALVDIDGIVERMRWLVEKVGDDRWFDARVLPQLHVIIWGNRRGV

SEQ ID NO: 33566 - protein, 251 aa, Rhizobium nepotum
  misc_feature (1)..(251): tr|A0A0D8KI15|A0A0D8KI15_9RHIZ 7-carboxy-7-deazaguanine synthase OS=Rhizobium nepotum 39/7 OX=1368418 GN=queE PE=3 SV=1
MTAAARKVAARETAIRISEIFGPTIQGEGPLIGLPTVFVRTGGCDYRCSWCDTLHAVDSAYRETWLPMSVEAIWQEVRRLSGGVPLTVSLSGGNPAIQSLGQLIAKGHGEGYRFALETQGSIAKDWFADLDHLVLSPKPPSSGMETDWQAFADCLTAAGDGPQVALKIVVFDDADYAYAKAASARFPHLPVYLQPGNHTPPPPDDDDARVDIDGVMDRMLWLVDKANEDRWFSARVLPQLHVLLWGNKRGV

SEQ ID NO: 33567 - protein, 241 aa, Rhizobium oryziradicis
  misc_feature (1)..(241): tr|A0A1Q8ZRR6|A0A1Q8ZRR6_9RHIZ 7-carboxy-7-deazaguanine synthase OS=Rhizobium oryziradicis OX=1867956 GN=queE PE=3 SV=1
MGNQIRISEIFGPTIQGEGVLIGQPTVFVRTGGCDYRCSWCDSLHAVDSQFRDAWQPMDVDAIWADVEHLSGGVPLMVSLSGGNPAIQPLDGLIAHGHQRGYRFALETQGSIARDWFADLDVLVLSPKPPSSGMETDWIALDDCLNKAGTKPQTVLKFVVFDEADYAYAKAASARYPHLPTYLQPGNHTPPPPEAVDAVIDMDGIMSRVHWLVDRVMQDRWFAATVLPQLHVLLWGNKRGV

SEQ ID NO: 33568 - protein, 242 aa, Rhizobium phaseoli
  misc_feature (1)..(242): tr|A0A0M3GQH0|A0A0M3GQH0_9RHIZ 7-carboxy-7-deazaguanine synthase OS=Rhizobium phaseoli Ch24-10 OX=1128399 GN=e xsD PE=3 SV=1
MSGESIRVSEIFGPTIQGEGALIGLPTVFVRTGGCDYRCSWCDSLHAVDSAFRDQWIPMSTEAIWQEVTKLSAGRPMTVSLSGGNPAIQPLGPLIEFGHSQGYRFALETQGSVARNWFRDLDVLVLSPKPPSSGMLADWDQVDNCLRLAAGGPEIALKIVVFDDDDYAFAQEAGQRYPYIPLYLQPGNHTPPPPDDDDARIDIDGVMDRMHWLVEKVTADGWFAPRVLPQLHVLLWGNKRGV

SEQ ID NO: 33569 - protein, 242 aa, Rhizobium phaseoli
  misc_feature (1)..(242): tr|A0A2U3CU56|A0A2U3CU56_9RHIZ 7-carboxy-7-deazaguanine synthase OS=Rhizobium phaseoli OX=396 GN=queE PE=3 SV= 1
MSGESIRVSEIFGPTIQGEGALIGLPTVFVRTGGCDYRCSWCDSLHAVDSAFRDQWIPMSTEAIWQEVTKLSAGRPMTVSLSGGNPAIQPLGPLIEFGHSQGYRFALETQGSIARNWFRDLDVLVLSPKPPSSGMLTDWDQVDNCLRLAAGGPEIALKIVVFDDDDYAFARETGRRYPYIPLYLQPGNHTPPPPDDDSARIDIDGVMDRMHWLVEKVTADGWFAPRVLPQLHVLLWGNKRGV

SEQ ID NO: 33570 - protein, 242 aa, Rhizobium pisi
  misc_feature (1)..(242): tr|A0A3R9AZ44|A0A3R9AZ44_9RHIZ 7-carboxy-7-deazaguanine synthase OS=Rhizobium pisi OX=574561 GN=queE PE=3 SV=1
MSVETIRVSEIFGPTIQGEGALIGLPTVFVRTGGCDYRCSWCDSLHAVDSAFRDQWIPMSTEAVWLEVKKLSGGKPMTVSLSGGNPAIQPLGPLIELGHSQGYRFALETQGSVARDWFRDLDMLVLSPKAPSSGMSTDWEQVDNCLRLAAGGPEIALKIVVFNDADYVFAQQVGQRYPYVPLFLQPGNHTPPPPDDDDARVDIDGVMDRMHWLVEKVTADRWFSVRVLPQLHVLLWGNKRGV

SEQ ID NO: 33571 - protein, 242 aa, Rhizobium pisi
  misc_feature (1)..(242): tr|A0A4V2LHD7|A0A4V2LHD7_9RHIZ 7-carboxy-7-deazaguanine synthase OS=Rhizobium pisi OX=574561 GN=queE PE=3 SV=1
MSVETIRVSEIFGPTIQGEGALIGLPTVFVRTGGCDYRCSWCDSLHAVDSAFRDQWIPMSTEAVWLEVKKLSGGKPMTVSLSGGNPAIQPLGPLIELGHSQGYRFALETQGSVARDWFRDLDMLVLSPKAPSSGMSTDWEQVDNCLRLAAGGPEIALKIVVFNDADYVFAQQVGQRYPYVPLFLQPGNHTPPPPDDDDARVDIDGVMDRMHWLVEKVTADRWFSVRVMPQLHVLLWGNKRGV

SEQ ID NO: 33572 - protein, 251 aa, Rhizobium pusense
  misc_feature (1)..(251): tr|A0A4U1JYD3|A0A4U1JYD3_9RHIZ 7-carboxy-7-deazaguanine synthase OS=Rhizobium pusense OX=648995 GN=queE PE=3 S V=1
MTAARQKSAAKDTTIRISEIFGPTIQGEGLLIGLPTVFVRTGGCDYRCSWCDTLHAVDSDYRDTWKPMPVDAIWQEVRRLSGGVPLTISLSGGNPAIQPLGSLIAKGHGEGYRFALETQGSIAKDWFADLDHLVLSPKPPSSGMGTDWQAFEDCLAAAGEGPQVALKIVVFDDADYAYAKAASARFPYLPVYLQPGNHTPPPPDDDDARVDIDGVMERMLWLVDKVSEDRWFSARVLPQLHVLLWGNKRGV

SEQ ID NO: 33573 - protein, 251 aa, Rhizobium pusense
  misc_feature (1)..(251): tr|A0A1L9D040|A0A1L9D040_9RHIZ 7-carboxy-7-deazaguanine synthase OS=Rhizobium pusense OX=648995 GN=queE PE=3 S V=1
MTAARQKSAAKDTTIRISEIFGPTIQGEGLLIGLPTVFVRTGGCDYRCSWCDTLHAVDSDYRDTWKPMPVDAIWQEVRRLSGGVPLTVSLSGGNPAIQPLGSLIAKGHGEGYRFALETQGSIAKDWFADLDHLVLSSKPPSSGMGTDWQAFEDCLAAAGEGPQVALKIVVFDDADYAYAKAASARFPYLPVYLQPGNHTPPPPDDDDARVDIDGVMERMLWLVDKVSEDRWFSARVLPQLHVLLWGNKRGV

SEQ ID NO: 33574 - protein, 251 aa, Rhizobium radiobacter
  misc_feature (1)..(251): tr|A0A1B9SWR5|A0A1B9SWR5_RHIRD 7-carboxy-7-deazaguanine synthase OS=Rhizobium radiobacter OX=358 GN=queE PE=3 SV=1
MTAAARKVAAKETAIRISEIFGPTIQGEGPLIGLPTVFVRTGGCDYRCSWCDTLHAVDSEYRDTWKPMPVEAIWQEVRRLSGGVPLTVSLSGGNPAIQPLGALIAKGQGEGYRFALETQGSIAKDWFADLDHLVLSPKPPSSGMETDWQAFENCLTAAGDGPQVALKIVVFDDADYAYAKAASARFPRLPVYLQPGNHTPPPPDDDDARVDIEGVMDRMLWLVDKVSEDRWFSARVLPQLHVLLWGNKRGV

SEQ ID NO: 33575 - protein, 251 aa, Rhizobium radiobacter; identical to SEQ ID NO: 27508
  misc_feature (1)..(251): tr|A0A4D7Y0U0|A0A4D7Y0U0_RHIRD 7-carboxy-7-deazaguanine synthase OS=Rhizobium radiobacter OX=358 GN=queE PE=3 SV=1

SEQ ID NO: 33576 - protein, 246 aa, Rhizobium selenitireducens
  misc_feature (1)..(246): tr|A0A376ABV8|A0A376ABV8_9RHIZ 7-carboxy-7-deazaguanine synthase OS=Rhizobium selenitireducens ATCC BAA-1503 O X=1336235 GN=queE PE=3 SV=1
MKSTAVGEVLRIAEIFGPTIQGEGPLIGQPTVFVRTGGCDYRCMWCDSLHAVDPHYRHDWTAMSAEAVLERINMLSGDVPLLVSLSGGNPAIQDFAGLIRIGHTAGHRFALETQGSICRDWFAALNNLVLSPKPPSSGMQTDWAALEDCLRAAGDGPEIALKIVVFNEDDYAYARGVGARYPHISLYLQPGNHTPPPPEAEDAPIDVEGVMERMRWLVNKLAEDRWFTPRVLPQLHVLLWGNKRGV

SEQ ID NO: 33577 - protein, 242 aa, Rhizobium sophoriradicis
  misc_feature (1)..(242): tr|A0A2A5KJC7|A0A2A5KJC7_9RHIZ 7-carboxy-7-deazaguanine synthase OS=Rhizobium sophoriradicis OX=1535245 GN=que E PE=3 SV=1
MSAETIRVSEIFGPTIQGEGALIGLPTVFVRTGGCDYRCSWCDSLHAVDSAYRDQWSPMSAEAIWQEVTKLSGGRPMTISLSGGNPAIQPLGPLIELGHSQGYRFALETQGSVARNWFRDLDVLVLSPKPPSSGMSTNWGELGNCLRLTAGGPEIALKIVVFDDADYAFARQVGERYPYIPLYLQPGNHTPPPPDDDDARIDIDGVMDRMHWLVEKVTADRWFAPRVLPQLHVLLWGNKRGV

SEQ ID NO: 33578 - protein, 242 aa, Rhizobium sophoriradicis
  misc_feature (1)..(242): tr|A0A3R9BV81|A0A3R9BV81_9RHIZ 7-carboxy-7-deazaguanine synthase OS=Rhizobium sophoriradicis OX=1535245 GN=que E PE=3 SV=1
MSAETIRVSEIFGPTIQGEGALIGLPTVFVRTGGCDYRCSWCDSLHAVDSAYRDQWSPMSAEAIWQEVTKLSGGRPMTVSLSGGNPAIQPLGPLIELGHSQGYRFALETQGSVARNWFRDLDVLVLSPKPPSSGMSTNWGELGNCLRLTAGGPEIALKIVVFDDADYAFARQVGERYPYIPLYLQPGNHTPPPPDDDDARIDIDGVMDRMHWLVEKVTADGWFAPRVLPQLHVLLWGNKRGV

SEQ ID NO: 33579 - protein, 242 aa, Rhizobium sp.
  misc_feature (1)..(242): tr|A0A235B1V5|A0A235B1V5_9RHIZ 7-carboxy-7-deazaguanine synthase OS=Rhizobium sp. N4311 OX=1703972 GN=queE-2 P E=3 SV=1
MSGETIRVSEIFGPTIQGEGALIGLPTVFVRTGGCDYRCSWCDSLHAVDSAFRDQWIPMSTEAIWQEVTKLSAGRPMTVSLSGGNPAIQPLGPLIEFGHSQGYRFALETQGSVARNWFRDLDMLVLSPKPPSSGMLTDWEEVDNCLRLAAGGPEIALKIVVFDDDDYAFAREAGRRYPYVPLYLQPGNHTPPPPDDNDARIDIDGVMDRMHWLVEKVTVDGWFSPRVLPQLHVLLWGNKRGV

SEQ ID NO: 33580 - protein, 244 aa, Rhizobium sp.
  misc_feature (1)..(244): tr|A0A1I1CTF6|A0A1I1CTF6_9RHIZ 7-carboxy-7-deazaguanine synthase OS=Rhizobium sp. NFR07 OX=1566262 GN=queE PE= 3 SV=1
MTGSVETIRISEIFGPTIQGEGMLIGQPTVFVRTGGCDYRCSWCDTLHAVDSAYRHDWTPMDAETIWKEVRRLSGDTPLMVSLSGGNPAIQPLKPLIRRGKNDGYRFAIETQGSVARDWFADLDVLVLSPKPPSSGMETNWDAVTDCLAAAGKAPRIALKFVVFDDADYDFARAASRRYPELPVYLQPGNHTPPPPDDDDARIDLDGIMDRMLWLVDKVTGDRWFSATVLPQLHVLLWGNKRGV

SEQ ID NO: 33581 - protein, 251 aa, Rhizobium straminoryzae
  misc_feature (1)..(251): tr|A0A549SQZ8|A0A549SQZ8_9RHIZ 7-carboxy-7-deazaguanine synthase OS=Rhizobium straminoryzae OX=1387186 GN=queE PE=3 SV=1
MGGVSSVTEAGGSLIRVSEIFGPTIQGEGVLIGQPTVFVRTGGCDFRCSWCDSLHAVESRFRADWQSMSVAAIWSEVERLSGGRPLMVSLSGGNPAIQPLGGLIAHGHARGYRFALETQGSIARDWFADLDVLVLSPKPPSSGMAFDPQALLASVEAASGGPRTVLKFVIFDEADFAFAWEVAALCRSLPVYLQPGNHTPPPPETDDAVIDLDGIMGRMHWLLDRVMAEGWFAATVLPQLHVLLWGNRRGV

SEQ ID NO: 33582 - protein, 245 aa, Rhizobium sullae
  misc_feature (1)..(245): tr|A0A4R3QHB8|A0A4R3QHB8_RHISU 7-carboxy-7-deazaguanine synthase OS=Rhizobium sullae OX=50338 GN=queE PE=3 SV= 1
MSAARETHIRVSEIFGPTIQGEGILIGLPTVFVRTGGCDYRCSWCDTLHAVDSDYRDQWHPMSVDDIWQEVVRLSGNKPLTVSLSGGNPAIQPLRPLLERGHEDGYRFALETQGSVAKDWFADLDVLVLSPKPPSSGMETDWSAFGACLRMAGKKPQLALKIVIFDDRDYLYARAAAARYPRLPVYLQPGNHTPPPPADDNAKVDIDGIMDRMLWLIDKVTEDRWFEARVLPQLHVLLWGNKRGV

SEQ ID NO: 33583 - protein, 245 aa, Rhizobium sullae
  misc_feature (1)..(245): tr|A0A2N0DF60|A0A2N0DF60_RHISU 7-carboxy-7-deazaguanine synthase OS=Rhizobium sullae OX=50338 GN=queE PE=3 SV= 1
MSAARETHIRVSEIFGPTIQGEGILIGLPTVFVRTGGCDYRCSWCDTLHAVDSDYRDQWHPMSVDDIWQEVVRLSGNKPLTVSLSGGNPAIQPLRPLLERGHEDGYRFALETQGSVAKDWFADLDVLVLSPKPPSSGMETDWSAFGACLRMAGKKPQLALKIVIFDDRDYLYARAAAARYPRLPVYLQPGNHTPPPPADDDAKVDIDGIMDRMRWLIDKVTEDRWFEARVLPQLHVLLWGNKRGV

SEQ ID NO: 33584 - protein, 248 aa, Rhizobium taibaishanense
  misc_feature (1)..(248): tr|A0A1Q9A4Y1|A0A1Q9A4Y1_9RHIZ 7-carboxy-7-deazaguanine synthase OS=Rhizobium taibaishanense OX=887144 GN=queE PE=3 SV=1
MSGPNLASETAIRISEIFGPTIQGEGVLIGQPTVFVRTGGCDYRCSWCDSLHAVETRFRHDWQAMGVEAIWADVEQLSGGEPLMVSLSGGNPAIQPLGPLIAHGHRRGYRFALETQGSIARDWFADLDVLVLSPKPPSSGMETDWAALADCLAAAGDGPQIVLKFIVFDEADYAYAKAAAARHPQVSVYLQPGNHTPPPPEDDDARIDMEGIMTRMHWLVDRVVEDRWFAARVLPQLHVLLWGNKRGV

SEQ ID NO: 33585 - protein, 245 aa, Rhizobium tibeticum
  misc_feature (1)..(245): tr|A0A1H8TZX9|A0A1H8TZX9_9RHIZ 7-carboxy-7-deazaguanine synthase OS=Rhizobium tibeticum OX=501024 GN=queE PE=3 SV=1
MSGARETQIRVSEIFGPTIQGEGILIGLPTVFVRTGGCDYRCSWCDSLHAVDNAYREQWVPMTVDGIWAEVTRLSGGKPLMVSLSGGNPAIQPLGGLIAHGHERGYSFALETQGSVAKEWFADLDVLVLSPKPPSSGMATDFDAFENCLGMAADGPEIALKIVVFDDRDYAYAREAATRYPDLPVYLQPGNHTPPPPDDDDARVDIDGIMDRMLWLVDKVTEDRWFEARVLPQLHVLLWGNKRGV

SEQ ID NO: 33586 - protein, 242 aa, Rhizobium tropici
  misc_feature (1)..(242): tr|L0LUH6|L0LUH6_RHITR 7-carboxy-7-deazaguanine synthas e OS=Rhizobium tropici CIAT 899 OX=698761 GN=queE PE=3 SV=1
MSEAPIRVSEIFGPTIQGEGILIGLPTIFVRTGGCDYRCSWCDTLHAVDSDYRDQWRPMSVDEIWQEVTRLSGGKPLTISLSGGNPAIQPLGPLIARGHAEGYRFALETQGSLAREWFAELDVLVLSPKPPSSGMATDWTAFDDCLRMAGDGPQIALKIVIFDDLDYEYARDAAARYPRLPVYLQPGNHTPPPADAGDAIVDIDGIVERMRWLVDKVSSDQWFDARVLPQLHVLIWGNKRGV

SEQ ID NO: 33587 - protein, 242 aa, Rhizobium tropici
  misc_feature (1)..(242): tr|A0A5B0VRV7|A0A5B0VRV7_RHITR 7-carboxy-7-deazaguanine synthase OS=Rhizobium tropici OX=398 GN=queE PE=3 SV=1
MSEARIRVSEIFGPTIQGEGILIGLPTIFVRTGGCDYRCSWCDTLHAVDSDYRDQWLPMSVDEIWSEVTRLSGGKPLTISLSGGNPAIQPLGPLIAHGHAEGYRFALETQGSLAKDWFAELDVLVLSPKPPSSGMATDWGAFDDCLRMASHKPQVALKIVVFDDVDYAYAREAASRYPGLPLYLQPGNHTPPPPEADDAIVDIEGIVERMRWLVDKVSSDRWFEARVLPQLHVLIWGNKRGV

SEQ ID NO: 33588 - protein, 271 aa, Rhizobium tubonense
  misc_feature (1)..(271): tr|A0A2W4D018|A0A2W4D018_9RHIZ 7-carboxy-7-deazaguanine synthase OS=Rhizobium tubonense OX=484088 GN=queE PE=3 SV=1
MVQGTAAGDLSRAGERDDKDLGGVPAVTRSRPLEIRVSEIFGPTIQGEGVLIGLPTVFVRTGGCDFRCSWCDSLHAVDSRYRDEWRPMSTEEVWREVKNLSGDKPLMVSLSGGNPAIQPLGELIARGHGEGYRFALETQGSVAKDWFADLDVLVFSPKPPSSGMGTDWRTLDACLEMAAGKPQIVLKMIVFDNADFAYAKDVAARYPHLPVYLQPGNHTPPSPDVEDDFVDIDGLMERMQWLIDKVVEAKWFEARVLPQLHVMLWGNRRGV

SEQ ID NO: 33589 - protein, 245 aa, Rhizobium tumorigenes
  misc_feature (1)..(245): tr|A0A2W4D2P0|A0A2W4D2P0_9RHIZ 7-carboxy-7-deazaguanine synthase OS=Rhizobium tumorigenes OX=2041385 GN=queE P E=3 SV=1
MRLESETPIRISEIFGPTIQGEGVLIGLPTVFVRTGGCDYRCTWCDSLHAVESAFRDTWAPMSVDDIWQEVRRLSGHRPLTVSLSGGNPAIQPLAPLIARGHGEGYRFALETQGSIAKPWFSDLDVLVLSPKPPSSGMDTDWDALQHCLDAAGGRPETVLKFVVFDDADYAYARDAAARHPHLPVYLQPGNHTPPKGTEENAVIDLDGITDRMLWLIDRVTEDGWFAARVLPQLHVILWGNRRGV

SEQ ID NO: 33590 - protein, 242 aa, Rhizobium vallis
  misc_feature (1)..(242): tr|A0A432PAZ4|A0A432PAZ4_9RHIZ 7-carboxy-7-deazaguanine synthase OS=Rhizobium vallis OX=634290 GN=queE PE=3 SV =1
MSAETIRVSEIFGPTIQGEGALIGLPTVFVRTGGCDYRCCWCDSLHAVDSAFRDQWIPMSTEAVWQEVKKLSGDKPLTVSLSGGNPAIQPLGPLIELGHSRGYRFALETQGSVARDWFRNLDMLILSPKPPSSGMSTDWEQVDDCLRLAAGGPEIALKIVVFDDADYAFAQLAGERYPYVPLFLQPGNHTPPPPDDADARVDIDGVMDRMHWLIEKVTADRWFSVRVLPQLHVLLWGNKRGV

SEQ ID NO: 33591 - protein, 211 aa, Rhizomicrobium sp.
  misc_feature (1)..(211): tr|A0A177QBM3|A0A177QBM3_9PROT 7-carboxy-7-deazaguanine synthase OS=Rhizomicrobium sp. SCGC AG-212-E05 OX=1799 655 GN=queE PE=3 SV=1
MTYSVKEIYYTLQGEGAQTGRAAVFLRFAGCNLWSGVEKDRPDATCRFCDTDFVGTDGPGGGKFVDAPALARAVAAAWPREARGKPYVVCTGGEPLLQLDSAAIAALKEQGFEIGIETNGTLLPPPGIDWICVSPKADAEQKLMRGNELKLIYPQAGAPPERFAGQDFQNFFLQPMDNEQRAANTEAATAYCLAHPQWRLSLQTHKLIGIR

SEQ ID NO: 33592 - protein, 210 aa, Rhizorhabdus dicambivorans
  misc_feature (1)..(210): tr|A0A2A4FTB9|A0A2A4FTB9_9SPHN 7-carboxy-7-deazaguanine synthase OS=Rhizorhabdus dicambivorans OX=1850238 GN=q ueE PE=3 SV=1
MASYAVKEMFLTLQGEGVQVGRRAVFLRFAGCNLWTGREEDRATAVCTFCDTDFVGLDGDHGGRYPDADALADRAAALWGDFPEPFVVMTGGEPLLQIDAALVAALKARGFEMAVETNGTQPAPDGIDWICVSPKQGSDVVLRRGNELKLVWPQPGLDPDELAGWDFDHFLLQPMDGPNLSSAREAAIRFVLEHPRWRLSTQTHKVVGIR

SEQ ID NO: 33593 - protein, 210 aa, Rhizorhabdus sp.
  misc_feature (1)..(210): tr|A0A521T1L1|A0A521T1L1_9SPHN 7-carboxy-7-deazaguanine synthase OS=Rhizorhabdus sp. OX=1968843 GN=queE PE=3 S V=1
MASYAVKEMFLTLQGEGMQVGRRAVFLRFTGCNLWSGREEDRATATCNFCDTDFVGMDGDRGGRYADADALADQAAALWADMPEPFIVMTGGEPLLQVDDALIAALKARSFEIAVETNGTQPVPDGIDWICVSPKQGSDIILRRGNELKLVWPQPGLNPDELATWDFSHFLIQPMDGANLPAARASAIDYVMAHPKWRLSTQTHKVVGIR

SEQ ID NO: 33594 - protein, 237 aa, Rhodanobacter denitrificans
  misc_feature (1)..(237): tr|A0A2W5KSZ0|A0A2W5KSZ0_9GAMM 7-carboxy-7-deazaguanine synthase OS=Rhodanobacter denitrificans OX=666685 GN=q ueE PE=3 SV=1
MLPAPIRLDAEPHAIDTAPAPRVRGERLRLTEIFLSVQGEADAAGWPTVFVRLTGCPLRCTWCDTAYAFHGGQWWTIESILAEVARHGARHVCVTGGEPLAQKRCLILLRRLCDAGYEVSLETSGAIDVGPVDPRVRKVVDLKAPGSGELERNRWDNLTHLAPHDQVKFVLADRADYEWARETVRRYALAARCMVLFSPVHGSLAPRDLAEWILADGLPVRFQLQLHKLLWGEESGR

SEQ ID NO: 33595 - protein, 230 aa, Rhodanobacter denitrificans
  misc_feature (1)..(230): tr|A0A368KK84|A0A368KK84_9GAMM 7-carboxy-7-deazaguanine synthase OS=Rhodanobacter denitrificans OX=666685 GN=q ueE PE=3 SV=1
MSGHDAREASGTPAAAVAERLRITEIFHSIQGEADAIGWRTVFVRLTGCPLRCVWCDTEYSFYGGNWHAIDDILAEVATHGAKHVCVTGGEPLAQKRCLILLRKLCDAGYEVSLETSGALDVSAVDPRVRKVLDLKAPDSGESGRNLWSNLDHLLPHDQIKIVIASRADYEWARAMLAEHALADRCMVLFSPVHGAVEPRDLAEWIIADKLPVRFQLQLHKLLWNDARGK

SEQ ID NO: 33596 - protein, 210 aa, Rhodanobacter fulvus
  misc_feature (1)..(210): tr|I4VY04|I4VY04_9GAMM 7-carboxy-7-deazaguanine synthas e OS=Rhodanobacter fulvus Jip2 OX=1163408 GN=queE PE=3 SV=1
MRITEIFHSLQGEADAIGWRTVFVRLTGCPLRCVWCDTEYSFHGGQWHDIDAILAEVARHDVGHVCVTGGEPLAQKRCLILLQKLCDVGYEVSLETSGALDVSAVDPRVRKVMDLKAPGSGESARNLWSNLAFLHQRDQVKIVIASRADYDWACSVLVEHALAARCMVLFSPVHGAISPRQLADWIIEDRLPVRFQLQLHKLLWNDAAGH

SEQ ID NO: 33597 - protein, 223 aa, Rhodanobacter glycinis
  misc_feature (1)..(223): tr|A0A5B9E7T6|A0A5B9E7T6_9GAMM 7-carboxy-7-deazaguanine synthase OS=Rhodanobacter glycinis OX=582702 GN=queE P E=3 SV=1
MAPDAPTSVVGERLRITEIFHSIQGEADAIGWRTVFVRLTGCPLRCVWCDTEYAFHGGGWRDIDDILAEVASHGAPRVCVTGGEPLAQKRCLILLQRLCDAGYQVSLETSGALDVSAVDTRVHKVMDLKAPDSGESARNLWSNLEHLLPHDQVKVVIASRADYEWARGVVAEHALDRRCMVLFSPVWGKVQPRELAEWIIEDKLPVRFQLQLHKLLWDDAAGR

SEQ ID NO: 33598 - protein, 230 aa, Rhodanobacter glycinis
  misc_feature (1)..(230): tr|A0A1I4BE82|A0A1I4BE82_9GAMM 7-carboxy-7-deazaguanine synthase OS=Rhodanobacter glycinis OX=582702 GN=queE P E=3 SV=1
MVGSSETMAPEAPTSAVGERLRITEIFHSIQGEADAIGWRTVFVRLTGCPLRCVWCDTEYAFHGGGWRDIDDILVEVASHGAPRVCVTGGEPLAQKRCLILLQRLCDAGYRVSLETSGALDVSAVDPRVHKVMDLKAPDSGESARNLWSNLEHLLPHDQVKVVIASRADYEWARGVVAEHALDRRCMVLFSPVWGKVQPRELAEWIIEDKLPVRFQLQLHKLLWDDAAGH

SEQ ID NO: 33599 - protein, 229 aa, Rhodanobacter lindaniclasticus
  misc_feature (1)..(229): tr|A0A4S3K7K3|A0A4S3K7K3_9GAMM 7-carboxy-7-deazaguanine synthase OS=Rhodanobacter lindaniclasticus OX=75310 GN =queE PE=3 SV=1
MNGEEARVGSATPAVAAERLRITEIFHSIQGEADAIGWRTVFVRLTGCPLRCVWCDTEYSFHGGDWHAIDDILAEVARHGAKHVCVTGGEPLAQKRCLILLRKLCDAGYEVSLETSGALDVSAVDPRVHKVMDLKAPDSGESGRNLWSNLDHLLAHDQIKIVLASRGDYEWARAMLTEHGLTDRCMVLFSPVHGAVEPRELAEWILADKLDVRFQLQLHKLLWNDAKGK

SEQ ID NO: 33600 - protein, 230 aa, Rhodanobacter sp.
  misc_feature (1)..(230): tr|A0A1V3P7V1|A0A1V3P7V1_9GAMM 7-carboxy-7-deazaguanine synthase OS=Rhodanobacter sp. C05 OX=1945855 GN=queE P E=3 SV=1
MNGNSASVDVSTPAPAATERLRITEIFHSIQGEADAIGWRTVFVRLTGCPLRCVWCDTEYSFYGGDWHAIDDILAEVASHGAKHVCVTGGEPLAQKRCLILLQKLCDAGYEVSLETSGALDVSAVDPRVHKVMDLKAPDSGESKRNLWSNLEHLLPHDQIKIVIASRADYEWARAMLDEHALANRCMVLFSPVHGAVQPRELAEWIIADKLSVRFQLQLHKLLWNDAAGH

SEQ ID NO: 33601 - protein, 223 aa, Rhodanobacter sp.
  misc_feature (1)..(223): tr|A0A522HBW2|A0A522HBW2_9GAMM 7-carboxy-7-deazaguanine synthase OS=Rhodanobacter sp. OX=1883446 GN=queE PE=3 SV=1
MVPTTAAVKAPARLRITEIFHSIQGEADAIGWRTVFVRLTGCPLRCVWCDTEYSFHGGDWHAIDDILAEVATHGAKHVCVTGGEPLAQKRCLILLRKLCDAGYQVSLETSGALDVSAVDPRVRKVMDLKAPGSGESRRNLWSNLDHLLPHDQIKIVLASRADYEWACAMLAEHALADRCMVLFSPVHGAVEPRDLAEWILADKLPVRFQLQLHKLLWNDAAGK

SEQ ID NO: 33602 - protein, 230 aa, Rhodanobacter spathiphylli
  misc_feature (1)..(230): tr|I4VYN6|I4VYN6_9GAMM 7-carboxy-7-deazaguanine synthas e OS=Rhodanobacter spathiphylli B39 OX=1163407 GN=queE PE=3 SV=1
MSGHDAQQASATPAAAVPERLRITEIFHSIQGEADAIGWRTVFVRLTGCPLRCVWCDTEYSFHGGDWHGIDEILAEVASHGARHVCVTGGEPLAQKRCLILLQRLCDAGYEVSLETSGALDVSAVDPRVRKVMDLKAPGSGESARNLWSNLDHLLPHDQIKIVIASREDYEWSCAMLAEHRLADRCMVLFSPVWGKVEPRELAEWIIADRLPVRFQLQLHKLLWNDAAGR

SEQ ID NO: 33603 - protein, 230 aa, Rhodanobacter thiooxydans
  misc_feature (1)..(230): tr|A0A154QJ75|A0A154QJ75_9GAMM 7-carboxy-7-deazaguanine synthase OS=Rhodanobacter thiooxydans OX=416169 GN=que E PE=3 SV=1
MSGHDAREASGTPAAAVAGRLRITEIFHSIQGEADAIGWRTVFVRLTGCPLRCVWCDTEYAFHGGNWHAIDDILAEVATHGAKHVCVTGGEPLAQKRCLILLRKLCDAGYEVSLETSGALDVSAVDPRVHKVMDLKAPGSGESARNLWSNLDHLLPHDQVKIVIASRADYEWACAVLAERTLADRCMVLFSPVWSKVEPRELAEWIIADKLPVRFQLQLHKLLWNDARGK

SEQ ID NO: 33604 - protein, 231 aa, Rhodanobacteraceae bacterium
  misc_feature (1)..(231): tr|A0A2Z6E797|A0A2Z6E797_9GAMM 7-carboxy-7-deazaguanine synthase OS=Rhodanobacteraceae bacterium Dysh456 OX=20 10829 GN=queE PE=3 SV=1
MQVEAASPARPAASDRARRGLLRISEIFHSIQGEADAIGWPTVFVRLTGCPLRCTWCDTEYAFHGGQWLAIDDVLAQVAGYGARHVCVTGGEPLAQKRCLALLARLCDAGHEVSLETSGALDVSRVDPRVRKVLDLKAPGSSESDRNLWSNLAHLRPHDQVKIVIASRDDYEWARDAVAAHALDRRCMVLFSPVHGAVEPRALAEWILADRLPVRFQLQLHKLLWNDARGK

SEQ ID NO: 33605 - protein, 210 aa, Rhodanobacteraceae bacterium
  misc_feature (1)..(210): tr|A0A522RUW8|A0A522RUW8_9GAMM 7-carboxy-7-deazaguanine synthase OS=Rhodanobacteraceae bacterium OX=2052182 GN =queE PE=3 SV=1
MYAIKEIFYTLQGEGFNAGRPAVFCRFSGCNLWSGREADRATSICNFCDTDFVGTNGVNGGKYPDAAAVAGKITSLWPAGQTENRFVVFTGGEPLLQLDTPVLDAMHAQGFECAVETNGTLEAPAGLDWITVSPKSTAPVKLKRASELKLVYPQPTALPERFAGFPATHFFLQPMDGPRIADNTRAAVEYCKAHPHWRLSLQTHKYLGIP

SEQ ID NO: 33606 - protein, 208 aa, Rhodobacteraceae bacterium
  misc_feature (1)..(208): tr|A0A3N9QCE8|A0A3N9QCE8_9RHOB 7-carboxy-7-deazaguanine synthase OS=Rhodobacteraceae bacterium CH30 OX=2490538 GN=queE PE=3 SV=1
MYTVKEIFYTLQGEGVHAGRAAVFCRFSGCNLWSGREVDRAKSICRFCDTDFVGVGPDGGRFACSAALADQICRQWQGLGGTPYVVFTGGEPLLQLDEALIAALHERGFEVGVETNGTLDAPAGIDWLCVSPKAGADWVQRHGDEIKLVYPQAGLLPHDVDTTGFAHAWLQPMDDCARADNTSAAIDYCMRAPHWRLSLQGHKLVGIR

SEQ ID NO: 33607 - protein, 235 aa, Rhodobacteraceae bacterium
  misc_feature (1)..(235): tr|A0A2E7Q5J1|A0A2E7Q5J1_9RHOB 7-carboxy-7-deazaguanine synthase OS=Rhodobacteraceae bacterium OX=1904441 GN=q ueE PE=3 SV=1
MTLRIAEIFGPTIQGEGALIGEPTVFVRAGGCDYRCSWCDSLHAVESKYRHTWTPMESDAVWERIEQLSGGQPLTISLSGGNPAIQDFGPLIALGRAKGYRFACETQGSVAREWFSDLDTLVLSPKPPSSGEEVDWDAFTACRTAGAGARLQVMKIVIFDDADYNWARDAHARHPDLALYLQPGNPEVDPGVPVDPQALADRLGWLTEKAMADGWFAPRILPQLHVLIWGNKRGV

SEQ ID NO: 33608 - protein, 236 aa, Rhodobacterales bacterium
  misc_feature (1)..(236): tr|B6B7B2|B6B7B2_9RHOB 7-carboxy-7-deazaguanine synthas e OS=Rhodobacterales bacterium Y4I OX=439496 GN=queE PE =3 SV=1
MTTLRIAEIFGPTIQGEGALIGEPTVFVRAGGCDYRCSWCDSMHAVDSAYRHDWAVKTPEDVMAEVRRLSGGKPLTVSISGGNPAIQDFAPVIAIGKEEGYRFACETQGSVSQPWFADLDTLVLSPKPPSSGEKTDWHKFTCCLHQAKGCGQAVMKIVVFDDTDYAWAKAAAERHPELPLYLQPGNPEVDPEQPVDLNQATDRLLWLIEKVTGDGWFTPRVLPQLHVLVWGNKRGV

SEQ ID NO: 33609 - protein, 271 aa, Rhodobacterales bacterium
  misc_feature (1)..(271): tr|A0A259M822|A0A259M822_9RHOB 7-carboxy-7-deazaguanine synthase OS=Rhodobacterales bacterium 34-62-10 OX=1970 561 GN=queE PE=3 SV=1
MVQVAPTGNRGGAGQRDAEDLGGIPAVNYAVADEIRISEIFGPTIQGEGALIGQPTVFVRTGGCDYRCAWCDSLHAVDSRFRADWRAMSTEEVLDQVRTLSGDQPLMVSLSGGNPAIQPLGPLIRQGQAEGYRFALETQGSVSRDWFADLDVLVLSPKPPSSVMTTDWAALRACVESAVAGPQIVLKFVVFDAEDYAYARDAATRFPGLPVYLQPGNHTPPGPQDDDAFIDTDGILQRMGWLVDRVMADRWFAAHVLPQLHVLLWGNKRGV

SEQ ID NO: 33610 - protein, 215 aa, Rhodobiaceae bacterium
  misc_feature (1)..(215): tr|A0A2E6U2B0|A0A2E6U2B0_9RHIZ 7-carboxy-7-deazaguanine synthase OS=Rhodobiaceae bacterium OX=2026785 GN=queE PE=3 SV=1
MSYSVKEIFFTLQGEGAQAGRPAVFCRFSGCNLWSGREEDRATAQCTFCDTDFVGTDGQNGGKFPDADALANAIAGSWPEDPAGPDAYVVFTGGEPCLQLDTPLLQALKARNFECAVETNGTLDVPQEVDWICVSPKPRSDLAQTHGHELKFVYPQEELSPDQFADLDFEHFYLQPMDTSEAETSWHNVQAAIAYCLQNPQWRLSLQSHKIVGLD

SEQ ID NO: 33611 - protein, 215 aa, Rhodobiaceae bacterium
  misc_feature (1)..(215): tr|A0A2D7FSU5|A0A2D7FSU5_9RHIZ 7-carboxy-7-deazaguanine synthase OS=Rhodobiaceae bacterium OX=2026785 GN=queE PE=3 SV=1
MSYAVKEIFYTLQGEGGQAGRPAVFCRFAGCNLWSGLERDRATAQCRFCDTDFVGTDGQNGGKFADAQALVEAIAAQWPEAEPGADALVVFTGGEPCLQLDAALLEAVAAQGFETAVETNGTLPVPTQIDWICVSPKPESTLVQQAGHELKFVYPQETLSPEQFEHLDFEHFFLQPMDVDDDETRWHNIQAAIAYCLQNPQWRLSLQTHKIIGLD

SEQ ID NO: 33612 - protein, 209 aa, Rhodoblastus acidophilus
  misc_feature (1)..(209): tr|A0A212RIW4|A0A212RIW4_RHOAC 7-carboxy-7-deazaguanine synthase OS=Rhodoblastus acidophilus OX=1074 GN=queE P E=3 SV=1
MAYSVKELFLTLQGEGGHAGRAAVFCRFAGCNLWSGREADREMSVCRFCDTDFVGTDGENGGKYEAEALADLIAGIWVGGDADRFVVFTGGEPLLQLDEPLLEAVRARGFFTAVESNGTVPAPEGVDWLCVSPKAGAPLRVRAGQELKLVFPQKWAEPEQFESLEFEHFFLQPMDGPERDENTRLAVEYCLLHPRWRLSLQTHKLIGIP

SEQ ID NO: 33613 - protein, 209 aa, Rhodoblastus sphagnicola
  misc_feature (1)..(209): tr|A0A2S6NGQ0|A0A2S6NGQ0_9RHIZ 7-carboxy-7-deazaguanine synthase OS=Rhodoblastus sphagnicola OX=333368 GN=queE PE=3 SV=1
MAYSVKEIFLTLQGEGGQAGRAAVFCRFAGCNLWSGREADRAAAACRFCDTDFIGIDGENGGRFADCEALAERIAQIWGDADNRFVVFTGGEPLLQLDAPLLEAVKARGFFIAVESNGTVPAPEGIDWLCVSPKAGAPLRVAAGQELKLVFPQQRAEPELFEALDFAHFFLQPMDGPDREANTGRAVAWCLAHPRWRLSLQTHKLIGIP

SEQ ID NO: 33614 - protein, 242 aa, Rhodococcus qingshengii
  misc_feature (1)..(242): tr|A0A4R6A145|A0A4R6A145_9NOCA 7-carboxy-7-deazaguanine synthase OS=Rhodococcus qingshengii OX=334542 GN=queE PE=3 SV=1
MSKLPIFEIFGPTIQGEGMVVGQVTMFVRTAGCDYSCSWCDSAFTWNGSARDDIRQMTAEEIWTELIALGGDNFSFVTISGGNPALLKNLDSLIDLLKEKQITIGIETQGSKWQDWFLKIDELTISPKPPSSRMETNLEILDSIFINLDENQFENNVSLKVVIFDEDDLEYAKMIHNRYKGIPFYLSVGNDDITNPNNQELIQKLLLKYEWLVNQVVVDNQLNNVRVLPQLHALLWGNKRGV

SEQ ID NO: 33615 - protein, 208 aa, Rhodococcus sp.
  misc_feature (1)..(208): tr|A0A2S7TWV7|A0A2S7TWV7_9NOCA 7-carboxy-7-deazaguanine synthase OS=Rhodococcus sp. SAORIC-690 OX=1923970 GN=q ueE PE=3 SV=1
MFYTLQGEGAQAGRAAVFCRFAGCNLWTGREEDRATAVCKFCDTDFVGTDGVGGGKFKDAVTLARAIANTYQGGQGTAKPYVVFTGGEPTLQLDTSLIDAVHANGFEIAIETNGTLPVPSGVDWICVSPKFGSELVQTSGHELKVVVPQLGQDLNALGRLQFEHYFVQAMDDSDPVKKSRNLQVAIQTCLDKPQWRLSVQTHKVIGMP

SEQ ID NO: 33616 - protein, 211 aa, Rhodococcus wratislaviensis
  misc_feature (1)..(211): tr|X0PXP8|X0PXP8_9NOCA 7-carboxy-7-deazaguanine synthas e OS=Rhodococcus wratislaviensis NBRC 100605 OX=1219028 GN=queE PE=3 SV=1
MSYKVKEIFYTLQGEGMHAGRPAVFCRFTSCNLWTGRESDRHRAICKFCDTDFVGTDGPGGGKFATASDLASAIADKWPASDTDHRMVVCTGGEPLLQLDEPLTAALHERGFYIAVETNGTQTPPPGIDWLCVSPKQGAELVVHAGDELKLVFPQVGSDPHLYESLAFKSFRLQPMDGEEVAANTASAVEYCMTHPKWQLSLQTHKFLGIP

SEQ ID NO: 33617 - protein, 158 aa, Rhodocyclaceae bacterium
  misc_feature (1)..(158): tr|A0A3D3U495|A0A3D3U495_9RHOO 7-carboxy-7-deazaguanine synthase QueE OS=Rhodocyclaceae bacterium OX=1898103 G N=DIT50_09325 PE=4 SV=1
MVAEVRARGVRTVCVTGGEPLAQPAVHQLLRALADAGYDVSLETSGALPIADVDPRVAVVMDLKAPGSGEHEKNLWQNLVALKPTDEIKIVIADRADYEWAKMVIAEHRLTERCAVLLSPVANALPPHQLAEWIVADKLPVRFQLQLHKVLWGEERGR

SEQ ID NO: 33618 - protein, 212 aa, Rhodocyclaceae bacterium
  misc_feature (1)..(212): tr|A0A524B8H6|A0A524B8H6_9RHOO 7-carboxy-7-deazaguanine synthase OS=Rhodocyclaceae bacterium OX=1898103 GN=que E PE=3 SV=1
MALRLTEIFFSLQGEASRVGLPTVFVRLTGCPLRCTWCDTTYSFTGGEPATVASILAEVAKYPARQVCVTGGEPLSQKECLLLLTALCDAGYDVSLETSGALDIADVDPRVARIMDLKAPDSGECAKNRWENLVHLTPRDEIKIIIASDADYRWACEQIRSHRLDTLCPVLLSPAQGQFEARDLAERILGDGLNVRFQIQLHKLLWGNMKAK

SEQ ID NO: 33619 - protein, 223 aa, Rhodocyclales bacterium
  misc_feature (1)..(223): tr|A0A3L6LZ70|A0A3L6LZ70_9RHOO 7-carboxy-7-deazaguanine synthase OS=Rhodocyclales bacterium GT-UBC OX=2316108 GN=queE PE=3 SV=1
MAGRPSPRVSVVALRITEIFYSLQGEASRVGLPTVFVRLTGCPLRCVWCDTTYSFTGGEAASVESVLAEVARYPARQVCVTGGEPLSQKDCLPLLQALCDAGYDVSLETSGAIDIAAVDARVSRIMDLKAPGSGEVDKNRWENLGCLNNRDEVKIIIASRDDYEWARQVLSEHQLERRCPVLFSPAQGLVEPAELAAWILEDGLDVRFQMQLHKLLWGNMKGK

SEQ ID NO: 33620 - protein, 217 aa, Rhodocyclales bacterium
  misc_feature (1)..(217): tr|A0A2M7Y5Q9|A0A2M7Y5Q9_9RHOO 7-carboxy-7-deazaguanine synthase OS=Rhodocyclales bacterium CG_4_9_14_3_um_fil ter_68_10 OX=1974089 GN=queE PE=3 SV=1
MSEPRLRLRVSEIFHSIQGESTRAGLPSAFVRLTGCPLRCRWCDTQYAFSGGEALALSEILERVRAFGAAHVCVTGGEPLAQPGCLRLLRELCEAGYRVSLETSGALDISGVDPRVARIMDLKAPGSGEEAKNRWENLECLGAGDEIKIVLAGEADYRWASEQIRTRDLARRCEVLLSPIQGALPLRLLAEWILRDRLPVRLQVQLHKLIWDEPRGH

SEQ ID NO: 33621 - protein, 211 aa, Rhodoferax ferrireducens
  misc_feature (1)..(211): tr|Q21V73|Q21V73_RHOFT 7-carboxy-7-deazaguanine synthas e OS=Rhodoferax ferrireducens (strain ATCC BAA-621 / DS M 15236 / T118) OX=338969 GN=queE PE=3 SV=1
MTYSVKEIFYTLQGEGHHAGRPAVFCRFAGCNLWSGAEDSRASAVCQFCDTDFVGTDGEGGGKFRDAETLAAAINQLWPASYPASKYVVFTGGEPLLQLNAALIDAMHDAGFEVAIETNGTLPVPEGVDWVCVSPKMGSALVVRAGNEIKVVIPQAGQVLDDYACLAFDHYFVQAMDGPLQKENLRMAIDYCKAHPQWKLSLQTHKLLQIP

SEQ ID NO: 33622 - protein, 211 aa, Rhodoferax koreense
  misc_feature (1)..(211): tr|A0A1P8JPZ6|A0A1P8JPZ6_9BURK 7-carboxy-7-deazaguanine synthase OS=Rhodoferax koreense OX=1842727 GN=queE PE= 3 SV=1
MGYQVKEIFYTLQGEGANAGRPAVFCRFAGCNLWSGREEDRSKAVCQFCDTDFVGTDGTSGGKYATAELLAEQIAAFWPAGDATHRFTVLTGGEPLLQVDDALVAALHARGFRIAVESNGTVVAPEGIDWLCISPKAGAQLVQKQGDELKVVWPQAGLDLPALAQLPFRHHYLQPMDGPLQKTNTGLCIAACMAQPAWKLSVQTHKFTGIR

SEQ ID NO: 33623 - protein, 211 aa, Rhodoferax sp.
  misc_feature (1)..(211): tr|A0A3D5VQE0|A0A3D5VQE0_9BURK 7-carboxy-7-deazaguanine synthase OS=Rhodoferax sp. OX=50421 GN=queE PE=3 SV=1
MTYQVKEIFYTLQGEGSNAGRPAVFCRFAGCNLWTGREQDRASAVCQFCDTDFVGTDGTLGGKFKSAQALAERIAAQWPDTDAAHRFVVLTGGEPLLQVDAALIEALHAQGFQIAVETNGTIAAPEGIDWICVSPKAGSTWVQRSGHELKLVWPQAGITLAECEAADFLHRYLQPMDNLLRADNTRACIAQCLERPQWRLSLQTHKITGIR

SEQ ID NO: 33624 - protein, 211 aa, Rhodoferax sp.
  misc_feature (1)..(211): tr|A0A515EM89|A0A515EM89_9BURK 7-carboxy-7-deazaguanine synthase OS=Rhodoferax sp. Gr-4 OX=2527691 GN=queE PE= 3 SV=1
MAYSVKEIFYTLQGEGAQQGRAAVFCRFAGCNLWSGREEDRSSAVCQFCDTDFVGTDGTGGGKFATADALADAVAAAWGPTGPSYRMVVLTGGEPLLQVDVALTQALHARGFFIAVETNGTIAAPEGLDWICVSPKSDAPLAQTSGSELKLVFPQKGVDPARFTGLAFEHFYLQPMDSPLRADHTAQAIAYCQAHPQWRLGVQTHKTIGIR

SEQ ID NO: 33625 - protein, 217 aa, Rhodohalobacter barkolensis
  misc_feature (1)..(217): tr|A0A2N0VKI2|A0A2N0VKI2_9BACT 7-carboxy-7-deazaguanine synthase OS=Rhodohalobacter barkolensis OX=2053187 GN= queE PE=3 SV=1
MFKKEKAAKINLEDTNELDLFEYPLMEDFYTIQGEGSHTGRPAYFIRTAGCDVNCWWCDVKDSWDEEKHPRVKTEEIVKRAVESGAEFAVITGGEPLLHNLEPLTIRLKQAGLQTHIETSGSSPLTGQLDWITLSPKRFKKPLDEVFPYVDELKVVVLTNKDLAWAEENAKKCPSNTQLLLQPEWDTPKSIPLIVEYVKKNPQWGISLQTHKFINVP

SEQ ID NO: 33626 - protein, 200 aa, Rhodohalobacter sp.
  misc_feature (1)..(200): tr|A0A371QNT3|A0A371QNT3_9BACT 7-carboxy-7-deazaguanine synthase OS=Rhodohalobacter sp. SW132 OX=2293433 GN=qu eE PE=3 SV=1
MDAVEYPLVEDFYTIQGEGAHTGRAAYFIRTAGCDVNCWWCDVKESWDEEKHPMTRTGDIVKRAVDSGAEFAVITGGEPLLHNLEPLSVRLKQEGLDVHIETSGSSPLSGQLDWVTLSPKRFKKPLDENFPYVDELKVVVLKNKDIEWAELNAKKCPPSTQLLLQPEWETPSSVKLIVDYVKKNPQWGISLQTHKFMNVP

SEQ ID NO: 33627 - protein, 213 aa, Rhodomicrobium udaipurense
  misc_feature (1)..(213): tr|A0A037UZN0|A0A037UZN0_9RHIZ 7-carboxy-7-deazaguanine synthase OS=Rhodomicrobium udaipurense JA643 OX=858455 GN=queE PE=3 SV=1
MYTVKEIFPTLQGEGAQVGRAAVFLRFAGCNLWTGQHKDKSKAFCRFCDTDFVGYDGPNGGKFETADQLADIVLGMWNSLTKGKTASPYVVCTGGEPTLQLDTPMIDALKKRGFTVAIESNGTRPAPRGLDWICISPKAGVPLAQREGNELKLVYPQTGALPQLFERLKFEHFFLQPMDGPQHRDNIEAAIRYCMANPPWRLSMQMHKLVGIR

SEQ ID NO: 33628 - protein, 213 aa, Rhodomicrobium vannielii; identical to SEQ ID NO: 33627
  misc_feature (1)..(213): tr|E3I3N5|E3I3N5_RHOVT 7-carboxy-7-deazaguanine synthas e OS=Rhodomicrobium vannielii (strain ATCC 17100 / ATH 3.1.1 / DSM 162 / LMG 4299) OX=648757 GN=queE PE=3 SV=1

SEQ ID NO: 33629 - protein, 208 aa, Rhodonellum psychrophilum
  misc_feature (1)..(208): tr|U5BWJ4|U5BWJ4_9BACT 7-carboxy-7-deazaguanine synthas e OS=Rhodonellum psychrophilum GCM71 = DSM 17998 OX=112 3057 GN=queE PE=3 SV=1
MEKKTAVAAGTMLPLMEAFYTIQGEGTFSGTPAYFIRLGGCDVGCVWCDVKASWEAAKWPVLPIEEIVEGALQYPGRLVVITGGEPLMYNLDPLTRLLKENGFTTNIETSGAHPFSGDFDWVCFSPKKFKTPHPSIYAVADELKVVVFHKSDFDFAEKHAVLVRENCRKLLQPEWSKSDLFINSIIDYVKSHPNWKVSLQTHKFMEIP

SEQ ID NO: 33630 - protein, 257 aa, Rhodopirellula bahusiensis
  misc_feature (1)..(257): tr|A0A2G1W2R7|A0A2G1W2R7_9PLAN 7-carboxy-7-deazaguanine synthase OS=Rhodopirellula bahusiensis OX=2014065 GN=q ueE PE=3 SV=1
MKSVDHSVDVLPAENLAETPGDARASASSLLISETFVSLQGEGELTGTESVFIRTSGCNLRCWFCDTPYASWKPEGTSQSIESLLHLVAESGVKHVVLTGGEPLIAKGMVSLVDQLRAAGNHVTIETAGTVDPGVSCDLLSLSPKLRASTPDAADHARWAKLHAERRLPIDTMKQLIRSAKATQVKFVVDSSEEMAEIDEVVGQLAVPAHSVWLMPQGISVEQLDAARPWLEPLAESRGYRYCDRMQIRWYGNRRGT

SEQ ID NO: 33631 - protein, 257 aa, Rhodopirellula baltica
  misc_feature (1)..(257): sp|Q7UVG8|QUEE_RHOBA 7-carboxy-7-deazaguanine synthase OS=Rhodopirellula baltica (strain DSM 10527 / NCIMB 139 88 / SH1) OX=243090 GN=queE PE=3 SV=1
MKSVDHPVDVLPAEHSAETPGDARASESSLLISETFVSRQGEGELTGTESVFIRTSGCNLRCWFCDTPYASWKPEGTRQTIEDLLQLVAKSGVKHVVLTGGEPLIAKGIVSLIDQLRSAGNHVTIETAGTVDPGARCDLLSLSPKLRASTPDAKDHPRLAKMHAERRLPINTMKQLIQSAEATQVKFVVDSADELPEIDEVVRQLEIAADAVYLMPQGISVEQLDAARPWLEPMAISRGYQYCDRMQIRWFGNRRGT

SEQ ID NO: 33632 - protein, 257 aa, Rhodopirellula baltica
  misc_feature (1)..(257): tr|K5CXN3|K5CXN3_RHOBT 7-carboxy-7-deazaguanine synthas e OS=Rhodopirellula baltica SH28 OX=993517 GN=queE PE=3 SV=1
MKSVDHPVDVLPAEHSAETPGDARASASSLLISETFVSRQGEGELTGTESVFIRTSGCNLRCWFCDTPYASWKPEGTRQTIENLLQLVAESGVKHVVLTGGEPLIAKGIVSLIDQLRSAGNHVTIETAGTVDPGARCDLLSLSPKLRASTPDAKDHPRLAKMHAERRLPIDTMKQLIQSAEATQVKFVVDSADELPEIDEVVRQLEIAADAVYLMPQGISVEQLDAARPWLEPMAISRGYQYCDRMQIRWYGNRRGT

SEQ ID NO: 33633 - protein, 278 aa, Rhodopirellula europaea
  misc_feature (1)..(278): tr|M2A7H9|M2A7H9_9PLAN 7-carboxy-7-deazaguanine synthas e OS=Rhodopirellula europaea 6C OX=1263867 GN=queE PE=3 SV=1
MSRKEAVSLTWFGSLLETRCRLKSVDHPVDVLPAEDSAETPGDSCAPASSLLISETFVSRQGEGELTGTESVFIRTSGCNLRCWFCDTPYASWKPEGARLTVDDLLQLVADSGVKHVVLTGGEPLIAKGIVSLIDQLRVAGNHVTIETAGTVDPGVRCDLLSLSPKLRASTPDEKDHPRWAKLHAERRLPINTMKQLIQSAEATQVKFVVDSADELPEIDEVVRQLEISADSVYLMPQGISVEQLDTARPWLEPMATLRGYQYCDRMQIRWYGNRRGT

SEQ ID NO: 33634 - protein, 272 aa, Rhodopirellula europaea
  misc_feature (1)..(272): tr|M5SA91|M5SA91_9PLAN 7-carboxy-7-deazaguanine synthas e OS=Rhodopirellula europaea SH398 OX=1263868 GN=queE P E=3 SV=1
MSLTWFGSLLETRCRLKSVDHPVDVLPAEDSAETPGDSCAPASSLLISETFVSRQGEGELTGTESVFIRTSGCNLRCWFCDTPYASWKPEGTRQTVDDLLQLVADSGVKHVVLTGGEPLIAKGIVSLIDQLRVAGNHVTIETAGTVDPGVQCDLLSLSPKLRASTPDEKDHPRWAKLHAERRLPIGTMKQLIQSAEATQVKFVVDSADELPEIDEVVRQLEISADSAYLMPQGISVEQLDTARPWLEPMATLRGYQYCDRMQIRWYGNRRGT

SEQ ID NO: 33635 - protein, 272 aa, Rhodopirellula islandica
  misc_feature (1)..(272): tr|A0A0J1B800|A0A0J1B800_RHOIS 7-carboxy-7-deazaguanine synthase OS=Rhodopirellula islandica OX=595434 GN=queE PE=3 SV=1
MSLTWFGSLLETRCRLKSVDQSVDVLPAEDSAETPGDPRARPSTLLISETFVSRQGEGQLTGTNSVFIRTSGCNLRCWFCDTPYASWKPEGAPQTIESLLNLVADSEANHVVLTGGEPLIAKGIVGLTDRLRAAGNHVTIETAGTVDPGVRCDLLSLSPKLRASTPDEKEHPRWAKLHSERRLPIDTMKQLIRSADATQVKFVVDSAEELAEIDEVVGQLGVDADLVWLMPQGISVEQLDAVRPWLEPMAESRGYRYCDRMQIRWYGNRRGT

SEQ ID NO: 33636 - protein, 213 aa, Rhodopirellula maiorica
  misc_feature (1)..(213): tr|M5RZD2|M5RZD2_9PLAN 7-carboxy-7-deazaguanine synthas e OS=Rhodopirellula maiorica SM1 OX=1265738 GN=queE PE= 3 SV=1
MTGTNSFFVRTSGCNLRCWFCDTPYASWRPEGDRVSIATLVESISESGVRHVVLTGGEPLLPKESVLLCEMLRARGHHITIETAGTIDREIACDLMSISPKFRTSAPDADQHPRWNELHEQRRMPIGTMQMLIQQSADYQVKFVVDGERDLQELQEIISQLGVPATKVWVMPQGVSNDELDKAATWLRPWTAERGFQYCDRMQIRWYGNRRGT

SEQ ID NO: 33637 - protein, 320 aa, Rhodopirellula sallentina
  misc_feature (1)..(320): tr|M5UJ27|M5UJ27_9PLAN 7-carboxy-7-deazaguanine synthas e OS=Rhodopirellula sallentina SM41 OX=1263870 GN=queE PE=3 SV=1
MVKRVERLKEREHAVPALLYPDISLRKGATACADNGAGPHHVSEPSTPTPRSASPATQNRRLRIAETFTSLQGEGRLTGVPSFFIRTSGCNLRCWFCDTPYASWNPEGDRLSIESLVNAAVESSISPDAAALPTDGSIDDPDSAHATGPANAPIAVRHVVLTGGEPLVAAGFPELAAALREAGMHVTVETAGTVDVDFPCNLLSLSPKLRASRPDPEAHPKWSRRHEERRMPVATMRSLIERSPAVQVKFVVDSPEEFGEIEEVVTDLRIDAADVWIMPQGVSVEQLDDAAKWLTPWASQQGYQYCDRMQIRWYGNRRGT

SEQ ID NO: 33638 - protein, 293 aa, Rhodopirellula sp.
  misc_feature (1)..(293): tr|M5SVJ2|M5SVJ2_9PLAN 7-carboxy-7-deazaguanine synthas e OS=Rhodopirellula sp. SWK7 OX=595460 GN=queE PE=3 SV= 1
MVKRFEILKEREQGVPALLYPDATSRKGDSAPSDASLVASNTRLRIAETFTSRQGEGRLTGVPSFFIRTSGCNLRCWFCDTPYASWNPEGERFTIDSLLNDAQNASMPMADDRATDEDSSRGTETSIRVQHVVLTGGEPLIAAGFPELATTLQNAGFHVTVETAGTVDVDFHCDLLSLSPKLRGSTPDAAEHPKWSQTHEERRMPVTTMRQLISRSPNVQVKFVVDSPDEFDEILGVVADLEVAASDVWIMPQGVTVEQLDAAATWLAPWASEHEFEYCDRMQIRWYGNRRGT

SEQ ID NO: 33639 - protein, 213 aa, Rhodopirellula sp.
  misc_feature (1)..(213): tr|A0A255R871|A0A255R871_9PLAN 7-carboxy-7-deazaguanine synthase OS=Rhodopirellula sp. MGV OX=2023130 GN=queE PE=3 SV=1
MTGTDSFFIRTSGCNLRCWFCDTPYASWNPSGETQSVRQLLDAAKHSGTRHVVLTGGEPLLPSSIESLCRALFQQDFHVTIETAGTIDKPIACDLLSLSPKLADSTPDADKHPRWSQLHEARRMPIDTMRRLIDAAKDFQLKFVVSSQEQFREIDSIVKALAITANDVYIMPQGVTVEAMDKAQQELRPTTEASGYQYCDRMQIRWYGNRRGT

SEQ ID NO: 33640 - protein, 243 aa, Rhodoplanes sp.
  misc_feature (1)..(243): tr|A0A127EVF3|A0A127EVF3_9RHIZ 7-carboxy-7-deazaguanine synthase OS=Rhodoplanes sp. Z2-YC6860 OX=674703 GN=que E PE=3 SV=1
MKETIRISEIFGPTVQGEGPLIGRPAVFVRTGGCDYRCAWCDTLYAVLPEYRSEWTPMTPEQIVARIDDLTAGHPIPVTLTGGNPATQPLEPLIELGRARGHGFAVETQGSVAAPWFAALDWLILSPKPPSSGMTTDWDALDACLGAAGQGPRVVLKVVVFDDADFAYAKDLSSRHPTLPVYLQVGNPAPLIAADGRQSEDADMDDLGARLRWLIGRVTDDRWFSATVLPQLHVLAWGNRRGV

SEQ ID NO: 33641 - protein, 210 aa, Rhodopseudomonas faecalis
  misc_feature (1)..(210): tr|A0A318TKQ1|A0A318TKQ1_9BRAD 7-carboxy-7-deazaguanine synthase OS=Rhodopseudomonas faecalis OX=99655 GN=queE PE=3 SV=1
MSYAVKEIFLTLQGEGAQAGRAAVFCRFSGCNLWSGREQDRGKADCQFCDTDFVGTDGTLGQRYQNAAELAEAIAAQWLGAEAERYVVLTGGEPLLQVDAALIDALHDLGFSVGLETNGTMLPPDGIDWICVSPKAGTELVLQHGDELKLVFPQAGAEPERFARLPFEYFSLQPLDGPDAAAHTQAAIDYCLHHPQWRLSVQTHKVIGIR

SEQ ID NO: 33642 - protein, 210 aa, Rhodopseudomonas palustris
  misc_feature (1)..(210): tr|Q2J0V2|Q2J0V2_RHOP2 7-carboxy-7-deazaguanine synthas e OS=Rhodopseudomonas palustris (strain HaA2) OX=316058 GN=queE PE=3 SV=1
MSYAVKEIFLTLQGEGAHAGRASVFCRFAGCNLWTGREQDRHDAVCQFCDTDFVGTDGTLGGRYGDAGKLADTIAAQWVGADTDRYVVITGGEPLLQLDAELIDALHKQGFEVGVETNGTIEPPAGIDWLCVSPKAGTQIRVQCGNELKLVYPQPDAMPEQFTSLDFERFSLQPMDGPDRDDNTRRAIDYCLRHPQWRLSVQTHKVIGIR

SEQ ID NO: 33643 - protein, 210 aa, Rhodopseudomonas palustris
  misc_feature (1)..(210): tr|E6VGE8|E6VGE8_RHOPX 7-carboxy-7-deazaguanine synthas e OS=Rhodopseudomonas palustris (strain DX-1) OX=652103 GN=queE PE=3 SV=1
MSYAVKEIFLTLQGEGAHAGRAAVFCRFAGCNLWTGREQDRDEATCKFCDTDFIGTDGTLGGRYAGAELLADTIAEQWTGDPRKRYVVITGGEPLLQLDGELIAALHTRGFAIGVETNGTIEPPDGIDWLCVSPKAGAELRIRRGDELKLVYPQPGAMPEQFAALDFERFSLQPMDGPERDDNTTRAIAYCLMHPQWRLSLQTHKITGIR

SEQ ID NO: 33644 - protein, 210 aa, Rhodopseudomonas pentothenatexigens
  misc_feature (1)..(210): tr|A0A336JLH3|A0A336JLH3_9BRAD 7-carboxy-7-deazaguanine synthase OS=Rhodopseudomonas pentothenatexigens OX=999 699 GN=queE PE=3 SV=1
MSYAVKEIFLTLQGEGAHAGRAAVFCRFAGCNLWSGRDQDRDEATCKFCDTDFVGTDGTLGGRYADAALLADVIAAQWTGSARDRYVVITGGEPLLQLDAELIDALHARGFEIGVETNGTIEPPAGIDWLCVSPKAGAELRIRRGDELKLVYPQPGAMPDQFAALDFARFSLQPMDGPDRDDNTTRAIAYCLQHPQWRLSLQTHKVTGIR

SEQ ID NO: 33645 - protein, 210 aa, Rhodopseudomonas pseudopalustris
  misc_feature (1)..(210): tr|A0A1H8NY52|A0A1H8NY52_9BRAD 7-carboxy-7-deazaguanine synthase OS=Rhodopseudomonas pseudopalustris OX=151389 2 GN=queE PE=3 SV=1
MSYAVKEIFLTLQGEGAHAGRASVFCRFAGCNLWTGREQDRDQAVCRFCDTDFVGTDGTLGGRYTDAGELAGAIAAQWAGAEVDRYVVITGGEPLLQLDAELIAALQKQGFAIGVETNGTIEPPPGIDWLCVSPKAGAELRVKRGNELKLVYPQPGAMPEQFAALDFERFSLQPMDGPARDEHTRLAIAYCLRHPQWRLSVQTHKTIGIR

SEQ ID NO: 33646 - protein, 210 aa, Rhodopseudomonas sp.
  misc_feature (1)..(210): tr|A0A0N1BX34|A0A0N1BX34_9BRAD 7-carboxy-7-deazaguanine synthase OS=Rhodopseudomonas sp. AAP120 OX=1523430 GN= queE PE=3 SV=1
MSYAVKEIFLTLQGEGAHAGRASVFCRFAGCNLWTGREQDRDQAVCKFCDTDFVGTDGTLGGRYADADQLAAVIAAQWIGDDHDRYVVITGGEPLLQLDAELIDALHKQGFAIGVETNGTIEPPHGIDWVCVSPKAGAPLRVQRGNELKLVYPQAGAMPDQFHHLAFERFALQPMDGPRQLDNTREAIDYCLRHPQWRLSVQTHKVIGIR

SEQ ID NO: 33647 - protein, 246 aa, Rhodospirillaceae bacterium
  misc_feature (1)..(246): tr|A0A1Z8LM52|A0A1Z8LM52_9PROT 7-carboxy-7-deazaguanine synthase OS=Rhodospirillaceae bacterium TMED8 OX=19866 45 GN=queE PE=3 SV=1
MKKYKYSECFLSIQGEGKYTGVPSVFLRFWGCNFTCEGFKCDTEYSWHKDYNHMLKRASAGELMCEIEKLCPAFTETYHLVITGGEPMLSQSAFVEILYLLEKNGNLPSYVTIETNGTQMPRLAAAESISDVRELLWSVSPKLSISGENWINAIQPDVVAAYAEISKCGQLKYVVDGSAKCWDEVEIATQAFRDAGVEFPVWIMPVGATTEQLSQNQEQICIDTVTRGYNFSPRAHAWIFGDKPGT

SEQ ID NO: 33648 - protein, 209 aa, Rhodospirillaceae bacterium; identical to SEQ ID NO: 31350
  misc_feature (1)..(209): tr|A0A357V077|A0A357V077_9PROT 7-carboxy-7-deazaguanine synthase OS=Rhodospirillaceae bacterium OX=1898112 GN= queE PE=3 SV=1

SEQ ID NO: 33649 - protein, 211 aa, Rhodospirillales bacterium
  misc_feature (1)..(211): tr|A0A1G3I8N0|A0A1G3I8N0_9PROT 7-carboxy-7-deazaguanine synthase OS=Rhodospirillales bacterium RIFCSPLOWO2_12_ FULL_58_28 OX=1802022 GN=queE PE=3 SV=1
MSYAVKEMFYSLQGEGAQSGRAAVFCRFAGCNLWSGREDDRASATCSFCDTDFIGVDGGGGGRFRTADKLARAAFALWPKTTTGRPMVVCTGGEPFLQLDKKLIAAFHDAGFEVAAETNGALPAPDGLDWVCVSPKAGSNLVLTAGDELKLVYPQPDADPRWYENLDFRHFFLQPMDGAELAKNTESAMRFCLERPKWRLSLQIQKQLGIR

SEQ ID NO: 33650 - protein, 241 aa, Rhodospirillales bacterium
  misc_feature (1)..(241): tr|A0A259MHI2|A0A259MHI2_9PROT 7-carboxy-7-deazaguanine synthase OS=Rhodospirillales bacterium 39-66-50 OX=197 0570 GN=queE PE=3 SV=1
MSTIRISEIFGPTVQGEGALIGKPTVFVRTGGCDYRCSWCDTLYAVLPEYRHDWRPLTPDAILAKVDALTGGTPVLVTISGGNPAIQPLGPLIEQGHARGHRFAMETQGSVAAGWFATLDHLVLSPKPPSSGMDTDWSAFDACLAAAAGGPHTVLKVAVFDEADYAFARAAAARHPSLPVYLSVGNHTPGEPNEAGRDGVDQKGLMARFRWLVDRVGQDRWFAATVLPQLHVLAWGNERGV

SEQ ID NO: 33651 - protein, 235 aa, Rhodospirillum rubrum
  misc_feature (1)..(235): sp|Q2RSY6|QUEE_RHORT 7-carboxy-7-deazaguanine synthase OS=Rhodospirillum rubrum (strain ATCC 11170 / ATH 1.1.1 / DSM 467 / LMG 4362 / NCIB 8255 / S1) OX=269796 GN=qu eE PE=3 SV=1
MFGRNPARGPDPGDGESLWIQEVFYTLQGEGPFSGQPSVFVRTAGCNLRCAWCDTDFESSAWKPPLPELLAVIDSRRPRVCDLVVLTGGEPLRQEVGPLVRALLARGLRVQIETNGTLWRDLPFGPGLSIVCSPKTRTLDPQLVPRIDAFKYVIAAGETDPTDGLPALSTQHPGRAERLFRPPPGVPVFVMPRDDHGTPARPGRGEDDNLAEAAASALRFGYRLCVQVHKILKIA

SEQ ID NO: 33652 - protein, 209 aa, Rhodothalassium salexigens
  misc_feature (1)..(209): tr|A0A4R2PVG8|A0A4R2PVG8_RHOSA 7-carboxy-7-deazaguanine synthase OS=Rhodothalassium salexigens DSM 2132 OX=118 8247 GN=queE PE=3 SV=1
MAYAVKELFLTLQGEGGQAGRPAVFCRFAGCNLWSGREADRAGAVCRFCDTDFVGTDGQNGGRYAGPDLVAAAAALWPAGRDRRLVVCTGGEPLLQLDAALIARFHDAGFEVAVESNGTVAAPAGIDWLCVSPKAGAPLVQTRGQELKLVYPQPGAEPERFADLDFAHRFLQPMDGPALADNTRQAIAYCLANPRWRLSVQTHKVLGID

SEQ ID NO: 33653 - protein, 233 aa, Rhodothermaceae bacterium
  misc_feature (1)..(233): tr|A0A2E3R1H8|A0A2E3R1H8_9BACT 7-carboxy-7-deazaguanine synthase OS=Rhodothermaceae bacterium OX=2026787 GN=qu eE PE=3 SV=1
MAASPAGPKRYAVKALWRTVQGEGTQAGRAAVFVRLAGCNLWSGFEADRTRDAARSGADCPLWCDTEFTPPGAVKLSAADLARAAAEAGGAVRFCVLTGGEPLLQADAALLRALHAEGFVVAVETNGTQRLADAFGEDPADHPDWVVCSPKLPEAQLPLEACDELKLVVPDYRPEAYASMATRVREHAGRRALWLQPEDGPRLTEATRLALDLVFQDPRWRVSVQTHKALGVD

SEQ ID NO: 33654 - protein, 192 aa, Rhodothermaceae bacterium
  misc_feature (1)..(192): tr|A0A424HNK7|A0A424HNK7_9BACT 7-carboxy-7-deazaguanine synthase OS=Rhodothermaceae bacterium TMED105 OX=19866 65 GN=queE PE=3 SV=1
MEHFYTIQGEGAHTGRAAYFIRLAGCDVGCSWCDVKESWQEEGHPILSIQTLVDAVVESGAKMVVITGGEPLLHDLDPLTDALQACNISLHIETSGSSPFSGTFDWVTLSPKKFKHPVPDVYPIVAELKVVVVNQKDFQWAEQHAAMCPESTQLYLQPEWQTPQAMGWIVNYVKEHPHWNISLQTHKYLDVP

SEQ ID NO: 33655 - protein, 193 aa, Rhodothermaeota bacterium
  misc_feature (1)..(193): tr|A0A2A5X396|A0A2A5X396_9BACT 7-carboxy-7-deazaguanine synthase OS=Rhodothermaeota bacterium MED-G19 OX=19862 40 GN=queE PE=3 SV=1
MESFYSIQGEGFHSGKPAYFIRLSGCDVNCHWCDVKESWKISKDQYMHIDDIVKKVSKSCADIVVITGGEPLMHDLTILTKTLKDNDKKVHIETSGTHSLKGDYDWICFSPKKFKEPLEDFFSISDELKVIIYNRSDFKWAEELSKKVSQKTELIMQPEWSKEELISPLILDYIKSNPKWRISVQTHKYLNVQ

SEQ ID NO: 33656 - protein, 203 aa, Rhodothermaeota bacterium
  misc_feature (1)..(203): tr|A0A2A5XB53|A0A2A5XB53_9BACT 7-carboxy-7-deazaguanine synthase OS=Rhodothermaeota bacterium MED-G18 OX=19862 39 GN=queE PE=3 SV=1
MKRGSKNLPVMESFYSIQGEGYHSGKPAYFVRLAGCDVKCSWCDVKDSWSNSADQFVHVQDIVKEINQYSTDLVIITGGEPFFHDLGPLTNLLKENGKMVHVETSGTEKFSGEFDWICLSPKRFKKPLENFYEISDELKVIIYQDSDFRWAERISSRMKKDTKRLLQPEWSVENTVNPKILNFIKENPKWRISLQTHKYLKVD

SEQ ID NO: 33657 - protein, 233 aa, Rhodothermus marinus
  misc_feature (1)..(233): tr|D0MDN0|D0MDN0_RHOM4 7-carboxy-7-deazaguanine synthas e OS=Rhodothermus marinus (strain ATCC 43812 / DSM 4252 / R-10) OX=518766 GN=queE PE=3 SV=1
MRSYRVKEIWKTLQGEGFFAGRPAVFVRFVGCNLWSGRDEDRARDARRTGADCPRWCDTDFRKEGSRAYTADELVAAMQEVGGPIQFCVLTGGEPLLQLDAALMRALKAAGYFVAIETNGTISLREACTDPETGQVVAPDWIVCSPKLPEDRLALEYFDELKLVVPDYRPEQYARFARRARPHRVGGRRIPLLWLQPEDGPRLAEAQRCAVELALAHPDWRVSVQTHKILGVP

SEQ ID NO: 33658 - protein, 233 aa, Rhodothermus marinus
  misc_feature (1)..(233): tr|G2SH20|G2SH20_RHOMG 7-carboxy-7-deazaguanine synthas e OS=Rhodothermus marinus (strain SG0.5JP17-172) OX=762 570 GN=queE PE=3 SV=1
MRSYRIKAIWKTLQGEGFFAGRPAVFVRFVGCNLWSGRDEDRARDARRTGADCPRWCDTDFRKEGSRAYTADELVAAMQEVGGPIQFCVLTGGEPLLQLDAALMRALKAAGYFVAIETNGTISLREACTDPETGQVVAPDWIVCSPKLPEDRLALEYFDELKLVVPDYRPEQYARFARRARPHRVGGRRIPLLWLQPEDGPRLAEAQRCAVELALAHPDWRVSVQTHKILGVP

SEQ ID NO: 33659 - protein, 233 aa, Rhodothermus profundi
  misc_feature (1)..(233): tr|A0A1M6VWD0|A0A1M6VWD0_9BACT 7-carboxy-7-deazaguanine synthase OS=Rhodothermus profundi OX=633813 GN=queE PE =3 SV=1
MPTYRVKAIWKTLQGEGFFAGRPAVFVRFVGCNLWSGQERDRERDAQRTGADCPRWCDTDFRKAGSRPYTADELVAALQEVGGPIRFCVLTGGEPLLQLDASLMHALQAAGYFVAIETNGTVSLRQACTDPETGQLVAPDWIVCSPKLPEDRLALEYFDELKLIVPDYRPEQYARFARRARPHRVGGRRIPLLWLQPEDGPRLAEAQRCAVELALAHPEWRVSVQIHKVLGVD

SEQ ID NO: 33660 - protein, 219 aa, Rhodovarius sp.
  misc_feature (1)..(219): tr|A0A437MEE5|A0A437MEE5_9PROT 7-carboxy-7-deazaguanine synthase OS=Rhodovarius sp. CCP-6 OX=1979269 GN=queE P E=3 SV=1
MSYAVKEIFYTLQGEGAQAGRPAVFCRFTGCNLWSGREEDRAEAVCRFCDTDFVGMDGTAGGRYPDAAALADTIAAHWPGGGAAPGSTAGGRPFVVCTGGEPLLQLDEPLVEALHARGFEVAVETNGTIAPAPAGLDWICVSPKAGAELRLTSGHELKLVIPQPGIDLEAMEKLDFQRFSLQPMDGADAERNTRSALELCLARPQWQLSLQTHKMLDIR

SEQ ID NO: 33661 - protein, 213 aa, Richelia intracellularis
  misc_feature (1)..(213): tr|M1X212|M1X212_9NOST Queuosine Biosynthesis QueE Radi cal SAM OS=Richelia intracellularis HM01 OX=1165095 GN= RINTHM_15680 PE=4 SV=1
MPEICRIENTPGLRDFQNHLNPVTPEKLLAWVQQQNKPFIHDSISLTGGETLIHTLFLIKFLPQVRDLTKLPIYLETGGHRPQQLAQLIPHLDLVGMDIKLPSVSGENHWQAHKEFLKLCYESKLEVFVKIIVSKNTELMDLKIAGEIVRNVNPGSPIFLQPVTPLDTPTGSINHNLISSPSPKQILMWQVLMKEFVKEVRVLPQTHKILNQL

SEQ ID NO: 33662 - protein, 267 aa, Richelia intracellularis
  misc_feature (1)..(267): tr|M1X0I5|M1X0I5_9NOST 7-carboxy-7-deazaguanine synthas e OS=Richelia intracellularis HH01 OX=1165094 GN=queE P E=3 SV=1
MNIRNINQEHSAHLIEVFSGIQGEGLNVGTRQIFIRFALCDLRCHFCDSSNTWKMPEICRIENTPGLRDFQNHLNPVTPEKLLTWVQQQNKPFIHDSISLTGGETLIHTLFLIKFLPQVRDLTKLPVYLETGGHRPQQLAQLIPHLDLVGMDIKLPSVSGENHWQAHKEFLKLCYESKLEVFVKIIVSKNTELMDLKIAGEIVRNVNPGSPIFLQPVTPLDTPTGSINHNLISSPSPKQILMWQVLMKEFVKEVRVLPQTHKILNQL

SEQ ID NO: 33663 - protein, 267 aa, Richelia sp.
  misc_feature (1)..(267): tr|A0A3B9F723|A0A3B9F723_9NOST 7-carboxy-7-deazaguanine synthase OS=Richelia sp. OX=2053605 GN=queE PE=3 SV=1
MNIRNINQEHSAHLLEVFSGIQGEGLNVGTRQIFIRFALCDLRCHFCDSSNTWKMPEICRIENTPGLRDFQNHLNPVTPEKLLTWVQQQNKPFIHDSISLTGGETLIHTLFLIKFLPQVRDLTKLPVYLETGGHRPQQLAQLIPHLDLVGMDIKLPSVSGENHWQAHKEFLKLCYESKLEVFVKIIVSKNTELMDLKIAGEIVRNVNPGSPIFLQPVTPLDTPTGSINHNLISSPSPKQILMWQVLMKEFVKEVRVLPQTHKILNQL

SEQ ID NO: 33664 - protein, 225 aa, Rickettsia africae
  misc_feature (1)..(225): tr|C3PP48|C3PP48_RICAE 7-carboxy-7-deazaguanine synthas e OS=Rickettsia africae (strain ESF-5) OX=347255 GN=nrd G PE=3 SV=1
MFGQNPKRSILNGDGTQLEVQSIFKTIQGEGIFVGCPAIFIRLGGCNLACNFCDTEFEDFDLVDIDKILNKVESLALNSKNEKSINLVVITGGEPMRQPIELLCQKLLDRDVKVQIETNGTLYRSLPKEVSIICSPKVGKTGYSKIREDLLPKISAVKFIVAKNILEYSLIPEVGQTSYNIPVFIQPMDQNNQRLNGENNELAVKLALESGARLSLQTHKFLNIP

SEQ ID NO: 33665 - protein, 225 aa, Rickettsia akari
  misc_feature (1)..(225): tr|A8GP86|A8GP86_RICAH 7-carboxy-7-deazaguanine synthas e OS=Rickettsia akari (strain Hartford) OX=293614 GN=qu eE PE=3 SV=1
MFGQNPKRSILNGDGTTLEVQSIFKTIQGEGLFVGGPAIFIRLGGCNLACNFCDTEFEDFKLVDIVEILNKVESLALNSKNERAINLVVITGGEPMRQPIELLCQKLLDQDFKVQIETNGTLYRALPNEVYIICSPKAGKTGYSKIREDLLSQISAVKFIVAKNILEYNFIPEVGQTSYNIPVFIQPMDQNNQRLNDENNELAVKLALESGARLSLQTHKILGIE

SEQ ID NO: 33666 - protein, 225 aa, Rickettsia amblyommatis
  misc_feature (1)..(225): tr|A0A0F3QH68|A0A0F3QH68_RICAM 7-carboxy-7-deazaguanine synthase OS=Rickettsia amblyommatis str. Darkwater OX= 1359166 GN=queE PE=3 SV=1
MFGQNPKRSILNGDGTKLEVQSIFKTIQGEGIFVGYPAIFIRLGGCNLACNFCDTEFEDFDLVDIDKILNKVESLALNSKNEKSINLVVITGGEPMRQPIELLCQKLLDRDVKVQIETNGTLYRSLPKEVSIICSPKAGKTGYSKIREDLLPKISAVKFIVAKHILEYSLIPEVGQTSYNIPVFIQPMDQNDQRLNGENNELAVKLALESGAILSLQTHKFLNIP

SEQ ID NO: 33667 - protein, 225 aa, Rickettsia amblyommatis; identical to SEQ ID NO: 33666
  misc_feature (1)..(225): tr|H8K2M2|H8K2M2_RICAG 7-carboxy-7-deazaguanine synthas e OS=Rickettsia amblyommatis (strain GAT-30V) OX=110511 1 GN=queE PE=3 SV=1

SEQ ID NO: 33668 - protein, 225 aa, Rickettsia argasii; identical to SEQ ID NO: 33664
  misc_feature (1)..(225): tr|A0A0F3RF57|A0A0F3RF57_9RICK 7-carboxy-7-deazaguanine synthase OS=Rickettsia argasii T170-B OX=1268837 GN=qu eE PE=3 SV=1

SEQ ID NO: 33669 - protein, 225 aa, Rickettsia asembonensis
  misc_feature (1)..(225): tr|A0A0C2MN13|A0A0C2MN13_9RICK 7-carboxy-7-deazaguanine synthase OS=Rickettsia asembonensis OX=1068590 GN=queE PE=3 SV=1
MFGQNPKRSILNGDGTKLEVQSIFKTIQGESIFVGCPAIFIRLGGCNLACNFCDTEFEDFELVDIAEILNKVESLALNSKNEKSINLVVITGGEPMRQPIELLCQKLLDQNLKIQIETNGTLYRSLPNEVSIICSPKAGKNGYSKIREDLLPKISAVKFIVAKNILEYNFIPEVGQTSYNIPVFIQPMDQNDQRLNAENNELAVKLALESGARLSLQTHKFLGIE

SEQ ID NO: 33670 - protein, 225 aa, Rickettsia asiatica
  misc_feature (1)..(225): tr|A0A510G806|A0A510G806_9RICK 7-carboxy-7-deazaguanine synthase OS=Rickettsia asiatica OX=238800 GN=queE PE=3 SV=1
MFGQNPKRSILNGDGTKLEVQSIFKTIQGEGIFVGCPAIFIRLGGCNLACNFCDTEFEDFELVDIDKILNKVEGLVLNSKNEKSINLVVITGGEPMRQPIELLCWKLLDLDFKVQIETNGTLYRSLPNEVSIICSPKAGKNGYSKIREDLLPKISAVKFIVAKNIMEYSFIPEVGQIAYNIPVFIQPMDQNDQRLNDENNELAVKLVLESGARLSLQTHKFLGIE

SEQ ID NO: 33671 - protein, 225 aa, Rickettsia australis
  misc_feature (1)..(225): tr|H8K6U9|H8K6U9_RICAC 7-carboxy-7-deazaguanine synthas e OS=Rickettsia australis (strain Cutlack) OX=1105110 G N=queE PE=3 SV=1
MFGQNPKRSILNGDGTKLEVQSIFKTIQGEGIFVGCPAIFIRLGGCNLACNFCDTEFEDFKLVDIVEILNKVESLALNSTNERSINLVVITGGEPMRQPIELLCQKLLDQDFKVQIETNGTLYRSLPNEVYIICSPKAGKTGYSKIREDLLSQISALKFIVAKNILEYNFIPEVGQTSYNIPVFIQPMDQNNQRLNDENNELVVKLALESGARLSLQTHKILGIE

SEQ ID NO: 33672 - protein, 225 aa, Rickettsia bellii
  misc_feature (1)..(225): tr|A0A0F3QC75|A0A0F3QC75_RICBE 7-carboxy-7-deazaguanine synthase OS=Rickettsia bellii str. RML An4 OX=1359193 GN=queE PE=3 SV=1
MFGQNPKRGVLKGDGTQLQVQFIFKTIQGEGIFVGVPAIFIRLGGCNLACDFCDTEFENFETIKIDDILSKVNLLALNSKNEQSVKLVVITGGEPMRQPIELLCQKLLEQDFKVQIETNGTLYRSLPDEVSIICSPKAGKKGYSKIMEDLLPKISAVKFIIAKNILEYSLIPEIGQTAYNIPVFVQPMDQNDQKLNKENNELAVKLALESGARLSVQTHKFIGIE

SEQ ID NO: 33673 - protein, 225 aa, Rickettsia bellii
  misc_feature (1)..(225): tr|A0A0F3QJI8|A0A0F3QJI8_RICBE 7-carboxy-7-deazaguanine synthase OS=Rickettsia bellii str. RML Mogi OX=1359194 GN=queE PE=3 SV=1
MFGQNPKRGVLKGDGTQLQVQFIFKTIQGEGIFVGVPAIFIRLGGCNLACDFCDTEFENFETIKIDDILSKVNLLALNSKNEQSVKLVVITGGEPMRQPIELLCQKLLEQDFKVQIETNGTLYCSLPDEVSIICSPKAGKKGYSKIREDLLPKISAVKFIIAKNILEYSLIPEIGQTAYNIPVFVQPMDQNDQKLNKENNELAVKLALESGARLSVQTHKFIGIE

SEQ ID NO: 33674 - protein, 225 aa, Rickettsia buchneri
  misc_feature (1)..(225): tr|A0A067AJQ9|A0A067AJQ9_9RICK 7-carboxy-7-deazaguanine synthase OS=Rickettsia buchneri OX=1462938 GN=queE PE= 3 SV=1
MFGQNPKRSILNGDGTKLEVQSIFKTIQGEGIFVGCPAIFIRLGGCNLACNFCDTEFEDFDLVDIDKILNKVEILALNSKNEKSINLVVITGGEPMRQPIELLCHKLLDLDFKVQIETNGTLYRSLPKGVSIICSPKAGKTGYSKIRENLLPKISAVKFIVAKNILEYSIIPEVGQTSYNIPVFIQPMDQNNQRLNDENNELAVKLALESGARLSLQTHKFLNIP

SEQ ID NO: 33675 - protein, 225 aa, Rickettsia canadensis
  misc_feature (1)..(225): tr|A8EY63|A8EY63_RICCK 7-carboxy-7-deazaguanine synthas e OS=Rickettsia canadensis (strain McKiel) OX=293613 GN =rpmI PE=3 SV=1
MFGQNPKRSILNGDGTKLEVKSIFKTIQGEGIFVGSPAIFVRLGGCNLACHFCDTEFEDFDLVDITEILNKVESLALNSKNEKSVNLVVITGGEPMRQPIALLCQKLLDRDFKVQIETNGTLYRSLPNEVSIICSPKAGQTGYSKIREDLLSQISAVKFIVAKNILEYSFIPEVGQTAYNIPVFVQPMDQNNPKLNDENNALAVKLALESGSKLSLQTHKFLGID

SEQ ID NO: 33676 - protein, 225 aa, Rickettsia conorii; identical to SEQ ID NO: 33664
  misc_feature (1)..(225): tr|Q92H39|Q92H39_RICCN 7-carboxy-7-deazaguanine synthas e OS=Rickettsia conorii (strain ATCC VR-613 / Malish 7) OX=272944 GN=queE PE=3 SV=1

SEQ ID NO: 33677 - protein, 225 aa, Rickettsia endosymbiont
  misc_feature (1)..(225): tr|A0A0F3RA26|A0A0F3RA26_9RICK 7-carboxy-7-deazaguanine synthase OS=Rickettsia endosymbiont of Ixodes pacificu s OX=1133329 GN=queE PE=3 SV=1
MFGQNPKRSILNGDGTKLEVQSIFKTIQGEGIFVGCPAIFIRLGGCNLACNFCDTEFEDFDLVDIDKILNKVEILALNSKNEKSINLVVITGGEPMRQPIELLCHKLLDLDFKVQIETNGTLYRSLPKGVSIICSPKAGKTGYSKIRENLLPKISAVKFIVAKNILEYSLIPEVGQTSYNIPVFIQPMDQNDQRLNDENNELAVKLALESGARLSLQTHKFLNIP

SEQ ID NO: 33678 - protein, 225 aa, Rickettsia endosymbiont; identical to SEQ ID NO: 33664
  misc_feature (1)..(225): tr|A0A162VGE4|A0A162VGE4_9RICK 7-carboxy-7-deazaguanine synthase OS=Rickettsia endosymbiont of Proechinophthir us fluctus OX=1462733 GN=queE PE=3 SV=1

SEQ ID NO: 33679 - protein, 225 aa, Rickettsia felis
  misc_feature (1)..(225): tr|A0A0F3MRL4|A0A0F3MRL4_RICFI 7-carboxy-7-deazaguanine synthase OS=Rickettsia felis str. Pedreira OX=1359196 GN=queE PE=3 SV=1
MFGQNPKRSILNGDGTKLEVQSIFKTIQGEGIFVGCPAIFIRLGGCNLACNFCDTEFEDFKLVDIAEILNKVESLALNSKNEKSINLVVITGGEPMRQPIELLCQKLLDQDFKIQIETNGTLYRSLPNEVSIICSPKAGKNGYSKIREDLLPKISAVKFIIAKNILEYSLIPEVGQTSYNIPVFVQPMDQNDQSLNDENNELAVKLALESGARLSLQTHKFLGIE

SEQ ID NO: 33680 - protein, 225 aa, Rickettsia felis; identical to SEQ ID NO: 33679
  misc_feature (1)..(225): tr|Q4UMK6|Q4UMK6_RICFE 7-carboxy-7-deazaguanine synthas e OS=Rickettsia felis (strain ATCC VR-1525 / URRWXCal2) OX=315456 GN=nrdG PE=3 SV=1

SEQ ID NO: 33681 - protein, 225 aa, Rickettsia heilongjiangensis; identical to SEQ ID NO: 33664
  misc_feature (1)..(225): tr|G0GYX4|G0GYX4_RICH0 7-carboxy-7-deazaguanine synthas e OS=Rickettsia heilongjiangensis (strain ATCC VR-1524 / 054) OX=1032845 GN=queE PE=3 SV=1

SEQ ID NO: 33682 - protein, 225 aa, Rickettsia japonica; identical to SEQ ID NO: 33664
  misc_feature (1)..(225): tr|G4KL14|G4KL14_RICJY 7-carboxy-7-deazaguanine synthas e OS=Rickettsia japonica (strain ATCC VR-1363 / YH) OX= 652620 GN=nrdG PE=3 SV=1

SEQ ID NO: 33683 - protein, 225 aa, Rickettsia japonica; identical to SEQ ID NO: 33664
  misc_feature (1)..(225): tr|A0A3B7DB67|A0A3B7DB67_RICJA 7-carboxy-7-deazaguanine synthase OS=Rickettsia japonica OX=35790 GN=queE PE=3 SV=1

SEQ ID NO: 33684 - protein, 225 aa, Rickettsia massiliae
  misc_feature (1)..(225): tr|H6QIJ3|H6QIJ3_RICMA 7-carboxy-7-deazaguanine synthas e OS=Rickettsia massiliae str. AZT80 OX=1105112 GN=queE PE=3 SV=1
MFGQNPKRSILNGDGTKLEVQSIFKTIQGEGIFVGCPAIFIRLGGCNLACNFCDTEFEDFDLVDIDQILNKVESLALNSKNEKSINLVVITGGEPMRQPIELLCQKLLDRDVKVQIETNGTLYRSLPQEVAIICSPKAGKTGYSKIREELLPKISAVKFIVAKNILEYSLIPEVGQTSYNIPVFIQPMDQNDQRLNGENNELAVKLALESGARLSLQTHKFLNIP

SEQ ID NO: 33685 - protein, 231 aa, Rickettsia massiliae
  misc_feature (1)..(231): tr|A8F289|A8F289_RICM5 7-carboxy-7-deazaguanine synthas e OS=Rickettsia massiliae (strain Mtu5) OX=416276 GN=nr dG PE=3 SV=1
MDNNLKMFGQNPKRSILNGDGTKLEVQSIFKTIQGEGIFVGCPAIFIRLGGCNLACNFCDTEFEDFDLVDIDQILNKVESLALNSKNEKSINLVVITGGEPMRQPIELLCQKLLDRDVKVQIETNGTLYRSLPQEVSIICSPKAGKTGYSKIREELLPKISAVKFIVAKNILEYSLIPEVGQTSYNIPVFIQPMDQNDQRLNGENNELAVKLALESGARLSLQTHKFLNIP

SEQ ID NO: 33686 - protein, 225 aa, Rickettsia monacensis; identical to SEQ ID NO: 33677
  misc_feature (1)..(225): tr|A0A0B7J1C3|A0A0B7J1C3_9RICK 7-carboxy-7-deazaguanine synthase OS=Rickettsia monacensis OX=109232 GN=queE PE =3 SV=1

SEQ ID NO: 33687 - protein, 225 aa, Rickettsia montanensis
  misc_feature (1)..(225): tr|H8KBP7|H8KBP7_RICMS 7-carboxy-7-deazaguanine synthas e OS=Rickettsia montanensis (strain OSU 85-930) OX=1105 114 GN=queE PE=3 SV=1
MFGQNPKRSILNGDGTKLEVQSIFKTIQGEGIFVGCPAIFIRLGGCNLACNFCDTEFEDFDLVDIDKILNKVESLALNSKNEKSINLVVITGGEPMRQPIELLCHKLLDRDVKVQIETNGTLYRSLPKEVSIICSPKAGKTGYSKIREDLLPKISAVKFIVAKNILEYSLIPEVGQTSYNIPVFIQPMDQNDQRLNGENKELAVKLALESGARLSLQTHKFLNIP

SEQ ID NO: 33688 - protein, 225 aa, Rickettsia parkeri; identical to SEQ ID NO: 33664
  misc_feature (1)..(225): tr|A0A0F3QMX6|A0A0F3QMX6_RICPA 7-carboxy-7-deazaguanine synthase OS=Rickettsia parkeri str. Grand Bay OX=13592 03 GN=queE PE=3 SV=1

SEQ ID NO: 33689 - protein, 225 aa, Rickettsia peacockii
  misc_feature (1)..(225): tr|C4K1L2|C4K1L2_RICPU 7-carboxy-7-deazaguanine synthas e OS=Rickettsia peacockii (strain Rustic) OX=562019 GN= queE PE=3 SV=1
MFGQNPKRSILNGDGTQLEVQSIFKTIQGEGIFVGCPAIFIRLGGCNLACNFCDTEFEAFDLVDIDKILNKVESLALNSKNEKSINLVVITGGEPMRQPIELLCQKLLDRDVKVQIETNGTLYRSLPKEVSIICSPKVGKTSYSKIREDLLPKISAVKFIVAKNILEYSLIPEVGQTSYNIPVFIQPMDQNNQRLNGENNELAVKLALESGTRLSLQTHKFLNIP

SEQ ID NO: 33690 - protein, 225 aa, Rickettsia philipii; identical to SEQ ID NO: 33664
  misc_feature (1)..(225): tr|H6PUL0|H6PUL0_RICP3 7-carboxy-7-deazaguanine synthas e OS=Rickettsia philipii (strain 364D) OX=481009 GN=que E PE=3 SV=1

SEQ ID NO: 33691 - protein, 234 aa, Rickettsia prowazekii
  misc_feature (1)..(234): sp|Q9ZCV2|QUEE_RICPR 7-carboxy-7-deazaguanine synthase OS=Rickettsia prowazekii (strain Madrid E) OX=272947 GN =queE PE=3 SV=1
MNQRINSYKMFGHNPKRSILSGDGTKLEVQSIFKTIQGEGIFVGYPSIFIRLGGCNLACNFCDTEFEDFKLIDIDQILNKVKNLSLNSKNAKTINLVVITGGEPMRQPIGLLCQKLLDQDFKVQIETNGTLYRSLPKEVFIVCSPKVGKTGYNKIREDLLPQISAVKFIISKNIVEYSIIPEVGQSAYDIPVFVQSMDQNDKRLNNENNELAVKLALESGARLSLQTHKFLGIE

SEQ ID NO: 33692 - protein, 225 aa, Rickettsia prowazekii
  misc_feature (1)..(225): tr|D5AXK7|D5AXK7_RICPP 7-carboxy-7-deazaguanine synthas e OS=Rickettsia prowazekii (strain Rp22) OX=449216 GN=n rdG PE=3 SV=1
MFGHNPKRSILSGDGTKLEVQSIFKTIQGEGIFVGYPSIFIRLGGCNLACNFCDTEFEDFKLIDIDQILNKVKNLSLNSKNAKTINLVVITGGEPMRQPIGLLCQKLLDQDFKVQIETNGTLYRSLPKEVFIVCSPKVGKTGYNKIREDLLPQISAVKFIISKNIVEYSIIPEVGQSAYDIPVFVQSMDQNDKRLNNENNELAVKLALESGARLSLQTHKFLGIE

SEQ ID NO: 33693 - protein, 225 aa, Rickettsia raoultii
  misc_feature (1)..(225): tr|A0A126E9Z0|A0A126E9Z0_9RICK 7-carboxy-7-deazaguanine synthase OS=Rickettsia raoultii OX=369822 GN=queE PE=3 SV=1
MFGQNPKRSILNGDGTKLEVQSIFKTIQGEGIFVGCPAIFIRLGGCNLACNFCDTEFEDFDLVDIDKILNKVESLALNSKNEKSINLVVITGGEPMRQPIELLCQKLLDRDVKVQIETNGTLYRSLPKEVSIICSPKAGKTGYSKIREDLLPKISAVKFIVAKNILEYSLIPEVGQTSYNIPVFIQPMDQNDQRLNGENNELAVKLALESGARLSLQTHKFLNIP

SEQ ID NO: 33694 - protein, 225 aa, Rickettsia rhipicephali
  misc_feature (1)..(225): tr|A0A0S2C9E6|A0A0S2C9E6_RICRH 7-carboxy-7-deazaguanine synthase OS=Rickettsia rhipicephali OX=33992 GN=queE P E=3 SV=1
MFGQNPKRSILNGDGTKLEVQSIFKTIQGEGIFVGCPAIFIRLGGCNLACNFCDTEFEDFDLVDIDQILNKVESLALNSKNEKSINLVVITGGEPMRQPIELLCQKLLDRDVKVQIETNGTLYRSLPQEVSIICSPKAGKTGYSKIREELLPKISAVKFIVAKNILEYSLIPEVGQTSYNIPVFIQPMDQNDQRLNGENNELAVKLALESGARLSLQTHKFLNIP

SEQ ID NO: 33695 - protein, 225 aa, Rickettsia rhipicephali; identical to SEQ ID NO: 33684
  misc_feature (1)..(225): tr|A0A0F3PE67|A0A0F3PE67_RICRH 7-carboxy-7-deazaguanine synthase OS=Rickettsia rhipicephali str. Ect OX=135919 9 GN=queE PE=3 SV=1

SEQ ID NO: 33696 - protein, 225 aa, Rickettsia rickettsii; identical to SEQ ID NO: 33664
  misc_feature (1)..(225): tr|A0A0H3AX85|A0A0H3AX85_RICRS 7-carboxy-7-deazaguanine synthase OS=Rickettsia rickettsii (strain Sheila Smith ) OX=392021 GN=queE PE=3 SV=1

SEQ ID NO: 33697 - protein, 225 aa, Rickettsia rickettsii; identical to SEQ ID NO: 33664
  misc_feature (1)..(225): tr|B0BUI8|B0BUI8_RICRO 7-carboxy-7-deazaguanine synthas e OS=Rickettsia rickettsii (strain Iowa) OX=452659 GN=q ueE PE=3 SV=1

SEQ ID NO: 33698 - protein, 225 aa, Rickettsia sibirica; identical to SEQ ID NO: 33664
  misc_feature (1)..(225): tr|Q7P969|Q7P969_RICS2 7-carboxy-7-deazaguanine synthas e OS=Rickettsia sibirica (strain ATCC VR-151 / 246) OX= 272951 GN=queE PE=3 SV=1

SEQ ID NO: 33699 - protein, 225 aa, Rickettsia slovaca; identical to SEQ ID NO: 33664
  misc_feature (1)..(225): tr|H8LQ45|H8LQ45_RICSL 7-carboxy-7-deazaguanine synthas e OS=Rickettsia slovaca str. D-CWPP OX=1105109 GN=queE PE=3 SV=1

SEQ ID NO: 33700 - protein, 225 aa, Rickettsia sp.
  misc_feature (1)..(225): tr|A0A1C3EV46|A0A1C3EV46_9RICK 7-carboxy-7-deazaguanine synthase OS=Rickettsia sp. wb OX=1851512 GN=queE PE=3 SV=1
MFGQNPKRGILKGDGTELQVHSIFKTIQGEGIFVGVPAIFIRLGGCNLACDFCDTEFEDFKIIKIDDILFKVNLLTLNSKNEQSVKLVVITGGEPMRQPIELLCQKLLKQDFKVQIETNGTLYRSLPDKVSIICSSKAGKNGYSKIREDLLPKISAVKFIIAKNILEYSLIPEIGQTAYNIPVFVQPMDQNDQKLNKENNELAVKLALESGARLSIQTHKFIGIE

SEQ ID NO: 33701 - protein, 225 aa, Rickettsia sp.; identical to SEQ ID NO: 33700
  misc_feature (1)..(225): tr|A0A249E499|A0A249E499_9RICK 7-carboxy-7-deazaguanine synthase OS=Rickettsia sp. MEAM1 (Bemisia tabaci) OX=1 182263 GN=queE PE=3 SV=1

SEQ ID NO: 33702 - protein, 231 aa, Rickettsia typhi
  misc_feature (1)..(231): tr|Q68WD2|Q68WD2_RICTY 7-carboxy-7-deazaguanine synthas e OS=Rickettsia typhi (strain ATCC VR-144 / Wilmington) OX=257363 GN=queE PE=3 SV=1
MNNIVIMFGYNPKRSVLSGDGTKLEVQSIFKTIQGEGIFVGYPSIFIRLGGCNLACNFCDTEFEDFELIDIDQIINKVQNLSLNSKNSKTINLVVITGGEPMRQPIGLLCQKLLDQDFKVQIETNGTLYRSLPKGVFIVCSPKVGKTGYNKIREDLLPQVCAVKFIISKNIIEYSIIPEVGQSAYNIPVFVQSMDQNDKKLNAENNELAVKLALESGARLSLQIHKFLGIE

SEQ ID NO: 33703 - protein, 210 aa, Rickettsiales bacterium
  misc_feature (1)..(210): tr|A0A2E0F8A8|A0A2E0F8A8_9RICK 7-carboxy-7-deazaguanine synthase OS=Rickettsiales bacterium OX=2026788 GN=queE PE=3 SV=1
MYKVKEIFRSIQGEGFHTGKAAVFIRFSGCNLWNGLSKFRKKAVCNFCDTDFVGVDGQNGGNYSLEQLIKKTLEIWRQGRSTKKKFIILTGGEPLLQVDEKLINELKKKNFYIAVETNGTIKTKLKFDWVAVSPKENASWNLKRGDELKVVYPQNKINLKKALDLKFKYFFLQPMANEFKQTNIIKTINYCKSHKPWFPSFQIHKSLGIS

SEQ ID NO: 33704 - protein, 210 aa, Rickettsiales bacterium
  misc_feature (1)..(210): tr|A0A1Z9MWS9|A0A1Z9MWS9_9RICK 7-carboxy-7-deazaguanine synthase OS=Rickettsiales bacterium TMED211 OX=1986869 GN=queE PE=3 SV=1
MFFIKEIFKSIQGEGFFSGKSAVFVRFTGCNLWNGLVKDRENALCQFCDTDFLGTNGQNGGYYSLNDLLNKIDKIWNQKKLTNNKFIVLTGGEPMLQVNKKLVESLKKRGYFVSVETNGTIQFDIDFDWVCVSPKQRTKWKVISGDELKVIFPQQAFDLNMLKKLNFKYFFLQPMDNNKKQINIWNTINYCKSHKPWFPSFQLHKSLNIS

SEQ ID NO: 33705 - protein, 219 aa, Rickettsiales endosymbiont
  misc_feature (1)..(219): tr|A0A4Q7DKS5|A0A4Q7DKS5_9RICK 7-carboxy-7-deazaguanine synthase OS=Rickettsiales endosymbiont of Peranema tri chophorum OX=2486577 GN=queE PE=3 SV=1
MAFGNNPKLPPDFGDGEFLKVVSIYYTIQGEGPYVGFPSVFVRLGGCNLACTFCDTEFDVYQEMHISKIVEKIQEYPHKPLIVITGGEPFRQTIGPLCTTLVSLGYHIQIESNGTLYREIPSNVEIVCSPKSLKGDVFYIAPGIYKHLTAYKFLISTSNQSYLHIPKVVHVDLLNKVYIQPIDELDQEKNAANLSLAIRLAMEHGYKLSLQIHKIINLP

SEQ ID NO: 33706 - protein, 222 aa, Rickettsiales endosymbiont
  misc_feature (1)..(222): tr|A0A3S8T120|A0A3S8T120_9RICK 7-carboxy-7-deazaguanine synthase OS=Rickettsiales endosymbiont of Stachyamoeba lipophora OX=2486578 GN=queE PE=3 SV=1
MFGNNPKRKPDLGSGESLDIQEILLTLQGEGPYQGQPAVFIRLGGCNLACHFCDTEFESFSNLNLNEITAKATQLSRNLETAKLIVITGGEPFRQNISLLCEQLIELGFLVQIETNGTLYQELPAGIKIICSPKNNSGKYHYIREDLLKRIDAFKFIIAQDQPNYNYVPEVGQTANNIPVYVQPMDEYDEAKNKQNTTYCLELALKHGYFFSIQLHKILDIA

SEQ ID NO: 33707 - protein, 210 aa, Riemerella anatipestifer
  misc_feature (1)..(210): tr|H8M9L8|H8M9L8_RIEAD 7-carboxy-7-deazaguanine synthas e OS=Riemerella anatipestifer (strain ATCC 11845 / DSM 15868 / JCM 9532 / NCTC 11014) OX=693978 GN=queE PE=3 S V=1
MMTNTEKELLKLGKLLPVMEHFYTIQGEGAYTGKAAYFIRLGGCDVGCHWCDVKESWDPNLHPLMDAEEVAQIAANHSKTIVLTGGEPLMWNLEILTKKLKDLGCTIHIETSGAYEISGHIDWVCLSPKKTGLPKESIYAKANELKVIIFNNHDFKFAEEQASKVSQNCKFYLQSEWSKRDEMYPKITDYILENPKWQASVQTHKYLNIP

SEQ ID NO: 33708 - protein, 210 aa, Riemerella anatipestifer; identical to SEQ ID NO: 33707
  misc_feature (1)..(210): tr|A0A1S7DQU7|A0A1S7DQU7_RIEAN 7-carboxy-7-deazaguanine synthase OS=Riemerella anatipestifer OX=34085 GN=queE PE=3 SV=1

SEQ ID NO: 33709 - protein, 210 aa, Riemerella columbipharyngis
  misc_feature (1)..(210): tr|A0A1G7ADY1|A0A1G7ADY1_9FLAO 7-carboxy-7-deazaguanine synthase OS=Riemerella columbipharyngis OX=1071918 GN= queE PE=3 SV=1
MDNHLQETLLKKGRLLPVMEHFYTLQGEGAHAGVAAYFIRLGGCDVGCHWCDVKESWNAELHPLMDMEALAKNAAEHCKTIILTGGEPLMWNLSILTKKLKSLGCRIHIETSGAYPLSGEIDWICLSPKKTAMPKKEIYAKADELKMIIYNNNDFKFAEKQAALVNKDCKLYLQSEWSKREEMYPKITEFILKNPRWRASVQTHKYLNIP

SEQ ID NO: 33710 - protein, 212 aa, Riemerella sp.
  misc_feature (1)..(212): tr|A0A496P5H7|A0A496P5H7_9FLAO 7-carboxy-7-deazaguanine synthase OS=Riemerella sp. OX=2382126 GN=queE PE=3 SV= 1
MSDFSSEQKILLNQGKMLPVMEHFYTIQGEGAHSGRAAYFIRLGGCDVGCHWCDVKESWDATLHPLMDAEEIAAIAAKHCKTIIITGGEPLMWDLNILTKKLKELGCTIHVETSGSHNLRGHIDWITLSPKKVKLPKEEIYQMADELKVVIFNNHDFKFAEEQAAKVSEKCKLYLQSEWSKREQNYPKITDYILQNPKWIASVQTHKYLNIP

SEQ ID NO: 33711 - protein, 210 aa, Rikenella microfusus
  misc_feature (1)..(210): tr|A0A379MRR7|A0A379MRR7_9BACT 7-carboxy-7-deazaguanine synthase OS=Rikenella microfusus OX=28139 GN=queE PE=3 SV=1
MTNEIYDLLDGGRLLPLVEDFYTIQGEGYHAGKPAYFIRLGGCDVGCRWCDAKFTWNAKLYPPTPIRDIVERAASLPAQAIVITGGEPTLYPLEPLTASLKDRGLEIFIETSGTNPLSGRIDWVCLSPKRQQPPLPEVLARADELKVIIETPDDIRWAEENASHVSGHCRLYLQPEWSRYREIVPVLVEYAKANPRWNISIQNHKFMHIP

SEQ ID NO: 33712 - protein, 206 aa, Rikenellaceae bacterium
  misc_feature (1)..(206): tr|A0A353R658|A0A353R658_9BACT 7-carboxy-7-deazaguanine synthase OS=Rikenellaceae bacterium OX=2049048 GN=queE PE=3 SV=1
MNSLLDEGNLLPLAEDFYTIQGEGYHTGKAAYFIRLGGCDVGCSWCDSKFTWNPKLYPPVPVTEIIARAVKCPTRSVVITGGEPLSYPLGILCKELKNNGMDIFLETSGSQPLSGEMDWICLSPKQNHPPLPEFYPLASELKVIITGPLDLEWAEFNRRKVGPQCHLYLQPEWSRREAVLPHIVSYIKANPSWKISLQTHKYIHIP

SEQ ID NO: 33713 - protein, 207 aa, Rikenellaceae bacterium
  misc_feature (1)..(207): tr|A0A3D4XFN4|A0A3D4XFN4_9BACT 7-carboxy-7-deazaguanine synthase OS=Rikenellaceae bacterium OX=2049048 GN=queE PE=3 SV=1
MKIPELDNGNLLPLAEAFYTIQGEGFNTGKAAYFIRLGGCDVGCNWCDAKETWNPGLYPPVEVDKIVADAIIHPAKSIVITGGEPLNYPLDILCRKLKNHGIEIFLETSGSSHISGNFDWICLSPKRKKPPVDEIYEMASELKIIVEDEVDFIWAEENRSRVKPDCLLYLQPEWSKSGEMMEKIVEYVKTNPCWNISLQTHKYMNIP

SEQ ID NO: 33714 - protein, 205 aa, Rippkaea orientalis
  misc_feature (1)..(205): tr|B7K251|B7K251_RIPO1 7-carboxy-7-deazaguanine synthas e OS=Rippkaea orientalis (strain PCC 8801) OX=41431 GN= queE PE=3 SV=1
MKAIALTTITYPIVETFHSIQGEGVWMGVNAFFIRLAGCDVHCPWCDQKESWPVQPYPQQSLEALGEAAKRANPAIVIITGGEPLMHNLDPLTAQLRGLGLRVHLETSGSHPFSGQFDWVTFSPKPFKLPHESIYPQVDELKVVITSQEDLQWAEHQAAQVPLKTIKYLQPEWNTPESQQLIFDYVLHHPDWRISLQVHKFLGVS

SEQ ID NO: 33715 - protein, 211 aa, Rivibacter subsaxonicus
  misc_feature (1)..(211): tr|A0A4Q7VGA9|A0A4Q7VGA9_9BURK 7-carboxy-7-deazaguanine synthase OS=Rivibacter subsaxonicus OX=457575 GN=queE PE=3 SV=1
MSYSVKEVFYTLQGEGHHAGRPAVFCRFAGCNLWSGREVDRATAVCRFCDTEFVGTDGSGGGKFTSGADLAAHVASFWPLAAHAGRFVVLTGGEPLLQVDPELIDALHEQGFEIAVETNGTIAAPAGLDWICVSPKAGAPLVQRSGDELKVVVPQVGIDLAELEGLAFAHRRVQPMDGPDRVATTAYAVQWCLDHPGWHLSVQTHKVIGIR

SEQ ID NO: 33716 - protein, 210 aa, Rivicola pingtungensis
  misc_feature (1)..(210): tr|A0A318KK54|A0A318KK54_9NEIS 7-carboxy-7-deazaguanine synthase OS=Rivicola pingtungensis OX=1054498 GN=queE PE=3 SV=1
MSYTVKEIFYSLQGEGHHSGRPAVFCRFSGCNLWSGREEDRARAQCTFCDTDFVGVGPDGGKFADAQALARRIAGHWPAQGGGTPYVVCTGGEPLLQLDALLIDALHAQGFEVAVETNGTLPAPRGLDWICVSPKGKARLAQTWGHELKLVYPQADCTPEQVAHLDFRHFYLQALDDPAHPEHQQAALDYCLAHPRWKLSLQTHKWLRIR

SEQ ID NO: 33717 - protein, 268 aa, Rivularia sp.
  misc_feature (1)..(268): tr|K9RCI7|K9RCI7_9CYAN 7-carboxy-7-deazaguanine synthas e OS=Rivularia sp. PCC 7116 OX=373994 GN=queE PE=3 SV=1
MHPMTTTTAVNENASLIEVFSAIQGEGLNVGTRQIFIRFAFCDLRCHFCDSAHTWNAPATCRIEQTPGSRDFEICSNPVSLSMLIEWVERQNIPCLHDSISLTGGEPLLHARFLSKFLPKIRLTTGLPIYLESGGHRPQQLAMILPYLDSVGMDLKLPSVSGESRWQEHENFLQICYEAQIEIFVKIIISQNTNPAELKRSAELVAAVNPAIPVFLQPVTPLGSTEQLTDFPLIVPTPKQVIDWQALMKNFLKSVRVVPQTHKMINQL

SEQ ID NO: 33718 - protein, 210 aa, Robbsia andropogonis
  misc_feature (1)..(210): tr|A0A0F5K3D0|A0A0F5K3D0_9BURK 7-carboxy-7-deazaguanine synthase OS=Robbsia andropogonis OX=28092 GN=queE PE=3 SV=1
MTYSVKEVFHTLQGEGANAGRPAVFCRFSGCNLWTGREADRAEAVCQFCDTDFVGTDGENGGKYRTPADLVAVVAGLWPEGEGQRFIVCTGGEPLLQLDAALIDALHQAGFTIAIETNGTIPVPDGIDWVCVSPKMGSTLVVTRGDELKVVVPQPNQVLAQYLALDFTYFLVQPMDGPSRDMNTRLAIDWCKRHPRWWLSMQTHKYLNIA

SEQ ID NO: 33719 - protein, 210 aa, Robbsia sp.
  misc_feature (1)..(210): tr|A0A494YA38|A0A494YA38_9BURK 7-carboxy-7-deazaguanine synthase OS=Robbsia sp. DHC34 OX=2419776 GN=queE PE=3 SV=1
MTYAVKEIFYTLQGEGANAGRPAVFCRFAGCNLWSGREQDRAEAVCQFCDTDFVGTDGENGGKYASAEALVARVASLWPEDEAYRFIVCTGGEPLLQIDATLIDALHAAGFTIAIETNGTLPVPDGIDWVCVSPKADAELVVTRGDELKVVVPQANQRLADYERLDFTYFMVQPMDNASRTLNTRLAIDWCKRHPRWRLSMQTHKYLNIP

SEQ ID NO: 33720 - protein, 210 aa, Robertkochia marina
  misc_feature (1)..(210): tr|A0A4V3UXY5|A0A4V3UXY5_9FLAO 7-carboxy-7-deazaguanine synthase OS=Robertkochia marina OX=1227945 GN=queE PE= 3 SV=1
MEKSEVLALVDKGEMLPLMEEFYTIQGEGYHKGTAAYFIRVGGCDVGCHWCDVKESWNAATHPPTHVDHIVDNAARYSDTIVITGGEPLTWDMNPLTQKLKAKGLKIHIETSGAYPLTGTWDWICLSPKKMKLPKEEVYQKAHELKVIIYNRHDFTFAEEQAAKVNENCILYLQPEWSKREKMIPEIVDYVMKHPKWKVSLQTHKYLNIP

SEQ ID NO: 33721 - protein, 210 aa, Robiginitalea biformata
  misc_feature (1)..(210): tr|A4CLZ4|A4CLZ4_ROBBH 7-carboxy-7-deazaguanine synthas e OS=Robiginitalea biformata (strain ATCC BAA-864 / HTC C2501 / KCTC 12146) OX=313596 GN=queE PE=3 SV=1
MEKAGVLAQVDKGLMLPLMEAFYTIQGEGFHKGTAAYFIRVGGCDVGCHWCDVKESWNADLHPPTAVDTIVRDAAAASDTIVVTGGEPLMWDMAPLTSRLKSRGMKIHIETSGAYPLTGTWDWICLSPKKNKAPVGDIHQRAHELKVIVYNRHDLKFAEEHAELTSPDCLLYLQPEWSVRERVTPLIVEYVMANPRWRVSLQTHKYLNIP

SEQ ID NO: 33722 - protein, 204 aa, Robiginitalea myxolifaciens
  misc_feature (1)..(204): tr|A0A1I6HGL3|A0A1I6HGL3_9FLAO 7-carboxy-7-deazaguanine synthase OS=Robiginitalea myxolifaciens OX=400055 GN=q ueE PE=3 SV=1
MDQVEAGTMLPLMEAFYTIQGEGFHKGTAAYFIRVGGCDVGCHWCDVKESWNATLHPPTGIDEIVTEARRYSNTIVITGGEPLTWDMGPLTSSLKQAGIAIHIETSGAYPLTGQWDWICLSPKKNMLPVGDIHKNAHELKVIVYNKHDLKFAEEQAAQVSPECMLYLQPEWSVREKVTPMIVDYVMENPRWRVSLQTHKYLNIP

SEQ ID NO: 33723 - protein, 209 aa, Robiginitomaculum sp.
  misc_feature (1)..(209): tr|A0A2G2FZI8|A0A2G2FZI8_9RHOB 7-carboxy-7-deazaguanine synthase OS=Robiginitomaculum sp. OX=2030823 GN=queE P E=3 SV=1
MTYSVKEMFLTLQGEGQQTGRPAVFLRFTGCNLWSGREQDRTKAVCQFCDTDFVGMDGTNGGQFQAADELARAAFALWPGGGEPLVVCTGGEPLLQLDPELIAALHVCGFAIAVETNGTLAAPDGIDWLCVSPKADAPLVQTCGDELKLVYPQTENQPGDFEHLEFTHFSLQPLENARVEENTKAAIAWCLSHPKWHLSLQTHKWTKIP

SEQ ID NO: 33724 - protein, 209 aa, Robiginitomaculum sp.
  misc_feature (1)..(209): tr|A0A2G2LX54|A0A2G2LX54_9RHOB 7-carboxy-7-deazaguanine synthase OS=Robiginitomaculum sp. OX=2030823 GN=queE P E=3 SV=1
MTYSVKEMFLTLQGEGAQAGRPAVFMRFTGCNLWSGREVDRHKAQCQFCDTDFIGMDGQNGAQFTTPTALARAAFALWPGGGKPYVVCTGGEPLLQLEAALIDALHKVGFEIAVETNGTLAAPTGIDWLCVSPKAGTELAQKSGNELKLVFPQKDQSPADFEHLDFDRFVLQPMDGPQIVEYTRSAVEYCLSHPHWGLSLQTHKWIGIS

SEQ ID NO: 33725 - protein, 223 aa, Robinsoniella sp.
  misc_feature (1)..(223): tr|A0A371AXK4|A0A371AXK4_9FIRM 7-carboxy-7-deazaguanine synthase OS=Robinsoniella sp. MCWD5 OX=1812858 GN=queE PE=3 SV=1
MEYYQIAERFVSINGEGIFAGQLAVFVRFKGCNLHCSYCDTLWANQKDCGTEELTREEIADYIKSTGIHHVTLTGGEPLLQNNIIQLIESLLEVSNVKIEIETNGSIDLLPIKQRFNERVTLTMDYKLPSSRMEQYMKIENLSSLQKEDVVKFVVSTIADLEHAKQVIYQNRLLEKTNVYISPVYGKIQLEDIVEWMKMNQLNKATLQMQLHKIIWGSEAKGV

SEQ ID NO: 33726 - protein, 209 aa, Rodentibacter genomosp.
  misc_feature (1)..(209): tr|A0A1V3J6S0|A0A1V3J6S0_9PAST 7-carboxy-7-deazaguanine synthase OS=Rodentibacter genomosp. 1 OX=1908264 GN=qu eE PE=3 SV=1
MEKLTNFDPHFNIVEIFESLQGEGFNTGMPSIFVRFGKCNLACPWCDTPYNQFERWSASQILAKVRSFSAKNIIITGGEPTIVPKIELLLDQFKADGYFLAIETNGLKAIPPQIDYIATSPKRLYMYKYEQRCIESADEVRVVADENVLPFCELIEQKIRAQHYYLSPCEIDGKMNLLETITQLGKLNQRTNKPKWQLSLQTHKLVGIE

SEQ ID NO: 33727 - protein, 209 aa, Rodentibacter genomosp.
  misc_feature (1)..(209): tr|A0A1V3JR87|A0A1V3JR87_9PAST 7-carboxy-7-deazaguanine synthase OS=Rodentibacter genomosp. 2 OX=1908266 GN=qu eE PE=3 SV=1
MKNQAVLEPHFNIVEIFESLQGEGFNTGMPSIFVRFGKCNLACPWCDTPYNQFERWSTSQILAKVRSFSAKNIIITGGEPTIVPKIELLLDQFKADGYFLAIETNGLKAIPSQIDYIATSPKRLYMHKYEQRCIESADEVRVVADENVLPFCELIEQKIRAQHYYLSPCDIDGKMNLLETITQLGKLNQRTNKPKWQLSLQTHKLVGIE

SEQ ID NO: 33728 - protein, 213 aa, Rodentibacter heidelbergensis
  misc_feature (1)..(213): tr|A0A1V3IBI3|A0A1V3IBI3_9PAST 7-carboxy-7-deazaguanine synthase OS=Rodentibacter heidelbergensis OX=1908258 G N=queE PE=3 SV=1
MKNQNILEPHFNIVEIFESLQGEGFNTGMPSIFVRFGKCNLTCPWCDTAYNQFERQSASQILAKVRSFSAKNIIITGGEPTIVPHIEYLLEQFKQEGYFLAIETNGLKPVPPQIDYIATSPKRLYAHKYEKQCLSIANEVRIVVDENILPFCELIEQKIQAEHYYLSPCEKEGKMNLLETITQLGQLNQRSHTHKWKPKWQLSLQTHKLVGIE

SEQ ID NO: 33729 - protein, 209 aa, Rodentibacter heylii
  misc_feature (1)..(209): tr|A0A1V3KPK9|A0A1V3KPK9_9PAST 7-carboxy-7-deazaguanine synthase OS=Rodentibacter heylii OX=1906744 GN=queE PE =3 SV=1
MKNQAVLEPHFNIVEIFESLQGEGFNTGMPSIFVRFGKCNLACPWCDTPYNQFERWSASQILAKVRSFSARNIIITGGEPTIVPKIELLLDQFKADGYFLAIETNGLKAIPPQIDYIATSPKRLYMHKYEQRCIESADEVRVVADENVLPFCELIEQKIRAQHYYLSPCDIDGKMNLLETITQLGKLNQRTNKPKWQLSLQTHKLVGIE

SEQ ID NO: 33730 - protein, 209 aa, Rodentibacter heylii
  misc_feature (1)..(209): tr|A0A1V3KBU7|A0A1V3KBU7_9PAST 7-carboxy-7-deazaguanine synthase OS=Rodentibacter heylii OX=1906744 GN=queE PE =3 SV=1
MSIKTIWEARYNIVEIFESLQGEGANTGMPCIFVRFGKCNLACPWCDTHYNRFESWTLGQILSKVRSFSAKNIIITGGEPTIVPHLAILLDELKKLGYFLAIETNGLKSIPPQIDYIATSPKRLYQHKYQIRCIPVADEVRIVADANVIEFCELIEARIEAKRYYLSPCEINGQMNLLETISQLGQLNQRLDKPKWQLSIQTHKLIGIE

SEQ ID NO: 33731 - protein, 211 aa, Rodentibacter mrazii
  misc_feature (1)..(211): tr|A0A1V3ICT5|A0A1V3ICT5_9PAST 7-carboxy-7-deazaguanine synthase OS=Rodentibacter mrazii OX=1908257 GN=queE PE =3 SV=1
MKNPAVSDSEPHFNIVEIFESLQGEGFNTGMPSIFVRFGKCNLACPWCDTSYNQFERQSASQILAKVRSFSAKNIIITGGEPTIVPKLEILLEQFKRLGYFLAIETNGLKPVPPQIDYIATSPKRLYTHKYEKQCIDFANEVRIVADENILSFCELIEQKIQAAHYYLSPCEIEGKMNLLETITQLGKLNQRTNKPKWQLSLQTHKLVGIE

SEQ ID NO: 33732 - protein, 209 aa, Rodentibacter myodis
  misc_feature (1)..(209): tr|A0A1V3JQZ7|A0A1V3JQZ7_9PAST 7-carboxy-7-deazaguanine synthase OS=Rodentibacter myodis OX=1907939 GN=queE PE =3 SV=1
MQNQYNLEPHFNIVEIFESLQGEGFNTGMPSIFVRFGKCNLACPWCDTPYNQFEPWSASQILAKVRSFSAKNIIITGGEPTIVPKIEFLLDQFKAEGYFLAIETNGLKPVPSQIDYIATSPKRLYAHKYTQRCIQFADEVRIVADENILSFCELIEQKIQAKHYYLSPCEIDGKMNLLETITQLGQLNQRPNKPKWQLSLQTHKLVGIE

SEQ ID NO: 33733 - protein, 209 aa, Rodentibacter pneumotropicus
  misc_feature (1)..(209): tr|A0A4S2QPG5|A0A4S2QPG5_9PAST 7-carboxy-7-deazaguanine synthase OS=Rodentibacter pneumotropicus OX=758 GN=que E PE=3 SV=1
MKNQAVLEPHFNIVEIFESLQGEGFNTGMPSIFVRFGKCNLACPWCDTAYNQFERQSASQILAKVRSFSAKNIIITGGEPTIVPHIEYLLEQFKQAGYFLAIETNGLKSVPPQIDYIATSPKRLYSHKYGKQCIAFADEVRIVVDENILPFCELIEQKIQAEHYYLSPCEVEGKMNLLETITQLGKINQRTNKPKWRLSLQTHKLVGIE

SEQ ID NO: 33734 - protein, 209 aa, Rodentibacter pneumotropicus
  misc_feature (1)..(209): tr|A0A4S2P6K7|A0A4S2P6K7_9PAST 7-carboxy-7-deazaguanine synthase OS=Rodentibacter pneumotropicus OX=758 GN=que E PE=3 SV=1
MKNQAVLEPHFNIVEIFESLQGEGFNTGMPSIFVRFGKCNLACPWCDTAYNQFERQSASQILAKVRSFSAKNIIITGGEPTIVPHIEYLLEQFKQAGYFLAIETNGLKSVPPQIDYIATSPKRLYSHKYGKQCVAFANEVRIVVDENILPFCELIEQKIQAEHYYLSPCEVEGKMNLLETITQLGKLNQRTNKPKWQLSLQTHKLVGIE

SEQ ID NO: 33735 - protein, 213 aa, Rodentibacter rarus
  misc_feature (1)..(213): tr|A0A1V3IJH1|A0A1V3IJH1_9PAST 7-carboxy-7-deazaguanine synthase OS=Rodentibacter rarus OX=1908260 GN=queE PE= 3 SV=1
MKNQNILEPHFNIVEIFESLQGEGFNTGMPSIFVRFGKCNLTCPWCDTAYNQFERQSASQILAKVRSFSAKNIIITGGEPTIVPHIEYLLEQFKRAGYFLAIETNGLKPVPPQIDYIATSPKRLYAHKYEKQCLSVANEVRIVVDENILPFCELIEQKIQAEHYYLSPCEREGKMNLLETITQLGQLNQRSHTHKWKPKWQLSLQTHKLVGIE

SEQ ID NO: 33736 - protein, 209 aa, Rodentibacter ratti
  misc_feature (1)..(209): tr|A0A1V3LCN9|A0A1V3LCN9_9PAST 7-carboxy-7-deazaguanine synthase OS=Rodentibacter ratti OX=1906745 GN=queE PE= 3 SV=1
MKNQRVLEPHFNIVEIFESLQGEGFNTGMPSIFVRFGKCNLTCPWCDTAYNQFERQSASQILAKVRSFSAKNIIITGGEPTIVPHIEYLLEQFKQAGYFLAIETNGLKPIPPQIDYIATSPKRLYAHKYEKQCIAFANEVRIVVDENILPFCELIEQKIQAEHYYLSPCEREGKMNLLDTITQLGKLNQRSNKPKWQLSLQTHKLAGIE

SEQ ID NO: 33737 - protein, 213 aa, Rodentibacter ratti
  misc_feature (1)..(213): tr|A0A1V3L800|A0A1V3L800_9PAST 7-carboxy-7-deazaguanine synthase OS=Rodentibacter ratti OX=1906745 GN=queE PE= 3 SV=1
MKNQRVLEPHFNIVEIFESLQGEGFNTGMPSIFVRFGKCNLTCPWCDTAYNQFERQSASQILAKVRSFSAKNIIITGGEPTIVPHIEYLLEQFKQAGYFLAIETNGLKPVPPQIDYIATSPKGLYAHKYEKQCIASANEVRIVVDENILPFCELIEQKIQAEHYYLSPCEREGKMNLLETITLLGQLNQRSHTHKWKPKWQLSLQTHKLVGIE

SEQ ID NO: 33738 - protein, 209 aa, Rodentibacter sp.
  misc_feature (1)..(209): tr|A0A1V3JYZ3|A0A1V3JYZ3_9PAST 7-carboxy-7-deazaguanine synthase OS=Rodentibacter sp. Ppn85 OX=1908525 GN=queE PE=3 SV=1
MKNQAVLEPHFNIVEIFESLQGEGFNTGMPSIFVRFGKCNLACPWCDTPYNQFERQSASQILAKVRSFSAKNIIITGGEPTIVPKIEFLLDQFKADDYFLAIETNGLKAIPPQIDYIATSPKRLYMYKYEQRCIESADEVRVVADENVLPFCELMEQKIRAQHYYLSPCDIDGKMNLLETITQLGKLNQRTNKPKWQLSLQTHKLVGIE

SEQ ID NO: 33739 - protein, 213 aa, Rodentibacter trehalosifermentans; identical to SEQ ID NO: 33735
  misc_feature (1)..(213): tr|A0A1V3IT93|A0A1V3IT93_9PAST 7-carboxy-7-deazaguanine synthase OS=Rodentibacter trehalosifermentans OX=19082 63 GN=queE PE=3 SV=1

SEQ ID NO: 33740 - protein, 209 aa, Rodentibacter trehalosifermentans
  misc_feature (1)..(209): tr|A0A1V3IPJ8|A0A1V3IPJ8_9PAST 7-carboxy-7-deazaguanine synthase OS=Rodentibacter trehalosifermentans OX=19082 63 GN=queE PE=3 SV=1
MKNQNILEPHFNIVEIFESLQGEGFNTGMPSIFVRFGKCNLTCPWCDTAYNQFERQSASQILAKVRSFSAKNIIITGGEPTIVPHIEYLLEQFKRAGYFLAIETNGLKPVPPQIDYIATSPKRLYAHKYEKQCLSVANEVRIVVDENILPFCELIEQKIQAEHYYLSPCEREGKMNLLETITQLGQLNQRPNKPKWQLSLQTHKLVGIE

SEQ ID NO: 33741 - protein, 211 aa, Roseateles aquatilis
  misc_feature (1)..(211): tr|A0A246IY63|A0A246IY63_9BURK 7-carboxy-7-deazaguanine synthase OS=Roseateles aquatilis OX=431061 GN=queE PE= 3 SV=1
MTYAVKEMFYTLQGEGAQAGRAAVFCRFAGCNLWTGREQDRAAAVCTFCDTEFVGTDGQGGGKFASADALAEAIAAKWPMDQPGKPYVVCTGGEPLLQLDGPLITALKALGFEIAVETNGTQPAPEGLDWICVSPKADAELVLTKGNELKLVYPQPLAMPERFAALDFDYFFLQPMDSVLQKQNTKAAVAYCMAHPRWRLSIQMHKVVGID

SEQ ID NO: 33742 - protein, 217 aa, Roseateles depolymerans
  misc_feature (1)..(217): tr|A0A2W5FA89|A0A2W5FA89_9BURK 7-carboxy-7-deazaguanine synthase OS=Roseateles depolymerans OX=76731 GN=queE P E=3 SV=1
MYSVKELFYTLQGEGAQAGRAAVFCRFAGCNLWSGREQDRASAVCTFCDTDFVGTDGEGGGKFATAEQLADVIASKWPRPASDEGQALPGRPYVVCTGGEPLLQLDEALINALHARGFEVAVETNGTQPAPPGLDWICVSPKADAPLVLTAGHELKLVYPQPLAQPERFARLNFQHFFLQPMDSVLQREHTRAAVDYCMKHPQWQLSVQMHKVVGIA

SEQ ID NO: 33743 - protein, 214 aa, Roseateles depolymerans
  misc_feature (1)..(214): tr|A0A0U3DV27|A0A0U3DV27_9BURK 7-carboxy-7-deazaguanine synthase OS=Roseateles depolymerans OX=76731 GN=queE P E=3 SV=1
MTYAVKEMFYTLQGEGAQAGRAAVFCRFAGCNLWSGREQDRADAVCTFCDTDFVGTDGQGGGKFATAEALADAVAAKWPQGPQGQAGRPYVVCTGGEPLLQLDTALIEALHARGFEVAVETNGTQPAPEGLDWICVSPKADAELVLTRGHELKLVYPQPLAQPERFAGLAFDHFFLQPMDSVLQKQHIKAAVAYCMDHPQWRLSIQMHKVVGID

SEQ ID NO: 33744 - protein, 217 aa, Roseateles sp.
  misc_feature (1)..(217): tr|A0A1H7KH85|A0A1H7KH85_9BURK 7-carboxy-7-deazaguanine synthase OS=Roseateles sp. YR242 OX=1855305 GN=queE PE =3 SV=1
MTYAVKEMFYTLQGEGAQAGRAAVFCRFAGCNLWTGREQDRTAAVCTFCDTDFVGTDGQGGGKFTTAEALADAILAKWPGSGAGHAGTAGKPYVVCTGGEPLLQLDVPLIEALHSRGFEIAVETNGTQPAPEGLDWICVSPKADAELVLTQGHELKLVYPQPLAPPERFAHLAFDNFFLQPMDSVLQKQNMKAAVAYCMDHPQWRLSIQMHKVVGID

SEQ ID NO: 33745 - protein, 222 aa, Roseburia sp.
  misc_feature (1)..(222): tr|A0A1Q6U1I4|A0A1Q6U1I4_9FIRM 7-carboxy-7-deazaguanine synthase OS=Roseburia sp. CAG:197_41_10 OX=1897018 GN= queE PE=3 SV=1
MCKLDVVEKFVSINGEGTKAGQLAVFIRFKGCNLACEYCDTQWANQADAPAQQMTAGEIVDYVISTGVKNVTLTGGEPLLRDGIEDVIAQLADHMLNVEIETNGSISLKKICDLQKENVTFTMDYKLSCSGMEKSMCLDNFRILGKNDTVKFVVGCHDDLIKTKKIIDDYRLNGKCNLYISPVFGRIKLEDIVDFMKQNVMNNVNMQIQLHKVIWDPDKKGV

SEQ ID NO: 33746 - protein, 222 aa, Roseburia sp.
  misc_feature (1)..(222): tr|R5TGX2|R5TGX2_9FIRM 7-carboxy-7-deazaguanine synthas e OS=Roseburia sp. CAG:50 OX=1262949 GN=queE PE=3 SV=1
MTNYKVVEIFSSINGEGTRAGQLAVFVRMQGCNLNCTYCDTKWANEADAKFHWTSTEEILELLRSMEIKNVTITGGEPLLQEKIGELLEAMAKEENLRVEIETNGSVPLQPFAEIPNGPSFTMDYKLPGSGMEKYMLPENFAVLRAQDTVKFVVKDYEDLCRARDVIREYDLTEKCHVYLSPVYGQIELENIVNFMKDNRLNDVNMQLQMHKIIWDSEMRGV

SEQ ID NO: 33747 - protein, 251 aa, Roseibacillus sp.
  misc_feature (1)..(251): tr|A0A2E6SDF2|A0A2E6SDF2_9BACT 7-carboxy-7-deazaguanine synthase OS=Roseibacillus sp. OX=2024856 GN=queE PE=3 SV=1
MKIAQLSTGHPEIFHTLQGEGISTGVPAVFVRASQCNLHCLWCDTDYTWNWTGTPWPHEKDSEAGYQKFNRQQSQLEMTPTDVAGAIREHDCRRLVVTGGEPLVQQKEFTDVLKILRGWDPEWTFELETNGTIRPHEALDDLVNQYNVSPKLTNSGNPTRLRLVEEALAFFAASSKAWFKFVVSAASDLAEITALQDQLDLAPDRIVLMPEGRDATTLRTRRQWLADRCIEKGYRYSDRLHIQLWGNERGR

SEQ ID NO: 33748 - protein, 231 aa, Roseibacillus sp.
  misc_feature (1)..(231): tr|A0A2E7AI04|A0A2E7AI04_9BACT 7-carboxy-7-deazaguanine synthase OS=Roseibacillus sp. OX=2024856 GN=queE PE=3 SV=1
MLISELFYSVQGEGLLAGVPSVFVRTSGCNLRCRWCDTPYASSEPEGEQQTVEEIVARVQEHPARHVVLTGGEPMLAKGIGGLAGALKEAGYHITIETAATIEPDGIACDLASLSPKLSDSTPEADQFGEGWSKRHEELRIQQEVLDAWAEGYHCQFKFVVSESGEMGEIEEILQGITPRPEPGKVLLMPEGTDSEVLQERSQMVAELCKQTGYRFCPRLHIDLYGDTKGT

SEQ ID NO: 33749 - protein, 242 aa, Roseibium hamelinense
  misc_feature (1)..(242): tr|A0A562SMG0|A0A562SMG0_9RHOB 7-carboxy-7-deazaguanine synthase OS=Roseibium hamelinense OX=150831 GN=queE PE =3 SV=1
MSESLIRVSEIFGPTIQGEGALIGQPTVFVRTGGCDYRCSWCDTLHAVDSSYRHDWHPMDAAGIFAEVERLSGGTPLTVSLSGGNPAIQPLGGLILLGREKGYRFGLETQGSLAKDWFADLDVLTLSPKPPSSGMEPDWDAFQDCIAAAGANTRLALKIVIFNEADYAFAKDAVARHPDLPVYLQPGNHTPAAPAEDDTTIDMDGIMERMRWLIGKVSADRWFDATVLPQLHTLIWGNLKGV

SEQ ID NO: 33750 - protein, 247 aa, Roseibium sp.
  misc_feature (1)..(247): tr|E2CGX7|E2CGX7_9RHOB 7-carboxy-7-deazaguanine synthas e OS=Roseibium sp. TrichSKD4 OX=744980 GN=queE PE=3 SV= 1
MADGHQSEKSIRISEIFGPTIQGEGALVGKPTVFVRTGGCDYRCSWCDTLHAVDAEYRHDWTPMSAAEIFTKVEELSGGIPLTVSLSGGNPAIQPLASLITLGKAKGYAFALETQGSVVKDWFAELDVLTLSPKPPSSGMKTDLAALDACVSAGGVATQIALKFAVMDEADYAFARQISTRHPALPVYLQPVNHTPPPPDTEDADIDMSGIMDRMRWLVERTMSDRWYSATLLPQLHVLIWGNLRGV

SEQ ID NO: 33751 - protein, 269 aa, Roseimaritima ulvae
  misc_feature (1)..(269): tr|A0A5B9QMN1|A0A5B9QMN1_9PLAN 7-carboxy-7-deazaguanine synthase OS=Roseimaritima ulvae OX=980254 GN=queE PE=3 SV=1
MNSPEKVLGFSHSSAASTRGNRSGASVLRVAECFDSIQGEGRLTGTPSHFIRLSGCNLRCWFCDTPYASWHPEGPGRSLDEIVRRAVESDCQHVVLTGGEPLMFKGVEELVARLRSAGLHLTIETAGTLAPDVSADLMSISPKLSSSTPTVARAAGLSHLQTVSGSTIARWEQMHEQRRWQPQAIEKLIAASVDYQIKFVLDSSADTTEVLQAVTDLALPADHVWIMPQAVSTAELAKQARWLQPWCETHGFRFCDRMQIHWYGNRRGT

SEQ ID NO: 33752 - protein, 231 aa, Roseimicrobium gellanilyticum
  misc_feature (1)..(231): tr|A0A366HGF3|A0A366HGF3_9BACT 7-carboxy-7-deazaguanine synthase OS=Roseimicrobium gellanilyticum OX=748857 GN =queE PE=3 SV=1
MRISEMFFSVQGEGRLAGVPSVFIRTSGCNLRCHWCDTPYASWNPEGEEMSVAEILAEVEKHPTRFVVVTGGEPMIAKGMPELLKALKDAGKHITIETAGTIAPEGVPCDLASLSPKLHHSTPSVAQAGQAWHDRHEKTRWQPEVVRAWCQAYEHQLKFVVGSEADCAEVEQMIAGAGVETPPENVLLMPEGKTVQGLHESALQVVEWCKQRGWRYCPRIHVDLYGNTRGT

SEQ ID NO: 33753 - protein, 235 aa, Roseinatronobacter monicus
  misc_feature (1)..(235): tr|A0A543KBE7|A0A543KBE7_9RHOB 7-carboxy-7-deazaguanine synthase OS=Roseinatronobacter monicus OX=393481 GN=qu eE PE=3 SV=1
MSLRIAEIFGPTIQGEGALIGEPTVFVRAGGCDYRCVWCDSLHAVDTAFRHQWQKMSAQAVWDDVRALSGGQPLTVSLSGGNPAIQDFAPLIALGKAKGYRFACETQGSIARPWFADLDTLVLSPKPPSGGEVMDWAAFELCVAAAGARPKTVLKIVIFDEVDYAWAKDAASRYPDLPLYLQPGNPDVDPDHAVDLAACTDRLLWLVDKVTQDRWFTARVLPQLHVLIWGNKRGV

SEQ ID NO: 33754 - protein, 235 aa, Roseinatronobacter thiooxidans
  misc_feature (1)..(235): tr|A0A2W7QL75|A0A2W7QL75_9RHOB 7-carboxy-7-deazaguanine synthase OS=Roseinatronobacter thiooxidans OX=121821 G N=queE PE=3 SV=1
MSLRISEIFGPTIQGEGVLIGAPTVFVRAGGCDYRCVWCDSMHAVDTAYRHQWQKMSAQAVWDEVRALSGGQPLTVSLSGGNPAIQDFGPLIALGKSDGYRFACETQGSVARQWFAELDTLVLSPKPPSSGEVVDWAAFESCLTMAQARPETVLKIVIFDETDYAWAREAAGRYPDLPLYLQPGNPDLDPQQSVDLAACTDRLLWLVEKVTADRWFAARVLPQLHVLLWGNKRGV

SEQ ID NO: 33755 - protein, 205 aa, Roseivirga echinicomitans
  misc_feature (1)..(205): tr|A0A150X0Y4|A0A150X0Y4_9BACT 7-carboxy-7-deazaguanine synthase OS=Roseivirga echinicomitans OX=296218 GN=que E PE=3 SV=1
MSKTKEIIQLPIMEAFYTIQGEGHFSGNSAYFIRLGGCDVGCVWCDVKDSWDASQWPKESVEEIVAKASAHPGRLAVVTGGEPLMYDMTDLTNQLHAAGFQTNIETSGAHPLSGNWDWLCFSPKKFKAPKEEFYAEADELKVIIYNKSDFKWAEGHAAKMNKDCLLYMQPEWDQSEKMLPEIIEYVKNNPKWKISLQTHKFMNIP

SEQ ID NO: 33756 - protein, 205 aa, Roseivirga ehrenbergii
  misc_feature (1)..(205): tr|A0A150XQQ6|A0A150XQQ6_9BACT 7-carboxy-7-deazaguanine synthase OS=Roseivirga ehrenbergii OX=279360 GN=queE P E=3 SV=1
MSKTMKTTQFPVMEAFYTIQGEGHFSGNSAYFIRLGGCDVGCVWCDVKDSWDASQWPKESVEEIVAKASVHPGRLAVVTGGEPLMYDMTDLTNQLHAAGFQTNIETSGAHPLSGNWDWLCFSPKKFKAPKEEFYAAADELKVIIYNKSDFKWAEAHAAKMSENSLLYMQPEWDQSEKMLPEIIEYVKNNPKWKISLQTHKFMNIP

SEQ ID NO: 33757 - protein, 205 aa, Roseivirga seohaensis
  misc_feature (1)..(205): tr|A0A0L8AGY2|A0A0L8AGY2_9BACT 7-carboxy-7-deazaguanine synthase OS=Roseivirga seohaensis subsp. aquiponti OX= 1566026 GN=queE PE=3 SV=1
MSKTMKTTQLPVMEAFYTIQGEGHFSGNSAYFIRLGGCDVGCVWCDVKDSWDASQWPKESVEEIVAKASAHPGRLAVVTGGEPLMYDMTELTNQLHAAGFQTNIETSGAHPLSGNWDWLCFSPKKFKAPKEEFYAAADELKVIIYNKSDFKWAEAHAAKMSENSLLYMQPEWDQSEKMLPEIIEYVKNNPKWKISLQTHKFMNIP

SEQ ID NO: 33758 - protein, 205 aa, Roseivirga seohaensis
  misc_feature (1)..(205): tr|A0A150Y393|A0A150Y393_9BACT 7-carboxy-7-deazaguanine synthase OS=Roseivirga seohaensis OX=1914963 GN=queE P E=3 SV=1
MSKTMKTTQLPVMEAFYTIQGEGHFSGNSAYFIRLGGCDVGCVWCDVKDSWDASQWPKESVEEIVANASVHPGRLAVVTGGEPLMYDMTDLTNQLHAAGFQTNIETSGAHPLSGNWDWLCFSPKKFKAPKEEFYAAADELKVIIFNKSDFKWAEAHAAKMNENSLLYMQPEWDQSEKMLPEIIEYVKNNPKWKISLQTHKFMNIP

SEQ ID NO: 33759 - protein, 193 aa, Roseivirga sp.
  misc_feature (1)..(193): tr|A0A316KFE9|A0A316KFE9_9BACT 7-carboxy-7-deazaguanine synthase OS=Roseivirga sp. XM-24bin3 OX=2133949 GN=que E PE=3 SV=1
MEAFYTIQGEGHFTGNSAYFVRLGGCDVGCVWCDVKDSWDAEKWPAQSIQEIVAGAKQYKSKLVVVTGGEPLMYNLDSLTESLRSEGFHTNIETSGAHPLSGTWDWLCFSPKKFMKPRQEFYETADELKVVIYNKSDFKWAEEHAAKIRPECLLYLQPEWDKSDKMLPEIIDYVKDNPRWKISLQTHKFMQIP

SEQ ID NO: 33760 - protein, 209 aa, Roseivirga spongicola
  misc_feature (1)..(209): tr|A0A150WY71|A0A150WY71_9BACT 7-carboxy-7-deazaguanine synthase OS=Roseivirga spongicola OX=333140 GN=queE PE =3 SV=1
MTENKQVAELNGKLPIMEAFYTIQGEGHFTGNSAYFVRLGGCDVGCVWCDVKDSWDAEKWPAQSIGEIVAGAKQYKSKLVVVTGGEPLMYNLDSLTESLRSEGFHANIETSGAHPLSGTWDWLCFSPKKFMKPRQEFYETADELKVVIYNKSDFKWAEEHAAKIRPECLLYLQPEWDKSEKMLPEIIEYVKDNPRWKISLQTHKFMQIP

SEQ ID NO: 33761 - protein, 223 aa, Rosenbergiella nectarea
  misc_feature (1)..(223): tr|A0A1H9ITE9|A0A1H9ITE9_9ENTR 7-carboxy-7-deazaguanine synthase OS=Rosenbergiella nectarea OX=988801 GN=queE PE=3 SV=1
MLYPINEMFQTLQGEGFYTGAPAIFIRLQGCPVGCSWCDTKHTWEKYADQQQPLADIVHKMAESEAWADASVEQLLAVIAEQGWTAKHIVITGGEPALYDLTLLTEQFEQEGFQCQIETSGTHPIRCSVATWVTVSPKVNMRGGYDVLNSALLRANEVKHPVGRQRDIDALDLLLSQVPPSTQRIIALQPISCKKAATELCIATCIARNWRFSMQTHKYLNIA

SEQ ID NO: 33762 - protein, 236 aa, Roseobacter sp.
  misc_feature (1)..(236): tr|A0A2E9YTM5|A0A2E9YTM5_9RHOB 7-carboxy-7-deazaguanine synthase OS=Roseobacter sp. OX=1907202 GN=queE PE=3 SV =1
MSTLRIAEIFGPTIQGEGALIGEPTVFVRTGGCDYRCAWCDSLHAVDTSYRRTWMPMTPDAVWDRIVQLSLGKPLTVSLSGGNPAIQDFSEVIAQGHANGYRFACETQGSVAKPWFADLDTLVLSPKPPSSGETVDWKVFDACVNAAGPATTTVMKIVIFDDLDYAWAQDTAKRYPDLPLYLQPGNPQVDPSVSIAPQDLSDRLLWLVEKVMADSWFAPRVLPQLHVMLWGNKRGV

SEQ ID NO: 33763 - protein, 235 aa, Roseobacter sp.
  misc_feature (1)..(235): tr|A4EQD3|A4EQD3_9RHOB 7-carboxy-7-deazaguanine synthas e OS=Roseobacter sp. SK209-2-6 OX=388739 GN=queE PE=3 S V=1
MTLRIAEIFGPTIQGEGALIGEPTVFVRAGGCDYRCSWCDSLHAVDSENRHDWAKMSADEVFDEVCRLSGGKPLTVSISGGNPAIQDFAPLIRLGHAAGYGFACETQGSIAKPWFGDLDTLVLSPKPPSSGEDTDWSSFDACLKAAEACEQVVMKIVIFDDADYAWAKEASARYPDLPLYLQPGNPEVDPELPVDLNQATDRLLWLIEKVTADQWYTPRVLPQLHVLVWGNKRGV

SEQ ID NO: 33764 - protein, 211 aa, Roseococcus sp.
  misc_feature (1)..(211): tr|A0A4R0YK71|A0A4R0YK71_9PROT 7-carboxy-7-deazaguanine synthase OS=Roseococcus sp. SYP-B2431 OX=2496640 GN=qu eE PE=3 SV=1
MSYAVKEIFYTLQGEGRQAGRPAVFCRFAGCNLWSGREEDRAASVCTFCDTDFVGLDGPGGGRFADAGALAAAIAGAWAGATHAERFVVLTGGEPLLQVDSPLVDALHAEGFVIAVETNGTIAPPQGLDWVCVSPKSGAPLAVTQGHELKLVFPQPSLEPRRFEAMDFTDFLLQPMDGPAQAENTAAAIAYCLAHPQWRLSLQTHKLLGIP

SEQ ID NO: 33765 - protein, 199 aa, Roseofilum reptotaenium
  misc_feature (1)..(199): tr|A0A1L9QPI8|A0A1L9QPI8_9CYAN 7-carboxy-7-deazaguanine synthase OS=Roseofilum reptotaenium AO1-A OX=1925591 G N=queE PE=3 SV=1
MKTYPIVETFHSIQGEGYWMGRNAFFIRLGGCDVGCWFCDTKESWPVDKHPQYSIEQLAEAVLAVNPSMIVITGGEPLMHNLDQLTQGLRSLCHLPLHLETSGAYPFSGTFDWVTFSPKQSKSPDRSMGTYADELKVVITGPEDLDWAKEQAQFVKPNAVKFLQPEWNSPETIDLAMQFVLHHPDWRISLQTHKFLGCP

SEQ ID NO: 33766 - protein, 210 aa, Roseomonas deserti
  misc_feature (1)..(210): tr|A0A1V2H4V5|A0A1V2H4V5_9PROT 7-carboxy-7-deazaguanine synthase OS=Roseomonas deserti OX=1817963 GN=queE PE=3 SV=1
MSYAVKEIFATLQGEGAQAGRPSVFCRFTGCNLWSGREQDRAKAVCQFCDTDFIGTDGEGGGRFADAEALAEAVLTAWPGGDAHRYVVFTGGEPLLQLDAALIAAMHERGFEIAVESNGTFVPPPGIDWLCVSPKAGAALTVAGGSELKLVFPQPALMPEAVQHLAFRHFYLQPMDGPDRLANTEAAVRYCLAHPQWRLSLQTHKLIGIP

SEQ ID NO: 33767 - protein, 210 aa, Roseomonas gilardii
  misc_feature (1)..(210): tr|A0A1L7ACS2|A0A1L7ACS2_9PROT 7-carboxy-7-deazaguanine synthase OS=Roseomonas gilardii OX=257708 GN=queE PE=3 SV=1
MSYAVKEIFATLQGEGAQAGRPSVFCRFAGCNLWNGREEDRAGAVCQFCDTDFVGMDGEGGGRFADAEALAAAIEAAWPGGPSHRYVVFTGGEPLLQLDAPLIAAVHARGFEIAVESNGTVEPPEGIDWLCVSPKAGAPLRVRRGSELKLVFPQPALMPDSLPPLEFRYFYLQPMDGPDRLAHTEAAVRYCLEHPQWRLSLQTHKLIGIP

SEQ ID NO: 33768 - protein, 210 aa, Roseomonas gilardii
  misc_feature (1)..(210): tr|A0A379NDV8|A0A379NDV8_9PROT 7-carboxy-7-deazaguanine synthase OS=Roseomonas gilardii subsp. rosea OX=243956 GN=queE PE=3 SV=1
MSYAVKEIFATLQGEGAQAGRPSVFCRFAGCNLWSGREEDRAGAVCRFCDTDFVGMDGEGGGRFPDAELLAAAIEAAWPGGASHRYVVFTGGEPLLQLDASLIAAVHARGFEIAVESNGTVEPPEGIDWLCISPKAGAPLKVRRGSELKLVFPQPSLMPDSLPPLEFRHFYLQPMDGPDRLAHTEAAVRYCLEHPQWRLSLQTHKLIGIP

SEQ ID NO: 33769 - protein, 210 aa, Roseomonas mucosa
  misc_feature (1)..(210): tr|A0A1S8D9H9|A0A1S8D9H9_9PROT 7-carboxy-7-deazaguanine synthase OS=Roseomonas mucosa OX=207340 GN=queE PE=3 S V=1
MSYAVKEIFATLQGEGAQAGRPSVFCRFAGCNLWSGREEDRAGAVCQFCDTDFIGMDGEGGGRFADAGALAAAIEAAWPGGASHRYVVFTGGEPLLQLDTHLIAAVHERGFEIAVESNGTVEPPEGIDWLCISPKAGAPLKVRCGSELKLVFPQPKLMPDSLPPLEFGHFYLQPMDGPDRLAHTEAAVRYCLEHPQWRLSLQTHKLIGIP

SEQ ID NO: 33770 - protein, 210 aa, Roseomonas mucosa
  misc_feature (1)..(210): tr|A0A4Y1MX06|A0A4Y1MX06_9PROT 7-carboxy-7-deazaguanine synthase OS=Roseomonas mucosa OX=207340 GN=queE PE=3 S V=1
MSYAVKEIFATLQGEGAQAGRPSVFCRFAGCNLWSGREEDRAGAVCQFCDTDFIGMDGEGGGRFADAGALAAAIEAAWPGGASHRYVVFTGGEPLLQLDTHLIAAVHERGFEIAVESNGTVEPPEGIDWLCISPKAGAPLKVRCGSELKLVFPQPMLMPDSLPPLEFGHFYLQPMDGPDRLAHTEAAVRYCLEHPQWRLSLQTHKLIGIP

SEQ ID NO: 33771 - protein, 210 aa, Roseomonas sp.
  misc_feature (1)..(210): tr|A0A2D2H537|A0A2D2H537_9PROT 7-carboxy-7-deazaguanine synthase OS=Roseomonas sp. FDAARGOS_362 OX=2018065 GN= queE PE=3 SV=1
MSYTVKEIFATLQGEGAQAGRPSVFCRFAGCNLWSGREEDRAGAVCQFCDTDFIGMDGEGGGRFADAGALAAAIEAAWPGGASHRYVVFTGGEPLLQLDTHLIAAVHERGFEIAVESNGTVEPPEGIDWLCISPKAGAPLKVRCGSELKLVFPQPKLMPDSLPPLEFGHFYLQPMDGPDRLAHTEAAVRYCLEHPQWRLSLQTHKLIGIP

SEQ ID NO: 33772 - protein, 210 aa, Roseomonas sp.; identical to SEQ ID NO: 33770
  misc_feature (1)..(210): tr|A0A1Q2YW90|A0A1Q2YW90_9PROT 7-carboxy-7-deazaguanine synthase OS=Roseomonas sp. TAS13 OX=1926319 GN=queE PE =3 SV=1

SEQ ID NO: 33773 - protein, 237 aa, Roseovarius aestuarii
  misc_feature (1)..(237): tr|A0A1X7BN86|A0A1X7BN86_9RHOB 7-carboxy-7-deazaguanine synthase OS=Roseovarius aestuarii OX=475083 GN=queE PE =3 SV=1
MTRLRISEIFGPTIQGEGSVIGVPTVFVRAGGCDYRCSWCDSLHAVDSRYRHEWQPMTAEEIMGKVTELSGGQPLTISLSGGNPAIQDFGPLIRLGKTQGYSFAMETQGSVARDWFCELAPLILSPKPPSSGETVDWDAFDACIAAAVETESVMKIVIFDEDDYTWAREVAAGYPSLPLYLQPGNHTPPGPDSDAIDLPGIMTRYEWLIERALADRWFTPRILPQLHVLVWGNKRGV

SEQ ID NO: 33774 - protein, 239 aa, Roseovarius albus
  misc_feature (1)..(239): tr|A0A1X6ZJZ3|A0A1X6ZJZ3_9RHOB 7-carboxy-7-deazaguanine synthase OS=Roseovarius albus OX=1247867 GN=queE PE=3 SV=1
MSEKIRVSEIFGPTIQGEGAVIGVPTVFVRTGGCDFRCSWCDSLHAVDQEYRHTWAPMTSQSVLEAVADLSEGEPLMITLSGGNPAIQPLGELINLGQAQGYTFGMETQGSVVKDWFAKLDMLVLSPKPPSSGMETDWKMLARCVVQGAAQTVLKIVVFDDVDFSYAQEVAKRFPDLPIYLQPGNHTPPPPEDDDAEVDIEGIDDRMRWLVDRVVEKKWYSARVLPQLHVMLWGNKRGV

SEQ ID NO: 33775 - protein, 211 aa, Roseovarius atlanticus
  misc_feature (1)..(211): tr|A0A0T5NRM8|A0A0T5NRM8_9RHOB 7-carboxy-7-deazaguanine synthase OS=Roseovarius atlanticus OX=1641875 GN=queE PE=3 SV=1
MTYSVKEVFYTLQGEGANTGRPAVFCRFSGCNLWSGLERDRSTAICQFCDTDFVGTDGIGGGKFRTAEELADHVASTWPVSREGKKLVVCTGGEPVLQLDQALVDTLHTRGFEVAIETNGTLPMPEGIDWVCVSPKAGTEIVVKKGNELKAVYPQPGLDLEFLRGLDFKHFFLQPLDGADQQQALAQVLNYCLEHPEWRLSLQTHKILEIA

SEQ ID NO: 33776 - protein, 244 aa, Roseovarius atlanticus
  misc_feature (1)..(244): tr|A0A0T5NTK1|A0A0T5NTK1_9RHOB 7-carboxy-7-deazaguanine synthase OS=Roseovarius atlanticus OX=1641875 GN=queE PE=3 SV=1
MAVSEKHLIRVSEIFGPTIQGEGALIGQPTVFVRTGGCDFRCSWCDSMHAVDNEYRDTWKPMTPEAIMEEVARLSGGKPILITLSGGNPAIQPMAELIRLGQEQGCYFAMETQGSVVRGWFEALDMLVLSPKPPSSGMLTDWGLVAECVEAGQGTQTILKLVVFDEADFAYAREAAAMFPQLPVYLQPGNHTPPPPDDDTAVVDREGLEARMRWLIDRVTEEKWYDARVLPQLHVTLWGNMRGV

SEQ ID NO: 33777 - protein, 240 aa, Roseovarius azorensis
  misc_feature (1)..(240): tr|A0A1H7WIU5|A0A1H7WIU5_9RHOB 7-carboxy-7-deazaguanine synthase OS=Roseovarius azorensis OX=1287727 GN=queE P E=3 SV=1
MNDSIRVAEIFGPTIQGEGALIGLPTVFVRTGGCDYRCSWCDSLHAVDAAYRDTWKPMAVTDVMAEIERLSGGRPVMVTLSGGNPAIQPLGPLIRLGREKGYRFALETQGSVARGWFADLDMLVLSPKPPSSGMEMDWAMLGQCAEAADGAQTVLKIVVFDEADYRFAREVAEFLPLLAVYLQPGNHTPPPPDDDSAGVDQAGIDARMRWLVERVTADGWFEARVLPQLHVMLWGNRRGV

SEQ ID NO: 33778 - protein, 242 aa, Roseovarius gaetbuli
  misc_feature (1)..(242): tr|A0A1X6YEP8|A0A1X6YEP8_9RHOB 7-carboxy-7-deazaguanine synthase OS=Roseovarius gaetbuli OX=1356575 GN=queE PE =3 SV=1
MSSDNIIRVSEIFGPTIQGEGALIGVPTVFVRTGGCDYRCSWCDSLHAVEPEYRDTWKPMTSEAVMAEIKALSGSAPLMVSLSGGNPAIQPLGALIEMGQGKGYRFALETQGSVVRRWFSDLDMLVLSPKPPSSGMVVDWDIFADCVAAAKGAQSVLKIVVFDEVDYQWARDVAGRYPDLAVYLQPGNHTPPPPDDDAAMVDQIGIDARMRWLVDRVIEDRWFTAKVLPQLHVMLWGNKRGV

SEQ ID NO: 33779 - protein, 242 aa, Roseovarius halotolerans
  misc_feature (1)..(242): tr|A0A1X6YDV2|A0A1X6YDV2_9RHOB 7-carboxy-7-deazaguanine synthase OS=Roseovarius halotolerans OX=505353 GN=queE PE=3 SV=1
MSDETPLRVSEIFGPTIQGEGALIGVPTVFVRLGGCDYRCSWCDSLHAVESAYRESWIPMSAEAVMDEVARLSGGRPLLVSLSGGNPAIQPLAGLIGLGHDKGYCFALETQGSVARDWFRDLDMLVLSPKPPSSGMEVDWTAFQACVDAGQGADMVMKIVIFDETDYQWAQGVAARYPHLPLFLQPGNHTPPPPDDDHALVDQAGVDERMRWLVDKVTQDGWFQARVLPQLHVMLWGNKRGV

SEQ ID NO: 33780 - protein, 242 aa, Roseovarius indicus
  misc_feature (1)..(242): tr|A0A1I2DDB4|A0A1I2DDB4_9RHOB 7-carboxy-7-deazaguanine synthase OS=Roseovarius indicus OX=540747 GN=queE PE=3 SV=1
MTTRDTIRVSEIFGPTIQGEGALIGQPTVFVRTGGCDYRCSWCDSLHAVDSEYRDTWKAMPPEDILAEIEKLTGGKPIMVTLSGGNPATQPLDRLIEQGKAKGYSFAMETQGSVVKPWFADLQMLVLSPKPPSSGMGTDWRVVANCVRTAKAAPTVLKIVVFDEADYAFAREASERFRELPIYLQPGNHTPPPPEDDSATVDQEGIDERMRWLVDKVVEDKWYGARVLPQLHVMLWGNKRGV

SEQ ID NO: 33781 - protein, 248 aa, Roseovarius indicus
  misc_feature (1)..(248): tr|A0A0T5P390|A0A0T5P390_9RHOB 7-carboxy-7-deazaguanine synthase OS=Roseovarius indicus OX=540747 GN=queE PE=3 SV=1
MGRVPPMTTRDTIRVSEIFGPTIQGEGALIGQPTVFVRTGGCDYRCSWCDSLHAVDSEYRDTWKAMPPEDILAEIEKLTGGKPIMVTLSGGNPATQPLDRLIEQGKAKGYSFAMETQGSVVKPWFADLQMLVLSPKPPSSGMGTDWRVVANCVRTAKAAPTVLKIVVFDEADYAFAREASERFRELPIYLQPGNHTPPPPEDDSATVDQEGIDERMRWLVDKVVEDKWYGARVLPQLHVMLWGNKRGV

SEQ ID NO: 33782 - protein, 242 aa, Roseovarius litoreus
  misc_feature (1)..(242): tr|A0A1M7F508|A0A1M7F508_9RHOB 7-carboxy-7-deazaguanine synthase OS=Roseovarius litoreus OX=1155722 GN=queE PE =3 SV=1
MTDAAPIRVSEIFGPTIQGEGALIGVSTVFVRTGGCDYRCSWCDSLHAVDSAFRETWAPMTPGAIMAEVEKLSGGRPLLVSLSGGNPATQPLGEVIRLGHARGYGFALETQGSVAKDWFSELDMLVLSPKPPSSGMEVDWTAFDACIAAGQGADMVMKIVIFDETDYDWARKVAGRYPQLPLFLQPGNHTPPPPGDDAARVDQDGLDARMRWLVDHVTRDGWFEARVLPQLHVALWGNKRGV

SEQ ID NO: 33783 - protein, 248 aa, Roseovarius lutimaris
  misc_feature (1)..(248): tr|A0A1I5FEF3|A0A1I5FEF3_9RHOB 7-carboxy-7-deazaguanine synthase OS=Roseovarius lutimaris OX=1005928 GN=queE P E=3 SV=1
MGGIPSVTTGDKIRVSEIFGPTIQGEGALIGVPTVFVRTGGCDYRCSWCDSLHAVDAEYRDTWKPMAPAAVMAEIEALSGGAPLMVSLSGGNPAIQPLGALIELGQGKGYRFALETQGSLARPWFGDLDMLVLSPKPPSSGMPVDWQIFNHCVAAAAEAKTVLKIVVFDEQDYQWAREVAGHYPDLAVYLQPGNHTPPPPDDDAAVVDQEGVDARMRWLVDRVIEDRWFTAKVLPQLHVMLWGNKRGV

SEQ ID NO: 33784 - protein, 242 aa, Roseovarius marisflavi
  misc_feature (1)..(242): tr|A0A1M6VPD7|A0A1M6VPD7_9RHOB 7-carboxy-7-deazaguanine synthase OS=Roseovarius marisflavi OX=1054996 GN=queE PE=3 SV=1
MSSDNTIRVSEIFGPTIQGEGALIGVPTVFVRTGGCDYRCSWCDSLHAVESEYRDTWKPMTPEAVMAEIEALSGGAPLMVSLSGGNPAIQPLGALIKLGQGKGYRFALETQGSVARRWFSDLDMLVLSPKPPSSGMVVDWDIFADCVAAAKGAPSVLKIVVFDEIDYQWACDVAGRYPDLAVYLQPGNHTPPPPDDDAAMVDQIGIDARMRWLVDRVIEDRWFTAKVLPQLHVMLWGNKRGV

SEQ ID NO: 33785 - protein, 240 aa, Roseovarius mucosus
  misc_feature (1)..(240): tr|A0A1V0RTV1|A0A1V0RTV1_9RHOB 7-carboxy-7-deazaguanine synthase OS=Roseovarius mucosus OX=215743 GN=queE PE=3 SV=1
MTEAIRVSEIFGPTIQGEGALIGQPTVFVRTGGCDYRCVWCDSLHAVESAYRETWVPMSADAVLAEVARLSGGRPIMVTLSGGNPAIQPLGALIDLGHARGYRFAMETQGSVARDWFAALDMLVLSPKPPSSGMEVDWALFDDCVAAAKGAASVLKIVVFDEADYEWARAVAGRYPQLPLYLQPGNHTPPPPEDDAATVDQAGIDARMRWLVERVTGDGWFDAKVLPQLHVMLWGNKRGV

SEQ ID NO: 33786 - protein, 240 aa, Roseovarius mucosus
  misc_feature (1)..(240): tr|A0A0A0HQ00|A0A0A0HQ00_9RHOB 7-carboxy-7-deazaguanine synthase OS=Roseovarius mucosus DSM 17069 OX=1288298 G N=queE PE=3 SV=1
MSEAIRVSEIFGPTIQGEGALIGQPTVFVRTGGCDYRCSWCDSLHAVESAYRETWVPMSPDAVLAEVARLSDGRPIMVTLSGGNPAIQPLGALIDQGHARGYRFAMETQGSVARDWFAALDMLVLSPKPPSSGMEVDWALFDDCVAAAKGAARVLKIVVFDEADYQWARDVAGRYPDLPLYLQPGNHTPPPPEDDTATVDQAGIDDRMRWLVERVTADGWFDAKVLPQLHVMLWGNKRGV

SEQ ID NO: 33787 - protein, 240 aa, Roseovarius nanhaiticus
  misc_feature (1)..(240): tr|A0A1N7FP98|A0A1N7FP98_9RHOB 7-carboxy-7-deazaguanine synthase OS=Roseovarius nanhaiticus OX=573024 GN=queE PE=3 SV=1
MSDVLRISEIFGPTIQGEGALIGVPTVFVRTGGCDFRCVWCDSLHAVNSEYRHTWAPMSAVDVMAEIRRLSGGVPLTVTLSGGNPAIQPMGDLIEMGRAEGYGFAIETQGSVARDWFAQLDMLVLSPKPPSSEMETDWAILQDCIDAAKDAPTVLKIVVFDEADYAYARDVAARHPDLPIYLQPGNHTPPPPEDDSATVDQDGIDARMRWLVDRVIADHWHAARVLPQLHVMLWGNKRGV

SEQ ID NO: 33788 - protein, 236 aa, Roseovarius nubinhibens
  misc_feature (1)..(236): tr|A3SN30|A3SN30_ROSNI 7-carboxy-7-deazaguanine synthas e OS=Roseovarius nubinhibens (strain ATCC BAA-591 / DSM 15170 / ISM) OX=89187 GN=queE PE=3 SV=1
MSSLRISEIFGPTIQGEGILIGEPTVFVRAGGCDYRCSWCDTPHAVDSEHRSSWTPMTTFDIWDEIQRLSDGQPLTVSLSGGNPAIQDFGPLIALGRAQGYRFACETQGSIARGWFNVLDTLVLSPKPPSSGERPDWEAFDACLRAGANAGRTILKIVIFDDEDYNWAKTVQARFPGLPLFLQPGNPEIDPAQPVDLPAMADRLRLLTERAMRDGWFSVRILPQLHVFIWGNQRGV

SEQ ID NO: 33789 - protein, 210 aa, Roseovarius nubinhibens
  misc_feature (1)..(210): tr|A0A348WIX9|A0A348WIX9_9RHOB 7-carboxy-7-deazaguanine synthase QueE (Fragment) OS=Roseovarius nubinhibens OX =314263 GN=queE PE=3 SV=1
FVRAGGCDYRCSWCDTPHAVDSEHRSSWTPMTTFDIWDEIQRLSDGQPLTVSLSGGNPAIQDFGPLIALGRAQGYRFACETQGSIARGWFNVLDTLVLSPKPPSSGERPDWEAFDACLRAGANAGRTILKIVIFDDEDYNWAKTVQARLPGLPLFLQPGNPEIDPAQPVDLPAMADRLRLLTERTMRDGWFSVRILPQLHVFIWGNQRGV

SEQ ID NO: 33790 - protein, 242 aa, Roseovarius pacificus
  misc_feature (1)..(242): tr|A0A1M7DFR8|A0A1M7DFR8_9RHOB 7-carboxy-7-deazaguanine synthase OS=Roseovarius pacificus OX=337701 GN=queE PE =3 SV=1
MSGEATIRVSEIFGPTIQGEGALIGVPTVFVRTGGCDYRCEWCDSLHAVEAEYRGTWTPMTAQEIMAEVVRLSGGKPLLVSLSGGNPAIQPLGEVIRQGHAQGYGFALETQGSVARDWFSDLDMLVLSPKPPSSGMQVDWPVFDACLQAGQGADMVMKIVIFDDTDYAWARDVAARYPQLPLFLQPGNHTPPPPDDDSATVDQDGVDERMRWLVDRVVQDRWYQARVLPQLHVMLWGNKRGV

SEQ ID NO: 33791 - protein, 248 aa, Roseovarius sp.
  misc_feature (1)..(248): tr|A0A365TZ91|A0A365TZ91_9RHOB 7-carboxy-7-deazaguanine synthase OS=Roseovarius sp. TE539 OX=2249812 GN=queE P E=3 SV=1
MGGISPVTSEGTIRVAEVFGPTIQGEGALIGVPTVFVRTGGCDFRCSWCDSLHAVDSSYRDTWAAMSASEVMTRIEALSGARPLMVSLSGGNPAIQPLGRLIGMGRARGYRFALETQGTVARDWFANLDMLVLSPKPPSSGMDTDWALLRGCVDAAQGAQTVLKIVVFDEADYAYARDVAARYPQLPVYLQPGNHTPPPPEDDAATVDQDGVDARMRWLVERVTGDRWFEARVLPQLHVMLWGNKRGV

SEQ ID NO: 33792 - protein, 240 aa, Roseovarius sp.
  misc_feature (1)..(240): tr|A3W8B2|A3W8B2_9RHOB 7-carboxy-7-deazaguanine synthas e OS=Roseovarius sp. 217 OX=314264 GN=queE PE=3 SV=1
MSDAIRVSEIFGPTIQGEGALIGQPTVFVRTGGCDYRCSWCDSLHAVESAYRETWVPMSAEAVMAEVVRLSGGRAIMVTLSGGNPAIQPLGALIDLGHAQGYRFAMETQGSVARDWFAALDMLVLSPKPPSSSMVVDWALFEECVAAAKGAASVLKIVVFDEVDYQWARQVAGRYPHLPLYLQPGNHTPPPPEDDAATVDQAGIDERMRWLVERVTGDGWFEAKVLPQLHVMLWGNKRGV

SEQ ID NO: 33793 - protein, 240 aa, Roseovarius tolerans
  misc_feature (1)..(240): tr|A0A0L6CUV7|A0A0L6CUV7_9RHOB 7-carboxy-7-deazaguanine synthase OS=Roseovarius tolerans OX=74031 GN=queE PE=3 SV=1
MSEAIRISEIFGPTIQGEGALIGEPTVFVRTGGCDYRCSWCDSLHAVNAEYRATWAPMPPAEVMAEVAHLSGDRPLMVTLSGGNPAIQPLGPLIEMGKAQGYRFAMETQGSVARDWFASLDMLVLSPKPPSSGMTVDWPVFEDCVTAAGTAPAVLKIVIFDEADYLWAQDVAARYPALPLYLQPGNHTPPPPEDDSAVVDQDGIDDRMRWLVDRVVADGWFAAKVLPQLHVMLWGNKRGV

SEQ ID NO: 33794 - protein, 246 aa, Roseovarius tolerans
  misc_feature (1)..(246): tr|A0A1H7XSK8|A0A1H7XSK8_9RHOB 7-carboxy-7-deazaguanine synthase OS=Roseovarius tolerans OX=74031 GN=queE PE=3 SV=1
MGGIPTVSEAIRISEIFGPTIQGEGALIGEPTVFVRTGGCDYRCSWCDSLHAVNAEYRTTWAPMPPAEVMAEVAHLSGDRPLMVTLSGGNPAIQPLGQLIEMGKAQGYRFAMETQGSVARDWFAALDMLVLSPKPPSSGMTVDWPVFEDCVTAAGTAPAVLKIVIFDETDYLWAQDVAARCPALPLYLQPGNHTPPPPEDDSAVVDQDGIDDRMRWLVERVVADGWFAAKVLPQLHVMLWGNKRGV

SEQ ID NO: 33795 - protein, 215 aa, Rothia sp.
  misc_feature (1)..(215): tr|A0A433E8I1|A0A433E8I1_9MICC 7-carboxy-7-deazaguanine synthase OS=Rothia sp. HSID18069 OX=2419515 GN=queE PE =3 SV=1
MQDTLRITEVFYSLQGETRTAGPPTVFVRLTGCPLRCQYCDSAYAFSCGTVRTLDDILEQVAGFKPRYVCVTGGEPLAQPNAIPLLKQLCDAGYEVSLETSGALDISAVDPRVSRVVDLKTPGSKEAHRNLYANMDLLTPNDQVKFVICSREDYDWATSKLIQYGLERRAGEVLFSPSHHDLNARDLADWVVADNLPVRLQVQLHKYLWNDEPGR

SEQ ID NO: 33796 - protein, 223 aa, Rouxiella badensis
  misc_feature (1)..(223): tr|A0A1X0WKL8|A0A1X0WKL8_9GAMM 7-carboxy-7-deazaguanine synthase OS=Rouxiella badensis OX=1646377 GN=queE PE=3 SV=1
MQYPINEMFETLQGEGYFTGVPAIFIRLQGCPVGCSWCDTKHTWEKFADREVDMQRILVKTEESDAWGNATAEQLHQVIKNQGWTANHVVITGGEPCIYDLQPLTELLESLGYSCQIETSGTHEVRCSAKTWVTVSPKVNMRGGYDILPQALQRADEIKHPVARQRDIDALEVLLATLTDQKARIIALQPISQKEEATKLCIATCIAKNWRLSMQTHKYLNIA

SEQ ID NO: 33797 - protein, 223 aa, Rouxiella silvae
  misc_feature (1)..(223): tr|A0A1X0W5F5|A0A1X0W5F5_9GAMM 7-carboxy-7-deazaguanine synthase OS=Rouxiella silvae OX=1646373 GN=queE PE=3 S V=1
MQYPINEMFETLQGEGYFTGVPAIFIRLQGCPVGCSWCDTKHTWEKFADREVDMQRILVKTQESDAWGNASAEKLHQVIQNQGWTAKHIVITGGEPCIYNLEPLTELLEQEGYSCQIETSGTHEVRCSAKTWVTVSPKVNMRGGYDILPQALQRADEIKHPVARQRDIDALEQLLATLSDDKARIIALQPISQKEEATKLCIATCIAKNWRLSMQTHKYLNIA

SEQ ID NO: 33798 - protein, 271 aa, Rubellimicrobium roseum
  misc_feature (1)..(271): tr|A0A5C4N9S8|A0A5C4N9S8_9RHOB 7-carboxy-7-deazaguanine synthase OS=Rubellimicrobium roseum OX=687525 GN=queE PE=3 SV=1
MVQGAPARDRSGSRQRNTQDLGGVPALIEAYAEKIRISEIFGPTIQGEGALIGLPTVFVRTGGCDYRCSWCDSLHAVDSRFRADWRAMTAEEIFQEVRRLSDDRPLMVSLSGGNPAIQPLGGLIRLGHSAGYRFALETQGTVCRDWFADLDVLVLSPKPPSSGMETDWEALKACQESAAEGPRTVLKFVVFDAEDYAYARDAAARFPDLPVYLQPGNHTPPDPDEEDGLIDMDGLTRRLHWLVDKVTTDRWFDAHVLPQLHVLLWGNKRGV

SEQ ID NO: 33799 - protein, 274 aa, Rubidibacter lacunae
  misc_feature (1)..(274): tr|U5D6D8|U5D6D8_9CHRO 7-carboxy-7-deazaguanine synthas e OS=Rubidibacter lacunae KORDI 51-2 OX=582515 GN=queE PE=3 SV=1
MTTTVPATEPTNTAAAVLTVDRANLVEVFSAIQGEGSNVGTRQIFIRFARCDLRCHFCDSARTWGTPATCRIEATPGARDFETHANPVTRSQLLAWVVRQHVPGLHDSISLTGGEPLLHASFLQTFLPEVRRLGLPIYLETGGHHPQQLSAVLPFLDAVGADLKLPSVSGEQRWQAHADFLKRCCDAGVEVFAKLIVSDRTDRADLERAAAIVAGTSPEIPVFLQPVTPLAEPLAVGAISPPTPAQVLAWQALLKQQLACVRVVPQTHKAIGQL

SEQ ID NO: 33800 - protein, 241 aa, Rubinisphaera brasiliensis; identical to SEQ ID NO: 32847
  misc_feature (1)..(241): tr|F0SMR4|F0SMR4_RUBBR 7-carboxy-7-deazaguanine synthas e OS=Rubinisphaera brasiliensis (strain ATCC 49424 / DS M 5305 / JCM 21570 / NBRC 103401 / IFAM 1448) OX=756272 GN=queE PE=3 SV=1

SEQ ID NO: 33801 - protein, 226 aa, Rubinisphaera sp.
  misc_feature (1)..(226): tr|A0A2E9VM28|A0A2E9VM28_9PLAN 7-carboxy-7-deazaguanine synthase OS=Rubinisphaera sp. OX=2024857 GN=queE PE=3 SV=1
MLISEIFASIQGEGQFTGTPSVFIRASGCNLRCHFCDTPYASWNPEGVEMSVAEVVKTASEWWHPHVVITGGEPMIFKQMPELTAALKRNDRFITIETAGTALMDVEADLMSISPKRSNSTPAAITGWKERHNERRHRPDVIRSLLESYECQFKFVIDQAEDIEDVLDYLSEFPEIDHEKVWLMPQAIEANVLNEKLHWLQPLAMEHGFHLSSRLQIQQFGNRRGT

SEQ ID NO: 33802 - protein, 234 aa, Rubricoccus marinus
  misc_feature (1)..(234): tr|A0A259U495|A0A259U495_9BACT 7-carboxy-7-deazaguanine synthase OS=Rubricoccus marinus OX=716817 GN=queE PE=3 SV=1
MAPSAASGEKTYRVRALWRTLQGEGFWAGRPAVFVRLVACNMWSGYEADRARDAERNGADCPLWCDTAFTKEGSVRLTASDLADAVVATGDGVTFCVLTGGEPLLQADAALIRALHARGVTVAVETNGTLSLAGAFGDEADWPDWIVCSPKLAAARLEIETCDELKLVVPDYRPEAYRPLAQRVRERSLAGPLLWLQPEDGPRFEAAARLAVDLALADPRWRVSVQGHKALGVD

SEQ ID NO: 33803 - protein, 270 aa, Rubripirellula obstinata
  misc_feature (1)..(270): tr|A0A5B1CG63|A0A5B1CG63_9PLAN 7-carboxy-7-deazaguanine synthase OS=Rubripirellula obstinata OX=406547 GN=queE PE=3 SV=1
MESSSQTEFSHAESDRTRGTSHDVVRGTIDDATRGTSHDVATLKISETFQSCQGEGKLTGTDSFFIRTSGCNLRCHFCDTPYASWNPTGDQLPIDQLVAMAVETGLQHVVLTGGEPMLPIQITSLCELLRDAGMHVTIETAGTIDRELVCDLASISPKLENSTPDSQQHPRWSELHQQRRMPIEVMRSVIDRSIDHQIKFVVTSLDDFAEINSVVRQLDVDADAVWIMPEGVTIEAMDAAASWLKPYCDDTGYRYCDRMQIRWFGNRRGT

SEQ ID NO: 33804 - protein, 255 aa, Rubritalea profundi
  misc_feature (1)..(255): tr|A0A2S7TYP2|A0A2S7TYP2_9BACT 7-carboxy-7-deazaguanine synthase OS=Rubritalea profundi OX=1658618 GN=queE PE= 3 SV=1
MNSATLKLAVLNGKPEIFHTLQGEGVSTGVPSIFVRSSLCNLHCAWCDTDYTWNWEGTPWTHENDQVAGYSKFKKSDYILECEVAEVAKLVQQFCCKNLILTGGEPLLQQAGWIALIQILLAADPDYRFEVETNGTQLPNPKMAEAIDQFNVSAKLSNSGNDAKLRDNPKAMQWFANSPKAWFKFVIQDPQDLSEMQQLEQKYSIPRERILLMPEGRDEETLRQRRLWLADLCRDHGYRFSDRLHIQLWGSKRGV

SEQ ID NO: 33805 - protein, 254 aa, Rubritalea squalenifaciens
  misc_feature (1)..(254): tr|A0A1M6LXQ7|A0A1M6LXQ7_9BACT 7-carboxy-7-deazaguanine synthase OS=Rubritalea squalenifaciens DSM 18772 OX=11 23071 GN=queE PE=3 SV=1
MSCTLKLAVLNGQPEIFHTLQGEGVSMGVPSIFIRSSLCNLHCTWCDTDYTWNWEGTPWTHENDALPGYKKFSKADYIQEVSIEEVANILSHYPCKNVILTGGEPLLQQAGWEDLITHLRNIDPDYRFEVETNGTQLPNSFLQEAIDQWNVSPKLSNSGNAENLRLNEASLAYFASSPKAWFKFVVQNEQDLEEIQEIEKRFSIPRSRILLMPEGRDEETLNQRRLWLADLCRDHGYRFSDRLHIQLWGSKRGV

SEQ ID NO: 33806 - protein, 233 aa, Rubrivirga marina
  misc_feature (1)..(233): tr|A0A271J508|A0A271J508_9BACT 7-carboxy-7-deazaguanine synthase OS=Rubrivirga marina OX=1196024 GN=queE PE=3 SV=1
MAASPAGGKRYAVKALWRTVQGEGTQAGRAAVFVRLAGCNLWSGLERDRQRDAARSGADCPLWCDTEFAPPGAVKLSAADLARAAAEAGGAVRFCVLTGGEPLLQADAALVRALRAEGFTVAVETNGTQRLADAFGGDPANRPDWVVCSPKLPEAELALEACDELKLVVPDYRPDAYGAFAERVRAHGGRRALWLQPEDGPRLAEATRLALDLVFEDPRWRVSVQTHKALGVD

SEQ ID NO: 33807 - protein, 233 aa, Rubrivirga sp.
  misc_feature (1)..(233): tr|A0A271JEB3|A0A271JEB3_9BACT 7-carboxy-7-deazaguanine synthase OS=Rubrivirga sp. SAORIC476 OX=1961794 GN=que E PE=3 SV=1
MAASPAGPKRYAVKALWRTVQGEGTQAGRAAVFVRLAGCNLWSGFEADRTRDAARSGADCPLWCDTEFTPPDAVKLSAADLARAAAEAGGAVRFCVLTGGEPLLQADAALLRALHAERFVVAVETNGTQRLADAFGEDPADHPDWVVCSPKLPEAQLPLEACDELKLVVPDYRPEAYASMATRVREHAGRRALWLQPEDGPRLTEATRLALDLVFQDPRWRVSVQTHKALGVD

SEQ ID NO: 33808 - protein, 220 aa, Rubrivivax sp.
  misc_feature (1)..(220): tr|A0A519ZJ61|A0A519ZJ61_9BURK 7-carboxy-7-deazaguanine synthase OS=Rubrivivax sp. OX=50259 GN=queE PE=3 SV=1
MSYSVKEIFYTLQGEGTHAGRPAVFCRFAGCNLWSGREQDRATAICRFCDTDFVGTDGLGGGKFADAAQLAARVASFWPAGPAGDQGQRFVVLTGGEPLLQVDAELIDALHAQGFEIAVETNGTIQAPPGLDWICVSPKAGSTLVQTSGHELKLVVPQLGFDEAALARFEAMDFVQRRVQPMDSASPEARLAATEWAVQWCLDHPRWLLSVQTHKTLGIR

SEQ ID NO: 33809 - protein, 217 aa, Rubrivivax sp.
  misc_feature (1)..(217): tr|A0A519I9K0|A0A519I9K0_9BURK 7-carboxy-7-deazaguanine synthase OS=Rubrivivax sp. OX=50259 GN=queE PE=3 SV=1
MYSVKELFYTLQGEGAQAGRAAVFCRFAGCNLWTGREQDRATAVCTFCDTDFIGTDGEGGGKFATADALADTIAKAWPRGTEGDASHDRGRPYVVCTGGEPLLQLDTPLIDALHARGFEIAVETNGTQPAPPGLDWICVSPKADAPLVLTSGHELKLVYPQPLAQPERFAALDFQHFFLQPMDSVLKREHTKAAVDYCMQHPQWRLSVQMHKVVGIA

SEQ ID NO: 33810 - protein, 134 aa, Ruegeria atlantica
  misc_feature (1)..(134): tr|A0A0P1EKS8|A0A0P1EKS8_9RHOB 7-carboxy-7-deazaguanine synthase OS=Ruegeria atlantica OX=81569 GN=queE_2 PE=4 SV=1
MDTQAVWSEIQRLSGGRPLTVSLSGGNPAIQDFGPLIQQGKAEGYAFACETQGSIAKPWFADLAMLVLSPKPPSSGEDMDWKAFDACLNVRPAQAVLKIVIFDDTDFNWARSVTDRYPDLPLYLQPGNRSGQPG

SEQ ID NO: 33811 - protein, 178 aa, Ruegeria atlantica
  misc_feature (1)..(178): tr|A0A0N7LQ25|A0A0N7LQ25_9RHOB 7-carboxy-7-deazaguanine synthase OS=Ruegeria atlantica OX=81569 GN=queE PE=4 S V=1
METQAVWSEVQRLSGGRPLTVSLSGGNPAIQDFGPLIWQGKAEGYAFVCETQGSIAKPWFSDLAMLVLSPNPPSSGENMDWTAFGACLNVRPAQTVLKIVIFDDMDFNWARSVADRYPDLPLYLQPGNPEADPASPVDLNNATSRMEWLIDKTLNAGWFAPRILPQLHVLIWGNKRGV

SEQ ID NO: 33812 - protein, 236 aa, Ruegeria denitrificans
  misc_feature (1)..(236): tr|A0A0P1IPW9|A0A0P1IPW9_9RHOB 7-carboxy-7-deazaguanine synthase OS=Ruegeria denitrificans OX=1715692 GN=queE PE=3 SV=1
MTRLRIAEIFGPTIQGEGALIGEPTVFVRTGGCDYRCSWCDSMHAVDTAFRHDWASMSTDAVWDRVHTLSGGRPLTVSLSGGNPAIQNFGPLIARGRAEGYRFACETQGSIAKPWFSNLDTLVLSPKPPTSGESVDWSAFAACIDAAQPGPKVVMKIVIFDEADYDWARSVADRYPTLPLYLQPGNAEVDPELPVDPKTLSDRLLWLVEKVTADGWFTPRVLPQLHVLLWGNKRGV

SEQ ID NO: 33813 - protein, 239 aa, Ruegeria intermedia
  misc_feature (1)..(239): tr|A0A1M5AW76|A0A1M5AW76_9RHOB 7-carboxy-7-deazaguanine synthase OS=Ruegeria intermedia OX=996115 GN=queE PE=3 SV=1
MKPLRIAEIFGPTIQGEGAVIGVATVFVRAGGCDYRCSWCDSLHAVDSAYRHEWTPMTPEQIWAQVEALSGGTPLTVSLSGGNPAIQDFGPLIALGRSKGYDFVMETQGSVAQDWFRDLSTLILSPKPPSSGETVDWARFEDCIARAEGTPTVMKIVVFDEDDYHWARATAARFPALPLYLQPGNHTPPPPDSEDAEIDMDGIMSRYEWLIDKTLGDCWFTPTILPQLHVLIWGNKRGV

SEQ ID NO: 33814 - protein, 235 aa, Ruegeria litorea
  misc_feature (1)..(235): tr|A0A1Y5TRX1|A0A1Y5TRX1_9RHOB 7-carboxy-7-deazaguanine synthase OS=Ruegeria litorea R37 OX=1200284 GN=queE PE =3 SV=1
MTLRIAEIFGPTIQGEGALIGEPTVFIRAGGCDYRCSWCDSMHAVDSAYRHAWTPLSDNAVWDQVRDLSGGRPLTVSISGGNPAIQDFSGVIALGKAEGYRFACETQGSIAKPWFAELDTLVLSPKPPSSGETVDWAAFENCLTAAKGCRNIVLKIVIFDDADYAWAQQVAKNHPDLPLYLQPGNPEVDPNQPVDLQVTTDRLLWLIEKVTGDGWFTPRVLPQLHVLVWGNKRGV

SEQ ID NO: 33815 - protein, 239 aa, Ruegeria marina
  misc_feature (1)..(239): tr|A0A1G7C094|A0A1G7C094_9RHOB 7-carboxy-7-deazaguanine synthase OS=Ruegeria marina OX=639004 GN=queE PE=3 SV= 1
MTTLRIAEIFGPTIQGEGAVIGAPTVFVRAGGCDYRCAWCDSLHAVDSAYRDTWAPMTTEEVWAEVERLSGGVPLTVSLSGGNPAIQDFGPLIEMGKEQGYRFALETQGSVARNWFRELSPLILSPKPPSSGETVDWERFGDCIAQARNAVTVIKIVVFDEADYLWAREVAARYPHLPIYLQPGNHTPPPPDEHDAAIDMDGIMARYEWLIGRALADRWFTPTILPQLHVLVWGNKRGV

SEQ ID NO: 33816 - protein, 245 aa, Ruegeria marisrubri
  misc_feature (1)..(245): tr|A0A0X3TR27|A0A0X3TR27_9RHOB 7-carboxy-7-deazaguanine synthase OS=Ruegeria marisrubri OX=1685379 GN=queE PE= 3 SV=1
MGGVSAVKPLRIAEIFGPTIQGEGAVIGVPTVFVRAGGCDYRCSWCDSLHAVDSAYRHDWTPMTPEQVWAQVETLSGGAPLTVSLSGGNPAIQDFGPLIALGRSKGYDFVMETQGSVAQDWFRELSTLILSPKPPSSGETVDWARFEDCVARAEGAPTVMKIVVFDDDDYHWARAAADRFPSLPLYLQPGNHTPPPPDAEDAAIDMDGIMSRYEWLIDKTLGDRWFTPTILPQLHVLIWGNRRGV

SEQ ID NO: 33817 - protein, 235 aa, Ruegeria mediterranea
  misc_feature (1)..(235): tr|A0A2R8C6M2|A0A2R8C6M2_9RHOB 7-carboxy-7-deazaguanine synthase OS=Ruegeria mediterranea M17 OX=1200281 GN=qu eE PE=3 SV=1
MTLRIAEIFGPTIQGEGALIGEPTVFIRAGGCDYRCCWCDSMHAVDSAYRHEWAPLSDRAVWDQVRDLSGGRPLTVSISGGNPAIQDFSGVIAMGKAEGYRLACETQGSIAKPWFADLDTLVLSPKPPSSGETPDWAAFESCLTAAKGCRSIVLKIVIFDDADYTWAQQVAANHPDLPLYLQPGNPEVDPSQPVDLQVTTDRLLWLIEKVTGDGWFTPRVLPQLHVLVWGNKRGV

SEQ ID NO: 33818 - protein, 239 aa, Ruegeria pomeroyi
  misc_feature (1)..(239): tr|Q5LM11|Q5LM11_RUEPO 7-carboxy-7-deazaguanine synthas e OS=Ruegeria pomeroyi (strain ATCC 700808 / DSM 15171 / DSS-3) OX=246200 GN=queE PE=3 SV=1
MTTLRIAEIFGPTIQGEGAVIGAPTVFVRAGGCDYRCSWCDSLHAVDSAYRDTWTAMTTEQVWAEVARLSGGVPLTVSLSGGNPAIQDFGPLIEMGKAQGYRFALETQGSVARGWFRELSPLILSPKPPSSGETVDWDRFADCIARARDAVTVIKIVVFDEADYLWAREVAARFPNLPIYLQPGNHTPPPPDAEDAAIDMDGIMARYEWLIGRALSDRWFTPTILPQLHVLVWGNKRGV

SEQ ID NO: 33819 - protein, 233 aa, Ruegeria sp.
  misc_feature (1)..(233): tr|A0A366XBH1|A0A366XBH1_9RHOB 7-carboxy-7-deazaguanine synthase OS=Ruegeria sp. A3M17 OX=2267229 GN=queE PE=3 SV=1
MTLKISEIFGPTVQGEGALIGQPTVFVRSGGCDFRCSWCDSLHAVDSAYRHDWAAMETQAVWSEVQRLSGGRPLTVSLSGGNPAIQDFGPLIQQGKAEGYAFACETQGSIAKPWFADLAMLVLSPKPPSSGEDMDWTAFDACLNVRPAQTVLKIVIFDDTDFNWARSVADRHPDLPLYVQPGNPETDPASPVDLTNATSRMDWLIDKTLNAGWFAPRILPQLHVLIWGNKHGV

SEQ ID NO: 33820 - protein, 235 aa, Ruegeria sp.; identical to SEQ ID NO: 32730
  misc_feature (1)..(235): tr|B7QQ99|B7QQ99_9RHOB 7-carboxy-7-deazaguanine synthas e OS=Ruegeria sp. R11 OX=439497 GN=queE PE=3 SV=1

SEQ ID NO: 33821 - protein, 217 aa, Rufibacter immobilis
  misc_feature (1)..(217): tr|A0A3M9MQX5|A0A3M9MQX5_9BACT 7-carboxy-7-deazaguanine synthase OS=Rufibacter immobilis OX=1348778 GN=queE PE =3 SV=1
METTLDIKIASIHTVPTDGTKLPLMEHFYTIQGEGYHTGKAAYFIRLGGCDIGCHWCDVKESWDANLHPLTDTDWIVQQAEQYPGKAVVVTGGEPLLYNLDYLTSELQKRGIQTFIETSGAYPLSGHWDWICLSPKKFKGPHASVLPHAGELKVIVFNKSDFAWAEEHAAQVGPNTRLYLQPEWSKAPQMMPLIVDYVKENPKWRISLQTHKFLNIP

SEQ ID NO: 33822 - protein, 193 aa, Rufibacter sp.
  misc_feature (1)..(193): tr|A0A3M9MC27|A0A3M9MC27_9BACT 7-carboxy-7-deazaguanine synthase OS=Rufibacter sp. R-22-1c-1 OX=2487040 GN=que E PE=3 SV=1
MEHFYTIQGEGYHTGKAAYFIRLGGCDIGCHWCDVKESWDANLHPLTDTDWIVQQAEQYPGKAVVVTGGEPLLYNLDYLTTELHKRGIQTFIETSGAYPLSGQWDWICLSPKKFKGPHPSVLPHAGELKVIVFNKSDFAWAEEHAAMVGPETRLYLQPEWSKADQMMPQIVEYVKSNPKWRISLQTHKFLNIP

SEQ ID NO: 33823 - protein, 214 aa, Rufibacter sp.
  misc_feature (1)..(214): tr|A0A127B6T8|A0A127B6T8_9BACT 7-carboxy-7-deazaguanine synthase OS=Rufibacter sp. DG15C OX=1379909 GN=queE PE =3 SV=1
MLEIKTASVHTVPKDGTKLPLMEHFYTIQGEGYHTGKAAYFIRLGGCDIGCHWCDVKESWDANLHPLTDTDWIVQQAIQYPGKAVVVTGGEPLLYNLDYLTNELQKRGVQTFIETSGAYPLSGTWDWICLSPKKFKGPHPNVLPHAGELKVIVFNKTDFAWAEEHAAYVGPETRLYLQPEWSKAEQIMPLIVEYVKENPKWQVSLQTHKFLNIP

SEQ ID NO: 33824 - protein, 217 aa, Rufibacter tibetensis
  misc_feature (1)..(217): tr|A0A0P0CVA9|A0A0P0CVA9_9BACT 7-carboxy-7-deazaguanine synthase OS=Rufibacter tibetensis OX=512763 GN=queE PE =3 SV=1
MEAIVDRKIASVYTVPKDGTKLPLMEHFYTIQGEGYHTGKAAYFIRLGGCDIGCHWCDVKESWDANLHPLTDTDWIVQQAEQYPGKAVVVTGGEPLLYNLDYLTSELQKRGIQTFIETSGAYPLSGTWDWICLSPKKFKGPHPTVQPQAGELKVIVFNKSDFAWAEEHAAQVGPETRLFLQPEWSKADQMMPLIVEYVKNNPKWRISLQTHKFLNIP

SEQ ID NO: 33825 - protein, 211 aa, Rugamonas rubra
  misc_feature (1)..(211): tr|A0A1I4R326|A0A1I4R326_9GAMM 7-carboxy-7-deazaguanine synthase OS=Rugamonas rubra OX=758825 GN=queE PE=3 SV= 1
MTYSIKESFYTLQGEGAHAGRPAVFCRFSGCNLWSGRESDRATAVCQFCDTDFVGTDGDGGGKFATPAALAARIDGLWPAAYPANKYVVFTGGEPLLQLDAALIAALHAAGFEIAIETNGTLPVPPGVDWVCVSPKMGATLVVRQGDEIKVVVPQAGQDLAAYEGLRFEHFFVQPMDGPLAAFNTTLAIETCKRNPTWKLSLQTHKLLQIP

SEQ ID NO: 33826 - protein, 227 aa, Rugosibacter aromaticivorans
  misc_feature (1)..(227): tr|A0A0C5J6T6|A0A0C5J6T6_9RHOO 7-carboxy-7-deazaguanine synthase OS=Rugosibacter aromaticivorans OX=1565605 GN =queE PE=3 SV=1
MSVATTQPTASSVRSDALRVTEIFHSIQGESSRVGLPTVFIRLTGCPLRCTWCDTEYAFHGGGTIPIDAILAQVAEFHCTTVCVTGGEPLAQKNCLPLLVALCEAGYSVSLETSGALDIGGIDPRVSRIMDIKAPGSGETTKNRWENLDLLTAHDELKLVLASREDYEWAITACHQHRLFERCPVLFSPVQGQLEAGQLAQWIIDDKLPVRFQLQLHKVLWGNTPGR

SEQ ID NO: 33827 - protein, 227 aa, Rugosibacter sp.
  misc_feature (1)..(227): tr|A0A522Y6Q7|A0A522Y6Q7_9RHOO 7-carboxy-7-deazaguanine synthase OS=Rugosibacter sp. OX=1914450 GN=queE PE=3 S V=1
MSVATTQPTASSVRSDTLRVTEIFHSIQGESSRVGLPTVFIRLTGCPLRCTWCDTEYAFHGGGTIPIDAILAQVAEFHCTTVCVTGGEPLAQKNCLPLLVALCEAGYSVSLETSGALDIGGIDPRVSRIMDIKAPGSGETTKNRWENLDLLTAHDELKLVLASREDYEWAITACHQHRLFERCPVLFSPVQGQLEAGQLAQWIIDDKLPVRFQLQLHKVLWGNTPGR

SEQ ID NO: 33828 - protein, 230 aa, Rugosibacter sp.
  misc_feature (1)..(230): tr|A0A522XNM0|A0A522XNM0_9RHOO 7-carboxy-7-deazaguanine synthase OS=Rugosibacter sp. OX=1914450 GN=queE PE=3 S V=1
MSAVTLAAIQPAAPSVRSDTLRITEIFHSIQGESSRVGLPTVFIRLTGCPLRCTWCDTEYAFHGGGAMSIDAILAQVAEFNCATICVTGGEPLAQKNCLPLLGALCDADYSVSLETSGALDISGIDPRVSRIMDVKAPGSGEVTKNRWENLDLLTPHDELKLVLASREDYEWAMAACHQRRLFARCPVLFSPVQGQLEAGQLAQWIIDDKLPVRFQLQLHKVLWGNTPGR

SEQ ID NO: 33829 - protein, 248 aa, Ruminiclostridium papyrosolvens
  misc_feature (1)..(248): tr|U4R382|U4R382_9FIRM 7-carboxy-7-deazaguanine synthas e OS=Ruminiclostridium papyrosolvens C7 OX=1330534 GN=q ueE PE=3 SV=1
MNLQQFEQSRMPIIEIFNSVSGEGVSAGSVMTFVRVAGCNLRCDYCDTKYSYNEFSNDIQELKPNEIVNILDNYNCKNVLCTGGEPLELNKVKRYLPLYLALKGFKVRIETNGSYPLYSKTELNDFVEDTNFLKLNYALDVKCPDSGMSNYNIYNENFKLLGSDDEIKFIVGSRRDLEFAFETIKEHRNILSQTGVTINFSPVFGKLDCIEIVNMLKEKNAYFEEYELTVRLSLQIHKFIWPLEARGV

SEQ ID NO: 33830 - protein, 249 aa, Ruminiclostridium papyrosolvens
  misc_feature (1)..(249): tr|F1TE88|F1TE88_9FIRM 7-carboxy-7-deazaguanine synthas e OS=Ruminiclostridium papyrosolvens DSM 2782 OX=588581 GN=queE PE=3 SV=1
MKLQDFEQRRIPIIEIFNSVSGEGISAGSVVTFVRAAGCNLRCNYCDTKYSYNELGNGIQVLKPDGIVNILESYNCKNVLCTGGEPLELNKAKRYLPLYLASKGFKVRIETNGSCPLYSKTELNDFAVDNISFLTLNYALDVKCPDSGMSNYNIYNENFELLGPEDEIKFIVGTRRDLKFAFETIKEYSNILSKTGVTINFLPVFGKLEAIEIVNMLKENNAYFEKYGLNVRLSLQIHKFIWPPEARGV

SEQ ID NO: 33831 - protein, 210 aa, Ruminiclostridium sp.; identical to SEQ ID NO: 30648
  misc_feature (1)..(210): tr|A0A3B8KMR1|A0A3B8KMR1_9FIRM 7-carboxy-7-deazaguanine synthase OS=Ruminiclostridium sp. OX=2053608 GN=queE P E=3 SV=1

SEQ ID NO: 33832 - protein, 223 aa, Ruminiclostridium sufflavum
  misc_feature (1)..(223): tr|A0A318XIR7|A0A318XIR7_9FIRM 7-carboxy-7-deazaguanine synthase OS=Ruminiclostridium sufflavum DSM 19573 OX=1 121337 GN=queE PE=3 SV=1
MKYRVAEKFISINGEGNAAGQLAVFIRFAGCNLNCSYCDTKWANNVTGVKYNEFSEEDIFYYIKETGVENVTLTGGEPLLQEGIIQLLSLLSADGTLRVEIETNGSIELNKFINIKPRRPVFTMDYKLGSSEMETAMKTGNFELLCRQDTVKFVAGSIGDLETAKELIAKYHLTHKCQVHFSPVFGKIDMQTIVEFIKKNKMNGVRLQPQIHKIIWHPDMRGV

SEQ ID NO: 33833 - protein, 224 aa, Ruminococcaceae bacterium
  misc_feature (1)..(224): tr|A0A354HIY2|A0A354HIY2_9FIRM 7-carboxy-7-deazaguanine synthase OS=Ruminococcaceae bacterium OX=1898205 GN=qu eE PE=3 SV=1
MGTFRLAEHFISINGEGCKAGELALFLRFTGCNLRCSWCDTMWANGKDAPYTAVTTKDLVKTAEEAFSAGVRNITLTGGEPLLQPDIAELITALAETGMRTEIETNGAVLLKPFAGAQRPVFTMDYKLPSSGMERFMLTENFDLLNEQDSVKFVIGSGEDLERASQIIDEYRLAEKHCTLFFSPVFGKIEPAEMVEFMKERGLGSVRLQLQLHKFIWDPEKRGV

SEQ ID NO: 33834 - protein, 219 aa, Ruminococcaceae bacterium
  misc_feature (1)..(219): tr|A0A1G4W4B2|A0A1G4W4B2_9FIRM 7-carboxy-7-deazaguanine synthase OS=Ruminococcaceae bacterium P7 OX=1200751 GN =queE PE=3 SV=1
MYQVVEQFVSINGEGVCAGELAAFIRFKGCNLNCSYCDTKWANQTNAPYTEKTADELLAWAGGTGVCNITLTGGEPLLQTNIGELISLLIQNGFRVEIETNGSVFIGDLAESEHRPVFTMDYKLPESGMEQAMDCGNFGYLNGDDTVKFVAGSQNDLTRALEVTEKYQLRERCHVYFSPVFGKIDPAEMVAFMKENQLNGVRLQLQLHKFIWDPEKRGV

SEQ ID NO: 33835 - protein, 222 aa, Ruminococcus albus
  misc_feature (1)..(222): tr|E9S9P1|E9S9P1_RUMAL 7-carboxy-7-deazaguanine synthas e OS=Ruminococcus albus 8 OX=246199 GN=queE PE=3 SV=1
MEQLFSLAEHFISINGEGQRAGELALFLRFTGCDLRCVWCDTLWAVPKDAPHKDKDLRSLLDIARDAVSHGVRNVTLTGGEPLMQKGIVRLFEALLDMGLRVEIETNGSVALAPFIRDKRPDFNMDYKLPDSGMESRMIIDNISLLQANDTLKFVCASHRDLLRAYEVIQQTKPKCKVYFSPVFGKIEPADMVEFIKEKGLGEVRLQLQLHKFIWDPQKRGV

SEQ ID NO: 33836 - protein, 224 aa, Ruminococcus albus
  misc_feature (1)..(224): tr|A0A1I1NHV6|A0A1I1NHV6_RUMAL 7-carboxy-7-deazaguanine synthase OS=Ruminococcus albus OX=1264 GN=queE PE=3 SV =1
MGTFKLVESFVSINGEGRFAGELALFMRFAGCNLQCDWCDTKWANSADVAYTEKTVSQLADIAKSAAEEYGLHRVTLTGGEPLLQKDIAELINALNDIGIDVEIETNGSVPIVPVAEKSGVRPEFTMDYKLPSSGMESRMCLENLPQLKDSDTLKFVCASREDLERAAEVLEEYKPVCKVYLSPVFGRIEPKDMVEFMKEKKLGRVNLQLQLHKFIWDPNERGV

SEQ ID NO: 33837 - protein, 226 aa, Ruminococcus callidus
  misc_feature (1)..(226): tr|U2JR98|U2JR98_9FIRM 7-carboxy-7-deazaguanine synthas e OS=Ruminococcus callidus ATCC 27760 OX=411473 GN=queE PE=3 SV=1
MRCENMNRLAVVEKFVSINGEGTHAGELAVFLRFRGCNLNCGFCDTKWANAADAPATEESAEELVEYVRQTGVQNVTLTGGEPLLQPHIGELITALGALGYRVEIETNGSVALEPFAALAFRPCFTMDYKLPDSGMESAMKPENFDLLRSQDAVKFVVGSRSDLNRALEVIRQYALTAKCTVFFSPVFGAIEPVEIVEFLEEHKLNRVRLQLQLHKLIWDPQKRGV

SEQ ID NO: 33838 - protein, 219 aa, Ruminococcus flavefaciens
  misc_feature (1)..(219): tr|A0A1H6KTH4|A0A1H6KTH4_RUMFL 7-carboxy-7-deazaguanine synthase OS=Ruminococcus flavefaciens OX=1265 GN=queE PE=3 SV=1
MLPVVEKFISINGEGAHAGELAAFIRFRGCNLCCSYCDTVWANCESAPADYETPEEIAEWVAEKGVENVTLTGGEPLMQKECDAVAELLMKQGCRVEIETNGSIYLGRLADAEYRPVFTMDYKLPSSGMEEFMCRDNFRLLGEHDTVKFVSGSKEDLERAAEIIEEYGLVGRCHVYISPVFGEIDPADIVTFMEERKMNGVRLQLQLHKFIWEPSRRGV

SEQ ID NO: 33839 - protein, 219 aa, Ruminococcus flavefaciens
  misc_feature (1)..(219): tr|A0A1H7LRH2|A0A1H7LRH2_RUMFL 7-carboxy-7-deazaguanine synthase OS=Ruminococcus flavefaciens OX=1265 GN=queE PE=3 SV=1
MLPVVEKFISINGEGAHAGELAAFIRFRGCNLCCSYCDTCWANTENAPAEFESADELARWVAETGVHNVTLTGGEPLLHKEAGELAELLIEKGCRVEIETNGSISLERLAAAKSRPVFTMDYKLPSSGMEEFMCKNNFRLLGCHDTVKFVSGSTDDLERAAELIKEYRLTERCHVFISPVFGEIDPADIVSFMEEHMMNGVRLQLQLHKFIWEPTRRGV

SEQ ID NO: 33840 - protein, 224 aa, Ruminococcus gnavus
  misc_feature (1)..(224): tr|A0A415S9L1|A0A415S9L1_RUMGN 7-carboxy-7-deazaguanine synthase OS=Ruminococcus gnavus OX=33038 GN=queE PE=3 SV=1
MKDDVRFEITEIFQTIQGEGILQGVPSIFIRFAECNLRCRWCDTTKEGIKKELLSWEEIDKQISQYTANHIVITGGEPMLYEDIKYLIGMLKNKGYHITVETNGTIYRKTSCDLVSISPKLKHSGNDSMNLKTIYPDVINQYINNNGYQLKFVVRDFEEDFNEVKEILKELPQVNYDKVLIMALSSSKADLERVQKQVIRLCIQNNLRYTTRLQLHVWDGENEI

SEQ ID NO: 33841 - protein, 221 aa, Ruminococcus lactaris
  misc_feature (1)..(221): tr|B5CRQ8|B5CRQ8_9FIRM 7-carboxy-7-deazaguanine synthas e OS=Ruminococcus lactaris ATCC 29176 OX=471875 GN=queE PE=3 SV=1
MKVVEKFISINGEGRRAGELAVFIRFKGCNLNCSYCDTKWANEPACDYEELSPDDICEYVSETGIKNVTLTGGEPLLQKDIRSLVEKLLNKSDIRVEIETNGAVDIAPLANAFSKEKLSLTMDYKLPSSGCEEKMILSNMEVLRKQDTVKFVSGSVKDLECAEKIIGKFHLTERCQVFISPVFGSIEPVEIVNFMTSKRMNDVRLQIQMHKVIWNPEERGV

SEQ ID NO: 33842 - protein, 221 aa, Ruminococcus lactaris; identical to SEQ ID NO: 33841
  misc_feature (1)..(221): tr|A0A3E4LHH0|A0A3E4LHH0_9FIRM 7-carboxy-7-deazaguanine synthase OS=Ruminococcus lactaris OX=46228 GN=queE PE= 3 SV=1

SEQ ID NO: 33843 - protein, 216 aa, Ruminococcus sp.
  misc_feature (1)..(216): tr|A0A373SQ83|A0A373SQ83_9FIRM 7-carboxy-7-deazaguanine synthase OS=Ruminococcus sp. AF25-17 OX=2293164 GN=que E PE=3 SV=1
MKVVEKFTSINGEGTRAGELAVFIRFKGCNLRCSYCDTMWANEPDCPYEEETPEEILNYVLGTGIRNVTLTGGEPLLQKDIRELIHLLLQAGLQVEIETNGAVDLSAFCEERPVFTMDYKLPSSGCEEYMITENMGLLGKDDTVKFVCGSKKDLLKALDVIQTYNLTNRCHVYLSPVFGSIEPVQIVEFMLKHRLNGVRLQIQMHKVIWDPNERGV

SEQ ID NO: 33844 - protein, 216 aa, Ruminococcus sp.
  misc_feature (1)..(216): tr|A0A373PZ11|A0A373PZ11_9FIRM 7-carboxy-7-deazaguanine synthase OS=Ruminococcus sp. AM57-5 OX=2293227 GN=queE PE=3 SV=1
MKVVEKFTSINGEGTRAGELAVFIRFKGCNLRCSYCDTMWANEPDCQYKEETPEEILNYVLETGIRNVTLTGGEPLLQKDIRELIHLLLQAGLQVEIETNGAVDLSAFCEERPVFTMDYKLPSSGCEEYMITENMELLGKDDTVKFVCGSQEDLLKALDVIQTYNLTNRCHVYLSPVFGSIEPVQIVEFMLKHQLNGVCLQIQMHKVIWDPNERGV

SEQ ID NO: 33845 - protein, 216 aa, [Ruminococcus] torques
  misc_feature (1)..(216): tr|A0A564UHH8|A0A564UHH8_9FIRM 7-carboxy-7-deazaguanine synthase OS=[Ruminococcus] torques OX=33039 GN=queE PE =3 SV=1
MKVVEKFTSINGEGTRAGELAVFVRFKGCNLRCSYCDTMWANEPDCPYEEETPEEILNYVLGTGIRNVTLTGGEPLLQKDIRELIYLLLQAGLQVEIETNGAVDLSAFCEERPVFTMDYKLPSSGCEEYMIVENMELLGKDDTVKFVCGSQKDLLKALDVIQIYNLTNRCHVYLSPVFGSIEPVQIVEFMLKHRLNGVRLQIQMHKVIWDPNERGV

SEQ ID NO: 33846 - protein, 216 aa, [Ruminococcus] torques
  misc_feature (1)..(216): tr|A0A174ZG94|A0A174ZG94_9FIRM 7-carboxy-7-deazaguanine synthase OS=[Ruminococcus] torques OX=33039 GN=queE PE =3 SV=1
MKVVEKFTSINGEGTRAGELAVFVRFKGCNLRCSYCDTMWANESDCPYEEETPEEILNYVLGTGIRNVTLTGGEPLLQKDIRELIYLLLQAGLQVEIETNGAVDLSAFCEERPVFTMDYKLPSSGCEEYMITENMELLGKDDTVKFVCGSQEDLLKALDVIQTYNLTNRCHVYLSPVFGSIEPVQIVEFMLKHRLNGVRLQIQMHKVIWDPNERGV

SEQ ID NO: 33847 - protein, 236 aa, Rummeliibacillus sp.
  misc_feature (1)..(236): tr|A0A3N6AAE2|A0A3N6AAE2_9BACL 7-carboxy-7-deazaguanine synthase OS=Rummeliibacillus sp. TYF005 OX=2058214 GN= queE PE=3 SV=1
MKIPVIEIFGPTIQGEGRKIGQKTMFVRTAGCDYRCHWCDSAFTWDGSEKNRIRLLDAEEIYDELKEIAGNNFQYVTISGGNPALIGKPMAEFIQLLRKDNIKVGLETQGSKWQEWFRLVDDLTISPKPPSSGMVTDLIVLDEIISRLPLEALSLKVVVFDDNDFLFAKRIHKRYPTAEFFLSVGNHNPNETGDIYPRLLKSLEWLWEKVIKDPEMNTVRALPQLHALVWSNKREV

SEQ ID NO: 33848 - protein, 193 aa, Runella sp.
  misc_feature (1)..(193): tr|A0A3C0UUF2|A0A3C0UUF2_9BACT 7-carboxy-7-deazaguanine synthase OS=Runella sp. OX=1960881 GN=queE PE=3 SV=1
MEAFYTLQGEGYHSGKAAYFIRLGGCDVGCVWCDVKESWDADIHPKHTLTQIVNEALQYPARMAVVTGGEPLMYDLGALTTELHNAGFETNIETSGAHPFSGTWDWVCFSPKKFKNPHESIYAQANELKVVVYHKSDFEFAEYHAARVNKDCVLLLQPEWSRMQEMTPLIVEYVKQHPQWRVSLQTHKYMDIP

SEQ ID NO: 33849 - protein, 200 aa, Runella sp.
  misc_feature (1)..(200): tr|A0A344TPT4|A0A344TPT4_9BACT 7-carboxy-7-deazaguanine synthase OS=Runella sp. HYN0085 OX=2259595 GN=queE PE= 3 SV=1
MNEVLPLMEAFYTLQGEGYHNGKAAYFIRLGGCDVGCVWCDVKESWDVEAHPKVSIKDMVEEALKHPARMAVVTGGEPLMHNLEPLTEALQAAGFHTNIETSGAHPMSGRWDWVCFSPKKFKAPHPSVYAQAHELKVIVYNKTDFEFAEQHAALVNKECVLLLQPEWSRVQEMTPLIVEYVKQHPQWRVSLQTHKYMDIP

SEQ ID NO: 33850 - protein, 213 aa, Ruthia magnifica
  misc_feature (1)..(213): tr|A1AW81|A1AW81_RUTMC 7-carboxy-7-deazaguanine synthas e OS=Ruthia magnifica subsp. Calyptogena magnifica OX=4 13404 GN=queE PE=3 SV=1
MINIKLNINEIFYSLQGEGREVGLPSVFIRLTGCPLRCTYCDTEYAFKGNNLMAIDEIIKKIKQYDTPYICVTGGEPLAQKNCCLLLNELVKNNYQVSLETSGSINIQDVNVSVSIVMDIKTPDSGEFEQNKYTNIKKLTTKDQLKFVIRSRADFDWSVAILSQYPTAAGTLFSPVFGDITPTQLADWILDQQLNVRMQLQLHKLLWGDEKGK

SEQ ID NO: 33851 - protein, 247 aa, Saccharibacillus sp.
  misc_feature (1)..(247): tr|A0A4Y6UX42|A0A4Y6UX42_9BACL 7-carboxy-7-deazaguanine synthase OS=Saccharibacillus sp. ATSA2 OX=2583377 GN=q ueE PE=3 SV=1
MNVSASSRPIPVLEVFGPTIQGEGMSIGRKTMFVRTAGCDYRCSWCDSKFTWDGSAKDQIRMLSPEQIVDELLDLGGDTFDHVTISGGNPLLLPQIAYLIQELHGRGIRTAVETQGSRWQDWLVRIDEVTLSPKPPSSGMETDFDVLDDIVARLREASGRRDLCLKIVIFDEEDLTYARFVHKRYPDVPFILQTGNPQVAGEVQDHVSSLLQRYEWLIGRLSDLPDLKDARALPQLHTLVWGNKRGV

SEQ ID NO: 33852 - protein, 251 aa, Saccharibacillus sp.
  misc_feature (1)..(251): tr|A0A254NTA7|A0A254NTA7_9BACL 7-carboxy-7-deazaguanine synthase OS=Saccharibacillus sp. O23 OX=2009338 GN=que E PE=3 SV=1
MSDSVSKKTTERAIPVLEIFGPTIQGEGMAIGRKTMFVRTAGCDYRCSWCDSKFTWDGSAKDEIRMLSAEEILAKLLELGGDTFDHVTISGGNPLLLPQIALLVQRLHERGIRVAVETQGSRWQDWLVRIDEVTLSPKPPSSGMETDFEILDSIVSRLSEAPGRRDLCIKIVIFDEDDLTYARDVHRRYPNVPFILQTGNPQVSHESDDHVSSLLRRYEWLIGRLSDLPDLKDARALPQLHTLVWGNKRGV

SEQ ID NO: 33853 - protein, 225 aa, Saccharibacter sp.
  misc_feature (1)..(225): tr|A0A060QBC7|A0A060QBC7_9PROT 7-carboxy-7-deazaguanine synthase OS=Saccharibacter sp. AM169 OX=1343158 GN=que E PE=3 SV=1
MHPERSCPTSLPMPYIVKELFATLQGEGAHSGRAAIFCRFTGCNLWSGREEDRHKAQCTFCDTDFIGTDGPGGGRFATAEALAAALDDCWLAHTADVTRRYVVFTGGEPLLQLDAALIAATRARGFTIAVETNGSLPAPEGIDWVCVSPKPGQPLKQTHGHELKLVYPQDTLTPEQFAACDFQHFWLQPMDGPDRPANTEKAVRYCQTHPQWRLSLQTHKLIGIP

SEQ ID NO: 33854 - protein, 277 aa, Saccharicrinis carchari
  misc_feature (1)..(277): tr|A0A521B8G5|A0A521B8G5_9BACT 7-carboxy-7-deazaguanine synthase OS=Saccharicrinis carchari OX=1168039 GN=queE PE=3 SV=1
MLVGEGVFPIVMDAKGNAIAEVPATGWNLSGTVQGEGKLAGTPSLFIRLATCNLRCIWQMDDGSFCRCDTAYASFHPDDKKAWTVEEIVKVVKHNIGAMQHVVITGGEPLLQKKGVLALCKSIKEELNLHITIETNGTIFDQELTQFVDLFSISPKLSNSVPSAQKLKFYNEAETGSSRFHHEVRRNLNALQSYIDTAQDLQLKFVVAKQSDADEITKDYLKVLQRYNKNDIMLMPLGATQHEITKSNPIVLQMCLQNGWKYTPRIHIDIFGSKQGV

SEQ ID NO: 33855 - protein, 259 aa, Saccharicrinis fermentans
  misc_feature (1)..(259): tr|W7Y0Y6|W7Y0Y6_9BACT 7-carboxy-7-deazaguanine synthas e OS=Saccharicrinis fermentans DSM 9555 = JCM 21142 OX= 869213 GN=queE PE=3 SV=1
MIVEEKIEKEEVVSNNIHSAQLVLVGEGVFPITRDADMKAVDCVPNTGLAISGTIQGEGKLAGTPSLFIRLASCNLRCIWQMEDGSLCKCDTSYASFHPEDKKTWSVEEVVNTLKNNMGQIKHVVISGGEPLLQKKGVAALCKMIKEKLHLHITLETNGTIFDKEVAQYIDLFSISPKLSNSVPSKEKLQFYREDETGASKYHHEVRRNLKVLQSYIYFANVTSKDVQLKFVVGKASDADEIKKDYLDLLLGYSRKILC

SEQ ID NO: 33856 - protein, 240 aa, Saccharomonospora marina
  misc_feature (1)..(240): tr|H5WZ64|H5WZ64_9PSEU 7-carboxy-7-deazaguanine synthas e OS=Saccharomonospora marina XMU15 OX=882083 GN=queE P E=3 SV=1
MKLPAVSDVDRELVVNETFGPTFQGEGPSTGRYAHFVRLFGCHLSCIWCDSPQTHDATRCDLADEQRVLSIEDILSWLAAGPADLLVVTGGEPLLQPHVVGRLLGAIRERALATDIEIETSGTIAPTDMITSAVTRFNVSPKLSHSGLRRHQRIRPAVLRDLADSGKAVWKFVVQALDDLDEIQELVDTYGLHPVWVMPEGTDSSTVLARMRMLADPVLARRWNLSTRLHTLLWENDRGR

SEQ ID NO: 33857 - protein, 211 aa, Saccharomonospora sp.
  misc_feature (1)..(211): tr|A0A4P7CAP7|A0A4P7CAP7_9PSEU 7-carboxy-7-deazaguanine synthase OS=Saccharomonospora sp. 31sw OX=2528243 GN=q ueE PE=3 SV=1
MTYLIKEIVYTLQGEGSHTGRPAVFCRFSRCNLWTGFEKDRYRAICKFCDTDFVGTDGVGGGRFSTADELADAVEAAWPSDARNNRFVVCTGGEPLLQLDAAAIDALHHRGFEVAVETNGTRTPPAGVDWLCVSPKIGADLVVTSGDELKLVYPQAGGDPAQFEHLDFRSFRLQPLDDEDRQSHTEAAVEYCMKNPRWSLSLQTHKYLGIR

SEQ ID NO: 33858 - protein, 240 aa, Saccharomonospora sp.
  misc_feature (1)..(240): tr|A0A1Q9UVP1|A0A1Q9UVP1_9PSEU 7-carboxy-7-deazaguanine synthase OS=Saccharomonospora sp. CUA-673 OX=1904969 G N=queE PE=3 SV=1
MTTPRPSVARPLLVSECFGPTVQGEGPSAGKPAVFIRLSRCNLSCPGCDTPYTWDWSRFDPRRESRRMSVDDLYRWVTTQLVDLVVISGGEPLLQQESLRPLVRSLAEAGHRIEIETNGTVVPNSDIIDSVDQFNVSPKTSAFAGTAVEWDARINPEALRVFTSSKKSIFKFVVTQEGDLDEISQYTEEFDLSPLWVMPEGTTREQVLDRMSWLAEEAVRRSWNLSTRLHILLWGDERGR

SEQ ID NO: 33859 - protein, 216 aa, Saccharophagus degradans
  misc_feature (1)..(216): tr|Q21HP3|Q21HP3_SACD2 7-carboxy-7-deazaguanine synthas e OS=Saccharophagus degradans (strain 2-40 / ATCC 43961 / DSM 17024) OX=203122 GN=queE PE=3 SV=1
MADSGLRITEIFHSLQGEARTVGLPTVFVRLTGCPLRCHYCDSEYAFHGGERLSFEQILEQVAGFGAKYVCVTGGEPLAQPGCIDLLSRLCDLGYNVSLETSGAMDVSKVDHRVSIVLDLKTPASGEQDKNLYTNIPLLKLKDQVKFVICDRGDYDWARFQLDQLQLVSKVGDVLFSPSFEQLAPKQLAEWILDDRLPVRFQMQLHKQLWGDTPGV

SEQ ID NO: 33860 - protein, 211 aa, Saccharospirillum sp.
  misc_feature (1)..(211): tr|A0A2T6E4T5|A0A2T6E4T5_9GAMM 7-carboxy-7-deazaguanine synthase OS=Saccharospirillum sp. MSK14-1 OX=1897632 G N=queE PE=3 SV=1
MFYTLQGEGAQAGRPAVFCRFTGCNLWSGRDQDRATAVCTFCDTDFLGTDGPGGGRFADAQSLSRAIAALWPEETDGTPYVVFTGGEPSLQLTEALIDQLHSAHFECAIETNGTRPLPANLDWICVSPKGNSEVIIQRCNELKLVYPQPEAPPERFASIEASYRFLSPLNPFDAAQIAPAQQSSTRAAIDYCLAHPQWRLTVQMHKVVNIA

SEQ ID NO: 33861 - protein, 245 aa, Saccharothrix australiensis
  misc_feature (1)..(245): tr|A0A495VWY3|A0A495VWY3_9PSEU 7-carboxy-7-deazaguanine synthase OS=Saccharothrix australiensis OX=2072 GN=que E PE=3 SV=1
MTAARTAGPDDVLVVNEIFGPTVQGEGPSAGTRCAFLRLGGCNLTCSWCDTPYTWDWKGVSEHGRPHDPRAELHPMRAHEVLDRLRAFGVGLVVVSGGEPLTQQHRLRHVLAGLRRAGVEVEVETNGTIPPSPELVELGVWFNVSPKLRHSGVDPARALVGEALTEFAACGRGRFKFVCRDRADLVEVAEVVDAHGLSPVWIMPLGRSADAVLAGLRELADATVRRGWNLTPRLHVLAWEDRRGV

SEQ ID NO: 33862 - protein, 211 aa, Saccharothrix espanaensis
  misc_feature (1)..(211): tr|K0JXB9|K0JXB9_SACES 7-carboxy-7-deazaguanine synthas e OS=Saccharothrix espanaensis (strain ATCC 51144 / DSM 44229 / JCM 9112 / NBRC 15066 / NRRL 15764) OX=1179773 GN=queE PE=3 SV=1
MTYLVKEIFYTLQGEGAHSGRPAVFCRFSRCNLWTGHEKDRARAVCRFCDTDFVGIDGPGGGRFATPAELADAVEAAWPTLGKARRFVVCTGGEPLLQLDEVAVQTLHERGFEVAVETNGTRVPPPGIDWLCVSPKVGAELVVESGDELKFVYPQEGVNPARFEHLDFRSFRLQPLDDHNLDDNTKAAISYCLANPRWSLSLQTHKYLGTR

SEQ ID NO: 33863 - protein, 237 aa, Saccharothrix sp.
  misc_feature (1)..(237): tr|A0A0F0HLS1|A0A0F0HLS1_9PSEU 7-carboxy-7-deazaguanine synthase OS=Saccharothrix sp. ST-888 OX=1427391 GN=que E PE=3 SV=1
METRRVEAGPGRGLLVAESFGPTFQGEGPSVGQQALFIRLSRCNLHCPGCDTPETWDWSRYNPREVATRHSVEDLAAWVTSRPLARIVLTGGEPLLQQDQLVGLARLLPGHRIEVETNGTIVPLPELVSLVEAFNVSPKLADFAAPGDRRINNQALRALASCGKARFKFVVQDESELNEVAALVDEFSLTDVWVMPEGTSSATVLAGMRKLADAVLEYGWNLSTRLHILIWEAQRGR

SEQ ID NO: 33864 - protein, 211 aa, Saccharothrix sp.
  misc_feature (1)..(211): tr|A0A1V2Q612|A0A1V2Q612_9PSEU 7-carboxy-7-deazaguanine synthase OS=Saccharothrix sp. ALI-22-I OX=1933778 GN=q ueE PE=3 SV=1
MTYLIKEIFFTLQGEGSHAGRPAVFCRFSRCNLWTGLEKDRYRAICKFCDTDFVGTDGTGGGRFATPDELAEAVERAWPSDARDNRFVVCTGGEPLLQLDAAAVDAFHVRGFEVAVETNGTRVPPAGIDWLCVSPKIGADLVVTSGDELKLVYPQVGGDPAQFEHLDFRSFRLQPLDDRERESHTRAAVEYCMKNPRWSLSLQTHKYLGIR

SEQ ID NO: 33865 - protein, 211 aa, Saccharothrix variisporea
  misc_feature (1)..(211): tr|A0A495X900|A0A495X900_9PSEU 7-carboxy-7-deazaguanine synthase OS=Saccharothrix variisporea OX=543527 GN=que E PE=3 SV=1
MTYLVKEIFYTLQGEGTHAGRPAVFCRFSRCNLWTGLEKDRYRAICKFCDTDFVGTDGTGGGRFSTADDLAEAVESAWPSEARENRFVVCTGGEPLLQLDDAAVAALHERGFEVAVETNGTRVPPVGVDWLCVSPKIGAELVVTGGDELKLVYPQVGGDPAQFEHLDFRTFRLQPLDDAERDSHTRAAVEYCMKNPRWSLSLQTHKYLGIR

SEQ ID NO: 33866 - protein, 234 aa, Saccharothrix variisporea
  misc_feature (1)..(234): tr|A0A495X6D2|A0A495X6D2_9PSEU 7-carboxy-7-deazaguanine synthase OS=Saccharothrix variisporea OX=543527 GN=que E PE=3 SV=1
MNTLSLAPERAEGSAILTEKFESFQGEGPWTGQRCVFVRFSRCNLRCGYCDTPESWDWSRYNPAEVSARVPVAELVSWVRERGVDLMVITGGEPMLQQPAMTALARGLADVRVQVETNGTVAPTPELASLVDLWVVSPKLANSGMPYSTRIKPDALSALVATDRAVFKFVVTEPDRDLDEIAHLVEEHQLAPVWVMPEGTTREKVLAGMDALYHRATERGWNVSTRLHILTGAR

SEQ ID NO: 33867 - protein, 210 aa, Salegentibacter agarivorans
  misc_feature (1)..(210): tr|A0A1I2LLU7|A0A1I2LLU7_9FLAO 7-carboxy-7-deazaguanine synthase OS=Salegentibacter agarivorans OX=345907 GN=q ueE PE=3 SV=1
MITEETKALVDDGIMLPLMEEFYTIQGEGFHKGTAAYFIRIGGCDVGCHWCDVKESWDPNIHPPTHIGEIVEKAVASSKTIVITGGEPLTWDMTRLTGALKAKGCDIHIETSGAYKLTGQWDWICLSPKKIKLPTEEIYPLAHELKVIIFNKHDFKFAEEQAEKVSENCILYLQPEWSNRDKMMPLIVDFVMKHPKWKVSLQTHKYLNIP

SEQ ID NO: 33868 - protein, 210 aa, Salegentibacter echinorum
  misc_feature (1)..(210): tr|A0A1M5GQ94|A0A1M5GQ94_9FLAO 7-carboxy-7-deazaguanine synthase OS=Salegentibacter echinorum OX=1073325 GN=qu eE PE=3 SV=1
MITEETKTLVDDGIMLPLMEEFYTIQGEGYHKGTAAYFIRIGGCDVGCHWCDVKESWDPAIHPPTHIGEIVEHAIAKSKTIVITGGEPLTWDMTRLTGALKAKGCAIHIETSGAYKLTGQWDWICLSPKKIKLPTEEIYPLANELKVIVFNKHDFKFAEEQAAKVSKDCHLYLQPEWSNREKMMPQIVDFVMENPKWKVSLQTHKYLNIP

SEQ ID NO: 33869 - protein, 210 aa, Salegentibacter flavus
  misc_feature (1)..(210): tr|A0A1I4XTQ4|A0A1I4XTQ4_9FLAO 7-carboxy-7-deazaguanine synthase OS=Salegentibacter flavus OX=287099 GN=queE P E=3 SV=1
MITEDTRRLVDEGIMLPLMEEFYTIQGEGFHKGTAAYFIRIGGCDVGCHWCDVKESWDAGLHPPTHIGKIIENATAYSDTVVVTGGEPLTWDMTQLTQGLKNKGSKIHIETSGAYKLSGQWDWICLSPKKKKLPTDEIYPLANELKMIIFNKHDFKFAEEQAAKVSEDCILYLQPEWSKRDKMMPLIVDYVMKNPKWKVSLQTHKYLNIP

SEQ ID NO: 33870 - protein, 210 aa, Salegentibacter holothuriorum
  misc_feature (1)..(210): tr|A0A1T5CH92|A0A1T5CH92_9FLAO 7-carboxy-7-deazaguanine synthase OS=Salegentibacter holothuriorum OX=241145 GN =queE PE=3 SV=1
MITEETKALVDDGIMLPLMEEFYTIQGEGFHKGTAAYFIRIGGCDVGCHWCDVKESWDPSIHPPTHIGEIVEKAVSNSKTIVITGGEPLTWDMTRLTGALKAKGCDIHIETSGAYKLTGQWDWICLSPKKIKLPTEEIYPLAHELKVIIFNKHDFKFAEEQAEKVSENCILYLQPEWSNRDKMMPLIVDFVMKNPKWKVSLQTHKYLNIP

SEQ ID NO: 33871 - protein, 210 aa, Salegentibacter mishustinae
  misc_feature (1)..(210): tr|A0A0Q9Z6C7|A0A0Q9Z6C7_9FLAO 7-carboxy-7-deazaguanine synthase OS=Salegentibacter mishustinae OX=270918 GN=q ueE PE=3 SV=1
MITEETKALVDDGIMLPLMEEFYTIQGEGFHKGTAAYFIRIGGCDVGCHWCDVKESWDPSIHPPTHIGEIVEKAVASSKTIVITGGEPLTWDMTRLTGALKAKGCDIHIETSGAYKLTGQWDWICLSPKKIKLPTEEIYPLAHELKVIIFNKHDFKFAEEQAEKVSENCILYLQPEWSNRDKMMPLIVDFVMKNPKWKVSLQTHKYLNIP

SEQ ID NO: 33872 - protein, 210 aa, Salegentibacter salarius; identical to SEQ ID NO: 33871
  misc_feature (1)..(210): tr|A0A2N0U0R0|A0A2N0U0R0_9FLAO 7-carboxy-7-deazaguanine synthase OS=Salegentibacter salarius OX=435906 GN=queE PE=3 SV=1

SEQ ID NO: 33873 - protein, 210 aa, Salegentibacter salegens
  misc_feature (1)..(210): tr|A0A1M7I388|A0A1M7I388_9FLAO 7-carboxy-7-deazaguanine synthase OS=Salegentibacter salegens OX=143223 GN=queE PE=3 SV=1
MITEETKALVDDGIMLPLMEEFYTIQGEGFHKGTAAYFIRIGGCDVGCHWCDVKESWDPNIHPPTHIGEIVEKAVASSKTIVITGGEPLTWDMTRLTGALKDKGCDIHIETSGAYKLTGQWDWICLSPKKIKLPTEEIYPLAHELKVIIFNKHDFKFAEEQAEKVSENCILYLQPEWSNRDKMMPLIVDFVMKNPKWKVSLQTHKYLNIP

SEQ ID NO: 33874 - protein, 210 aa, Salegentibacter salinarum
  misc_feature (1)..(210): tr|A0A2N0TPA5|A0A2N0TPA5_9FLAO 7-carboxy-7-deazaguanine synthase OS=Salegentibacter salinarum OX=447422 GN=que E PE=3 SV=1
MITEETKALVDDGIMLPLMEEFYTIQGEGFHKGTAAYFIRIGGCDVGCHWCDVKESWDPSIHPPTHIGEIVEKAVASSKTIVITGGEPLTWDMTRLTGALKAKGCDIHIETSGAYKLTGQWDWICLSPKKIKLPTEEIYPLAHELKVIIFNKHDFKFAEEQAEKVSENCILYLQPEWSNREKMMPLIVDYVMKNPKWKVSLQTHKYLNIP

SEQ ID NO: 33875 - protein, 210 aa, Salegentibacter sp.
  misc_feature (1)..(210): tr|A0A4R6FRU9|A0A4R6FRU9_9FLAO 7-carboxy-7-deazaguanine synthase OS=Salegentibacter sp. 24 OX=2183986 GN=queE PE=3 SV=1
MITEETKALVDDGIMLPLMEEFYTIQGEGFHKGTAAYFIRIGGCDVGCHWCDVKESWDPSIHPPTHIGKIVEKAVASSKTIVITGGEPLTWDMTRLTGALKSKGCDIHIETSGAYKLTGQWDWICLSPKKIKLPTQEIYPLAHELKVIIFNKHDFQFAEEQAAKVSKNCILYLQPEWSNREKMMPLIVDFVMKNPKWKVSLQTHKYLNIP

SEQ ID NO: 33876 - protein, 210 aa, Salegentibacter sp.; identical to SEQ ID NO: 33867
  misc_feature (1)..(210): tr|A0A1L6QZG2|A0A1L6QZG2_9FLAO 7-carboxy-7-deazaguanine synthase OS=Salegentibacter sp. T436 OX=1729720 GN=que E PE=3 SV=1

SEQ ID NO: 33877 - protein, 239 aa, Salibacterium halotolerans
  misc_feature (1)..(239): tr|A0A1I5T421|A0A1I5T421_9BACI 7-carboxy-7-deazaguanine synthase OS=Salibacterium halotolerans OX=1884432 GN=q ueE PE=3 SV=1
MKKVPVLEIFGPTIQGEGMVIGRKTMFLRTGGCDYRCSWCDSAFTWDGSQKPDILDASDIVEWLEMEGGSFFNHVTISGGNPALHEGLGEVNRLLQEKGIQTAVETQGSFWQEWMTEIDDVTISPKPPSSGMKTNWEHLDMYISRLKDRETKKVSLKVVIFDDTDLSYAADVHERYPEVEMFLQTGNDEISTADDQWLLSHLLNRYEWLVEQVLHSNRLNDVKVLPQLHTLLWGNKQGV

SEQ ID NO: 33878 - protein, 239 aa, Salibacterium qingdaonense
  misc_feature (1)..(239): tr|A0A1I4IF39|A0A1I4IF39_9BACI 7-carboxy-7-deazaguanine synthase OS=Salibacterium qingdaonense OX=266892 GN=qu eE PE=3 SV=1
MKKVPVLEIFGPTIQGEGMVIGRKTMFLRTGGCDYRCSWCDSAFTWDGSQKPDLLEASDIVERLEMEGGSFFNHVTISGGNPALHEGLGEVNRLLQEKGIQTAVETQGSFWQEWMTEIDDVTISPKPPSSGMKTNWEQLDAYIRRLKDRDTKKVSLKVVIFDDTDLSYAADVHERYPEVEMFLQTGNDELSTADDQWLLSHLLTRYEWLVEQVLHANRLNDVKVLPQLHTLLWGNKQGV

SEQ ID NO: 33879 - protein, 240 aa, Salilacibacter sp.
  misc_feature (1)..(240): tr|A0A514LL67|A0A514LL67_9ACTN 7-carboxy-7-deazaguanine synthase OS=Salilacibacter sp. NKC3-5 OX=2502791 GN=qu eE PE=3 SV=1
MSGKIPVLEIFGPTIQGEGMVAGQKTMFVRTGGCDYRCAWCDSAFTWDGSQKATPMKADDILAELEQIAGDRFSHVTISGGNPALHSGIDALVERFREKGIASAVETQGSFWQDWLLAVDEVTVSPKPPSSKMTTDWSRLDTFMKRLAEEQVGHHSLKVVIFDEEDLTYAKQVHERYPDVLFYLQVGNDDLETPEPARLRDHLLEKYEWLVVRVMDERQLNDVRVLPQIHALLWGNKQGV

SEQ ID NO: 33880 - protein, 242 aa, Salimicrobium flavidum
  misc_feature (1)..(242): tr|A0A1N7IR52|A0A1N7IR52_9BACI 7-carboxy-7-deazaguanine synthase OS=Salimicrobium flavidum OX=570947 GN=queE P E=3 SV=1
MAKFPVLEIFGPTIQGEGMVVGRKTMFVRTAGCDYSCSWCDSAFTWDGSAKEEIEKLEADEIITRLQEEGGDHFDHVTISGGNPALLARLDELIDPLHELGIEVALETQGSRWQDWFTTIDDLTISPKPPSSNMNTNWETLDLILRKLRKAGRSRNVSLKVVIFDKEDLAYAEYVHKRYPNLAFFLQVGNDDLEEDSPSDLASTLLLKYEWLIDQVMASSALNRVRVLPQVHALVWGNKRGV

SEQ ID NO: 33881 - protein, 242 aa, Salimicrobium halophilum
  misc_feature (1)..(242): tr|A0A1G8T6W8|A0A1G8T6W8_9BACI 7-carboxy-7-deazaguanine synthase OS=Salimicrobium halophilum OX=86666 GN=queE PE=3 SV=1
MAKFPVLEIFGPTIQGEGMVVGRKTMFVRTAGCDYSCAWCDSAFTWDGSAKEEIEKLEADEIIARLQEEGGDHFDHVTISGGNPALLARLDELIDPLHELGIEVALETQGSRWQDWFTEIDDLTISPKPPSSKMNTNWETLDLILEKLDDAGRSKNVSLKVVIFDKEDLAYAEYVHKRYPNLSFFLQVGNDDLEEDSPSGLASTLLSKYEWLIDQVMASSALNRVRVLPQVHTLVWGNKRGV

SEQ ID NO: 33882 - protein, 240 aa, Salinibacter sp.
  misc_feature (1)..(240): tr|A0A2P6C057|A0A2P6C057_9BACT 7-carboxy-7-deazaguanine synthase OS=Salinibacter sp. 10B OX=1923971 GN=queE PE =3 SV=1
MPRPFSAPSYRVKHVFQTVQGEGFWVGRPALFVRLVSCNMWSGYEADRARDADRTGADCPRWCDTDFTKEGASTLTADQLTDQMREIGGPAIDFCVLTGGEPLLQADAALVHALHEAGYEVALETNGTVPLADAFGNDNSEQLHTPDWVTCSPKRPEDQLALERYDELKLIVPDYRPSNYAQFAEHATPHSINGRERRLLWLQPEDGPRLEEAQAMAVDLALKHPEWRVSTQTHKVLNVK

SEQ ID NO: 33883 - protein, 240 aa, Salinicoccus alkaliphilus
  misc_feature (1)..(240): tr|A0A1M7EZD1|A0A1M7EZD1_9STAP 7-carboxy-7-deazaguanine synthase OS=Salinicoccus alkaliphilus DSM 16010 OX=112 3231 GN=queE PE=3 SV=1
MMKVPVLEIFGPTFQGEGAVIGQKTMFVRTAGCDYQCSWCDSKFTWDGSQQENIRMMTADDIFASLDALAEGNYNHVTISGGNPLLLKNLREFVESAKAKGVKLAVETQGTMYQDWLQGIDDVTISPKPPSSGMVTDYGKLDYIFTKLDESGTAYNLKVVIFDEEDFEYAVHMHQKYAKVDFYLQVGNPYLDGEDIENHTEKLLNRYENLVDRTMRDSRVNDVRVLPQLHTLLWSNKQGV

SEQ ID NO: 33884 - protein, 239 aa, Salinicoccus halodurans
  misc_feature (1)..(239): tr|A0A0F7HJC3|A0A0F7HJC3_9STAP 7-carboxy-7-deazaguanine synthase OS=Salinicoccus halodurans OX=407035 GN=queE PE=3 SV=1
MMKVPVLEIFGPTFQGEGAVIGRKTMFVRTAGCDYSCSWCDSAFTWDGSQKENIRMMSPEDIFGSLDELAEGNYNHVTISGGNPALLKNMEAFVEKAKGKGIELAMETQGTVFQEWMKQVDDVTVSPKPPSSNMNTDFDRLDRVLAGLDGGDGSYNLKVVVFDDGDFEYAATVHLKYPSIPFYLQVGNPYLGNNVENHTQKLLERYGELVEKTMEDPRMNDARVLPQLHTLLWSNKQGV

SEQ ID NO: 33885 - protein, 239 aa, Salinicoccus kekensis
  misc_feature (1)..(239): tr|A0A285URR4|A0A285URR4_9STAP 7-carboxy-7-deazaguanine synthase OS=Salinicoccus kekensis OX=714307 GN=queE PE =3 SV=1
MKIPVLEIFGPTFQGEGAVIGQKTMFVRTAGCDYQCSWCDSKFTWDGSQKENIRMMTAEDIFASLDALAKDNYSHVTISGGNPLLLKNLSDFVEKAKSKNIRLAVETQGTMYQDWLQMIDDVTISPKPPSSGMVTDYGKLEHIFAKLDESGTSYNLKVVIFDDADFEYAADLHRKYRDVAFYLQVGNPYLDGESVDNHTEKLLSRYEDLVDRTMNDKRMNEVRVLPQLHTLLWSNKQGV

SEQ ID NO: 33886 - protein, 240 aa, Salinicoccus qingdaonensis
  misc_feature (1)..(240): tr|A0A1G9DKH9|A0A1G9DKH9_9STAP 7-carboxy-7-deazaguanine synthase OS=Salinicoccus qingdaonensis OX=576118 GN=qu eE PE=3 SV=1
MMKIPVLEIFGPTFQGEGAVIGQKTMFVRTAGCDYQCSWCDSKFTWDGSQKENIRMMSADDIFESLDTLAENNYNHVTISGGNPLLLKNLQAFVEQAKEKGIQLAVETQGSMYQDWLQLIDDVTISPKPPSSGMETDYGRLEYIFTKLDESETSYNLKIVIFDEEDFEYAADMHRRYPDKAFYLQVGNPYLDGESVDNHTEKLLSRYEKLVDMTMNDSRMNNVRVLPQLHTLLWSNRQGV

SEQ ID NO: 33887 - protein, 238 aa, Salinicoccus roseus
  misc_feature (1)..(238): tr|A0A3N4TA17|A0A3N4TA17_9STAP 7-carboxy-7-deazaguanine synthase OS=Salinicoccus roseus OX=45670 GN=queE PE=3 SV=1
MKVPVLEIFGPTFQGEGAVIGQKTMFVRTAGCDYSCSWCDSAFTWDGSQKDKIRMMDGDDILAALDDLAPGNYNHVTISGGNPALLKNMQDFVEKAKARGIKLAVETQGTMFQEWLAVIDDVTISPKPPSSGMDTDFRKLERVMAGLDEGTAHYNLKVVVFDEKDFEYAADVHGKYPHVDFYLQVGNPYLGDNVEGHTFKLLERYEWLVDMAMADPRMNDAKVLPQLHTLLWSNKQGV

SEQ ID NO: 33888 - protein, 239 aa, Salinicoccus roseus
  misc_feature (1)..(239): tr|A0A0C2HJ47|A0A0C2HJ47_9STAP 7-carboxy-7-deazaguanine synthase OS=Salinicoccus roseus OX=45670 GN=queE PE=3 SV=1
MMKVPVLEIFGPTFQGEGAVIGQKTMFVRTAGCDYSCSWCDSAFTWDGSQKDKIRMMDGDDILAALDDLAPGNYNHVTISGGNPALLKNMQDFVEKAKARGIKLAVETQGTVFQEWLAVIDDVTISPKPPSSGMDTDFRKLERVMAGLDEGPAHYNLKVVVFDEKDFEYAADVHGKYPHVDFYLQVGNPYLGDNVEGHTFKLLERYERLVDMAMADPRMNDAKVLPQLHTLLWSNKQGV

SEQ ID NO: 33889 - protein, 239 aa, Salinicoccus sediminis
  misc_feature (1)..(239): tr|A0A0M2SJY1|A0A0M2SJY1_9STAP 7-carboxy-7-deazaguanine synthase OS=Salinicoccus sediminis OX=1432562 GN=queE PE=3 SV=1
MMKVPVLEIFGPTFQGEGAVIGQKTMFVRTAGCDYSCSWCDSAFTWDGSQKENIRMMTSEDIFRSLDGLAAGNYNHVTISGGNPALLKNLEPFVTAAKDRGIALAMETQGTVFQEWMGRVDDVTVSPKPPSSGMETDFDRLDRVLAGLEAGYGAYNLKVVVFDKRDFEYAAYVHMKYPSVPFYLQTGNPYLGENVVNHTEKLLGRYGELVEMTMGDARMNDARVLPQLHTLLWSNKQGV

SEQ ID NO: 33890 - protein, 239 aa, Salinicoccus sp.
  misc_feature (1)..(239): tr|A0A558AQY9|A0A558AQY9_9STAP 7-carboxy-7-deazaguanine synthase OS=Salinicoccus sp. CT19 OX=2493691 GN=queE P E=3 SV=1
MMKVPVLEIFGPTFQGEGAVIGQKTMFVRTAGCDYSCSWCDSAFTWDGSQKENIRMMTADEILASLDHLAAGNYNHVTISGGNPALLKNMQEFVTKAKERGIRLAVETQGTVYQEWLSEIDDVTISPKPPSSGMVTDFEKLERVMAGLDQGPAHYNLKVVVFDEKDFEYAADVHQKYPDVDFYLQVGNPYLGDNVDNHTTRLLERYEKLVDMTMADARMNNAKVLPQLHTLLWSNKQGV

SEQ ID NO: 33891 - protein, 217 aa, Salinicola socius
  misc_feature (1)..(217): tr|A0A1Q8SPE6|A0A1Q8SPE6_9GAMM 7-carboxy-7-deazaguanine synthase OS=Salinicola socius OX=404433 GN=queE PE=3 S V=1
MYSVKEAFYTLQGEGAQAGRASVFCRFTGCNLWSGRERDRARSQCTFCDTDFVGTDGQNGGQFGDADALASHLERLWPASAPGRHRRYVVFTGGEPLLQLDTALIDAMHARGFEIAVETNGTLPAPEGIDWICVSPKSDTTLRQIQGDELKLIHPQPGVDPEAFAELNFTHFLLQPMDLAPGAIVTDANPMTATVEYCMRHPQWRLSLQTHKIAGID

SEQ ID NO: 33892 - protein, 217 aa, Salinicola sp.
  misc_feature (1)..(217): tr|A0A2D8P014|A0A2D8P014_9GAMM 7-carboxy-7-deazaguanine synthase OS=Salinicola sp. OX=1978524 GN=queE PE=3 SV= 1
MYSVKEAFYTLQGEGAQAGRASVFCRFTGCNLWSGRERDRARSQCTFCDTDFVGTDGQNGGQFPDADALATHLATLWQAPEEANSSRYVVFTGGEPLLQLDAALIDAMHAHGFEVAVETNGTLSPPEGIDWICVSPKSDTTLRLTRGNELKLVYPQAGVDPANFAGLDFTHFFLQPMDLSPVAIVSDGDPMAATVEYCLRHPQWRLSLQTHKIAGID

SEQ ID NO: 33893 - protein, 217 aa, Salinicola sp.
  misc_feature (1)..(217): tr|A0A1Q8T3K8|A0A1Q8T3K8_9GAMM 7-carboxy-7-deazaguanine synthase OS=Salinicola sp. MH3R3-1 OX=1928762 GN=queE PE=3 SV=1
MYSVKEAFYTLQGEGAQAGRASVFCRFTGCNLWSGRERDRATSQCTFCDTDFVGTDGQNGGQFADAAALASHLECLWPTSVSGRHRRYVVFTGGEPLLQLDTALIETMHARGFEIAVETNGTLPAPLGIDWICVSPKSDNALRQTRGDELKLVHPQAGIDPETFAELDFTHFFLQPMDLAPGAIVSDASPMEATVDYCMRHPQWRLSLQTHKIAGID

SEQ ID NO: 33894 - protein, 210 aa, Salinimicrobium catena
  misc_feature (1)..(210): tr|A0A1H5NG05|A0A1H5NG05_9FLAO 7-carboxy-7-deazaguanine synthase OS=Salinimicrobium catena OX=390640 GN=queE P E=3 SV=1
MKENEINELVAAGEMLPLMEEFYTIQGEGYHKGTAAYFVRIGGCDVGCHWCDVKESWNAKLHPPTEVDRIVENAVKYSKTVVVTGGEPLTWDMTKLTSGLKAKGAKIHIETSGAYPLTGIWDWICLSPKKIKLPTETVYKKANELKVIIFNKHDFKFAEEQAARVNEDCILYLQPEWSNREKMIPLIVDYVMQNPKWKVSLQTHKYLNIP

SEQ ID NO: 33895 - protein, 210 aa, Salinimicrobium sediminis
  misc_feature (1)..(210): tr|A0A285X694|A0A285X694_9FLAO 7-carboxy-7-deazaguanine synthase OS=Salinimicrobium sediminis OX=1343891 GN=qu eE PE=3 SV=1
MNEQEVNALVERGEMLPLMEDFYTIQGEGFHKGTAAYFIRIGGCDVGCHWCDVKESWNAKLHPPTGVDQIVEKALKSSKTIVVTGGEPLTWNMEPLTSRLKARGAKIHIETSGAYPMTGTWDWICLSPKKIKLPTPEIYEVADELKVIVFNKHDFQFAEEQAAKVNRNCILYLQPEWSNREKMMPLIVDYVMQNPQWKVSLQTHKYLNIP

SEQ ID NO: 33896 - protein, 226 aa, Salinimonas sediminis
  misc_feature (1)..(226): tr|A0A346NK29|A0A346NK29_9ALTE 7-carboxy-7-deazaguanine synthase OS=Salinimonas sediminis OX=2303538 GN=queE P E=3 SV=1
MTTQQLSINEVFETIQGEGFHTGVPAIFLRLQGCPVGCPWCDTKHTWTLDDAFLTTAEAVVEKPQESEAYFDADENAVLALFEQLKYTAKHVVITGGEPCMYDLIPLTRLLHQHGYSTQIETSGTYEVKCDDDTWVTVSPKVDMKGGMPVLTSALQRANEIKHPVAMERHVEELDALLARLGGQLPAHICLQPISQQQRATDLVIKTCIERNWRLSLQTHKYIGIE

SEQ ID NO: 33897 - protein, 215 aa, Salinimonas sp.
  misc_feature (1)..(215): tr|A0A5B7YI29|A0A5B7YI29_9ALTE 7-carboxy-7-deazaguanine synthase OS=Salinimonas sp. KX18D6 OX=2572577 GN=queE PE=3 SV=1
MFETIQGEGVYTGVPSIFIRLQGCPVGCPWCDTKHTWTLDDAFLTTSDNVITKTKESEAFFNTDGQSILTLFSQQGYKAKHIVITGGEPCMYDLTEVTSLLHDNGYSTQIETSGTYEVRCAPETWVTVSPKVDMKGGLPVLESALNRANEIKHPVAMQKHIEELDALLAKLDKPCSHVCLQPISQQERATELAIKTCIARNWRLSLQTHKYIGIE

SEQ ID NO: 33898 - protein, 223 aa, Saliniradius amylolyticus
  misc_feature (1)..(223): tr|A0A2S2E1D2|A0A2S2E1D2_9ALTE 7-carboxy-7-deazaguanine synthase OS=Saliniradius amylolyticus OX=2183582 GN=qu eE PE=3 SV=1
MSLKLNEVFESIQGEGAYTGVPSIFVRLQGCPVGCPWCDTQHTWSVDLEDKRSEQQVMKESGDSRHWFSSDAEQLMALFKRQGYQARHVVLTGGEPAMYDLRDLTQTLHQHGFSTQIETSGTFELQISPETWVTLSPKVDMKGGYPVLDSVLAVAHEIKHPVAMERHVEELKALLARPATNLDALVYLQPISQQKRATELAIRTCIAENWRLSLQTHKFIGIE

SEQ ID NO: 33899 - protein, 213 aa, Salinisphaera halophila
  misc_feature (1)..(213): tr|A0A423PMA4|A0A423PMA4_9GAMM 7-carboxy-7-deazaguanine synthase OS=Salinisphaera halophila YIM 95161 OX=10511 39 GN=queE PE=3 SV=1
MDALRITEIFCSLQGEARDAGALTTFVRLTGCPLRCHYCDTAYAFSGGDWMPLDAIIQRVRSLGARQVCVTGGEPLAQPNCAALVGRLCDAGYRVSVETAGALDIRAVDSRASRVVDIKTPDSGEAARNRWDNIEALTDHDQLKFVICSRADYVWARDRVAELHLPAGCDVWFSPSSEQMPARDLADWIVADRLPVRFQLQLHKQLWGEAPGR

SEQ ID NO: 33900 - protein, 238 aa, Salinisphaera hydrothermalis
  misc_feature (1)..(238): tr|A0A084IKJ6|A0A084IKJ6_SALHC 7-carboxy-7-deazaguanine synthase OS=Salinisphaera hydrothermalis (strain C41B8 ) OX=1304275 GN=queE PE=3 SV=1
MPDVLDVRSDGLRRDGVRESRWPQREDALRITEIFCSLQGEAKAAGRVCTFIRLTGCPLRCHYCDTAYAFHGGEWTRLDEIINQVEAFGARDVCVTGGEPLAQPNVAPLVRRLCDAGYDVSVETAGALDIRPIDERASRVVDIKTPDSGEAARNRWDNIAALTDHDQLKFVICSRADYEWSKARLAEITPPAGCIVWFSPSHGEITARDLADWIVADRLPVRFQLQLHKQLWGDAPGH

SEQ ID NO: 33901 - protein, 233 aa, Salinisphaera japonica
  misc_feature (1)..(233): tr|A0A423PLX1|A0A423PLX1_9GAMM 7-carboxy-7-deazaguanine synthase OS=Salinisphaera japonica YTM-1 OX=1209778 GN =queE PE=3 SV=1
MDRASARRLDGISDSRWAERIDALRITEIFCSLQGEANDAGRVCTFVRLTGCPLRCHYCDTAYAFQGGEWQKIDAIIEQIKAFGAHHVCVTGGEPLAQPNAVPLIARLCDAGYAVSVETAGALDIRPVDTRASRVVDIKTPASGEATRNRWDNIEVLTGHDQLKFVICSRADYEWARARLGEIDVPAGCTVWFSPSAGEITARGLADWIVADRLPVKFQMQLHKLLWGDAPGY

SEQ ID NO: 33902 - protein, 237 aa, Salinisphaera orenii
  misc_feature (1)..(237): tr|A0A423PJU8|A0A423PJU8_9GAMM 7-carboxy-7-deazaguanine synthase OS=Salinisphaera orenii MK-B5 OX=856730 GN=qu eE PE=3 SV=1
MPVALSPGAGAARAPRAAGRRPERVDALRITEIFCSLQGEARDAGALTTFVRLTGCPLRCHYCDTAYAFSGGDWMPLDAIMQRVRTLEARHVCVTGGEPLAQPNCAALVGRLCNAGYRVSVETAGALDIRAVDSRASRVVDIKTPDSGEAARNRWDNIEALTGHDQLKFVICSRADYVWARDRVAELQLPAGCDVWFSPSSEQMPARDLADWIVADRLPVRFQLQLHKQLWGEAPGR

SEQ ID NO: 33903 - protein, 240 aa, Salinisphaera shabanensis
  misc_feature (1)..(240): tr|U2FZA9|U2FZA9_9GAMM 7-carboxy-7-deazaguanine synthas e OS=Salinisphaera shabanensis E1L3A OX=1033802 GN=queE PE=3 SV=1
MLFKDVDESHEPCFASEAQESGEGLCAMSYSVKEMFLTLQGEGAQTGRASLFCRFSGCNLWTGREKDRDKAICQFCDTDFVGVDGPGGGRFKTAQALAERAAQIWRETANAGGTPYIVCTGGEPLLQLDNALIDALHAVGFEIAVETNGTLKAPPSIDWICVSPKAGSTLVQTHGNELKLVWPQPAFALEQFEALDFERFYLQPMDGPVREANVARCIDTALRRPQWRLSLQTHKMIGIA

SEQ ID NO: 33904 - protein, 213 aa, Salinisphaera sp.
  misc_feature (1)..(213): tr|A0A2E9AH56|A0A2E9AH56_9GAMM 7-carboxy-7-deazaguanine synthase OS=Salinisphaera sp. OX=1914330 GN=queE PE=3 SV=1
MSYAVKEMFLTLQGEGAQTGRASLFCRFAGCNLWSGREKDRGHAICQFCDTDFVGVDGPGGGRFKNAEALAERAREIWDETANQGGTPYIVCTGGEPLLQLDDSLIDALHAVGFEIAVETNGTLKASPAIDWVCVSPKAGSTLVQTHGNELKLVWPQPGFTLEQFETLAFERFYLQPMDGPAREANVATCIETALGRPQWRLSLQTHKMIGIA

SEQ ID NO: 33905 - protein, 255 aa, Salinisphaera sp.
  misc_feature (1)..(255): tr|A0A3A5J7B9|A0A3A5J7B9_9GAMM 7-carboxy-7-deazaguanine synthase OS=Salinisphaera sp. Q1T1-3 OX=2321229 GN=que E PE=3 SV=1
MRPVRPRPNSTRSAADQAVSDIIDADRRRNTRGVAESRWPQRVDALRITEIFCSLQGEANGAGRVCTFIRLTGCPLRCHYCDTAYAFHGGEWMPLDAIVARAEALGATDICVTGGEPLAQPNVIPLVARLCDAGYAVSVETAGALDIRSIDTRASRVVDIKTPGSGEDRRNRWDNIEALTDHDQLKFVICSRADYEWARDTWRGLSLPAGATVWFSPSAGEITARDLADWIVADRIDVRFQLQLHKLLWGDAPGH

SEQ ID NO: 33906 - protein, 210 aa, Salinisphaeraceae bacterium
  misc_feature (1)..(210): tr|A0A2D4SFT4|A0A2D4SFT4_9GAMM 7-carboxy-7-deazaguanine synthase OS=Salinisphaeraceae bacterium OX=2026789 GN= queE PE=3 SV=1
MRVTEVFLSLQGEARAAGLPTVFVRLTGCPLRCHYCDTAYAFHGGERQSVDSLLQRIRDHGVADVCVTGGEPLAQPGASLLIRSLCDAGFSVAVETSGVLNIDRADRRASRIMDLKTPASGELKRNDYGNIERLTGHDQVKFVVCDRADFDWACMQIREHGLTDRCPVWLSPSHGQLEAAQLAEWLIDSRLPVRLQLQLHKQLWGNEPGR

SEQ ID NO: 33907 - protein, 239 aa, Salinispora arenicola
  misc_feature (1)..(239): tr|A0A542XMM9|A0A542XMM9_9ACTN 7-carboxy-7-deazaguanine synthase OS=Salinispora arenicola OX=168697 GN=queE PE =3 SV=1
MVTAMAQARAAGDLLVTEMFGPTVQGEGPSIGRRAVFVRLSGCHLSCSWCDTAYTWDTTRYNLDEHRRQAPVADILTWVRASGADMVVLTGGEPLLQQAALVNLAGPLYRSGIRVEVETSGTVAPSRRLLVSVTAFNVSPKLANSGVAERARLRPPALGAMVASGKATFKFVAVGRRDLDEIAELERTYSLTPIWVMPEGRTPDEVLRRARDLADDVISRGWNLSTRLHVLLWGDQRGR

SEQ ID NO: 33908 - protein, 221 aa, Salinivibrio kushneri
  misc_feature (1)..(221): tr|A0A4P8H5A2|A0A4P8H5A2_9GAMM 7-carboxy-7-deazaguanine synthase OS=Salinivibrio kushneri OX=1908198 GN=queE P E=3 SV=1
MYRVNEIFETIQGEGTFTGVPSVFVRLQGCPVGCAWCDTKQTWETDEKDRKDKIFIIDKSEDSPAWCWLSADAITADILSRYHARHIVITGGEPCLYDLKPLTHALEAAGCQCQIETSGTYPIEASANTWVTVSPKINMRGKLPVLKEAMARANEVKHPVGTEKDIDQLDALLTTCPPPDTATIALQPVSQKARATQLCIDTCIQRGWRLSIQTHKYLAIA

SEQ ID NO: 33909 - protein, 221 aa, Salinivibrio kushneri
  misc_feature (1)..(221): tr|A0A1V3GH14|A0A1V3GH14_9GAMM 7-carboxy-7-deazaguanine synthase OS=Salinivibrio kushneri OX=1908198 GN=queE P E=3 SV=1
MYRVNEIFETIQGEGTFTGVPSVFVRLQGCPVVCAWCDTKQTWETDDKDQKDKIFIIDKSEDSPAWCWLSADAIATDILSRYHARHIVITGGEPCLYDLRPLTHALEAAGCQCQIETSGTYPVEASTNTWVTVSPKINMRGKLPVLKEAMARANEVKHPVGTEKDIDQLDALLADCPAPETATIALQPVSQKARATQLCIDTCIQRGWRLSIQTHKYLAIA

SEQ ID NO: 33910 - protein, 221 aa, Salinivibrio sharmensis
  misc_feature (1)..(221): tr|A0A1V3H0V7|A0A1V3H0V7_9GAMM 7-carboxy-7-deazaguanine synthase OS=Salinivibrio sharmensis OX=390883 GN=queE PE=3 SV=1
MYRVNEIFETIQGEGTFTGVPSVFVRLQGCPVGCAWCDTKQTWETDEKDQKDKIFIIDKSEDSPAWCWLSADAIVADILNRYHARHIVITGGEPCLYDLRPLTHALEAAGCQCQIETSGTYPVEASANTWVTVSPKINMRGKLPVLKEAMARANEVKHPVGTEKDIDQLDALLADCPPADTATIALQPVSQKARATQLCIDTCIQRGWRLSIQTHKYLAIA

SEQ ID NO: 33911 - protein, 221 aa, Salinivibrio sp.
  misc_feature (1)..(221): tr|A0A1V3I3C8|A0A1V3I3C8_9GAMM 7-carboxy-7-deazaguanine synthase OS=Salinivibrio sp. IB872 OX=1766123 GN=queE PE=3 SV=1
MYRVNEIFETIQGEGTFTGVPSVFVRLQGCPVGCAWCDTKQTWETDDNDQQDKIFIIDKSEDSPAWCWLSAKDIATEITQRYQAKHIVITGGEPCLYDLVPLTEALEAVGCQCQIETSGTYEVKASPQTWVTVSPKINMRGKLPVLASAMARANEIKHPVGTEKDIAQLDILLEHCPPSPKATIALQPVSQKPRATKLCIDTCIARGWRLSIQTHKYLNIA

SEQ ID NO: 33912 - protein, 221 aa, Salinivibrio sp.
  misc_feature (1)..(221): tr|A0A0F5ASQ3|A0A0F5ASQ3_9GAMM 7-carboxy-7-deazaguanine synthase OS=Salinivibrio sp. KP-1 OX=1406902 GN=queE P E=3 SV=1
MYRVNEIFETIQGEGTFTGVPSVFVRLQGCPVGCAWCDTKQTWETDEKDQKDKIFIIDKSEDSPAWCWLDGNAITADILSRYHARHIVITGGEPCLYDLRPLTHALEAAGCQCQIETSGTYPIHASANTWVTVSPKIHMRGKLPVLKEAMARANEVKHPVGTEKDIDQLDALLATCPPADTATIALQPVSQKARATQLCIDTCIQRGWRLSIQTHKYLSIA

SEQ ID NO: 33913 - protein, 217 aa, Salinivirga cyanobacteriivorans
  misc_feature (1)..(217): tr|A0A0S2HXL6|A0A0S2HXL6_9BACT 7-carboxy-7-deazaguanine synthase OS=Salinivirga cyanobacteriivorans OX=1307839 GN=queE PE=3 SV=1
MAKSQKSYQKVDLKLLEGGKKLPLVESFYSIQGEGHHTGKPAYFIRVGGCDIACHWCDSKISWNADMHPLVSVDEIVNQVLNTPARSVVVTGGEPAMYPLNPLSTLIRRNNISNFLESSGAYEITGQWDWICISPKHNKHPLKQNLERADELKIVIFSQSDFDFAEQWKKEVSADCKLLLQPEYSQFKKMAPLMVEYVKAHPEWNISLQSHKYLDIP

SEQ ID NO: 33914 - protein, 216 aa, Salinivirgaceae bacterium
  misc_feature (1)..(216): tr|A0A2N5ZVM5|A0A2N5ZVM5_9BACT 7-carboxy-7-deazaguanine synthase OS=Salinivirgaceae bacterium OX=2053305 GN=qu eE PE=3 SV=1
MVSKELYTRVDKSITQNGINLPLVEEFYSIQGEGYHSGKAAYFIRVGGCDIACHWCDSKLSWNAKLHPLVSIEDIVSKVLETPAQSVVVTGGEPGIYNLEPLSNLLRKNKINNFLETSGAYKLSGEWDWICLSPKKNKEPLTENLQLAHELKVVIFDDTDFEFAEKWKSQVNEDCKLLLQPEYSQFDKMAPKMVEYVKNNPDWNISLQSHKYLNIP

SEQ ID NO: 33915 - protein, 242 aa, Salipaludibacillus aurantiacus
  misc_feature (1)..(242): tr|A0A1H9SA88|A0A1H9SA88_9BACI 7-carboxy-7-deazaguanine synthase OS=Salipaludibacillus aurantiacus OX=1601833 GN=queE PE=3 SV=1
MSKLPVLEVFGPTIQGEGMVVGQKTMFVRTAGCDYSCSWCDSAFTWDGSAKDEIIQMTPEEVWERLNCLAPGNFSHVTVSGGNPALLKNLDGLLDIFEANGVAAALETQGSVWQDWFLRIQDLTLSPKPPSSLMKTNFEVLDDIITRLMDAGRLANMSLKVVIFDDKDFNYAKDVHLRYPAVPFYLQVGNDDTATENNENLTKKLLDKYEWLTDKTAADKDLNNVRVLPQLHTLLWGNKRGV

SEQ ID NO: 33916 - protein, 242 aa, Salipaludibacillus keqinensis
  misc_feature (1)..(242): tr|A0A323TIW3|A0A323TIW3_9BACI 7-carboxy-7-deazaguanine synthase OS=Salipaludibacillus keqinensis OX=2045207 G N=queE PE=3 SV=1
MNKFPILEIFGPTIQGEGMVIGQKTMFVRTAGCDYSCAWCDSAFTWDGSAKDDIVSMTASDIWEKLNELAKGNFSHVTISGGNPALLKNLQEFVKILNDNQIRIALETQGSVWQDWFLTIDDLTISPKPPSSKMVTDFQVLDKIISRLEDGGRKAHISLKVVVFDNKDYEYAKMVARRYSNIQMFLQVGNDDLSTIDDAELTYKLLNKYEWLTDKTMADSELADVKVLPQLHTLLWGNKRGV

SEQ ID NO: 33917 - protein, 242 aa, Salipaludibacillus neizhouensis
  misc_feature (1)..(242): tr|A0A3A9KIB8|A0A3A9KIB8_9BACI 7-carboxy-7-deazaguanine synthase OS=Salipaludibacillus neizhouensis OX=885475 GN=queE PE=3 SV=1
MSKIPVLEIFGPTIQGEGMVIGKKTMFIRTAGCDYSCVWCDSAFTWDGSAKNDIVQMSAEEIWLKLKETGNDRFSHVTISGGNPALLRHLDKVIHLLKENNISIALETQGSRWQDWFLHIDDLTISPKPPSSEMKTDYTVLDHIIKQLKDSNRFPNTSLKVVIFNDEDLLYAKGITKRYPLLPLYLQVGNEDVSTENTTKLTEVLLHHYEDLIDKVVSDKELNEARVLPQLHTLVWGNKRGV

SEQ ID NO: 33918 - protein, 235 aa, Salipiger thiooxidans
  misc_feature (1)..(235): tr|A0A1G7FJ94|A0A1G7FJ94_9RHOB 7-carboxy-7-deazaguanine synthase OS=Salipiger thiooxidans OX=282683 GN=queE PE =3 SV=1
MSLRIAEIFGPTIQGEGALIGEPTVFVRTGGCDYRCSWCDSLHAVESRYRDTWAAMSDEAVWDEVLRLSGGQPLTVSLSGGNPAIQDFAPVIARGRAAGYRFACETQGSVARPWFAELDTLVLSPKPPSSGETVDWDAFAACVRAGSAARQTVMKIVIFDGTDYAWARDAHARHPELPLYLQPGNPEVDPETPVDPQALADRLGWLVERTMADTWFTPRILPQLHVLIWGNKRGV

SEQ ID NO: 33919 - protein, 242 aa, Salisediminibacterium haloalkalitolerans
  misc_feature (1)..(242): tr|A0A1H9T7S0|A0A1H9T7S0_9BACI 7-carboxy-7-deazaguanine synthase OS=Salisediminibacterium haloalkalitolerans O X=1464123 GN=queE PE=3 SV=1
MSKLPVLEVFGPTIQGEGMVTGQKTMFVRTAGCDYACSWCDSAFTWDGSAKDGIKQMTPEQIWQSLKEAGGSRFSHVTISGGNPALYPQMGDFVRLLHEERIDVALETQGSRWQDWFVEVDDLTLSPKPPSSNMTADFEKLDLIVARLIDAGRQAHVSQKIVVFDEADYDFAKQAAKRYPQLDTYLQTGNPDVETADDEKLRTDLLSRYEALIDRVMADEEMNDVRVLPQLHTLLWGNMRGV

SEQ ID NO: 33920 - protein, 223 aa, Salmonella abony
  misc_feature (1)..(223): tr|A0A5H6T3N4|A0A5H6T3N4_SALAB 7-carboxy-7-deazaguanine synthase QueE OS=Salmonella abony OX=29482 GN=queE PE= 4 SV=1
MQYPINEMFQTLQGEGYFTGVPAIFIRLQGCPVGCAWCDTKHTWDKLSDREVSLFSILAKTKESDKWGAASSEDLLAVINRQGYTARHVVITGGEPCIHDLMPLTDLLEKSGFSCQIETSGTHEVRCTPNTWVTVSPKVNMRGGYDVLSQALERANEIKHPVGRVRDIEALDELLATLSDDKPRVIALQPISQKEDATRLCIETCIARNWRLSMQTHKYLNIA

SEQ ID NO: 33921 - protein, 223 aa, Salmonella agona; identical to SEQ ID NO: 33920
  misc_feature (1)..(223): tr|B5F4N8|B5F4N8_SALA4 7-carboxy-7-deazaguanine synthas e OS=Salmonella agona (strain SL483) OX=454166 GN=queE PE=3 SV=1

SEQ ID NO: 33922 - protein, 223 aa, Salmonella anatum
  misc_feature (1)..(223): tr|A0A3Y5SEK2|A0A3Y5SEK2_SALAN 7-carboxy-7-deazaguanine synthase OS=Salmonella anatum OX=58712 GN=queE PE=3 SV =1
MQYPINEMFQTLQGEGYFTGVPAIFIRLQGCPVGCAWCDTKHTWDKLSDREVSLFSILAKTKESDKWGAASSEDLLAVINRQDYTARHVVITGGEPCIHDLMPLTDLLEKSGFSCQIETSGTHEVRCTPNTWVTVSPKVNMRGGYDVLSQALERANEIKHPVGRVRDIEALDELLATLSDDKPRVIALQPISQKEDATRLCIETCIARNWRLSMQTHKYLNIA

SEQ ID NO: 33923 - protein, 223 aa, Salmonella anatum; identical to SEQ ID NO: 33920
  misc_feature (1)..(223): tr|A0A2T8MKW2|A0A2T8MKW2_SALAN 7-carboxy-7-deazaguanine synthase OS=Salmonella anatum OX=58712 GN=queE PE=3 SV =1

SEQ ID NO: 33924 - protein, 223 aa, Salmonella arizonae
  misc_feature (1)..(223): tr|A9MF14|A9MF14_SALAR 7-carboxy-7-deazaguanine synthas e OS=Salmonella arizonae (strain ATCC BAA-731 / CDC346- 86 / RSK2980) OX=41514 GN=queE PE=3 SV=1
MQYPINEMFQTLQGEGYFTGVPAIFIRLQGCPVGCAWCDTKHTWDKLSDREVSLYSILAKTKESDKWGAASSEDLLTVINRQDYTARHVVITGGEPCIHDLMPLTDLLEKSGFSSQIETSGTHEVLCTPNTWVTVSPKVNMRGGYDVLTQALERANEIKHPVGRIRDIEALDELLATLSDDKPRVIALQPISQKEDATRLCIETCIARNWRLSMQTHKYLNIA

SEQ ID NO: 33925 - protein, 223 aa, Salmonella berta; identical to SEQ ID NO: 33920
  misc_feature (1)..(223): tr|A0A3U8PA49|A0A3U8PA49_SALBE 7-carboxy-7-deazaguanine synthase OS=Salmonella berta OX=28142 GN=queE PE=3 SV= 1

SEQ ID NO: 33926 - protein, 223 aa, Salmonella blockley; identical to SEQ ID NO: 33920
  misc_feature (1)..(223): tr|A0A5H8H837|A0A5H8H837_SALBL 7-carboxy-7-deazaguanine synthase QueE OS=Salmonella blockley OX=57741 GN=queE PE=4 SV=1

SEQ ID NO: 33927 - protein, 223 aa, Salmonella bongori
  misc_feature (1)..(223): tr|A0A248K783|A0A248K783_SALBN 7-carboxy-7-deazaguanine synthase OS=Salmonella bongori serovar 66:z41:- str. S A19983605 OX=1243617 GN=queE PE=3 SV=1
MQYPINEMFQTLQGEGYFTGVPAIFIRLQGCPVGCAWCDTKHTWDKLEDREVSLYSILAKTKESDKWGAASSEDLLAVISRQGYTARHVVITGGEPCIHDLMPLTSLLEKNGFSCQIETSGTHEVRCTPNTWVTVSPKVNMRGGYGVLYQALERANEIKHPVGRVRDIEALDELLATLSDDKPRVIALQPISQKEDATRLCIDTCIARNWRLSMQTHKYLNIA

SEQ ID NO: 33928 - protein, 223 aa, Salmonella bongori; identical to SEQ ID NO: 33927
  misc_feature (1)..(223): tr|A0A5I6MQD6|A0A5I6MQD6_SALBN 7-carboxy-7-deazaguanine synthase QueE OS=Salmonella bongori CFSAN000510 OX=129 9282 GN=queE PE=4 SV=1

SEQ ID NO: 33929 - protein, 223 aa, Salmonella choleraesuis
  misc_feature (1)..(223): tr|Q57KH2|Q57KH2_SALCH 7-carboxy-7-deazaguanine synthas e OS=Salmonella choleraesuis (strain SC-B67) OX=321314 GN=ygcF PE=3 SV=1
MQYPINEMFQTLQGEGYFTGVPAIFIRLQGCPVGCAWCDTKHTWDKLSDREVSLFSILAKTKESDKWGAASSEDLLAVINRQGYTARHVVITGGEPCIHDLMPLTDLLEKSGFSCQIETSGTHEVRCTPNTWVTVSPKVNMRGGYDVLSQALERANEIKHPVGRVRDIEALGELLATLSDDKPRVIALQPISQKEDATRLCIETCIARNWRLSMQTHKYLNIA

SEQ ID NO: 33930 - protein, 223 aa, Salmonella derby; identical to SEQ ID NO: 33920
  misc_feature (1)..(223): tr|A0A3W0AR70|A0A3W0AR70_SALDE 7-carboxy-7-deazaguanine synthase OS=Salmonella derby OX=28144 GN=queE PE=3 SV= 1

SEQ ID NO: 33931 - protein, 223 aa, Salmonella diarizonae
  misc_feature (1)..(223): tr|A0A2I5HCV2|A0A2I5HCV2_SALDZ 7-carboxy-7-deazaguanine synthase OS=Salmonella diarizonae OX=59204 GN=queE PE= 3 SV=1
MQYPINEMFQTLQGEGYFTGVPAIFIRLQGCPVGCAWCDTKHTWDKLSDREVSLYSILAKTKESDKWGAASSEDLLAVINRQGYTARHVVITGGEPCIHDLMPLTDLLEKNGFSCQIETSGTHEVRCTPNTWVTVSPKVNMRGGYDVLSQALERANEIKHPVGRVRDIEALDELLATLSDDKPRVIALQPISQKEDATRLCIETCIARNWRLSMQTHKYLNIA

SEQ ID NO: 33932 - protein, 223 aa, Salmonella dublin; identical to SEQ ID NO: 33920
  misc_feature (1)..(223): tr|A0A3T3IFP5|A0A3T3IFP5_SALDU 7-carboxy-7-deazaguanine synthase OS=Salmonella dublin OX=98360 GN=queE PE=3 SV =1

SEQ ID NO: 33933 - protein, 145 aa, Salmonella enterica
  misc_feature (1)..(145): tr|A0A379XLK1|A0A379XLK1_SALER 7-carboxy-7-deazaguanine synthase OS=Salmonella enterica subsp. indica OX=59207 GN=queE_1 PE=3 SV=1
MQYPINEMFQTLQGEGYFTGVPAIFIRLQGCPVGCAWCDTKHTWDKLSDREVSLFSILAKTKESDKWGAASSEDLVAVINRQSYTARHVVITGGEPCIHDLMPLTDLLEKSGFSCQIETSGTHEVRCTPNTWVTVSPKVNMRGGI

SEQ ID NO: 33934 - protein, 223 aa, Salmonella enterica; identical to SEQ ID NO: 33920
  misc_feature (1)..(223): tr|A0A402MZM9|A0A402MZM9_SALET 7-carboxy-7-deazaguanine synthase OS=Salmonella enterica subsp. enterica serova r Braenderup str. CFSAN001740 OX=1299119 GN=queE PE=3 S V=1

SEQ ID NO: 33935 - protein, 223 aa, Salmonella enteritidis; identical to SEQ ID NO: 33931
  misc_feature (1)..(223): tr|A0A403FDY3|A0A403FDY3_SALEN 7-carboxy-7-deazaguanine synthase OS=Salmonella enteritidis OX=149539 GN=queE P E=3 SV=1

SEQ ID NO: 33936 - protein, 223 aa, Salmonella enteritidis; identical to SEQ ID NO: 33920
  misc_feature (1)..(223): tr|A0A2R4HMN7|A0A2R4HMN7_SALEN 7-carboxy-7-deazaguanine synthase OS=Salmonella enteritidis OX=149539 GN=queE P E=3 SV=1

SEQ ID NO: 33937 - protein, 223 aa, Salmonella gallinarum; identical to SEQ ID NO: 33920
  misc_feature (1)..(223): tr|B5RDS4|B5RDS4_SALG2 7-carboxy-7-deazaguanine synthas e OS=Salmonella gallinarum (strain 287/91 / NCTC 13346) OX=550538 GN=ygcF PE=3 SV=1

SEQ ID NO: 33938 - protein, 223 aa, Salmonella gallinarum; identical to SEQ ID NO: 33920
  misc_feature (1)..(223): tr|A0A3V9NUF6|A0A3V9NUF6_SALGL 7-carboxy-7-deazaguanine synthase OS=Salmonella gallinarum OX=594 GN=queE PE=3 SV=1

SEQ ID NO: 33939 - protein, 223 aa, Salmonella hadar; identical to SEQ ID NO: 33920
  misc_feature (1)..(223): tr|A0A3V2W3S3|A0A3V2W3S3_SALHA 7-carboxy-7-deazaguanine synthase OS=Salmonella hadar OX=149385 GN=queE PE=3 SV =1

SEQ ID NO: 33940 - protein, 145 aa, Salmonella houtenae
  misc_feature (1)..(145): tr|A0A484VQV9|A0A484VQV9_SALHO 7-carboxy-7-deazaguanine synthase OS=Salmonella houtenae OX=59205 GN=queE_1 PE= 3 SV=1
MQYPINEMFQTLQGEGYFTGVPAIFIRLQGCPVGCAWCDTKHTWDKLEDREVSLYSILAKTKESDKWGAASSEDLLAVIQRQGYTARHVVITGGEPCIHDLMPLTSLLEKNGFSCQIETSGTHEVRCTPNTWGDRITEGEYARWL

SEQ ID NO: 33941 - protein, 83 aa, Salmonella houtenae
  misc_feature (1)..(83): tr|A0A484VQX8|A0A484VQX8_SALHO Queuosine Biosynthesis Q ueE Radical SAM OS=Salmonella houtenae OX=59205 GN=queE _2 PE=4 SV=1
MRGGYNVLSQALERANEIKHPVGRVRDIEALDELLATLSDDKLRVIALQPISQKEDATRLCIETCIARNWRLSMQTHKYLNIA

SEQ ID NO: 33942 - protein, 223 aa, Salmonella infantis; identical to SEQ ID NO: 33929
  misc_feature (1)..(223): tr|A0A3W0HP89|A0A3W0HP89_SALIN 7-carboxy-7-deazaguanine synthase OS=Salmonella infantis OX=595 GN=queE PE=3 SV =1

SEQ ID NO: 33943 - protein, 223 aa, Salmonella infantis; identical to SEQ ID NO: 33920
  misc_feature (1)..(223): tr|A0A3R0DGR9|A0A3R0DGR9_SALIN 7-carboxy-7-deazaguanine synthase OS=Salmonella infantis OX=595 GN=queE PE=3 SV =1

SEQ ID NO: 33944 - protein, 223 aa, Salmonella montevideo; identical to SEQ ID NO: 33922
  misc_feature (1)..(223): tr|A0A3U8JHI9|A0A3U8JHI9_SALMO 7-carboxy-7-deazaguanine synthase OS=Salmonella montevideo OX=115981 GN=queE PE =3 SV=1

SEQ ID NO: 33945 - protein, 223 aa, Salmonella montevideo
  misc_feature (1)..(223): tr|A0A3V6QIX3|A0A3V6QIX3_SALMO 7-carboxy-7-deazaguanine synthase OS=Salmonella montevideo OX=115981 GN=queE PE =3 SV=1
MQYPINEMFQTLQGEGYFTGVPAIFIRLQGCPVGCAWCDTKHTWDKLSDREVSLFSILAKTKESDKWGAASSEDLLAVINRQGYTARHVVITGGEPCIHDLMPLTDLLEKSGFSCQIETSGTHEVCCTPNTWVTVSPKVNMRGGYDVLSQALERANEIKHPVGRVRDIEALDELLATLSDDKPRVIALQPISQKEDATRLCIETCIARNWRLSMQTHKYLNIA

SEQ ID NO: 33946 - protein, 223 aa, Salmonella moscow; identical to SEQ ID NO: 33920
  misc_feature (1)..(223): tr|A0A5H7LHV4|A0A5H7LHV4_SALMC 7-carboxy-7-deazaguanine synthase QueE OS=Salmonella moscow OX=28146 GN=queE PE =4 SV=1

SEQ ID NO: 33947 - protein, 223 aa, Salmonella muenchen; identical to SEQ ID NO: 33920
  misc_feature (1)..(223): tr|A0A3T3ESY7|A0A3T3ESY7_SALMU 7-carboxy-7-deazaguanine synthase OS=Salmonella muenchen OX=596 GN=queE PE=3 SV =1

SEQ ID NO: 33948 - protein, 223 aa, Salmonella muenster; identical to SEQ ID NO: 33920
  misc_feature (1)..(223): tr|A0A5J1ARD3|A0A5J1ARD3_SALMS 7-carboxy-7-deazaguanine synthase QueE OS=Salmonella muenster OX=82689 GN=queE PE=4 SV=1

SEQ ID NO: 33949 - protein, 223 aa, Salmonella muenster; identical to SEQ ID NO: 33922
  misc_feature (1)..(223): tr|A0A5I7TMW2|A0A5I7TMW2_SALMS 7-carboxy-7-deazaguanine synthase QueE OS=Salmonella muenster OX=82689 GN=queE PE=3 SV=1

SEQ ID NO: 33950 - protein, 223 aa, Salmonella newport; identical to SEQ ID NO: 33920
  misc_feature (1)..(223): tr|A0A0H3BP81|A0A0H3BP81_SALNS 7-carboxy-7-deazaguanine synthase OS=Salmonella newport (strain SL254) OX=42336 8 GN=queE PE=3 SV=1

SEQ ID NO: 33951 - protein, 223 aa, Salmonella newport; identical to SEQ ID NO: 33920
  misc_feature (1)..(223): tr|A0A0R9MWK4|A0A0R9MWK4_SALNE 7-carboxy-7-deazaguanine synthase OS=Salmonella newport OX=108619 GN=queE PE=3 SV=1

SEQ ID NO: 33952 - protein, 223 aa, Salmonella oranienberg
  misc_feature (1)..(223): tr|A0A5H6QZE1|A0A5H6QZE1_SALON 7-carboxy-7-deazaguanine synthase QueE OS=Salmonella oranienberg OX=28147 GN=qu eE PE=4 SV=1
MQYPINEMFQTLQGEGYFTGVPAIFIRLQGCPVGCAWCDTKHTWDKLSDREVSLFSILAKTKESDKWGAASSEDLLAVINRQGYTARHVVITGGEPCIHDLMSLTDLLEKSGFSCQIETSGTHEVCCTPNTWVTVSPKVNMRGGYDVLSQALERANEIKHPVGRVRDIEALDELLATLSDDKPRVIALQPISQKEDATRLCIETCIARNWRLSMQTHKYLNIA

SEQ ID NO: 33953 - protein, 223 aa, Salmonella oranienberg; identical to SEQ ID NO: 33920
  misc_feature (1)..(223): tr|A0A3W0KE55|A0A3W0KE55_SALON 7-carboxy-7-deazaguanine synthase OS=Salmonella oranienberg OX=28147 GN=queE PE =3 SV=1

SEQ ID NO: 33954 - protein, 223 aa, Salmonella paratyphi; identical to SEQ ID NO: 33920
  misc_feature (1)..(223): tr|C0PXD4|C0PXD4_SALPC 7-carboxy-7-deazaguanine synthas e OS=Salmonella paratyphi C (strain RKS4594) OX=476213 GN=ygcF PE=3 SV=1

SEQ ID NO: 33955 - protein, 223 aa, Salmonella paratyphi
  misc_feature (1)..(223): tr|A0A5I3QQV8|A0A5I3QQV8_SALPT 7-carboxy-7-deazaguanine synthase QueE OS=Salmonella paratyphi A OX=54388 GN=qu eE PE=4 SV=1
MQYPINEMFQTLQGEGYFTGVPAIFIRLQGCPVGCAWCDTKHTWDKLSDREVSLYSILAKIKESDKWGAASSEDLLAVINRQGYTARHVVITGGEPCIHDLMPLTDLLEKSGFSCQIETSGTHEVRCTPNTWVTVSPKVNMRGGYNVLSQALERANEIKHPVGRVRDIEALDELLATLSDDKPRVIALQPISQKEDATRLCIETCIARNWRLSMQTHKYLNIA

SEQ ID NO: 33956 - protein, 223 aa, Salmonella potsdam
  misc_feature (1)..(223): tr|A0A5I6RW98|A0A5I6RW98_SALPO 7-carboxy-7-deazaguanine synthase QueE OS=Salmonella potsdam OX=597 GN=queE PE= 4 SV=1
MQYPINEMFQTLQGEGYFTGVPAIFIRLQGCPVGCAWCDTKHTWDKLSDREVSLYSILAKTKESDKWGAASSEDLLAVINRQGYTARHVVITGGEPCIHDLMPLTDLLEKSGFSCQIETSGTHEVRCTPNTWVTVSPKVNMRGGYDVLSQALERANEIKHPVGRVRDIEALDELLATLSDDKPRVIALQPISQKEDATRLCIETCIARNWRLSMQTHKYLNIA

SEQ ID NO: 33957 - protein, 223 aa, Salmonella rubislaw; identical to SEQ ID NO: 33920
  misc_feature (1)..(223): tr|A0A5I8H0B3|A0A5I8H0B3_SALRU 7-carboxy-7-deazaguanine synthase QueE OS=Salmonella rubislaw OX=598 GN=queE PE =4 SV=1

SEQ ID NO: 33958 - protein, 223 aa, Salmonella rubislaw; identical to SEQ ID NO: 33922
  misc_feature (1)..(223): tr|A0A3V7ILY5|A0A3V7ILY5_SALRU 7-carboxy-7-deazaguanine synthase OS=Salmonella rubislaw OX=598 GN=queE PE=3 SV =1

SEQ ID NO: 33959 - protein, 223 aa, Salmonella schwarzengrund; identical to SEQ ID NO: 33922
  misc_feature (1)..(223): tr|A0A0N1QWS8|A0A0N1QWS8_SALSV 7-carboxy-7-deazaguanine synthase OS=Salmonella schwarzengrund (strain CVM19633 ) OX=439843 GN=queE PE=3 SV=1

SEQ ID NO: 33960 - protein, 223 aa, Salmonella senftenberg
  misc_feature (1)..(223): tr|A0A3U8RJN0|A0A3U8RJN0_SALSE 7-carboxy-7-deazaguanine synthase OS=Salmonella senftenberg OX=28150 GN=queE PE =3 SV=1
MQYPINEMFQTLQGEGYFTGVPAIFIRLQGCPVGCAWCDTKHTWDKLSDREVSLFSILAKTKESDKWGAASSEDLLAVINRQGYTARHVVITGGEPCIHDLMPLTDLLEKSGFSCQIETSGTHEVRCMPNTWVTVSPKVNMRGGYDVLSQALERANEIKHPVGRVRDIEALDELLATLSDDKPRVIALQPISQKEDATRLCIETCIARNWRLSMQTHKYLNIA

SEQ ID NO: 33961 - protein, 223 aa, Salmonella senftenberg; identical to SEQ ID NO: 33920
  misc_feature (1)..(223): tr|A0A3V9FH34|A0A3V9FH34_SALSE 7-carboxy-7-deazaguanine synthase OS=Salmonella senftenberg OX=28150 GN=queE PE =3 SV=1

SEQ ID NO: 33962 - protein, 72 aa, Salmonella sp.
  misc_feature (1)..(72): tr|A0A509BM65|A0A509BM65_9ENTR Queuosine Biosynthesis Q ueE Radical SAM OS=Salmonella sp. NCTC 6947 OX=2583581 GN=queE_1 PE=4 SV=1
MQYPINEMFQTLQGEGYFTGVPAIFIRLQGCPVGCAWCDTKHTWDKLSDREVSLFSILAKTKESDKWGCCEQ

SEQ ID NO: 33963 - protein, 83 aa, Salmonella sp.; identical to SEQ ID NO: 33941
  misc_feature (1)..(83): tr|A0A509CH37|A0A509CH37_9ENTR Queuosine Biosynthesis Q ueE Radical SAM OS=Salmonella sp. NCTC 7297 OX=2583578 GN=queE PE=4 SV=1

SEQ ID NO: 33964 - protein, 223 aa, Salmonella thompson; identical to SEQ ID NO: 33920
  misc_feature (1)..(223): tr|A0A3V4QB49|A0A3V4QB49_SALTH 7-carboxy-7-deazaguanine synthase OS=Salmonella thompson OX=600 GN=queE PE=3 SV =1

SEQ ID NO: 33965 - protein, 223 aa, Salmonella thompson; identical to SEQ ID NO: 33956
  misc_feature (1)..(223): tr|A0A3Y9ZNX0|A0A3Y9ZNX0_SALTH 7-carboxy-7-deazaguanine synthase QueE OS=Salmonella thompson OX=600 GN=queE PE =3 SV=1

SEQ ID NO: 33966 - protein, 223 aa, Salmonella typhi; identical to SEQ ID NO: 33920
  misc_feature (1)..(223): tr|Q8XEY5|Q8XEY5_SALTI 7-carboxy-7-deazaguanine synthas e OS=Salmonella typhi OX=90370 GN=queE PE=3 SV=1

SEQ ID NO: 33967 - protein, 223 aa, Salmonella typhimurium; identical to SEQ ID NO: 33920
  misc_feature (1)..(223): tr|Q7CPW4|Q7CPW4_SALTY 7-carboxy-7-deazaguanine synthas e OS=Salmonella typhimurium (strain LT2 / SGSC1412 / AT CC 700720) OX=99287 GN=ygcF PE=3 SV=1

SEQ ID NO: 33968 - protein, 223 aa, Salmonella typhimurium; identical to SEQ ID NO: 33920
  misc_feature (1)..(223): tr|A0A3Z2F8D4|A0A3Z2F8D4_SALTU 7-carboxy-7-deazaguanine synthase OS=Salmonella typhimurium (strain ATCC 68169 / UK-1) OX=990282 GN=queE PE=3 SV=1

SEQ ID NO: 33969 - protein, 223 aa, Salmonella virchow; identical to SEQ ID NO: 33920
  misc_feature (1)..(223): tr|A0A3Y8PHA5|A0A3Y8PHA5_SALVI 7-carboxy-7-deazaguanine synthase OS=Salmonella virchow OX=48409 GN=queE PE=3 S V=1

SEQ ID NO: 33970 - protein, 239 aa, Salsuginibacillus halophilus
  misc_feature (1)..(239): tr|A0A2P8HLC6|A0A2P8HLC6_9BACI 7-carboxy-7-deazaguanine synthase OS=Salsuginibacillus halophilus OX=517424 GN= queE PE=3 SV=1
MKKIPVLEVFGPTIQGEGMVAGQKTMFVRTAGCDYRCSWCDSAFTWDGSQKPRMLTAEDVAEELDELAPNNYGHITISGGNPALHAGIGGLVALMAERGVGTAVETQGSVWQDWMLEVDEVTVSPKPPSSNMTTDWEQLDHYMNALGARETKRHSLKVVIFNETDLAYAKTVHFRYPNVPFYLQVGNDDLSTADDLKLRDRLLASYEWLVEQAASDPDWNQARVLPQIHALLWGNKQGV

SEQ ID NO: 33971 - protein, 223 aa, Samsonia erythrinae
  misc_feature (1)..(223): tr|A0A4R3VGR3|A0A4R3VGR3_9GAMM 7-carboxy-7-deazaguanine synthase OS=Samsonia erythrinae OX=160434 GN=queE PE=3 SV=1
MQYPINEMFQTLQGEGYFTGVPAVFIRLQGCPVGCSWCDTKHTWDKLAEREVALDQVLVKTQESDAWGAASADDILAQMARQGYTARHVVITGGEPCIHDLAPLTLQLEKQGFSCQIETSGTHEVRCSPKTWVTVSPKVNMRGGMKVLDEALQRADEIKHPVARERDIEALDTLLARLDDDKPRIVALQPISQKDEATKLCIATCIARNWRLSMQTHKYLNIA

SEQ ID NO: 33972 - protein, 209 aa, Sandaracinaceae bacterium
  misc_feature (1)..(209): tr|A0A520QPA7|A0A520QPA7_9DELT 7-carboxy-7-deazaguanine synthase OS=Sandaracinaceae bacterium OX=2510337 GN=qu eE PE=3 SV=1
MGYAIKELFYTLQGEGAQAGRPAVFCRFTGCNLWSGREIDRAKAVCQFCDTDFVGTDGVGGGRFDGPAELARAVADAWPGGGAPYVVCTGGEPLLQLDAALVDALHAEGFEVAIETNGTLAPPPGVDWICVSPKAGSALVLTSGDELKLVYPQPGAEPERFVDLAFGRFFLQPMDGPLRDENTRAALAYCLAQPRWSLSLQTHKLLGIP

SEQ ID NO: 33973 - protein, 210 aa, Sandaracinobacter sp.
  misc_feature (1)..(210): tr|A0A501XVC9|A0A501XVC9_9SPHN 7-carboxy-7-deazaguanine synthase OS=Sandaracinobacter sp. PAMC 28131 OX=171534 8 GN=queE PE=3 SV=1
MSYAVKELFLTLQGEGAQTGMRAVFLRFAGCNLWTGREQDRDKAICKFCDTDFVGTDGEGGGKFAEAEALADAVAAMWGPGAVHRLVVCTGGEPLLQLDAALIGALHARGFRIAVESNGTVEAPDGIDWLCISPKAGAETVQRRGDELKLVYPQPDLLPDQVADWAFAHFFVQPMDGPEQKANIDAAIGWCLANPKWRLSLQTHKLTGIP

SEQ ID NO: 33974 - protein, 280 aa, Sandaracinus amylolyticus
  misc_feature (1)..(280): tr|A0A0F6YKN3|A0A0F6YKN3_9DELT 7-carboxy-7-deazaguanine synthase OS=Sandaracinus amylolyticus OX=927083 GN=que E PE=3 SV=1
MIVRLAAWPCATSRECAHDLIDAPRCPTTSRGEGSRSGESDRVLAVSRPLAPGGARRYTLRPAMAYSVKEIFYTLQGEGARAGRPAVFCRFAGCNLWTGREQDRARAVCQFCDTDFVGIDGVGGGRFADADALADAVASKWPGGGAPYVVCTGGEPLLQLDAAAIGALHARGFEIAIETNGTIEVPPGIDWICVSPKAGSELVVREGHELKLVFPQEGLDPASLESLRFEHFYLQPMDDRTLVGPGARSTSTSTKRAIEHCLAHPRWSLSLQTHKLLGIP

SEQ ID NO: 33975 - protein, 211 aa, Sandaracinus sp.
  misc_feature (1)..(211): tr|A0A2D9SYX2|A0A2D9SYX2_9DELT 7-carboxy-7-deazaguanine synthase OS=Sandaracinus sp. OX=2024858 GN=queE PE=3 S V=1
MLTGVPSVFVRTSACNLRCRWCDTPETSWSPEGVVRTVADVLAEVLAHDTIRHVVLTGGEPLLGKGMPALARALHAEGRHLTVETAGTLVRDLPVDLWSLSPKLSGSVPDDPRWGPRHDRMRLRPDVLRHYVATGRYQLKLVVGHPNELPEVDALVAEVGAAPERVLLMPEGLTAGRLDEVAEWLVPAAMARGARFCDRLHIRLFGHTRGT

SEQ ID NO: 33976 - protein, 230 aa, Sandaracinus sp.; identical to SEQ ID NO: 31932
  misc_feature (1)..(230): tr|A0A2E0TL45|A0A2E0TL45_9DELT 7-carboxy-7-deazaguanine synthase OS=Sandaracinus sp. OX=2024858 GN=queE PE=3 S V=1

SEQ ID NO: 33977 - protein, 210 aa, Sandarakinorhabdus cyanobacteriorum
  misc_feature (1)..(210): tr|A0A255Y507|A0A255Y507_9SPHN 7-carboxy-7-deazaguanine synthase OS=Sandarakinorhabdus cyanobacteriorum OX=198 1098 GN=queE PE=3 SV=1
MMYAVKELFLTLQGEGAQTGRRAVFLRFAGCNLWSGREQDRATAVCTFCDTDFVGTDGPGGGKFAAPEALADAVAACWGETAAHRLVVCTGGEPLLQLDAPLVAALHARGFEIAIETNGTQVPPPGIDWICVSPKADAPLVLTAGSELKLVFPQAKAMPDRFAHMDFQHFFLQPMDGPAQAENIQAAIAYCLAHPQWRLSLQTHKLTGIP

SEQ ID NO: 33978 - protein, 209 aa, Sandarakinorhabdus sp.
  misc_feature (1)..(209): tr|A0A552U910|A0A552U910_9SPHN 7-carboxy-7-deazaguanine synthase OS=Sandarakinorhabdus sp. LB1R16 OX=2593303 G N=queE PE=3 SV=1
MTYTVKELYVTLQGEGAQTGRRAVFLRFAGCNLWTGREADRHRAVCTFCDTDFVGTDGPGGGKFDCAGLVAAVEAAWGPGPDHRLVICTGGEPLLQLDRALIDALHACGFAVGVETNGTQAAPPGLDWVCVSPKAAAPLALTTGDELKLVYPQPLAMPERFEGLAFEHFFLQPMDGPAREANTQAAIAYCLDNPRWRLSLQTHKLTGLP

SEQ ID NO: 33979 - protein, 271 aa, Sanguibacteroides justesenii
  misc_feature (1)..(271): tr|A0A0C3RI34|A0A0C3RI34_9PORP 7-carboxy-7-deazaguanine synthase OS=Sanguibacteroides justesenii OX=1547597 GN =queE PE=3 SV=1
MFIQLAKDGIFPITRDKAGNPLKKLPASGFTFPGTIQGEGKLNGIPSLFIRLAGCNLHCCWQTPEGVVECDTAYAAFKIEESFRLPVTDITRIVKHNRENIRHIIITGGEPLLQAEGVLMLCRELKKEYPFHITLETNGTLFNEACAAEIDFFSISPKLASSTPPSPHDRRHSTTRINLGNIQSFITHARQYGKDFQLKFVYSAEHDGEEIKKILTQLTDWRNEDILLMPMGATPEELQRTIPKTLEHCIRNGWRYCDRLHLSLFGNKQGV

SEQ ID NO: 33980 - protein, 155 aa, Sanguibacteroides justesenii
  misc_feature (1)..(155): tr|A0A0C3RED9|A0A0C3RED9_9PORP Pyrroloquinoline quinone biosynthesis protein (Fragment) OS=Sanguibacteroides j ustesenii OX=1547597 GN=BA92_12720 PE=3 SV=1
MSKTLQVGVFFSGVPAIFIRLQGCPVGCAWCDTKHTWEKLEDREVSLFSILAKTKESDKWGAASSEDLLAVIGRQGYTARHVVITGGEPCIHDLLPLTDLLEKNGFSCQIETSGTHEVRCTPNTWVTVSPKLNMRGGYEVLSQALERANEIKHPV

SEQ ID NO: 33981 - protein, 211 aa, Sapientia aquatica
  misc_feature (1)..(211): tr|A0A4R5W6S7|A0A4R5W6S7_9BURK 7-carboxy-7-deazaguanine synthase OS=Sapientia aquatica OX=1549640 GN=queE PE=3 SV=1
MTYSVKEIFYTLQGEGNHAGRPAVFCRFAGCNLWSGREADRATAVCQFCDTDFVGTDGELGGKFKQAHELAATINGLWPSSYLDSKYVVFTGGEPLMQLDAALIDAMHAVGFEIAIETNGTIAVPEGVDWVCVSPKMGAELVVLQGDELKVVIPQLGQPLDQYAELDFTHFFVQAMDGPLQAENIRKAIAYCKNNPRWKLSIQTHKLLQIP

SEQ ID NO: 33982 - protein, 255 aa, Saprospira grandis
  misc_feature (1)..(255): tr|H6L3G8|H6L3G8_SAPGL 7-carboxy-7-deazaguanine synthas e OS=Saprospira grandis (strain Lewin) OX=984262 GN=que E PE=3 SV=1
MSTTPNLLAVSEYFYSLQGEGQTMGVPAIFLRLSGCNLICGGKGAEKDGQLHDGASWICDTMEVWMKGESLPFAQLLQRLDDELQFSQRLSQGVHLVITGGEPLLQDKRIAAFLAFLEAERQGLRPIIEVETNGCFLPSAPLLERVSYWNCSPKLQNSGMPAKKRIVPKALKGLAQEAGTIFKFVIAQASDFEEIQSDFLDKGLIKKEQLVLMPAADSLAALLERNKMVAEICIREQIRMCSRLHVEIWDQLTGV

SEQ ID NO: 33983 - protein, 255 aa, Saprospira grandis
  misc_feature (1)..(255): tr|J0P8V6|J0P8V6_9BACT 7-carboxy-7-deazaguanine synthas e OS=Saprospira grandis DSM 2844 OX=694433 GN=queE PE=3 SV=1
MSTTPNLLAVSEYFYSLQGEGQTMGVPAIFLRLSGCNLICGGKGAEKDGQLHDGASWICDTMEVWMKGESLPFAQLLQRLDDELQFSQRLAQGVHLVITGGEPLLQDKRIAAFLAFLEAERQGLRPIIEVETNGCFLPSAPLLERVSYWNCSPKLQNSGMPAKKRIVPKALKGLAQEAGTIFKFVIAQASDFEEIQSDFLAKGLIKKEQLVLMPAADSLAALLERNKMVAEICIREQIRMSSRLHVEIWDQLTGV

SEQ ID NO: 33984 - protein, 210 aa, Saprospiraceae bacterium
  misc_feature (1)..(210): tr|A0A521UTD3|A0A521UTD3_9BACT 7-carboxy-7-deazaguanine synthase OS=Saprospiraceae bacterium OX=2202734 GN=que E PE=3 SV=1
MAYKIKEMYYTLQGEGAHAGRPAVFCRFSGCNLWSGREEDRLKAICQFCDTDFWGMDGQNGGAYDSTGLVNVAKKLWGDVKNGRPYVVCTGGEPLLQLDEALVDAFHGGGFEVGVETNGTCLAPPGLDWICVSPKAGAVLKLKKGDELKLVFPQKEAPPALFENLDFSHFFIQPMDSPDIAENTRLAVKFCLENPKWRLSVQTHKWLNIP

SEQ ID NO: 33985 - protein, 299 aa, Saprospirales bacterium
  misc_feature (1)..(299): tr|A0A1Z9N8U8|A0A1Z9N8U8_9BACT 7-carboxy-7-deazaguanine synthase OS=Saprospirales bacterium TMED214 OX=1986670 GN=queE PE=3 SV=1
MTVEKKFYYSEIFHSIQGEGHYTGVPTAWIRFFLCNLQCNGFGQIDPTNPDTYELPFEDFDVSSVNKVEDLPVWDKGCDSSYTWAKKFKDLMGQETPTAIANKIVDIIKTDSNPTGQFLHPVTGQRQHLCVTGGEPLMATGQMATVGIYEELERQDNLPGSMTFETNGTQKLRDPFKEWVDRIDTEVFFSCSPKLWTVAGEKPEKAIKPEIVAEYYKLSKAGQLKFVVGPEEREWVEMESVIEQFRDAGVHWPVWVMPTGAREEEQTAGAGIVAEKAFKRGYNVAARVHVYLFGNAIGT

SEQ ID NO: 33986 - protein, 214 aa, Saprospirales bacterium
  misc_feature (1)..(214): tr|A0A351EZC3|A0A351EZC3_9BACT 7-carboxy-7-deazaguanine synthase OS=Saprospirales bacterium OX=2026790 GN=queE PE=3 SV=1
MSDTLKKYSIKEVFYTLQGEGLYAGRPAVFCRFSGCNFWTGLEKDRKNAICHFCDTDFKGINGKNGGKFDSDSLGDLINSIWPMGKAHKFVVCTGGEPLLQLDKKLIDAFHALGFEIAVETNGSVLAPEGIDWLTVSPKDAGYFKQRSGNELKLVFPQKSLTPGMFDQLPFEHFFLQPMDGPELASNTKAALRYCLENPPWKLSLQTHKILGIE

SEQ ID NO: 33987 - protein, 235 aa, Unknown
  misc_feature (1)..(235): tr|A0A2A4SDU4|A0A2A4SDU4_9CHLR 7-carboxy-7-deazaguanine synthase OS=SAR202 cluster bacterium OX=2030829 GN=que E PE=3 SV=1
  misc_feature (184)..(184): Xaa can be any naturally occurring amino acid
  misc_feature (188)..(188): Xaa can be any naturally occurring amino acid
  misc_feature (199)..(199): Xaa can be any naturally occurring amino acid
  misc_feature (203)..(204): Xaa can be any naturally occurring amino acid
  misc_feature (206)..(207): Xaa can be any naturally occurring amino acid
  misc_feature (210)..(210): Xaa can be any naturally occurring amino acid
MLKLSRQPGGQPEIFHSLQGEGATIGVATVFLRLSLCNLSCSWCDTKYTWDWENYDYKKEVIALDTEQVREKILSYECPHLVVTGGEPLLQQTELAPLISELKQQGFYCEVETNGTIAPIPEMERDIDQWNVSPKLSTSGNRLERRLVPGTLESFSRIPNAYFKFVVVEPQDIEEVCGLAEKYXIPPXRIILLPEGRDXEVLXXRXXWVXEACVKHGFRFSTRLHILLWGDQRGR

SEQ ID NO: 33988 - protein, 235 aa, Unknown
  misc_feature (1)..(235): tr|A0A2N0LIC4|A0A2N0LIC4_9CHLR 7-carboxy-7-deazaguanine synthase OS=SAR202 cluster bacterium Io17-Chloro-G5 OX =1926614 GN=queE PE=3 SV=1
MLKISQREKGEPEIFHSIQGEGISMGVPSVFLRLATCNLSCHWCDTKYTWDWQNFDYKAEVVELEAPEIQRKIQAFNCSHVVITGGEPMLQQKELEPLVESLAAQGYDFEVETNGTIVPQPGMLRHIGQWNVSPKLRSSGNTSAGRLIPRALETFARLPEAYFKFVVTEESDIDEVCALRDQYELTLDQVLLMPEGRTPDALAKKSAWLSEACVKYGFRFTTRLHIILWGDERGR

SEQ ID NO: 33989 - protein, 194 aa, Unknown
  misc_feature (1)..(194): tr|A0A2A4TAQ1|A0A2A4TAQ1_9DELT 7-carboxy-7-deazaguanine synthase OS=SAR324 cluster bacterium OX=2024889 GN=que E PE=3 SV=1
MKVSEIFYSLQGEGRHAGRAAIFVRFYDCNLACSFCDEPLHKSYYQEMEEAEVFQQIAQHPAKFVVITGGEPTLNDLRPFIAKLQDQGYYVAVETNGYQPTHIANADWVTYSPKNWKHIDFSSFFNEMKLIVHQKTDVEKLEEISRQLETPIFVQPQADQDRVVEENVQFCVNLIKKNPRFTLSLQLHKLLHIP

SEQ ID NO: 33990 - protein, 215 aa, Unknown
  misc_feature (1)..(215): tr|A0A2D6YLG8|A0A2D6YLG8_9DELT 7-carboxy-7-deazaguanine synthase OS=SAR324 cluster bacterium OX=2024889 GN=que E PE=3 SV=1
MTVIKNIQEIIPLTIQGEGFHAGRSCSFIRLFGCPVGCWFCDTGYAPGDLKDLKKLPRLSIDYKFLLERLQSRFVVISGGEPLYHQNFEELLERLLRDNFEVAVETSGARAFPFERFPRVWVTFSPKLHATDYLKDQHSRTFWTNSQEIKVVISKASDWEAYEQLLDQAAQRGILIYLQPEWSKQIEATPLILQILQQKPDWKISVQLHKYLRLP

SEQ ID NO: 33991 - protein, 208 aa, Unknown
  misc_feature (1)..(208): tr|A0A0R2PDD2|A0A0R2PDD2_9GAMM 7-carboxy-7-deazaguanine synthase OS=SAR86 cluster bacterium BACL1 MAG-120507-b in14 OX=1655567 GN=queE PE=3 SV=1
MMYSIKEIYKTIQGEGAQAGRTAMFVRFSGCNLWSGREQHRSSAICKFCDTDFVGTNGINGGTYAAKDLVLKLTDLWGDQGNRLIVFTGGEPMLQLDARLIEECKKSGFDTAIETNGTIAIDLDLDWICVSPKQGSELIVHQGNELKVVYPQEGQDLDHFLDLKFDHMYLQPMDGLEGKENTRKTIQYCLENPRWKLSIQQHKLIGMA

SEQ ID NO: 33992 - protein, 216 aa, Unknown
  misc_feature (1)..(216): tr|A0A2A4MUD4|A0A2A4MUD4_9GAMM 7-carboxy-7-deazaguanine synthase OS=SAR86 cluster bacterium OX=2030880 GN=queE PE=3 SV=1
MNSSALRITEIFHSLQGETRTAGIPTVFVRLTGCPLRCQYCDTAYAFSGGEMLSVDAIMEQVQGYNCHYITVTGGEPLAQPQCRELLTSLADKGYEISLETSGALSIEGLDTRISVILDLKTPGSLECDRNLESNIALLKTKDQLKFVICDRRDYDWAKAKVDQYDLQSRVSEILFSPSFEQLPAKHLAQWILDDGLNVRMQLQMHKSIWGDDPGH

SEQ ID NO: 33993 - protein, 216 aa, Unknown
  misc_feature (1)..(216): tr|A0A0R2W2R4|A0A0R2W2R4_9GAMM 7-carboxy-7-deazaguanine synthase OS=SAR92 bacterium BACL16 MAG-120619-bin48 OX =1655625 GN=queE PE=3 SV=1
MSDTALRITEIFHSLQGETSTTGLPTVFVRLTGCPLRCGYCDTAYAFEGGTKILISEILDTVKAFGADCVTVTGGEPLAQPQCLELLEELCDAGYRVSLETSGAMPVAEVDPRVVKIVDLKTPGSGELSKNLYENMDHLQPHDEVKFVICDRQDYDWACLKVDQLNLRAKAAEVLFSPSQGQLAPKQLAEWMLADKLNIRMQLQMHKYIWGDQPGH

SEQ ID NO: 33994 - protein, 213 aa, Unknown
  misc_feature (1)..(213): tr|A0A0R2TYF9|A0A0R2TYF9_9GAMM 7-carboxy-7-deazaguanine synthase OS=SAR92 bacterium BACL26 MAG-121220-bin70 OX =1655626 GN=queE PE=3 SV=1
MTYAVKEIFYSLQGEGAHAGRPAIFCRFSGCNLWSGQEKHRANAICQFCDTDFVGTNGDGGGSFTSTTSLVAQVKSYWPQSISDQTHPYVVCTGGEPLLQLDTDLIEAFHAEGMEVAIETNGTLPVPKGVDWVCVSPKSGSTLLVEEGDEIKLVYPQQGHHPSDFVHLKFNHFFLQPMFDDQENNNLETTVEYCLSHPRWSLSLQTHKLLGLP

SEQ ID NO: 33995 - protein, 213 aa, Unknown
  misc_feature (1)..(213): tr|A0A520MIJ0|A0A520MIJ0_9GAMM 7-carboxy-7-deazaguanine synthase OS=SAR92 clade bacterium OX=2315479 GN=queE P E=3 SV=1
MAYAVKEIFYSLQGEGAHAGRPAIFCRFTGCNLWSGHEKHRADAVCQFCDTDFVGTDGDGGGSFKNAVDLAKAVVSYWPDSITDVIHPYVICTGGEPLLQLDKDLIEAFHNEGAEVAIETNGTLPVPEGVDWVCVSPKSGSTVVVEEGDEIKLVYPQVGHQPSDFVHLNFEHFFLQPMFDEDENEHVKATIEYCLTHPRWSLSLQSHKLLGLQ

SEQ ID NO: 33996 - protein, 210 aa, Schlegelella thermodepolymerans
  misc_feature (1)..(210): tr|A0A2S5T500|A0A2S5T500_9BURK 7-carboxy-7-deazaguanine synthase OS=Schlegelella thermodepolymerans OX=215580 GN=queE PE=3 SV=1
MAYQIKEIFYTLQGEGANAGRPAVFCRFAGCNLWSGRERDRGRAVCRFCDTDFVGTDGTLGGRYEAEALADTIAAQWPAGRPGQPLTVLTGGEPLLQVDTALVDALHARGFRIALETNGTLAAPPGIDWICVSPKAGAELVQRSGQELKVVVPQDGLDLDALAALPFEHHFLQAMDGPDLQRNTQWAIARCLQDPRWRLSVQTHKVLDIR

SEQ ID NO: 33997 - protein, 210 aa, Schlegelella thermodepolymerans
  misc_feature (1)..(210): tr|A0A4R2MG97|A0A4R2MG97_9BURK 7-carboxy-7-deazaguanine synthase OS=Schlegelella thermodepolymerans OX=215580 GN=queE PE=3 SV=1
MAYQIKEIFYTLQGEGANAGRPAVFCRFAGCNLWSGRERDRGRAVCRICDTDFVGTDGTLGGRYEAEALADTIAAQWPAGRPGQPLTVLTGGEPLLQVDTALVDALHARGFRIALETNGTLAAPPGIDWICVSPKAGAELVQRSGQELKVVVPQDGLDLDALAALPFEHHFLQAMDGPDLQRNTQWAIARCLQDPRWRLSVQTHKVLDIR

SEQ ID NO: 33998 - protein, 213 aa, Schleiferia sp.
  misc_feature (1)..(213): tr|A0A401XNP6|A0A401XNP6_9FLAO 7-carboxy-7-deazaguanine synthase OS=Schleiferia sp. LA OX=2173829 GN=queE PE=3 SV=1
MNVHDKEVNERLVADGRYVPLMEEFYTIQGEGFHTGKAAYFVRIGGCDVGCHWCDVKESWNAALHPPTAVEEIAEHAAKHSSTVVVTGGEPLTWNMGPLTKALKDRGITIHLETSGSYPVTGVWDWVCLSPKKTKPPLPEWYALANELKVIVYNRHDLKWAEMHAERVGEGCLLYLQPEWSRRKEVMPMIAEYVMANPKWRVSLQTHKYIGIP

SEQ ID NO: 33999 - protein, 212 aa, Schleiferia thermophila
  misc_feature (1)..(212): tr|A0A085KZP9|A0A085KZP9_9FLAO 7-carboxy-7-deazaguanine synthase OS=Schleiferia thermophila str. Yellowstone O X=1453500 GN=queE PE=3 SV=1
MNELEVKNLELVSDGYYVPLMEEFYTIQGEGFHTGKAAYFIRIGGCDVGCHWCDVKESWNASLHPPTHVNTIAENARNHADTVVVTGGEPLTWNMGPLTKALKQYKLKIHLETSGAYPLTGIWDWICLSPKKTKPPRDEWYQVANEVKIIVYNRHDLKWAEMHAERVSKDCALFLQPEWSKRNEVMPFITQYILENPKWRISLQTHKYIGIP

SEQ ID NO: 34000 - protein, 212 aa, Schleiferia thermophila
  misc_feature (1)..(212): tr|A0A369A704|A0A369A704_9FLAO 7-carboxy-7-deazaguanine synthase OS=Schleiferia thermophila OX=884107 GN=queE PE=3 SV=1
MNELEVKNLELVSDGYYVPLMEEFYTIQGEGFHTGKAAYFIRIGGCDVGCHWCDVKESWNASLHPPTHVNTIAENARNHADTVVVTGGEPLTWNMGPLTKALKQYKLKIHLETSGAYPLTGIWDWICLSPKKTKPPRDEWYQVANEVKIIVYNRHDLKWAEMHAERVSKDCALFLQPEWSKRNEVMPIITQYILENPKWRISLQTHKYIGIP

SEQ ID NO: 34001 - protein, 244 aa, Schwartzia succinivorans
  misc_feature (1)..(244): tr|A0A1M4WBW2|A0A1M4WBW2_9FIRM 7-carboxy-7-deazaguanine synthase OS=Schwartzia succinivorans DSM 10502 OX=1123 243 GN=queE PE=3 SV=1
MKENVIEIFSSVQGEGKYAGCRQVFIRLEGCNISCRYCDTEHMTGKHDVCIVESVPGSHEYVEISNPMTAEAVAAEVKRFTDNVPHQAVSITGGEPLLHAEFVRELAKHVDVPVFLETNGTLPEKLKQVVDCVDIISMDIKLPSELNGKTYWAEHRDFLCTAKGKDIYCKIVLTQDTAKEEFEKACRIISDVDDTILLILQPVTPFGGAEPPSAKEMLQWQAEGLKFLKNVRVIPQTHVMMGQL

SEQ ID NO: 34002 - protein, 237 aa, Scopulibacillus darangshiensis
  misc_feature (1)..(237): tr|A0A4R2P4U1|A0A4R2P4U1_9BACL 7-carboxy-7-deazaguanine synthase OS=Scopulibacillus darangshiensis OX=442528 G N=queE PE=3 SV=1
MPSKEEYGNWTLPMVEIFETVEGEGMGQGLPTVFVRVFHCNLRCTWCDTPYSYAPEKPEFEATIDDIVEKVSTFPSRRICFTGGEPLIHRQKSAALIKAMAELDHIVDIHIETNGAIDLMPFDELRRSDDLLMSKVRFVMDYKLPDSGETDKMVHSNFDCLMEQDEVKFVIAGDEDFDYAKRVVSKYNSSGQVLFSPVWEAMAPDRLVEKVLAEPLPDVKISMQLHKVIWDPNRRGV

SEQ ID NO: 34003 - protein, 265 aa, Scytonema hofmannii
  misc_feature (1)..(265): tr|A0A139XDX1|A0A139XDX1_9CYAN 7-carboxy-7-deazaguanine synthase OS=Scytonema hofmannii PCC 7110 OX=128403 GN= queE PE=3 SV=1
MTAKTTVTPTARLIEIFSAIQGEGLNVGTRQIFIRFALCDLRCHFCDSAHTWNPPATCRIERTPGLRDFETYSNPVPLPMLLQWVEWQNLPFVHDTISLTGGEPLLHASFLLEFLPQVRFITGLPIYLETGGHRPKQLATILPYLDSVGMDFKLPSTSGESYWQEHTEFLQLCHTSNVEVFVKLIVSQTTNPLELERSAELVASVDPSIPVFLQPVTPIESSVMLTNKPILAPSPEQVLTWQALMKRLVKQVRVIPQTHKMLNQL

SEQ ID NO: 34004 - protein, 265 aa, Scytonema millei
  misc_feature (1)..(265): tr|A0A1D2PFC8|A0A1D2PFC8_9CYAN 7-carboxy-7-deazaguanine synthase OS=Scytonema millei VB511283 OX=1245923 GN=qu eE PE=3 SV=1
MTVKTTVTPTARLIEVFSAIQGEGLNVGTRQIFIRFALCDLRCHFCDSAHTWNAPATCRIEQTPGLRDFEIYSNPVSLPMLLEWVERQNVPCLHDSISLTGGEPLLHTPFLLEFLPQVRSVTGLPIYLETGGHRPEQLDTILPYIDSVGMDFKLPSTSGENRWREHAEFLQLCWKSQLEVFVKIIVSQTTDSTELERAAQLVASVNPSIVVFLQPVTPLDDPSAFNQPPVLAPSPSQVLGWQALMKRFVKQVRVVPQTHKMLNQL

SEQ ID NO: 34005 - protein, 258 aa, Scytonema millei
  misc_feature (1)..(258): tr|A0A4R4IZ58|A0A4R4IZ58_9CYAN 7-carboxy-7-deazaguanine synthase OS=Scytonema millei VB511283 OX=1245923 GN=qu eE PE=3 SV=1
MTTARLIEIFSAIQGEGLNVGTRQIFIRFALCDLRCHFCDSAHTWSVPSTCCVERSPGLRDFETHTNPVQLNTLLTWIERQNSPGLHDSISLTGGEPLLHAPFLVEFLPLVRRATGLPIYLETGGHRPQQLQLILPYLDSVGMDIKLPSVSGEDRWNEHAEFLQACHQAGVEVFIKAIVSSQTDERDLATAAKLVASVNPEIPVFLQPATPLTPSQQFGGIPIQAPTPAQVLHWQALTKRELKRVRVIPQTHKMLNQL

SEQ ID NO: 34006 - protein, 265 aa, Scytonema sp.
  misc_feature (1)..(265): tr|A0A1Z4IYY8|A0A1Z4IYY8_9CYAN 7-carboxy-7-deazaguanine synthase OS=Scytonema sp. HK-05 OX=1137095 GN=queE PE= 3 SV=1
MTVKNTITPTARLIEVFSAIQGEGLNVGTRQIFIRFALCDLRCHFCDSAHTWNAPATCKIEQTPGLRDFEIYSNPVPLPMLLSWVERQNLPCLHDSISLTGGEPLLHTPFLLEFLPQVRSVTGLPIYLETGGHRPEQLDTILPYLDSVGMDFKLPSTSGENRWREHAEFLQVCWKSQVEVFVKIIVSQTTDPTELEHSAQLVASVSPSIPVFLQPVTPLDDPIAFNQPPVLAPSPSQVLNWQSLMKRFVKQVRVVPQTHKMLNQL

SEQ ID NO: 34007 - protein, 265 aa, Scytonema sp.
  misc_feature (1)..(265): tr|A0A1Z4Q1D3|A0A1Z4Q1D3_9CYAN 7-carboxy-7-deazaguanine synthase OS=Scytonema sp. NIES-4073 OX=2005464 GN=queE PE=3 SV=1
MTVKNTITPTARLIEVFSAIQGEGLNVGTRQIFIRFALCDLRCHFCDSAHTWNAPATCKIEQTPGLRDFEIYSNPVPLPMLLSWVERQNLPCLHDTISLTGGEPLLHTPFLLEFLPEVRSVTGLPVYLETGGHRPEQLDTILPYLDSVGMDFKLPSTSGENRWREHAEFLQVCWKSQVEVFVKIIVSQTTDPTELEHSAQLVASVSPSIPVFLQPVTPLDDPIAFNQPPVLAPSPSQVLNWQSLMKRFVKQVRVVPQTHKMLNQL

SEQ ID NO: 34008 - protein, 265 aa, Scytonema tolypothrichoides
  misc_feature (1)..(265): tr|A0A0C2LEY8|A0A0C2LEY8_9CYAN 7-carboxy-7-deazaguanine synthase OS=Scytonema tolypothrichoides VB-61278 OX=12 33231 GN=queE PE=3 SV=1
MTIKTTVTPTARLIEVFSAIQGEGLNVGTRQIFIRFALCDLRCHFCDSAHTWNAPHTCRIEQTPGLRDFEIYSNPVSLPMLLEWVERQNLPCLHDTITITGGEPLLHTPFLVEFLPQVRSLTSLPVYLETGGHRPDQLKNILPLIDSVGMDFKLPSASGENRWREHAEFLHLCWTSQVEVFVKIIVSQTTNPTELEQSAQLVASVNPSIPVFLQSVTPLDDPGAFKQLPVAAPSPSQVLNWQALMKRFVKCVRVVPQTHKMLNQL

SEQ ID NO: 34009 - protein, 223 aa, Unknown
  misc_feature (1)..(223): tr|J3VRH3|J3VRH3_9ENTR 7-carboxy-7-deazaguanine synthas e OS=secondary endosymbiont of Ctenarytaina eucalypti O X=1199245 GN=queE PE=3 SV=1
MQYPLNEIFQTLQGEGYFTGVPAIFIRLQGCPVQCSWCDTKHTWQQDVTDQVTLREAPLKKKDNSTWANLTAEEMITIIFQQGWTAQHVVITGGEPCLHDLMPLTYALEQQGFSCQIETSGTQYIHCTPKTWVTVSPKIDMRKGLPVLLQAINRSDEIKHLVARQRDIEELDELLKTLNDAKQPVISLQPISQKEAANRLCIETCISRNWRLSIQTHKYLNIK

SEQ ID NO: 34010 - protein, 223 aa, Unknown
  misc_feature (1)..(223): tr|J3TZ27|J3TZ27_9ENTR 7-carboxy-7-deazaguanine synthas e OS=secondary endosymbiont of Heteropsylla cubana OX=1 34287 GN=queE PE=3 SV=1
MKYPVNRIFQTIQGEGCFTGVPAIFIRLQGCSVMCSWCDTKYTWKQDEFERVPSRDILVKTIDNSRWASCTEEDILALILNQDWTACHIVITGGEPCLYNLIPLTEVLEKQGFTCQIETSGTQEIHCTSRTWVTLSPKIDMYHKLPIVPKALIRSDEIKYPIEKKSDINKLDILLASLKDIKKRVIALQPVSQKERATNLCIETCILRNWRLSIQTQKYLKII

SEQ ID NO: 34011 - protein, 221 aa, Sedimentibacter sp.
  misc_feature (1)..(221): tr|A0A252CIY9|A0A252CIY9_9FIRM 7-carboxy-7-deazaguanine synthase OS=Sedimentibacter sp. SX930 OX=1955060 GN=qu eE PE=3 SV=1
MVLQVVEKFVSINGEGRRCGQLATFIRFAGCNLNCGYCDTAWANERKVAFDPMTAEEVYAYIKETQVTNVTLTGGEPLLQQDMGELLELLSQDPELYVEIETNGSVLLSKFSDLENPPSFTMDYKLPSSGMERMMALENFDHLTEKDTVKFVSGSMADLEKARELINKYKLTEKTSIFISPVFGDIELESIVDFMKDNQMNGVNMQVQLHKIIWDPNERGV

SEQ ID NO: 34012 - protein, 216 aa, Sedimenticola selenatireducens
  misc_feature (1)..(216): tr|A0A557SDR3|A0A557SDR3_9GAMM 7-carboxy-7-deazaguanine synthase OS=Sedimenticola selenatireducens OX=191960 G N=queE PE=3 SV=1
MSEMAQLRITEIFYSLQGESSTVGFPTVFVRLTGCPLRCGYCDTAYAFKGGVWQDLQAVMDQVAAYQPQYVTVTGGEPLAQESCLELLTALCDEGYKVSLETSGAIAISPVDPRVMNVMDIKTPGSGEVEKNLWSNIAQLKSTDQVKFVICDESDYRWSCEQLDKWNLSKRCEVLFSPALGLQDATQLAEWILRDRLQVRFQIQLHKYLWGDVSGK

SEQ ID NO: 34013 - protein, 213 aa, Sedimenticola selenatireducens
  misc_feature (1)..(213): tr|A0A2N6CUV4|A0A2N6CUV4_9GAMM 7-carboxy-7-deazaguanine synthase OS=Sedimenticola selenatireducens OX=191960 G N=queE PE=3 SV=1
MAQLRITEIFYSLQGESNSVGLPTVFVRLTGCPLRCGYCDTTYAFKGGEWLELDTVMEQVAAYAPQYVCVTGGEPLAQEACLELLVALCNAGYRVSLETSGALDISRVDPRVVNVMDLKTPGSGEEEKNLFSNIDRLKPEDQVKFVICDAADYDWALEQLRAWDLGNRCQVLFSPALGLQNATELAEWILRDRLNVRFQIQLHKYLWGDVAGK

SEQ ID NO: 34014 - protein, 213 aa, Sedimenticola sp.
  misc_feature (1)..(213): tr|A0A2N6GJC4|A0A2N6GJC4_9GAMM 7-carboxy-7-deazaguanine synthase OS=Sedimenticola sp. OX=1940285 GN=queE PE=3 SV=1
MSRLRISEIFYSLQGESNTVGMPTVFIRLTGCPLRCGYCDTTYAFKGGEWQTLEQILATVASFGARYVTVTGGEPLAQRECLGLLQALCDAGYQVSLETSGALDVCQVDARVVKVMDLKTPASGEMEKNLLSNIDCLTPKDQVKFVICDQADYLWAREQIDTLHLDRRCELLISPAQGLQDATELADWVIRDRLQVRFQIQLHKALWGNVSGK

SEQ ID NO: 34015 - protein, 213 aa, Sedimenticola thiotaurini
  misc_feature (1)..(213): tr|A0A0F7K3H1|A0A0F7K3H1_9GAMM 7-carboxy-7-deazaguanine synthase OS=Sedimenticola thiotaurini OX=1543721 GN=qu eE PE=3 SV=1
MTRLRISEIFYSLQGESNSVGLPTVFVRLTGCPLRCGYCDTTYAFKGGEWLELAQVLAQVADYAPRHVTVTGGEPLAQEACLELLGGLCDAGYRVSLETSGALDIGQVDPRVVTVMDLKTPGSGEVEKNRFSNIDHLKQTDQVKFVICDEVDYHWACEQLQAWDLDNRCQVLFSPALGRQDATQLAEWILRDRLHVRFQIQLHKYLWGDVAGK

SEQ ID NO: 34016 - protein, 213 aa, Sedimenticola thiotaurini
  misc_feature (1)..(213): tr|A0A558CVB4|A0A558CVB4_9GAMM 7-carboxy-7-deazaguanine synthase OS=Sedimenticola thiotaurini OX=1543721 GN=qu eE PE=3 SV=1
MAQLRITEIFYSLQGESNSVGLPTVFVRLTGCPLRCGYCDTTYAFKGGAWLDMQDVMAQVAAYRPKYVTVTGGEPLAQEACLTLLTALCDAGYKVSLETSGAISIAQVDPRVVNVMDLKTPGSGEMGKNLWDNIELLKPTDQVKFVLCDESDYRWACEQVDKWGMIDRCEVLFSPALGLQDATELAEWILRDRLQVRFQIQLHKYLWGDVSGK

SEQ ID NO: 34017 - protein, 172 aa, Sedimentisphaera cyanobacteriorum
  misc_feature (1)..(172): tr|A0A1Q2HNK7|A0A1Q2HNK7_9BACT Putative 7-cyano-7-deaza guanosine (PreQ0) biosynthesis protein QueE OS=Sediment isphaera cyanobacteriorum OX=1940790 GN=L21SP3_00583 PE =4 SV=1
MSVAQILRRAEAREGSNVVITGGEPLIQEELPELCYALRGICPHITLETSGILPADDLAVDLMSISPKLSNSVGDAEKSAEYFHPEIISELIEEYSSQIKFVISDLQDVLEAGRAVEQISAIGRADLMLMPLASTLEEYQIKASEVAQYCLGFGYTFCPRLQLTLFGGGRGA

SEQ ID NO: 34018 - protein, 221 aa, Sedimentisphaera salicampi
  misc_feature (1)..(221): tr|A0A1W6LJR8|A0A1W6LJR8_9BACT 7-carboxy-7-deazaguanine synthase OS=Sedimentisphaera salicampi OX=1941349 GN=q ueE PE=3 SV=1
MKISEIFYSIQGEGRLAGVPSLFIRTAGCPVNCPWCDTDYAKSFDAGEEMSVAQILRRADARDGSNVVITGGEPLIQEDLADLCYGLRAISPHITLETSGILPAGDLAVDLMSISPKLSNAQNDEEKNFEHFYPEIISGLIEEYSSQIKFVVSDLQDVLEAGRAVKEISAVGRADLMLMPMASTFEEYQLKAPEVAQYCLGFGYTFCPRLQLVLFGGGKGA

SEQ ID NO: 34019 - protein, 239 aa, Sedimentitalea sp.
  misc_feature (1)..(239): tr|A0A3T0N208|A0A3T0N208_9RHOB 7-carboxy-7-deazaguanine synthase OS=Sedimentitalea sp. W43 OX=2483033 GN=queE PE=3 SV=1
MNRLRIAEIFGPTIQGEGAVIGVPTVFVRAGGCDYRCSWCDSLHAVDSKFRHDWKMMSAADIFAEVEHLSGGVPLAVSLSGGNPAIQDFSPLIALGHAKGYRFVMETQGSVAQSWFSDLSTLILSPKPPSSGETVDWAKFDDCINQAKQAETVMKIVIFDEADYDWARNVAARYPDLPLYLQPGNHTPPPPEAEDAEIDMDGIMHRYEWLIDKTLGDHWYTPTILPQLHVLVWGNKRGV

SEQ ID NO: 34020 - protein, 242 aa, Sediminibacillus albus
  misc_feature (1)..(242): tr|A0A1G8X2K9|A0A1G8X2K9_9BACI 7-carboxy-7-deazaguanine synthase OS=Sediminibacillus albus OX=407036 GN=queE P E=3 SV=1
MNRFPVLEIFGPTIQGEGMVVGRKTMFVRTAGCDYSCAWCDSAFTWDGSAKAEIQKMSAGEILGELQRIGGSHFDHVTISGGNPALLRNLAELVDLLHQEGLEVALETQGSRWQDWFLQIDDLTISPKPPSSGMDTNWDMLDSIINRLSEKDRLFHTSLKVVIFNDEDLHYAEKVHKRYPGTAFFLQVGNENLAENSTTNLTAILLDKYQWLIDRVVNSQTLNHVRVLPQVHTLLWGNKRGV

SEQ ID NO: 34021 - protein, 242 aa, Sediminibacillus halophilus
  misc_feature (1)..(242): tr|A0A1G9P3B2|A0A1G9P3B2_9BACI 7-carboxy-7-deazaguanine synthase OS=Sediminibacillus halophilus OX=482461 GN=q ueE PE=3 SV=1
MFKFPVLEIFGPTIQGEGMVVGRKTMFVRTAGCDYGCSWCDSAFTWDGSSKKDIRMMSAEEVMEGLQAKGGSRFDHVTISGGNPALLQNLSELIDKLHGQGIEVALETQGSRWQEWFVDIDDLTISPKPPSSGMKTNWQVLDSIINRLADSGRLSHTSLKVVVFDEKDLQYASAVHQRYPKVDFYLQVGNDDLAEADSASLAGKLLEKYQWLIDRVMQSDMLNHVRVLPQVHALVWGNKRGV

SEQ ID NO: 34022 - protein, 207 aa, Sediminibacterium ginsengisoli
  misc_feature (1)..(207): tr|A0A1T4K814|A0A1T4K814_9BACT 7-carboxy-7-deazaguanine synthase OS=Sediminibacterium ginsengisoli OX=413434 G N=queE PE=3 SV=1
MITSPTLTRTSLPVMESFYTIQGEGFHQGRAAYFIRLGGCDVGCFWCDVKESWDASAHPQREIASIVEEAAAYPGRLAVITGGEPLMHDLTELTTALKAAGFETNIETSGSSAFSGSWDWVCLSPKKFKAPRPEIVPLASELKVVIYNKTDFQWAENYAAQASPECKLYLQPEWSKADTITPLIVDYIKANPRWELSMQLHKYINVP

SEQ ID NO: 34023 - protein, 193 aa, Sediminibacterium sp.
  misc_feature (1)..(193): tr|A0A2M8JT84|A0A2M8JT84_9BACT 7-carboxy-7-deazaguanine synthase OS=Sediminibacterium sp. FEMGT703S OX=2080766 GN=queE PE=3 SV=1
MEAFYTLQGEGAHQGRAAYFIRLGGCDVGCVWCDVKDSWDVTKHPIVSIDEIVAKAISYPGRLAVITGGEPLMHQLDALTNALHMAGFETNIETSGSWPLSGHWDWICLSPKKFKAPLDEVIVKAHELKVVVFNKHDFTWAEKYASLVNPSCKLYLQPEWDKAAEMTPLILDYIQANPQWRLSLQVHKYLNIP

SEQ ID NO: 34024 - protein, 210 aa, Sediminicola luteus
  misc_feature (1)..(210): tr|A0A2A4G928|A0A2A4G928_9FLAO 7-carboxy-7-deazaguanine synthase OS=Sediminicola luteus OX=319238 GN=queE PE=3 SV=1
MLEKQTMDLVDKGLMLPLMEEFYTIQGEGYYKGTAAYFIRVGGCDVGCHWCDVKESWDAEKHPPTAIDVIVENAAKYSDTIVITGGEPLTWDMGPLTQALKAKGMKTHIETSGAYTVSGQWDWFCLSPKKNKLPVPAAHTAAQELKIIVYNKHDLKFAEEQAALVGKDCILYLQPEWSVRDKVVPMIVDYVMAHPKWKVSLQTHKYLNIP

SEQ ID NO: 34025 - protein, 210 aa, Sediminicola sp.
  misc_feature (1)..(210): tr|A0A0S1SEQ1|A0A0S1SEQ1_9FLAO 7-carboxy-7-deazaguanine synthase OS=Sediminicola sp. YIK13 OX=1453352 GN=queE PE=3 SV=1
MVKNEVLALVDKGEMLPLMEEFYTIQGEGFHKGTAAYFIRVGGCDVGCHWCDVKESWNAETHPPTHISAIVDNAAKYSDTIVVTGGEPLTWEMNPLTTALKDKNLQVHIETSGAYPLTGQWDWICLSPKKNKLPEGIIYDKAHELKMIIFNKHDFIFAEEQAAKVNGNCILYLQPEWSVRDKMVPLIVDYVMKNPKWKVSLQTHKYLNIP

SEQ ID NO: 34026 - protein, 207 aa, Sediminitomix flava
  misc_feature (1)..(207): tr|A0A315ZC29|A0A315ZC29_9BACT 7-carboxy-7-deazaguanine synthase OS=Sediminitomix flava OX=379075 GN=queE PE=3 SV=1
MENLKDTVQITYPVMEAFYTIQGEGKYQGHAAYFIRLAGCDVGCVWCDVKESWEEEGHPILSVDEIVNEAKKYPGRLAVITGGEPCMHDLSPLTTALKEAGFHINIETSGAHELSGHIDWVCFSPKKFKAPLDEFYQKADELKVVIFHKSDFAWAEEHASKLGDDCLLYLQPEWGKSAKILPMIVDYVKDNPKWKISLQVHKYMDIP

SEQ ID NO: 34027 - protein, 207 aa, Segetibacter aerophilus
  misc_feature (1)..(207): tr|A0A512BBK5|A0A512BBK5_9BACT 7-carboxy-7-deazaguanine synthase OS=Segetibacter aerophilus OX=670293 GN=queE PE=3 SV=1
MDFAQTSVITTLPVMEAFYTIQGEGFHQGRAAYFIRLGGCNVGCFWCDVKESWDADKHPKIAIDEIVETASKEPGRLAVITGGEPLMHNLDELTYRLQSEGFETNIETSGSFPLSGHWNWICVSPKKFRPPTDEALANANELKVIIYNKNDFAWAEKHAANVSAECKLYLQPEWERAPIMTPPIIDYIKENPRWELSLQIHKYINVP

SEQ ID NO: 34028 - protein, 233 aa, Seinonella peptonophila
  misc_feature (1)..(233): tr|A0A1M4XIP8|A0A1M4XIP8_9BACL 7-carboxy-7-deazaguanine synthase OS=Seinonella peptonophila OX=112248 GN=queE PE=3 SV=1
MSRDISKELPMVEIFQTVEGEGLRAGFPTTFIRLFHCNLRCTWCDTTYSYAPAKPVFTATIAEIVNKVKKLPNPSICLTGGEPLIHGEHSLHLIQELVLLPFIKDIHIETNGAIDLKPYHQWRLSDKNGQKVRFILDYKLPASGEQHRMIEDNFSQLTDTDEVKFVIQDEHDFQVARKILQQKVIRGTPLFSPVWEICDPKQLVTWIQENHLRNVKLNLQLHKYIWDPEARGV

SEQ ID NO: 34029 - protein, 217 aa, Selenihalanaerobacter shriftii
  misc_feature (1)..(217): tr|A0A1T4K6B7|A0A1T4K6B7_9FIRM 7-carboxy-7-deazaguanine synthase OS=Selenihalanaerobacter shriftii OX=142842 G N=queE PE=3 SV=1
MLVNNIFSSIQGESTYSGFPTTFIRLTGCNLRCSYCDTEYAYKKGEELSIDEVITKVIDLNNDYVCLTGGEPLFQSNIQTLINKLFKEGYEVSIETNGAVDLEGFELDNIKVVMDFKLPSSGEFDNNSEVIYENLQRISKKDDLKFVIGDKEDFLFAKNVIIDKELQKKVNIIFSPIFKRLEPNLLVKWLLESPELNKCRLQLQLHKIIWDEEMKGV

SEQ ID NO: 34030 - protein, 243 aa, Selenomonas artemidis
  misc_feature (1)..(243): tr|E7N2W3|E7N2W3_9FIRM 7-carboxy-7-deazaguanine synthas e OS=Selenomonas artemidis F0399 OX=749551 GN=queE PE=3 SV=1
MRENIIEIFSSIQGEGKYVGCRQVFVRLEGCNLDCTYCDTENEIGRHPTCMVEMPAGSHELHSYANPLSIETVAALVAQVAGDVPHHSLSVTGGEPLLHVPFIRALKERVPLPIFLETNGTLHDALARCIDCVSYISMDIKLPGVLLHPVWDAHARFLEIARTKDVYVKVVVAAETREDEVRTAARMVAETAPDVLLILQPVTPYGGCTAPTPARLLALQQIALVHVPDVRVIPQTHRMMDLL

SEQ ID NO: 34031 - protein, 248 aa, Selenomonas flueggei
  misc_feature (1)..(248): tr|C4V0R7|C4V0R7_9FIRM 7-carboxy-7-deazaguanine synthas e OS=Selenomonas flueggei ATCC 43531 OX=638302 GN=queE PE=3 SV=1
MRETDMNENIIEIFSSIQGEGKYVGCRQVFLRLEGCNLNCTYCDTDSKAGTHPNCVVEEGAGTYHLVPYPNPISPERAAELVALAAAGVPHQALSITGGEPLLHASFIRALAPHVHLPIYLETNGTLYAELKKCIDCVAGISMDIKLPSVTAHPVWDAHVRFLEIAKVKDTWIKIVVAAESPDSEIDTAVRLVADTAPETMLILQPVTPCGGCMKPSSEQLLKWQETALRRLANVRVIPQTHRMMDML

SEQ ID NO: 34032 - protein, 243 aa, Selenomonas infelix
  misc_feature (1)..(243): tr|G5GS61|G5GS61_9FIRM 7-carboxy-7-deazaguanine synthas e OS=Selenomonas infelix ATCC 43532 OX=679201 GN=queE P E=3 SV=1
MRENIIEIFSSIQGEGKYVGCRQIFVRLEGCNLDCTYCDTENEIGRHPTCMVEERAGTHELVPYENPLSVEKVAEIVTHLTGAVPHHSLSITGGEPLLHVPFIKELAAHIDLPIFLETNGTLDRALAECIDCISHISMDLKLPDVLSAPVWDAHARFLEIAHTKDVYVKVVVAAETRAEDVEHATHLVADIAPATLLILQPVTPYGGCTAPTPARLLELQRIALCHLSDVRIIPQTHRMMDLL

SEQ ID NO: 34033 - protein, 243 aa, Selenomonas noxia
  misc_feature (1)..(243): tr|D4S495|D4S495_9FIRM 7-carboxy-7-deazaguanine synthas e OS=Selenomonas noxia ATCC 43541 OX=585503 GN=queE PE= 3 SV=1
MCENIIEIFSSIQGEGKYVGCRQIFVRLEGCNLDCTYCDTENEIGRHPHCMVEEDAGSHALISYENPLSAQRTAEIIARIVGDVPHHSLSMTGGEPLLHVPFIRELAAHVHLPLFLETNGTLDQALAECIDCIDIISMDIKLPDVLSVPVWDAHARFLAVARAKDVYVKIVVAAETADDDIVTAARIVADTAPETLLILQPVTPYGGCTAPTPEHLLAFQRLALRHVSDVRIIPQTHRMMDLL

SEQ ID NO: 34034 - protein, 243 aa, Selenomonas noxia
  misc_feature (1)..(243): tr|G5H497|G5H497_9FIRM 7-carboxy-7-deazaguanine synthas e OS=Selenomonas noxia F0398 OX=702437 GN=queE PE=3 SV= 1
MCENIIEIFSSIQGEGKYVGCRQVFVRLEGCNLDCTYCDTENEIGRHPHCMVEEDAGSHALISYENPLSAQRTAEIIARIVGDVPHHSLSMTGGEPLLHVPFIRELAARVSLPIFLETNGTLDKALAECIDCIDFISMDIKLPDVLSVPVWDAHARFLAVARAKDVYVKIVVAAETADDDIVTAARIVADTAPETLLILQPVTPYGGCTAPTPEHLLAFQRLALRHVSDVRIIPQTHRMMDLL

SEQ ID NO: 34035 - protein, 243 aa, Selenomonas ruminantium
  misc_feature (1)..(243): tr|A0A1K1QIR7|A0A1K1QIR7_SELRU 7-carboxy-7-deazaguanine synthase OS=Selenomonas ruminantium OX=971 GN=queE PE= 3 SV=1
MKENLIEIFSSIQGEGKYVGCRQVFVRLEGCNLDCSYCDTENAPGSHPQCEVETYAGSREFAKLPNPRSAEQVAMEINRLCQEVPHQAVSFTGGEPLLHADFIREVAKEVEVPVFLETNGTLYKQLESIIDITDIISMDIKLPSIVSQPQWEAHRKFIEVAKEKDLYIKLVVADETTEEEFRKAIDLVAETAPETLFIIQPVTPYGGCKAASPEKILICQNYALTKLKDVRVIPQTHKMIGQI

SEQ ID NO: 34036 - protein, 243 aa, Selenomonas ruminantium
  misc_feature (1)..(243): tr|A0A1H0MV85|A0A1H0MV85_SELRU 7-carboxy-7-deazaguanine synthase OS=Selenomonas ruminantium OX=971 GN=queE PE= 3 SV=1
MKENLIEIFSSIQGEGKYVGCRQVFVRLEGCNLDCSYCDTENAPGSHPQCEVETYAGSREFAKLPNPRSAEQVAMEINRLCKEVPHQAVSFTGGEPLLHADFIREVAKEVEVPIFMETNGTLYKQLESIIDITDIISMDIKLPSIVSQPQWEAHRKFIEIAKAKDLYIKLVVADETTEEEFRKAIDLVAETAPETLFIIQPVTPYGGCKAASPEKILMCQNYALTKLKDVRVIPQTHKMIGQI

SEQ ID NO: 34037 - protein, 243 aa, Selenomonas sp.
  misc_feature (1)..(243): tr|E4LGU7|E4LGU7_9FIRM 7-carboxy-7-deazaguanine synthas e OS=Selenomonas sp. oral taxon 137 str. F0430 OX=87931 0 GN=queE PE=3 SV=1
MRENIIEIFSSIQGEGKYVGCRQVFVRLEGCNLDCTYCDTEKEIGRHPTCVVEMPAGSHELHSYENPLSIETVAALAAQVAGGVPHHSLSVTGGEPLLHVPFIRALSARIPLPIFLETNGTLYEALAHCIDCVSYISMDIKLPGVLSHPVWDAHARFLKIARTKDVYVKVVVAAETEDDEVRTAARMVADTAPDVPLILQPVTPYGGCTAPTPARLLALQQIALAEVKDVRVIPQTHRMMDLL

SEQ ID NO: 34038 - protein, 243 aa, Selenomonas sp.
  misc_feature (1)..(243): tr|A0A0X8K971|A0A0X8K971_9FIRM 7-carboxy-7-deazaguanine synthase OS=Selenomonas sp. oral taxon 136 OX=713030 G N=queE PE=3 SV=1
MDENIIEIFSTVQGEGKYVGCRQVFMRLEGCNLHCSYCDTDSAVGMHPDCVVEEGAGTYHLVPYPNPISPQRAAELVEIAAAGIPHQALSITGGEPLLHAAFIRALAPHVHLPIYLETNGTLHEELKKCIDCVAGISMDIKLPSATTHPVWDAHVRFLEIAKAKDTWVKIVVAAESPDGEVDTAIRLVADIAPETMLILQPVTPYGGWTKPSPEQLLAWQGNALRRLAHVRVIPQTHRMMDML

SEQ ID NO: 34039 - protein, 241 aa, Selenomonas sputigena
  misc_feature (1)..(241): tr|C9LTU0|C9LTU0_SELS3 7-carboxy-7-deazaguanine synthas e OS=Selenomonas sputigena (strain ATCC 35185 / DSM 207 58 / VPI D19B-28) OX=546271 GN=queE PE=3 SV=1
MEENILEIFSSIQGEGKYIGARQVFLRFAGCNIKCSFCDTAFQPAASCRVEAIPGCGEYEELPNPLSVQEVAARIRAFVVPVRHHSISLTGGEPLLHATFIRALASEVNVPFFLETNGTLYEEMASILDITSYISMDIKLPSVTGKSLWEEHRRFLRLLHNHDTYVKIVVAENTEEEEFQEAVHLVAHIAPQILFVIQPATPFGSVHAPTAKKLLHLQEEAAEHLANVRVIPQAHRMMGLL

SEQ ID NO: 34040 - protein, 231 aa, Senegalimassilia anaerobia
  misc_feature (1)..(231): tr|A0A369LDV8|A0A369LDV8_9ACTN 7-carboxy-7-deazaguanine synthase OS=Senegalimassilia anaerobia OX=1473216 GN=q ueE PE=3 SV=1
MPVAERFVSINGEGACAGKLAAFIRFAGCNLRCGYCDTMWANVPGAAAKGETPEQLAAWVRQTGVECVTLTGGEPVLQPLLPQLVELLLGEPGPCERGLRVEIETNGAADLGELAALRARIGDATPGVLSFTVDWKLPSSGMEQRMLPANFRLLDTRDTVKFVCGQGDLPRALEVARQLDLPGRVPVYLSPCFGDIEPARIVEFMQENQMTWATAQVQLHKVIWPDVERGV

SEQ ID NO: 34041 - protein, 231 aa, Senegalimassilia sp.
  misc_feature (1)..(231): tr|A0A4Q2K0X5|A0A4Q2K0X5_9ACTN 7-carboxy-7-deazaguanine synthase OS=Senegalimassilia sp. KGMB04484 OX=2509433 GN=queE PE=3 SV=1
MPVVEKFISINGEGRCAGKLAAFIRFAGCNLRCSYCDTMWANEPGAAVQSETVAALVAWVRETGVECVTLTGGEPVLQPHLAQLVRVLCGEAGPTGHGLRVEVETNGAADLAELANLRQQLRGVAPGALTFTVDWKLPSSGMEARMLPTNFALLDARDAVKFVCAESDLPRVLEVARQLDLPGRVPVYLSPCFGRIEPARIVEFMQENGMIWATAQLQLHKIIWPNVERGV

SEQ ID NO: 34042 - protein, 209 aa, Seonamhaeicola algicola
  misc_feature (1)..(209): tr|A0A5C7ANI4|A0A5C7ANI4_9FLAO 7-carboxy-7-deazaguanine synthase OS=Seonamhaeicola algicola OX=1719036 GN=queE PE=3 SV=1
MNREIQTLVDKGEMLPLMEEFYTIQGEGYYKGTAAYFIRVGGCDVGCHWCDVKESWNANLHPPTETTKIVENAKKYSDTIVVTGGEPLTWDMTLLTTQLKAEGLKTHIETSGAYKLTGEWDWICLSPKKMKLPTKEVSKKANELKVIVYNKDDFRFAEEQAAKVSENCILYLQPEWSKRDKVVPLIVDYVMQNPKWKVSLQTHKYLNIP

SEQ ID NO: 34043 - protein, 209 aa, Seonamhaeicola aphaedonensis
  misc_feature (1)..(209): tr|A0A3D9HDP4|A0A3D9HDP4_9FLAO 7-carboxy-7-deazaguanine synthase OS=Seonamhaeicola aphaedonensis OX=1461338 GN =queE PE=3 SV=1
MNTEIQKLVDKGDMLPLMEEFYTIQGEGYHKGTAAYFIRIGGCDVGCHWCDVKESWNADLHPPTATSKIVDNAKKYSDTIVVTGGEPLMWDMTMLTTKLKAFGLKTHIETSGAYKLTGDWDWICLSPKKMKLPTNEVYEKAHELKVIVYNKDDLRFAEEQASKVNKNCILYLQPEWSKRDKVIPLIVDYVMQNPKWKVSLQTHKYLNIP

SEQ ID NO: 34044 - protein, 209 aa, Seonamhaeicola marinus
  misc_feature (1)..(209): tr|A0A5D0ILL1|A0A5D0ILL1_9FLAO 7-carboxy-7-deazaguanine synthase OS=Seonamhaeicola marinus OX=1912246 GN=queE PE=3 SV=1
MDEAIKIKVDKGEMLPLMEEFYTIQGEGYYKGTAAYFIRIGGCDVGCHWCDVKESWNADLHPPTETSKIVENAKKYSDTIVVTGGEPLTWDMTVLTTRLKEEGLKTHIETSGAYKLTGQWDWICLSPKKMKLPTDEVCEKADELKVIVYNKDDLRFAEEQAAKVSKDCILYLQPEWSKRDKVVPLIVDYVMQNPKWKVSLQTHKYLNIP

SEQ ID NO: 34045 - protein, 209 aa, Seonamhaeicola sp.
  misc_feature (1)..(209): tr|A0A562YDX8|A0A562YDX8_9FLAO 7-carboxy-7-deazaguanine synthase OS=Seonamhaeicola sp. W255 OX=2528206 GN=queE PE=3 SV=1
MIKEIQELVDKGEMLPLMEEFYTIQGEGYHKGTAAYFIRIGGCDVGCHWCDVKESWNANLHPPTATSKIVENAKRYSDTIVVTGGEPLTWDMTILTTKLKALGLKTHIETSGAYKLTGEWDWICLSPKKMKLPTDEVYEKAHELKVIVYNKDDLRFAEEQASRVNENCILYLQPEWSKRDKVIPLIVDYVMQYPKWKVSLQTHKYLNIP

SEQ ID NO: 34046 - protein, 209 aa, Seonamhaeicola sp.
  misc_feature (1)..(209): tr|A0A1U7DPL2|A0A1U7DPL2_9FLAO 7-carboxy-7-deazaguanine synthase OS=Seonamhaeicola sp. S2-3 OX=1936081 GN=queE PE=3 SV=1
MNEAIQKQVNKGEMLPLMEEFYTIQGEGFHKGTAAYFVRIGGCDVGCHWCDVKESWNANLHPPTETDKIVENAKKYSDTIVVTGGEPLTWDMTLLTTKLKAEGLQTHIETSGAYKLTGVWDWICLSPKKMKLPTNEIYAKADELKMIVYNKDDLRFAEEQAAKVNKDCILYLQPEWSKRDKVIPLIVDYVMQHPKWKVSLQTHKYLNIP

SEQ ID NO: 34047 - protein, 238 aa, Serpentinicella alkaliphila
  misc_feature (1)..(238): tr|A0A4R2TPQ7|A0A4R2TPQ7_9CLOT 7-carboxy-7-deazaguanine synthase OS=Serpentinicella alkaliphila OX=1734049 GN= queE PE=3 SV=1
MKLLLIAPLMKKVEVIKMSFNVVEKFVSINGEGRRCGQLAVFIRFAGCNLNCSYCDTAWANEEDVSYEIMSIEEIYKYIKSSGVNNITLTGGEPLLQEGIVNLLKTLSSDTELYIEIETNGSVLIDKFVSIKNCPSFTMDYKLPSSGMENKMALENFKYISKNDTIKFVSGSIEDLNRVKELIEEYDLVNKTNVYISSVFGKIALDEIVEFMKNNNMNGVTLQVQLHKIIWDPDKRSV

SEQ ID NO: 34048 - protein, 214 aa, Serpentinomonas mccroryi
  misc_feature (1)..(214): tr|A0A060NP88|A0A060NP88_9BURK 7-carboxy-7-deazaguanine synthase OS=Serpentinomonas mccroryi OX=1458426 GN=que E PE=3 SV=1
MSYSVKEIFYTLQGEGAQSGRAAVFCRFAGCNLWSGREADRASAQCRFCDTDFVGTDGAGGGRFASAQALAQAVRSHWRGGSGAGAGRPLVVCTGGEPLLQLDAALIEALHNEGFEIALETNGTLDLPAGLDWVCVSPKAGTELRVRRGDELKLVYPQPGAEPERFAALDFAHFFLQPLDGPQRAQHTQQAIDYCMAQPQWRLSLQTHKWLGIP

SEQ ID NO: 34049 - protein, 218 aa, Serpentinomonas raichei
  misc_feature (1)..(218): tr|A0A060NQY9|A0A060NQY9_9BURK 7-carboxy-7-deazaguanine synthase OS=Serpentinomonas raichei OX=1458425 GN=queE PE=3 SV=1
MNYSVKEIFYTLQGEGAQSGRAAVFCRFAGCNLWSGREADRASAQCRFCDTDFVGTDGSGGGKFASALALAQAVWACWGGGSGISSGLGAGRPLVVCTGGEPLLQLDAALIEALHAQGFEIAVETNGTLALPEGLDWVCVSPKADAELRVQRGDELKLVYPQAEAPPERFAGLDFAHFFLQPLDGPLRQAHTQQAIGYCMAHPQWRLSLQTHKWLGIP

SEQ ID NO: 34050 - protein, 223 aa, Serratia ficaria
  misc_feature (1)..(223): tr|A0A240AZR1|A0A240AZR1_SERFI 7-carboxy-7-deazaguanine synthase OS=Serratia ficaria OX=61651 GN=queE PE=3 SV= 1
MQYPINEMFQTLQGEGFFTGVPAIFIRLQGCPVGCSWCDTKHTWEKEANREVDMQRILVKTAESDAWGSASAEQLLAVMRQQGYTARHVVITGGEPCIYDLTPLTELFEQQGYGCQIETSGTHEIRCSAKTWVTVSPKVNMRGGMKVLDQALQRADEVKHPVARERDIEALDALLATLQDDKARIIALQPISQKEEATRLCIETCIARNWRLSMQTHKYLNIA

SEQ ID NO: 34051 - protein, 223 aa, Serratia fonticola
  misc_feature (1)..(223): tr|A0A0F7HBV3|A0A0F7HBV3_SERFO 7-carboxy-7-deazaguanine synthase OS=Serratia fonticola OX=47917 GN=queE PE=3 S V=1
MQYPINEMFQTLQGEGYFTGVPAIFIRLQGCPVGCSWCDTKHTWEKDADREVDMQRILVKTAESDAWGSASAEQLLEVVEQQGYTARHIVITGGEPCIYDLIPLTKLFENAGYGCQIETSGTHEVLCSPNTWVTVSPKVNMRGGLKVVEQALMRADEIKHPVGRERDIEALDELLATLHDEKHRIIALQPISQKEEATRLCIETCIARNWRLSMQTHKYLNIA

SEQ ID NO: 34052 - protein, 55 aa, Serratia fonticola
  misc_feature (1)..(55): tr|A0A4U9WFZ1|A0A4U9WFZ1_SERFO 7-carboxy-7-deazaguanine synthase OS=Serratia fonticola OX=47917 GN=queE_2 PE=4 SV=1
MQRILVKTAESDAWGSASAEQLLEVVEQQGYTARHIVITGGEPCIYDLIPVDQAV

SEQ ID NO: 34053 - protein, 223 aa, Serratia liquefaciens
  misc_feature (1)..(223): tr|A0A515D068|A0A515D068_SERLI 7-carboxy-7-deazaguanine synthase OS=Serratia liquefaciens OX=614 GN=queE PE=3 SV=1
MQYPINEMFQTLQGEGFFTGVPAIFIRLQGCPVGCSWCDTKHTWEKEANREVDMQRILVKTEESDAWGSANAEQLLAVMRQQGYTARHVVITGGEPCIYDLTPLTQLLEDNGYGCQIETSGTHEIRCSAKTWVTVSPKVNMRGGMKVLDQALQRADEVKHPVGRERDIEALDALLATLHDEKPRIIALQPISQKEEATRLCIETCIARNWRLSMQTHKYLNIA

SEQ ID NO: 34054 - protein, 223 aa, Serratia liquefaciens; identical to SEQ ID NO: 30865
  misc_feature (1)..(223): tr|A0A484XYY4|A0A484XYY4_SERLI 7-carboxy-7-deazaguanine synthase OS=Serratia liquefaciens OX=614 GN=queE PE=3 SV=1

SEQ ID NO: 34055 - protein, 223 aa, Serratia marcescens
  misc_feature (1)..(223): tr|A0A3E2EE54|A0A3E2EE54_SERMA 7-carboxy-7-deazaguanine synthase OS=Serratia marcescens subsp. sakuensis OX=21 1760 GN=queE PE=3 SV=1
MQYPINEMFQTLQGEGFFTGVPAIFIRLQGCPVGCSWCDTKHTWEKEAHREVDLQRILVKTEESDAWGNASAEQLLAVMRQQGYTARHVVITGGEPCIYDLAPLTELFEQHGYRCQIETSGTHEIRCSANTWVTVSPKVNMRGGMKVLDQALRRADEVKHPVARERDIEALDALLATLQDDKARIIALQPISQKEEATRLCIETCIARNWRLSMQTHKYLNIA

SEQ ID NO: 34056 - protein, 223 aa, Serratia marcescens
  misc_feature (1)..(223): tr|A0A2V4GSG1|A0A2V4GSG1_SERMA 7-carboxy-7-deazaguanine synthase OS=Serratia marcescens OX=615 GN=queE PE=3 SV =1
MQYPINEMFQTLQGEGFFTGVPAIFIRLQGCPVGCSWCDTKHTWEKEANREVDLQRILVKTEESDAWGNAGAEQLLAVMRQQGYTARHVVITGGEPCIYDLTPLTELFEQHGYGCQIETSGTHEIRCSAKTWVTVSPKVNMRGGMKVLDQALRRADEVKHPVARERDIEALDALLATLQDDKARIIALQPISQKEEATRLCIETCIARNWRLSMQTHKYLNIA

SEQ ID NO: 34057 - protein, 223 aa, Serratia nematodiphila
  misc_feature (1)..(223): tr|A0A086G8B3|A0A086G8B3_9GAMM 7-carboxy-7-deazaguanine synthase OS=Serratia nematodiphila DZ0503SBS1 OX=14499 81 GN=queE PE=3 SV=1
MQYPINEMFQTLQGEGFFTGVPAIFIRLQGCPVGCSWCDTKHTWEKEAHREVDLQRILVKTEESDAWGNASAEQLLAVMRQQGYTARHVVITGGEPCIYDLVPLTELFEQHGYRCQIETSGTHEIRCSANTWVTVSPKVNMRGGMKVLDQALRRADEVKHPVARERDIEALDALLATLQDDKARIIALQPISQKEEATRLCIETCIARNWRLSMQTHKYLNIA

SEQ ID NO: 34058 - protein, 223 aa, Serratia nematodiphila
  misc_feature (1)..(223): tr|A0A5C7D1F5|A0A5C7D1F5_9GAMM 7-carboxy-7-deazaguanine synthase OS=Serratia nematodiphila OX=458197 GN=queE P E=3 SV=1
MQYPINEMFQTLQGEGFFTGVPAIFIRLQGCPVGCSWCDTKHTWEKEAHREVDLQRILVKTEESDAWGNASAEQLLAVMRQQGYTARHVVITGGEPCIYDLAPLTELFEQHGYRCQIETSGTHEIRCSANTWVTVSPKVNMRGGMKVLDQALRRADEVKHPVARERDIEALDALLATLRDDKARIIALQPISQKEEATRLCIETCIARNWRLSMQTHKYLNIA

SEQ ID NO: 34059 - protein, 223 aa, Serratia odorifera
  misc_feature (1)..(223): tr|D4DX10|D4DX10_SEROD 7-carboxy-7-deazaguanine synthas e OS=Serratia odorifera DSM 4582 OX=667129 GN=nrdG PE=3 SV=1
MQYPINEMFQTLQGEGYFTGVPAIFIRLQGCPVGCSWCDTKHTWEKEANREVDMQRILVKTEESDAWGSATAEQLLEVVQRQGYTARHIVITGGEPCIYDLIPLTKLFELNGYACQIETSGTHEILCTPSTWVTVSPKVNMRGGMKVLEQALMRADEIKHPVGRQRDIEALDALLDTLNDEKRRIIALQPISQKDEATRLCIETCIARNWRLSMQTHKYLNIA

SEQ ID NO: 34060 - protein, 223 aa, Serratia odorifera; identical to SEQ ID NO: 34059
  misc_feature (1)..(223): tr|A0A3S5D6U1|A0A3S5D6U1_SEROD 7-carboxy-7-deazaguanine synthase OS=Serratia odorifera OX=618 GN=queE PE=3 SV= 1

SEQ ID NO: 34061 - protein, 223 aa, Serratia oryzae
  misc_feature (1)..(223): tr|A0A1S8CJP6|A0A1S8CJP6_9GAMM 7-carboxy-7-deazaguanine synthase OS=Serratia oryzae OX=2034155 GN=queE PE=3 SV =1
MQYPINEMFQTLQGEGYFTGVPAIFIRLQGCPVGCSWCDTKHTWEKDTDREVDMQRILVKTAESDAWGSASAEQLLEVIQQQGYTARHIVITGGEPCIYDLIPLTTLFENSGYGCQIETSGTHEILCSPTTWVTVSPKVKMRGGLTVLPQALMRADEIKHPVGRERDIDALDELLATLQDEKRRIIALQPISQKEEATRLCIATCIARNWRLSMQTHKYLNIA

SEQ ID NO: 34062 - protein, 146 aa, Serratia plymuthica
  misc_feature (1)..(146): tr|A0A3S4GWV2|A0A3S4GWV2_SERPL 7-carboxy-7-deazaguanine synthase OS=Serratia plymuthica OX=82996 GN=queE_2 PE= 4 SV=1
MIRQQGYTARHVVITGGEPCIYDLTLLTQLLEDNGYGCQIETSGTHEVRCSAKTWVTVSPKVNMRGGMKVLDQALQRADEVKHPVGRERDIEALDALLATLHDEKPRIIALQPISQKEEATRLCIETCIARNWRLSMQTHKYLNIA

SEQ ID NO: 34063 - protein, 223 aa, Serratia plymuthica
  misc_feature (1)..(223): tr|A0A318P4X3|A0A318P4X3_SERPL 7-carboxy-7-deazaguanine synthase OS=Serratia plymuthica OX=82996 GN=queE PE=3 SV=1
MQYPINEMFQTLQGEGFFTGVPAIFIRLQGCPVGCSWCDTKHTWEKEANREVDMQRILVKTEESDAWGSASAEQLLAVMRQQGYTARHVVITGGEPCIYDLTPLTQLLEENGYGCQIETSGTHEIQCSATTWVTVSPKVNMRGGMKVLDQALQRADEVKHPVGRERDIEALDALLATLHDEKPRIIALQPISQKEEATRLCIETCIARNWRLSMQTHKYLNIA

SEQ ID NO: 34064 - protein, 223 aa, Serratia proteamaculans
  misc_feature (1)..(223): tr|A0A4V1WJU1|A0A4V1WJU1_9GAMM 7-carboxy-7-deazaguanine synthase OS=Serratia proteamaculans OX=28151 GN=queE P E=3 SV=1
MQYPINEMFQTLQGEGFFTGVPAIFIRLQGCPVGCSWCDTKHTWEKEANREVDMQRILVKTEESDAWGSASAEQLLAVIRQQGYTARHVVITGGEPCIYDLTPLTELLEEHGYGCQIETSGTHEIQCSAKTWVTVSPKVNMRGGMKVLSQALQRADEVKHPVGRERDIEALDALLATLHDEKPRIIALQPISQKDEATRLCIETCIARNWRLSMQTHKYLNIA

SEQ ID NO: 34065 - protein, 223 aa, Serratia proteamaculans
  misc_feature (1)..(223): tr|A8G9X4|A8G9X4_SERP5 7-carboxy-7-deazaguanine synthas e OS=Serratia proteamaculans (strain 568) OX=399741 GN= queE PE=3 SV=1
MQYPINEMFQTLQGEGFFTGVPAIFIRLQGCPVGCSWCDTKHTWEKEANREVDMQRILVKTEESDAWGSASAEQLLAVIRQQGYTARHVVITGGEPCIYDLTPLTELLEEHGYGCQIETSGTHEIQCSAKTWVTVSPKVNMRGGMKVLSQALQRADEVKHPVGRERDIEALDALLATLHDEKPRIIALQPISQKEEATRLCIETCIARNWRLSMQTHKYLNIA

SEQ ID NO: 34066 - protein, 223 aa, Serratia quinivorans; identical to SEQ ID NO: 34065
  misc_feature (1)..(223): tr|A0A2X2J9Y2|A0A2X2J9Y2_9GAMM 7-carboxy-7-deazaguanine synthase OS=Serratia quinivorans OX=137545 GN=queE PE= 3 SV=1

SEQ ID NO: 34067 - protein, 223 aa, Serratia quinivorans
  misc_feature (1)..(223): tr|A0A4Q8DCN6|A0A4Q8DCN6_9GAMM 7-carboxy-7-deazaguanine synthase OS=Serratia quinivorans OX=137545 GN=queE PE= 3 SV=1
MQYPINEMFQTLQGEGFFTGVPAIFIRLQGCPVGCSWCDTKHTWEKEANREVDMQRILVKTEESDAWGSASAEQLLAVIRQQGYTARHVVITGGEPCIYDLTPLTELLEDNGYGCQIETSGTHEIQCSAKTWVTVSPKVNMRGGMKVLSQALQRADEVKHPVGRERDIEALDALLATLHDEKPRIIALQPISQKEEATRLCIETCIARNWRLSMQTHKYLNIA

SEQ ID NO: 34068 - protein, 168 aa, Serratia rubidaea
  misc_feature (1)..(168): tr|A0A4U9HEB6|A0A4U9HEB6_SERRU 7-carboxy-7-deazaguanine synthase OS=Serratia rubidaea OX=61652 GN=queE_1 PE=3 SV=1
MQYPINEMFQTLQGEGYFTGVPAIFIRLQGCPVGCSWCDTKHTWEKDAHREVDMQRILVKTSESDAWGSASAEQLLAVIGQQGYSARHIVITGGEPCIYDLLPLTRLFEAHGYGCQIETSGTHEVRCTENTWVTVSPKVNMRGGMKVLDQALTRADEIKTPGRASAGY

SEQ ID NO: 34069 - protein, 39 aa, Serratia rubidaea
  misc_feature (1)..(39): tr|A0A447QPG4|A0A447QPG4_SERRU 7-carboxy-7-deazaguanine synthase OS=Serratia rubidaea OX=61652 GN=queE_2 PE=4 SV=1
MIALQPISQKDEATKLCIATCIERNWRLSMQTHKYLNIA

SEQ ID NO: 34070 - protein, 223 aa, Serratia sp.
  misc_feature (1)..(223): tr|I0QYP4|I0QYP4_9GAMM 7-carboxy-7-deazaguanine synthas e OS=Serratia sp. M24T3 OX=932213 GN=queE PE=3 SV=1
MQYPINEMFETLQGEGFFTGVPAIFIRLQGCPVGCSWCDTKHTWEKFADREVDMQRILVKTEETDAWGNATAEQLHQVIQKQGWTAKHVVITGGEPCIYDLQPLTKLLEEQGYSCQIETSGTHEVRCSEKTWVTVSPKVNMRGGYDILPQALQRADEIKHPVARQRDVDALEQLLATLNDQKARIIALQPISQKDEATKLCIATCIAKNWRLSMQTHKYLNIA

SEQ ID NO: 34071 - protein, 223 aa, Serratia sp.
  misc_feature (1)..(223): tr|A0A4R6EK29|A0A4R6EK29_9GAMM 7-carboxy-7-deazaguanine synthase OS=Serratia sp. BIGb0156 OX=2485132 GN=queE P E=3 SV=1
MQYPINEMFQTLQGEGYFTGVPAIFIRLQGCPVGCAWCDTKHTWDMLEDREVSLFSILAKTKESDKWGAGTPEDLLTAITRQGWTARHVVITGGEPCIHDLTALTSLLEHNGYSCQIETSGTHEVRCSHATWVTVSPKVNMRGGYEVLSQALHRADEIKHPVGRVRDIEALDELLETLSDDKQRVIALQPISQKDDATRLCIETCIARNWRLSMQTHKYLNIV

SEQ ID NO: 34072 - protein, 223 aa, Serratia symbiotica
  misc_feature (1)..(223): tr|A0A068ZAE3|A0A068ZAE3_9GAMM 7-carboxy-7-deazaguanine synthase OS=Serratia symbiotica OX=138074 GN=ygcF PE=3 SV=1
MQYPINEIFQTLQGEGFFTGVPAIFIRLQGCPVGCSWCDTKHTWDKEANREVDMQRILVKTEESAAWGSANAEQLLAVMRQQGYTARHVVITGGEPCIFDLVPLTALLEQQGYGCQIETSGTYEIRCSAKTWVTVSPKVNMRGGMKVLDQALQRADEVKHPVARERDIEALDALLATLHDKKPRIIALQPISKKEEATRLCITTCIARNWRLSMQTHKYLNIA

SEQ ID NO: 34073 - protein, 223 aa, Serratia symbiotica
  misc_feature (1)..(223): tr|A0A455VFK2|A0A455VFK2_9GAMM 7-carboxy-7-deazaguanine synthase OS=Serratia symbiotica OX=138074 GN=queE PE=3 SV=1
MQYPINEIFQTLQGEGFFTGVPAIFIRLQGCPVGCSWCDTKHTWDKEVNREVDMQRILVKTEESATWGSASAEQLLAVMRQQGYTARHVVITGGEPCIYDLVPLTALLEQQGYGCQIETSGTYEIRCSVKTWVTVSPKVNMRGGMKVLDQALQRADEVKHPVARERDIEALDALLATLHDKKPRIIALQPISKKEDATRLCITTCIARNWRLSMQTHKYLNIA

SEQ ID NO: 34074 - protein, 223 aa, Serratia ureilytica
  misc_feature (1)..(223): tr|A0A5C7C741|A0A5C7C741_9GAMM 7-carboxy-7-deazaguanine synthase OS=Serratia ureilytica OX=300181 GN=queE PE=3 SV=1
MQYPINEMFQTLQGEGFFTGVPAIFIRLQGCPVGCSWCDTKHTWEKEAHREVDLQRILVKTEESDAWGNAGAEQLLAVMRQQGYTARHVVITGGEPCIYDLAPLTELFEQHGYRCQIETSGTHEIRCSANTWVTVSPKVNMRGGMKVLDQALRRADEVKHPVARERDIEALDALLATLQDDKARIIALQPISQKEEATRLCIETCIARNWRLSMQTHKYLNIA

SEQ ID NO: 34075 - protein, 222 aa, Shewanella algae
  misc_feature (1)..(222): tr|A0A1S2AYT9|A0A1S2AYT9_9GAMM 7-carboxy-7-deazaguanine synthase OS=Shewanella algae OX=38313 GN=queE PE=3 SV= 1
MYYPVNEVFETLQGEGVFTGVPAIFVRLQGCPVGCPWCDTRQTWDKLEHNQVKPADVIRTDGSIGRWAEHDAKSLLEAFKQQGFNAKHIVITGGEPCLYPLTEMTEAFNAAGFRTQIETSGTFEVNCSADTWVTVSPKVGMKGGMPVLRQALERANEIKHPVATEAHIEELDQLLRGLDLKDKAICLQPISQKSRATALAMKVCIERNWRLSIQTHKYLDID

SEQ ID NO: 34076 - protein, 222 aa, Shewanella algae
  misc_feature (1)..(222): tr|A0A3G4UNM6|A0A3G4UNM6_9GAMM 7-carboxy-7-deazaguanine synthase OS=Shewanella algae OX=38313 GN=queE PE=3 SV= 1
MYYPVNEVFETLQGEGVFTGVPAIFVRLQGCPVGCPWCDTRQTWDKLEHNQVKPADVIRTDGSIGRWALHDAKSLLEAFKQQGFNARHIVITGGEPCLYPLTEMTEAFNAAGFRAQIETSGTFEVNCSADTWVTVSPKVGMKGGMPVLRQALERANEIKHPVATEAHIEELDQLLQGLDLKDKTICLQPISQKSRATALAMKVCIERNWRLSIQTHKYLDID

SEQ ID NO: 34077 - protein, 233 aa, Shewanella amazonensis
  misc_feature (1)..(233): tr|A1S6M4|A1S6M4_SHEAM 7-carboxy-7-deazaguanine synthas e OS=Shewanella amazonensis (strain ATCC BAA-1098 / SB2 B) OX=326297 GN=queE PE=3 SV=1
MATTPTERVLMTEYPINEVFETIQGEGSHTGLPAIFVRLQGCPVACPWCDTAQTWDVLEQSKVAPADVIQVDGSIGRWAMHSASSLVAAFNQKGFTAKLVVITGGEPCMHDLTDLTQGFEAEGFHCQIETSGTFEVHCSDRTYVTVSPKINMKGGYPVLKQALVRANEIKHPVATDAHIDELDALLEGIDTSGKTICLQPISQKPRATELAMKTCIARNWRLSIQTHKYLNID

SEQ ID NO: 34078 - protein, 222 aa, Shewanella atlantica
  misc_feature (1)..(222): tr|A0A431WEF1|A0A431WEF1_9GAMM 7-carboxy-7-deazaguanine synthase OS=Shewanella atlantica OX=271099 GN=queE PE= 3 SV=1
MKYPVNEVFETIQGEGFFTGVPALFVRLQGCPVGCSWCDTKHTWDVIEENRVAPELVIQVDGTIGRWAELTAEELISNFKAKGFTAKHVVITGGEPCLHDLIPLTESLNRAGYATQIETSGTFEVICSDETWVTVSPKINMKAGLPILKQALIRANEIKHPVATQAHIDDLDCLLKGITLDEKIICLQPISQKSRATELAMRVCIERNWRLSIQTHKYLEID

SEQ ID NO: 34079 - protein, 222 aa, Shewanella baltica
  misc_feature (1)..(222): tr|A0A379ZCW3|A0A379ZCW3_9GAMM 7-carboxy-7-deazaguanine synthase OS=Shewanella baltica OX=62322 GN=queE PE=3 S V=1
MNYPVNEVFETIQGEGVFTGVPAIFVRLQGCPVGCAWCDTKQTWDVLEVNKVTPEQVITVDGTIGRWAEHTAQSLIAAFHAKGFTARHIVITGGEPCMYDLRELTETLHNQGFATQIETSGTFDINCADDTWVTVSPKVNMKGGYKVLTQALNRANEIKHPIATENHIAELDELLQDIDISAKTICLQPISQKPRATELAMKVCIARNWRLSIQTHKYLNID

SEQ ID NO: 34080 - protein, 222 aa, Shewanella baltica
  misc_feature (1)..(222): tr|A3D4T7|A3D4T7_SHEB5 7-carboxy-7-deazaguanine synthas e OS=Shewanella baltica (strain OS155 / ATCC BAA-1091) OX=325240 GN=queE PE=3 SV=1
MNYPVNEVFETIQGEGVFTGVPAIFVRLQGCPVGCAWCDTKQTWDVLEVNKVMPEQVISVDGTIGRWADHTAQSLIAAFHAKGFTARHIVITGGEPCMYDLCELTETLHSQGFATQIETSGTFDINCADDTWVTVSPKVNMKGGYKVLTQALNRANEIKHPIATENHIAELDELLQDIDISAKTICLQPISQKPRATELAMKVCIARNWRLSIQTHKYLNID

SEQ ID NO: 34081 - protein, 222 aa, Shewanella benthica
  misc_feature (1)..(222): tr|A9DGZ0|A9DGZ0_9GAMM 7-carboxy-7-deazaguanine synthas e OS=Shewanella benthica KT99 OX=314608 GN=queE PE=3 SV =1
MKYPVNEVFETIQGEGVFTGVAAIFVRLQGCPVGCSWCDTKHTWDVLEKNRVAPELVIQVDGVIGRWSELTAEELINFFIRKGFNAKHVVITGGEPCIHDLTELTSQLNRQGYGTQIETSGTFEVTCSDKTWVTVSPKVNMKAGMTVLTQALERADEIKHPVARSKHIDDLDELLEGIEVEGKIICLQPISQKPRATELAMKICIERNWRLSIQTHKYLNID

SEQ ID NO: 34082 - protein, 222 aa, Shewanella benthica
  misc_feature (1)..(222): tr|A0A330M3C8|A0A330M3C8_9GAMM 7-carboxy-7-deazaguanine synthase OS=Shewanella benthica OX=43661 GN=ygcF PE=3 SV=1
MKYPVNEVFETIQGEGVFTGVAAIFVRLQGCPVGCSWCDTKHTWDVLQKNRVAPELVIQVDGEIGRWSELTAEELINFFIRKGFNAKHVVITGGEPCIHDLTALTSQLNRQGYGTQIETSGTFEVICSDKTWVTVSPKVNMKAGMTVLTQALERADEIKHPVARSKHIEDLDELLEGIELEGKIICLQPISQKPRATELAMKICIERNWRLSIQTHKYLNID

SEQ ID NO: 34083 - protein, 222 aa, Shewanella bicestrii
  misc_feature (1)..(222): tr|A0A220UM37|A0A220UM37_9GAMM 7-carboxy-7-deazaguanine synthase OS=Shewanella bicestrii OX=2018305 GN=queE PE =3 SV=1
MNYPVNEVFETIQGEGVFTGVPAIFVRLQGCPVGCAWCDTKQTWDLLEENKVSPEQVITVDGSVGRWANHTAQSLIEAFNAKGYTARHVVITGGEPCMYDLNELTHALHAAGFATQIETSGTFEVKCDADTWVTVSPKINMKGGYKVLAQALIRANEIKHPIATENHIDELDELLKGIDVSSKTICLQPISQKPRATELAMKVCIARNWRLSIQTHKYLNID

SEQ ID NO: 34084 - protein, 222 aa, Shewanella canadensis
  misc_feature (1)..(222): tr|A0A3S0IL13|A0A3S0IL13_9GAMM 7-carboxy-7-deazaguanine synthase OS=Shewanella canadensis OX=271096 GN=queE PE =3 SV=1
MKYPVNEVFETIQGEGFFTGVPAIFVRLQGCPVGCSWCDTKHTWDVIEDNRVAPELVIQVDGTIGRWAELTAEELISNFKIKGFTAKHVVITGGEPCLHDLIPLTESLHLSGYATQIETSGTFEVICSDKTWVTVSPKINMKAGLPILEQALIRANEIKHPVATQAHIDDLDCLLKGIPLAEKTICLQPISQKSRATELAMRVCIERNWRLSIQTHKYLDID

SEQ ID NO: 34085 - protein, 222 aa, Shewanella chilikensis
  misc_feature (1)..(222): tr|A0A2V4W956|A0A2V4W956_9GAMM 7-carboxy-7-deazaguanine synthase OS=Shewanella chilikensis OX=558541 GN=queE P E=3 SV=1
MYYPVNEVFETLQGEGVFTGVPAIFVRLQGCPVGCPWCDTRQTWDKLEHNQVKPADVICTDGCIGRWAEHDAKSLLEAFKQQGFNARHIVITGGEPCLYSLTEMTEAFNAAGFRTQIETSGTFEVNCSADTWVTVSPKVGMKGGMPVLRQALERANEIKHPVATEAHIEELDQLLQGLDLKDKTICLQPISQKSRATALAMKVCIERNWRLSIQTHKYLDID

SEQ ID NO: 34086 - protein, 222 aa, Shewanella colwelliana
  misc_feature (1)..(222): tr|A0A1E5IYY9|A0A1E5IYY9_SHECO 7-carboxy-7-deazaguanine synthase OS=Shewanella colwelliana OX=23 GN=queE PE=3 SV=1
MKYPVNEVFETIQGEGVFTGVPAIFVRLQGCPVGCAWCDTKHTWETLAENRVDPALVIQVDGEVGRWSELGAGELIDALKQKGFTAKHIVITGGEPCMYDLQTLTQTLSEAGFQCQIETSGTFEVKCDDRTWVTVSPKVNMKGGFEVLSQALERANEIKHPVAKASHVAELDALLEGIVLDSKTICLQPISQKPRATELAMKVCIERNWRLSIQTHKYLNID

SEQ ID NO: 34087 - protein, 222 aa, Shewanella decolorationis
  misc_feature (1)..(222): tr|V1DF73|V1DF73_9GAMM 7-carboxy-7-deazaguanine synthas e OS=Shewanella decolorationis S12 OX=1353536 GN=queE P E=3 SV=1
MNYPVNEVFETIQGEGVFTGVPAIFVRLQGCPVGCAWCDTKQTWDLLEENKVSPEQVITVDGSVGRWANHTAQSLIEAFNAKGYTARHVVITGGEPCMYDLHELTHTLHAAGFATQIETSGTFEVKCDADTWVTVSPKINMKGGYKVLAQALSRANEIKHPIATENHIDELDELLKGIDVSAKTICLQPISQKPRATELAMKVCIARNWRLSIQTHKYLNID

SEQ ID NO: 34088 - protein, 222 aa, Shewanella decolorationis; identical to SEQ ID NO: 34087
  misc_feature (1)..(222): tr|A0A5B8QY19|A0A5B8QY19_9GAMM 7-carboxy-7-deazaguanine synthase OS=Shewanella decolorationis OX=256839 GN=que E PE=3 SV=1

SEQ ID NO: 34089 - protein, 222 aa, Shewanella denitrificans
  misc_feature (1)..(222): tr|Q12MM9|Q12MM9_SHEDO 7-carboxy-7-deazaguanine synthas e OS=Shewanella denitrificans (strain OS217 / ATCC BAA- 1090 / DSM 15013) OX=318161 GN=queE PE=3 SV=1
MNYPVNEVFETIQGEGCFTGVPALFVRLQGCPVGCAWCDTKQTWDVLADNKVTPEQVITVDGTIGRWANHDGASLITAFKAKGFTAKHIVLTGGEPCLYDLTDITHDFIAAGYSVQIETSGTFEVKCHQDVWVTVSPKINMKGGYKVLEQALIRANEIKHPIATQNHIDELDELLADIDLSGKTICLQPISQKVRATELAMKTCIARNWRLSIQTHKYLNID

SEQ ID NO: 34090 - protein, 222 aa, Shewanella fodinae
  misc_feature (1)..(222): tr|A0A4R2F8P3|A0A4R2F8P3_9GAMM 7-carboxy-7-deazaguanine synthase OS=Shewanella fodinae OX=552357 GN=queE PE=3 SV=1
MQYPVNEVFETIQGEGVNTGLPAIFVRLQGCPVGCPWCDTRQTWEQKPENEVAPKQVIQTDGSIGRWAWFDARSLLQSFSDGAFSAKHVVLTGGEPCLFDLVELTNVLNHAGYTTQIETSGTFEVKCSDSTWVTVSPKIGMKGGLAVKSQALKRANEIKHPVATSTHIEQLDALLEGVDLTGKVVCLQPISQKSHATALAIKVCIARNWRLSVQTHKYLQID

SEQ ID NO: 34091 - protein, 222 aa, Shewanella frigidimarina
  misc_feature (1)..(222): tr|A0A106BZ35|A0A106BZ35_SHEFR 7-carboxy-7-deazaguanine synthase OS=Shewanella frigidimarina OX=56812 GN=queE PE=3 SV=1
MKYPVNEVFETIQGEGTYTGVPALFVRLQGCPVGCAWCDTKQTWDVLPENKVTAEQVIQVDGTIGRWADHTGYSLLQAFHDKGFTAKHIVLTGGEPCLYDLTELTTIFIEAGYQVQIETSGTFDVKCHLDVWVTVSPKINMKGGYKVLEQALNRANEIKHPIATEHHIDELDKLLMNIDVSDKTICLQPISQKARATELAMKVCISRNWRLSIQTHKYLNID

SEQ ID NO: 34092 - protein, 222 aa, Shewanella frigidimarina
  misc_feature (1)..(222): tr|Q082U1|Q082U1_SHEFN 7-carboxy-7-deazaguanine synthas e OS=Shewanella frigidimarina (strain NCIMB 400) OX=318 167 GN=queE PE=3 SV=1
MKYPVNEVFETIQGEGTYTGVPALFVRLQGCPVGCAWCDTKQTWDVLPENKVTAEQVIQVDGTIGRWADHTGYTLLQAFHDKGFTAKHIVLTGGEPCLYNLTELTTIFIEAGYQVQIETSGTFDVKCHSDVWVTVSPKINMKGGYKVLEQALNRANEIKHPIATEHHIDELDKLLLNIDVSDKTICLQPISQKARATELAMKVCISRNWRLSIQTHKYLNID

SEQ ID NO: 34093 - protein, 222 aa, Shewanella halifaxensis
  misc_feature (1)..(222): tr|B0TSC1|B0TSC1_SHEHH 7-carboxy-7-deazaguanine synthas e OS=Shewanella halifaxensis (strain HAW-EB4) OX=458817 GN=queE PE=3 SV=1
MKYPVNEVFETIQGEGTFTGVPAVFVRLQGCPVGCSWCDTKQTWELLEANHVAKELVIQVDGTIGRWSELSAEELVNAFKDKGFNAKHIVITGGEPCLYDLTELTQYLHSQGYQTQIETSGTFDVLCHADTWVTVSPKVNMKGGYKVLAQALNRANEIKHPIATQNHIDELDELLEGIDLTDKTVCLQPISQKARATELAMSTCIARNWRLSIQTHKYLDID

SEQ ID NO: 34094 - protein, 222 aa, Shewanella hanedai
  misc_feature (1)..(222): tr|A0A553JIJ3|A0A553JIJ3_SHEHA 7-carboxy-7-deazaguanine synthase OS=Shewanella hanedai OX=25 GN=queE PE=3 SV=1
MKYPVNEVFETIQGEGFYTGVPAIFVRLQGCPVGCSWCDTKHTWDLLETNRVKPEMVIQVDGTIGRWSELSTSELIHFMKQKGFTASHIVITGGEPCLHDLTAMTDELNNAGYSTQIETSGTFNVLCSDKTWVTVSPKLKMKAGLAVLPQALNRANEIKHPVATQTHIDDLDELLFDIDLTGKTICLQPISQKDRATELAMRVCIERNWRLSIQTHKYLNID

SEQ ID NO: 34095 - protein, 222 aa, Shewanella livingstonensis
  misc_feature (1)..(222): tr|A0A3G8LV07|A0A3G8LV07_9GAMM 7-carboxy-7-deazaguanine synthase OS=Shewanella livingstonensis OX=150120 GN=qu eE PE=3 SV=1
MKYPVNEVFETIQGEGSYTGVPALFVRLQGCPVGCAWCDTKQTWDVLPENKVTAEQVIQVDGTIGRWADHNGQTLLQAFAGKGFTAKHIVLTGGEPCLYDLTELTTDFIKAGYQVQIETSGTFEVKCHPDVWVTVSPKINMKGGYKVLEQALNRANEIKHPIATEHHIDELDKLLLNIDISDKTICLQPISQKARATELAMKVCISRNWRLSIQTHKYLNID

SEQ ID NO: 34096 - protein, 222 aa, Shewanella loihica
  misc_feature (1)..(222): tr|A3QEM9|A3QEM9_SHELP 7-carboxy-7-deazaguanine synthas e OS=Shewanella loihica (strain ATCC BAA-1088 / PV-4) O X=323850 GN=queE PE=3 SV=1
MKYPVNEVFETIQGEGVYTGVPAIFVRLQGCPVGCSWCDTKHTWETLAENRVSSEQVIQVDGAIGRWAELDARELLMHFKVQGFSAKHVVITGGEPCIYDLIALTQAFADAGMQCQIETSGTFDVLVDPRAWVTVSPKINMKGGYKVLEQALERADEIKHPVAKASHIEELDELLKGIDTLGKTICLQPISQKPRATELAMKVCIERNWRLSIQTHKYLNID

SEQ ID NO: 34097 - protein, 222 aa, Shewanella mangrovi
  misc_feature (1)..(222): tr|A0A094JVR0|A0A094JVR0_9GAMM 7-carboxy-7-deazaguanine synthase OS=Shewanella mangrovi OX=1515746 GN=queE PE= 3 SV=1
MQYSVNEIFQTIQGEGLWTGVPALFVRLQGCPVGCSWCDTKQTWELLPENQVANGVIFQTDGSIGRWSELTAEAIIAGFVAQHFTAKHVVITGGEPCMYDLRPLTYALHAAGYTTQIETSGTFDVQCAEQTWVTVSPKVAMQGKLPVLTSALARANEIKHPVATEHHIAQLDELLTQIDIQGKTICLQPISQKPRATELAMRVCIERNWRLSVQTHKYLQID

SEQ ID NO: 34098 - protein, 222 aa, Shewanella marisflavi
  misc_feature (1)..(222): tr|A0A4Y6J0F3|A0A4Y6J0F3_9GAMM 7-carboxy-7-deazaguanine synthase OS=Shewanella marisflavi OX=260364 GN=queE PE =3 SV=1
MKYPVNEVFETIQGEGVYTGVPAIFVRLQGCPVGCSWCDTKHTWETLAENRVSSEQVIQVDGTIGRWAELDARELLMHFKVQGFSAKHVVITGGEPCIYDLTALTQSLADAGLQCQIETSGTFDVLVDPRAWVTVSPKVNMKGGFKVLEQALERADEIKHPVAKASHIEELDELLKGVDTLGKTICLQPISQKPRATELAMKVCIERNWRLSIQTHKYLNID

SEQ ID NO: 34099 - protein, 222 aa, Shewanella morhuae
  misc_feature (1)..(222): tr|A0A1N6Z670|A0A1N6Z670_9GAMM 7-carboxy-7-deazaguanine synthase OS=Shewanella morhuae OX=365591 GN=queE PE=3 SV=1
MNYPVNEVFETIQGEGVFTGVPAIFVRLQGCPVGCAWCDTKQTWDVLEANKVEPAQVITVDGTIGRWAEHTAQSLIVAFNAKGFTARHVVITGGEPCMYDLRDLTQTLHSQGFATQIETSGTFEVLCADDSWVTVSPKVNMKGGYQVLAQALNRANEIKHPIATENHIAELDNLLQDIDISAKTICLQPISQKPRATELAMKVCIARNWRLSIQTHKYLNID

SEQ ID NO: 34100 - protein, 222 aa, Shewanella oneidensis
  misc_feature (1)..(222): tr|A0A2W5D506|A0A2W5D506_SHEOE 7-carboxy-7-deazaguanine synthase OS=Shewanella oneidensis OX=70863 GN=queE PE= 3 SV=1
MNYPVNEVFETIQGEGVFTGVPAIFVRLQGCPVGCAWCDTKQTWDLLEENKVSPEQVITVDGSVGRWANHTAQSLIEAFNAKGYTARHVVITGGEPCMYDLNELTLTLHAAGFATQIETSGTFEVKCDADTWVTVSPKINMKGGYKVLAQALTRANEIKHPIATEHHIDELDELLKGIDVSAKTICLQPISQKPRATELAMKVCIARNWRLSIQTHKYLNID

SEQ ID NO: 34101 - protein, 222 aa, Shewanella oneidensis
  misc_feature (1)..(222): tr|Q8EE87|Q8EE87_SHEON 7-carboxy-7-deazaguanine synthas e OS=Shewanella oneidensis (strain MR-1) OX=211586 GN=q ueE PE=3 SV=1
MNYPVNEVFETIQGEGVFTGVPAIFVRLQGCPVGCAWCDTKQTWDLLETNKVSPEQVITVDGTVGRWANHTAQSLIEAFHAKGYTARHVVITGGEPCMYDLHELTHMLHRAGFATQIETSGTFEVKCDKDTWVTVSPKVNMKGGYPVLAQALNRANEIKHPIATQNHIDELDELLSDIDVSAKTICLQPISQKPRATELAMKVCIARNWRLSIQTHKYLNID

SEQ ID NO: 34102 - protein, 222 aa, Shewanella pealeana
  misc_feature (1)..(222): tr|A8H531|A8H531_SHEPA 7-carboxy-7-deazaguanine synthas e OS=Shewanella pealeana (strain ATCC 700345 / ANG-SQ1) OX=398579 GN=queE PE=3 SV=1
MKYPVNEVFETIQGEGTHTGVPAIFVRLQGCPVGCSWCDTKQTWELLEDNRVAPDLVIQVDGTVGRWSELTVEQLVSAFEDKGFTAKLVVITGGEPCLYDLSELTQYLHAQGYQTQIETSGTFDVLCHPDTWVTVSPKVNMKGGYAVLAQALNRANEIKHPVATQKHIDELDLLLEDINLTGKTVCLQPISQIPRATELAMKTCIERNWRLSVQTHKYLNID

SEQ ID NO: 34103 - protein, 222 aa, Shewanella piezotolerans
  misc_feature (1)..(222): tr|B8CM63|B8CM63_SHEPW 7-carboxy-7-deazaguanine synthas e OS=Shewanella piezotolerans (strain WP3 / JCM 13877) OX=225849 GN=queE PE=3 SV=1
MNYPVNEVFETIQGEGYFTGVPAIFVRLQGCPVGCAWCDTKHTWDVIEENRVAPELVIQVDGTIGRWSELSSEQLVAAFKSKGFTAKHIVITGGEPCMYDLTEFTHYLHQMGYQTQIETSGTFEVACDSGTWVTVSPKINMKGGYKVLAQALERANEIKHPIATRNHIDELDELLADIDINDKTVCLQPISQKARATELAMKTCIERNWRLSIQTHKYLDID

SEQ ID NO: 34104 - protein, 222 aa, Shewanella psychrophila
  misc_feature (1)..(222): tr|A0A1S6HLA7|A0A1S6HLA7_9GAMM 7-carboxy-7-deazaguanine synthase OS=Shewanella psychrophila OX=225848 GN=queE PE=3 SV=1
MKYPVNEVFETIQGEGFFTGVPAIFVRLQGCPVGCSWCDTKHTWDVFEQNRVVPEQVIQVDGEIGRWSELTAKDLIDFFTRKGFSAKHVVITGGEPCIHDLTELTSMLNCQGYGTQIETSGTFDVICSDKTWVTVSPKVNMKAGMAVLNQALERADEIKHPVATSKHIDDLDDLLEGIELDGKTICLQPISQKPRATELAMKTCIERNWRLSIQTHKYLNID

SEQ ID NO: 34105 - protein, 222 aa, Shewanella putrefaciens
  misc_feature (1)..(222): tr|A4Y6J5|A4Y6J5_SHEPC 7-carboxy-7-deazaguanine synthas e OS=Shewanella putrefaciens (strain CN-32 / ATCC BAA-4 53) OX=319224 GN=queE PE=3 SV=1
MNYPVNEVFETIQGEGVFTGVPAIFVRLQGCPVGCAWCDTKQTWDVLEANKVSPEQVITVDGTIGRWAEHTADSLIAAFNAKGFTARHIVITGGEPCMYDLRELTETLHSQGFATQIETSGTFEVNCADNTWVTVSPKVNMKGGYPVLAQALNRANEIKHPIATENHIDELDELLQDIDISAKTICLQPISQKPRATELAMKVCIARNWRLSIQTHKYLDID

SEQ ID NO: 34106 - protein, 222 aa, Shewanella putrefaciens
  misc_feature (1)..(222): tr|A0A252EPI5|A0A252EPI5_SHEPU 7-carboxy-7-deazaguanine synthase OS=Shewanella putrefaciens OX=24 GN=queE PE=3 SV=1
MNYPVNEVFETIQGEGVFTGVPAIFVRLQGCPVGCAWCDTKQTWDLLEENKVSSEQVITVDGSVGRWANHTAQSLIDAFNAKGYTARHVVITGGEPCMYDLNELTHTLHAAGFTTQIETSGTFEVKCDADTWVTVSPKINMKGGYKVLAQALIRANEIKHPIATENHIDELDELLKGIDVSAKTICLQPISQKPRATELAMKVCIARNWRLSIQTHKYLNID

SEQ ID NO: 34107 - protein, 222 aa, Shewanella sediminis
  misc_feature (1)..(222): tr|A8FUY5|A8FUY5_SHESH 7-carboxy-7-deazaguanine synthas e OS=Shewanella sediminis (strain HAW-EB3) OX=425104 GN =queE PE=3 SV=1
MKYPVNEVFETIQGEGFFTGVPAIFVRLQGCPVGCSWCDTKHTWDVIEENRVAPELVIQVDGTIGRWAELTAEELISNFKAKGFTAKHVVITGGEPCLHDLIPLTESLNLSGYATQIETSGTFEVICSDKTWVTVSPKINMKAGLPILNQALIRANEIKHPVATQAHIDDLDCLLKGISLDEKTICLQPISQKSRATELAMRVCIERNWRLSIQTHKYLEID

SEQ ID NO: 34108 - protein, 222 aa, Shewanella sp.
  misc_feature (1)..(222): tr|A0A0Q0GAD3|A0A0Q0GAD3_9GAMM 7-carboxy-7-deazaguanine synthase OS=Shewanella sp. P1-14-1 OX=1723761 GN=queE_ 1 PE=3 SV=1
MNYPVNEVFETIQGEGSFTGVPAIFVRLQGCPVGCAWCDTQQTWEVLAQNKVNQADVIQVDGTIGRWAEHDASSLIQAFQAKGYTAKHIVLTGGEPCMYNVTDLTSEFIAAGYAVQIETSGTFEVLCHDKVFVTVSPKVNMKGGYEVLEQALTRANEIKHPIATQKHIDELDDLLANIDTQDKVVCLQPISQKTRATELAMKTCIARNWRLSIQTHKYLDID

SEQ ID NO: 34109 - protein, 222 aa, Shewanella sp.
  misc_feature (1)..(222): tr|A0A2G1ZEB6|A0A2G1ZEB6_9GAMM 7-carboxy-7-deazaguanine synthase OS=Shewanella sp. OX=50422 GN=queE PE=3 SV=1
MKYPVNEVFETIQGEGVFTGVPAIFVRLQGCPVGCSWCDTKHTWDVLEKNRVAPELVIQVDGEIGRWSELTAEELINFFMRKGFNAKHVVITGGEPCIHDLTELTSQLNSQGYGTQIETSGTFEVICSDKTWVTVSPKVNMKAGMAVLTQALERADEIKHPVATSKHIEDLDELLEGIELEGKTICLQPISQKLRATELAMKTCIERNWRLSIQTHKYLNID

SEQ ID NO: 34110 - protein, 222 aa, Shewanella violacea
  misc_feature (1)..(222): tr|D4ZKV2|D4ZKV2_SHEVD 7-carboxy-7-deazaguanine synthas e OS=Shewanella violacea (strain JCM 10179 / CIP 106290 / LMG 19151 / DSS12) OX=637905 GN=queE PE=3 SV=1
MKYPVNEVFETIQGEGFFTGVPAIFVRLQGCPVGCSWCDTKHTWDVLEKNRVAPELVIQVDGEIGRWSELTAEALINSFIRKGFSANHVVITGGEPCIHDLTELTSQLNSQGYATQIETSGTFEVICSDKTWVTVSPKVNMKAGMAVLTQALERADEIKHPVATSKHIDDLDELLEGIELDGKTICLQPISQKPRATELAMKTCIERNWRLSIQTHKYLNID

SEQ ID NO: 34111 - protein, 222 aa, Shewanella woodyi
  misc_feature (1)..(222): tr|B1KGV9|B1KGV9_SHEWM 7-carboxy-7-deazaguanine synthas e OS=Shewanella woodyi (strain ATCC 51908 / MS32) OX=39 2500 GN=queE PE=3 SV=1
MKYPVNEVFETIQGEGFYTGVPAIFVRLQGCPVGCSWCDTKHTWELLDVNKVQPEMVIQVDGTIGRWSELTTSELISFLKQKEFTASHVVITGGEPCLHDLTAMTEEFNDAGYSTQIETSGTFEVHCSEKTWVTVSPKLKMKAGLAVLPQALKRANEIKHPVATASHIDDLDELLNGVDLKGKTICLQPISQKTRATELAMRVCIERNWRLSIQTHKYLDID

SEQ ID NO: 34112 - protein, 222 aa, Shewanella xiamenensis
  misc_feature (1)..(222): tr|A0A073KNY5|A0A073KNY5_9GAMM 7-carboxy-7-deazaguanine synthase OS=Shewanella xiamenensis OX=332186 GN=queE P E=3 SV=1
MNYPVNEVFETIQGEGVFTGVPAIFVRLQGCPVGCAWCDTKQTWELLEDKKVSPEQVITVDGSVGRWANHTAQSLIEAFNAKGYTARHVVITGGEPCMYDLHELTHTFHAAGFATQIETSGTFEVKCDADTWVTVSPKINMKGGYKVLAQALTRANEIKHPIATEHHIDELDELLKGIDVSAKTICLQPISQKPRATELAMKVCIARNWRLSIQTHKYLNID

SEQ ID NO: 34113 - protein, 222 aa, Shewanella xiamenensis
  misc_feature (1)..(222): tr|A0A1E3V0V7|A0A1E3V0V7_9GAMM 7-carboxy-7-deazaguanine synthase OS=Shewanella xiamenensis OX=332186 GN=queE P E=3 SV=1
MNYPVNEVFETIQGEGVFTGVPAIFVRLQGCPVGCAWCDTKQTWDLLEENKVSPEQVITVDGSVGRWANHTAQSLIEAFNAKGYTARHVVITGGEPCMYDLHELTHTLHAAGFATQIETSGTFEVKCDADTWVTVSPKINMKGGYKVLAQALTRANEIKHPIATEHHIDELDELLKGIDVSAKTICLQPINQKPRATELAMKVCIARNWRLSIQTHKYLNID

SEQ ID NO: 34114 - protein, 223 aa, Shigella boydii
  misc_feature (1)..(223): tr|B2TZF9|B2TZF9_SHIB3 7-carboxy-7-deazaguanine synthas e OS=Shigella boydii serotype 18 (strain CDC 3083-94 / BS512) OX=344609 GN=queE PE=3 SV=1
MQYPINEMFQTLQGEGYFTGVPAIFIRLQGCPVGCAWCDTKHTWEKLEDREVSLFSILAKTKESDKWGAASSEDLLAVIGRQGYTARHVVITGGEPCIHDLLPLTDLLEKNGFSCQIETSGTHEVRCTPNTWVTVSPKLNMRGGYDVLSQALERANEIKHPVGRVRDIEALDELLATLTDDKPRVIALQPISQKDDATRLCIETCIARNWRLSMQTHKYLNIA

SEQ ID NO: 34115 - protein, 223 aa, Shigella boydii; identical to SEQ ID NO: 29987
  misc_feature (1)..(223): tr|I6D4G1|I6D4G1_SHIBO 7-carboxy-7-deazaguanine synthas e OS=Shigella boydii 965-58 OX=766138 GN=queE PE=3 SV=1

SEQ ID NO: 34116 - protein, 223 aa, Shigella dysenteriae; identical to SEQ ID NO: 29987
  misc_feature (1)..(223): tr|Q32CF1|Q32CF1_SHIDS 7-carboxy-7-deazaguanine synthas e OS=Shigella dysenteriae serotype 1 (strain Sd197) OX= 300267 GN=ygcF PE=3 SV=1

SEQ ID NO: 34117 - protein, 223 aa, Shigella dysenteriae; identical to SEQ ID NO: 29987
  misc_feature (1)..(223): tr|A0A090NAF3|A0A090NAF3_SHIDY 7-carboxy-7-deazaguanine synthase OS=Shigella dysenteriae WRSd3 OX=1401327 GN=q ueE PE=3 SV=1

SEQ ID NO: 34118 - protein, 223 aa, Shigella flexneri
  misc_feature (1)..(223): tr|Q0T1P5|Q0T1P5_SHIF8 7-carboxy-7-deazaguanine synthas e OS=Shigella flexneri serotype 5b (strain 8401) OX=373 384 GN=ygcF PE=3 SV=1
MQYPINEMFQTLQGEGYFTGVPAIFIRLQGCPVGCAWCDTKHAWEKLEDREVSLFSILAKTKESDKWGAASSEDLLAVIGRQGYTARHVVITGGEPCIHDLLPLTDLLEKNGFSCQIETSGTHEVRCTPNTWVTVSPKLNMRGGYEVLSQALERANEIKHPVGRVRDIEALDELLATLTDDKPRVIALQPISQKDDATRLCIETCIARNWRLSMQTHKYLNIA

SEQ ID NO: 34119 - protein, 223 aa, Shigella flexneri; identical to SEQ ID NO: 29987
  misc_feature (1)..(223): tr|A0A5C2EI93|A0A5C2EI93_SHIFL 7-carboxy-7-deazaguanine synthase OS=Shigella flexneri Y OX=424720 GN=queE PE=3 SV=1

SEQ ID NO: 34120 - protein, 223 aa, Shigella sonnei
  misc_feature (1)..(223): tr|Q3YY83|Q3YY83_SHISS 7-carboxy-7-deazaguanine synthas e OS=Shigella sonnei (strain Ss046) OX=300269 GN=ygcF P E=3 SV=1
MQYPINEMFQTLQGEGYFTGVPAIFIRLQGCPVGCAWCDTKHTWEKLEDREVSLFSILAKTKESDKWGAASSEDLLAVISRQGYTARHVVITGGEPCIHDLLPLTDLLEKNGFSCQIETSGTHEVRCTPNTWVTVSPKLNMRGGYDVLSQALERANEIKHPVGRVRDIEALDELLATLTDDKPRVIALQPISQKDDATRLCIETCIARNWRLSMQTHKYLNIA

SEQ ID NO: 34121 - protein, 223 aa, Shigella sonnei; identical to SEQ ID NO: 29987
  misc_feature (1)..(223): tr|A0A235P2D8|A0A235P2D8_SHISO 7-carboxy-7-deazaguanine synthase OS=Shigella sonnei OX=624 GN=queE PE=3 SV=1

SEQ ID NO: 34122 - protein, 223 aa, Shigella sp.
  misc_feature (1)..(223): tr|A0A1D3DKB3|A0A1D3DKB3_9ENTR 7-carboxy-7-deazaguanine synthase OS=Shigella sp. FC1655 OX=1898038 GN=queE PE= 3 SV=1
MQYPINEVFQTLQGEGVFTGVPALFIRLQGCPVGCSWCDTKHTWEKEDEKKVPLGDIPIKTQESDAWGEASVAEILSLFQQQGYSAKHVVITGGEPCLYDLYPLTEGLEQAGFTCQIETSGTHDILCSEKTWVTLSPKVGMKGGFIVLPSAINRANEIKHPVGREKDIEALDTLLTLRTEHPEPVVALQPISCKKSATTLCIKTCIERNWRFSMQTHKYLNIA

SEQ ID NO: 34123 - protein, 223 aa, Shigella sp.
  misc_feature (1)..(223): tr|A0A1E3N469|A0A1E3N469_9ENTR 7-carboxy-7-deazaguanine synthase OS=Shigella sp. FC569 OX=1892897 GN=queE PE=3 SV=1
MQYPINEMFQTLQGEGYFTGVPAIFIRLQGCPVGCAWCDTKHTWEKLEDREVSLFSILAKTKESDKWGAASSEDLLAVIGRQGYTARHVVITGGEPCIHDLLPLTDLLEKNGFSCQIETSGTHEVRCTPNTWVTVSPKLNMRGGYEVLSQALERANEIKHPVGRVRDIEALDELLATLTDDKPRVIALQPISQKEDATRLCIDTCIARNWRLSMQTHKYLNIA

SEQ ID NO: 34124 - protein, 235 aa, Shimia marina
  misc_feature (1)..(235): tr|A0A0P1EPY5|A0A0P1EPY5_9RHOB 7-carboxy-7-deazaguanine synthase OS=Shimia marina OX=321267 GN=queE PE=3 SV=1
MTLRVAEIFGPTIQGEGVLIGAPTVFVRTGGCDYRCSWCDSLHAVDSAHRHDWLPMDPEAVMTEVRALSGDRPLTVSLSGGNPAIHDFAPLIALGKSEGYTFACETQGSIAKPWFAALDTLVLSPKPPSSGEEVDWSAFERCLEAAGNGPESVIKIVIFDDADFAWAQAAHARFPDLPLYLQPGNLMVDPDKPVDLTETTARLEWLIDKVVAAGWFAPRVLPQLHVMVWGNKRGV

SEQ ID NO: 34125 - protein, 223 aa, Shimwellia blattae
  misc_feature (1)..(223): tr|I2B622|I2B622_SHIBC 7-carboxy-7-deazaguanine synthas e OS=Shimwellia blattae (strain ATCC 29907 / DSM 4481 / JCM 1650 / NBRC 105725 / CDC 9005-74) OX=630626 GN=que E PE=3 SV=1
MQYPINEMFQTLQGEGYFTGVPAIFIRLQGCPVGCAWCDTKHTWETREDREVSLFSILAKTRESDKWGNASAEDLLAIIGRQGWTARHVVITGGEPCIHDLTPLTALLEQQGFICQIETSGTHEVRCTPGTWVTVSPKVNMRGGYDVLTQALHRADEIKHPVGRVRDIEALDELLEVITDDKQRIIALQPISQKEDATRLCIETCIARNWRLSVQTHKYLNIA

SEQ ID NO: 34126 - protein, 210 aa, Shinella sp.
  misc_feature (1)..(210): tr|A0A372NBS5|A0A372NBS5_9RHIZ 7-carboxy-7-deazaguanine synthase OS=Shinella sp. WSJ-2 OX=2303749 GN=queE PE=3 SV=1
MGYAVKEMFKTLQGEGAQAGRAAVFCRFAGCNLWSGREEDRDQAVCQFCDTDFVGTDGIGGAKFKDAETLAIAIASTWGDTTHRRYVVFTGGEPLLQLDDELVAAVHQQGFEIAIETNGTLEPPAGVDWICVSPKAGAPLKLREGSELKLVYPQPNLLPEALPDVRFEHYFLQPMDGPKRAENTIAVTEYCLEHPKWRLSLQTHKMIGIP

SEQ ID NO: 34127 - protein, 209 aa, Siansivirga zeaxanthinifaciens
  misc_feature (1)..(209): tr|A0A0C5W948|A0A0C5W948_9FLAO 7-carboxy-7-deazaguanine synthase OS=Siansivirga zeaxanthinifaciens CC-SAMT-1 O X=1454006 GN=queE PE=3 SV=1
MKKEIKDLVDTGEMLPLMEEFYTIQGEGFHKGTAAYFIRIGGCDVGCHWCDVKESWNADIHPPTETTKIVENAKKYSDTIVVTGGEPLTWDMTLLTSKLKAEGLQVHIETSGAYKLTGTWDWICLSPKKMKLPTKEVYEKANELKMIIYNKDDFRFAEEQAAKVNKDCILYLQPEWSKRDKVVPEIVDYVMANPKWKVSLQTHKYLNIP

SEQ ID NO: 34128 - protein, 222 aa, Siccationidurans arizonensis
  misc_feature (1)..(222): tr|A0A1I5TTG5|A0A1I5TTG5_9BACT 7-carboxy-7-deazaguanine synthase OS=Siccationidurans arizonensis OX=1227077 GN =queE PE=3 SV=1
MIPVTLLSSELVVPNGAVSAPATGTMLPVMEQFYTIQGEGYNTGRAAYFIRLGGCDVGCVWCDVKESWDADAHPRQSIAQLVDAVLAYPGRDVVITGGEPLMHDCGPLTAALQAAGCRTWLETSGAHPLSGTWDWICLSPKKFKAPLPDVLAAAHELKVVVFNSHDFTWAEEHAAQVPAATRLYLQPEWSRAARMTPELVEYVKQHPRWQVSLQTHKYLDIP

SEQ ID NO: 34129 - protein, 223 aa, Siccibacter turicensis
  misc_feature (1)..(223): tr|A0A2P8VM52|A0A2P8VM52_9ENTR 7-carboxy-7-deazaguanine synthase OS=Siccibacter turicensis OX=357233 GN=queE P E=3 SV=1
MQYPINEMFQTLQGEGYFTGVPAIFIRLQGCPVGCAWCDTKHTWDKLSDREVSLFSVLAKTKESDKWGAASSEDLLAIIERQGWTARHVVITGGEPCIHDLMPLTMALEALGFSCQIETSGTHDVRCTTGTWVTVSPKVNMKGGYDVIAQALQRADEIKHPVGRMRDIEALDDLLATLKDEKQRVIALQPISQKEDATRLCIETCIARNWRLSMQTHKYLNIA

SEQ ID NO: 34130 - protein, 218 aa, Sideroxydans lithotrophicus
  misc_feature (1)..(218): tr|D5CMS7|D5CMS7_SIDLE 7-carboxy-7-deazaguanine synthas e OS=Sideroxydans lithotrophicus (strain ES-1) OX=58033 2 GN=queE PE=3 SV=1
MSYVTSESLRISEIFYSLQGETSRVGLPTVFVRLTGCPLRCSYCDTAYAFTGGQSMQLSAIMDEVASYAPRYVTVTGGEPLAQKNCLFLLRALCDAGYEVSLETGGALDVSGVDARVMKVLDIKTPGSGEVQKNLWGNLQHLGRHDEIKFVLCGEADYQWAKQVMQEHALAQRCAVLFSPAQGQLAPTELAEWILRDRLPVRLQVQLHKLLWGNEAGH

SEQ ID NO: 34131 - protein, 235 aa, Silicibacter sp.
  misc_feature (1)..(235): tr|C9D360|C9D360_9RHOB 7-carboxy-7-deazaguanine synthas e OS=Silicibacter sp. TrichCH4B OX=644076 GN=queE PE=3 SV=1
MTLRIAEIFGPTIQGEGALIGEPTVFVRAGGCDYRCSWCDSLHAVESQYRHSWAPMDTDAVWAKVHKLSGGQPLTVSLSGGNPAIQDFGPLITKGRAAGYRFACETQGSIPRPWFADLDTLVLSPKPPSSGENVDWDAFDRCRAIGAGARQQVMKIVIFDETDYQWAREVHRHHSDLALYLQPGNPEVDPATPVDLQTLANRLGWLTEKAMADGWFAPRILPQLHVLIWGNKRGV

SEQ ID NO: 34132 - protein, 243 aa, Silvanigrella aquatica
  misc_feature (1)..(243): tr|A0A1L4CXY4|A0A1L4CXY4_9PROT 7-carboxy-7-deazaguanine synthase OS=Silvanigrella aquatica OX=1915309 GN=queE PE=3 SV=1
MSSSFLLNEIYPCLQGEGVNLGKPSLLVRFQICNLRCVWCDTPYTHTFKSDPLEKENSKSKQKFVRYTLETLVEKIKSFQINHLILTGGEPTLQNLGLLMRTLGNNFTAEVESNGTRIPHLQIPNFLEQDYNLMQWNISPKFSNSGEKIISESLHHWSHLSQNHNSVYFKFVVRKDFVENDMTEILDIVKTYHLEKARVLLMPEGTHLESQINNVWLHDKCIKYGFRYTPRLHVLLFGNLRGV

SEQ ID NO: 34133 - protein, 241 aa, Silvanigrellales bacterium
  misc_feature (1)..(241): tr|A0A4P2VT04|A0A4P2VT04_9PROT 7-carboxy-7-deazaguanine synthase OS=Silvanigrellales bacterium RF1110005 OX=24 93639 GN=queE PE=3 SV=1
MSFLINEIYPCLQGEGVNTGSPSLLVRFHICNLRCTWCDTPYTHTFKSDPVDKKNPSGKQKFVRFSLAELVKRLKEFPQKHLILSGGEPTLHNLGLLMRTLGDEYSAEVESNGTRIPHKQIPNFLVTDYNLMQWNISPKFSNAGENLVPEALAHWAELAKNHAHVYFKFVIRKDYLNADMQEIISIINQHKISANKVLLMPEGTTIQSQIENIWLHDECLKHGFRYAPRLHVLLFGNLRGV

SEQ ID NO: 34134 - protein, 229 aa, Simiduia agarivorans
  misc_feature (1)..(229): tr|K4KP46|K4KP46_SIMAS 7-carboxy-7-deazaguanine synthas e OS=Simiduia agarivorans (strain DSM 21679 / JCM 13881 / BCRC 17597 / SA1) OX=1117647 GN=queE PE=3 SV=1
MGIIARFLTSAPAMTDLNLKITEIFLSLQGESRTIGLPTVFVRLTGCPLRCQYCDSAYAFHGGERQTLAQILDRVAEFNCRQVCVTGGEPLAQANCHALLTALCDRGYEVSLETSGALDVGQVDARVSRVVDLKTPGSQESHRNRWENLPLLTRHDQIKFVICDRKDFDWACFKVNEHRLLEQVGDVLFSPSFGQVSPRDLADWVVDCGLPVRFQLQLHKLLWGDEPGR

SEQ ID NO: 34135 - protein, 205 aa, Simonsiella muelleri
  misc_feature (1)..(205): tr|V9H6K4|V9H6K4_9NEIS 7-carboxy-7-deazaguanine synthas e OS=Simonsiella muelleri ATCC 29453 OX=641147 GN=queE PE=3 SV=1
MSEPIFRIVEIFETLQGEGYNTGMPSVFIRFGKCNLACHWCDTNYQQFEMMTLTQIMDQVYDYSAKNIIITGGEPTIQPQLEILLNRLKSEGYFIAIETNGLRAVPEQIDYIATSPKRLYANAYDKTCLSAADEVRIVVDSDDIFSFCEIIEQKIRAKRYYLSPCEQNGEMNILATITLLGKLNARPNQPHWQLSIQTHKLCGID

SEQ ID NO: 34136 - protein, 212 aa, Simplicispira metamorpha
  misc_feature (1)..(212): tr|A0A4R2NEW1|A0A4R2NEW1_9BURK 7-carboxy-7-deazaguanine synthase OS=Simplicispira metamorpha OX=80881 GN=queE PE=3 SV=1
MTYSVKEIFYTLQGEGAQAGLPAVFCRFAGCNLWSGREADRAAAICRFCDTDFVGTDGTLGGKYPVADALAAQIEALWPAGDSTHRLVVLTGGEPLMQVDVPLIAALHARHFRIAVETNGTLAAPPGIDWLCVSPKAGAPWLQRQGQELKVVWPQPGLDLATLAQAGTFEHRFLQPMDGPAQAHNTALCIAACLQDPRWRLGLQTHKISGIR

SEQ ID NO: 34137 - protein, 211 aa, Simplicispira sp.
  misc_feature (1)..(211): tr|A0A398C9F3|A0A398C9F3_9BURK 7-carboxy-7-deazaguanine synthase OS=Simplicispira sp. NY-02 OX=2315688 GN=queE PE=3 SV=1
MTYSVKEIFYTLQGEGHHAGRPAVFCRFAGCNLWSGVEEGRASAVCQFCDTDFVGTDGEGGGKFADAASLAARVNALWPVDYPAQKYVVCTGGEPLLQLDAPLIDALHAAGFAVAIETNGTLPVPGGVDWVCVSPKMGAELVVRRGNEIKVVIPQPGQPLDDYAALDFEHHFVQAMDGPLQATNLRLAIGFCKAHPLWNLSVQTHKLLQIP

SEQ ID NO: 34138 - protein, 251 aa, Singulisphaera acidiphila
  misc_feature (1)..(251): tr|L0DLV1|L0DLV1_SINAD 7-carboxy-7-deazaguanine synthas e OS=Singulisphaera acidiphila (strain ATCC BAA-1392 / DSM 18658 / VKM B-2454 / MOB10) OX=886293 GN=queE PE=3 SV=1
MPRTLVTINDASVPLTPPGPASTILHPQRLRPLQGKPAGSLMIHEIYRSLQGESTFAGLPCVFIRLTACNLRCGYCDTPHAFTEGNLLSLDEVVERTLALGDPLVELTGGEPLLQPEVFPLMVRLADAGRTVLLETSGSLDIAPVDRRVHVILDLKTPGSGEEKANLWSNLSLVKPTDEIKFVLCDWADFDWAVAQTRAHRLTERCPVLFSGCFGKVDPTELAAWILETQLPIRLQLQQHKILWHPAARGV

SEQ ID NO: 34139 - protein, 255 aa, Singulisphaera sp.
  misc_feature (1)..(255): tr|A0A1N6F130|A0A1N6F130_9BACT 7-carboxy-7-deazaguanine synthase OS=Singulisphaera sp. GP187 OX=1882752 GN=que E PE=3 SV=1
MSRTLVTINDTSIPVTPAGPVTAAPSVALHPQRLRPLQGKPAGSLVIHEIYRSLQGESTFTGLPCVFIRLTACNLRCVYCDTPHAFTEGNLLSLDEVVERTLALGDPLVELTGGEPLLQPEVFPLMTRLADAGRTVLLETSGSLDIGPVDRRVHVILDLKTPGSGEEHANLWSNLALVKPTDEIKFVLCDRADFEWAVAQTRAHRLTERCPVLFSGCFGKVDPTELAAWILETQLPIRLQLQQHKILWHPAARGV

SEQ ID NO: 34140 - protein, 212 aa, Singulisphaera sp.
  misc_feature (1)..(212): tr|A0A1N6L3N5|A0A1N6L3N5_9BACT 7-carboxy-7-deazaguanine synthase OS=Singulisphaera sp. GP187 OX=1882752 GN=que E PE=3 SV=1
MSYAVKSIFYTLQGEGANTGRPAVFCRFAGCNLWSGREEDRLTAKCSFCDTDFVGTDGPGGGRFHSAGELAQAVLGYWPSPPAVGRPFVVCTGGEPLLQLDEALVVALHDHGFEIAVETNGTVRPPRGLDWITVSPKAGSDLVIQAGQELKLVFPQAGLRPEPFEGLDFRHFFLQPMDGTEAEVNTRLAVRYCLEHPCWRLSLQTHKMLGIP

SEQ ID NO: 34141 - protein, 230 aa, Sinimarinibacterium flocculans
  misc_feature (1)..(230): tr|A0A318EEG3|A0A318EEG3_9GAMM 7-carboxy-7-deazaguanine synthase OS=Sinimarinibacterium flocculans OX=985250 G N=queE PE=3 SV=1
MKPAADQARSSAENPDGETRLKITEIFCSLQGESSSVGWPTSFVRLTGCPLRCQYCDTAYAFHGGQWMTVAAIVDTVRAHATRHVCVTGGEPLAQKGCLPLLSALCDADWRVSLETSGALDIGSVDARVVRVVDIKTPGSGEVQRNRWDNLPLLRDHDEVKFVICNRDDYDWACGVVREHALDRRATVLFSPSQSELPAAELADWLLADRLPVRFQMQLHKVLWGNVPGR

SEQ ID NO: 34142 - protein, 210 aa, Sinimarinibacterium sp.
  misc_feature (1)..(210): tr|A0A4U0GQE1|A0A4U0GQE1_9GAMM 7-carboxy-7-deazaguanine synthase OS=Sinimarinibacterium sp. CAU 1509 OX=256228 3 GN=queE PE=3 SV=1
MRITEIFRSIQGESSSVGWPTVFVRLTGCPLRCSYCDTAYAFHGGQWMDVAQIVDQVRALGVSHVCVTGGEPLAQKNCQGLLTALCDSGYQVSLETSGALDVSSVDPRVMRVIDLKTPGSGEEGRNLWSNLSSLNAKDEIKMVICDRGDYEWAKAVISKHALPQRCTVLMSPSQSQLEPSALADWILEDQLPVRFQLQLHKVLWGNVAGR

SEQ ID NO: 34143 - protein, 239 aa, Sinobaca qinghaiensis
  misc_feature (1)..(239): tr|A0A419V6Z5|A0A419V6Z5_9BACL 7-carboxy-7-deazaguanine synthase OS=Sinobaca qinghaiensis OX=342944 GN=queE PE =3 SV=1
MKKIPVLEIFGPTIQGEGMVIGQKTMFVRTGGCDYRCSWCDSAFTWDGSQKAAVMDAASIVEKLYEKGTNLFSHVTISGGNPAIHPGIHSLIEELRNQGIQTAVETQGSIWAEWMIDIDEVTISPKPPSSLMKTDWEKLDYYINRLERRPNKAFSLKIVIFNKEDLEYAAEVHTRYPNAPMFLQVGNDDLTEKEAGMLRDHLLERYEWLISETMDDARWNDVKILPQLHTLLWGNKQGV

SEQ ID NO: 34144 - protein, 224 aa, Sinobacteraceae bacterium
  misc_feature (1)..(224): tr|A0A2T5MH90|A0A2T5MH90_9GAMM 7-carboxy-7-deazaguanine synthase OS=Sinobacteraceae bacterium GT1R17 OX=202916 6 GN=queE PE=3 SV=1
MRAMSIPAPDPSQRLKITEIFLSLQGESSRVGWPTIFIRLTGCPLRCGYCDSAYAFYGGEWHTFDQILDQVRSLGARHICVTGGEPLAQKNCTELMRRLCDEGYQVSLETSGSIDVSKVDVRVSRVVDIKTPGSGEVTRNRWENLPLLNAQDEIKFVLCGREDYDWAKQIIVEHQIEGRSPILFSPSQDQLDPRALADWIVADRLNVRFQLQLHKVLWGNVAGK

SEQ ID NO: 34145 - protein, 210 aa, Sinobacteraceae bacterium
  misc_feature (1)..(210): tr|A0A521N152|A0A521N152_9GAMM 7-carboxy-7-deazaguanine synthase OS=Sinobacteraceae bacterium OX=1969813 GN=qu eE PE=3 SV=1
MKITEVFLSLQGESSLVGWPTVFVRLTGCPLRCSYCDTAYAFHGGQWRDIPDLLGEVQSHGVRHVCVTGGEPLAQKNCLPLLSALCDAGYVVSLETSGALDIGGVDPRVARIVDIKTPGSGEVARNRWENLPLLTARDELKFVLCSRADYDWAVEQLRQHRLHERCAVLFSPSHKEVSPRELADWIVADRLPVRFQTQLHKQLWGEEAGR

SEQ ID NO: 34146 - protein, 218 aa, Sinobacterium caligoides
  misc_feature (1)..(218): tr|A0A3N2DE34|A0A3N2DE34_9GAMM 7-carboxy-7-deazaguanine synthase OS=Sinobacterium caligoides OX=933926 GN=queE PE=3 SV=1
MAVYSVKEMFYTLQGEGAQAGRPAIFCRFSGCNLWTGREQDRASADCRFCDTDFIGTDGVDGGKFRSADALADAITGLWPSAEVPCFVVITGGEPALQLDEALVTALHQRGCVIAIETNGTLPLPAAIDWVCISPKQGNEVVLRECDELKVVYPQQGIDPADYLHIQAQRYYISPENDPHAAELSLLGTSRYQEAIDYCLQHPQWRLNLQQHKVLNIA

SEQ ID NO: 34147 - protein, 192 aa, Sinomicrobium oceani
  misc_feature (1)..(192): tr|A0A1K1NLY4|A0A1K1NLY4_9FLAO 7-carboxy-7-deazaguanine synthase OS=Sinomicrobium oceani OX=1150368 GN=queE PE =3 SV=1
MEEFYTIQGEGYHKGTAAYFIRVGGCDVGCHWCDVKESWNAETHPPTAVEHIIENAARHSDTIVITGGEPLTWNMAPLTSGLKARGLKTHIETSGAYPLTGIWDWICLSPKKIKLPVDEVYEKADELKVIIYNKHDFDFAEEQAAKVNKDCILYLQPEWSRRDKMIPEIVTFVMKNPRWKVSLQTHKYLNIP

SEQ ID NO: 34148 - protein, 210 aa, Sinomicrobium pectinilyticum
  misc_feature (1)..(210): tr|A0A3N0E503|A0A3N0E503_9FLAO 7-carboxy-7-deazaguanine synthase OS=Sinomicrobium pectinilyticum OX=1084421 GN =queE PE=3 SV=1
MIKEEVSGLVAKGEMLPLMEEFYTIQGEGYHKGTAAYFIRVGGCDVGCHWCDVKESWNAETHPPTAVEHIIENAAKHSDTIVITGGEPLTWDMGPLTAGLKARGLKTHIETSGAYPLTGTWDWICLSPKKIKLPLNDIYEKADELKVIIYNQHDFAFAEEQAAKVNTDCILYLQPEWSRREKMIPDIVNFVMKNPRWKVSLQTHKYLNIP

SEQ ID NO: 34149 - protein, 210 aa, Sinomicrobium sp.
  misc_feature (1)..(210): tr|A0A329N3T5|A0A329N3T5_9FLAO 7-carboxy-7-deazaguanine synthase OS=Sinomicrobium sp. N-1-3-6 OX=2219864 GN=qu eE PE=3 SV=1
MSKAEVLTLVERGEMLPLMEEFYTIQGEGYHKGTAAYFIRIGGCDVGCHWCDVKESWNAETHPPTAVDRIVDNAAKYSDTIVITGGEPLTWNMGPLTSKLRDRGLKTHIETSGAYPLTGVWDWICLSPKKIKLPVEDIYEKAQELKVIVYNKSDFAFAEQQAAKVGPDCILYLQPEWSRREKMIPEIVGFVMKNPRWKVSLQTHKYLNIP

SEQ ID NO: 34150 - protein, 245 aa, Sinorhizobium americanum
  misc_feature (1)..(245): tr|A0A4R2C1C5|A0A4R2C1C5_9RHIZ 7-carboxy-7-deazaguanine synthase OS=Sinorhizobium americanum OX=194963 GN=queE PE=3 SV=1
MTGMRPAEIRVSEIFGPTIQGEGALTGLPTVFVRTGGCDYRCSWCDSLHAVDSAYRDEWRALTVEEVWAEVTRLSGGVPVMVSLSGGNPAIQPLGELIARGHPEGYRFALETQGSVARDWFADLDMLVLSPKPPSSGMETEWDDFDACLRSSRGKPQTALKIVVFDDADYAYARAAAARHPQLPVYLQPGNHTPPPPDDEDAPIDIDGVMERMRWLVDRVIADKWFEVRVLPQLHVLIWGNRRGV

SEQ ID NO: 34151 - protein, 245 aa, Sinorhizobium americanum
  misc_feature (1)..(245): tr|A0A1L3LXW7|A0A1L3LXW7_9RHIZ 7-carboxy-7-deazaguanine synthase OS=Sinorhizobium americanum OX=194963 GN=queE PE=3 SV=1
MTGMRPAEIRVSEIFGPTIQGEGALTGLPTVFVRTGGCDYRCSWCDSLHAVDSAYRDEWRALTVEEVWSEVTRLSGGVPVMVSLSGGNPAIQPLGELIARGHREGYRFALETQGSVARDWFADLDMLVLSPKPPSSGMETEWDDFDACLRSSRGKPQTALKIVVFDDADYAYARAAAARHPQLPVYLQPGNHTPPPPDDDDAPIDIDGVMERMRWLVDRVIADKWFEVRVLPQLHVLIWGNRRGV

SEQ ID NO: 34152 - protein, 245 aa, Sinorhizobium fredii; identical to SEQ ID NO: 33540
  misc_feature (1)..(245): tr|A0A2U8GAL9|A0A2U8GAL9_RHIFR 7-carboxy-7-deazaguanine synthase OS=Sinorhizobium fredii CCBAU 45436 OX=112833 1 GN=queE PE=3 SV=1

SEQ ID NO: 34153 - protein, 245 aa, Sinorhizobium fredii; identical to SEQ ID NO: 33540
  misc_feature (1)..(245): tr|A0A249Q4B3|A0A249Q4B3_RHIFR 7-carboxy-7-deazaguanine synthase OS=Sinorhizobium fredii CCBAU 83666 OX=112833 4 GN=queE PE=3 SV=1

SEQ ID NO: 34154 - protein, 245 aa, Sinorhizobium medicae
  misc_feature (1)..(245): tr|A6UJ89|A6UJ89_SINMW 7-carboxy-7-deazaguanine synthas e OS=Sinorhizobium medicae (strain WSM419) OX=366394 GN =queE PE=3 SV=1
MTNVRSDEIRVSEIFGPTIQGEGVLIGLPTVFVRSGGCDYRCSWCDSLHAVESSYRHEWHAMSTEAVWQEIVRLSRGEAVMVSLSGGNPAIQPFGDLIGRGHRNGYRFALETQGSIAREWFAELDVLVLSPKPPSSGMETDWQAFDVCLRMAAGKPQTVLKFVVFDEADYAYARAAAARHPHLPVYLQPGNHTPPPSDDKDAPIDLEGVMERMRWLVDATIEDGWFEARVLPQLHVLIWGNKRGV

SEQ ID NO: 34155 - protein, 245 aa, Sinorhizobium medicae
  misc_feature (1)..(245): tr|A0A508X4W9|A0A508X4W9_9RHIZ 7-carboxy-7-deazaguanine synthase OS=Sinorhizobium medicae OX=110321 GN=queE PE =3 SV=1
MTNVRSDEIRVSEIFGPTIQGEGVLIGLPTVFVRSGGCDYRCSWCDSLHAVESSYRHEWHSMSTEAVWQEIVRLSRGEAVMVSLSGGNPAIQPFGDLIGRGHRNGYRFALETQGSIAREWFAELDVLVLSPKPPSSGMETDWQAFDVCLRMAAGKPQTVLKFVVFDEADYSYARAAAARHPHLPVYLQPGNHTPPPSDDKDAPIDLEGVMERMRWLVDATIEDGWFEARVLPQLHVLIWGNKRGV

SEQ ID NO: 34156 - protein, 245 aa, Sinorhizobium meliloti; identical to SEQ ID NO: 33561
  misc_feature (1)..(245): tr|F7XK43|F7XK43_SINMM 7-carboxy-7-deazaguanine synthas e OS=Sinorhizobium meliloti (strain SM11) OX=707241 GN= exsD PE=3 SV=1

SEQ ID NO: 34157 - protein, 245 aa, Sinorhizobium meliloti; identical to SEQ ID NO: 33561
  misc_feature (1)..(245): tr|A0A0E0UMS3|A0A0E0UMS3_SINMB 7-carboxy-7-deazaguanine synthase OS=Sinorhizobium meliloti (strain BL225C) OX= 698936 GN=queE PE=3 SV=1

SEQ ID NO: 34158 - protein, 245 aa, Sinorhizobium saheli
  misc_feature (1)..(245): tr|A0A178YIF3|A0A178YIF3_SINSA 7-carboxy-7-deazaguanine synthase OS=Sinorhizobium saheli OX=36856 GN=queE PE=3 SV=1
MTSVRPAEIRVSEIFGPTIQGEGILIGLPTVFVRTGGCDYRCSWCDSLHAVDSEYREDWRAMSTEDVWQEVVRLSGGSPVMVTLSGGNPAIQPLGGLIDRGHEEGYRFALETQGSVARDWFAELDVLVLSPKPPSSGMETDWEAFDACLRLSKGRPQTVLKIVVLDEADYAYARAAAARYPHLPVYLQPCNHTPPPPDADDAPIDVEGILERMRWLVDKAAEDRWLEARVLPQLHVLIWGNKRGV

SEQ ID NO: 34159 - protein, 245 aa, Sinorhizobium sp.
  misc_feature (1)..(245): tr|A0A249P1J3|A0A249P1J3_9RHIZ 7-carboxy-7-deazaguanine synthase OS=Sinorhizobium sp. CCBAU 05631 OX=794846 GN =queE PE=3 SV=1
MTVTRPAEIRVSEIFGPTIQGEGALIGLPTVFVRTGGCDYRCSWCDSLHAVDSAYRDEWRAMTVEEVWSEVTRLSGGVPVMVSLSGGNPAIQPLGPLIDRGHREGYRFALETQGSVARDWFANLDMLVLSPKPPSSGMETDWEAFDACLRSSRGKPQTALKIVVFDEVDYAYARSAAARHPQLPVYLQPGNHTPPPPDDEVAPIDIEGVMERVRWLVDRVSADKWFEVRVLPQLHVLIWGNRRGV

SEQ ID NO: 34160 - protein, 245 aa, Sinorhizobium sp.
  misc_feature (1)..(245): tr|A0A2A6MEH3|A0A2A6MEH3_9RHIZ 7-carboxy-7-deazaguanine synthase OS=Sinorhizobium sp. NG07B OX=1538174 GN=queE PE=3 SV=1
MTVTRPAEIRVSEIFGPTIQGEGALIGLPTVFVRTGGCDYRCSWCDSLHAVDSAYRDEWRAMTVEEVWSEVTRLSGGVPVMVSLSGGNPAIQPLGPLIDRGHREGYRFALETQGSVARDWFANLDMLVLSPKPPSSGMETDWEAFDACLRSSRGKPQTALKIVVFDEVDYAYARSAAARHPQLPVYLQPGNHTPPPPDDEVAPIDIEGVMERMRWLVDRVSADKWFEARVLPQLHVLIWGNRRGV

SEQ ID NO: 34161 - protein, 210 aa, Siphonobacter aquaeclarae
  misc_feature (1)..(210): tr|A0A1G9RKE0|A0A1G9RKE0_9BACT 7-carboxy-7-deazaguanine synthase OS=Siphonobacter aquaeclarae OX=563176 GN=que E PE=3 SV=1
MSVSIAEFPVTAKKLPVMESFYTLQGEGFHNGKAAYFIRLGGCEVGCHWCDVKESWDVNAHPSFAVTEIVDGALAYPGRLAVITGGEPLMHDLAELTSALQEAGFQTNIETSGVYPVTGSWDWICFSPKKFKEPHSDIYDKASELKVIVYNKSDFAFAEEHAARVSADCVLLLQPEWSRQDLMLPEIIEYVKDNPKWRVSLQTHKYMQIP

SEQ ID NO: 34162 - protein, 193 aa, Siphonobacter curvatus
  misc_feature (1)..(193): tr|A0A2S7ITX0|A0A2S7ITX0_9BACT 7-carboxy-7-deazaguanine synthase OS=Siphonobacter curvatus OX=2094562 GN=queE PE=3 SV=1
MESFYTLQGEGFHAGKSAYFIRLGGCEVGCHWCDVKESWDASLHPSFGIDSIVAGALQYPGRMAVITGGEPLMHDLTDLTAALQIAGFQTNIETSGVYAVTGSWDWICFSPKKFKEPHSDIYERADELKVIIYNKSDFEFAEEHASRLQTDAQLLLQPEWSKRDVMLPQIIDYVKDNPKWRVSLQTHKYMNIP

SEQ ID NO: 34163 - protein, 193 aa, Siphonobacter sp.
  misc_feature (1)..(193): tr|A0A2N7BH44|A0A2N7BH44_9BACT 7-carboxy-7-deazaguanine synthase OS=Siphonobacter sp. BAB-5405 OX=1864825 GN=q ueE PE=3 SV=1
MESFYTLQGEGFHAGKAAYFIRLGGCEVGCHWCDVKESWDASLHPSFGIDSIVAGALQYPGRMAVITGGEPLMHDLTDLTAALQIAGFQTNIETSGVYAVTGSWDWICFSPKKFKEPHSDIYERADELKVIIYNKSDFEFAEEHASRLQTDAQLLLQPEWSKRDVMLPQIIDYVKDNPKWRVSLQTHKYMNIP

SEQ ID NO: 34164 - protein, 193 aa, Siphonobacter sp.
  misc_feature (1)..(193): tr|A0A261Q6V4|A0A261Q6V4_9BACT 7-carboxy-7-deazaguanine synthase OS=Siphonobacter sp. BAB-5385 OX=1864822 GN=q ueE PE=3 SV=1
MESFYTLQGEGFHAGKAAYFIRLGGCEVGCHWCDVKESWDASLHPSFGIDFIVAGALQYPGRMAVITGGEPLMHDLTDLTAALQIAGFQTNIETSGVYAVTGSWDWICFSPKKFKEPHSDIYERADELKVIIYNKSDFEFAEEHASRLQTDAQLLLQPEWSKRDVMLPQIIDYVKDNPKWRVSLQTHKYMNIP

SEQ ID NO: 34165 - protein, 213 aa, Skermanella aerolata
  misc_feature (1)..(213): tr|A0A0D2SN79|A0A0D2SN79_9PROT 7-carboxy-7-deazaguanine synthase OS=Skermanella aerolata KACC 11604 OX=1385368 GN=queE PE=3 SV=1
MSYAVKEIFYTLQGEGAQAGRPAVFCRFAGCNLWSGREADRESAVCRFCDTDFVGTDGTGGGRFSDAAALAAAVAAQWPAGAGGRPYVVCTGGEPLLQLDIPLIDALHAVGFEIAIETNGTKPVPDGIDWICVSPKAGSQLVVERGNELKLVFPQAESEARPENFLNLRFDNFFLQPMDGPERTENLQATIAYCLANPSWRLSLQTHKIMGIP

SEQ ID NO: 34166 - protein, 213 aa, Skermanella aerolata; identical to SEQ ID NO: 34165
  misc_feature (1)..(213): tr|A0A512E4E4|A0A512E4E4_9PROT 7-carboxy-7-deazaguanine synthase OS=Skermanella aerolata OX=393310 GN=queE PE= 3 SV=1

SEQ ID NO: 34167 - protein, 210 aa, Skermanella stibiiresistens
  misc_feature (1)..(210): tr|W9GRP2|W9GRP2_9PROT 7-carboxy-7-deazaguanine synthas e OS=Skermanella stibiiresistens SB22 OX=1385369 GN=que E PE=3 SV=1
MAYAVKELFKTLQGEGAQAGRAAVFCRFAGCNLWSGRERDRATATCQFCDTDFVGTDGEGGGRFGTAEDLAAALARGWGPGTERRYVVFTGGEPLLQLDTALVEAVHAEGFEIAIETNGTLEPPPGVDWICVSPKAGADWVLKRGHELKLVFPQEAFDPPELENLPFEHHWLQPMDGPDRLANTARIVDYCKDHPRWRLSLQTHKLIGIP

SEQ ID NO: 34168 - protein, 213 aa, Smithella sp.
  misc_feature (1)..(213): tr|A0A091FHA2|A0A091FHA2_9DELT 7-carboxy-7-deazaguanine synthase OS=Smithella sp. SCADC OX=1499107 GN=queE PE= 3 SV=1
MSYFIKEIFYSIQGEGFYSGRPAVFCRFAGCNLWSGKEADRKKAVCKFCDTDFIGCDGSQGGEFPTPDQLVEIICKLWPEKKLKPVRPFVVCTGGEPLLQLNVELIEALHKKGWEIAVETNGTLLPPPGIDWICVSPKAGAKLLLRSGQELKLVFPQQGAQPEKYEALDFQHFFLQPIALPDLEINTRLVLEYVLSHPKWRLSLQTHKILGVK

SEQ ID NO: 34169 - protein, 213 aa, Smithella sp.
  misc_feature (1)..(213): tr|A0A0Q1A3H2|A0A0Q1A3H2_9DELT 7-carboxy-7-deazaguanine synthase OS=Smithella sp. SDB OX=1735324 GN=queE PE=3 SV=1
MSYFIKEIFYSIQGEGFYSGRPAVFCRFAGCNLWSGEETDREKAVCKFCDTDFVGCDGQEGGKYSRPEQLVEKIYRLWLGKNSKAVRPFVVCTGGEPLLQLDTGLIEALHRKGCEVAIETNGTLLPPPGIDWVCVSPKADAKLLLRSGNELKLVFPQFGAEPEKYETLDFQHFFLQPMDSPERETNTRLALEYILTHPKWRLSLQIHKILGVK

SEQ ID NO: 34170 - protein, 204 aa, Snodgrassella alvi
  misc_feature (1)..(204): tr|A0A074V9I7|A0A074V9I7_9NEIS 7-carboxy-7-deazaguanine synthase OS=Snodgrassella alvi SCGC AB-598-J21 OX=1385 367 GN=queE PE=3 SV=1
MIQFNIVEIFESLQGEGYNTGMPAIFIRLAACNLKCPWCDTDFMSYQSMSLEHILNTVSQFQGKNIIITGGEPTINKKLPLLLRALKQENYYLAIESNGLGTVDPLIDYIALSPKFYYRHQYPFPLQRQADEVRIVVENHPDFLTFCQNIEQHIQARHYFLSPCEQNNQFNMLTTLQYLGRLNQNRHNNKWLLSIQTHKLANIE

SEQ ID NO: 34171 - protein, 204 aa, Snodgrassella alvi
  misc_feature (1)..(204): tr|A0A1X0TB93|A0A1X0TB93_9NEIS 7-carboxy-7-deazaguanine synthase OS=Snodgrassella alvi OX=1196083 GN=queE PE=3 SV=1
MIQFNIVEIFESLQGEGYNTGMPAVFIRLAACNLKCPWCDTDFMSYQSMSLEHILNTVSQFQSKNIIITGGEPTINKKLPLLLRALKQENYYLAIESNGLGTVDPLIDYIALSPKFYYRHQYPFPLQRQADEVRIVVENHPDFLTFCQNIEQHIQARHYFLSPCEQNNQFNMLTTLQYLGRLNQNRHNNKWLLSIQTHKLANIE

SEQ ID NO: 34172 - protein, 204 aa, Snodgrassella sp.
  misc_feature (1)..(204): tr|A0A1C4AX95|A0A1C4AX95_9NEIS 7-carboxy-7-deazaguanine synthase OS=Snodgrassella sp. R-53583 OX=1798181 GN=qu eE PE=3 SV=1
MTQFNIVEIFESLQGEGYNTGMPAIFIRLAACNLKCPWCDTDFMRYQSMSLQHILDIVQQYQSKNIIITGGEPTIHKKLPLLLQKLKQKNYYIALESNGLGIVDPHIDYIALSPKFHYRQHYPFLAQNRADEVRIVVEDHPEFIAFCQKIEQHIQARHYFLSPCEQNNQFNILTTLQTLGKLNQHRYNNKWLLSLQTHKLANIE

SEQ ID NO: 34173 - protein, 203 aa, Snowella sp.
  misc_feature (1)..(203): tr|A0A2W7B4Z8|A0A2W7B4Z8_9CYAN 7-carboxy-7-deazaguanine synthase OS=Snowella sp. OX=2164131 GN=queE PE=3 SV=1
MLALQTLTYPIVETFHSIQGEGAWAGTNAFFIRLGGCDVYCPWCDQKETWNPKRYPQQSIGYLLEQVQAVNPAIAIITGGEPLLYDLLPLTEALREKAIKVHLETSGAHPFSGKFDWVTFSPKSYKLPHPSIYPKASELKVIIGEEKDFQWAEEQSRQISLNIPKYLQPEWNRSESQQLIFNYILCHPQWRMSLQSHKFLGIR

SEQ ID NO: 34174 - protein, 223 aa, Sodalis glossinidius
  misc_feature (1)..(223): tr|A0A193QH33|A0A193QH33_SODGM 7-carboxy-7-deazaguanine synthase OS=Sodalis glossinidius (strain morsitans) OX =343509 GN=queE PE=3 SV=1
MQYPLNEIFQTLQGEGYFTGVPAIFIRLQGCPVGCSWCDTKHTWQQDEAERVTAGEIPLKTADSSRWASMTAEEIIALMVKQGWTARHVVITGGEPCLHDLMPLTHTLEQQGFSCQIETSGTQEIHCTPQTWVTVSPKINMRGGLPVLAQALGRSDEIKHPAARQSDIDELDALLATLHDTKQRVIALQPISQKEAATRLCIETCIARNWRLSMQTHKYLNIS

SEQ ID NO: 34175 - protein, 223 aa, Sodalis glossinidius
  misc_feature (1)..(223): tr|Q2NVN6|Q2NVN6_SODGM 7-carboxy-7-deazaguanine synthas e OS=Sodalis glossinidius (strain morsitans) OX=343509 GN=queE PE=3 SV=1
MQYPLNEIFQTLQGEGYFTGVPAIFIRLQGCPVGCSWCDTKHTWQQDEAERVTAGEIPLKTADSSRWASITAEEIIALMVKQGWTARHVVITGGEPCLHDLMPLTHTLEQQGFSCQIETSGTQEIHCTPQTWVTVSPKINMRGGLPVLAQALGRSDEIKHPAARQSDIDELDALLATLHDTKQRVIALQPISQKEAATRLCIETCIARNWRLSMQTHKYLNIS

SEQ ID NO: 34176 - protein, 223 aa, Sodalis praecaptivus
  misc_feature (1)..(223): tr|W0I0C5|W0I0C5_9GAMM 7-carboxy-7-deazaguanine synthas e OS=Sodalis praecaptivus OX=1239307 GN=queE PE=3 SV=1
MQYPLNEIFQTLQGEGYFTGVPAIFIRLQGCPVGCSWCDTKHTWQQDETDHVPAGEIPLKTADSSRWASLTAEEMIAMIAQQGWTARHVVITGGEPCLHDLMPLTHALEQQGYSCQIETSGTQEVHCTPQTWVTVSPKINMRGGLPVLAQALGRSDEIKHPVARQRDIDELDALLQTLHDTKQRVIALQPISQKEAATRLCIETCIARNWRLSMQTHKYLNIA

SEQ ID NO: 34177 - protein, 223 aa, Sodalis sp.
  misc_feature (1)..(223): tr|A0A4R1NGI0|A0A4R1NGI0_9GAMM 7-carboxy-7-deazaguanine synthase OS=Sodalis sp. 159R OX=2529856 GN=queE PE=3 S V=1
MQYPLNELFQTLQGEGYFTGVPAIFIRLQGCPVGCSWCDTKHTWQQDPLEEVPVGDIPLKTADSAKWALVSTEEMLEIITQQGYTARHVVITGGEPCLHDLFALTQMLEQQGYSCQIETSGTHEVRCTSQTWVTVSPKVGMRGGLEILPQALQRADEIKHPVARERDIEQLEALLATLDDDKPRIIALQPVSQQEAATRLCIETCIARNWRLSMQTHKYLNIA

SEQ ID NO: 34178 - protein, 223 aa, Sodalis sp.
  misc_feature (1)..(223): tr|A0A1J7C540|A0A1J7C540_9GAMM 7-carboxy-7-deazaguanine synthase OS=Sodalis sp. TME1 OX=1912097 GN=queE PE=3 S V=1
MQYPLNEIFQTLQGEGYFTGVPAIFIRLQGCPVGCSWCDTKHTWQQDETDHVPAGEIPLKTTDSSRWASLTAEEMIAMIAQQGWTARHVVITGGEPCLHDLMPLTHALEQQGFSCQIETSGTQDVHCTPQTWVTVSPKINMRGGLPVLAQALGRSDEIKHPVARQRDIDELDALLQTLHDTKQRVIALQPISQKEAATRLCIETCIARNWRLSMQTHKYLNIA

SEQ ID NO: 34179 - protein, 223 aa, Unknown
  misc_feature (1)..(223): tr|A0A151UKQ6|A0A151UKQ6_9GAMM 7-carboxy-7-deazaguanine synthase OS=Sodalis-like endosymbiont of Proechinophth irus fluctus OX=1462730 GN=queE PE=3 SV=1
MQYPLNEIFQTLQGEGYFTGVPAIFIRLQGCPVGCSWCDTKHSWQQGAADQVATGKIPLKTANNSLWASITVEEMITMIAQQGWAARHVVITGGEPCLHDLIPLTHALEQQGFSCQIETSGTQEVHCTPQTWVTVSPKINMRGGLPVLVQALGRSDEIKHPVARQRDIDELDALLQILHDTKQRIISLQPISQKEAAARLCIKTCIARNWRLSMQTHKYLNIA

SEQ ID NO: 34180 - protein, 213 aa, Solemya elarraichensis
  misc_feature (1)..(213): tr|A0A1T2LAQ1|A0A1T2LAQ1_9GAMM 7-carboxy-7-deazaguanine synthase OS=Solemya elarraichensis gill symbiont OX=19 18949 GN=queE PE=3 SV=1
MTQLRITEIFCSLQGESCSVGYATVFVRLTGCPLRCYYCDTTYAYSGGDLLDIDAIVEQVQGNGVPCVTVTGGEPLAQEGAIELLNKLCDAGLTVSLETSGALDIEPVDTRVSRVVDIKTPGSGEASKNLWKNLALLTSNDQVKFVICDRTDFDWSKRILEKYQLTESCEVLFSPSMDEMDATQLADWIVEERLPVRFQLQLHKILWGNKPGV

SEQ ID NO: 34181 - protein, 219 aa, Solemya pervernicosa
  misc_feature (1)..(219): tr|A0A1T2L4T8|A0A1T2L4T8_9GAMM 7-carboxy-7-deazaguanine synthase OS=Solemya pervernicosa gill symbiont OX=6427 97 GN=queE PE=3 SV=1
MSSNERAQQLRISEIFYSLQGESRSVGWPTVFIRLTGCPLRCNYCDTEYAFTGGESIAIESILEQVAQFGAHHVCVTGGEPLAQKGCLKLLTELCDLGYETSLETSGALDISTVDERVVRVVDVKTPDSGESSRNLLENLQYLTARDQLKFVICSREDYEWSRSIIAEHKLSERCEILFSPIHEAQDPTELAEWILEDRLHVRFQLQLHKLLWRETQGR

SEQ ID NO: 34182 - protein, 213 aa, Solemya velesiana
  misc_feature (1)..(213): tr|A0A1T2KTP4|A0A1T2KTP4_9GAMM 7-carboxy-7-deazaguanine synthase OS=Solemya velesiana gill symbiont OX=1918948 GN=queE PE=3 SV=1
MTRLRITEIFYSLQGESNTVGLPTVFVRLTGCPLRCGYCDTTYAFKGGEWMSLAQILASIIEYTPRYVTVTGGEPMAQKACAKLLTALCDAGYQVSLETSGAVDLSVVDPRVVKVMDLKTPGSGEMEKNLYNNVDTLAATDQVKFVICDEADYLWSRQQVEALGLDGRCEVLFSPALGQQDATELAEWIIRDRLQVRFQIQLHKYLWGDVAGK

SEQ ID NO: 34183 - protein, 213 aa, Solemya velum
  misc_feature (1)..(213): tr|A0A0B0H5L9|A0A0B0H5L9_SOVGS 7-carboxy-7-deazaguanine synthase OS=Solemya velum gill symbiont OX=2340 GN=que E PE=3 SV=1
MTQLRITEIFCSLQGESRSVGYATVFVRLTGCPLRCYYCDTKYAYSGGTLIDIDAIVEQVQGYAVPYVTVTGGEPLAQEGASELIDKLCDAGLKVSLETSGALDIGSVDTRVSRVLDIKTPGSGEASKNHWNNLSLLTSNDQVKFVICDRNDFDWSKRILEKYQLTDTCEVLFSPSVDEMDATQLADWIVEERLPVRFQLQLHKILWGDKPGV

SEQ ID NO: 34184 - protein, 224 aa, Solibacter usitatus
  misc_feature (1)..(224): tr|Q02CA2|Q02CA2_SOLUE 7-carboxy-7-deazaguanine synthas e OS=Solibacter usitatus (strain Ellin6076) OX=234267 G N=queE PE=3 SV=1
MKIAELFYSIQGEGALLGVPSVFIRTSGCNLRCSWCDTPYTSWRPEGTDLTLEQILDEVGAHPARHVVVTGGEPMIAPDIVALTQRLRARNLHITIETAGTVFEPVACDLMSISPKLANSTPDDARFSRQHERLRIQTPVLAELMARYPYQLKFVISQPGDLEEARSLVETLQADRERVILMPEGVDPARLRERALWLAEICKEEGFRFSPRLHVDLWGDRRGV

SEQ ID NO: 34185 - protein, 245 aa, Solimicrobium silvestre
  misc_feature (1)..(245): tr|A0A2S9GZR9|A0A2S9GZR9_9BURK 7-carboxy-7-deazaguanine synthase OS=Solimicrobium silvestre OX=2099400 GN=queE PE=3 SV=1
MKHKNAHASILVRSTGSFPLSAKLLFIRFFASSALTYSVKEIFYTLQGEGNHAGRPAVFCRFAGCNLWSGREVDRAKAICQFCDTDFVGTDGELGGKFKQAEELADVINGLWPAAYPANKYVVFTGGEPLMQLDAVLINAIHAAGFEIAIETNGTIAVPEGIDWVCVSPKMGAELIVFKGDELKVVIPQTGQDMQKYEQLDFKHFFVQAMDGPLQAENLRKAVNYCKLHPHWKLSLQTHKLLQIP

SEQ ID NO: 34186 - protein, 194 aa, Solimonas aquatica
  misc_feature (1)..(194): tr|A0A1H9HHB4|A0A1H9HHB4_9GAMM 7-carboxy-7-deazaguanine synthase OS=Solimonas aquatica OX=489703 GN=queE PE=3 SV=1
MGWPTVFVRLTGCPLRCQYCDTAYAFHGGQWQSLDDILAQVASYGAAHVCVTGGEPLAQKNCLALLTRLCDAGYQVSLETSGALDIAGVDARVRRIVDIKTPDSGEQARNRWENLDLLQAQDELKFVICSRSDYEWAREQLQTHQLARRCAVLFSPSAAQVAPAQLADWLLADRLPARFQLQLHKILWGNTPGR

SEQ ID NO: 34187 - protein, 224 aa, Solimonas fluminis
  misc_feature (1)..(224): tr|A0A2S5TDK3|A0A2S5TDK3_9GAMM 7-carboxy-7-deazaguanine synthase OS=Solimonas fluminis OX=2086571 GN=queE PE=3 SV=1
MSNTAPGSSPEAVRLKITEIFHSLQGESSLAGWPTVFVRLTGCPLRCQYCDTTYSFYGGQYRSLEQVLEEVAGHGARHVCVTGGEPLAQKSCLPLLEALCDAGYVVSLETSGALDIGGVDPRVIRVVDLKTPDSGEQGRNRLANIELLTPRDELKFVLCSRADYDWARGMLAEHRLAERCGVLFSHAHGQLGARELADWIVADRLPVRFQTQLHKALWGSEPGR

SEQ ID NO: 34188 - protein, 224 aa, Solimonas sp.
  misc_feature (1)..(224): tr|A0A346N1Y2|A0A346N1Y2_9GAMM 7-carboxy-7-deazaguanine synthase OS=Solimonas sp. K1W22B-7 OX=2303331 GN=queE PE=3 SV=1
MSNTAPGSAPEAVRLKITEIFHSLQGESSLVGWPTVFVRLTGCPLRCQYCDTTYSFYGGEWRTLPQILEEVASHGARHVCVTGGEPLAQKNCLPLLAQLCDAGYVVSLETSGALDIGSVDPRVIRVVDLKTPDSGELAKNRLANIELLTPRDELKFVLCSRADYDWARGMLAEHRLAERCGVLFSHAHGQLEARDLADWIIADRLPVRFQTQLHKALWGNQPGR

SEQ ID NO: 34189 - protein, 193 aa, Solirubrum puertoriconensis
  misc_feature (1)..(193): tr|A0A0W8EGS0|A0A0W8EGS0_9BACT 7-carboxy-7-deazaguanine synthase OS=Solirubrum puertoriconensis OX=1751427 GN= queE PE=3 SV=1
MEQFYTIQGEGANAGRAAYFIRLGGCDVGCHWCDVKESWDADAHPRLTIESLIAEVRQHPGRNVVITGGEPLMYDLGPLTQALHAAGCQNWIETSGAHPLSGEWDWICVSPKKFKAPLPEVLLHAHELKVVVFNKSDFAWAEQHAALVGPQCRLFLQPEWSKAAAVTPLIIDYVKQHPQWQVSLQTHKYLDIP

SEQ ID NO: 34190 - protein, 206 aa, Solitalea canadensis
  misc_feature (1)..(206): tr|H8KQU3|H8KQU3_SOLCM 7-carboxy-7-deazaguanine synthas e OS=Solitalea canadensis (strain ATCC 29591 / DSM 3403 / NBRC 15130 / NCIMB 12057 / USAM 9D) OX=929556 GN=que E PE=3 SV=1
MHQIPEDGTSLPLMEEFYTIQGEGFNTGKAAYFIRLGGCDVGCHWCDVKESWDAELHPLTPADTIVDNASKFPSKAVVVTGGEPLIYNLEYLTRQLQSKGIKTFIETSGAYPLSGNWDWICLSPKKFKAPRPDILPLAHELKVIVFNKSDFEWAEQHAKSVSADCKLYLQPEWSKAKEMTPLIVEYVMNNPKWEISLQTHKYLNIP

SEQ ID NO: 34191 - protein, 210 aa, Solitalea koreensis
  misc_feature (1)..(210): tr|A0A521BLM8|A0A521BLM8_9SPHI 7-carboxy-7-deazaguanine synthase OS=Solitalea koreensis OX=543615 GN=queE PE=3 SV=1
MSSVLNKIPTDGTLLPLMEEFYTIQGEGFNTGKAAYFIRLGGCDVGCHWCDVKESWDAELHPLTNSDIIVENAGKFPSKAVVVTGGEPLLYNLDYLTSELQKKGIKTFIETSGAYPLSGSWDWICLSPKKFKSPRPDILPLANELKVIVFNKSDFDWAEQHAAHVSDKCKLYLQPEWSKHSEMTPLIVDYVMNNPRWEISLQTHKYLNIP

SEQ ID NO: 34192 - protein, 207 aa, Solitalea longa
  misc_feature (1)..(207): tr|A0A2S5A0C2|A0A2S5A0C2_9SPHI 7-carboxy-7-deazaguanine synthase OS=Solitalea longa OX=2079460 GN=queE PE=3 SV =1
MSVQVPEDGTLLPLMEEFYTIQGEGFNTGKAAYFIRLGGCDVGCHWCDVKESWDAELHPLTKADVIVDHASQYPSKAVVVTGGEPLIYNLEYLTKELQNKGIKTFIETSGAYPLSGSWDWVCLSPKKFKAPRPDILPLADELKVIVFNKSDFEWAEQHAANVSANCKLYLQPEWSKAKEMIPLIVEYVMNNPKWEISLQTHKYLNIP

SEQ ID NO: 34193 - protein, 210 aa, Soonwooa buanensis
  misc_feature (1)..(210): tr|A0A1T5G2S7|A0A1T5G2S7_9FLAO 7-carboxy-7-deazaguanine synthase OS=Soonwooa buanensis OX=619805 GN=queE PE=3 SV=1
MTKEQEDLLLKEGKMLPVMEHFYTIQGEGFHAGKAAYFIRLGGCDVGCHWCDVKESWDPTLHPLMSTEEIAETAAKYCKTIVLTGGEPLMWNLDLLTSKLKSLGCTIHIETSGAYPMSGQLDWITLSPKKTGLPLDDIYKVANELKVIVFNNNDLKFAEEQAARVNPNCELFLQSEWSKKDANYPKITDFILEHPEWRSSIQTHKYLNIP

SEQ ID NO: 34194 - protein, 242 aa, Sorangiineae bacterium
  misc_feature (1)..(242): tr|A0A1W9Q8F4|A0A1W9Q8F4_9DELT 7-carboxy-7-deazaguanine synthase OS=Sorangiineae bacterium NIC37A_2 OX=1970199 GN=queE PE=3 SV=1
MTPAPEQTLLVSERFVSLQGEGVSQGQPAAFLRLGRCNLTCTFCDTPYTWDFENYSYDEELSEVIQDELVAWVLRESPGRLIVTGGEPLIQQKQLAIFFATLDRARQETGGLLEFIEIETNGTVKPRPELEARVNQWNVSPKLKNSGEPRERAVRPDALGRFAELDGAYFKFVVRDEADAEEALGLVRSLSLPTHKVLFMPEARDASDLKERGPRVAELALRARVRYSGRMHLELFGGGRGV

SEQ ID NO: 34195 - protein, 217 aa, Sorangium cellulosum
  misc_feature (1)..(217): tr|A0A4P2QNN2|A0A4P2QNN2_SORCE 7-carboxy-7-deazaguanine synthase OS=Sorangium cellulosum OX=56 GN=queE PE=3 SV =1
MKEDTLVVHEIYASVQGESTFAGLPCTFVRLTGCNLRCAWCDTSQAFYGGKRLRRSDVLERALALGTSLVELTGGEPLLQPGSLPLLKELCDAGRTVLVETSGEADVSRVDPRVHKIMDLKAPGSGESHRNRWSNLDHLTPRDEIKFVLADRADYEWMRDTIRERRLDARGVTLLASCVWGKLAPRDLVQWVLDDGLRVRVQVQLHKVIWGADAQGV

SEQ ID NO: 34196 - protein, 217 aa, Sorangium cellulosum
  misc_feature (1)..(217): tr|A9G6T5|A9G6T5_SORC5 7-carboxy-7-deazaguanine synthas e OS=Sorangium cellulosum (strain So ce56) OX=448385 GN =queE PE=3 SV=1
MKEDTLVVHEIYASVQGESTFAGLPCTFVRLTGCNLRCAWCDTSQAFYGGKRIRRGEVLERALALGTPLVELTGGEPLLQPGSFPLLAELCDAGRTVLVETSGEADVSRVDPRVHKIMDLKAPGSGESHRNRWSNLDHLTPRDEIKFVLADRADYAWMRDTIRERRLDARGVTLLASCVWGKLSPKELVQWVLDDGLRVRVQVQLHKVIWGADAQGV

SEQ ID NO: 34197 - protein, 218 aa, Spartobacteria bacterium
  misc_feature (1)..(218): tr|A0A2T6CXX6|A0A2T6CXX6_9BACT 7-carboxy-7-deazaguanine synthase OS=Spartobacteria bacterium LR76 OX=2161866 G N=queE PE=3 SV=1
MDENAKLTINEIYLSVQGESTWAGLPCVFIRLTGCDLRCSYCDTEYAFYEGKKRLVSEVLAEVSDMPCPMVEVTGGEPLLQKNVKPLMAALCDAGKTVLIETSGAHDISGIDSRVHRIVDLKTPSSGESGRNRYENIPHLTERDEVKFVLGSREDYEWAREQIGRYDLGTRVRAVLLSPVFGKIDPKDIVQWMLDDQLPARFQLQMHKFIWEPRARGV

SEQ ID NO: 34198 - protein, 217 aa, Spartobacteria bacterium
  misc_feature (1)..(217): tr|A0A3C0R7I7|A0A3C0R7I7_9BACT 7-carboxy-7-deazaguanine synthase OS=Spartobacteria bacterium OX=2052183 GN=que E PE=3 SV=1
MSEKTLTINEIYQSIQGESTWAGQRCVFVRLTFCNLRCNYCDTEYAFYEGKKQTLNEVVDLVAAFNCPLVEITGGEPLLQKNVLPLMSMLADAGHTILLETSGAHDISKVDPRVHRIMDLKTPGSGEVERNLWSNIDHLTLLDEVKFVVGSREDYEWSCEKVQRFNLSKRCHAVLFSPIFGRIDPRQIVEWILADQLDVRFQLQMHKFIWTPTQRGV

SEQ ID NO: 34199 - protein, 204 aa, Sphaerisporangium sp.
  misc_feature (1)..(204): tr|A0A366LX56|A0A366LX56_9ACTN 7-carboxy-7-deazaguanine synthase OS=Sphaerisporangium sp. LHW63015 OX=2248750 GN=queE PE=3 SV=1
MFIRLSRCNLSCGFCDTPYTWDWARYDPHHEARWQSVAELAEWAGGHSPRLVVITGGEPLIQQDRLLPLVDVLIADGRRVEIETNGTIAPTPGLVREGVQFNVSPKLGNAGLAEDHRIVPAALTALADTGNAIFKFVATEPADLAEVAELEERYALAPIWVMPEGTTTQAVLDRARQLADQVIARGWNLSLRLQVLLWEGERGR

SEQ ID NO: 34200 - protein, 204 aa, Sphaerisporangium sp.
  misc_feature (1)..(204): tr|A0A2W2HLM9|A0A2W2HLM9_9ACTN 7-carboxy-7-deazaguanine synthase OS=Sphaerisporangium sp. 7K107 OX=2070365 GN= queE PE=3 SV=1
MFIRLSRCNLRCGFCDTPYTWDWARYDPHHEARWQPVAELAEWVGGHSPRLVVITGGEPLLQQDRLLPLVDALIADGRRVEIETNGTIAPTPGLVREGVQFNVSPKLGNAGLAEDHRIVPAVLTALANTGNAIFKFVATEPADLAEVAELEERYALAPIWVMPEGTTTQAVLDRVRQLADQVIARGWSLSLRLQVLLWEAERGR

SEQ ID NO: 34201 - protein, 264 aa, Sphaerospermopsis kisseleviana
  misc_feature (1)..(264): tr|A0A1Z4UQ10|A0A1Z4UQ10_9CYAN 7-carboxy-7-deazaguanine synthase OS=Sphaerospermopsis kisseleviana NIES-73 OX= 1973480 GN=queE PE=3 SV=1
MIAKTKVKPTARLIEVFSAIQGEGLNVGTRQIFIRFAICDLRCHFCDSSHTWNAPSVCQIERSPGLRDFEIHSNPIPLSTLIKWVERQNLPFLHDSISLTGGEPLLHAPFLAQFLPEVRSLNLPIYLETGGHRPEQLDMILPYLDSVGMDLKLPSVSGESHWTEHEKFLQICFDANLEIFVKIIVSQRTDPGELERAALLVNGICQDIPIFLQPVTPLAESQKFSQVAVEAPTPNQVLEWQALMKRFVKQVRVIPQTHKMLRQL

SEQ ID NO: 34202 - protein, 264 aa, Sphaerospermopsis reniformis
  misc_feature (1)..(264): tr|A0A480A5G4|A0A480A5G4_9CYAN 7-carboxy-7-deazaguanine synthase OS=Sphaerospermopsis reniformis OX=531300 GN= queE PE=3 SV=1
MIAKTKVKPTARLIEVFSAIQGEGLNVGTRQIFIRFAICDLRCHFCDSSHTWNAPSVCQIERSPGLRDFEIHSNPIPLSTLIKWVERQNLPFLHDSISLTGGEPLLHAPFLAQFLPEVRSLNLPIYLETGGHRPEQLDMILPYLDSVGMDLKLPSVSGESHWTEHEKFLQICFDANLEIFVKIIVSQRTDPGELERAALLVNGICQDIPIFLQPVTPLAESQKFSQVVVEAPTPNQVLEWQALMKRFVKQVRVIPQTHKMLRQL

SEQ ID NO: 34203 - protein, 187 aa, Sphaerotilus hippei
  misc_feature (1)..(187): tr|A0A318HAX7|A0A318HAX7_9BURK 7-carboxy-7-deazaguanine synthase OS=Sphaerotilus hippei OX=744406 GN=queE PE=3 SV=1
MFCRFAGCNLWSGREADRAGAVCRFCDTDFVGTDGTLGGKYERADTLADAVASQWPAGTRPGLVVLTGGEPLLQVDGALIDALHARGFTLAVETNGTIAAPPGLDWICVSPKAGSTLVQTSGHELKVVVPQAGQDLEALAALPFEHHFLQPMDDLLAREHQRLAIELCLRDPRWRLSVQTHKVMGIR

SEQ ID NO: 34204 - protein, 214 aa, Sphaerotilus natans
  misc_feature (1)..(214): tr|A0A5C1PVI7|A0A5C1PVI7_9BURK 7-carboxy-7-deazaguanine synthase OS=Sphaerotilus natans subsp. sulfidivorans O X=639200 GN=queE PE=3 SV=1
MSYAVKEIFYTLQGEGAQAGRAAVFCRFAGCNLWSGRESDRAAAVCTFCDTDFVGTDGQNGGKFAGADALADAVAARWPGGVAGAAGRPYVVCTGGEPLLQLDDALVEAFHARGFEVAVETNGTQPAPAGLDWICVSPKADAPLLLTAGDELKLVYPQPLALPERFAGLAFDHFFLQPMDGPERLAHTRAATDYCMAHPQWRLGVQMHKIVGIE

SEQ ID NO: 34205 - protein, 131 aa, Sphingobacteriaceae bacterium
  misc_feature (1)..(131): tr|A0A4Q6DN63|A0A4Q6DN63_9SPHI 7-carboxy-7-deazaguanine synthase QueE (Fragment) OS=Sphingobacteriaceae bacter ium OX=2021370 GN=EOP47_30290 PE=4 SV=1
NVVVTGGEPLIYNMDYLTAKLHQRGVKTFIETSGAYPLSGNWDWICLSPKKFKAPTPGVAAAAHELKVIIFNKSDFEFAEQNAKMVSADCKLFLQPEWSKAKEMTPLIVDYVMNNPQWEISLQTHKFLNIP

SEQ ID NO: 34206 - protein, 207 aa, Sphingobacteriaceae bacterium
  misc_feature (1)..(207): tr|A0A1X9Z3I3|A0A1X9Z3I3_9SPHI 7-carboxy-7-deazaguanine synthase OS=Sphingobacteriaceae bacterium GW460-11-11- 14-LB5 OX=1986952 GN=queE PE=3 SV=1
MKQEIPEDGTLLPLMEEFYTIQGEGFNTGKAAYFIRLGGCDVGCHWCDVKESWDAEMHPLTPSDVIVENADKFPGKAVVITGGEPLIYNLDYLTNKLKERGILTFIETSGAYPLSGNWDWICLSPKKFKAPRPDITPFAHELKVIVFNKSDFKWAEEYAAMVSPTCKLYLQPEWSKSKEITPLIIEYVMANPKWEISLQTHKFLNIP

SEQ ID NO: 34207 - protein, 207 aa, Sphingobacteriales bacterium
  misc_feature (1)..(207): tr|A0A258WXY9|A0A258WXY9_9SPHI 7-carboxy-7-deazaguanine synthase OS=Sphingobacteriales bacterium 16-39-50 OX=1 970581 GN=queE PE=3 SV=1
MAHQIPSDGTLLPLMEEFYTIQGEGFHSGKAAYFIRLGGCDVGCHWCDVKESWDAELHPLTYTDQIVKNAEKYPGKAVVVTGGEPLIYNLDYLTSELQKRGIKTFIETSGAYPLSGTWDWICLSPKKFKAPRPDIAPLAGELKVIVFNKSDFKWAEDYAATVSEGCKLYLQPEWSKSSEVIPLIIDYVMENPKWEISLQTHKYLNIP

SEQ ID NO: 34208 - protein, 193 aa, Sphingobacteriales bacterium
  misc_feature (1)..(193): tr|A0A2P7TSI3|A0A2P7TSI3_9SPHI 7-carboxy-7-deazaguanine synthase OS=Sphingobacteriales bacterium UPWRP_1 OX=21 16516 GN=queE PE=3 SV=1
MEQFYTIQGEGAYQGSAAVFIRLGGCDVGCVWCDVKESWNAGNHPQTDITDIIRESGKYESEICVITGGEPLMHNLTALCTGLQKAGKRTHVETSGAHPLTGKWDWICLSPKKFKFPLPEVVAVANELKVVVYHPSDFAWAEQFAAKVPANCQLFLQPEWSKTNTILPLIVDYVKQHPKWQISLQIHKYMNIP

SEQ ID NO: 34209 - protein, 203 aa, Sphingobacteriia bacterium
  misc_feature (1)..(203): tr|A0A259HN41|A0A259HN41_9BACT 7-carboxy-7-deazaguanine synthase OS=Sphingobacteriia bacterium 39-39-8 OX=1970 578 GN=queE PE=3 SV=1
MQITNTSLPVMEAFYTLQGEGYHQGRAAYFIRLGGCDVGCVWCDVKDSWDADKHPKISIEAIVAQACKYPGRLAVITGGEPLLHQLDELTKALQDKGFETNIETSGSSPMSGQWDWICLSPKKFKAPVPANLALAQELKVVVFNKHDFEWAELHAAEVAPTCKLYLQPEWDKAAEITPLIVDYIKAHPQWELSLQTHKYINVP

SEQ ID NO: 34210 - protein, 206 aa, Sphingobacteriia bacterium
  misc_feature (1)..(206): tr|A0A1G3J6H1|A0A1G3J6H1_9BACT 7-carboxy-7-deazaguanine synthase OS=Sphingobacteriia bacterium RIFOXYD2_FULL_3 5_12 OX=1802167 GN=queE PE=3 SV=1
MRAAVNNTLALPVMEAFYTLQGEGAHQGRAAYFIRLGGCDVGCVWCDVKDSWDVTKHPLVSIDEIVAKAVSYPGRLAVVTGGEPLMHHLDALTDALHAAGFETNIETSGSSPLSGNWDWICLSPKKFKAPLDEVIVKAHELKVVVFNKHDFEWAEKYAALVNSSCKLYLQPEWDKAAEMTPLILAYIQANPQWRLSLQVHKYLNIP

SEQ ID NO: 34211 - protein, 207 aa, Sphingobacterium alimentarium
  misc_feature (1)..(207): tr|A0A4R3VRD6|A0A4R3VRD6_9SPHI 7-carboxy-7-deazaguanine synthase OS=Sphingobacterium alimentarium OX=797292 GN =queE PE=3 SV=1
MSHQVPEDGSLLPLMEEFYTIQGEGYHTGKAAYFIRLGGCDVGCHWCDVKESWDASLHPLTHTDTIVHNAKQHPAQTVVITGGEPLLYNLDSLTLKLKDQGIQTFIETSGAYPLSGHWDWICLSPKKFKSPLPEVSAAAGELKVIIFNKSDFLWAEEHASRVNPACKLYLQPEWSKAAEVTPLIIDYVKDNPKWNISLQTHKYLNIP

SEQ ID NO: 34212 - protein, 207 aa, Sphingobacterium alkalisoli
  misc_feature (1)..(207): tr|A0A4U0GWQ1|A0A4U0GWQ1_9SPHI 7-carboxy-7-deazaguanine synthase OS=Sphingobacterium alkalisoli OX=1874115 GN= queE PE=3 SV=1
MSHQVPEDGTQLPLMEEFYTIQGEGYHTGKAAYFIRLGGCDVGCHWCDVKESWNAELHPLTSADQIVKNATQYPSKTVVITGGEPLIYNLDYLTRKLKEAGIKTFIETSGAYPLSGFWDWICLSPKKFKGPRPDVLNAAGELKIIIFNKSDFEWAEEHAKFVGDQCRLYLQPEWSKASEMTPLIIDYVKNNPKWEISLQTHKYLNIP

SEQ ID NO: 34213 - protein, 207 aa, Sphingobacterium cellulitidis
  misc_feature (1)..(207): tr|A0A235E4N4|A0A235E4N4_9SPHI 7-carboxy-7-deazaguanine synthase OS=Sphingobacterium cellulitidis OX=1768011 G N=queE PE=3 SV=1
MSNQVPEDGTFLPLMEEFYTIQGEGYHTGKAAYFIRLGGCDVGCHWCDVKESWDAELHPLTSADVIVEHALQHPAKTVVITGGEPLLYNLTYLTQKLKEAGIKIFLETSGAYPLTGYWDWICLSPKKFKGPREDVLSAAGELKVIVFNKSDFQWAEDHAKFVNANCKLYLQPEWSKAAEMTPLIINYVKDNPRWEISLQTHKYLNIP

SEQ ID NO: 34214 - protein, 207 aa, Sphingobacterium daejeonense
  misc_feature (1)..(207): tr|A0A4U9K7K1|A0A4U9K7K1_9SPHI 7-carboxy-7-deazaguanine synthase OS=Sphingobacterium daejeonense OX=371142 GN= queE PE=3 SV=1
MSNQVPEDGTFLPLMEEFYTIQGEGYHTGKAAYFIRLGGCDVGCHWCDVKESWDAELHPLTSADVIVEHALQHPAKTVVITGGEPLLYNLTYLTQKLKEAGIKIFLETSGAYPLTGYWDWICLSPKKFKGPREDVLSAAGELKVIVFNKSDFQWAEDHAKFVNANCKLYLQPEWSKAAEMTPLIIDYVKDNPKWEISLQTHKYLNIP

SEQ ID NO: 34215 - protein, 207 aa, Sphingobacterium deserti
  misc_feature (1)..(207): tr|A0A0B8TAG8|A0A0B8TAG8_9SPHI 7-carboxy-7-deazaguanine synthase OS=Sphingobacterium deserti OX=1229276 GN=que E PE=3 SV=1
MSNQVPEDGTLLPLMEDFYTIQGEGYHTGKAAYFIRLGGCDVGCHWCDVKESWDANLHPLTAADEIVENAKRHPAKTVVITGGEPLIYNLDYLTRALKAAGIQTFIETSGAYPLSGFWDWICLSPKKFKGPRPDVLNAAGELKVIIFNKSDFQWAEEHAKFVGKNCKLYLQPEWSKASEMTPLIVEYVKENPHWEISLQTHKYLNIP

SEQ ID NO: 34216 - protein, 214 aa, Sphingobacterium detergens
  misc_feature (1)..(214): tr|A0A420BJ61|A0A420BJ61_9SPHI 7-carboxy-7-deazaguanine synthase OS=Sphingobacterium detergens OX=1145106 GN=q ueE PE=3 SV=1
MQTQILTMSNQVPEDGTRLPLMEEFYTIQGEGYHTGTAAYFIRLGGCDVGCHWCDVKESWDASIHPLTAADSIIENAKKYPAKTVVITGGEPLIYNLDYLTKGLHAAGIKTFIETSGAYPLSGEWDWICLSPKKFKAPRKDVLDAAGELKVIVFNKSDFAWGEEYAQLVGPNCKLYLQPEWSKSKEMTPSIIDYVKENPKWDISLQTHKFLNIP

SEQ ID NO: 34217 - protein, 207 aa, Sphingobacterium faecium
  misc_feature (1)..(207): tr|A0A2T5YB00|A0A2T5YB00_9SPHI 7-carboxy-7-deazaguanine synthase OS=Sphingobacterium faecium OX=34087 GN=queE PE=3 SV=1
MSHQVPEDGTLLPLMEEFYTIQGEGFHTGKAAYFIRLGGCDVGCHWCDVKESWDATLHPLTTADQIIENAKKYPAKTVVITGGEPLIYNLDYLTKGLHEAGIQTFIETSGAYPLSGEWDWICLSPKKFKAPRKDVLEAAGELKVIVFNKSDFEWAEEHSKLVNSNCKLYLQPEWSKYSEMTPLIIDHVKDNPKWNISLQTHKYLNIP

SEQ ID NO: 34218 - protein, 207 aa, Sphingobacterium gobiense
  misc_feature (1)..(207): tr|A0A2S9JUJ2|A0A2S9JUJ2_9SPHI 7-carboxy-7-deazaguanine synthase OS=Sphingobacterium gobiense OX=1382456 GN=qu eE PE=3 SV=1
MSNQVPEDGTLLPLMEEFYTIQGEGYHTGKAAYFIRLGGCDVGCHWCDVKESWDAELHPLTSADAIIENAKKFPAKTVVITGGEPLLYNLDYLTRGLKEAGIQTFIETSGAYPLSGYWDWICLSPKKFKGPRPDVLNAAGELKVIVFNKSDFQWAEEHARFVGKNCKLYLQPEWSKTTEMTPLIIEYVKDNPQWEISLQTHKYLNIP

SEQ ID NO: 34219 - protein, 207 aa, Sphingobacterium haloxyli
  misc_feature (1)..(207): tr|A0A2S9J756|A0A2S9J756_9SPHI 7-carboxy-7-deazaguanine synthase OS=Sphingobacterium haloxyli OX=2100533 GN=qu eE PE=3 SV=1
MSNQVPEDGTLLPLMEEFYTIQGEGYHTGKAAYFIRLGGCDVGCHWCDVKESWDAELHPLTSAEAIIENAKKFPAKTVVITGGEPLLYNLDYLTRGLKEAGIQTFIETSGAYPLSGYWDWICLSPKKFKGPRPDVLNAAGELKVIVFNKSDFQWAEEHARFVSKNCKLYLQPEWSKSAEMTPLIIEYVKDNPQWEISMQTHKYLNIP

SEQ ID NO: 34220 - protein, 207 aa, Sphingobacterium lactis
  misc_feature (1)..(207): tr|A0A1H5WMR5|A0A1H5WMR5_9SPHI 7-carboxy-7-deazaguanine synthase OS=Sphingobacterium lactis OX=797291 GN=queE PE=3 SV=1
MSNQVPADGTFLPLMEEFYTIQGEGYHTGKAAYFIRLGGCDVGCHWCDVKESWDAALHPLTAAEVIVDNAKKHPAKTVVITGGEPLLYNLTYLTQKLKEAGIKIFLETSGAYPLTGYWDWICLSPKKFKGPREDVLSAAGELKVIVFNKSDFQWAEEHAKFVNANCKLYLQPEWSKAAEMTPLIIDYVKDNPKWEISLQTHKYLNIP

SEQ ID NO: 34221 - protein, 207 aa, Sphingobacterium mizutaii
  misc_feature (1)..(207): tr|A0A239XE02|A0A239XE02_9SPHI 7-carboxy-7-deazaguanine synthase OS=Sphingobacterium mizutaii OX=1010 GN=queE PE=3 SV=1
MSNQVPEDGTFLPLMEEFYTIQGEGYHTGKAAYFIRLGGCDVGCHWCDVKESWDAEMHPLTSADTIVEHALQHPAKTVVITGGEPLLYNLTYLTQKLKEAGIKIFLETSGAYPLTGYWDWICLSPKKFKGPREDVLSAAGELKVIVFNKSDFQWAEEHAKFVSSNCKLYLQPEWSKAAEMTPLIIDYVKDNPRWEISLQTHKYLNIP

SEQ ID NO: 34222 - protein, 214 aa, Sphingobacterium multivorum
  misc_feature (1)..(214): tr|A0A380DAD0|A0A380DAD0_SPHMU 7-carboxy-7-deazaguanine synthase OS=Sphingobacterium multivorum OX=28454 GN=qu eE PE=3 SV=1
MQTEILTMSNQVPEDGTLLPLMEEFYTIQGEGYHTGTAAYFIRLGGCDVGCHWCDVKESWDASIHPLTAADSIIENAKKYPAKTVVITGGEPLIYNLDYLTKGLHEAGIKTFIETSGAYPLSGEWDWICLSPKKFKAPRKDVLEAAGELKVIVFNKSDFAWGEEYAQLVGPNCRLYLQPEWSKSKEMTPSIIDYVKENPKWDISLQTHKFLNIP

SEQ ID NO: 34223 - protein, 214 aa, Sphingobacterium multivorum
  misc_feature (1)..(214): tr|A0A2X2JFG1|A0A2X2JFG1_SPHMU 7-carboxy-7-deazaguanine synthase OS=Sphingobacterium multivorum OX=28454 GN=qu eE PE=3 SV=1
MQTEILTMSNQVPEDGTLLPLMEEFYTIQGEGYHTGTAAYFIRLGGCDVGCHWCDVKESWDASIHPLTTADSIIENAKKYPAKTVVITGGEPLIYNLDYLTKGLHEAGIKTFIETSGAYPLSGEWDWICLSPKKFKAPRKDVLEAAGELKVIVFNKSDFAWGEEYAQLVGQNCRLYLQPEWSKSKEMTPSIIDYVKENPKWDISLQTHKFLNIP

SEQ ID NO: 34224 - protein, 232 aa, Sphingobacterium nematocida
  misc_feature (1)..(232): tr|A0A1T5CND7|A0A1T5CND7_9SPHI 7-carboxy-7-deazaguanine synthase OS=Sphingobacterium nematocida OX=1513896 GN= queE PE=3 SV=1
MEFKLFTCVILGLFILPLQAIKYMIMSHQVPENGTKLPLMEEFYTIQGEGFHTGKAAYFIRLGGCDVGCHWCDVKESWDAELHPLTDAETIVENAKKHPAKTVVITGGEPLIYNLDYLTQRLKEEGIKTFIETSGAYPLSGVWDWICLSPKKFKGPKEDVLQAAGELKVIVFNKSDFKWAEEHAKMVGPNCKLYLQPEWSKSNEITPLIIEYVKDHPHWDISLQTHKFLNIP

SEQ ID NO: 34225 - protein, 207 aa, Sphingobacterium paludis
  misc_feature (1)..(207): tr|A0A4R7D7N3|A0A4R7D7N3_9SPHI 7-carboxy-7-deazaguanine synthase OS=Sphingobacterium paludis OX=1476465 GN=que E PE=3 SV=1
MSNQVPEDGTLLPLMEEFYTIQGEGYHTGKAAYFIRLGGCDVGCHWCDVKESWDANLHPLTAADQIVENAKKHPAKTVVITGGEPLIYNLDYLTRALKAAGIQTFIETSGAYPLSGFWDWICLSPKKFKGPRPDVLNAAGELKVIVFNKSDFQWAEEHAKFVGKNCKLYLQPEWSKAAEMTPLIIDYVKENPQWEISLQTHKYLNIP

SEQ ID NO: 34226 - protein, 207 aa, Sphingobacterium paucimobilis
  misc_feature (1)..(207): tr|U2J4V1|U2J4V1_9SPHI 7-carboxy-7-deazaguanine synthas e OS=Sphingobacterium paucimobilis HER1398 OX=1346330 G N=queE PE=3 SV=1
MSHQVPENGSKLPLMEEFYTIQGEGFHTGKAAYFIRLGGCDVGCHWCDVKESWDAELHPLTDAETIVENAKKHPAKTVVITGGEPLIYNLDYLTQRLKDEGIKTFIETSGAYPLSGTWDWICLSPKKFKAPKLEVLQVAGELKVIVFNKSDFKWAEEHAKMVGPNCRLYLQPEWSKATEITPLIIEYVKDNPHWDISLQTHKFLNIP

SEQ ID NO: 34227 - protein, 207 aa, Sphingobacterium psychroaquaticum
  misc_feature (1)..(207): tr|A0A1X7HVV4|A0A1X7HVV4_9SPHI 7-carboxy-7-deazaguanine synthase OS=Sphingobacterium psychroaquaticum OX=56106 1 GN=queE PE=3 SV=1
MSNQVPEDGSLLPLMEEFYTIQGEGYHMGKAAYFIRLGGCDVGCHWCDVKESWDANLHPLTPADTIIENAKKHPSKTVVITGGEPLLYNLDYLTKGLKEAGIQTFMETSGAYPLSGFWDWICLSPKKFKGPRPDVLNAAGELKVIVFNKSDFQWAEEHARFVGKDCKLYLQPEWSKSAEMTPLIIDYVKENPRWEISLQTHKYLNIP

SEQ ID NO: 34228 - protein, 214 aa, Sphingobacterium siyangense; identical to SEQ ID NO: 34223
  misc_feature (1)..(214): tr|A0A562MYA8|A0A562MYA8_9SPHI 7-carboxy-7-deazaguanine synthase OS=Sphingobacterium siyangense OX=459529 GN=q ueE PE=3 SV=1

SEQ ID NO: 34229 - protein, 207 aa, Sphingobacterium siyangense
  misc_feature (1)..(207): tr|A0A420GAT0|A0A420GAT0_9SPHI 7-carboxy-7-deazaguanine synthase OS=Sphingobacterium siyangense OX=459529 GN=q ueE PE=3 SV=1
MSNQVPEDGTLLPLMEEFYTIQGEGYHTGTAAYFIRLGGCDVGCHWCDVKESWDASIHPLTTADSIIENAKKYPAKTVVITGGEPLIYNLDYLTKGLHEAGIKTFIETSGAYPLSGEWDWICLSPKKFKAPRKDVLEAAGELKVIVFNKSDFAWGEEYAQLVGQNCRLYLQPEWSKSKEMTPSIIDYVKENPKWDISLQTHKFLNIP

SEQ ID NO: 34230 - protein, 207 aa, Sphingobacterium sp.
  misc_feature (1)..(207): tr|A0A4V1B3B0|A0A4V1B3B0_9SPHI 7-carboxy-7-deazaguanine synthase OS=Sphingobacterium sp. CZ-2 OX=2557994 GN=qu eE PE=3 SV=1
MSNQVPADGSMLPLMEEFYTIQGEGYHTGKAAYFIRLGGCDVGCHWCDVKESWDADLHPLTSAETIVENAKKFPAKTVVITGGEPLLYNLSYLTQKLKEAGIQIFLETSGAYPLTGYWDWICLSPKKFKGPRPDVLSAAGELKVIVFNKSDFTWAEEHAKFVGSTCKLYLQPEWSKAAEMTPLIIDYVKDNPKWEISLQTHKYLNIP

SEQ ID NO: 34231 - protein, 207 aa, Sphingobacterium sp.
  misc_feature (1)..(207): tr|A0A4R2ZVL5|A0A4R2ZVL5_9SPHI 7-carboxy-7-deazaguanine synthase OS=Sphingobacterium sp. JUb78 OX=2485111 GN=q ueE PE=3 SV=1
MSHQVPEDGTLLPLMEEFYTIQGEGFHTGKAAYFIRLGGCDVGCHWCDVKESWDATLHPLTSADQIIENAKKYPAKTVVITGGEPLIYNLDYLTRGLHAAGIQTFIETSGAYPLSGEWDWICLSPKKFKAPRKDVLEAAGELKVIVFNKSDFEWAEEHSKLVNNDCKLYLQPEWSKYPEMTPLIIDHVKDNPKWNISLQTHKYLNIP

SEQ ID NO: 34232 - protein, 207 aa, Sphingobacterium spiritivorum
  misc_feature (1)..(207): tr|D7VPY8|D7VPY8_9SPHI 7-carboxy-7-deazaguanine synthas e OS=Sphingobacterium spiritivorum ATCC 33861 OX=525373 GN=queE PE=3 SV=1
MSLQVPENGQQLPLMEEFYTIQGEGYHTGKAAYFIRLGGCDVGCHWCDVKESWDAELHPLTAADTIVEHANVHPSKTVVVTGGEPLIYNLDYLTSQLQNAGIQTFLETSGAYPLSGHWDWICLSPKKFKAPRPDVLANAGELKVIVFNKSDFQWAEEHARLVSDTCKLYLQPEWSKAAEMTPLIIDYVMANPKWEISLQTHKYLNIP

SEQ ID NO: 34233 - protein, 207 aa, Sphingobacterium spiritivorum; identical to SEQ ID NO: 34232
  misc_feature (1)..(207): tr|A0A380CQI9|A0A380CQI9_9SPHI 7-carboxy-7-deazaguanine synthase OS=Sphingobacterium spiritivorum OX=258 GN=qu eE PE=3 SV=1

SEQ ID NO: 34234 - protein, 207 aa, Sphingobacterium thalpophilum
  misc_feature (1)..(207): tr|A0A4U9W5W5|A0A4U9W5W5_9SPHI 7-carboxy-7-deazaguanine synthase OS=Sphingobacterium thalpophilum OX=259 GN=qu eE PE=3 SV=1
MSNQVPEDGTRLPLMEEFYTIQGEGYHTGTAAYFIRLGGCDVGCHWCDVKESWDASIHPLTAADAIIENAKKYPAKTVVITGGEPLIYNLDYLTKGLHVAGIKTFIETSGAYPLSGEWDWICLSPKKFKAPRKDVLDAAGELKVIVFNKSDFAWGEQYAQLVGPDCRLYLQPEWSKSKEMTPLIIDYVKENPKWDISLQTHKYLNIP

SEQ ID NO: 34235 - protein, 207 aa, Sphingobacterium wenxiniae
  misc_feature (1)..(207): tr|A0A1I6SXA0|A0A1I6SXA0_9SPHI 7-carboxy-7-deazaguanine synthase OS=Sphingobacterium wenxiniae OX=683125 GN=qu eE PE=3 SV=1
MARQVPEDGSLLPLMEEFYTIQGEGYHTGKAAYFIRLGGCDVGCHWCDVKESWDAELHPLTPADEIIENAKKYPAKTVVITGGEPLIYNLDYLTRGLKEAGIQTFIETSGAYTLSGYWDWICLSPKKFKGPRPDVLNAAGELKVIVFNKSDFQWAEEHARFVGKNCKLYLQPEWSKAAEMTPLIIDYVKEHPQWEISLQTHKYLNIP

SEQ ID NO: 34236 - protein, 207 aa, Sphingobacterium yanglingense
  misc_feature (1)..(207): tr|A0A4R6WLL2|A0A4R6WLL2_9SPHI 7-carboxy-7-deazaguanine synthase OS=Sphingobacterium yanglingense OX=1437280 G N=queE PE=3 SV=1
MSHQVPENGTKLPLMEEFYTIQGEGFHTGKAAYFIRLGGCDVGCHWCDVKESWDAELHPLTDAETIVENAKKHPAKTVVITGGEPLIYNLDYLTKRLKEEGIRTFIETSGAYPLSGTWDWICLSPKKFKGPKTEVLEAAGELKVIVFNKSDFKWAEEHASQVGPNCKLYLQPEWSKANEITPLIIEYVKDNPHWDISLQTHKFLNIP

SEQ ID NO: 34237 - protein, 215 aa, Sphingobium algicola
  misc_feature (1)..(215): tr|A0A5J5HJ69|A0A5J5HJ69_9SPHN 7-carboxy-7-deazaguanine synthase OS=Sphingobium algicola OX=2048546 GN=queE PE =4 SV=1
MTYAVKEMFLTLQGEGVQAGRRAVFLRFAGCNLWSGREQDRRDAVCKFCDTDFVGTDGLGGGKFADADALADAALAFWGEGVAGHYIVLTGGEPMLQVDDALVDALHARGFTIAIESNGTIAAHPGIDWICISPKAGSDVVQRSGNELKLVWPQPDGGHSLADVAVMEGWAFDHHLLQPLDDPHAADNARAAIAVVMDRPQWRLTVQAHKYLGLR

SEQ ID NO: 34238 - protein, 210 aa, Sphingobium algorifonticola
  misc_feature (1)..(210): tr|A0A437JBQ6|A0A437JBQ6_9SPHN 7-carboxy-7-deazaguanine synthase OS=Sphingobium algorifonticola OX=2008318 GN= queE PE=3 SV=1
MAYSVKEMFLTLQGEGMQAGRRAVFLRFAGCNLWSGREGDRATAVCRFCDTDFVGTDGAGGGKFADAAAVVAAVERFWGEGRTLRYIVLTGGEPMLQVDDALVDALHDAGFEIAIETNGTLPVHPRIDWICVSPKAGSEVVQTSGHELKLVWPQPGSDYAAMEGWAFDHWLVQPLDDPDAAAHVDVAIAFVMDRPQWRLTLQTHKTLGLR

SEQ ID NO: 34239 - protein, 215 aa, Sphingobium amiense
  misc_feature (1)..(215): tr|A0A494WEJ4|A0A494WEJ4_9SPHN 7-carboxy-7-deazaguanine synthase OS=Sphingobium amiense OX=135719 GN=queE PE=3 SV=1
MSYAVKEMFLTLQGEGVQAGRRAVFLRFAGCNLWSGREQDRASAVCRFCDTDFVGTDGLGGGRFADARDLADAALRFWGERTEGRYIVLTGGEPMLQIDDALIDALHGHGFTIAIESNGTIPVHPGIDWVCISPKAGSDVVQRSGDELKLVWPQPGAGHSLADVAEMEAWAFAHHLIQPLDDARAADNARAAVDLVMDRPVWRLTVQAHKYLGLR

SEQ ID NO: 34240 - protein, 215 aa, Sphingobium baderi
  misc_feature (1)..(215): tr|T0HVF2|T0HVF2_9SPHN 7-carboxy-7-deazaguanine synthas e OS=Sphingobium baderi LL03 OX=1114964 GN=queE PE=3 SV =1
MSYAVKEMFLTLQGEGVHGGRRAVFLRFAGCNLWTGRERDRADAVCRFCDTDFVGTDGDGGGKFATAAALADAAQDFWGPNRELRYIVLTGGEPMLQIDDALVDALHDRGFTIAIESNGTLPVHPGIDWVCISPKAGSDVIQQSGNELKLVWPQPGAGHSAQEVDAMERWAFDHLLVQPLDDAAAAANVQAAIAFVMERPRWRLTLQSHKYLGLR

SEQ ID NO: 34241 - protein, 215 aa, Sphingobium baderi
  misc_feature (1)..(215): tr|A0A0S3EXA8|A0A0S3EXA8_9SPHN 7-carboxy-7-deazaguanine synthase OS=Sphingobium baderi OX=1332080 GN=queE PE=3 SV=1
MSYAVKEMFLTLQGEGVHAGRRAVFLRFAGCNLWTGRERDRADAVCRFCDTDFVGTDGEGGGKFPDAAALADAAQDFWGQDRALRYIVLTGGEPMLQIDDALVDALHDRGFTIAIESNGTLPVHPGIDWVCISPKAGSDVVQKSGDELKLVWPQPGAGHSVEEVDAMEQWAFGHLLVQPLDDAAAADNVKAAIAFVMERPRWRLTLQSHKYLGLR

SEQ ID NO: 34242 - protein, 215 aa, Sphingobium barthaii
  misc_feature (1)..(215): tr|A0A4R6FGK2|A0A4R6FGK2_9SPHN 7-carboxy-7-deazaguanine synthase OS=Sphingobium barthaii OX=1054037 GN=queE PE =3 SV=1
MSYAVKEMFLTLQGEGVHAGRRAVFLRFAGCNLWTGREQDRETAICRFCDTDFVGTDGDGGGKFADADDLAAAALAFWGEGREGRYIVLTGGEPMLQIDDALVDALHARGFAIAIESNGTLPAHPGLDWVCISPKAGSEVVQRSGNELKLVWPQPGQGHSLTDVEDMERWAFDHWLVQPLDDPKAAENAQAAVDLVMGRPRWRLSLQSHKYLGLR

SEQ ID NO: 34243 - protein, 215 aa, Sphingobium chinhatense
  misc_feature (1)..(215): tr|W1KM69|W1KM69_9SPHN 7-carboxy-7-deazaguanine synthas e OS=Sphingobium chinhatense IP26 OX=1346790 GN=queE PE =3 SV=1
MSYAVKEMFLTLQGEGVHAGRRAVFLRFAGCNLWTGREQDRASAVCRFCDTDFVGTDGDGGGRFADADGLADAALALWGEGRDGRYIVLTGGEPMLQVDDALVDALHARGFAIAIESNGTLPAHPGLDWVCISPKAGSEVVQRSGNELKLVWPQPGQGHSIADVEDMEGWAFDHWLVQPLDDPKAADNARAAVELVMERPRWRLSLQSHKYLGLR

SEQ ID NO: 34244 - protein, 215 aa, Sphingobium chlorophenolicum
  misc_feature (1)..(215): tr|A0A081RGL4|A0A081RGL4_SPHCR 7-carboxy-7-deazaguanine synthase OS=Sphingobium chlorophenolicum OX=46429 GN=q ueE PE=3 SV=1
MSYAVKEMFLTLQGEGVHAGRRAVFLRFAGCNLWSGREQDRATAICRFCDTDFVGTDGDGGGKFADADSLAEAALAFWGEGPEGRYIVLTGGEPMLQIDDALVDALHARGFAIAVESNGTLPAHPGLDWVCISPKAGSEVVQRSGDELKLVWPQPGQGHGIADVEDMEGWAFDHLLVQPLDDPDAARNAQAAVDLVLARPRWRLSLQSHKYLGLR

SEQ ID NO: 34245 - protein, 215 aa, Sphingobium chlorophenolicum
  misc_feature (1)..(215): tr|F6F088|F6F088_SPHCR 7-carboxy-7-deazaguanine synthas e OS=Sphingobium chlorophenolicum L-1 OX=690566 GN=queE PE=3 SV=1
MSYAVKELFLTLQGEGVHAGRRAVFLRFAGCNLWSGREQDRATAICQFCDTDFVGTDGDGGGKFADADSLAEAALALWGEGAEGRYIVLTGGEPMLQIDDALVDALHARGFAIAVESNGTLPAHPGLDWVCISPKAGSEVVQRSGNELKLVWPQPGQGHGIADVEDMEGWAFDHLLVQPLDDPDAARNAQAAVDLVLARPRWRLSLQSHKYLGLR

SEQ ID NO: 34246 - protein, 215 aa, Sphingobium chungbukense
  misc_feature (1)..(215): tr|A0A0M3AX01|A0A0M3AX01_9SPHN 7-carboxy-7-deazaguanine synthase OS=Sphingobium chungbukense OX=56193 GN=queE PE=3 SV=1
MSYAVKEMFLTLQGEGVHAGRRAVFLRFAGCNLWSGREQDRASAICRFCDTDFVGTDGDGGGRFADADGLADAALAFWGEGSEGRYIVLTGGEPMLQIDNGLVDALHARGFAIAIESNGTLPAHPGLDWVCISPKAGSEVVQRSGNELKLVWPQPGQGHSLADVEEMEGWAFDHLLVQPLDDPNAVRNAQAAVDLVMDRPRWRLSLQSHKYLGLR

SEQ ID NO: 34247 - protein, 215 aa, Sphingobium cloacae
  misc_feature (1)..(215): tr|A0A1E1F291|A0A1E1F291_9SPHN 7-carboxy-7-deazaguanine synthase OS=Sphingobium cloacae OX=120107 GN=queE PE=3 SV=1
MSYAVKEMFLTLQGEGVHAGRRAVFLRFAGCNLWTGREQDRADAVCRFCDTDFVGTDGDGGGKFADAEALADAAEGFWGPGPDLRYIVLTGGEPMLQIDDALVDALHGRGFTIAIESNGTLPAHPGIDWVCISPKAGSEVVQREGHELKLVWPQPGGGHSRAEVEAMERWAFDHLLVQPLDDADAARNVEAAIAFVMERPRWRLTLQSHKYLGLR

SEQ ID NO: 34248 - protein, 215 aa, Sphingobium cupriresistens
  misc_feature (1)..(215): tr|A0A4Q4JNB0|A0A4Q4JNB0_9SPHN 7-carboxy-7-deazaguanine synthase OS=Sphingobium cupriresistens OX=1132417 GN=q ueE PE=3 SV=1
MSYAVKEMFLTLQGEGVQAGRRAVFLRFAGCNLWSGREQDRRDAVCRFCDTDFVGTDGLGGGKFADADALADAALAFWGTGGEGRYIVLTGGEPMLQVDDALVDALHARSFIIAIESNGTIAAHAGIDWICISPKAGSDVVQRSGHELKLVWPQPGGGHSLADVAAMEGWAFDHYLLQPLDDPHATDNARAAIALVMDRPQWRLTVQAHKYLGLR

SEQ ID NO: 34249 - protein, 215 aa, Sphingobium czechense
  misc_feature (1)..(215): tr|A0A0J8ARY7|A0A0J8ARY7_9SPHN 7-carboxy-7-deazaguanine synthase OS=Sphingobium czechense LL01 OX=1420583 GN=q ueE PE=3 SV=1
MSYAVKEMFLTLQGEGVQAGRRAVFLRFAGCNLWSGREQDRRDAVCRFCDTDFVGTDGLGGGKFADADALADAALAFWGTGGEGRYIVLTGGEPMLQVDDALVDALHARSFIIAIESNGTIAAHAGIDWICISPKAGSDVVQRSGHELKLVWPQPGGGHSLADVAAMEGWAFEHYLLQPLDDPHATDNARAAIALVMDRPQWRLTVQAHKYLGLR

SEQ ID NO: 34250 - protein, 215 aa, Sphingobium faniae
  misc_feature (1)..(215): tr|A0A1G4UH52|A0A1G4UH52_9SPHN 7-carboxy-7-deazaguanine synthase OS=Sphingobium faniae OX=570446 GN=queE PE=3 SV=1
MSYAVKEMFLTLQGEGIHAGRRAVFLRFAGCNLWSGREQDRAEAVCRFCDTDFVGTDGDGGGKFADAAALADAAQDFWGPERDLRYIVLTGGEPMLQIDDALVDALHDRGFTIAIESNGTLAVHPGIDWVCISPKAGSEVVQHKGNELKLVWPQPGGGHSRAEVEEMERWVFDHLLVQPLDDADAARNVEAAIAFVMERPRWRLTLQSHKYLGLR

SEQ ID NO: 34251 - protein, 215 aa, Sphingobium francense
  misc_feature (1)..(215): tr|A0A4Q4J8I9|A0A4Q4J8I9_9SPHN 7-carboxy-7-deazaguanine synthase OS=Sphingobium francense OX=332057 GN=queE PE =3 SV=1
MSYAVKEMFLTLQGEGVHAGRRAVFLRFAGCNLWSGREQDRASAICRFCDTDFVGTDGDGGGRFADAKGLADAALAFWGEGRDGRYIVLTGGEPMLQVDDALVDALHARGFAIAIESNGTLPAHPGLDWVCISPKAGSEVVQRSGNELKLVWPQPGQGHSLADVEDMEGWAFDHWLVQPLDDPKAADNARAAVELVMERPRWRLSLQSHKYLGLR

SEQ ID NO: 34252 - protein, 210 aa, Sphingobium fuliginis
  misc_feature (1)..(210): tr|A0A4Q4ITE6|A0A4Q4ITE6_SPHSA 7-carboxy-7-deazaguanine synthase OS=Sphingobium fuliginis (strain ATCC 27551) OX=336203 GN=queE PE=3 SV=1
MAYAVKEIFKTLQGEGAQSGRAAVFCRFAGCNLWSGRKEDRAGAACNFCDTDFVGMDGMGGGRFADAEALAAAIEREWAGPAHRRYVVLTGGEPLLQVDDALVAALHGRSFQIGVETNGTQPAPEGIDWICVSPKGRAELVLRTGHELKLVYPQAEARPEHFAGLEFEHFFLQPMDSPMASANLEAAIGFCTENPQWRLSIQSHKMIGIR

SEQ ID NO: 34253 - protein, 215 aa, Sphingobium fuliginis
  misc_feature (1)..(215): tr|A0A292ZJY4|A0A292ZJY4_SPHSA 7-carboxy-7-deazaguanine synthase OS=Sphingobium fuliginis (strain ATCC 27551) OX=336203 GN=queE PE=3 SV=1
MSYAVKEMFLTLQGEGVHAGRRAVFLRFAGCNLWTGREQDRASAVCRFCDTDFVGTDGDGGGRFADADGLAEAALAFWGEGREGRYIVLTGGEPMLQVDDALVDALHARGFAIAIESNGTLPAHPGLDWVCISPKAGSEVVQRSGNELKLVWPQPGRGHSLADVEDMERWAFDHWLVQPLDDPKAAENARAAVDLVMGRPRWRLSLQSHKYLGLR

SEQ ID NO: 34254 - protein, 215 aa, Sphingobium herbicidovorans
  misc_feature (1)..(215): tr|A0A086P6T3|A0A086P6T3_SPHHM 7-carboxy-7-deazaguanine synthase OS=Sphingobium herbicidovorans (strain ATCC 7 00291 / DSM 11019 / NBRC 16415 / MH) OX=1219045 GN=queE PE=3 SV=1
MTYAVKEMFLTLQGEGVHSGRRAVFLRFAGCNLWTGREEDRRKAVCQFCDTDFVGTDGDGGGKFADAASLADAALAFWGEGQEGRYIVLTGGEPMLQIDEALIDALHARGFTIAMESNGTIAAHPGIDWVCISPKAGSEVVQRSGNELKLVWPQPGIGHSLADVAGMEGWAFGHLLIQPLDDPNAPANMQAAIDLVMARPRWRLSLQSHKYLGLR

SEQ ID NO: 34255 - protein, 215 aa, Sphingobium hydrophobicum
  misc_feature (1)..(215): tr|A0A249MQB7|A0A249MQB7_9SPHN 7-carboxy-7-deazaguanine synthase OS=Sphingobium hydrophobicum OX=1673076 GN=qu eE PE=3 SV=1
MSYAVKEMFLTLQGEGVQAGRRAVFLRFAGCNLWSGREQDRAQAICRFCDTDFVGTDGDGGGKFADADALADAALAFWCAGDAGRYIVLTGGEPMLQVDDALVDALHARGFTIAIESNGTLAVHPGIDWICISPKAGSDVVQREGHELKLVWPQPGGGHSIADVAAMEQWAFAHHLLQPLDDPHAQDNARAAIALVMDRPRWRLTVQAHKYLGLR

SEQ ID NO: 34256 - protein, 215 aa, Sphingobium indicum; identical to SEQ ID NO: 34251
  misc_feature (1)..(215): tr|A0A1L5BQW9|A0A1L5BQW9_SPHIB 7-carboxy-7-deazaguanine synthase OS=Sphingobium indicum (strain DSM 16412 / CC M 7286 / MTCC 6364 / B90A) OX=861109 GN=queE PE=3 SV=1

SEQ ID NO: 34257 - protein, 215 aa, Sphingobium japonicum
  misc_feature (1)..(215): tr|D4Z5L3|D4Z5L3_SPHJU 7-carboxy-7-deazaguanine synthas e OS=Sphingobium japonicum (strain DSM 16413 / CCM 7287 / MTCC 6362 / UT26 / NBRC 101211 / UT26S) OX=452662 GN =queE PE=3 SV=1
MSYAVKEMFLTLQGEGVHAGRRAVFLRFAGCNLWTGREQDRASAVCRFCDTDFVGTDGDGGGRFADADGLADAALALWGEGRDGRYIVLTGGEPMLQVDDALVDALHARGFAIAIESNGTLPAHPGLDWVCISPKAGSEVVQRSGNELKLVWPQPGQGHSLADVEDMEGWAFDHWLVQPLDDPKAADNARAAVELVMERPRWRLSLQSHKYLGLR

SEQ ID NO: 34258 - protein, 210 aa, Sphingobium lactosutens
  misc_feature (1)..(210): tr|T0I0X7|T0I0X7_9SPHN 7-carboxy-7-deazaguanine synthas e OS=Sphingobium lactosutens DS20 OX=1331060 GN=queE PE =3 SV=1
MAYAVKEIFKTLQGEGAQSGRAAVFCRFAGCNLWSGREEDRAGAACTFCDTDFVGMDGTGGGRFVDAEALAVAIEREWAGPAHKRYVVLTGGEPLLQVDETLVAALHGRSFEIGVETNGTQPAPEGIDWICVSPKGRAELVLRTGHELKLVYPQAEARPEHFAGLEFEHFFLQPMDSPMASANLEAAISFCTENPQWRLSIQSHKMIGIR

SEQ ID NO: 34259 - protein, 215 aa, Sphingobium lactosutens
  misc_feature (1)..(215): tr|T0IFT6|T0IFT6_9SPHN 7-carboxy-7-deazaguanine synthas e OS=Sphingobium lactosutens DS20 OX=1331060 GN=queE PE =3 SV=1
MSYAVKEMFLTLQGEGVQAGRRAVFLRFAGCNLWSGREQDRASAICRFCDTDFVGTDGLGGGKFADADALADAALGFWGEGAQGRYIVLTGGEPMLQVDDALVDALHDRGFTIAIESNGTLAAHPGIDWICISPKAGSDVVQRSGHELKLVWPQPGGGHSLADVDAMAGWAFDHHLIQPLDDAHAPDNARAAIALVMDRPQWRLTVQAHKYLGLR

SEQ ID NO: 34260 - protein, 215 aa, Sphingobium limneticum
  misc_feature (1)..(215): tr|A0A5J5HIA0|A0A5J5HIA0_9SPHN 7-carboxy-7-deazaguanine synthase OS=Sphingobium limneticum OX=1007511 GN=queE PE=4 SV=1
MTYAVKEMFLTLQGEGVQAGRRAVFLRFAGCNLWSGREQDRRAAVCKFCDTDFVGTDGLGGGKFADADALADAALAFWGEGVAGHYIVLTGGEPMLQVDDALVDALHARGFTIAIESNGTIAAHPGIDWICISPKAGSDVVQRSGNELKLVWPQPDGGHSLADVAVMEGWAFDHHLLQPLDDPHAADNARAAIAMVMDRPQWRLTVQAHKYLGLR

SEQ ID NO: 34261 - protein, 215 aa, Sphingobium paulinellae; identical to SEQ ID NO: 34237
  misc_feature (1)..(215): tr|A0A5J5IAC0|A0A5J5IAC0_9SPHN 7-carboxy-7-deazaguanine synthase OS=Sphingobium paulinellae OX=2048545 GN=queE PE=4 SV=1

SEQ ID NO: 34262 - protein, 215 aa, Sphingobium quisquiliarum
  misc_feature (1)..(215): tr|T0I7P8|T0I7P8_9SPHN 7-carboxy-7-deazaguanine synthas e OS=Sphingobium quisquiliarum P25 OX=1329909 GN=queE P E=3 SV=1
MTYAVKEMFLTLQGEGVHSGRRAVFLRFAGCNLWTGREEDRRKAVCQFCDTDFVGTDGEGGGKFADADMLADAALAFWGEDGEGRYIVITGGEPMLQIDGALIDALHARGFTIAIESNGTIAAHPGIDWVCISPKAGSEIVQRSGNELKLVWPQPGAGHSLTDIEAMEGWAFDHLLVQPLDDPHAAANMQAAIDLVMARPRWRLSLQTHKYLGLR

SEQ ID NO: 34263 - protein, 215 aa, Sphingobium sp.
  misc_feature (1)..(215): tr|A0A2E9CNK8|A0A2E9CNK8_9SPHN 7-carboxy-7-deazaguanine synthase OS=Sphingobium sp. OX=1912891 GN=queE PE=3 SV =1
MSYAVKEMFLTLQGEGVQAGRRAVFLRFAGCNLWSGREQDRAQAICRFCDTDFVGTDGDGGGKFADADALADAALAFWGAGDAGRYIVLTGGEPMLQVDDALVDALHARGFAIAIESNGTLAVHPGIDWICISPKAGSDVVQREGHELKLVWPQPGGGHSIADVAAMEQWAFAHHLLQPLDDPHAQDNARAAIALVMDRPRWRLTVQAHKYLGLR

SEQ ID NO: 34264 - protein, 215 aa, Sphingobium sp.; identical to SEQ ID NO: 34253
  misc_feature (1)..(215): tr|A0A0C5X189|A0A0C5X189_SPHYB 7-carboxy-7-deazaguanine synthase OS=Sphingobium sp. (strain YBL2) OX=484429 GN =queE PE=3 SV=1

SEQ ID NO: 34265 - protein, 215 aa, Sphingobium ummariense
  misc_feature (1)..(215): tr|T0KBC4|T0KBC4_9SPHN 7-carboxy-7-deazaguanine synthas e OS=Sphingobium ummariense RL-3 OX=1346791 GN=queE PE= 3 SV=1
MSYAVKEMFLTLQGEGVQAGRRAVFLRFAGCNLWSGREQDRASAICRFCDTDFVGTDGLGGGRFADAAALADAALGFWGEGGEGRYIVLTGGEPMLQVDDALVEALHARGFTIAIESNGTLPVHPGIDWVCVSPKAGSTVVQTRGDELKLVWPQPGVGHGPDDLAAMEGWAFDHFLIQPLDDPHAADNARAAIDVVMARPRWRLTVQAHKYLGLR

SEQ ID NO: 34266 - protein, 215 aa, Sphingobium wenxiniae
  misc_feature (1)..(215): tr|A0A562K586|A0A562K586_SPHWJ 7-carboxy-7-deazaguanine synthase OS=Sphingobium wenxiniae (strain DSM 21828 / JZ-1) OX=595605 GN=queE PE=3 SV=1
MSYAVKEMFLTLQGEGVHGGRRAVFLRFAGCNLWTGRERDRADAVCRFCDTDFVGTDGDGGGKFATAAALADAAQDFWGPNRELRYIVLTGGEPMLQIDDALVDALHDRGFTIAIESNGTLSVHPGIDWVCISPKAGSDVIQQSGNELKLVWPQPGAGHSAQEVDAMERWAFDHLLVQPLDDAEAAANVQAAIAFVMERPRWRLTLQSHKYLGLR

SEQ ID NO: 34267 - protein, 215 aa, Sphingobium xenophagum
  misc_feature (1)..(215): tr|A0A401J586|A0A401J586_SPHXE 7-carboxy-7-deazaguanine synthase OS=Sphingobium xenophagum OX=121428 GN=queE P E=3 SV=1
MSYAVKEMFLTLQGEGVQAGRRAVFLRFAGCNLWSGREQDRAQAICRFCDTDFVGTDGDGGGKFADADALADAALAFWGAGDAGRYIVLTGGEPMLQVDDALVDALHARGFTIAIESNGTLAVHPGIDWICISPKAGSDVVQREGHELKLVWPQPGGGHSIADVAAMEQWAFAHHLLQPLDDPHAQDNARAAIALVMDRPRWRLTVQAHKYLGLR

SEQ ID NO: 34268 - protein, 214 aa, Sphingobium yanoikuyae
  misc_feature (1)..(214): tr|A0A177J2N3|A0A177J2N3_SPHYA 7-carboxy-7-deazaguanine synthase OS=Sphingobium yanoikuyae OX=13690 GN=queE PE =3 SV=1
MTYAVKEMFLTLQGEGVQAGRRAVFLRFAGCNLWSGREQDRRDAVCRFCDTDFVGTDGDGGGKFATADALADAAFAFWGEGEGPYIVLTGGEPMLQVDDALIDALHARGFTIAIESNGTLPAHPGIDWVCISPKAGSDVVQMKGNELKLVWPQPDGGHSLADVEAMEGWRFDHLLVQPLDDAHAVDNARAAIDLVMARPRWRLTVQAHKYLGLR

SEQ ID NO: 34269 - protein, 214 aa, Sphingobium yanoikuyae
  misc_feature (1)..(214): tr|A0A085K7Z1|A0A085K7Z1_SPHYA 7-carboxy-7-deazaguanine synthase OS=Sphingobium yanoikuyae OX=13690 GN=queE PE =3 SV=1
MTYAVKEMFLTLQGEGVQAGRRAVFLRFAGCNLWSGREQDRRDAVCRFCDTDFVGTDGDGGGKFATADALADAAFAFWGEGEGPYIVLTGGEPMLQVDDALIDALHARGFTIAIESNGTLPAHPGIDWVCISPKAGSDVVQVKGNELKLVWPQPDGGHSLADVEAMEGWGFDHLLVQPLDDAHAVDNARAAIDLVMARPRWRLTVQAHKYLGLR

SEQ ID NO: 34270 - protein, 210 aa, Sphingomonadaceae bacterium
  misc_feature (1)..(210): tr|A0A431JPS2|A0A431JPS2_9SPHN 7-carboxy-7-deazaguanine synthase OS=Sphingomonadaceae bacterium OX=1930536 GN= queE PE=3 SV=1
MSYAVKEMFLTLQGEGVNAGRRAVFVRFAGCNLWSGREQDRATAVCRFCDTDFVGTDGLGGGKFADARALAAAVAGFWGAGQTDRFVVLTGGEPMLQVDDALVDALHDAGFRIAIESNGTLPVHPDIDWVCISPKAGSVVVQRSGDELKLVWPQAGTDIDAIESWDFAHRLLQPMDDAAGQANVDAAIALVMERPHWRLSLQTHKLLGLR

SEQ ID NO: 34271 - protein, 244 aa, Sphingomonadaceae bacterium
  misc_feature (1)..(244): tr|A0A2D4Y8I0|A0A2D4Y8I0_9SPHN 7-carboxy-7-deazaguanine synthase OS=Sphingomonadaceae bacterium OX=1930536 GN= queE PE=3 SV=1
MALILATDDEGGPEIFASVQGEGPSMGMPVAFMRLSRCNLACVWCDTAYTWHFQGDERPHRGGVEYDRKANQLSLPEDEVAARIMALGQSRLVITGGEPLLQAPALARLLELLPDVSIEIETNGTTKAPAPLDIRIDQFNVSPKLAHSGNPAELALLPERLDAYATDPRAWFKFVIAEPADVDEVLALRDRYRFRPGHVFLMAEGTDSETLRELEKWLAPLCVRHGFRLSDRLHIHLFGDTRAT

SEQ ID NO: 34272 - protein, 210 aa, Sphingomonadales bacterium
  misc_feature (1)..(210): tr|A0A258JC43|A0A258JC43_9SPHN 7-carboxy-7-deazaguanine synthase OS=Sphingomonadales bacterium 32-65-25 OX=197 0594 GN=queE PE=3 SV=1
MSYAVKELFLTLQGEGAQTGRRAVFLRFAGCNLWTGREADRAKAICTFCDTDFVGTDGPGGGKFADAEALATAVTACWGETAEHRLVVCTGGEPLLQLDATLVEALHARSFEIAIETNGTQVPPPGIDWICVSPKADAPLALTTGNELKLVYPQPKAMPERFEALDFQHFFLQPMDGPNQAENIQAAIAHCLAHPRWRLSLQTHKLTGIP

SEQ ID NO: 34273 - protein, 210 aa, Sphingomonadales bacterium
  misc_feature (1)..(210): tr|A0A5C7JSL1|A0A5C7JSL1_9SPHN 7-carboxy-7-deazaguanine synthase OS=Sphingomonadales bacterium OX=1978525 GN=q ueE PE=3 SV=1
MSYAVKELFLTLQGEGAQAGRRAVFLRFAGCNLWSGREVDRAAAVCRFCDTDFVGTDGPGGGRYADAVALAGRVAACWGAEPARRYVVCTGGEPLLQLDAPLIAALHAQGFEIAIETNGTVAVPSGVDWVCVSPKANARTIVRSGDELKLVFPQQDAAPGQYENWAFRHFFLQPMDGPAREENTRAAVAYCLANPLWRLSLQTHKLIGIP

SEQ ID NO: 34274 - protein, 210 aa, Sphingomonas adhaesiva
  misc_feature (1)..(210): tr|A0A2A4IA72|A0A2A4IA72_9SPHN 7-carboxy-7-deazaguanine synthase OS=Sphingomonas adhaesiva OX=28212 GN=queE PE =3 SV=1
MSYAVKEMFLTLQGEGVQAGRRAVFVRFAGCNLWSGREQDRASAVCRFCDTDFIGTDGLGGGRFADAAALVAAVEDFWGAGRERRFVVLTGGEPMLQVDDALVDALHDAGFFVAIESNGTLPVHPRIDWVCISPKAGSETVQRRGDELKLVWPQPGSDLSMIEGWAFDHFLLQPMDDARGQANVDAAMALVMERPRWRLTLQTHKMLGLR

SEQ ID NO: 34275 - protein, 210 aa, Sphingomonas aerolata
  misc_feature (1)..(210): tr|A0A2T4YTJ8|A0A2T4YTJ8_9SPHN 7-carboxy-7-deazaguanine synthase OS=Sphingomonas aerolata OX=185951 GN=queE PE =3 SV=1
MSYAVKEMFLTLQGEGVNAGRRAVFVRFAGCNLWSGREQDRATAVCRFCDTDFVGTDGLGGGKFADARALADAVAGFWGAGTQDRFVVLTGGEPMLQIDDAIVDALHAAGFRIAIESNGTLPVHPGIDWVCISPKAGSVVVQRHGDELKLVWPQPGTDIADIETWDFANLLLQPLDDPQADANRDACVALVMERPQWRLSLQTHKMLGLR

SEQ ID NO: 34276 - protein, 210 aa, Sphingomonas aquatilis
  misc_feature (1)..(210): tr|A0A511Q7C7|A0A511Q7C7_9SPHN 7-carboxy-7-deazaguanine synthase OS=Sphingomonas aquatilis NBRC 16722 OX=12190 39 GN=queE PE=3 SV=1
MSYAVKEMFLTLQGEGVNAGRRAVFVRFAGCNLWSGREQDRATAVCRFCDTDFVGTDGLGGGKFADAGALAAAVAGFWGAGQTDRFVVLTGGEPMLQVDDALVDALHDAGFRIAIESNGTLPVHPGIDWVCISPKAGSVVVQRSGDELKLVWPQPGTDIDAIETWDFAHRLLQPMDDVAGQANVDAAIALVMERPHWRLSLQTQKLLGLR

SEQ ID NO: 34277 - protein, 210 aa, Sphingomonas aurantiaca
  misc_feature (1)..(210): tr|A0A2T5GTP9|A0A2T5GTP9_9SPHN 7-carboxy-7-deazaguanine synthase OS=Sphingomonas aurantiaca OX=185949 GN=queE PE=3 SV=1
MSYAVKEMFLTLQGEGVNAGRRAVFVRFAGCNLWSGREQDRATAVCRFCDTEFVGTDGLGGGKFADAQALASAVAGFWGEGSQDRFVVLTGGEPMLQIDDAIVDALHAHGFRIAMESNGTIAAHPGIDWICVSPKAGSVVVQRTGHELKLVWPQPGTDIDDVETWDFANLLLQPLDDPRADANREACVDMVMERPQWRLSLQTHKLLGLR

SEQ ID NO: 34278 - protein, 210 aa, Sphingomonas carotinifaciens
  misc_feature (1)..(210): tr|A0A1G7KJK7|A0A1G7KJK7_9SPHN 7-carboxy-7-deazaguanine synthase OS=Sphingomonas carotinifaciens OX=1166323 GN =queE PE=3 SV=1
MSYAVKEMFLTLQGEGVHAGRRAVFVRFAGCNLWSGREQDRATAVCRFCDTDFVGTDGLGGGKFADAGALVAAVAGFWGEGVANRFVVLTGGEPMLQIDDALVDALHGAGFTIAIESNGTIAAHAGIDWVCISPKAGSVVVQRAGDELKLVWPQAGLDPAALEDWAFTHHLLQPLDDPRADANREACVDMVLARPRWRLSLQTHKLLGLR

SEQ ID NO: 34279 - protein, 210 aa, Sphingomonas changbaiensis
  misc_feature (1)..(210): tr|A0A0E9MR76|A0A0E9MR76_9SPHN 7-carboxy-7-deazaguanine synthase OS=Sphingomonas changbaiensis NBRC 104936 OX= 1219043 GN=queE PE=3 SV=1
MAYSVKEIFYTLQGEGRNAGRATVFCRFAGCNLWSGREQDRGAAVCTFCDTDFVGTNGTGGGKFRDAEALAAAVDAEWQGDGGRKMVVLTGGEPLLQVDPALVEALHARGFEIAVETNGTCPPPPGIDWLCVSPKADAPLAVAGGDELKLVYPQAAAMPERFSDLAFDHFLLQPMDGPALAENTAAAIAYCMAHPKWRLSVQTHKVIGIR

SEQ ID NO: 34280 - protein, 210 aa, Sphingomonas desiccabilis
  misc_feature (1)..(210): tr|A0A4Q2J064|A0A4Q2J064_9SPHN 7-carboxy-7-deazaguanine synthase OS=Sphingomonas desiccabilis OX=429134 GN=que E PE=3 SV=1
MSYAVKEMFLTLQGEGVHAGRRAVFVRFAGCNLWSGREVDRASAICRFCDTDFVGTDGEGGGKFADAAALVAAVEGFWGAGFERRFVVLTGGEPMLQIDDSLVEALHAAGFTIAIESNGTIAAHPGIDWVCISPKAGSTVVQRSGDELKLVWPQPGLDPAEIEGWNFANFLAQPLDDPQADANREAAVALVLARPKWRLSLQTHKLLGLR

SEQ ID NO: 34281 - protein, 210 aa, Sphingomonas dokdonensis
  misc_feature (1)..(210): tr|A0A245ZVS0|A0A245ZVS0_9SPHN 7-carboxy-7-deazaguanine synthase OS=Sphingomonas dokdonensis OX=344880 GN=queE PE=3 SV=1
MSYAVKEMFLTLQGEGVQAGRRAVFIRFAGCNLWSGREQDRATAICRFCDTDFVGIDGLGGGRFADAEALAAAAVNMWDGDKGGRFVVLTGGEPMLQVDDALIDALHAAGFFIAIESNGTLPVNPGIDWVCISPKAGSETVQRQGNELKLVWPQPGSDVVAMESWAFDHLLIQPLDDINAAANQEAAMALVMERPRWRLSLQTHKLLGLR

SEQ ID NO: 34282 - protein, 210 aa, Sphingomonas edaphi
  misc_feature (1)..(210): tr|A0A418PZ03|A0A418PZ03_9SPHN 7-carboxy-7-deazaguanine synthase OS=Sphingomonas edaphi OX=2315689 GN=queE PE= 3 SV=1
MSYAVKEAFLTLQGEGVQAGSRAVFLRFAGCNLWSGREQDRSTAQCNFCDTDFVGIDGPGGGKFANADALSSHVEALWGEERDFRLVVITGGEPMLQLDKALIDALHARDFRVAVESNGTIAATPGIDWLCVSPKAGTEVVQRSGDELKLVWPQPGIDLADLEGWDFRHYLVQPMDCADGQAAVDAAISLVMERPLWRLTLQGHKIVGLK

SEQ ID NO: 34283 - protein, 210 aa, Sphingomonas elodea
  misc_feature (1)..(210): tr|A0A495F0M5|A0A495F0M5_SPHEL 7-carboxy-7-deazaguanine synthase OS=Sphingomonas elodea OX=179878 GN=queE PE=3 SV=1
MSYAVKEMFLTLQGEGVNAGARAVFVRFAGCNLWSGREEDRATAVCRFCDTDFVGIDGVGGGRFADAATLVDAVEGHWGPGQDKRFVVLTGGEPMLQIDDALVEALHARGFRIAIESNGTLPVHPGIDWVCISPKAGSAVVQRRGDELKLVWPQAGTDIEAIEGWDFAHFLIQPMDSAEAEANTRAAIAVAMERPRWRLTLQTHKLLGLR

SEQ ID NO: 34284 - protein, 210 aa, Sphingomonas endophytica
  misc_feature (1)..(210): tr|A0A147I8S7|A0A147I8S7_9SPHN 7-carboxy-7-deazaguanine synthase OS=Sphingomonas endophytica OX=869719 GN=queE PE=3 SV=1
MSYAVKEMFLTLQGEGVQAGRRAVFVRFAGCNLWSGREQDRAAAVCRFCDTDFVGTDGLGGGKFADAAALVAAVEGFWGGGDARRFVVLTGGEPMLQIDDALVDALHGAGFEIAIESNGTLAVHPGIDWVCISPKAGSETVQRRGDELKLVWPQAGSDIEAIERWDFAHFLLQPLDDAKGQENVAAAMAVVMERPRWRLSLQTHKLLGLR

SEQ ID NO: 34285 - protein, 210 aa, Sphingomonas faeni
  misc_feature (1)..(210): tr|A0A2T5U4D5|A0A2T5U4D5_9SPHN 7-carboxy-7-deazaguanine synthase OS=Sphingomonas faeni OX=185950 GN=queE PE=3 SV=1
MSYAVKEMFLTLQGEGVNAGRRAVFVRFAGCNLWSGREQDRATAVCKFCDTEFVGTDGLGGGKFADAQALASAVAGFWGEGERDRFVVLTGGEPMLQIDDAIVDALHEQGFRIAMESNGTIPAHPGIDWICISPKAGSIVVQRAGHELKLVWPQPGSDIEEVETWDFENFLLQPLDDPRADANREACVDLVMERPQWRLSLQTHKLLGLR

SEQ ID NO: 34286 - protein, 215 aa, Sphingomonas fennica
  misc_feature (1)..(215): tr|A0A2T4HQ22|A0A2T4HQ22_9SPHN 7-carboxy-7-deazaguanine synthase OS=Sphingomonas fennica OX=114404 GN=queE PE= 3 SV=1
MSYAVKEIFLTLQGEGRQAGRRAVFLRFSGCNLWSGRERDRATADCRFCDTDFVGMDGDNGGRYADAQALAARVGELWETGLDRVEGGVPFVVMTGGEPLLQVDDALIAALHDRGFEIAVETNGTIAAPAGIDWICVSPKAGTEIVQRRGNELKIVWPQPGNDHRAMEEWDFDHFLVSPMDGEDRAGTTAAAIAFVLANPRWRLSAQVHKLIGVR

SEQ ID NO: 34287 - protein, 210 aa, Sphingomonas gei
  misc_feature (1)..(210): tr|A0A4S1X2I5|A0A4S1X2I5_9SPHN 7-carboxy-7-deazaguanine synthase OS=Sphingomonas gei OX=1395960 GN=queE PE=3 S V=1
MSYAVKEMFLTLQGEGVNAGARAVFVRFAGCNLWSGREQDRAAAVCRFCDTDFVGTDGLGGGKFADADALADAVVGHWGADPERRFVVLTGGEPMLQVDDALVDALHARGFRIAIESNGTLPTHPGIDWVCISPKAGSVVVQRSGDELKLVWPQAGSDLDAIEGWDFAHFLVQPMDDAAGEANIRAAVALVMARPRWRLSLQTHKLLGLR

SEQ ID NO: 34288 - protein, 210 aa, Sphingomonas ginsenosidimutans
  misc_feature (1)..(210): tr|A0A2A4I3A1|A0A2A4I3A1_9SPHN 7-carboxy-7-deazaguanine synthase OS=Sphingomonas ginsenosidimutans OX=862134 G N=queE PE=3 SV=1
MSYAVKEMFLTLQGEGVQAGRRAVFVRFAGCNLWSGREQDRASAVCRFCDTDFVGTDGLGGGRFGDAAALVAAVEGFWGAGRERRFVVLTGGEPMLQVDDALVDALHDAGFFVAIESNGTLPVHPRIDWICISPKAGSETVQRCGDELKLVWPQPGSDLSAIEGWAFDHFLLQPMDDARGQANVDAAMALVMERPRWRLTLQTHKMLGLR

SEQ ID NO: 34289 - protein, 210 aa, Sphingomonas ginsenosidivorax
  misc_feature (1)..(210): tr|A0A5C6UAR3|A0A5C6UAR3_9SPHN 7-carboxy-7-deazaguanine synthase OS=Sphingomonas ginsenosidivorax OX=862135 GN =queE PE=3 SV=1
MSYAVKEMFLTLQGEGVNAGRRAVFVRFAGCNLWSGREQDRATAVCRFCDTDFVGTDGLGGGKFADADALAAAVEGFWGEGAADRFVVLTGGEPMLQIDDAVVDALHARGFSIAMESNGTIAAHPGIDWVCVSPKAGSVVVQRTGDELKLVWPQPGTDIADIETWDFAHRLLQPLDDPRADANREACVAMVMQRPAWRLSLQTHKLLGLR

SEQ ID NO: 34290 - protein, 230 aa, Sphingomonas ginsenosidivorax
  misc_feature (1)..(230): tr|A0A5C6UGZ5|A0A5C6UGZ5_9SPHN 7-carboxy-7-deazaguanine synthase OS=Sphingomonas ginsenosidivorax OX=862135 GN =queE PE=3 SV=1
MFGGNPARAQEMGDGASLWIQEVFYTLQGEGPFAGDPAVFVRTAGCNIRCYWCDTDFESSTWRPALADLIAAIETHRPAHCDLIVLTGGEPFRQNIAPLVQQLLARGLRVQIETNGTLSIPLPVDDRLTIVCSPKTKQLHDAIVPRITAYKYVLAAGEVDPDDGLPMASTQKAGQRTRLFRPPSNTRVFVMPRDDGDAVANRAHQATAAGIAMRHGYRLCLQLHKLLDLP

SEQ ID NO: 34291 - protein, 210 aa, Sphingomonas glacialis
  misc_feature (1)..(210): tr|A0A502FZF3|A0A502FZF3_9SPHN 7-carboxy-7-deazaguanine synthase OS=Sphingomonas glacialis OX=658225 GN=queE P E=3 SV=1
MSYAVKEMFLTLQGEGVQAGRRAVFVRFAGCNLWSGREQDRASAICQFCDTDFVGTDGAGGAKFADAAELVAAVAEFWGADPAHRFVVLTGGEPMLQVDDALVDALHAAGFEIAIESNGTLAVHPGIDWVCISPKAGSQVVQRSGDELKLVWPQPGSDVAELETWNFAHYLIQPLDSIAAEANHAAAIDLVMARPQWRLTLQAHKALGLR

SEQ ID NO: 34292 - protein, 210 aa, Sphingomonas guangdongensis
  misc_feature (1)..(210): tr|A0A285Q9R3|A0A285Q9R3_9SPHN 7-carboxy-7-deazaguanine synthase OS=Sphingomonas guangdongensis OX=1141890 GN= queE PE=3 SV=1
MSYAVKELFLTLQGEGANAGRRAVFVRFAGCNLWSGREADRATAVCRFCDTDFVGTDGAGGGRFADASALVAAVVAAWGEDREHRFVVLTGGEPMLQVDDALVDALHAAGFRIAIESNGTLPAHPGIDWVCISPKAGSTVVQRAGDELKLIWPQAGIDPVALEDWAFTHHLLQPMDDVRGQANVAAAIDLVMARPRWTLTLQTHKLLGLR

SEQ ID NO: 34293 - protein, 215 aa, Sphingomonas haloaromaticamans
  misc_feature (1)..(215): tr|A0A1S1HJ36|A0A1S1HJ36_9SPHN 7-carboxy-7-deazaguanine synthase OS=Sphingomonas haloaromaticamans OX=653954 G N=queE PE=3 SV=1
  misc_feature (97)..(97): Xaa can be any naturally occurring amino acid
MSYAVKEIFLTLQGEGRQAGRRAVFLRFSGCNLWSGREQDRATADCRFCDTDFVGMDGDNGGRYADARALAARVGELWETGLDRAEGGMPFVVMTGXEPLLQVDDALIAALHDRGFEIAVETNGTIAAPAGIDWICVSPKAGTEIVQRRGNELKIVWPQPGNDHRAMEEWDFDHFLVSPMDGEDRVETTAAAIAFVLANPRWRLSAQVHKLIGVR

SEQ ID NO: 34294 - protein, 211 aa, Sphingomonas hengshuiensis
  misc_feature (1)..(211): tr|A0A2W4ZFN7|A0A2W4ZFN7_9SPHN 7-carboxy-7-deazaguanine synthase OS=Sphingomonas hengshuiensis OX=1609977 GN=q ueE PE=3 SV=1
MTYSVKEMFLTLQGEGVHAGRRAVFVRFAGCNLWSGREADRANAICRFCDTDFVGTDGIGGGKFADAAALVAAVVGHWDGAADRRFVVLTGGEPMLQIDDAIVDALHAAAFTIAIESNGTIAAHPGIDWVCISPKAGSDVVQRRGDELKLVWPQAGIDVDALERWDFAHHLVQPMDAAGMEIAHREAAVGFAMARPKWRLSLQTHKLLGLR

SEQ ID NO: 34295 - protein, 210 aa, Sphingomonas histidinilytica
  misc_feature (1)..(210): tr|A0A1T5C345|A0A1T5C345_9SPHN 7-carboxy-7-deazaguanine synthase OS=Sphingomonas histidinilytica OX=439228 GN= queE PE=3 SV=1
MGSYAVKEMFLTLQGEGAQVGRRAVFLRFAGCNLWSGREEDRADAQCRFCDTDFVGLDGDNGGRYPDAGTLADRAIALWGELPGAFIVMTGGEPLLQVDDALVAALKARGFETAVETNGTQPAPAGIDWICVSPKAGTDVVLRRGNELKLVWPQPGIDPAALEDWDFEHFLLQPMDGPRLDEARAVAIAYVMAHPKWRLSTQTHKVVGIR

SEQ ID NO: 34296 - protein, 208 aa, Sphingomonas indica
  misc_feature (1)..(208): tr|A0A1X7FYX4|A0A1X7FYX4_9SPHN 7-carboxy-7-deazaguanine synthase OS=Sphingomonas indica OX=941907 GN=queE PE=3 SV=1
MSYAVKEIFLTLQGEGMQAGRRAVFLRFSGCNLWSGREADRATAQCSFCDTDFVGMDGENGGRYDADMLADRVAALWSAGELPLVVITGGEPMLQLDAALIDALHDRGFEIAVESNGTLPAPPGIDWLCISPKAGSEVVQRSGDELKLVWPQAGMEPADLLRWDFAHFLIQPMDCAKGDAARQAAIAYVMAHPGWRLSLQTHKLLGLP

SEQ ID NO: 34297 - protein, 215 aa, Sphingomonas jatrophae
  misc_feature (1)..(215): tr|A0A1I6JY51|A0A1I6JY51_9SPHN 7-carboxy-7-deazaguanine synthase OS=Sphingomonas jatrophae OX=1166337 GN=queE PE=3 SV=1
MAGYAVKEMFLTLQGEGLQAGRRAVFIRFAGCNLWSGREQDRAGADCTFCDTDFVGTDGDGGGRYADGGALADAALGLWGEWLEEPGAPPFAVLTGGEPTLQVDEALIAALKARGFELAIETNGTRPVPDGIDWICVSPKAGNEVVQRSGDELKLVWPQPGVDFKAMEAWDFTHLLIQPMDGNSAVDTRNSAIKFVLTHPRWRLSVQTHKLVGLR

SEQ ID NO: 34298 - protein, 210 aa, Sphingomonas jeddahensis
  misc_feature (1)..(210): tr|A0A1V2EUE6|A0A1V2EUE6_9SPHN 7-carboxy-7-deazaguanine synthase OS=Sphingomonas jeddahensis OX=1915074 GN=que E PE=3 SV=1
MSYAVKEMFLTLQGEGVQAGRRAVFVRFAGCNLWSGREQDRANAICRFCDTDFVGVDGLGGGKFGDAAALAAAVVAMWDRGEAHRFVVLTGGEPMLQIDDPLVEALHAAGFVIAIESNGTLPVHPGIDWVCISPKAGSETVQRAGDELKLVWPQPGSDIAAMEAWDFQHFLLQPLDDPNAAANQAAAMALVMERPKWRLSLQTHKLLGLR

SEQ ID NO: 34299 - protein, 210 aa, Sphingomonas koreensis
  misc_feature (1)..(210): tr|A0A1L6JEY8|A0A1L6JEY8_9SPHN 7-carboxy-7-deazaguanine synthase OS=Sphingomonas koreensis OX=93064 GN=queE PE =3 SV=1
MSYAVKEMFLTLQGEGVNAGARAVFVRFAGCNLWSGREQDRAAAVCKFCDTDFVGTDGLGGGKFADADALAIAVQGFWGPGIERRFVVLTGGEPMLQVDDALVASLHAQGFRIAIESNGTLPVHPGIDWVCVSPKAGSEVVQRSGDELKLVWPQAGTDVAALETWDFAHFLVQPMDDANGAANVQAAVDFALERPKWRLTLQAHKSLGLR

SEQ ID NO: 34300 - protein, 210 aa, Sphingomonas koreensis
  misc_feature (1)..(210): tr|A0A2M8WG30|A0A2M8WG30_9SPHN 7-carboxy-7-deazaguanine synthase OS=Sphingomonas koreensis OX=93064 GN=queE PE =3 SV=1
MSYAVKEMFLTLQGEGVNAGARAVFVRFAGCNLWSGREQDRAAAVCKFCDTDFVGTDGLGGGKFADADALAVAVQGFWGPGIERRFVVLTGGEPMLQIDDALVAALHAQGFRIAIESNGTLPVHPGIDWVCISPKAGSEVVQRSGDELKLVWPQAGTDVAALETWDFAHFLVQPMDDANGAANVQAAVDFALERPKWRLTLQAHKSLGLR

SEQ ID NO: 34301 - protein, 216 aa, Sphingomonas laterariae
  misc_feature (1)..(216): tr|A0A239CZ14|A0A239CZ14_9SPHN 7-carboxy-7-deazaguanine synthase OS=Sphingomonas laterariae OX=861865 GN=queE PE=3 SV=1
MTSYAVKEIFLTLQGEGRQAGRRAVFLRFAGCNLWTGREQDRESADCRFCDTDFVGMDGDHGGRYRDAAALADKVAALWAEGLVGEAGAVPFVVMTGGEPLLQVDDALIAALHARGFEIAVETNGTIAAPAGIDWICVSPKAGTEIVQRSGQELKLVWPQPGNDYRAMEGWAFDHFLVSPMDGPDVVETTAAAVAFVLANPRWRLSVQSHKLIGVR

SEQ ID NO: 34302 - protein, 210 aa, Sphingomonas melonis
  misc_feature (1)..(210): tr|A0A0D1KV86|A0A0D1KV86_9SPHN 7-carboxy-7-deazaguanine synthase OS=Sphingomonas melonis OX=152682 GN=queE PE= 3 SV=1
MSYAVKEMFLTLQGEGVNAGRRAVFVRFAGCNLWSGREQDRATAVCRFCDTDFVGTDGLGGGKFADAGALAAVVAGFWGAGQADRFVVLTGGEPMLQVDDALVDALHDAGFRIAIESNGTLPVHPGIDWVCISPKAGSEVVQRSGDELKLVWPQPGTDIDAIETWDFAHRLLQPMDDAAGQANVDAAIALVMERPHWRLSLQTHKLLGLR

SEQ ID NO: 34303 - protein, 210 aa, Sphingomonas melonis
  misc_feature (1)..(210): tr|A0A175XZZ4|A0A175XZZ4_9SPHN 7-carboxy-7-deazaguanine synthase OS=Sphingomonas melonis TY OX=621456 GN=queE PE=3 SV=1
MSYAVKEMFLTLQGEGVNAGRRAVFVRFAGCNLWSGREQDRASAICRFCDTDFVGTDGLGGGKFADAGALVAAVAGFWGAGQAHRFVVLTGGEPMLQVDDALVDALHDAGFRIAIESNGTLPVHPGIDWVCISPKAGSEVVQRSGDELKLVWPQPGTDIDAIETWDFAHRLLQPMDDAAGQANVDAAIALVMERPHWRLSLQTHKLLGLR

SEQ ID NO: 34304 - protein, 210 aa, Sphingomonas mucosissima
  misc_feature (1)..(210): tr|A0A245ZT33|A0A245ZT33_9SPHN 7-carboxy-7-deazaguanine synthase OS=Sphingomonas mucosissima OX=370959 GN=queE PE=3 SV=1
MSYAVKEMFLTLQGEGVQAGRRAVFVRFAGCNLWSGREQDRARAICRFCDTDFVGVDGLSGGRFADAQGLADAAVQMWSGGEEARFVVLTGGEPMLQVDDALIDALHAAGFFIAIESNGTIPVHPGIDWVCISPKAGSEIVQRRGNELKLVWPQPGSDVTAMEGWDFAHLLIQPLDDANAAANQEAAMALVMERPRWRLSLQTHKLLGLR

SEQ ID NO: 34305 - protein, 210 aa, Sphingomonas naasensis
  misc_feature (1)..(210): tr|A0A4S1W3C5|A0A4S1W3C5_9SPHN 7-carboxy-7-deazaguanine synthase OS=Sphingomonas naasensis OX=1344951 GN=queE PE=3 SV=1
MSYAVKEMFLTLQGEGVNAGARAVFVRFAGCNLWSGREQDRASAVCRFCDTDFVGTDGAGGGRFADAEALAEAVAGHWGAETERRFVVLTGGEPMLQIDDALVDALHARGFRIAIESNGTLPAHPGIDWVCISPKAGSDVVQRSGDELKLVWPQAGTDVAELETWDFAHFLVQPMDSAEAEANTRAAVALAMARPRWRLTLQTHKMLGLR

SEQ ID NO: 34306 - protein, 210 aa, Sphingomonas olei
  misc_feature (1)..(210): tr|A0A4S4GAK8|A0A4S4GAK8_9SPHN 7-carboxy-7-deazaguanine synthase OS=Sphingomonas olei OX=1886787 GN=queE PE=3 SV=1
MSYAVKEMLLTLQGEGVQAGRRAVFVRFAGCNLWSGREEDRATAICKFCDTDFVGMDGLGGGRFADADALVAAVVAMWDGGEQDRFVVLTGGEPMLQVDDALVDALHAAGFFLAIESNGTLPVHPGIDWVCISPKAGSETVQRSGDELKVVWPQPGTDLEAMEKWGFRHFLLQPLDDPNAVTNQAAAMAKVMERPRWRLSLQTHKLLGLR

SEQ ID NO: 34307 - protein, 215 aa, Sphingomonas oleivorans
  misc_feature (1)..(215): tr|A0A2T5FTG0|A0A2T5FTG0_9SPHN 7-carboxy-7-deazaguanine synthase OS=Sphingomonas oleivorans OX=1735121 GN=queE PE=3 SV=1
MAGYAVKEMFLTLQGEGLQIGRRAVFLRFAGCNLWSGREQDRATAQCTFCDTDFVGTDGDNGGRYPDAAALAKKAAALWGERLEDEAGHALIVLTGGEPLLQLDAPLIDALKARGFRIAIETNGTIAAPEGIDWICVSPKRGTEIVQRSGNELKMVWPQPGLDFRAMEAWNFDHFLVQPMDGPALQATQEACIDFVLRHPRWRLSIQSHKLIGVR

SEQ ID NO: 34308 - protein, 210 aa, Sphingomonas oligophenolica
  misc_feature (1)..(210): tr|A0A502CRE5|A0A502CRE5_9SPHN 7-carboxy-7-deazaguanine synthase OS=Sphingomonas oligophenolica OX=301154 GN=q ueE PE=3 SV=1
MTYAVKEMFLTLQGEGVNAGARAVFVRFAGCNLWSGREQDRAAAICSFCDTDFVGIDGVGGGKFADGDALVAAVERHWGSGRADRFVVLTGGEPMLQVDDALVAALHGAGFRIAIETNGTIAAHPRIDWVCVSPKAGSDVVQRSGDELKLVWPQPGTDIDVLEGWDFAHRLLQPLDSADHTANIAACVDMVMQRPHWRLTLQTHKLLGLR

SEQ ID NO: 34309 - protein, 210 aa, Sphingomonas panacis
  misc_feature (1)..(210): tr|A0A1B3Z996|A0A1B3Z996_9SPHN 7-carboxy-7-deazaguanine synthase OS=Sphingomonas panacis OX=1560345 GN=queE PE =3 SV=1
MSYAVKEMFLTLQGEGVNAGRRAVFVRFAGCNLWSGREEDRATAICSFCDTDFVGINGLGGGRFADADALAAAVAGFWGDRPEARFVVLTGGEPMLQVDDALVDALHAGGFTIAIETNGTLPVHPGIDWVCVSPKAGSTVVQRSGDELKLVWPQAGSDPEVLESWDFANFLVQPMDDAAAADNQAAAIALAMARPKWRLSLQTHKFLGLR

SEQ ID NO: 34310 - protein, 210 aa, Sphingomonas parapaucimobilis
  misc_feature (1)..(210): tr|A0A0A1W4R9|A0A0A1W4R9_9SPHN 7-carboxy-7-deazaguanine synthase OS=Sphingomonas parapaucimobilis NBRC 15100 O X=1219049 GN=queE PE=3 SV=1
MSYAVKEIFKTLQGEGAHSGRAAVFCRFAGCNLWSGRETDRATSVCTFCDTDFVGLNGTGGGRFADADALADAIAAEWGTGLAGRYAVLTGGEPLLQVDQALIDALHAHGFEIGVETNGTQPAPAGLDWICVSPKAGAPLVLETGNELKLVYPQADARPERFEHLSFDHFFLQPMDAPAADDNLAAAIAYCTQNPRWRLSLQSHKMIGIR

SEQ ID NO: 34311 - protein, 210 aa, Sphingomonas parapaucimobilis
  misc_feature (1)..(210): tr|A0A0A1W419|A0A0A1W419_9SPHN 7-carboxy-7-deazaguanine synthase OS=Sphingomonas parapaucimobilis NBRC 15100 O X=1219049 GN=queE PE=3 SV=1
MSYAVKEMFLTLQGEGVQAGRRAVFVRFAGCNLWSGREQDRASAICRFCDTDFVGVDGLGGGRFVDAAALVAAVEGFWGASHEERFVVLTGGEPMLQVDDALVDALHAAGFFIAIESNGTLAAHPRLDWVCISPKAGSEVVQRSGQELKLVWPQAGIDPVEVESWDFANHLLQPLDDPRAEANREACIAMVMERPRWRLTLQTHKMLGLR

SEQ ID NO: 34312 - protein, 210 aa, Sphingomonas paucimobilis
  misc_feature (1)..(210): tr|A0A0C9M4B7|A0A0C9M4B7_SPHPI 7-carboxy-7-deazaguanine synthase OS=Sphingomonas paucimobilis NBRC 13935 OX=12 19050 GN=queE PE=3 SV=1
MSYAVKEMFLTLQGEGVQAGRRAVFVRFAGCNLWSGREQDRASAICRFCDTDFVGVDGLGGGRFADAGALVAAVEGFWGPERAERFVVLTGGEPMLQVDDALVDALHDAGFFIAIESNGTIAAHPRLDWVCISPKAGSEVVQRSGQELKLVWPQAGIDPAEVEGWDFANHLLQPLDDPRAEANREACIAMVMERPRWRLTLQTHKMLGLR

SEQ ID NO: 34313 - protein, 210 aa, Sphingomonas paucimobilis; identical to SEQ ID NO: 34312
  misc_feature (1)..(210): tr|A0A411LMB6|A0A411LMB6_SPHPI 7-carboxy-7-deazaguanine synthase OS=Sphingomonas paucimobilis OX=13689 GN=queE PE=3 SV=1

SEQ ID NO: 34314 - protein, 210 aa, Sphingomonas pokkalii
  misc_feature (1)..(210): tr|A0A2U0SEA9|A0A2U0SEA9_9SPHN 7-carboxy-7-deazaguanine synthase OS=Sphingomonas pokkalii OX=2175090 GN=queE P E=3 SV=1
MSYAVKEMFLTLQGEGVNAGARAVFVRFAGCNLWSGREVDRAAAVCRFCDTDFVGVDGAGGGRFADATALADAAAAHWGPDGTARFVVLTGGEPMLQVDDSLVEALHARGFRIAIETNGTLPVHPGIDWVCVSPKAGSVVVQQRGNELKLVWPQPGTDLEAIEGWDFGHFLVQPMDDADAAANRDAAIALAMARPRWRLSLQTHKLLGLR

SEQ ID NO: 34315 - protein, 210 aa, Sphingomonas rubra
  misc_feature (1)..(210): tr|A0A1I5UFW9|A0A1I5UFW9_9SPHN 7-carboxy-7-deazaguanine synthase OS=Sphingomonas rubra OX=634430 GN=queE PE=3 SV=1
MTYAVKEMFLTLQGEGVNAGARAVFVRFAGCNLWSGREQDRATAVCRFCDTDFVGTDGLGGGKFADAAALVAAVEGFWGEGRDRRFVVLTGGEPMLQVDDALVDELHAAGFRIAIESNGTLPVHPLIDWVCISPKAGSDVVQRRGDELKLVWPQVGIDPVALEGWNFTHHLLQPLDDARADANREACVATVLERPRWRLSLQTHKLLGLR

SEQ ID NO: 34316 - protein, 210 aa, Sphingomonas sanguinis
  misc_feature (1)..(210): tr|A0A147IKT3|A0A147IKT3_9SPHN 7-carboxy-7-deazaguanine synthase OS=Sphingomonas sanguinis OX=33051 GN=queE PE =3 SV=1
MSYAVKEMFLTLQGEGVQAGRRAVFVRFAGCNLWSGREQDRASAICRFCDTDFVGVDGLGGGRFADADALVAAVEGFWGESRNERFVVLTGGEPMLQVDDALVDALHAAGFFIAIESNGTIAAHPGIDWVCISPKAGSEVVQRSGQELKLVWPQAGIDPAEVEGWDFANHLLQPLDDPRAEENREVCIAMVMERPRWRLTLQTHKMLGLR

SEQ ID NO: 34317 - protein, 210 aa, Sphingomonas sanguinis
  misc_feature (1)..(210): tr|A0A147J7L7|A0A147J7L7_9SPHN 7-carboxy-7-deazaguanine synthase OS=Sphingomonas sanguinis OX=33051 GN=queE PE =3 SV=1
MSYAVKEMFLTLQGEGVQAGRRAVFVRFAGCNLWSGREQDRASAICRFCDTDFVGVDGLGGGRFADAAALVAAVEGFWGESRDERFVVLTGGEPMLQVDDALVDALHAAGFFIAIESNGTIAAHPGIDWVCISPKAGSHVVQRSGNELKLVWPQAGIDPVEVEGWDFANHLLQPLDDPRADENREACIGVVMDRPRWRLTLQTHKMLGLR

SEQ ID NO: 34318 - protein, 212 aa, Sphingomonas sanxanigenens
  misc_feature (1)..(212): tr|W0AF43|W0AF43_9SPHN 7-carboxy-7-deazaguanine synthas e OS=Sphingomonas sanxanigenens DSM 19645 = NX02 OX=112 3269 GN=queE PE=3 SV=1
MASYAVKEAFLTLQGEGRRAGRRAVFVRFAGCNLWTGREKDRATAVCRFCDTDFVGTDGDGGGRFADAAALAAHASALWGVAEGARPYVVLTGGEPLLQVDAALIDALHDAGFEIAIESNGTIAAPAGIDWVCISPKAGSAVVQTRGDELKLVWPQPGIDIDALERWDFANFLVQPMDDADYPANRDAAVALAMTRPLWRLTLQTHKMLGLR

SEQ ID NO: 34319 - protein, 210 aa, Sphingomonas sanxanigenens
  misc_feature (1)..(210): tr|A0A2W5A6G4|A0A2W5A6G4_9SPHN 7-carboxy-7-deazaguanine synthase OS=Sphingomonas sanxanigenens OX=397260 GN=qu eE PE=3 SV=1
MSYAVKEMFLTLQGEGVQAGRRAVFIRFAGCNLWTGREQDRESAVCRFCDTDFVGMDGTFGGRYDSATKLAAQAKSLWERDNLAGFCVLTGGEPLLQVDAALIDALHAEGFEIAVESNGTIAAPPGIDWLCISPKAGSEVVQTSGDELKLVWPQPGIDLERIEAWDFRNFLVQPMDCAESEAARDAAIALAMERPRWRLTLQNHKQLGLR

SEQ ID NO: 34320 - protein, 210 aa, Sphingomonas sp.
  misc_feature (1)..(210): tr|A0A2U1G3G0|A0A2U1G3G0_9SPHN 7-carboxy-7-deazaguanine synthase OS=Sphingomonas sp. URHD0007 OX=1298856 GN=qu eE PE=3 SV=1
MTYAVKECFLTLQGEGVQAGSRAVFLRFAGCNLWSGREQDRATAQCGFCDTDFVGTDGEGGGKFVAADDLADHVARLWGAGEERRLVVITGGEPMLQLDSALVDALHARGFRVAVETNGTLAAVKDVDWICVSPKAGADVVQRSGDELKLVWPQKGIDPAELEAWDFDHFLVQPMDCAEGEAARDAAIRLAMERPKWRLTLQAHKLVGLP

SEQ ID NO: 34321 - protein, 210 aa, Sphingomonas sp.
  misc_feature (1)..(210): tr|A0A0Q8Q6E3|A0A0Q8Q6E3_9SPHN 7-carboxy-7-deazaguanine synthase OS=Sphingomonas sp. Root710 OX=1736594 GN=que E PE=3 SV=1
MGSYAVKEMFLTLQGEGMQVGRRAVFLRFAGCNLWSGREQDRETAVCRFCDTDFVGTDGDHGGRYPGADALADQALRLWGALPDPFLVMTGGEPLLQIDDALIAALKARGFETAVETNGTQPAPDGIDWICVSPKAGSDVVLRRGNELKLVWPQPGIDPGELATWDFEHFLLQPMDGPTLASARDAAIAYILEHPRWRLSTQTHKVVGIR

SEQ ID NO: 34322 - protein, 210 aa, Sphingomonas spermidinifaciens
  misc_feature (1)..(210): tr|A0A2A4B153|A0A2A4B153_9SPHN 7-carboxy-7-deazaguanine synthase OS=Sphingomonas spermidinifaciens OX=1141889 GN=queE PE=3 SV=1
MSYAVKELFLTLQGEGFHAGRRAVFVRFAGCNLWSGREEDRATAICKFCDTDFVGMDGGGGARFADAGALAAAVVEAWGQGAERRFVVLTGGEPMLQVDDAIVHALHDAGFTIAIESNGTLPVHPGIDWVCISPKAGSEVVQRSGDELKLVWPQPGTDVAEIERWDFRHFLVQPLDDAAGQANWDAATAFAMERPKWRLSLQTHKLLGLR

SEQ ID NO: 34323 - protein, 210 aa, Sphingomonas spermidinifaciens
  misc_feature (1)..(210): tr|A0A2A4B603|A0A2A4B603_9SPHN 7-carboxy-7-deazaguanine synthase OS=Sphingomonas spermidinifaciens OX=1141889 GN=queE PE=3 SV=1
MSYAVKEIFKTLQGEGAQMGRAAVFCRFAGCNLWSGREIDRGQAVCSFCDTDFVGIDGSGGGRFADAGALADAVEAEWGDSRPGRYVVLTGGEPLLQVDQSLVDALHARGFEVWIETNGTQAAPAGLDWVCVSPKADAELVLRAGDELKLVYPQEKAAPERFEHLAFDYFFLQPMDSPQAATNLEAAIAYCTNNPRWRLSLQSHKMIGIR

SEQ ID NO: 34324 - protein, 210 aa, Sphingomonas taxi
  misc_feature (1)..(210): tr|A0A2W4YWT6|A0A2W4YWT6_9SPHN 7-carboxy-7-deazaguanine synthase OS=Sphingomonas taxi OX=1549858 GN=queE PE=3 SV=1
MSYAVKEMFLTLQGEGVNAGRRAVFVRFAGCNLWSGREQDRATAVCKFCDTEFVGTDGLGGGKFADARELAAAVAGFWGEGMRDRFVVLTGGEPMLQIDDAIVDALHAEGFRIAMESNGTIVAHPGIDWVCISPKAGSIVVQRTGDELKLVWPQPGTDIADVETWDFANLLLQPLDDPQADANREACVEMVMARPQWRLSLQTHKLLGLR

SEQ ID NO: 34325 - protein, 210 aa, Sphingomonas taxi
  misc_feature (1)..(210): tr|A0A2W5P748|A0A2W5P748_9SPHN 7-carboxy-7-deazaguanine synthase OS=Sphingomonas taxi OX=1549858 GN=queE PE=3 SV=1
MSYAVKEMFLTLQGEGVQAGRRAVFVRFAGCNLWTGREQDRARAICRFCDTDFVGVDGAGGGRFADAAALVAAVEGFWGGDGLRRFVVLTGGEPMLQVDDALVDALHAAGFEIAIESNGTLPVHPGIDWVCISPKAGSETVQRRGHELKLVWPQAGSDLDTIERWDFAHFLLQPLDDARGEANVAAAMALVMERPQWRLSLQTHKLLGLR

SEQ ID NO: 34326 - protein, 210 aa, Sphingomonas trueperi
  misc_feature (1)..(210): tr|A0A543M6K7|A0A543M6K7_9SPHN 7-carboxy-7-deazaguanine synthase OS=Sphingomonas trueperi OX=53317 GN=queE PE= 3 SV=1
MSYAVKEMFLTLQGEGVNAGARAVFVRFAGCNLWSGREEDRATAVCRFCDTDFVGMDGLGGGRFADADALVSAVEGHWGPGRDKRFVVLTGGEPMLQIDDALVEALHARGFRIAIESNGTLAVHPGIDWVCISPKAGSDVVQRRGDELKLVWPQPGTDLEAIEEWDFAHFLIQPMDSAAAEANTRAAIAVAMERPRWRLTLQTHKLLGLR

SEQ ID NO: 34327 - protein, 210 aa, Sphingomonas turrisvirgatae
  misc_feature (1)..(210): tr|A0A1E3LUQ4|A0A1E3LUQ4_9SPHN 7-carboxy-7-deazaguanine synthase OS=Sphingomonas turrisvirgatae OX=1888892 GN= queE PE=3 SV=1
MTYSVKELFLTLQGEGVNAGARAVFVRFAGCNLWSGREQDRASAICRFCDTDFVGTDGLGGGKFGEAQALAAAVEQHWGEGDERRFVVLTGGEPMLQVDDALVDALHARGFRIAIESNGTLPAHPRIDWVCISPKAGSTVVQRRGDELKLVWPQPGSDVAEIERWDFANFLVQPMDDADAAANVQAAIDFAMARPKWRLTLQAHKALGLR

SEQ ID NO: 34328 - protein, 210 aa, Sphingomonas wittichii
  misc_feature (1)..(210): tr|A0A1X9UIT7|A0A1X9UIT7_SPHSD 7-carboxy-7-deazaguanine synthase OS=Sphingomonas wittichii (strain DC-6 / KACC 16600) OX=1283312 GN=queE PE=3 SV=1
MAGYAVKEMFLTLQGEGVQVGRRAVFLRFAGCNLWSGREEDRADAQCRFCDTDFVGLDGDNGGRYPHADALADKAIALWGDLAGAFIVMTGGEPLLQVDDALVAALKARGFETAVETNGTQPAPAGIDWICVSPKAGTDIVLRRGNELKLVWPQPGIDPAALEGWDFEHFLLQPMDGAQLDEARGAAIAYVMDHPRWRLSTQTHKVVGIR

SEQ ID NO: 34329 - protein, 210 aa, Sphingomonas wittichii
  misc_feature (1)..(210): tr|A5V651|A5V651_SPHWW 7-carboxy-7-deazaguanine synthas e OS=Sphingomonas wittichii (strain RW1 / DSM 6014 / JC M 10273) OX=392499 GN=queE PE=3 SV=1
MAGYAVKEMFLTLQGEGVQVGRRAVFLRFAGCNLWSGREEDRADAQCRFCDTDFVGLDGDNGGRYPHADALADKAIALWGDLAGAFIVMTGGEPLLQVDDALVAALKARGFETAVETNGTQPAPAGIDWICVSPKAGTDIVLRRGNELKLVWPQPGIDPAALEGWDFEHFLLQPMDGAQLDEARAAAIAYVMDHPRWRLSTQTHKVVGIR

SEQ ID NO: 34330 - protein, 210 aa, Sphingomonas yabuuchiae
  misc_feature (1)..(210): tr|A0A147IJM2|A0A147IJM2_9SPHN 7-carboxy-7-deazaguanine synthase OS=Sphingomonas yabuuchiae OX=172044 GN=queE PE=3 SV=1
MSYAVKEMFLTLQGEGVQAGRRAVFVRFAGCNLWSGREQDRASAICRFCDTDFVGVDGLGGGRFADAGALVAAVEGFWGESRGERFVVLTGGEPMLQVDDALVDALHAAGFFIAIESNGTIAAHPGIDWVCISPKAGSAVVQRSGQELKLVWPQAGIDPAEVEGWDFANHLLQPLDDPRADENREACIAMVMERPRWRLTLQTHKMLGLR

SEQ ID NO: 34331 - protein, 210 aa, Sphingopyxis alaskensis
  misc_feature (1)..(210): tr|Q1GTF4|Q1GTF4_SPHAL 7-carboxy-7-deazaguanine synthas e OS=Sphingopyxis alaskensis (strain DSM 13593 / LMG 18 877 / RB2256) OX=317655 GN=queE PE=3 SV=1
MAYSVKEIFLTLQGEGAQAGRRAVFCRFAGCNLWTGREQDRAKAICRFCDTDFVGTDGTLGAKYRDAAALADVIAESWGPGSDDRYVVLTGGEPMLQVDDALIDALHARGFTIAIESNGTLPIPRSIDWICVSPKAGSELVQSSGDELKLVWPQPGSDVAKLAALDFRHLLVQPLDDRNAAANVQACIDLVMADPRWRLSLQTHKSLGLR

SEQ ID NO: 34332 - protein, 210 aa, Sphingopyxis alaskensis
  misc_feature (1)..(210): tr|Q1GPS2|Q1GPS2_SPHAL 7-carboxy-7-deazaguanine synthas e OS=Sphingopyxis alaskensis (strain DSM 13593 / LMG 18 877 / RB2256) OX=317655 GN=queE PE=3 SV=1
MSYAVKEIFKTLQGEGAQMGRAAVFCRFAGCNLWSGREGDRTTSVCTFCDTDFVGMDGSGGGRFADDQALADAIESEWAGARADRYVVLTGGEPLLQVDQDLVDALHTRGFEIAIETNGTQPAPRGLDWICVSPKADAELVLLAGNELKLVYPQEKAAPERFEHLAFEHFFLQPMDSPTAAANLEAAITYCTQNPRWRLSLQSHKMIGIR

SEQ ID NO: 34333 - protein, 210 aa, Sphingopyxis bauzanensis
  misc_feature (1)..(210): tr|A0A246JRX7|A0A246JRX7_9SPHN 7-carboxy-7-deazaguanine synthase OS=Sphingopyxis bauzanensis OX=651663 GN=queE PE=3 SV=1
MTYAVKEIFLTLQGEGAQAGRRAVFCRFAGCNLWTGREQDRGKAICKFCDTDFVGTDGTLGGKYADAVALAAVIAECWGPGGDEHYVVLTGGEPMLQVDAALIDALHEQGFTIAIETNGTFAVPRSIDWICVSPKAGSELVQLSGDELKLVWPQPGSDVERLAALDFTHRLVQPLDDPNAADSVQHCIDLVMADPRWRLSLQTHKSLGLR

SEQ ID NO: 34334 - protein, 210 aa, Sphingopyxis flava
  misc_feature (1)..(210): tr|A0A1T5D6L9|A0A1T5D6L9_9SPHN 7-carboxy-7-deazaguanine synthase OS=Sphingopyxis flava OX=1507287 GN=queE PE=3 SV=1
MAYSVKEIFLTLQGEGAQAGRRAVFCRFAGCNLWTGREGDRARAVCRFCDTDFVGTDGTLGGKYPDAGTLADQIAAIWGAGSDDRYVVLTGGEPMLQVDEALIGSLHERGFTIAIETNGTIPVPRSIDWICVSPKSGSKLVQTSGDELKLVWPQPGSDVEHFAALDFAHHLVQPLDDPKAADNVRACIDLVMADPRWRLSLQTHKSLGLR

SEQ ID NO: 34335 - protein, 210 aa, Sphingopyxis fribergensis
  misc_feature (1)..(210): tr|A0A0A7PKJ0|A0A0A7PKJ0_9SPHN 7-carboxy-7-deazaguanine synthase OS=Sphingopyxis fribergensis OX=1515612 GN=qu eE PE=3 SV=1
MTYAVKEIFLTLQGEGAQAGRRAVFCRFAGCNLWTGREKDRAKAVCQFCDTDFVGTDGTMGGKYKIAAALADVIAESWGAGSDDRYVVLTGGEPMLQVDDALIDALHERGFTIAIESNGTFPIPRSIDWICVSPKAGSELVQLSGDELKLVWPQPGSDVARLAGLDFAHLLVQPLDDPHAAANVQACIDLVMDDPRWRLSLQTHKNLGLR

SEQ ID NO: 34336 - protein, 210 aa, Sphingopyxis granuli
  misc_feature (1)..(210): tr|A0A109YLX4|A0A109YLX4_9SPHN 7-carboxy-7-deazaguanine synthase OS=Sphingopyxis granuli OX=267128 GN=queE PE= 3 SV=1
MSYAVKEIFLTLQGEGARSGRRAVFCRFAGCNLWTGREVDRAKAVCRFCDTDFVGTDGTLGGKYADAATLATAIAQSWGEARDRRYVVLTGGEPMLQVDRALIDALHGEGFTIAIETNGTLPVPRAIDWICVSPKAGSELVQTSGDELKLVWPQPGSDVERLAGLDFAHRLIQPLDDAHAADNARACIELVMRDPRWQLSLQTHKHLGLR

SEQ ID NO: 34337 - protein, 210 aa, Sphingopyxis indica
  misc_feature (1)..(210): tr|A0A239E9K2|A0A239E9K2_9SPHN 7-carboxy-7-deazaguanine synthase OS=Sphingopyxis indica OX=436663 GN=queE PE=3 SV=1
MTYAVKEIFLTLQGEGVQAGRRAVFCRFAGCNLWTGREQDRAKAICQFCDTDFVGTDGTLGGKYADAAALVRIIAECWGAGGDDRFVVLTGGEPMLQVDDALIDALHAAGFTIAIESNGTQAVPRSIDWICISPKAGSDLVQTSGDELKLVWPQPGSDVDRLAALDFRHRLIQPLDDPNAAANVRACIDLVMADPRWRLSLQAHKALGLR

SEQ ID NO: 34338 - protein, 210 aa, Sphingopyxis lindanitolerans
  misc_feature (1)..(210): tr|A0A2S8BAY7|A0A2S8BAY7_9SPHN 7-carboxy-7-deazaguanine synthase OS=Sphingopyxis lindanitolerans OX=2054227 GN =queE PE=3 SV=1
MTYAVKEIFLTLQGEGAQAGRRAVFCRFAGCNLWTGREQDRGKAICQFCDTDFVGTDGTLGGKYADAAALARVIGACWGEGRADRYVVLTGGEPMLQVDAPLIDALHAEGFTIAIETNGTHNVPRSIDWICVSPKAGSQLVQQSGDELKLVWPQPGSDVAALADLDFAHRLIQPLDDPNAAANVQACIDLVMADPRWRLSLQTHKSLGLR

SEQ ID NO: 34339 - protein, 210 aa, Sphingopyxis macrogoltabida
  misc_feature (1)..(210): tr|A0A2W5L4P6|A0A2W5L4P6_SPHMC 7-carboxy-7-deazaguanine synthase OS=Sphingopyxis macrogoltabida OX=33050 GN=qu eE PE=3 SV=1
MAYAVKEIFLTLQGEGAQAGRRAVFCRFAGCNLWTGRERDRAKAVCRFCDTDFVGTDGTLGARYADADALAAVIADCWGGGSADRYVVLTGGEPMLQVDAALIDALHGHGFTIAIETNGTHAVPRAIDWICVSPKAGSVLVQTSGDELKLVWPQPGSDVAALAALDFTHRLVQPLDDPQAAANVRACIDLVMADPRWRLSLQDHKKLGLR

SEQ ID NO: 34340 - protein, 210 aa, Sphingopyxis macrogoltabida
  misc_feature (1)..(210): tr|A0A0N9UUV0|A0A0N9UUV0_SPHMC 7-carboxy-7-deazaguanine synthase OS=Sphingopyxis macrogoltabida OX=33050 GN=qu eE PE=3 SV=1
MTYAVKEIFLTLQGEGAQAGRRAVFCRFAGCNLWTGREQDRAKAVCKFCDTDFVGTDGTLGGKYRDAKTLAAVIAESWGEASADRYVVLTGGEPMLQVDDALIDALHAQGFTIAIESNGTLPVPRSIDWICISPKAGSELVQRSGDELKLVWPQPGSDVDMLASLDFAHRLIQPLDDPHAADNVRRCIDLVMADPRWRLSLQTHKSLGLR

SEQ ID NO: 34341 - protein, 210 aa, Sphingopyxis sp.
  misc_feature (1)..(210): tr|A0A0W1DVB2|A0A0W1DVB2_9SPHN 7-carboxy-7-deazaguanine synthase OS=Sphingopyxis sp. H050 OX=1759072 GN=queE P E=3 SV=1
MSYAVKEIFLTLQGEGAQAGRRAVFCRFAGCNLWTGREQDRAQAICKFCDTDFVGTDGTLGEKYRTAEALAATIAESWGSGADDRYVVLTGGEPMLQVDEALIDALHAEGFTIAIESNGTQVVPRSIDWICISPKAGSALIQKSGDELKLVWPQPGSDVEALAELDFAHRLIQPLDDPNAAANVQACIDLVMADPRWRLSLQTHKSLGLR

SEQ ID NO: 34342 - protein, 210 aa, Sphingopyxis sp.
  misc_feature (1)..(210): tr|A0A0Q8RS79|A0A0Q8RS79_9SPHN 7-carboxy-7-deazaguanine synthase OS=Sphingopyxis sp. Root214 OX=1736491 GN=que E PE=3 SV=1
MTYAVKEIFLTLQGEGAQAGRRAVFCRFAGCNLWTGREQDRAKAICQFCDTDFVGTDGTLGGKYSTAAALADVIAESWGQGSDDRYVVLTGGEPMLQVDGALIDALHERGFTIAIESNGTLPVPRSIDWICVSPKAGSDLVQTSGDELKLVWPQPGSDVARLATLDFKHLLVQPLDDPHAAANVQACIDLVMDDPRWRLSLQTHKNLGLR

SEQ ID NO: 34343 - protein, 210 aa, Sphingopyxis terrae
  misc_feature (1)..(210): tr|A0A142W2N8|A0A142W2N8_9SPHN 7-carboxy-7-deazaguanine synthase OS=Sphingopyxis terrae subsp. terrae NBRC 150 98 OX=1219058 GN=queE PE=3 SV=1
MTYAVKEIFLTLQGEGAQAGRRAVFCRFAGCNLWTGREQDRARAICKFCDTDFVGTDGTLGGKYADAAALAERIGETWGAAQGDRYVVLTGGEPMLQVDDALIEALHGEGFTVAIESNGTLPVPRLIDWICISPKAGSELVQTSGDELKLVWPQPGSDVERLAELDFAHRLIQPLDDANAADNVRNCIDLVMRDPRWRLSLQTHKTLGLR

SEQ ID NO: 34344 - protein, 210 aa, Sphingopyxis terrae
  misc_feature (1)..(210): tr|A0A1Y6EBS3|A0A1Y6EBS3_9SPHN 7-carboxy-7-deazaguanine synthase OS=Sphingopyxis terrae subsp. ummariensis OX= 429001 GN=queE PE=3 SV=1
MAYAVKEIFLTLQGEGAQAGRRAVFCRFAGCNLWTGREQDRAKAICKFCDTDFVGTDGTLGGKYADAAALAERIGETWGAAQDDRYVVLTGGEPMLQVDDALIEALHGEGFTVAIESNGTLPVPRLIDWICISPKAGSELVQTSGDELKLVWPQSGSDVERLAELDFAHRLIQPLDDANAADNARHCIDLVMRDPRWRLSLQTHKTLGLR

SEQ ID NO: 34345 - protein, 210 aa, Sphingopyxis witflariensis
  misc_feature (1)..(210): tr|A0A246K535|A0A246K535_9SPHN 7-carboxy-7-deazaguanine synthase OS=Sphingopyxis witflariensis OX=173675 GN=qu eE PE=3 SV=1
MTYAVKEIFLTLQGEGAQAGRRAVFCRFAGCNLWTGREVDRAKAVCKFCDTDFVGTDGTLGGKYADAAALAAVIAENWGEGFDDRYVVLTGGEPMLQVDEALIEALHREGFTVAIESNGTLAVPRSIDWICISPKAGSELVQLSGDELKLVWPQPGSDVERLAELDFEHRLVQPLDDPNAADNVQRCIDLVMDDPRWRLSLQAHKSLGLR

SEQ ID NO: 34346 - protein, 212 aa, Sphingorhabdus contaminans
  misc_feature (1)..(212): tr|A0A553WH41|A0A553WH41_9SPHN 7-carboxy-7-deazaguanine synthase OS=Sphingorhabdus contaminans OX=1343899 GN=q ueE PE=3 SV=1
MSYAVKEIFLTLQGEGVHAGRRAVFLRFAGCNLWTGREEDRASAICQFCDTDFVGMDGENGGRYSADEIATRVAELWGESQSDRYVVLTGGEPMLQVDDALVDGLHARGFTIAIESNGTIETHPRIDWVCISPKAGSEVVQRRGDELKLVWPQNGSDTDAMAHWNFANFLIQPMDSGDSATNQAHVEAATAFVMAHPKWRLSLQNHKILGLP

SEQ ID NO: 34347 - protein, 214 aa, Sphingorhabdus marina
  misc_feature (1)..(214): tr|A0A1N6F569|A0A1N6F569_9SPHN 7-carboxy-7-deazaguanine synthase OS=Sphingorhabdus marina DSM 22363 OX=1123272 GN=queE PE=3 SV=1
MNYAVKEMFLTLQGEGVHAGRRAVFARFAGCNLWSGLEKDRANAVCRFCDTDFVGMDGEGGGRFADADAFADAVARLWGDEKERRFVVLTGGEPMLQVDAALIDALHDAGFEIAIESNGTIAVPRAIDWICISPKAGSETVQKTGDELKLVWPQSGSDWEEMENWDFANLLIQPMDALGDPVVSEANVRSAIKFVQLNPKWRLSLQTHKILGLA

SEQ ID NO: 34348 - protein, 210 aa, Sphingorhabdus sp.
  misc_feature (1)..(210): tr|A0A2D5DJX8|A0A2D5DJX8_9SPHN 7-carboxy-7-deazaguanine synthase OS=Sphingorhabdus sp. OX=1902408 GN=queE PE=3 SV=1
MSYAVKEIFPTLQGEGAHAGRRAVFLRFAGCNLWTGREQDREKAICRFCDTDFVGMDGENGARYADAESLGDKVAELWGAGRTRRYVVMTGGEPMLQVDDALIDALHARGFEIAIESNGTLPVPRTIDWICISPKAGSETVQRSGDELKLVWPQPGSDWQAMESWDFSHHLIQPMDSASADENRAEAIAFVEAHPAWRLSLQTHKLLGLP

SEQ ID NO: 34349 - protein, 210 aa, Sphingorhabdus sp.
  misc_feature (1)..(210): tr|A0A5C6ULX4|A0A5C6ULX4_9SPHN 7-carboxy-7-deazaguanine synthase OS=Sphingorhabdus sp. D-2Q-5-6 OX=2601267 GN= queE PE=3 SV=1
MAYAVKELFLTLQGEGVRSGRRAVFCRFAGCNLWSGREQDRASATCKFCDTDFVGTNGAGGGKFADAGALADAITGFWGDDAALRYVVLTGGEPMLQVDDALVDALHDRGFEIAIETNGTLAVPRSIDWICVSPKAGSTTVQRSGDELKLVWPQPGSDIDAMEGWDFVHRLIQPMDDARSAENMRACVDLVIERPHWRLSLQTHKLLGIR

SEQ ID NO: 34350 - protein, 212 aa, Sphingorhabdus wooponensis
  misc_feature (1)..(212): tr|A0A426RU85|A0A426RU85_9SPHN 7-carboxy-7-deazaguanine synthase OS=Sphingorhabdus wooponensis OX=940136 GN=qu eE PE=3 SV=1
MSYAVKEIFLTLQGEGVHAGRRAVFLRFSGCNLWTGREEDRASAICQFCDTDFVGMDGENGGRYDAEALAAKVAALWGDGTENRYVVITGGEPMLQVDDAIVDALHAQAFQIAIESNGTIEVHPGIDWVCISPKAGSDVIHRRGDELKLVWPQPASNIDAMEQWQFAHFLIQPMDAGDLGVNAANVAEATRFVMERPKWRLSLQNHKILGLP

SEQ ID NO: 34351 - protein, 208 aa, Sphingosinicella ginsenosidimutans
  misc_feature (1)..(208): tr|A0A5C6TP92|A0A5C6TP92_9SPHN 7-carboxy-7-deazaguanine synthase OS=Sphingosinicella ginsenosidimutans OX=1176 539 GN=queE PE=3 SV=1
MTYAVKEMFLTLQGEGMQAGRRAVFLRMAGCNLWSGREIDRPTAQCRFCDTDFVGTDGENGGRYAAGALADRAAALWGEGDRPLVVITGGEPTLQLDAALIDALHAAGFEIAIETNGTLPAPAGLDWICVSPKAGTEIVQRRGNELKLVWPQTGIDPAALLGWDFDHFLIQPMDCADAVAARAAAIDYVMRHPRWALSLQTHKLLGLP

SEQ ID NO: 34352 - protein, 210 aa, Sphingosinicella microcystinivorans
  misc_feature (1)..(210): tr|A0A495RX52|A0A495RX52_SPHMI 7-carboxy-7-deazaguanine synthase OS=Sphingosinicella microcystinivorans OX=335 406 GN=queE PE=3 SV=1
MTYTVKELFLTLQGEGAQTGRRAVFLRFSGCNLWSGLERDRAGAVCTFCDTDFIGTDGPGGGKFADAEALADAVAAAWGMGAEHRLVVCTGGEPLLQLDPALIDALHAREFSIAIETNGTLPAPAGIDWICVSPKADAELVQTSGDELKLVYPQPNNSPEMFEQLDFRNFFLQPMDGPAQAENIAAATDYCLTHPKWRLSLQTHKLIGIP

SEQ ID NO: 34353 - protein, 210 aa, Sphingosinicella sp.
  misc_feature (1)..(210): tr|A0A2P7QJ25|A0A2P7QJ25_9SPHN 7-carboxy-7-deazaguanine synthase OS=Sphingosinicella sp. GL-C-18 OX=2116704 GN =queE PE=3 SV=1
MSYAVKEIFLTLQGEGVQAGRRAVFLRFAGCNLWSGREQDRARAQCTFCDTDFVGTDGENGGRYDADGLVAMVSSLWGEEGRVRRLVVITGGEPMLQLDAALIDALHRAGFEIAMESNGTLAAAAGIDWICVSPKAGTEVVQRSGNELKLVWPQRGLDPQAMLAWDFEHFLIQPLDDTAAPANVQAAIDYVMANPRWRLSLQTHKLLGLP

SEQ ID NO: 34354 - protein, 210 aa, Sphingosinicella sp.
  misc_feature (1)..(210): tr|A0A4P6FT85|A0A4P6FT85_9SPHN 7-carboxy-7-deazaguanine synthase OS=Sphingosinicella sp. BN140058 OX=1892855 G N=queE PE=3 SV=1
MSYAVKEIFLTLQGEGLQAGRRAVFLRFAGCNLWSGREQDRATAQCTFCDTDFVGTDGENGGRYDAERLVDTVAALWGAESMARRLVVVTGGEPMLQLDAALIDALHGAGFEIAMESNGTLASADGIDWICISPKAGTSIVQRSGDELKLVWPQVGIDPEAMLGWDFRHFLIQPLDAADAASNRQAAIDYVMANPRWRLSLQTHKLLGLP

SEQ ID NO: 34355 - protein, 228 aa, Spiribacter salinus
  misc_feature (1)..(228): tr|A0A540VN03|A0A540VN03_9GAMM 7-carboxy-7-deazaguanine synthase OS=Spiribacter salinus OX=1335746 GN=queE PE= 3 SV=1
MLDVVAIFSTIQGEGPFSGVPAVFIRLAGCNLQCPFCDTDYTSGRRELNNALLVDAVRSEHPLGVGLVVITGGEPFRQDIGKLIACLVDQGYAVQVETNGTLPPSDLTRYGLEWLVQPRSPLTGAYIVCSPKTGKVHEDVVARACAFKYVIDAWHVDPDDGLPTSVLGHTVKDKVARPPAWWDRPVYIQPADEQDAQCNTLNTDVAIASAMDHGYTLQLQIQKYLGME

SEQ ID NO: 34356 - protein, 243 aa, Spirobacillus cienkowskii
  misc_feature (1)..(243): tr|A0A369KV06|A0A369KV06_9PROT 7-carboxy-7-deazaguanine synthase OS=Spirobacillus cienkowskii OX=495820 GN=que E PE=3 SV=1
MHASFLVNEMYPCLQGEGVNLGKPSLLVRFQICNLRCSWCDTPYTHTFKSDPVSSTEPKGIQKFTRHSLNELVTKIQSFKVNHLILSGGEPTLHNIGLLMRSLGSNYTAEVESNGTRIPHLQIPNFLNSDYFLMQWNISPKFSNANEKINSEALEHWAKLSLQYDQIYFKFVIRKQEAIEDLNEVLKIISKFNISKHKVLLMPEGTNIESQICNVWLHDICLKHSFRYTPRLHVLLFGNLRGV

SEQ ID NO: 34357 - protein, 287 aa, Spirochaeta sp.
  misc_feature (1)..(287): tr|A0A2D7DMS8|A0A2D7DMS8_9SPIO 7-carboxy-7-deazaguanine synthase OS=Spirochaeta sp. OX=28185 GN=queE PE=3 SV=1
  misc_feature (84)..(84): Xaa can be any naturally occurring amino acid
  misc_feature (206)..(206): Xaa can be any naturally occurring amino acid
  misc_feature (262)..(262): Xaa can be any naturally occurring amino acid
  misc_feature (270)..(270): Xaa can be any naturally occurring amino acid
MASRRTLNASRKSSPRSPWDAQRWNARSMETDPQGNLVEVFWSAQGEGTFVGRPTVFVRFGGCDLRCRWCDSAYTWHPVESCRXEMEPGNQSFASEANPIRMTRILEAIQQLEPQPGSFISLTGGEPLLQPEFAGALAQACQERGWQTHLETHGLDPEGLERVLPSIDLVAMDWKLAGEVKPAASASVTQEDFYRLHREFMALATXQARVNVKVVLTSQTSADDLTAVCQSVSELAPEAALILQPVSEIGSSRPPDPRTLMXLLRHCERXVADVRLIPQTHKVYGAL

SEQ ID NO: 34358 - protein, 262 aa, Spirochaetaceae bacterium; identical to SEQ ID NO: 31197
  misc_feature (1)..(262): tr|A0A2E8PWV7|A0A2E8PWV7_9SPIO 7-carboxy-7-deazaguanine synthase OS=Spirochaetaceae bacterium OX=1898206 GN=qu eE PE=3 SV=1

SEQ ID NO: 34359 - protein, 242 aa, Spirochaetaceae bacterium
  misc_feature (1)..(242): tr|A0A2E9Q8E7|A0A2E9Q8E7_9SPIO 7-carboxy-7-deazaguanine synthase OS=Spirochaetaceae bacterium OX=1898206 GN=qu eE PE=3 SV=1
MKKIENRSIIGDSQLTEREATADRDSGSSERFLKLSEVYGTLQGEGSHSGLPCFFLRLAVCDIRCSWCDTPDSWTGGAWKSRAEILAMIPDNMQLVQITGGEPVLQMKRLRLLMEDLHERGKKILLETGGHRNLSEVPEFVHIIMDIKLPSSGEDGHPFEDNFPYLKATDEIKFVVQDERDFRAAVDWIERHNLDRRFQLLVSPVPGLDLKKLAAWVLETKLTMRLQVQLHKYIWGPDAKMV

SEQ ID NO: 34360 - protein, 217 aa, Spirochaetae bacterium
  misc_feature (1)..(217): tr|A0A2N1T9Z8|A0A2N1T9Z8_9SPIR 7-carboxy-7-deazaguanine synthase OS=Spirochaetae bacterium HGW-Spirochaetae-1 OX=2013832 GN=queE PE=3 SV=1
MKLIVKEIFFSLQGETTTTGFPSLFIRLTGCNLRCRYCDSEYAWNGGSEMEIAAIMAKIHNETGIHHITITGGEPLCQENVRYLIKNLCDGGYNVQIETNGSLPLEKIDARARKIVDVKTPSSGEDSSFLMENLTCLNPHDEIKFVIGDTTDYNFARDFTRKHLEKLDSTVNFSPVYGNITYNTMASWILRDRLMVRLNLQLHKIAELETDGEKNFL

SEQ ID NO: 34361 - protein, 209 aa, Spirochaetae bacterium
  misc_feature (1)..(209): tr|A0A2N1RPB5|A0A2N1RPB5_9SPIR 7-carboxy-7-deazaguanine synthase OS=Spirochaetae bacterium HGW-Spirochaetae-5 OX=2013837 GN=queE PE=3 SV=1
MKLKVYEIFYSIQGETTTAGFPSLFIRLAGCNLNCSWCDTVKAKDGGREMDVEDIIDEVNRNKPFHHVTLTGGEPLIQDGALHLLQRLSEEGYTTQVETNGTVLYGTIPDNVRIVTDVKTPSSGEAGSFRDENISHLSKNDEVKFVIAMMEDYEFAKSFVKDKLKNSEAVINFSPASGMMEPWVLANLIIKDKLPVRLNIQLHKIAKFA

SEQ ID NO: 34362 - protein, 214 aa, Spirochaetales bacterium
  misc_feature (1)..(214): tr|A0A2E9KWV0|A0A2E9KWV0_9SPIR 7-carboxy-7-deazaguanine synthase OS=Spirochaetales bacterium OX=2026792 GN=que E PE=3 SV=1
MKLRVNEIFQSIQGEGIQIGAPTIFLRLFGCDLRCAWCDSMHAVEGSDYQNITLDDIIQEAESHDCKNICITGGEPLLQQDVLVPLIDILIQKKYNILLETSGHIRPNEIFYNPNVLISMDCKCPGSTMEKKTDFSILESLQEKDQIKFVINDKSDYEYAKQIITHRHFRATIVFQPVYGTDISFLVDLALKDNLNIKVLPQLHKLIWGDIRGV

SEQ ID NO: 34363 - protein, 238 aa, Spirochaetes bacterium
  misc_feature (1)..(238): tr|A0A522D3T2|A0A522D3T2_9SPIR 7-carboxy-7-deazaguanine synthase OS=Spirochaetes bacterium OX=2202144 GN=queE PE=3 SV=1
MHERIRAGVQLKARAKTVRNTADDRLLVHGIFLSIEGETTTAGFPSAFVRLAGCNLTCSWCDTPEAREGGARMSVDEVVKKVARLGAVHHVTLTGGEPLLQGNSIPLIRKLLAARRNVQVETNGSIPLDAVPPHARIIADVKTPSSGCAGSFVLRNLEFLKASDEIKFVIAGGGDYRFAKRFIKKYLAESAAVVNLSPVSDRMRPDELARLILNDRLRCRLNLQLHTIIWPGGEPKDL

SEQ ID NO: 34364 - protein, 219 aa, Spirochaetes bacterium
  misc_feature (1)..(219): tr|A0A1G3LH67|A0A1G3LH67_9SPIR 7-carboxy-7-deazaguanine synthase OS=Spirochaetes bacterium GWB1_27_13 OX=18021 73 GN=queE PE=3 SV=1
MLEIVEKFITISGEAPTIGEPIFLIRLSGCNLTCSYCDTTYNNEVNEYISSDNLKNEIIENVQDFPELKVLFTGGEPLLKERQEDIFAIINDLKYINFYIETNGSVPITNFTLPNCYFVADWKSPTSKNEIDFYLDNLKHFRIDKDCIKFVVSKDDLHWLKTKISHINKINPFLPLYVSPQFNKITLEEIADFIIKNKLPLKMSFQFHKIIWPLKDRGV

SEQ ID NO: 34365 - protein, 210 aa, Spirochaetia bacterium
  misc_feature (1)..(210): tr|A0A3D3AJ97|A0A3D3AJ97_9SPIR 7-carboxy-7-deazaguanine synthase OS=Spirochaetia bacterium OX=2053615 GN=queE PE=3 SV=1
MKLKINEIFYSLQGEGSASGYPFIFIRFSNCNLRCLYCDTKFSFNEGEELPVKEVTERISYLPSVDHILITGGEPLLQKEGLLELLKELFVMKKKIFIETNGSVDISFLPREIVKIIDVKTPSSGYPSSFHIENLKYLTEKDDMKFVISDKEDFDFSVRFIEEHRLINKINLIFSPVYKVLEKEKLAQWILESGLPVRFSIQLHKLLKMK

SEQ ID NO: 34366 - protein, 219 aa, Spirochaetia bacterium
  misc_feature (1)..(219): tr|A0A352VVQ2|A0A352VVQ2_9SPIR 7-carboxy-7-deazaguanine synthase OS=Spirochaetia bacterium OX=2053615 GN=queE PE=3 SV=1
MAAEEKALPPFFLLISEIFFSIEGETEFQGLPCIFVRTAGCNLSCSYCDSPGSRSFSSGRELAITDILTIIKKYACSLICITGGEPLLQKDINPLLEILIKNNYQVLLETNGSRSVADLPAGIIKIIDVKTPSSGQAENFYRKNLLFLEGKDHLKYIIGCREDFDFTLDFIAKNHLEEKINIVQPVYGKLAVNDLAGWVLDCGKKIRVQIQLHKLAGLP

SEQ ID NO: 34367 - protein, 216 aa, Spirosoma endophyticum
  misc_feature (1)..(216): tr|A0A1I1VY91|A0A1I1VY91_9BACT 7-carboxy-7-deazaguanine synthase OS=Spirosoma endophyticum OX=662367 GN=queE P E=3 SV=1
MLLEQKQQTIITSTEPTASLPVMEAFYTLQGEGAHTGRAAYFIRLGGCEVGCHWCDVKESWDVNVHPKIPIDTIVDGALQHPGRMAVITGGEPLMHDLTRLTATLQMAGFQTNIETSGVCKAVTGSWDWICFSPKKFKKPNPDIYRKADELKVIIYNQSDFAFAESFVHELRPNCKLFLQSEWSRSNEMLPLIVDYVKNNPQWQISLQTHKYLDIP

SEQ ID NO: 34368 - protein, 216 aa, Spirosoma fluviale
  misc_feature (1)..(216): tr|A0A286FFG3|A0A286FFG3_9BACT 7-carboxy-7-deazaguanine synthase OS=Spirosoma fluviale OX=1597977 GN=queE PE=3 SV=1
MLLTQEQQTKQTDNQSTTALPVMEAFYTLQGEGAHTGRAAYFIRLGGCDVGCHWCDVKESWDADAHPKQTIDALVQGALQYPGRMAVITGGEPLMHDLTELTEALQTAGFQTNIETSGVCQTVTGSWDWICFSPKKFKKPNPAIYERADELKVIIYNQSDFAFAESFVPYLRPDCKLFLQSEWGRSNEMLPRIVDYVKDHPQWQISLQTHKFLDIP

SEQ ID NO: 34369 - protein, 216 aa, Spirosoma linguale
  misc_feature (1)..(216): tr|D2QQX5|D2QQX5_SPILD 7-carboxy-7-deazaguanine synthas e OS=Spirosoma linguale (strain ATCC 33905 / DSM 74 / L MG 10896) OX=504472 GN=queE PE=3 SV=1
MLLTQEQQTKQTDNQSTIALPVMEAFYTIQGEGAHTGRAAYFIRLGGCDVGCHWCDVKESWDADAHPKQSIDALVKGALQYPGRLAVITGGEPLMHDLTALTEALQVAGFKTNIETSGVCQTVTGSWDWICFSPKKFKKPNPAIYEKADELKVIIYNQSDFAFAESFVPYLRPDCKLFLQSEWGRSNEMLPRIVDYVKDHPQWQISLQTHKFLNIP

SEQ ID NO: 34370 - protein, 211 aa, Spirosoma montaniterrae
  misc_feature (1)..(211): tr|A0A1P9WTG6|A0A1P9WTG6_9BACT 7-carboxy-7-deazaguanine synthase OS=Spirosoma montaniterrae OX=1178516 GN=queE PE=3 SV=1
MVSEQQQQTRQTNTLPVMEAFYTLQGEGVHTGRAAYFIRLGGCDVGCHWCDVKESWDVNAHPHHTVDNIVAGALDYPGRLAVITGGEPLMHDLTNLTAALQTAGFQTNIETSGVCEAVTGSWDWICFSPKKFKKPNPAIFEQADELKVIVYNQSDFAFAESFVPFLRPGCTLFLQTEWSRSNEMLPRIVQYIKEHPQWQLSLQTHKYLDIP

SEQ ID NO: 34371 - protein, 209 aa, Spirosoma oryzae
  misc_feature (1)..(209): tr|A0A2T0SLX2|A0A2T0SLX2_9BACT 7-carboxy-7-deazaguanine synthase OS=Spirosoma oryzae OX=1469603 GN=queE PE=3 S V=1
MLTEQQTTDTTTLPVMEAFYTLQGEGAHTGRAAYFIRLGGCDVGCHWCDVKESWDASLHPQLSIDQIVAGAAAHPGRMAVITGGEPLMHDLTTLTNALQTAGFSTNIETSGVCTAVTGSWNWICFSPKKFKKPNPAIYGLANELKVIIYNASDFAFAESFVPHLRPDCKLFLQTEWSRSNEMLPRIVDYVKNNPQWQISLQTHKYMDIP

SEQ ID NO: 34372 - protein, 219 aa, Spirosoma pollinicola
  misc_feature (1)..(219): tr|A0A2K8Z7H0|A0A2K8Z7H0_9BACT 7-carboxy-7-deazaguanine synthase OS=Spirosoma pollinicola OX=2057025 GN=queE P E=3 SV=1
MLLTQKKQPIEMNSLLAVEATALPVMEAFYTIQGEGAHTGRAAYFIRLGGCDVGCHWCDVKESWDAEAHPKLSIDSLVDGALQYPGRMAVITGGEPLMHDLTELTAALQTAGFQTNIETSGVCQAVTGSWDWICFSPKKFKKPNPAIYDKADELKVIIYNQSDFAFAESFVPYLRPGCKLFLQTEWSRSNEMLPRIVDYVKDHPQWQISLQTHKYLDIP

SEQ ID NO: 34373 - protein, 194 aa, Spirosoma radiotolerans
  misc_feature (1)..(194): tr|A0A0E4A050|A0A0E4A050_9BACT 7-carboxy-7-deazaguanine synthase OS=Spirosoma radiotolerans OX=1379870 GN=queE PE=3 SV=1
MEAFYTIQGEGAHTGRAAYFIRLGGCDVGCHWCDVKESWDASVHPKLSIDSLVAGALQYPGRMAVITGGEPLMHDLTDLTASLQAAGFRTNIETSGVCQVVTGSWDWICFSPKKFKKPNPAIYTQADELKVIIYNQSDFAFAESFAPHLRPDCKLFLQTEWSRSNEMLPRIVEYVKDHPQWQISLQTHKYLDIP

SEQ ID NO: 34374 - protein, 214 aa, Spirosoma sp.
  misc_feature (1)..(214): tr|A0A4Q2UJV1|A0A4Q2UJV1_9BACT 7-carboxy-7-deazaguanine synthase OS=Spirosoma sp. TY50 OX=2502893 GN=queE PE=3 SV=1
MLLEQKQQPSTDLLTSSLPVMEAFYTLQGEGAHTGRAAYFIRLGGCDVGCHWCDVKESWDVNAHPQRTIDAIVTGALAYPGRMAVITGGEPLMHNLTPLTRALQTAGFRTNIETSGVCEAVTGSWDWICFSPKKFKKPNPAIFERADELKVIVYNQSDFAFAESFVPSLRPDCKLFLQTEWSRSNEMLPRIVEYVKDHPQWQLSLQTHKYLDIP

SEQ ID NO: 34375 - protein, 194 aa, Spirosoma sp.
  misc_feature (1)..(194): tr|A0A515AAG0|A0A515AAG0_9BACT 7-carboxy-7-deazaguanine synthase OS=Spirosoma sp. KCTC 42546 OX=2520506 GN=que E PE=3 SV=1
MEAFYTLQGEGAHSGRAAYFIRLGGCDVGCFWCDVKESWDADAHPKLTINSIVDGALQYPGRMAVITGGEPLMHDLSELTSALQSAGFQTNIETSGVCQAVTGSWDWICFSPKKFKAPNPDIYNKANELKVIIYNQSDFAFAESFVPHLRPDCRLFLQTEWGRSNEMLPRIVEYVKDHPQWQISLQTHKYMDIP

SEQ ID NO: 34376 - protein, 215 aa, Spongiibacter sp.
  misc_feature (1)..(215): tr|A0A2D7WE96|A0A2D7WE96_9GAMM 7-carboxy-7-deazaguanine synthase OS=Spongiibacter sp. OX=2024860 GN=queE PE=3 SV=1
MSASLRITEIFYSLQGESRTIGLPTVFVRLTGCPLRCTYCDTEYAFHGGERRSIDDILAQVASYSPRYICVTGGEPLAQPECLTLLRALCDAGYEVSLETSGAMPVADVDPRVSKVVDLKTPASGEQHRNLMENLDHLGANDQVKFVICDRDDYDWARFQVDQHRLPERVGEVLFSPSFEQLPARDLADWIIDDNLPVRFQLQLHKLLWQDAPGH

SEQ ID NO: 34377 - protein, 215 aa, Spongiibacter sp.
  misc_feature (1)..(215): tr|A0A2E9SQP2|A0A2E9SQP2_9GAMM 7-carboxy-7-deazaguanine synthase OS=Spongiibacter sp. OX=2024860 GN=queE PE=3 SV=1
MSASLRITEIFYSLQGESRSIGLPTVFVRLTGCPLRCVYCDTEYAFHGGERQSIDQIVAKVESYAPRYVCVTGGEPLAQPDCLPLLTALCDAGYEVSLETSGAMPVDAVDSRVSRVVDLKTPASGEQHRNLMDNLPHLGANDQIKFVICDRGDYDWARFQLDQYQLNKKVGEVLFSPSFEQLPARQLADWIVEDNLPVRFQLQLHKLLWQDAAGH

SEQ ID NO: 34378 - protein, 218 aa, Spongiibacteraceae bacterium
  misc_feature (1)..(218): tr|A0A2E7IN38|A0A2E7IN38_9GAMM 7-carboxy-7-deazaguanine synthase OS=Spongiibacteraceae bacterium OX=2026793 GN =queE PE=3 SV=1
MTESDNSLRITEIFYSLQGESLTVGLPTVFVRLTGCPLRCQYCDTAYAFHGGERRSQQEILAQVAAHSPRYICVTGGEPLAQPACIPLLTALCDVGYQVSLETSGAMPVGAVDPRVARIVDIKTPDSAECEKNLWDNIDLLTDHDQLKFVICSRSDYEWARFQLDSRQLAARVGQVLFSPSFGQINATELANWIIEDNLPVRFQLQLHKLLWNDEPGH

SEQ ID NO: 34379 - protein, 216 aa, Spongiibacteraceae bacterium
  misc_feature (1)..(216): tr|A0A2E2K3S3|A0A2E2K3S3_9GAMM 7-carboxy-7-deazaguanine synthase OS=Spongiibacteraceae bacterium OX=2026793 GN =queE PE=3 SV=1
MTDTSLRITEIFYSLQGEALTVGLPTVFVRLTGCPLRCQYCDTEYAFHGGERLTQAQVLEQVAAFSPRYICVTGGEPLAQPSCIPLLSALCDAGYQVSLETSGAMPIDKVDARVSRVLDLKTPDSAESSRNLWDNIPLLTKHDQVKFVICSRRDYDWARLQLDQYRLNERAGEVLFSPSFGQQNATELADWIVQDNLPVRFQLQLHKLLWNDEPGH

SEQ ID NO: 34380 - protein, 213 aa, Sporocytophaga myxococcoides
  misc_feature (1)..(213): tr|A0A098LMT0|A0A098LMT0_9BACT 7-carboxy-7-deazaguanine synthase OS=Sporocytophaga myxococcoides OX=153721 GN= queE PE=3 SV=1
MSIKQDLNKILEHSGSILPVMESFYTIQGEGFFQGHAAYFIRLAGCDVGCHWCDVKESWEIKGHPVYSVEEIAQAGSAHPGRVAVITGGEPLIYPLEQLTESLKKFQFRTHIETSGAYPLSGNWDWICLSPKKFKAPHQSVIENTDELKIIVFNKSDFDWAEQFARQVKPECKLYLQPEWSKQNEVLPLIIEYVKSNPQWNISLQIHKFMNIP

SEQ ID NO: 34381 - protein, 245 aa, Sporolactobacillus sp.
  misc_feature (1)..(245): tr|A0A4Q4IPJ9|A0A4Q4IPJ9_9BACL 7-carboxy-7-deazaguanine synthase OS=Sporolactobacillus sp. THM7-4 OX=2511170 G N=queE PE=3 SV=1
MKTIAEFDLPAREVYGKWKLPMVEIFETIEGEGMYQGFPTVFVRSFHCNLRCKWCDTPYSFAPAKPAFEARVDEIVDKVASFNSRRICFTGGEPLIHRQKSAALIKALADLDQIIDIHIETNGAIDLAPFARMRKRDAVLMKKMRFVMDYKLAASGESEKMITDNFNCLLNQDEIKFVIGSDEDFEQAKKVMARFHKKGQVLFSPVWETMEPRRLVEKVLADPLPQVKISMQLHKIIWDPNRRGV

SEQ ID NO: 34382 - protein, 245 aa, Sporolactobacillus sp.
  misc_feature (1)..(245): tr|A0A4Q4J648|A0A4Q4J648_9BACL 7-carboxy-7-deazaguanine synthase OS=Sporolactobacillus sp. THM7-7 OX=2511172 G N=queE PE=3 SV=1
MKTTAEFQLPAREVYGKWSLPMVEIFETVEGEGMSQGFPTVFVRSFHCNLRCKWCDTPYSFAPAKPAFEATIDEIVRKVARYSSRRICFTGGEPLIHRQKSAALIQALARLDHIVDVHIETNGAIDLGPFARMREKDPLLMKKMRFVMDYKLAASGETKKMIRDNFDSLLDQDEIKFVIGSDEDFDQAKTVIERFHKKGQVLFSPVWASMPPKRLVEKVLVEPLPQVKVSLQLHKIIWDPNERGV

SEQ ID NO: 34383 - protein, 196 aa, Sporolituus thermophilus
  misc_feature (1)..(196): tr|A0A1G7NX05|A0A1G7NX05_9FIRM 7-carboxy-7-deazaguanine synthase OS=Sporolituus thermophilus DSM 23256 OX=1123 285 GN=queE PE=3 SV=1
MSAVVYPVIEIFESIQGEGTHMGMPAAFIRLAGCNLRCKWCDTANAFDLKNATYLAPSHIVAKIKQKLVVITGGEPTLHDLKPLVAALHERGKYVAVETNGTNPIPEEWGIDWITASPKPGSGYLLACQADELKYVVDDEFTLDCVAYDAVPPGRIFLQVESGRKESAQKAFALVMKNPERGLRLGIQLHKILGVE

SEQ ID NO: 34384 - protein, 194 aa, Sporomusa acidovorans
  misc_feature (1)..(194): tr|A0A259UIS6|A0A259UIS6_9FIRM Anaerobic ribonucleoside -triphosphate reductase-activating protein OS=Sporomusa acidovorans DSM 3132 OX=1123286 GN=queE_3 PE=3 SV=1
MNPQEKTKGGLINLAAFLPASRSNGPGLRAVVWVQGCERRCPGCFNPDMQEFRKKELVPAAELVKRICALPGIEGVTFSGGEPFAQAGALARLAERLAVQGLTIVIFTGYTFAELTAQPNPAWQQLLAAADLLVAGPYREDLPSQDYLLGSANQQLVFLTDKLKHHPDFAENKGQTMEVIVDAAGNVITTGLVK

SEQ ID NO: 34385 - protein, 441 aa, Sporomusa acidovorans
  misc_feature (1)..(441): tr|A0A259V167|A0A259V167_9FIRM 7-carboxy-7-deazaguanine synthase OS=Sporomusa acidovorans DSM 3132 OX=1123286 GN=queE_1 PE=4 SV=1
MPDLTNQCETILPVENPALRDYLKIYQAIDLDFLEQIQAAGLAVDVPAGRPAADKIKRLKSLGAIGRNADKSLYSNWLSPACAACRQGIDSISLYLSLMCPRHCYYCFNPNQEAYSYYLANQRDCIRELAALYKANQKLKYIALTGGEPLLHHRETIEFFRYAKSNFKRVHTRLYTAGDLLDRPLLQQLQETQLDEIRFSIKLEDSAATIRQIYEHICWAKEYIPHVLVEMPVIPGSLQKMRHLLRDLDELGVTGINLLEFCFPFHNAAEFRKRSFTIKNPPFQVLYNYRYAGGLPVSQSETACLELIEFAIREKLRLGVHYCSLENKFTEQIYQQNSRHYKLFPLTYFSPHDFFLKTAKVFGDDIPTALRELKSHKTSPYRLDKKYGYLEIPVQAVPRLKKLDLAIGLCSHIIENREGKPCLRELKVDVIRTGGFDIRQL

SEQ ID NO: 34386 - protein, 241 aa, Sporomusa malonica
  misc_feature (1)..(241): tr|A0A1W2A5Z5|A0A1W2A5Z5_9FIRM 7-carboxy-7-deazaguanine synthase OS=Sporomusa malonica OX=112901 GN=queE PE=3 SV=1
MSNIVEIFSSIQGEGLYVGTRQIFVRFAGCNLSCAYCDTPDSRNLCKFALVERTPGKQDFEKIPNPLPIDHLAQMINSLLTVKHHSISLTGGEPLGQADSIVKLAPKLHAPIYLETNGTMFDKLAQVLPHIHIISMDIKLPSAAGKAYWQEHDKFLRLASTKELFVKLVITKQTNSDEFKQAVDLIASANTSIPLILQPVTPCNGCETVTPATMLAYQEQALEILENVRVIPQTHKFMGQL

SEQ ID NO: 34387 - protein, 200 aa, Sporomusa silvacetica
  misc_feature (1)..(200): tr|A0A259UC74|A0A259UC74_9FIRM 7-carboxy-7-deazaguanine synthase OS=Sporomusa silvacetica DSM 10669 OX=1123289 GN=queE PE=3 SV=1
MGKIDILYPIIEIFSSIQGEGFHMGKGATFIRVAGCNLRCSWCDTGYSFDLSTSKWMSVGDILAAECFSHHHVVITGGEPTLYNLEPLVRALHKLGKYVAIETNGTNSIPVEWGIDWITASPKPASGFALSCQADELKYVVDDEFSIDVISNHAVPAGRIFLQIESGRQESLQKAYDLINRYPELQLRLGIQMHKVLNFK

SEQ ID NO: 34388 - protein, 200 aa, Sporomusa sp.
  misc_feature (1)..(200): tr|A0A0U1L3W9|A0A0U1L3W9_9FIRM 7-carboxy-7-deazaguanine synthase OS=Sporomusa sp. An4 OX=411922 GN=queE PE=3 S V=1
MGTIDILYPIIEIFSSIQGEGFHMGKGATFIRVAGCNLRCSWCDTGYSFDLSKSKWMNVDEIVAAECFSHHHVVITGGEPSLYNLEPLVRALHKLGKYVAIETNGTNPIPVEWGIDWITASPKPANGFALACRADELKYVVDDEFSIDVISKHNVPEGRIFLQIESGRQESLQKAYDLINRYPELQLRLGIQMHKVLNFR

SEQ ID NO: 34389 - protein, 198 aa, Sporomusa sp.
  misc_feature (1)..(198): tr|A0A562GRC5|A0A562GRC5_9FIRM 7-carboxy-7-deazaguanine synthase OS=Sporomusa sp. KB1 OX=943346 GN=queE PE=3 S V=1
MVDILYPIIEIFSSIQGEGFHMGKGATFIRVAGCNLRCSWCDTGYSFDLSKSKWMSVDAIVAAEHFSHQLVVITGGEPTLYNLEPLVRALHKLGKYVTIETNGTNPIPVEWGIDWITASPKPANGFALSCRADELKYVVDDEFSIDVISKHDVPEGRIFLQIESGRQESLQKAYDLINRYPELQLRLGIQMHKVLNFR

SEQ ID NO: 34390 - protein, 241 aa, Sporomusa sphaeroides
  misc_feature (1)..(241): tr|A0A1U7MM05|A0A1U7MM05_9FIRM 7-carboxy-7-deazaguanine synthase OS=Sporomusa sphaeroides DSM 2875 OX=1337886 GN=queE PE=3 SV=1
MLNLVEIFSSIQGEGLYVGTRQIFVRFAGCNLTCTYCDTPDSRQFSGQALVERTPGERDFIRIANPVAIDSVAQMINSLLTIRHHSISLTGGEPLCQAKMLAELAPKLNAPLYLETNGTLFEQLAVVLPYIDIVSMDIKLPGTSGKHYWQEHHEFLRLAAAKEVFVKIVIAAQSSKEEIHQAFNLVAGIDDTIPVILQPVTPVNGCEAVSPDNMLAYQAQALALLKNVRVIPQTHKLMGQL

SEQ ID NO: 34391 - protein, 243 aa, Sporomusa termitida
  misc_feature (1)..(243): tr|A0A517DTH3|A0A517DTH3_9FIRM 7-carboxy-7-deazaguanine synthase OS=Sporomusa termitida OX=2377 GN=queE PE=3 S V=1
MANIIELFSSIQGEGLYVGTRQIFVRFAGCNLACDYCDTPASRTLCGHALVETVPGQRIFEKITNPVPIADLARRINSFLTVRHHSISLTGGEPLGQAESIIRLAPQLNSPIYLETNGTLVEKLALVLPYIHIISMDLKLPSVTGNSYWQQHYEFLRLATAKDKEVFVKLVITGQTGEHEFKQAIDLVAAVRTSIPFILQPVTPCNASTAVTPDIMLAYQAEALKQLENVRVIPQTHKFMGQL

SEQ ID NO: 34392 - protein, 197 aa, Sporomusaceae bacterium
  misc_feature (1)..(197): tr|A0A3C0UDC6|A0A3C0UDC6_9FIRM 7-carboxy-7-deazaguanine synthase OS=Sporomusaceae bacterium OX=1917525 GN=queE PE=3 SV=1
MSTQYPIVEVFESIQGEGTFLGLGASFIRLAGCNLRCPWCDTKHSFDVQAASLLSVDAILGTWRFTQPLVVITGGEPTLHDLGPLVRELKKLGKFVTLETNGTNPVPNEWGIDWVTVSPKPGSNYAINCRADELKYVVDDDFEIGVIQTERVPLQRIYLQVESGRPESASRAFTLVTMNPDLHLRVGVQLHKVLHVE

SEQ ID NO: 34393 - protein, 244 aa, Sporomusaceae bacterium
  misc_feature (1)..(244): tr|A0A402BQP0|A0A402BQP0_9FIRM 7-carboxy-7-deazaguanine synthase OS=Sporomusaceae bacterium OX=1917525 GN=queE PE=3 SV=1
MTNAINLVEVFSSIQGEGEYVGCRQVFVRLAGCNLQCNYCDTPTSRQIPDTCRIEGNAGQRDFIEVANPMNPEALAAVINGLLDKPHHSVSFTGGEPLCQAEALNQVAGKIKGKTYLETNGTLPVELEKVIDNIDIISMDIKLPVTTGCPLWEEHRQFLELALAKNVFVKLVIDAGIDIDHFDQAVHLVAAVSTEIPLILQPVTPINDCKAIDPDQVIELQSRALNILKNVKVIPQTHKFLGQL

SEQ ID NO: 34394 - protein, 243 aa, Sporosarcina globispora
  misc_feature (1)..(243): tr|A0A0M0GG35|A0A0M0GG35_SPOGL 7-carboxy-7-deazaguanine synthase OS=Sporosarcina globispora OX=1459 GN=queE PE =3 SV=1
MSKIPVLEIFGPTIQGEGMVIGQKTMFVRTAGCDYSCSWCDSSFTWDGSAKDSIRQMEPDEIWKKLKKLGGDGFSFVTISGGNPALLKNMNEFISLLKAEQMKICLETQGSRWQDWFYEIDELTLSPKPPSSGMNTDFEVLDLIVNNLQTSRKIKQQFSLKIVIFDDEDYEYAKNVHQRYPGIPFYLQVGNDDTVTADDRNLLQRLLDKYEWLIDKTIHDSDLTDVKVLPQLHTYVWGNKRGV

SEQ ID NO: 34395 - protein, 240 aa, Sporosarcina pasteurii
  misc_feature (1)..(240): tr|A0A380C272|A0A380C272_SPOPA 7-carboxy-7-deazaguanine synthase OS=Sporosarcina pasteurii OX=1474 GN=queE PE= 3 SV=1
MTIPVLEIFGPTIQGEGMVIGQKTMFVRTAGCDYSCSWCDSKFTWDGSEKKNIRKMNAKEILDALIEEGGDRFGHVTISGGNPGLLPQLNSLVDLLHAQGIKIALETQGSRWQPWFTKIDELTLSPKPPSSGMQTDFSVLDQIIESLSIEQKGTFSLKIVVFDDEDLGYARKVHQRYPTVELFIQVGNDDLQKANEAELLVHLLERYERLIDQVMADKELKHVRVLPQLHTYLWGNKRGV

SEQ ID NO: 34396 - protein, 235 aa, Sporosarcina psychrophila
  misc_feature (1)..(235): tr|A0A127VXV0|A0A127VXV0_SPOPS 7-carboxy-7-deazaguanine synthase OS=Sporosarcina psychrophila OX=1476 GN=queE PE=3 SV=1
MKIPVMEVFGPTIQGEGMVMGLKTMFVRTAGCDYSCSWCDSSFTWDGSGKSTSKQPAEIIDELKAIGGQSFSHVTISGGNPALHKGIGELVDLCHEQGWKVAVETQASFWQDWLLKIDDITLSPKPPSSGMVTDFSKLDTFMEKLIETTATLKVVIFDEKDFKFAEEVHLRYPAFPFFLQTGNDDTTTTDDALLVSTLLQRYEWLIDLTVHSPIMNDAKVLPQLHTLLWGNKRGV

SEQ ID NO: 34397 - protein, 235 aa, Sporosarcina sp.
  misc_feature (1)..(235): tr|A0A135WAN1|A0A135WAN1_9BACL 7-carboxy-7-deazaguanine synthase OS=Sporosarcina sp. HYO08 OX=1759557 GN=queE PE=3 SV=1
MKIPVMEVFGPTIQGEGMVIGQKTMFVRTAGCDYSCAWCDSSFTWDGTGKSVSKRPQEIIDELKTIGGQSFSHVTISGGNPALHKGIGELVDLCHAEGWKVAVETQATFWQDWLLKIDDITLSPKPPSSKMITDFDKLDLFMEKLSDTNASLKIVIFDEEDFKFAEEVHLRYPSVPFYLQVGNDDTTTTDDAVLIPHLLKRFEWLIDLAVASPIMNDVKVLPQLHALVWGNRRGV

SEQ ID NO: 34398 - protein, 235 aa, Sporosarcina sp.
  misc_feature (1)..(235): tr|A0A5B0DKI2|A0A5B0DKI2_9BACL 7-carboxy-7-deazaguanine synthase OS=Sporosarcina sp. ANT_H38 OX=2597358 GN=que E PE=3 SV=1
MKIPVMEVFGPTIQGEGMVMGLKTMFVRTAGCDYSCNWCDSSFTWDGSGKSTSKQPVEIIDELKAIGRQSFSHVTISGGNPALHKGIGELVELCHEQGWKVAVETQASFWQDWLLNIDDITLSPKPPSSGMTTDFGKLDSFMEKLIDSNTSLKVVIFNEEDFKFAEEVHLRYPAFPFFLQTGNEDTTTTDDTLLVSTLLQRYEWLIDLTVHSPIMNDAKVLPQLHTLLWGNKRGV

SEQ ID NO: 34399 - protein, 211 aa, Stakelama pacifica
  misc_feature (1)..(211): tr|A0A4R6FTM9|A0A4R6FTM9_9SPHN 7-carboxy-7-deazaguanine synthase OS=Stakelama pacifica OX=517720 GN=queE PE=3 SV=1
MSYAVKEMFLTLQGEGVHAGRRAVFVRFAGCNLWTGREADRASAICRFCDTDFVGMDGPGGGRFADATALAGAAAVTWGDAARGERFVVLTGGEPMLQIDDALIDALHDQGFAIAMESNGTIAAHPGIDWVCISPKAGSEVVQRRGDELKLVWPQDHIDIDSLEHWDFANFLVQPMDSAAREENLRAAIAFAMARPRWRLTLQTHKMLGLP

SEQ ID NO: 34400 - protein, 200 aa, Stanieria cyanosphaera
  misc_feature (1)..(200): tr|K9XVJ7|K9XVJ7_STAC7 7-carboxy-7-deazaguanine synthas e OS=Stanieria cyanosphaera (strain ATCC 29371 / PCC 74 37) OX=111780 GN=queE PE=3 SV=1
MDTVTYPIVETFHSVQGEGAWTGVNAFFIRLGGCDVGCFWCDTKQSWNAKRHPQRQVQDLAEEVRNAHPAIAVITGGEPLMHNLYPLTAAIKSLGIRVHLETSGAHPFSGDFDWVTFSPKQFKPPHQSVYSHVSELKVVIAKSEDLIWAEQQASLVSPETLKYLQPEWNTPSSKDLIFEYILKHPQWRISLQTHKLLEVR

SEQ ID NO: 34401 - protein, 202 aa, Stanieria sp.
  misc_feature (1)..(202): tr|A0A140K2C4|A0A140K2C4_9CYAN 7-carboxy-7-deazaguanine synthase OS=Stanieria sp. NIES-3757 OX=1807358 GN=queE PE=3 SV=1
MKTVTVTYPIVETFHSVQGEGAWTGVNAFFIRLGGCDVGCPWCDTKQSWNAKRHSQRPVQDLAEEVQIANPAIAVITGGEPLMHDLKPLTAAIKSLGIRVHLETSGAHPFSGDFDWVTFSPKQFKPPHPSIYHQVSELKVVIAKSEDLIWAQQQASLVSPQTLKYLQPEWNTPASKDLIFEYVLRHPQWRISLQTHKLLEVR

SEQ ID NO: 34402 - protein, 237 aa, Staphylococcus agnetis
  misc_feature (1)..(237): tr|A0A2T4MU41|A0A2T4MU41_9STAP 7-carboxy-7-deazaguanine synthase OS=Staphylococcus agnetis OX=985762 GN=queE P E=3 SV=1
MVKIPVLEIFGPTIQGEGRVIGRKTMFVRTAGCDFRCSWCDSKFTWDGSAKDEIRMMTPEAILHELKAIGGNQFNHVTISGGNPALIKGIQALVDLFQSQDIQTALETQGSKYQPWMRQINDLTVSPKPPSSGMKQNLDILDSVIDQCIPETMNLKVVIFNDDDYHFAQTIHHRYPHLPFYLQVGNPYLETDVDHHTDKLLARYETLIDRVMTDPSMNNVFVLPQLHTLLWSNKKGV

SEQ ID NO: 34403 - protein, 237 aa, Staphylococcus agnetis
  misc_feature (1)..(237): tr|A0A2T4MLD3|A0A2T4MLD3_9STAP 7-carboxy-7-deazaguanine synthase OS=Staphylococcus agnetis OX=985762 GN=queE P E=3 SV=1
MVKIPVLEIFGPTIQGEGRVIGRKTMFVRTAGCDFRCSWCDSKFTWDGSAKDEIRMMTPEAILHELKAIGGNQFNHVTISGGNPALIKGIQALVDLFQSQDIQTALETQGSKYQPWMRQINDLTVSPKPPSSGMKQNLDILDSVIDQCIPETLNLKVVIFNDDDYHFAQTIHHRYPHLPFYLQVGNPYLETDVDHHTDKLLARYETLIDRVMTDPSMNNVFVLPQLHTLLWSNKKGV

SEQ ID NO: 34404 - protein, 238 aa, Staphylococcus argensis
  misc_feature (1)..(238): tr|A0A2K4FDK3|A0A2K4FDK3_9STAP 7-carboxy-7-deazaguanine synthase OS=Staphylococcus argensis OX=1607738 GN=queE PE=3 SV=1
MAKIPVLEIFGPTIQGEGKVIGRKTMFVRTAGCDYRCDWCDSSFTWDGSAKDEIRMMTAEEVYEELKEVGGDYFNHVTISGGNPALIKAIQDLVDLFQEKGIYTALETQGSKYQPWMRQIDDLTISPKPPSSMMKPNLPLLDEVIEQCVHDTLNLKVVIFEEADFDFAKMIHHRYPSIPFYLQVGNPYLEGEHVDNHTEKLLSLYEHLVDRVMKSSEMNDVYVLPQLHTLLWSNTKGV

SEQ ID NO: 34405 - protein, 237 aa, Staphylococcus argenteus
  misc_feature (1)..(237): tr|A0A348B966|A0A348B966_9STAP 7-carboxy-7-deazaguanine synthase OS=Staphylococcus argenteus OX=985002 GN=queE PE=3 SV=1
MAKIPVLEIFGPTIQGEGRVIGRKTMFVRTAGCDYRCSWCDSAFTWDGSAKGDIKLMTAEEIYDELKHIGGEQFNHVTISGGNPALIKGIQELVDLFQDKGIYSALETQGSKFQPWMTQIDDLTISPKPPSSTMTPDLNKLDEVIQQCVPSSLNLKVVVFDDNDYEFAKMIHHRYPDIPFYLQVGNPYLSESVNNHTAKLLERYEQLVDLVMQSSDMNHVYVLPQLHTLLWSNKKGV

SEQ ID NO: 34406 - protein, 238 aa, Staphylococcus arlettae
  misc_feature (1)..(238): tr|A0A2T7BWG2|A0A2T7BWG2_9STAP 7-carboxy-7-deazaguanine synthase OS=Staphylococcus arlettae OX=29378 GN=queE P E=3 SV=1
MAKIPVLEIFGPTIQGEGSVIGRKTMFVRTAGCDYRCSWCDSSFTWDGSAKEDIRMMTAAEIYEELYAIGGELFNHVTISGGNPALIKGIQDLVDLFDSKNIQSALETQGSKFQPWMLQIDDLTISPKPPSSLMKPNLPILDNVIEQCHDEALSLKVVIFTDEDYDFAKMIHHRYPNIPFYLQVGNPYLDGEQVADHTSKLLSLYESLVNRVMGSADMNNVYVLPQLHTLLWSNKKGV

SEQ ID NO: 34407 - protein, 238 aa, Staphylococcus arlettae
  misc_feature (1)..(238): tr|A0A5F0TP08|A0A5F0TP08_9STAP 7-carboxy-7-deazaguanine synthase OS=Staphylococcus arlettae OX=29378 GN=queE P E=3 SV=1
MAKIPVLEIFGPTIQGEGSVIGRKTMFVRTAGCDYRCSWCDSSFTWDGSAKEDIRMMTAAEIYEELYAIGGELFNHVTISGGNPALIKGIQDLVDLFDSKNIQSALETQGSKFQPWMLQIDDLTISPKPPSSLMKPNLPILDNVIEQCHDEALSLKVVIFTDEDYDFAKMIHHRYPNIPFYLQVGNPYLDGEQVADHTSKLLSLYESLVNRAMGSADMNNVYVLPQLHTLLWSNKKGV

SEQ ID NO: 34408 - protein, 236 aa, Staphylococcus aureus
  misc_feature (1)..(236): tr|A0A033UVZ9|A0A033UVZ9_STAAU 7-carboxy-7-deazaguanine synthase OS=Staphylococcus aureus C0673 OX=1413510 GN= queE PE=3 SV=1
MPKIPVLEIFGPTIQGEGAVIGQKTMFVRTSGCDYRCSWCDSSFTWDGSAKDDIRLLEPEDIISELDQLAPNKYQHVTISGGNPALIKNIGPFVEALKARNIKTALETQGSKFQEWMTQIDDLTISPKPPSSGMKPNLTILDEVIAQCVEESLSLKVVIFDEADYQFAKDIHKRYPSIPFYLQVGNPYLDDSVSNHTEKLLEKYEQLIDKVMNDTLNDIFVLPQLHTLLWSNKKGV

SEQ ID NO: 34409 - protein, 77 aa, Staphylococcus aureus
  misc_feature (1)..(77): tr|A0A2S6D9W2|A0A2S6D9W2_STAAU 7-carboxy-7-deazaguanine synthase QueE (Fragment) OS=Staphylococcus aureus OX=1 280 GN=CSC87_17695 PE=4 SV=1
MKIPVLEIFGPTIQGEGAVIGRKTMFVRTAGCDFSCAWCDSKFTWDGTMKDEIEMLLPETIYERLQSIAPNQFNHVT

SEQ ID NO: 34410 - protein, 238 aa, Staphylococcus auricularis
  misc_feature (1)..(238): tr|A0A2T4M647|A0A2T4M647_9STAP 7-carboxy-7-deazaguanine synthase OS=Staphylococcus auricularis OX=29379 GN=que E PE=3 SV=1
MAKIPVLEIFGPTIQGEGRVIGRKTMFVRTAGCDYRCSWCDSSFTWDGSAKDQIKMMTAEEIYDELYRIGGDYFNHVTISGGNPALIKGIQELVDLFDEKGIHSALETQGSRFQPWMRQIDDLTISPKPPSSMMKPNLMTLDEVIEQCVPETLNLKVVVFDDTDFDFARDIHHRYPSIPFYLQVGNPYLDGEYIENHTARLLALYESLVDRVINTSDMNDVYVLPQLHTLLWSNKKGV

SEQ ID NO: 34411 - protein, 238 aa, Staphylococcus auricularis
  misc_feature (1)..(238): tr|A0A2K4C4B0|A0A2K4C4B0_9STAP 7-carboxy-7-deazaguanine synthase OS=Staphylococcus auricularis OX=29379 GN=que E PE=3 SV=1
MAKIPVLEIFGPTIQGEGRVIGRKTMFVRTAGCDYRCSWCDSSFTWDGSAKDQIKMMTAEEIYDELYRVGGDYFNHVTISGGNPALIKGIQELVDLFDEKGIHSALETQGSRFQPWMRQIDDLTISPKPPSSMMKPNLMTLDEVIEQCVPETLNLKVVVFDDTDFDFARDIHHRYPSIPFYLQVGNPYLDGEYIENHTARLLALYESLVDRVINTSDMNDVYVLPQLHTLLWSNKKGV

SEQ ID NO: 34412 - protein, 237 aa, Staphylococcus capitis
  misc_feature (1)..(237): tr|A0A0U1EI80|A0A0U1EI80_STACP 7-carboxy-7-deazaguanine synthase OS=Staphylococcus capitis OX=29388 GN=queE PE =3 SV=1
MAKIPVLEVFGPTIQGEGRVIGRKTMFVRTAGCDYRCSWCDSAFTWDGSAKEDIRLLTAEEIYEELLEVGGNHFNHVTISGGNPALIKGIQDLVDLFEEKNIYTALETQGSKFQPWMTQINDLTISPKPPSSMMKPNLNTLDSVIDQCVHDTLNLKVVIFNEEDYEFATMIHHRYPSIPFYLQVGNPYLEDEVENHTDKLLERYEKLVDRVMESDEMNHVYVLPQLHTLLWSNKKGV

SEQ ID NO: 34413 - protein, 237 aa, Staphylococcus capitis
  misc_feature (1)..(237): tr|A0A4U9TJ46|A0A4U9TJ46_STACP 7-carboxy-7-deazaguanine synthase OS=Staphylococcus capitis OX=29388 GN=queE PE =3 SV=1
MAKIPVLEVFGPTIQGEGRVIGRKTMFVRTAGCDYRCSWCDSAFTWDGSAKEDIRLLTAEEIYEELLEVGGNHFNHVTISGGNPALIKGIQDLVDLFEEKNIYTALETQGSKFQPWMTQINDLTISPKPPSSMMKPNLDILDSVIEQCIDDTLNLKVVIFNEEDYEFAKMIHHRYPSIPFYLQVGNPYLEDEVEHHTDKLLERYEKLVDRVMESDDMNHVYVLPQLHTLLWSNKKGV

SEQ ID NO: 34414 - protein, 237 aa, Staphylococcus caprae
  misc_feature (1)..(237): tr|C5QQ79|C5QQ79_9STAP 7-carboxy-7-deazaguanine synthas e OS=Staphylococcus caprae M23864:W1 OX=525378 GN=queE PE=3 SV=1
MAKIPVLEVFGPTIQGEGRVIGRKTMFVRTAGCDYRCSWCDSAFTWDGSAKEDIRLLSAEEIYEELREVGGDNFNHVTISGGNPALIKGIQDLVDLFEEKNIYTALETQGSKFQPWMTQINDLTISPKPPSSTMKPNLDILDSVIEQCVHHTLNLKVVIFNEEDYEFAKMIHHRYPSIPFYLQVGNPYLEDDVEHHTYKLLERYEKLVDRVMESSDMNHVYVLPQLHTLLWSNKKGV

SEQ ID NO: 34415 - protein, 237 aa, Staphylococcus carnosus
  misc_feature (1)..(237): tr|A0A380F9G1|A0A380F9G1_STACA 7-carboxy-7-deazaguanine synthase OS=Staphylococcus carnosus subsp. utilis OX=1 47449 GN=queE PE=3 SV=1
MAKIPVLEIFGATIQGEGRVIGRKTMFVRTAGCDYHCSWCDSKFTWDGSAKDQIEMMTAEEIYHQLKEVGGDYFNHVTISGGNPALIKGIQELVDLFEDKNIETALETQGSRYQPWMRQINNLTISPKPPSSGMKPNLEILDDVIAQCVLESLNLKVVIFEDKDFEFAKEIHHRYPSIPFYLQVGNPYLEDEVENHTERLLKRYENLVETVMVSSEMNDVYVLPQLHTLLWSNKKGV

SEQ ID NO: 34416 - protein, 237 aa, Staphylococcus carnosus
  misc_feature (1)..(237): tr|B9DK39|B9DK39_STACT 7-carboxy-7-deazaguanine synthas e OS=Staphylococcus carnosus (strain TM300) OX=396513 G N=queE PE=3 SV=1
MAKIPVLEIFGPTIQGEGRVIGRKTMFVRTAGCDYHCSWCDSKFTWDGSAKDQIEMMTAEEIYHQLKEVGGDYFNHVTISGGNPALIKGIQELVDLFEDKNIETALETQGSRYQPWMRQINDLTISPKPPSSGMKPNLEILDDVIAQCVLESLNLKVVIFEDKDFEFAKEIHHRYPSIPFYLQVGNPYLEDEVENHTERLLKRYENLVETVMVSSEMNDVYVLPQLHTLLWSNKKGV

SEQ ID NO: 34417 - protein, 237 aa, Staphylococcus chromogenes
  misc_feature (1)..(237): tr|A0A2T4M0R0|A0A2T4M0R0_STACR 7-carboxy-7-deazaguanine synthase OS=Staphylococcus chromogenes OX=46126 GN=que E PE=3 SV=1
MVKIPVLEIFGPTIQGEGRVIGRKTMFVRTAGCDFRCSWCDSKFTWDGSAKEDIRLMTPEAIYEELKTIGGDYFNHVTISGGNPALIKGIQSLVDLLQTHQIYTALETQGSKFQPWMRQIDDLTISPKPPSSGMHQNLEVLDKVIEQCVTSTLNLKVVVFDEADYTFAQSIHQRYPHLPFYLQVGNPFLQEEVDHHTDKLLMRYETLIDRVMTDASMNNVYVLPQLHTLLWSNKKGV

SEQ ID NO: 34418 - protein, 238 aa, Staphylococcus cohnii; identical to SEQ ID NO: 29431
  misc_feature (1)..(238): tr|A0A3A0JDK7|A0A3A0JDK7_9STAP 7-carboxy-7-deazaguanine synthase OS=Staphylococcus cohnii OX=29382 GN=queE PE= 3 SV=1

SEQ ID NO: 34419 - protein, 238 aa, Staphylococcus cohnii; identical to SEQ ID NO: 28254
  misc_feature (1)..(238): tr|A0A0M2P2B4|A0A0M2P2B4_STACC 7-carboxy-7-deazaguanine synthase OS=Staphylococcus cohnii subsp. cohnii OX=747 04 GN=queE PE=3 SV=1

SEQ ID NO: 34420 - protein, 237 aa, Staphylococcus condimenti
  misc_feature (1)..(237): tr|A0A143PCL1|A0A143PCL1_9STAP 7-carboxy-7-deazaguanine synthase OS=Staphylococcus condimenti OX=70255 GN=queE PE=3 SV=1
MAKIPVLEIFGPTIQGEGRVIGRKTMFVRTAGCDYHCSWCDSKFTWDGSAKDQIEMMTAEEIFHQLKEVGGDYFNHVTISGGNPALIKGIQELVDLFEEKNIETALETQGSRYQPWMRQINDLTISPKPPSSGMKPNLEILDDVIAQCVPESLNLKVVIFEDEDFNFAKEIHHRYPDIPFYLQVGNPYLEDKVEKHTERLLERYENLVETVMHSSEMNKVYVLPQLHTLLWSNQKGV

SEQ ID NO: 34421 - protein, 74 aa, Staphylococcus condimenti
  misc_feature (1)..(74): tr|A0A4Q7CMM9|A0A4Q7CMM9_9STAP 7-carboxy-7-deazaguanine synthase QueE (Fragment) OS=Staphylococcus condimenti OX=70255 GN=EIG99_11710 PE=4 SV=1
DFNFAKEIHHRYPDIPFYLQVGNPYLEDKVEKHTERLLERYENLVETVMHSSEMNKVYVLPQLHTLLWSNQKGV

SEQ ID NO: 34422 - protein, 237 aa, Staphylococcus delphini
  misc_feature (1)..(237): tr|A0A2A4GWL9|A0A2A4GWL9_9STAP 7-carboxy-7-deazaguanine synthase OS=Staphylococcus delphini OX=53344 GN=queE P E=3 SV=1
MAKIPVLEIFGPTIQGEGRVIGRKTMFVRTAGCDFRCSWCDSKFTWDGSMKDDIEMMEAEEILAQLRNIGGNRFNHVTISGGNPALIKGLQSFVDLCEANDIRTALETQGSQFKPWMRQINDLTLSPKPPSSGMQQNLPRLDEVIEQLDISRINLKVVVFDDADYDFAKMIHQRYPNIPFYLQVGNPYLEDHVEQHTAKLLDRYEQLIDRVTADAEMNEVFVLPQLHTLIWSNQKGV

SEQ ID NO: 34423 - protein, 237 aa, Staphylococcus delphini
  misc_feature (1)..(237): tr|A0A2A4HCM1|A0A2A4HCM1_9STAP 7-carboxy-7-deazaguanine synthase OS=Staphylococcus delphini OX=53344 GN=queE P E=3 SV=1
MAKIPVLEIFGPTIQGEGRVIGRKTMFVRTAGCDFRCSWCDSKFTWDGSMKDDIEMMEAEEILAQLRNIGGNRFNHVTISGGNPALIKGLQSFVDLCEANDIRTALETQGSQFKPWMRQINDLTLSPKPPSSGMQQNLPRLDEVIEQLDISRINLKVVVFDDADYDFAKMIHQRYPDIPFYLQVGNPYLEDHVEQHTAKLLERYEQLIDRVTTDAEMNEVFVLPQLHTLIWSNQKGV

SEQ ID NO: 34424 - protein, 238 aa, Staphylococcus devriesei
  misc_feature (1)..(238): tr|A0A2K4DUW0|A0A2K4DUW0_9STAP 7-carboxy-7-deazaguanine synthase OS=Staphylococcus devriesei OX=586733 GN=queE PE=3 SV=1
MASKIPVLEIFGPTIQGEGRVIGRKTMFVRTAGCDYRCSWCDSAFTWDGSAKDDIQLMTAEDIYHQLREVGGDQFDHVTISGGNPALIKGIQDLVDLFEEKNIYTALETQGSKFQPWMTQINDLTISPKPPSSNMKPNLEILDSVIEQCVQDSLNLKVVIFNDDDYEFAKMIHHRYPHLPFYLQVGNPYLDDSVANHTEKLLARYESLVDTVMQSSDMNHVYVLPQLHTLLWSNKKGV

SEQ ID NO: 34425 - protein, 238 aa, Staphylococcus devriesei
  misc_feature (1)..(238): tr|A0A2T4KB19|A0A2T4KB19_9STAP 7-carboxy-7-deazaguanine synthase OS=Staphylococcus devriesei OX=586733 GN=queE PE=3 SV=1
MAPKIPVLEIFGPTIQGEGRVIGRKTMFVRTAGCDYRCSWCDSAFTWDGSAKDEIQLMTAEDIYHQLREVGGDQFDHVTISGGNPALIKGIQDLVDLFEEKNIYTALETQGSKFQPWMTQINDLTISPKPPSSNMKPNLEILDSVIEQCVQNSLNLKVVIFNDKDYEFAKMIHHRYPHLPFYLQVGNPYLDDSEANHTEKLLARYESLVDTVMQSSDMNHVYVLPQLHTLLWSNKKGV

SEQ ID NO: 34426 - protein, 238 aa, Staphylococcus edaphicus
  misc_feature (1)..(238): tr|A0A2C6WSE5|A0A2C6WSE5_9STAP 7-carboxy-7-deazaguanine synthase OS=Staphylococcus edaphicus OX=1955013 GN=que E PE=3 SV=1
MSKIPVLEIFGPTIQGEGRVIGRKTMFVRTAGCDYRCSWCDSSFTWDGSAKEDIRMMTAEEIYDALYEIAGDAFNHVTISGGNPALIKGIQQLVDLFDNKGIQSALETQGSKFQPWMTQIDDLTISPKPPSSKMKPNLPILDEVIEQCVPETLNLKVVIFDDEDYQFAKMIHHRYPTIPFYLQVGNPYLDGEHVEAHTEKLLSLYETLVDRVMISSDMNNVYVLPQLHTLLWSNKKGV

SEQ ID NO: 34427 - protein, 212 aa, Staphylococcus epidermidis
  misc_feature (1)..(212): tr|Q5HR22|Q5HR22_STAEQ 7-carboxy-7-deazaguanine synthas e OS=Staphylococcus epidermidis (strain ATCC 35984 / RP 62A) OX=176279 GN=queE PE=3 SV=1
MFVRTAGCDYRCSWCDSAFTWDGSAKEDIKLMTAEEIYDALLEIGGHRFNHVTISGGNPALIKGIQELVDLFEDKHIYTALETQGSRFQSWMTQIDDLTISPKPPSSGMKTNLEILDSVINQCTFHSLNLKVVIFDDADYDFAKLIHHRYPNIPFYLQVGNPYLDDNVDQHTDKLLERYEQLVDRVMQSSDMNHVYVLPQLHTLLWSNKKGV

SEQ ID NO: 34428 - protein, 237 aa, Staphylococcus epidermidis
  misc_feature (1)..(237): tr|A0A4T0WLY8|A0A4T0WLY8_STAEP 7-carboxy-7-deazaguanine synthase OS=Staphylococcus epidermidis FS1 OX=1008454 GN=queE PE=3 SV=1
MAKIPVLEIFGPTIQGEGRVIGRKTMFVRTAGCDYRCSWCDSAFTWDGSAKEDIKLMTAEEIYDALLEIGGHRFNHVTISGGNPALIKGIQELVDLFEDKHIYTALETQGSRFQSWMTQIDDLTISPKPPSSGMKTNLEVLDSVINQCTFHSLNLKVVIFDDADYDFAKLIHHRYPNIPFYLQVGNPYLDDNVDQHTDKLLERYEQLVDRVMQSSDMNHVYVLPQLHTLLWSNKKGV

SEQ ID NO: 34429 - protein, 237 aa, Staphylococcus equorum
  misc_feature (1)..(237): tr|A0A431ZY60|A0A431ZY60_9STAP 7-carboxy-7-deazaguanine synthase OS=Staphylococcus equorum subsp. equorum OX=2 9383 GN=queE PE=3 SV=1
MTKIPVLEIFGPTIQGEGRVIGRKTMFVRTAGCDYRCSWCDSAFTWNGSAKEEIRLLTAKEIYKELRQVGGDNFDHVTISGGNPALIKGIQNLVNLFEEKDIYTALETQGSKFQPWMTQINDLTISPKPPSSNMIPDLDILDSVIEKCVHETLNLKVVVFNEEDYKFAKVIHHRYPSIPFYLQVGNPYLDDDVEHHTDKLLSKYEELVHRVIKSSDMNHVYVLPQLHTLLWSNKKGV

SEQ ID NO: 34430 - protein, 238 aa, Staphylococcus equorum
  misc_feature (1)..(238): tr|A0A1B1G4R7|A0A1B1G4R7_9STAP 7-carboxy-7-deazaguanine synthase OS=Staphylococcus equorum OX=246432 GN=queE P E=3 SV=1
MSKIPVLEIFGPTIQGEGRVIGRKTMFVRTAGCDYRCSWCDSSFTWDGSAKEDIRMMTAEEIYDSLYEIAGDSFNHVTISGGNPALIKGIQDLVDLFETKNIYSALETQGSKFQPWMTQIDDLTISPKPPSSKMKPNLPILDEVIENCIPASLNLKVVIFDDQDYDFAKMIHHRYPTIPFYLQVGNPYLDGDYVESHTEKLLSLYETLVNRVMASSDMNNVYVLPQLHTLLWSNKKGV

SEQ ID NO: 34431 - protein, 237 aa, Staphylococcus felis
  misc_feature (1)..(237): tr|A0A3E0IGZ4|A0A3E0IGZ4_9STAP 7-carboxy-7-deazaguanine synthase OS=Staphylococcus felis OX=46127 GN=queE PE=3 SV=1
MAKIPVLEIFGPTIQGEGRVVGRKTMFVRTAGCDFRCSWCDSKFTWDGSMKDAIQMMTADEIFESLKLIGGDCFNHVTISGGNPALIKGLQSFVDLCHSQNIKTALETQGSHFKPWMRQIDDLTISPKPPSSGMTHDLNILDGVINQCDENKINLKVVIFDETDYQFAKIIHHRYPDLPFYLQVGNPYLDDQVEHHTSKLLSRYEWLIQLVMKSSDMNDVFVLPQLHTLVWSNQKGV

SEQ ID NO: 34432 - protein, 237 aa, Staphylococcus felis
  misc_feature (1)..(237): tr|A0A2K3Z2M3|A0A2K3Z2M3_9STAP 7-carboxy-7-deazaguanine synthase OS=Staphylococcus felis OX=46127 GN=queE PE=3 SV=1
MAKIPVLEIFGPTIQGEGRVVGRKTMFVRTAGCDFRCSWCDSKFTWDGSMKDAIQMMTADEIFESLKLIGGDCFNHVTISGGNPALIKGLQSFVDLCHSQNIKTALETQGSHFKPWMRQIDDLTISPKPPSSGMTHDLNILDGVIDQCDESKINLKVVIFDETDYQFAKIIHHRYPDLPFYLQVGNPYLDDQVEHHTSKLLSRYEWLIQLVMKSSDMNDVFVLPQLHTLVWSNQKGV

SEQ ID NO: 34433 - protein, 237 aa, Staphylococcus fleurettii
  misc_feature (1)..(237): tr|A0A3S0M9Q1|A0A3S0M9Q1_9STAP 7-carboxy-7-deazaguanine synthase OS=Staphylococcus fleurettii OX=150056 GN=que E PE=3 SV=1
MAKIPVLEIFGPTIQGEGRVIGRKTMFVRTAGCDFRCSWCDSKFTWDGSMKDEIRMMSAEAIFDQLKAIGGDRFNHVTISGGNPALIKGIQALIDVCQSHGVHTALETQGSHFQPWMRQIDDLTISPKPPSSGMKQDLERLNHVIAQCDVSQINLKVVVFDDADYEFAKMIHHRYPHLPFYLQVGNPYLEDHVEHHTQKLLEHYEQLIDRVTEDAEMNEVYVLPQLHTLVWSNKKGV

SEQ ID NO: 34434 - protein, 236 aa, Staphylococcus fleurettii
  misc_feature (1)..(236): tr|A0A380FUR4|A0A380FUR4_9STAP 7-carboxy-7-deazaguanine synthase OS=Staphylococcus fleurettii OX=150056 GN=que E PE=3 SV=1
MPKIPVLEIFGPTIQGEGSVIGRKTMFVRTSGCDYRCSWCDSSFTWDGSAKDDIRLLEPEDIISELDALAPNKYQHVTISGGNPALIKNIGPLVETLNDRGIKTALETQGSKFQAWMTLIDDLTISPKPPSSGMKPNLPILDEVITQCVQDSLSLKVVIFDEDDYQFAKDIHNRYPSIPFYLQVGNPYLDDSVSNHTEKLLEKYEQLIDKVMNDTLNDIYVLPQLHTLLWSNKKGV

SEQ ID NO: 34435 - protein, 238 aa, Staphylococcus gallinarum
  misc_feature (1)..(238): tr|A0A3A0W6V2|A0A3A0W6V2_STAGA 7-carboxy-7-deazaguanine synthase OS=Staphylococcus gallinarum OX=1293 GN=queE PE=3 SV=1
MSKIPVLEIFGPTIQGEGRVIGRKTMFVRTAGCDYRCSWCDSSFTWDGSAKDDIQLMTAEEIYSKLYEIAGDSFNHVTISGGNPALIKGIQSLVDLFDSKGIQSALETQGSKFQPWMTQIDDLTISPKPPSSKMKPNLPILDDVIAQCVPETLNLKVVIFDDEDYQFAKMIHHRYPTIPFYLQVGNPYLDGEYVESHTERLLSLYETLVDRVMSSPDMNNVYVLPQLHTLLWSNKKGV

SEQ ID NO: 34436 - protein, 238 aa, Staphylococcus gallinarum
  misc_feature (1)..(238): tr|A0A0D0RR91|A0A0D0RR91_STAGA 7-carboxy-7-deazaguanine synthase OS=Staphylococcus gallinarum OX=1293 GN=queE PE=3 SV=1
MSKIPVLEIFGPTIQGEGRVIGRKTMFVRTAGCDYRCSWCDSSFTWDGSAKEDIQLMTAEEIYDKLYEIAGDSFNHVTISGGNPALIKGIQSLVDLFDSKNIQSALETQGSKFQPWMTQIDDLTISPKPPSSKMKPNLPILDDVIAKCVPETLNLKVVIFDDEDYQFAKMIHHRYPEIPFYLQVGNPYLDGEYVESHTERLLTLYETLVDRVMASPDMNNVYVLPQLHTLLWSNKKGV

SEQ ID NO: 34437 - protein, 238 aa, Staphylococcus haemolyticus
  misc_feature (1)..(238): tr|Q4L4C8|Q4L4C8_STAHJ 7-carboxy-7-deazaguanine synthas e OS=Staphylococcus haemolyticus (strain JCSC1435) OX=2 79808 GN=queE PE=3 SV=1
MAAKIPVLEIFGPTIQGEGRVIGRKTMFVRTAGCDYRCSWCDSAFTWDGSAKEDIKLMTAEEIYNQLKKIGGDRFDHVTISGGNPALIKGIQDLVDLFEEKQIYTALETQGSKFQPWMRQINDLTISPKPPSSNMKPNIDILDSVIEQCIESTLNLKVVIFDDDDYEFAKMIHHRYPNIPFYLQVGNPYLDDDVDNHTEKLLSRYEALVDRVMASNDMNQVYVLPQLHTLLWSNKKGV

SEQ ID NO: 34438 - protein, 238 aa, Staphylococcus haemolyticus; identical to SEQ ID NO: 34437
  misc_feature (1)..(238): tr|A0A2A1K9K1|A0A2A1K9K1_STAHA 7-carboxy-7-deazaguanine synthase OS=Staphylococcus haemolyticus OX=1283 GN=que E PE=3 SV=1

SEQ ID NO: 34439 - protein, 238 aa, Staphylococcus hominis
  misc_feature (1)..(238): tr|A0A4Q9WQM1|A0A4Q9WQM1_STAHO 7-carboxy-7-deazaguanine synthase OS=Staphylococcus hominis OX=1290 GN=queE PE= 3 SV=1
MPSKIPVLEIFGPTIQGEGRVIGRKTMFVRTAGCDYRCSWCDSPFTWDGSAKDDIELLTAQDIYDRLKEIGGNQFDHVTISGGNPALIKGIQDLVDLFEEKNIFTALETQGSKFQPWMRQINDLTISPKPPSSNMVPNLEILDDVIEQCIPSTLNLKVVVFDKEDYQFARMIHHRYPNIPFYLQVGNPYLDDDVEHHTEKLLGRYETLVDTVMNSSDMNHVYVLPQLHTLLWSNKKGV

SEQ ID NO: 34440 - protein, 238 aa, Staphylococcus hominis
  misc_feature (1)..(238): tr|A0A533IXE2|A0A533IXE2_STAHO 7-carboxy-7-deazaguanine synthase OS=Staphylococcus hominis OX=1290 GN=queE PE= 3 SV=1
MPSKIPVLEIFGPTIQGEGRVIGRKTMFVRTAGCDYRCSWCDSAFTWDGSAKDDIELLTAQDIYDRLKEIGGNQFDHVTISGGNPALIKGIQDLVDLFEEKNIFTALETQGSKFQPWMRQINDLTISPKPPSSNMVPNLEILDDVIEQCIPSTLNLKVVVFDKEDYQFARMIHHRYPNIPFYLQVGNPYLDDDVEHHTEKLLGRYETLVDTVMNSSDMNHVYVLPQLHTLLWSNKKGV

SEQ ID NO: 34441 - protein, 237 aa, Staphylococcus hyicus
  misc_feature (1)..(237): tr|A0A0A8HUW8|A0A0A8HUW8_STAHY 7-carboxy-7-deazaguanine synthase OS=Staphylococcus hyicus OX=1284 GN=queE PE=3 SV=1
MVKIPVLEIFGPTIQGEGRVIGRKTMFVRTAGCDFRCSWCDSKFTWDGSAKDDIRMMTPEAILDELKAIGGNQFNHVTISGGNPALIKGIQALVDLFQSERIQTALETQGSKFQPWMRQINDLTVSPKPPSSGMKQNLDILDSVINQCVPETLNLKVVIFDEADYHFAQTIHHRYPHLPFYLQVGNPYLEADVDHHTDKLLLRYETLIDRVMTDASMNNVFVLPQLHTLLWSNKKGV

SEQ ID NO: 34442 - protein, 237 aa, Staphylococcus hyicus
  misc_feature (1)..(237): tr|A0A4U9ZI45|A0A4U9ZI45_STAHY 7-carboxy-7-deazaguanine synthase OS=Staphylococcus hyicus OX=1284 GN=queE PE=3 SV=1
MAKIPVLEIFGPTIQGEGRVIGRKTMFVRTAGCDYRCSWCDSAFTWDGSAKGDIKLMTAEEIYDELKRIGGDLFNHVTISGGNPALIKGIQELVDLFQDKGIFSALETQGSKFQPWMTQIDDLTISPKPPSSTMTPDLKKLDEVIAQCVPSSLNLKVVVFDDKDYDFAKMIHHRYPDIPFYLQVGNPYLSDSVDNHTEKLLERYEQLVDLVMQSNDMNHVYVLPQLHTLLWSNKKGV

SEQ ID NO: 34443 - protein, 242 aa, Staphylococcus intermedius
  misc_feature (1)..(242): tr|A0A380GAR2|A0A380GAR2_STAIN 7-carboxy-7-deazaguanine synthase OS=Staphylococcus intermedius NCTC 11048 OX=1 141106 GN=queE_1 PE=3 SV=1
MAKIPFLEVFGPTIQGEGMIIGKKTMFLRTYGCDYSCSWCDTKYTWDGSEKGNVRRNTAQEVFDLLVEEAGDKSFSHVTVSGGNPALIGKAMDEFIDICHKNGVKVGLETQGSIWRDWFLKIDDLTISPKPPSSLMKIDFNVLDDIVSKLLTHKVNFSLKIVYFNDKDKEYAKEVFNRYRDNNIPYYLSVGNESPYTDKDITKQLLNKLDELWNVVINEPEFNDVQALPQLHSIVWGNKRGV

SEQ ID NO: 34444 - protein, 237 aa, Staphylococcus intermedius
  misc_feature (1)..(237): tr|A0A380GB70|A0A380GB70_STAIN 7-carboxy-7-deazaguanine synthase OS=Staphylococcus intermedius NCTC 11048 OX=1 141106 GN=queE_2 PE=3 SV=1
MAKIPVLEIFGPTIQGEGKVIGRKTMFVRTAGCDFRCSWCDSKFTWDGSMKDEIEMMAAENILAQLRNIGGDRFNHVTISGGNPALIKGLQSFVDLCEANNIRTALETQGSQFKPWMRQINDLTLSPKPPSSGMQQDLPRLDEVILQLDVSRINLKVVVFDDADYDFAKMIHHRYPDIPFYLQVGNPYLEEHVEQHTAKLLERYEQLIDRVTADAEMNEVFVLPQLHTLVWSNQKGV

SEQ ID NO: 34445 - protein, 238 aa, Staphylococcus kloosii
  misc_feature (1)..(238): tr|A0A151A744|A0A151A744_9STAP 7-carboxy-7-deazaguanine synthase OS=Staphylococcus kloosii OX=29384 GN=queE PE =3 SV=1
MAKIPVLEIFGPTIQGEGRVIGRKTMFVRTAGCDYRCSWCDSSFTWDGSAKEDIRMMTAEEIYSELYEIGGDMFNHVTISGGNPALIKGIQELVDLFETKNIYSALETQGSKFQPWMTQIDDLTISPKPPSSKMKPNLLVLDEVIEQCKHDTLNLKVVIFDDEDYDFAKMIHHRYPSIPFYLQVGNPYLDGEHVAQHTEKLLSLYEDLVTRVMESSDMNNVYVLPQLHTLLWSNKKGV

SEQ ID NO: 34446 - protein, 236 aa, Staphylococcus lentus
  misc_feature (1)..(236): tr|A0A178PF50|A0A178PF50_STALE 7-carboxy-7-deazaguanine synthase OS=Staphylococcus lentus OX=42858 GN=queE PE= 3 SV=1
MPKIPVLEIFGPTIQGEGSVIGRKTMFVRTSGCDYRCSWCDSSFTWDGSAKDDIRLLEPEQILSELDQLAPNQYQHVTISGGNPALIKNIGPLVEAFKERKIQTALETQGSKFQEWMVDIDDLTISPKPPSSGMKPSLPILDDVISKCTKESLSLKVVIFDDEDYKFAKDIHARYPDIPFYLQVGNPYLDDSVSNHTEKLLSKYEELIDKVMNDTLNDIYVLPQLHTLLWRNKKGV

SEQ ID NO: 34447 - protein, 236 aa, Staphylococcus lentus
  misc_feature (1)..(236): tr|A0A4Y9K9C0|A0A4Y9K9C0_STALE 7-carboxy-7-deazaguanine synthase OS=Staphylococcus lentus OX=42858 GN=queE PE= 3 SV=1
MPKIPVLEIFGPTIQGEGSVIGRKTMFVRTSGCDYRCSWCDSSFTWDGSAKDDIRLLEPEQILSELDQLAPNQYQHVTISGGNPALIKNIGPLVEAFKERKIQTALETQGSKFQEWMVDIDDLTISPKPPSSGMKPSLPILDDVISKCTKESLSLKVVIFDDEDYKFAKDIHARYPDIPFYLQVGNPYLDDSVSNHTEKLLSKYEELIDKVMNDTLNDIYVLPQLHTLLWSNKKGV

SEQ ID NO: 34448 - protein, 238 aa, Staphylococcus lugdunensis
  misc_feature (1)..(238): tr|A0A133Q1C5|A0A133Q1C5_STALU 7-carboxy-7-deazaguanine synthase OS=Staphylococcus lugdunensis OX=28035 GN=que E PE=3 SV=1
MAAKIPVLEIFGPTIQGEGRVIGRKTMFVRTAGCDYRCSWCDSAFTWDGSAKDQIQLMSATEIYEKLIEIGGDCFDHVTISGGNPALIKGIQDLVDLFETEHIATALETQGSKFQPWMTQINDLTISPKPPSSSMTPNLEVLDQVIAQCVPQSLNLKVVVFDDEDYAFAKMIHHRYPDIPFYLQVGNPYLADDVANHTEKLLSRYEQLVEKVMHSNDMNRAYVLPQLHTLLWSNKKGV

SEQ ID NO: 34449 - protein, 237 aa, Staphylococcus lutrae
  misc_feature (1)..(237): tr|A0A1W6BN52|A0A1W6BN52_9STAP 7-carboxy-7-deazaguanine synthase OS=Staphylococcus lutrae OX=155085 GN=queE PE =3 SV=1
MAKIPVLEIFGPTIQGEGRVIGRKTMFVRTAGCDFRCSWCDSKFTWDGSMKDDIEMMEAEDILARLREIGGNRFNHVTISGGNPALIKGLQAFVDLCASHHIYTALETQGTKFQPWMRQINDLTLSPKPPSSGMQHNVHLLDGVINQLDPSRINLKVVVFDDKDYDFAKMIHHRYPDIPFYLQVGNPYLEDHVEQHTEKLLSRYEALIDQVTLDAEMNDVFVLPQLHTLIWSNMKGV

SEQ ID NO: 34450 - protein, 237 aa, Staphylococcus massiliensis
  misc_feature (1)..(237): tr|K9AME6|K9AME6_9STAP 7-carboxy-7-deazaguanine synthas e OS=Staphylococcus massiliensis S46 OX=1229783 GN=queE PE=3 SV=1
MAKIPVLEIFGPTIQGEGRVIGRKTMFVRTSGCDFRCSWCDSSFTWDGSMKDDVHLMTAEAIYDELKAIGGDCFNHVTISGGNPALIKGIQELVDLFEMKGIETALETQGSKFQPWMRQINDLTISPKPPSSGMDQNLDILKAVIAQCKKETVNLKVVIFEEDDYEYAKMIHHTFPVIPFYLQVGNPYLEDDVDNHTMKLLERYENLIDRVMKSDDMNNVYVLPQLHTLLWSNKKSV

SEQ ID NO: 34451 - protein, 238 aa, Staphylococcus microti
  misc_feature (1)..(238): tr|A0A0D6XTC8|A0A0D6XTC8_9STAP 7-carboxy-7-deazaguanine synthase OS=Staphylococcus microti OX=569857 GN=queE P E=3 SV=1
MTAKIPVLEIFGPTIQGEGQVIGRKTMFVRTAGCDFRCSWCDSKFTWDGSMRDDIEMLTAEDIWQRLKTIGGDCFDHVTISGGNPALIKNLQTFVNLCEAQHIQLALETQGTKFQPWMTQIHNLTISPKPPSSGMNQDLAQLDDVIAQCNQTALSLKVVVFDDDDLAFAQKIHQRYPNIPFYVQVGNPYLEDDVDNHTARLLERYEWLINKVMTNAEMNRVHVLPQLHTLLWSNLKGV

SEQ ID NO: 34452 - protein, 238 aa, Staphylococcus muscae
  misc_feature (1)..(238): tr|A0A240BWC3|A0A240BWC3_9STAP 7-carboxy-7-deazaguanine synthase OS=Staphylococcus muscae OX=1294 GN=queE PE=3 SV=1
MTAIIPVLEIFGPTIQGEGQVIGRKTMFVRTAGCDFRCSWCDSKFTWDGSMKDEIQMMTAEEIWERLTEIGGECFDHVTISGGNPALIKNLQAFVDLCETKHIQLALETQGTKFQPWMRQIHDLTISPKPPSSGMNQDLSQLDTVITQCVPTSLSLKVVVFDEADLTFAQTIHKRYPKTPFYLQVGNPYLEDTVEHHTERLLNRYEWLINKVMSNPTLNRVHVLPQLHTLLWSNLKGV

SEQ ID NO: 34453 - protein, 238 aa, Staphylococcus nepalensis
  misc_feature (1)..(238): tr|A0A291JN32|A0A291JN32_9STAP 7-carboxy-7-deazaguanine synthase OS=Staphylococcus nepalensis OX=214473 GN=que E PE=3 SV=1
MSKIPVLEIFGPTIQGEGRVIGRKTMFVRTAGCDYRCSWCDSSFTWDGSAKEDIRMMNAEEIYAALYDLAGESFNHVTISGGNPALIRGIQGLVDLFEEKGIQSALETQGSKFQPWMTQIDDLTISPKPPSSMMKPNLPILDDVIAKCVPETLNLKVVIFDDDDYEFAKMIHHRYPDIPFYLQVGNPYLDGEYVEAHTEKLLSLYETLVDRVMVSNDMNNVYVLPQLHTLLWSNKKGV

SEQ ID NO: 34454 - protein, 238 aa, Staphylococcus nepalensis; identical to SEQ ID NO: 29329
  misc_feature (1)..(238): tr|A0A2T4SCE9|A0A2T4SCE9_9STAP 7-carboxy-7-deazaguanine synthase OS=Staphylococcus nepalensis OX=214473 GN=que E PE=3 SV=1

SEQ ID NO: 34455 - protein, 237 aa, Staphylococcus pasteuri
  misc_feature (1)..(237): tr|A0A269XJE5|A0A269XJE5_9STAP 7-carboxy-7-deazaguanine synthase OS=Staphylococcus pasteuri OX=45972 GN=queE P E=3 SV=1
MAKIPVLEVFGPTIQGEGRVIGRKTMFVRTAGCDYRCSWCDSAFTWDGSAKEDIQLMSAEEIYNKLREVGGDNFNHVTISGGNPALIKGIQDLVDLFEEHHIQTALETQGSKFQPWMTQIDDLTISPKPPSSNMKPNLDILDSVIEQCVPESLNLKVVIFDEDDFEFAKMIHHRYPSIPFYLQVGNPYLDEEVDNHTSKLLQRYEQLVERVMTSSDMNNVYVLPQLHTLLWSNMKGV

SEQ ID NO: 34456 - protein, 237 aa, Staphylococcus pasteuri
  misc_feature (1)..(237): tr|A0A0M2NU01|A0A0M2NU01_9STAP 7-carboxy-7-deazaguanine synthase OS=Staphylococcus pasteuri OX=45972 GN=queE P E=3 SV=1
MAKIPVLEVFGPTIQGEGRVIGRKTMFVRTAGCDYRCSWCDSAFTWDGSAKEDIQLMTAEEIYAKLREVGGDNFNHVTISGGNPALIKGIQELVDLFETHHIQTALETQGSKFQPWMTQINDLTISPKPPSSKMKPNLDILDSVIEQCVPESLNLKVVIFEEDDFDFAKMIHHRYPTIPFYLQVGNPYLDDNVDNHTAKLLQRYESLVDRVMTSSDMNNVYVLPQLHTLLWSNMKGV

SEQ ID NO: 34457 - protein, 238 aa, Staphylococcus petrasii
  misc_feature (1)..(238): tr|A0A5F1B1S9|A0A5F1B1S9_9STAP 7-carboxy-7-deazaguanine synthase OS=Staphylococcus petrasii subsp. petrasii OX =1276937 GN=queE PE=3 SV=1
MAAKIPVLEIFGPTIQGEGRVIGRKTMFVRTAGCDYRCSWCDSAFTWDGSAKEDIQLMTAEEIYDQLREVGGDHFDHVTISGGNPALIKGIQDLVDLFEEKNIYTALETQGSKFQPWMTQIDDLTISPKPPSSTMTPNLDILDSVIEQCVHESLNLKVVIFDDKDYEFAKMIHHRYPTIPFYLQVGNPYLDDDVANHTEKLLERYEALVDTVMQSNDMNHVYVLPQLHTLLWSNKKGV

SEQ ID NO: 34458 - protein, 238 aa, Staphylococcus petrasii
  misc_feature (1)..(238): tr|A0A380G3S1|A0A380G3S1_9STAP 7-carboxy-7-deazaguanine synthase OS=Staphylococcus petrasii subsp. jettensis O X=1077965 GN=queE PE=3 SV=1
MAAKIPVLEIFGPTIQGEGRVIGRKTMFVRTAGCDYRCSWCDSAFTWDGSAKEDIQLMTAEEIYHQLREVGGDHFDHVTISGGNPALIKGIQDLVDLFEEKNIYTALETQGSKFQPWMTQIDDLTISPKPPSSTMTPNLDILDSVIEQCVHESLNLKVVIFDDKDYDFAKMIHHRYPTIPFYLQVGNPYLDDDVANHTEKLLERYEALVDTVMQSNDMNHVYVLPQLHTLLWSNKKGV

SEQ ID NO: 34459 - protein, 238 aa, Staphylococcus pettenkoferi
  misc_feature (1)..(238): tr|A0A2N6QLN0|A0A2N6QLN0_9STAP 7-carboxy-7-deazaguanine synthase OS=Staphylococcus pettenkoferi OX=170573 GN=q ueE PE=3 SV=1
MAKIPVLEIFGPTIQGEGKVIGRKTMFVRTAGCDYRCDWCDSSFTWDGSAKDEIRMMTAEEIYAELKEVGGDYFNHVTISGGNPALIKAIQDLVDLFQEKGVYTALETQGSKYQPWMRQIDDLTISPKPPSSMMKPNLPLLDEVIEQCVHDTLNLKVVIFEEADFDFAKMIHHRYPSIPFYLQVGNPYLEGEHVDNHTYKLLSLYEDLVDRVMKSSEMNDVYVLPQLHTLLWSNTKGV

SEQ ID NO: 34460 - protein, 237 aa, Staphylococcus piscifermentans
  misc_feature (1)..(237): tr|A0A239UD84|A0A239UD84_9STAP 7-carboxy-7-deazaguanine synthase OS=Staphylococcus piscifermentans OX=70258 GN =queE PE=3 SV=1
MAKIPVLEIFGPTIQGEGRVIGRKTMFVRTAGCDYHCSWCDSKFTWDGSAKEDIQMMTAEEIYQQLKEVGGDCFNHVTISGGNPALIKGIQALVDLFEEYGIETALETQGSRYQPWMRQINDLTISPKPPSSGMKPNLEILDSVIAQCVPESLNLKVVIFEDRDFEFAKKIHHRYPDIPFYLQVGNPYLEEEVENHTSRLLERYESLVETVMHSSDMNQAYVLPQLHTLLWSNQKGV

SEQ ID NO: 34461 - protein, 238 aa, Staphylococcus piscifermentans
  misc_feature (1)..(238): tr|A0A3S0M5W0|A0A3S0M5W0_9STAP 7-carboxy-7-deazaguanine synthase OS=Staphylococcus piscifermentans OX=70258 GN =queE PE=3 SV=1
MSKIPVLEIFGPTIQGEGRVIGRKTMFVRTAGCDYRCSWCDSSFTWDGSAKEDIRMMTAEEIYDSLYEIAGDSFNHVTISGGNPALIKGIQDLVDLFETKNIYSALETQGSKFQPWMTQIDDLTISPKPPSSKMKPNLPILDEVIENCIPASLNLKVVIFDDQDYDFAKMIHHRYPTIPFYLQVGNPYLDGDYVESHTEKLLSLYETLVDRVMASSDMNNVYVLPQLHTLLWSNKKGV

SEQ ID NO: 34462 - protein, 43 aa, Staphylococcus pseudintermedius
  misc_feature (1)..(43): tr|A0A317YNK6|A0A317YNK6_STAPS 7-carboxy-7-deazaguanine synthase QueE (Fragment) OS=Staphylococcus pseudinterm edius OX=283734 GN=DD902_14520 PE=4 SV=1
MAKIPVLEIFGPTIQGEGRVIGRKTMFVRTAGCDYRCSWCDSA

SEQ ID NO: 34463 - protein, 237 aa, Staphylococcus pseudintermedius
  misc_feature (1)..(237): tr|A0A166S3F5|A0A166S3F5_STAPS 7-carboxy-7-deazaguanine synthase OS=Staphylococcus pseudintermedius OX=283734 GN=queE PE=3 SV=1
MAKIPVLEIFGPTIQGEGRVIGRKTMFVRTAGCDFRCSWCDSKFTWDGSMKDDIEMMEAEEILAQLRNIGGNRFNHVTISGGNPALIKGLQSFVDLCEANDIRTALETQGSQFKPWMRQINDLTLSPKPPSSGMQQNLPRLDEVIEQLDISRINLKVVVFDDADYDFAKMIHQRYPDIPFYLQVGNPYLEEHVEQHTAKLLDRYEQLIDRVTADAEMNEVFVLPQLHTLIWSNQKGV

SEQ ID NO: 34464 - protein, 238 aa, Staphylococcus rostri
  misc_feature (1)..(238): tr|A0A2K3YS24|A0A2K3YS24_9STAP 7-carboxy-7-deazaguanine synthase OS=Staphylococcus rostri OX=522262 GN=queE PE =3 SV=1
MTAKIPVLEIFGPTIQGEGQVIGRKTMFVRTAGCDFRCSWCDSKFTWDGSMRDEIEMLTAEDIWQRLKAIGGDCFDHVTISGGNPALLKNLQSFVDLCDAQGIQLALETQGTKFQPWMRQIHDLTISPKPPSSGMDQDLAQLDNVIGQCNPSSLSLKVVVFDETDLAFAQKIHKRYPDLSFYLQVGNPYLEDDVEHHTERLLTRYEWLIDHVMTNPELNRVHVLPQLHTLLWSNLKGV

SEQ ID NO: 34465 - protein, 237 aa, Staphylococcus saccharolyticus; identical to SEQ ID NO: 34429
  misc_feature (1)..(237): tr|A0A380H9Y3|A0A380H9Y3_9STAP 7-carboxy-7-deazaguanine synthase OS=Staphylococcus saccharolyticus OX=33028 GN =queE PE=3 SV=1

SEQ ID NO: 34466 - protein, 237 aa, Staphylococcus saccharolyticus
  misc_feature (1)..(237): tr|A0A4Q8N0J4|A0A4Q8N0J4_9STAP 7-carboxy-7-deazaguanine synthase OS=Staphylococcus saccharolyticus OX=33028 GN =queE PE=3 SV=1
MTKIPVLEIFGPTIQGEGRVIGRKTMFVRTAGCDYRCSWCDSAFTWDGSAKEEIRLLTAKEIYKELRQVGGDNFDHVTISGGNPALIKGIQNLVNLFEEKDIYTALETQGSKFQPWMTQINDLTISPKPPSSNMIPDLDKLDSVIEKCVHETLNLKVVVFNEEDYKFAKVIHHRYPSIPFYLQVGNPYLDDDVEHHTDKLLSKYEELVHRVIKSSDMNHVYVLPQLHTLLWSNKKGV

SEQ ID NO: 34467 - protein, 238 aa, Staphylococcus saprophyticus
  misc_feature (1)..(238): tr|Q49VQ5|Q49VQ5_STAS1 7-carboxy-7-deazaguanine synthas e OS=Staphylococcus saprophyticus subsp. saprophyticus (strain ATCC 15305 / DSM 20229 / NCIMB 8711 / NCTC 7292 / S-41) OX=342451 GN=queE PE=3 SV=1
MSKIPVLEIFGPTIQGEGRVIGRKTMFVRTAGCDYRCSWCDSSFTWDGSAKEDIRMMSAEEIYDQLYHIAGDSFNHVTISGGNPALIKGIQQLVDLFDDKGIQSALETQGSKFQPWMTQIDDLTISPKPPSSKMKPNLPILDEVIEQCVPESLNLKVVIFDDEDYQFAKMIHHRYPTVPFYLQVGNPYLDGEHVEAHTEKLLSLYETLVDRVMVSSDMNNVYVLPQLHTLLWSNKKGV

SEQ ID NO: 34468 - protein, 238 aa, Staphylococcus saprophyticus
  misc_feature (1)..(238): tr|A0A4Y9KPU2|A0A4Y9KPU2_STASA 7-carboxy-7-deazaguanine synthase OS=Staphylococcus saprophyticus OX=29385 GN=q ueE PE=3 SV=1
MSKIPVLEIFGPTIQGEGRVIGRKTMFVRTAGCDYRCSWCDSSFTWDGSAKEDIRMMTAEEIYDALYEIAGDSFNHVTISGGNPALIKGIQQLVDLFDEKHIQSALETQGSKFQPWMTQIDDLTISPKPPSSKMKPNLPILDEVIEQCVPESLNLKVVIFDDEDYEFAKKIHHRYPAIPFYLQVGNPYLDGEYVESHTKKLLTLYETLVDRVMVSSDMNNVYVLPQLHTLLWSNKKGV

SEQ ID NO: 34469 - protein, 236 aa, Staphylococcus schleiferi
  misc_feature (1)..(236): tr|A0A3S0MPK7|A0A3S0MPK7_9STAP 7-carboxy-7-deazaguanine synthase OS=Staphylococcus schleiferi subsp. schleifer i OX=74707 GN=queE PE=3 SV=1
MPKIPVLEIFGPTIQGEGAVIGQKTMFVRTSGCDYRCSWCDSSFTWDGSAKDDIRLLEPEDIISELDQLAPNKYQHVTISGGNPALIKNIGPFVEALKARNIKTALETQGSKFQEWMTLIDDLTISPKPPSSGMKPNLTILDEVIAQCVEESLSLKVVIFDEADYQFAKDIHKRYPSIPFYLQVGNPYLDDSVSNHTEKLLEKYEQLIDKVMNDTLNDIFVLPQLHTLLWSNKKGV

SEQ ID NO: 34470 - protein, 237 aa, Staphylococcus schleiferi
  misc_feature (1)..(237): tr|A0A0M4V299|A0A0M4V299_9STAP 7-carboxy-7-deazaguanine synthase OS=Staphylococcus schleiferi OX=1295 GN=queE PE=3 SV=1
MAKIPVLEIFGPTIQGEGRVIGRKTMFVRTAGCDFRCSWCDSKFTWDGSMKDEIQMMSAEAIFDQLKAIGGDRFNHVTISGGNPALIKGIQALVDVCQSHGVHTALETQGSHFQPWMRQIDDLTISPKPPSSGMKQDLERLDHVIAQCDVSQINLKVVVFDDVDYQFAKMIHHRYPHLPFYLQVGNPYLEDYVKHHTQKLLERYEQLIDHVTEDAEMNEVYVLPQLHTLVWSNKKGV

SEQ ID NO: 34471 - protein, 237 aa, Staphylococcus schweitzeri
  misc_feature (1)..(237): tr|A0A2K4AJX1|A0A2K4AJX1_9STAP 7-carboxy-7-deazaguanine synthase OS=Staphylococcus schweitzeri OX=1654388 GN=q ueE PE=3 SV=1
MAKIPVLEIFGPTIQGEGRVIGRKTMFVRTAGCDYRCSWCDSAFTWDGSAKGDIKLMTAEEIYDELKRVGGEQFNHVTISGGNPALIKGIQELVDLFQDKGIYSALETQGSKFQPWMTQIDDLTISPKPPSSAMTPDLNKLDEVIKQCVPSSLNLKVVVFDDNDYEFAKMIHHRYPNIPFYLQVGNPYLSESVDNHTAKLLERYEQLVDLVMQSSDMNHVYVLPQLHTLLWSNKKGV

SEQ ID NO: 34472 - protein, 236 aa, Staphylococcus sciuri
  misc_feature (1)..(236): tr|A0A2T4RWG6|A0A2T4RWG6_STASC 7-carboxy-7-deazaguanine synthase OS=Staphylococcus sciuri OX=1296 GN=queE PE=3 SV=1
MPKIPVLEIFGPTIQGEGAVIGQKTMFVRTSGCDYRCSWCDSSFTWDGSAKDDIRLLEPEDIISELDQLAPNKYQHVTISGGNPALIKNIGPFVEALKARNIKTALETQGSKFQEWMTLIDDLTISPKPPSSGMKPNLTILDEVIAQCVEESLSLKVVIFDEDDYQFAKDIHKRYPSIPFYLQVGNPYLDDSVSNHTEKLLEKYEQLIDKVMNDTLNDIFVLPQLHTLLWSNKKGV

SEQ ID NO: 34473 - protein, 236 aa, Staphylococcus sciuri
  misc_feature (1)..(236): tr|A0A5F0UYQ3|A0A5F0UYQ3_STASC 7-carboxy-7-deazaguanine synthase OS=Staphylococcus sciuri OX=1296 GN=queE PE=3 SV=1
MPKIPVLEIFGPTIQGEGAVIGQKTMFVRTSGCDYRCSWCDSSFTWDGSAKDDIRLLEPEDIISELDQLAPNKYQHVTISGGNPALIKNIGPFVEALKARNIKTALETQGSKFQEWMTLIDDLTISPKPPSSGMKPNLTILDEVIAQCVEESLSLKVVIFDEADYQFAKDIHKRYPTIPFYLQVGNPYLDDSVSNHTEKLLEKYEQLIDKVMNDTLNDIFVLPQLHTLLWSNKKGV

SEQ ID NO: 34474 - protein, 237 aa, Staphylococcus simiae
  misc_feature (1)..(237): tr|G5JG86|G5JG86_9STAP 7-carboxy-7-deazaguanine synthas e OS=Staphylococcus simiae CCM 7213 = CCUG 51256 OX=911 238 GN=queE PE=3 SV=1
MAKVPVLEIFGPTIQGEGRVIGRKTMFVRTAGCDYRCSWCDSAFTWDGSAKDDIQLMTAEEIYDQLVKVGGDRFNHVTISGGNPALIKGIQELVDLFDAKGIVSALETQGSKFQPWMTQIDDLTISPKPPSSSMIPDLAKLDDVISQCVKSSLNLKVVIFDDNDFEFAKMIHHRYPDIPFYLQVGNPYLADNVENHTAKLLHRYEQLVDMVIDSNEMNDVYVLPQLHTLLWSNMKGV

SEQ ID NO: 34475 - protein, 237 aa, Staphylococcus simulans
  misc_feature (1)..(237): tr|A0A2T4R141|A0A2T4R141_STASI 7-carboxy-7-deazaguanine synthase OS=Staphylococcus simulans OX=1286 GN=queE PE =3 SV=1
MAKIPVLEIFGPTIQGEGRVIGRKTMFVRTAGCDYRCSWCDSSFTWDGSMKDEIQMMTAEEIYDRLYEIGGDCFNHVTISGGNPALIKGIQDLVDLFEEKNIESALETQGSRFQPWMRQINDLTISPKPPSSGMKPNLQILDEVIDQCVKETLNLKVVVFDDEDYAFAKQMHHRYPDIPFYLQVGNPYLDDEVENHTARLLKRYEDLVEKVMQSNDMNQVYVLPQLHTLLWSNMKGV

SEQ ID NO: 34476 - protein, 237 aa, Staphylococcus simulans
  misc_feature (1)..(237): tr|A0A133QNG5|A0A133QNG5_STASI 7-carboxy-7-deazaguanine synthase OS=Staphylococcus simulans OX=1286 GN=queE PE =3 SV=1
MAKIPVLEIFGPTIQGEGRVIGRKTMFVRTAGCDYRCSWCDSSFTWDGSMKDEIQMMTAEEIYDRLYEIGGDCFNHVTISGGNPALIKGIQDLVDLFEEKNIESALETQGSRFQPWMRQINDLTISPKPPSSGMKPNIQILDEVIEQCVKETLNLKVVVFDDDDYEFAKYIHHRYPDLPFYLQVGNPYLDDEVENHTARLLERYENLVDKVMQSNDMNQVYVLPQLHTLLWSNMKGV

SEQ ID NO: 34477 - protein, 236 aa, Staphylococcus sp.
  misc_feature (1)..(236): tr|A0A1T1D7X7|A0A1T1D7X7_9STAP 7-carboxy-7-deazaguanine synthase OS=Staphylococcus sp. MB371 OX=1663557 GN=que E PE=3 SV=1
MPKIPVLEIFGPTIQGEGAVIGQKTMFVRTSGCDYRCSWCDSSFTWDGSAKDDIRLLEPEDIISELDQLAPNKYQHVTISGGNPALIKNIGPFVEALKARNIKTALETQGSKFQEWMTLIDDLTISPKPPSSGMKPNLTILDEVIAQCVKESLSLKVVIFDEDDYQFAKDIHKRYPSIPFYLQVGNPYLDDSVSNHTEKLLEKYEQLIDKVMNDTLNDIFVLPQLHTLLWSNKKGV

SEQ ID NO: 34478 - protein, 238 aa, Staphylococcus sp.; identical to SEQ ID NO: 34437
  misc_feature (1)..(238): tr|A0A1F2KUP7|A0A1F2KUP7_9STAP 7-carboxy-7-deazaguanine synthase OS=Staphylococcus sp. HMSC14D01 OX=1581101 GN =queE PE=3 SV=1

SEQ ID NO: 34479 - protein, 236 aa, Staphylococcus stepanovicii
  misc_feature (1)..(236): tr|A0A240A1Z9|A0A240A1Z9_9STAP 7-carboxy-7-deazaguanine synthase OS=Staphylococcus stepanovicii OX=643214 GN=q ueE PE=3 SV=1
MPKIPVLEIFGPTIQGEGSVIGKKTMFVRTSGCDYRCSWCDSSFTWDGSAKEDIQLLEPEDIISTLDELAPNKYQHVTISGGNPALIKNIGPLVKALQERNIKTALETQGSKFQDWMTEIDDLTISPKPPSSGMKPNLPILDDVINKCNLESLSLKVVIFDDEDYNFAKMIHNRYPEVPFYLQVGNPYLDDTVDNHTERLLEKYEQLIDKVMNDTLNDIYVLPQLHTLLWSNKKGV

SEQ ID NO: 34480 - protein, 238 aa, Staphylococcus succinus
  misc_feature (1)..(238): tr|A0A2T4Q9J7|A0A2T4Q9J7_9STAP 7-carboxy-7-deazaguanine synthase OS=Staphylococcus succinus OX=61015 GN=queE P E=3 SV=1
MSKIPVLEIFGPTIQGEGRVIGRKTMFVRTAGCDYRCSWCDSSFTWDGSAKDDIRMMTAEEIYTSLYEIAGDSFNHVTISGGNPALIKGIQDLVDLFDSKHIQSALETQGSKFQPWMTQIDDLTISPKPPSSMMKPNLPILDEVIAQCVPESLNLKVVIFDDADYHFAKMIHHRYPTIPFYLQVGNPYLDGEHVESHTEKLLSLYESLVDRVMESSEMNNVYVLPQLHTLLWSNKKGV

SEQ ID NO: 34481 - protein, 236 aa, Staphylococcus vitulinus
  misc_feature (1)..(236): tr|A0A2T4PVX2|A0A2T4PVX2_9STAP 7-carboxy-7-deazaguanine synthase OS=Staphylococcus vitulinus OX=71237 GN=queE PE=3 SV=1
MPKIPVLEIFGPTIQGEGSVIGRKTMFVRTSGCDYRCSWCDSSFTWDGSAKDDIRLLEPEDIISELDAIAPNKYQHVTISGGNPALIKNIGPLVEALNERNIETALETQGSKFQSWMTLIDDLTISPKPPSSGMKPNLPILDEVIAQCVQDSLSLKVVIFDEEDYQFAKDIHNRYPSIPFYLQVGNPYLDDSVSNHTEKLLEKYEQLIDKVMNDTLNDIYVLPQLHTLLWSNKKGV

SEQ ID NO: 34482 - protein, 237 aa, Staphylococcus warneri; identical to SEQ ID NO: 34455
  misc_feature (1)..(237): tr|A0A364UR94|A0A364UR94_STAWA 7-carboxy-7-deazaguanine synthase OS=Staphylococcus warneri OX=1292 GN=queE PE= 3 SV=1

SEQ ID NO: 34483 - protein, 242 aa, Staphylococcus warneri
  misc_feature (1)..(242): tr|A0A2V3ZDM8|A0A2V3ZDM8_STAWA 7-carboxy-7-deazaguanine synthase OS=Staphylococcus warneri OX=1292 GN=queE PE= 3 SV=1
MAKIPFLEVFGPTIQGEGMVIGKKTMFVRTYGCDYGCIWCDTKYTWDGSEKDNVRRATAEELFELLKETAGDKSFSHVTISGGNPALIGRAMQEFVDLCHANGVKVGLETQGSLWKDWFYDIDDLTISPKPPSSTMKTNFKMLDDIVDKLHKANVNFSLKIVYFNEEDKEYAKDVFARYKGKNIPYYLSVGNTEPYTDRDITKQLIDKLDELWEVVMNEPAFNDVQALPQLHAIVWGNKRGV

SEQ ID NO: 34484 - protein, 238 aa, Staphylococcus xylosus
  misc_feature (1)..(238): tr|A0A418IGB1|A0A418IGB1_STAXY 7-carboxy-7-deazaguanine synthase OS=Staphylococcus xylosus OX=1288 GN=queE PE= 3 SV=1
MSKIPVLEIFGPTIQGEGRVIGRKTMFVRTAGCDYRCSWCDSSFTWDGSAKEDIRMMTAEEIYEALYEIAGDSFNHVTISGGNPALIKGIQQLVDLFDEKHIQSALETQGSKFQPWMTQIDDLTISPKPPSSKMKPNLPILDEVIEQCVPESLNLKVVIFDDEDYEFAKMIHHRYPTIPFYLQVGNPYLDGEYVESHTKKLLTLYETLVDRVMVSSDMNNVYVLPQLHTLLWSNKKGV

SEQ ID NO: 34485 - protein, 238 aa, Staphylococcus xylosus
  misc_feature (1)..(238): tr|A0A418I8Z1|A0A418I8Z1_STAXY 7-carboxy-7-deazaguanine synthase OS=Staphylococcus xylosus OX=1288 GN=queE PE= 3 SV=1
MSKIPVLEIFGPTIQGEGRVIGRKTMFVRTAGCDYRCSWCDSSFTWDGSAKEDIRMMTAEEIYDALYEIAGDSFNHVTISGGNPALIKGIQQLVDLFDEKHIQSALETQGSKFQPWMTQIDDLTISPKPPSSKMKPNLPILDEVIEQCVPKSLNLKVVIFDDEDYEFAKKIHHRYPDIPFYLQVGNPYLDGEYVESHTKKLLTLYETLVDRVMVSSDMNNVYVLPQLHTLLWSNKKGV

SEQ ID NO: 34486 - protein, 242 aa, Stappia sp.
  misc_feature (1)..(242): tr|A0A5D0WB79|A0A5D0WB79_9RHOB 7-carboxy-7-deazaguanine synthase OS=Stappia sp. BW2 OX=2592622 GN=queE PE=3 SV =1
MSIEQIRVSEIFGPTIQGEGALIGQPTVFVRTGGCDYRCSWCDTLHAVDSAHRGEWCPMTPQAILMQVEILSGGTPLTVSLSGGNPAIQPLGGLITLGRKEGYRFALETQGSLAKDWFADLDVLTLSPKPPSSGMKTDWQRLAECVEAAGPETQTVLKVVVFDEADYAFARDVSDRYPHLSCFLQPGNHTPPEATETDATIDMSGIMERMRWLVDRVSSDRWYTATVLPQLHTMIWGNLRGV

SEQ ID NO: 34487 - protein, 210 aa, Starkeya novella
  misc_feature (1)..(210): tr|A0A2W5KP36|A0A2W5KP36_STANO 7-carboxy-7-deazaguanine synthase OS=Starkeya novella OX=921 GN=queE PE=3 SV=1
MTYTVKELFKTLQGEGAHAGRAAVFCRFAGCNLWTGREQDRETAVCRFCDTDFVGTDGPGGGKFATAEALAETIAHTWDGAVGRRYVVFTGGEPLLQLDEALVAAMHAENFEIAIETNGTRTPPPGVDWICVSPKAGAALALTSGDELKLVYPQPDAPPEAFASLDFRHFFLQPMDGAAREANTAAAAAYCMANPTWRLSLQTHKLIGLP

SEQ ID NO: 34488 - protein, 211 aa, Stella humosa
  misc_feature (1)..(211): tr|A0A3N1KVQ6|A0A3N1KVQ6_9PROT 7-carboxy-7-deazaguanine synthase OS=Stella humosa OX=94 GN=queE PE=3 SV=1
MAYAVKEIFYTLQGEGRNAGRAAVFCRFSGCNLWSGREADRATAACRFCDTDFVGMDGAGGGRFAGADELAAAVARLWPHAGTAGRMVVLTGGEPLLQVDDALVAALHGAGFEICVETNGTIAPPAGIDWLCVSPKGANALAVSAGDELKLVFPQADAQPERFEGLGFDHFLLQPMDGPALAANTAAAIAYCLAHPRWRLSLQTHKLLGIP

SEQ ID NO: 34489 - protein, 233 aa, Stenotrophomonas acidaminiphila
  misc_feature (1)..(233): tr|A0A2L0SJY1|A0A2L0SJY1_9GAMM 7-carboxy-7-deazaguanine synthase OS=Stenotrophomonas acidaminiphila OX=128780 GN=queE PE=3 SV=1
MTAVSLSSAAATPSEIVQSPLPRLKITEIFLSLQGEADTAGWPTVFVRLTGCPLRCGYCDTEYAFHGGQWRDIDDIVAEVRGHGVRHVCVTGGEPLAQKRCLVLLRALCDAGLEVSLETSGALDIGGVDPRVSRVVDLKTPGSGEMPRNRLENLPLLTARDQLKFVLCDRADYDWARDMVAAQRLHERCMVLFSPCKDRLGARELADWIVADRLPVRFQMQLHKILWNDEPGR

SEQ ID NO: 34490 - protein, 227 aa, Stenotrophomonas acidaminiphila
  misc_feature (1)..(227): tr|A0A2W5L3X7|A0A2W5L3X7_9GAMM 7-carboxy-7-deazaguanine synthase OS=Stenotrophomonas acidaminiphila OX=128780 GN=queE PE=3 SV=1
MNDAARPSEIVQSPLERLKITEIFLSLQGEANAVGWPTVFVRLTGCPLRCQYCDTAYAFHGGEWREIDDIVAEVAAYGVRHVCVTGGEPLSQKRCLLLLRKLCDAGLDVSLETSGAIDIADVDPRVSRVVDLKTPGSNEMARNRLENLPLLTARDQVKFVLCGRADYEWARGMLAEHRLAERCDVLFSPSKSELSPRELADWIVEDRLPVRFQMQLHKLLWNDEPGR

SEQ ID NO: 34491 - protein, 232 aa, Stenotrophomonas chelatiphaga
  misc_feature (1)..(232): tr|A0A0R0CIX2|A0A0R0CIX2_9GAMM 7-carboxy-7-deazaguanine synthase OS=Stenotrophomonas chelatiphaga OX=517011 GN =queE PE=3 SV=1
MNVTPANAVTTPSDIVQSPLPRLKITEIFTSLQGEADTAGWPTVFVRLTGCPLRCQYCDTAYAFHGGTWWDIDAIVAEVLAQGVRHVCVTGGEPLAQKRCLILLQKLCDAGMDVSLETSGALDVSEVDPRVSRVVDLKTPGSAEMARNKLENLPLLTARDQVKFVICSREDYDWAKAMVVEHHLAERTMVLFSPSKGEITARELADWIVADRLPVRFQMQLHKLLWNDEPGR

SEQ ID NO: 34492 - protein, 229 aa, Stenotrophomonas daejeonensis
  misc_feature (1)..(229): tr|A0A0R0DWL6|A0A0R0DWL6_9GAMM 7-carboxy-7-deazaguanine synthase OS=Stenotrophomonas daejeonensis OX=659018 GN =queE PE=3 SV=1
MNHPAASVPSEIVQSPLPRLKITEIFLSLQGEADTAGWLTVFVRLTGCPLRCTYCDTEYAFHGGQWRDIDDIVAEVLGHGVRHVCVTGGEPLAQKRCLLLLRQLCDAGLDVSLETSGALDIGGVDPRVSRVVDLKTPGSGEMARNRLQNLPLLTARDQLKFVLCGRGDYEWARDMVATHRLHERCMVLFSPSKSELTPRELADWIVADRLPVRFQMQLHKLLWNDEPGR

SEQ ID NO: 34493 - protein, 230 aa, Stenotrophomonas ginsengisoli
  misc_feature (1)..(230): tr|A0A0R0DC19|A0A0R0DC19_9GAMM 7-carboxy-7-deazaguanine synthase OS=Stenotrophomonas ginsengisoli OX=336566 GN =queE PE=3 SV=1
MQPAQAFAQPSQIEQSPLSRLKITEIFLSLQGEADTIGWPTVFVRLTGCPLRCQYCDTAYAFHGGQWREIDDIVAEVLGHGVRHVCVTGGEPLAQKRCLTLLAKLCDAGLSVSLETSGALDIAGVDGRISRVVDVKTPDSGEAGRNRAENIDLLTAHDQLKFVICSRSDYEWARDMVLARQLHQRTMVLFSPSKDQVSPRELADWIIADRLPVRFQMQLHKLLWNDEPGR

SEQ ID NO: 34494 - protein, 229 aa, Stenotrophomonas humi
  misc_feature (1)..(229): tr|A0A0R0C5W6|A0A0R0C5W6_9GAMM 7-carboxy-7-deazaguanine synthase OS=Stenotrophomonas humi OX=405444 GN=queE PE =3 SV=1
MNSPAAAVPSEIVQSPLPRLKITEIFLSLQGEADTVGWPTVFVRLTGCPLRCSYCDTEYAFHGGTWWDIDDIVTEVLKQGVRHVCVTGGEPLAQKRCLILLQKLCDAGLDVSLETSGALDIAAVDARVSRVVDLKTPDSAEMARNRLENIPLLTARDQLKFVICSRSDYEWAKTMLVEHGLPARCMVLFSPSKSQVSARELADWIIADRLPVRFQMQLHKLLWDDEPGR

SEQ ID NO: 34495 - protein, 233 aa, Stenotrophomonas koreensis
  misc_feature (1)..(233): tr|A0A0R0C2X6|A0A0R0C2X6_9GAMM 7-carboxy-7-deazaguanine synthase OS=Stenotrophomonas koreensis OX=266128 GN=qu eE PE=3 SV=1
MYPMNPVDAVALPSHIEQSPLPRLKITEIFLSLQGEADSIGWPTVFVRLTGCPLRCTYCDTSYAFHGGQWRDIDDIVAEVLGYGVGHVCVTGGEPLAQKRCLALLGKLCDAGLSVSLETSGALDVSAVDPRVSRVIDIKTPDSGEVARNREANLALLTAHDQLKFVICSRADFEWARQRVLEQKLHQRTMVFFSPSKDQVSARELADWIVADRLPVRFQLQLHKLLWNDEPGR

SEQ ID NO: 34496 - protein, 233 aa, Stenotrophomonas lactitubi
  misc_feature (1)..(233): tr|A0A2M9QZ56|A0A2M9QZ56_9GAMM 7-carboxy-7-deazaguanine synthase OS=Stenotrophomonas lactitubi OX=2045214 GN=q ueE PE=3 SV=1
MTAVSPSAAVATPSEIVQSPLPRLKITEIFTSLQGEADTAGWPTVFVRLTGCPLRCQYCDTAYAFHGGTWWDIDDIVAEVLAQGVRHVCVTGGEPLAQKRCLVLLQKLCDAGLDVSLETSGALDVGAVDPRVSRVVDIKTPGSAEVARNRLENLPLLTTRDQIKFVICNREDYDWAKAMVAEHELVQRTMVFFSPSKGEITARQLADWIVEDRLPVRFQMQLHKILWNDEPGR

SEQ ID NO: 34497 - protein, 232 aa, Stenotrophomonas maltophilia; identical to SEQ ID NO: 34491
  misc_feature (1)..(232): tr|A0A3N1QT59|A0A3N1QT59_STEMA 7-carboxy-7-deazaguanine synthase OS=Stenotrophomonas maltophilia OX=40324 GN=q ueE PE=3 SV=1

SEQ ID NO: 34498 - protein, 233 aa, Stenotrophomonas maltophilia
  misc_feature (1)..(233): tr|T5KDP8|T5KDP8_STEMA 7-carboxy-7-deazaguanine synthas e OS=Stenotrophomonas maltophilia MF89 OX=1333853 GN=qu eE PE=3 SV=1
MTAVTPSSAAATPSEIVQSPLPRLKITEIFTSLQGEADTAGWPTVFVRLTGCPLRCQYCDTAYAFHGGTWWDIDDIVAEVLAQGVRHVCVTGGEPLAQKRCLVLLQKLCDAGMDVSLETSGALDVSAVDSRVSRVVDIKTPGSAEVARNRWENLPLLTARDQIKFVICSREDYDWAKALVAEHELVKRCTVFFSPSKGEITARQLADWIVEDRLPVRFQMQLHKILWNDEPGR

SEQ ID NO: 34499 - protein, 226 aa, Stenotrophomonas panacihumi
  misc_feature (1)..(226): tr|A0A0R0AWR4|A0A0R0AWR4_9GAMM 7-carboxy-7-deazaguanine synthase OS=Stenotrophomonas panacihumi OX=676599 GN=q ueE PE=3 SV=1
MNAAVPSEIIQSPLPRLKITEIFLSLQGEADTAGWPTVFVRLTGCPLRCQYCDTAYAFHGGEWWDIDDIVKHVLDQGVRHVCVTGGEPLAQKRCLVLLRRLCDAGLDVSLETSGALDVAEVDPRVSRVVDIKTPGSAEEHRNRWENLPLLTARDQIKFVLCSRADYEWAREIVRERGLDRVCTVWFSPSKSEVTPRELADWIVADRLPVRFQMQLHKLLWNDEPGR

SEQ ID NO: 34500 - protein, 233 aa, Stenotrophomonas pavanii; identical to SEQ ID NO: 28236
  misc_feature (1)..(233): tr|A0A246KT37|A0A246KT37_9GAMM 7-carboxy-7-deazaguanine synthase OS=Stenotrophomonas pavanii OX=487698 GN=queE PE=3 SV=1

SEQ ID NO: 34501 - protein, 229 aa, Stenotrophomonas pictorum
  misc_feature (1)..(229): tr|A0A0R0AF58|A0A0R0AF58_9GAMM 7-carboxy-7-deazaguanine synthase OS=Stenotrophomonas pictorum JCM 9942 OX=1236 960 GN=queE PE=3 SV=1
MNSPSAAVPSEIVQSPLPRLKITEIFLSLQGEADSVGWPTVFVRLTGCPLRCQYCDTEYAFHGGTWWDIDAIVDEVLRQGVRHVCVTGGEPLAQKRCVILLQKLCDAGLEVSLETSGALDIAEVDPRVSRVVDLKTPDSAEMARNRLENIPLLTARDQLKFVICSRADYDWAKSMLVEHDLPGRCMVLFSPSKSQVSARELADWIVADRLPVRFQMQLHKLLWNDAPGR

SEQ ID NO: 34502 - protein, 232 aa, Stenotrophomonas rhizophila
  misc_feature (1)..(232): tr|A0A4U3GGY4|A0A4U3GGY4_9GAMM 7-carboxy-7-deazaguanine synthase OS=Stenotrophomonas rhizophila OX=216778 GN=q ueE PE=3 SV=1
MTVSLSAAAALPSEIVQSPLPRLKITEIFTSLQGEADTAGWPTVFVRLTGCPLRCTYCDTAYAFHGGTWWDIDAIVAEVLAQGVHHVCVTGGEPLAQKRCLVLLEKLCDAGLDVSLETSGALDVSAVDPRVSRVVDLKTPGSGELARNRLENLPLLTRRDQIKFVLCSREDYEWARGMVAEHRLNQRSMVLFSPSKDQVSPRQLADWIVEDRLPVRFQMQLHKLLWNDEPGR

SEQ ID NO: 34503 - protein, 232 aa, Stenotrophomonas rhizophila
  misc_feature (1)..(232): tr|A0A1B2N732|A0A1B2N732_9GAMM 7-carboxy-7-deazaguanine synthase OS=Stenotrophomonas rhizophila OX=216778 GN=q ueE PE=3 SV=1
MTSPLSAAAALPSEIVQSPLPRLKITEIFTSLQGEADTAGWPTVFVRLTGCPLRCTYCDTAYAFHGGTWWDIDEIVREVLAQGVHHVCVTGGEPLAQKRCLVLLEKLCEAGLDVSLETSGALDVGGVDPRVSRVVDLKTPGSGEMARNRLENLPLLTRRDQIKFVLCSREDYDWARGMVREHRLNERSMVLFSPSKGQVSPRELADWIVEDRLPVRFQMQLHKILWDDEPGR

SEQ ID NO: 34504 - protein, 229 aa, Stenotrophomonas sp.
  misc_feature (1)..(229): tr|A0A4R4IHK5|A0A4R4IHK5_9GAMM 7-carboxy-7-deazaguanine synthase OS=Stenotrophomonas sp. ATCM1_4 OX=2259330 GN =queE PE=3 SV=1
MNSPAAAVPSEIVQSPLPRLKITEIFLSLQGEADTAGWPTVFVRLTGCPLRCLYCDTEYAFHGGEWWDIDAIVAEVLQQGVRHVCVTGGEPLAQKRCLILLQKLCDAGLDVSLETSGALDIAAVDARVSRVVDLKTPDSGEVARNRLENLPLLTARDQLKFVICSRGDYEWARAMVAEHGLPARCTVFFSPSKSQVSARELADWIVADRLPVRFQMQLHKILWNDEPGR

SEQ ID NO: 34505 - protein, 233 aa, Stenotrophomonas sp.
  misc_feature (1)..(233): tr|A0A1W1H3D4|A0A1W1H3D4_9GAMM 7-carboxy-7-deazaguanine synthase OS=Stenotrophomonas sp. 92mfcol6.1 OX=1761901 GN=queE PE=3 SV=1
MTAVPPSAAVATPSEIVQSPLPRLKITEIFTSLQGEADTAGWPTVFVRLTGCPLRCQYCDTAYAFHGGTWWDIDDIVAHVQAQGVRHVCVTGGEPLAQKRCLVLLQKLCDAGLDVSLETSGALDVSAVDPRVSRVVDIKTPGSAEVARNRWENLPLLTTRDQIKFVICNREDYDWAKAMVAEHQLVQRTMVFFSPSKGEITARQLADWIVEDRLPVRFQMQLHKILWNDEPGR

SEQ ID NO: 34506 - protein, 229 aa, Stenotrophomonas terrae
  misc_feature (1)..(229): tr|A0A0R0CMT3|A0A0R0CMT3_9GAMM 7-carboxy-7-deazaguanine synthase OS=Stenotrophomonas terrae OX=405446 GN=queE PE=3 SV=1
MNSPSAAVPSEIVQSPLPRLKITEIFLSLQGEADTAGWPTVFVRLTGCPLRCQYCDTEYAFHGGDWWDIDDIVAEVLKQGVRHVCVTGGEPLAQKRCLILLQKLCDAGLDVSLETSGALDIAAVDPRVSRVVDLKTPDSREMARNRLENIPLLSARDQLKFVICSRGDYEWAKAMLAEHRLAERCMVLFSPSKSQLKPRELADWIVADRLPVRFQMQLHKLLWDDAPGY

SEQ ID NO: 34507 - protein, 227 aa, Steroidobacter denitrificans
  misc_feature (1)..(227): tr|A0A127FC33|A0A127FC33_STEDE 7-carboxy-7-deazaguanine synthase OS=Steroidobacter denitrificans OX=465721 GN= queE PE=3 SV=1
MAISSGSSSFAGKAATRVRLTEIFLSIQGEADSVGWPTVFVRLTGCPLRCSYCDTAYAFHGGEWFRIEAVLEKVASFDTRHVCVTGGEPLAQKGCLVLLQRLCDAGHQVSLETSGAMDVSTVDPRVVRVVDIKTPGSGEVARNRYENLALLRPEEQIKFVICNRADFEWACEQVRTRHLQERCMVLFSPSSGQVEAGELAQWILDARLPVRLQVQLHKYLWGDTPGR

SEQ ID NO: 34508 - protein, 215 aa, Stigmatella aurantiaca
  misc_feature (1)..(215): tr|A0A1H7ZBT5|A0A1H7ZBT5_STIAU 7-carboxy-7-deazaguanine synthase OS=Stigmatella aurantiaca OX=41 GN=queE PE=3 SV=1
MAYAVKELFYTLQGEGAQTGRAAVFLRFTGCNLWTGLEKDRDRGQGGCSRWCDTDFVGMDGQGGGRFSTAEALASAVQEAWRPGPDGGTPLVVCTGGEPLLQLDAPLVAALHTRGFAIAVETNGTQEAPAGLDWVCVSPKAGGHLVLRAGNELKLIFPQQGLSPDDVEGLAFTHFFLQPLDGPDKLRNMQLAVEYCLAHPKWRLSLQTHKFLGIP

SEQ ID NO: 34509 - protein, 194 aa, Stigmatella aurantiaca
  misc_feature (1)..(194): tr|Q08U16|Q08U16_STIAD 7-carboxy-7-deazaguanine synthas e OS=Stigmatella aurantiaca (strain DW4/3-1) OX=378806 GN=queE PE=3 SV=1
MLCAFVRLTGCHLRCTYCDSEFAFRGGTRMPNAQVVEQVKALRTPMVEITGGEPLLQPGVYPLMEALLAEGLTVLLETSGAIDVRLVPPAVHKIVDMKTPSSGESDRNDVRNFSSMNARDEMKFVIGSREDYEWSKALIAEHGLATKPFAMLFSTVFDKLHPRELAEWVIADRLPVRFQLQMHKYVWEPEARGV

SEQ ID NO: 34510 - protein, 230 aa, Stigmatella erecta
  misc_feature (1)..(230): tr|A0A1I0KQS4|A0A1I0KQS4_9DELT 7-carboxy-7-deazaguanine synthase OS=Stigmatella erecta OX=83460 GN=queE PE=3 S V=1
MLALRPRIEPHRSPAIDSVMVKELYLSVQGESSHAGLLCAFVRLTGCHLRCTYCDSTFAFRGGTRMTNAQVVQEVKAMRTPMVEITGGEPLLQPGVYPLMEALLAEGLKVLLETSGAIDVRLVPPEVHKIVDIKTPSSGESDRNDLRNFQSMNARDELKFVIGSREDYEWSKALIAEHALATKPFGMLFSTVFSKLHPRELAEWVIDDRLPVRFQLQLHKYMWDPEARGV

SEQ ID NO: 34511 - protein, 234 aa, Streptoalloteichus hindustanus
  misc_feature (1)..(234): tr|A0A1M5DB62|A0A1M5DB62_STRHI 7-carboxy-7-deazaguanine synthase OS=Streptoalloteichus hindustanus OX=2017 GN= queE PE=3 SV=1
MNTLTVAPERVEGSAILTEKFESFQGEGPWTGQRCVFVRFSRCNLRCGFCDTPESWDWSRYNPAEVSERAPVAELVSWVRERGVDMMVITGGEPMLQQPAMTALARGLANVRVQVETNGTIAPTPELASLVDLWVVSPKLANSGMTYSTRIKPAALSAFAVTDRAVFKFVVTEPDRDLDEIAQLVEEHQLAPVWVMPEGTTREKILAGMDALYSRATERGWNVSTRLHILTGAR

SEQ ID NO: 34512 - protein, 238 aa, Streptococcus australis
  misc_feature (1)..(238): tr|A0A4V0BUK0|A0A4V0BUK0_9STRE 7-carboxy-7-deazaguanine synthase OS=Streptococcus australis OX=113107 GN=queE PE=3 SV=1
MTRERVLKLPVLEIFGPTFQGEGRAIGQKTMFVRTAGCDYHCDWCDSAFTWDGSEKPTRMTADEVITELDKLGSYDYVTLSGGNPAILAANMAELVTKLKERGVTLAVETQGSRWQNWLKDIDQVTLSPKPPSSKMEVNFETLDFIVSQLDRDKVTFKIPVFDDADLAFAKDIQERYQPDVLFLSAGNPEPKATGNIVQDQLDRLKELWERIATDDSWGNVRVLPQLHTLLYDNQRGV

SEQ ID NO: 34513 - protein, 242 aa, Streptococcus criceti
  misc_feature (1)..(242): tr|G5JPD6|G5JPD6_STRCG 7-carboxy-7-deazaguanine synthas e OS=Streptococcus criceti HS-6 OX=873449 GN=queE PE=3 SV=1
MGPDMRKKRDLKLPILEIFGPTFQGEGRAIGQKTMFIRTGGCDYHCDWCDSAFTWDGSEKATPMTTDQVIAELDKLGTYDYVTLSGGNPCLQAANMAELVHKLKERDVTLAVETQGSRWQDWLLDIDQVTLSPKPPSSKMDVNMETLDFIVGRLDPEKVTYKIPIFNDEDLAFAKKIQARYQPDVLYLSVGNPEPKAQGDIVRHQLDRLHALWDKVAKDDNWGNVRVLPQLHTLVYDNQRGV

SEQ ID NO: 34514 - protein, 238 aa, Streptococcus downei
  misc_feature (1)..(238): tr|A0A380JEF9|A0A380JEF9_STRDO 7-carboxy-7-deazaguanine synthase OS=Streptococcus downei MFe28 OX=764290 GN=qu eE PE=3 SV=1
MRKKRELKLPILEIFGPTFQGEGRAIGQKTMFIRTGGCDYHCDWCDSAFAWDGSEKATPMTSDQVIAELDKLGTYDYVTLSGGNPCLQAANMEELVHKLKSRGVILAVETQGSRWQDWLLDIDQVTLSPKPPSSKMEVNMETLDFIVGKLDSSKVTYKIPIFNDDDLAFAKMIQARYNPDVLYLSVGNPEPKAEGDIVRHQLDRLQALWDKVAKDDSWGNVRVLPQLHTLVYDNQRGV

SEQ ID NO: 34515 - protein, 237 aa, Streptococcus dysgalactiae
  misc_feature (1)..(237): tr|A0A4V0BSH5|A0A4V0BSH5_STREQ 7-carboxy-7-deazaguanine synthase OS=Streptococcus dysgalactiae subsp. equisimi lis OX=119602 GN=queE PE=3 SV=1
MAKIPVLEIFGPTIQGEGRVIGRKTMFVRTAGCDYRCSWCDSAFTWDGSAKGDIKLMTAEEIYDELKRIGGDLFNHVTISGGNPALIKGIQELVDLFQDKGIFSALETQGSKFQPWMTQIDDLTISPKPPSSTMTPDLKKLDEVITQCVPSSLNLKVVVFDDKDYDFAKMIHHRYPDIPFYLQVGNPYLSDSVDNHTEKLLERYEQLVDLVMQSNDMNHVYVLPQLHTLLWSNKKGV

SEQ ID NO: 34516 - protein, 242 aa, Streptococcus dysgalactiae
  misc_feature (1)..(242): tr|A0A4U9XUP9|A0A4U9XUP9_STREQ 7-carboxy-7-deazaguanine synthase OS=Streptococcus dysgalactiae subsp. equisimi lis OX=119602 GN=queE PE=3 SV=1
MWALPRRFSYLPQRRRTTCSVVTPVADMQQTLRITEIFYSLQGETRTAGLPTVFVRLTGCPLRCHYCDTAYAFSGGEIVSLDAILERVAAYKPRYICVTGGEPLAQPNCIPLLERLCDAGYEVSLETSGALDVSRVDPRVSKVLDLKTPGSGEVGRNRYENIPLLTANDQVKFVVCSREDYDWAVSKLIEYRLEQRTGEVLFSPSHRQVDARELADWIVADNLPVRLQLQLHKILWNDEPGH

SEQ ID NO: 34517 - protein, 237 aa, Streptococcus equinus
  misc_feature (1)..(237): tr|A0A1H9C304|A0A1H9C304_STREI 7-carboxy-7-deazaguanine synthase OS=Streptococcus equinus OX=1335 GN=queE PE=3 SV=1
MTKRPLMIPVLEIFGPTFQGEGRAIGQKTMFVRTAGCDYHCAWCDSAFTWDGSEKPKRMTADEIIAELDKLGAYDYVTLSGGNPCLLGANMGELVAKLKTRGVTLGIETQGSRWQTWLKDIDQVTLSPKPPSSQMSVNFETLDFIVSQLDKGQVTFKIPVFNDEDLTFAKMIQKRYQPDVLYLSAGNPEPHASGNIVEAQLNRLRQLWETVAADSEWKSVRVLPQLHTLLYDNKRGV

SEQ ID NO: 34518 - protein, 237 aa, Streptococcus equinus
  misc_feature (1)..(237): tr|A0A091BW37|A0A091BW37_STREI 7-carboxy-7-deazaguanine synthase OS=Streptococcus equinus JB1 OX=1294274 GN=qu eE PE=3 SV=1
MTKRPLMIPVLEIFGPTFQGEGRAIGQKTMFVRTAGCDYHCAWCDSAFTWDGSEKPKRMTADEIIAELDKLGAYDYVTLSGGNPCLLGANMGELVAKLKARGVTLGIETQGSRWQTWLKDIDQVTLSPKPPSSQMSVNFETLDFIVSQLDKDQVTFKIPVFNDEDLTFAKMIQKRYQPDVLYLSAGNPEPHASGNIVEAQLNRLRQLWETVAADSEWKSVRVLPQLHTLLYDNKRGV

SEQ ID NO: 34519 - protein, 237 aa, Streptococcus gallolyticus
  misc_feature (1)..(237): tr|F5X1J1|F5X1J1_STRG1 7-carboxy-7-deazaguanine synthas e OS=Streptococcus gallolyticus (strain ATCC 43143 / F- 1867) OX=981539 GN=queE PE=3 SV=1
MTKRQLTLPILEIFGPTFQGEGRAIGQKTMFVRTGGCDYHCDWCDSAFTWDGSEKPKRMTVDEVIEQLDQLGTYDYVTLSGGNPCLLANNMAELVAKLKARGVTLAIETQGSRWQTWLKDIDQVTLSPKPPSSKMTVNFETLDFIVSKLKKDQITFKIPVFDDADLTFAKMIQKRYQPDVLYLSAGNPEPHANGNIVEHQLDRLRQLWETVAADPEWQSVRVLPQLHTLLYDNQRGV

SEQ ID NO: 34520 - protein, 237 aa, Streptococcus gallolyticus
  misc_feature (1)..(237): tr|A0A0E1XHG2|A0A0E1XHG2_STRGY 7-carboxy-7-deazaguanine synthase OS=Streptococcus gallolyticus subsp. gallolyt icus TX20005 OX=545774 GN=queE PE=3 SV=1
MTKRQLTLPILEIFGPTFQGEGRAIGQKTMFVRTGGCDYHCDWCDSAFTWDGSEKPKRMTVDEVIEQLDQLGTYDYVTLSGGNPCLLANNMAELVAKLKARGVTLAIETQGSRWQTWLKDIDQVTLSPKPPSSKMTVNFETLDFIVSQLKKDQITFKIPVFDDADLAFAKMIQKRYQPDVLYLSAGNPEPHASGNIVEHQLDRLRQLWETVAADPEWQSVRVLPQLHTLLYDNQRGV

SEQ ID NO: 34521 - protein, 238 aa, Streptococcus halitosis
  misc_feature (1)..(238): tr|A0A426FXH7|A0A426FXH7_9STRE 7-carboxy-7-deazaguanine synthase OS=Streptococcus halitosis OX=2172545 GN=queE PE=3 SV=1
MTRERVLKLPVLEIFGPTFQGEGRAIGQKTMFVRTAGCDYHCDWCDSAFTWDGSEKPTRMTADEVIAALDKLGSYDYVTLSGGNPAILAANMAELVTKLKERGVTLAVETQGSRWQNWLKDIDQVTLSPKPPSSKMEVNFETLDFIVSQLDPDKVTFKIPVFDDADLAFAKGIQERYQPDVLFLSAGNPEPKATGNIVQDQLDRLKELWERVAADDSWGNVRVLPQLHTLLYDNQRGV

SEQ ID NO: 34522 - protein, 238 aa, Streptococcus henryi
  misc_feature (1)..(238): tr|A0A1G6A9H7|A0A1G6A9H7_9STRE 7-carboxy-7-deazaguanine synthase OS=Streptococcus henryi OX=439219 GN=queE PE= 3 SV=1
MASKRQLKLPVLEIFGPTFQGEGRAIGQKTMFVRTAGCDYHCDWCDSAFTWDGSEKPKPMTVDEVISELDKLGSYDYVTLSGGNPCLLASNMAELVNKLKNRGVTLAVETQGSRWQEWLKDIDQVTLSPKPPSSKMTVNFETLDFIVSNLRDDQITFKIPVFNDEDLAFAKGIQERYQPDVLYLSAGNPEPQAQGDIVSAQLNRLRELWERVAADDTWGNVRVLPQLHTLLYDNQRGV

SEQ ID NO: 34523 - protein, 238 aa, Streptococcus infantis
  misc_feature (1)..(238): tr|E8K2R2|E8K2R2_9STRE 7-carboxy-7-deazaguanine synthas e OS=Streptococcus infantis ATCC 700779 OX=889204 GN=qu eE PE=3 SV=1
MTKERVLKLPVLEIFGPTFQGEGRAIGQKTMFVRTAGCDYHCDWCDSAFTWDGSEKPTRMTADEVIAELDKLGSYDYVTLSGGNPAILAANMAQLVTKLKERGITLAVETQGSRWQNWLKDIDQVTLSPKPPSSKMEVNFETLDFIVSQLDPDKVTFKIPVFDDADLAFAKNIQERYKPDVLFLSAGNPEPKATGNIVQDQLDRLKELWERVAADDSWGNVRVLPQLHTLLYDNQRGV

SEQ ID NO: 34524 - protein, 238 aa, Streptococcus infantis
  misc_feature (1)..(238): tr|A0A139RE92|A0A139RE92_9STRE 7-carboxy-7-deazaguanine synthase OS=Streptococcus infantis OX=68892 GN=queE PE =3 SV=1
MTSERVLKLPVLEIFGPTFQGEGRAIGQKTMFVRTAGCDYHCDWCDSAFTWDGSEKPTRMTADEVIAELDKLGSYDYVTLSGGNPAILAANMAELVTKLKQRGVTLAVETQGSRWQNWLKDIDQVTLSPKPPSSKMEVNFETLDFIVSQLDSDKVTFKIPVFDDADLAFAKGIQERYQPDVLFLSAGNPEPKATGNIVQDQLDRLKELWERVAADDSWGNVRVLPQLHTLLYDNQRGV

SEQ ID NO: 34525 - protein, 99 aa, Streptococcus lutetiensis
  misc_feature (1)..(99): tr|A0A2X3WAG5|A0A2X3WAG5_9STRE Radical SAM domain-conta ining protein OS=Streptococcus lutetiensis OX=150055 GN =queE_2 PE=4 SV=1
MTKRPLMIPVLEIFGPTFQGEGRAIGQKTMFVRTAVCDYHCAWCDSVFTWDGSEKPKRMTADEIIAELDKLGSYDYVTLSGGNPCLLGAKANMGNWLLS

SEQ ID NO: 34526 - protein, 103 aa, Streptococcus lutetiensis
  misc_feature (1)..(103): tr|A0A4V0E5J1|A0A4V0E5J1_9STRE Radical SAM domain-conta ining protein OS=Streptococcus lutetiensis OX=150055 GN =queE_1 PE=4 SV=1
MTVNFEILDFIVSQLDKDQVTFKIPVFNDEDLTFAKMIQKRYQPDVLYLSAGNPEPHACGNIVEAQLNHLRQLWETVAADTEWKSVRVLPQLHTLLYDNKRGV

SEQ ID NO: 34527 - protein, 238 aa, Streptococcus macedonicus
  misc_feature (1)..(238): tr|A0A2G3NYA5|A0A2G3NYA5_STRMC 7-carboxy-7-deazaguanine synthase OS=Streptococcus macedonicus OX=59310 GN=queE PE=3 SV=1
MMTKRQLTLPILEIFGPTFQGEGREIGQKTMFVRTGGCDYHCDWCDSAFTWDGSEKPKRMTVDEVIEQLDQLGTYNHVTLSGGNPCLLANNMAELVAKLKALGVTLAIETQGSRWQTWLKDIDQVTLSPKPPSSKMTVNFETLDFIVSQLKKDQMTFKIPVFDDADLAFAKMIQKRYQPDVLYLSAGNPEPHANGNIVEHQLDRLRQLWETVAADPEWQSVRVLPQLHTLLYDNQRGV

SEQ ID NO: 34528 - protein, 237 aa, Streptococcus macedonicus
  misc_feature (1)..(237): tr|A0A1C3SPA7|A0A1C3SPA7_STRMC 7-carboxy-7-deazaguanine synthase OS=Streptococcus macedonicus OX=59310 GN=queE PE=3 SV=1
MTKRQLTLPILEIFGPTFQGEGREIGQKTMFVRTGGCDYHCDWCDSAFTWDGSEKPKRMTVDEVIEQLDQLGTYNHVTLSGGNPCLLANNMAELVAKLKALGVTLAIETQGSRWQTWLKDIDQVTLSPKPPSSKMTVNFETLDFIVSQLKKDQMTFKIPVFDDADLAFAKMIQKRYRPDVLYLSAGNPEPHANGNIVEHQLDRLRQLWETVAADPEWQSVRVLPQLHTLLYDNQRGV

SEQ ID NO: 34529 - protein, 238 aa, Streptococcus mitis
  misc_feature (1)..(238): tr|S7XJ79|S7XJ79_STRMT 7-carboxy-7-deazaguanine synthas e OS=Streptococcus mitis 29/42 OX=1340486 GN=queE PE=3 SV=1
MTRERVLKLPVLEIFGPTFQGEGRAIGQKTMFVRTAGCDYHCDWCDSAFTWDGSEKPTRMTADEVIAELDKLGSYDYVTLSGGNPAILAANMAELVTKLKERGVTLAVETQGSRWQNWLKDIDQVTLSPKPPSSKMEVNFETLDFIVSQLDPDKVTFKIPVFDDADLAFAKGIQERYQPDVLFLSAGNPEPKATGNIIQDQLDRLKELWERVAADDSWGNVRVLPQLHTLLYDNQRGV

SEQ ID NO: 34530 - protein, 238 aa, Streptococcus mitis
  misc_feature (1)..(238): tr|A0A4U9YZC0|A0A4U9YZC0_STRMT 7-carboxy-7-deazaguanine synthase OS=Streptococcus mitis OX=28037 GN=queE PE=3 SV=1
MTRERVLKLPVLEIFGPTFQGEGRAIGQKTMFVRTAGCDYHCDWCDSAFTWDGSEKPTRMTADEVIAALDKLGSYDYVTLSGGNPAILAANMAELVTKLKERGITLAVETQGSRWQNWLKDIDQVTLSPKPPSSKMEVNFETLDFIVSQLDPNKVTFKIPVFDDADLAFAKGIQERYQPDVLFLSAGNPEPKARGNIVQDQLDRLKELWERVAADDSWGNVRVLPQLHTLLYDNQRGV

SEQ ID NO: 34531 - protein, 238 aa, Streptococcus mutans
  misc_feature (1)..(238): tr|A0A3S4WL38|A0A3S4WL38_STRMG 7-carboxy-7-deazaguanine synthase OS=Streptococcus mutans OX=1309 GN=queE PE=3 SV=1
MKKQHLLKLPILEIFGPTFQGEGRSIGQKTMFVRTGGCDYHCDWCDSAFTWDGSEKPTMMTSDQVIDELDKLGHYDYVTLSGGNPCLLAANMEELVTKLKDRQVTLAVETQGSRWQSWLKDIDQVTLSPKPPSSKMDVHFETLDFIVSQLDPQKVAYKIPIFDEADLDFAKMIQERYQPDVLYLSAGNPEPKASGDIVQHQLTRLKNLWMRVAQDNSWGNVRVLPQLHTLVYDNKRGV

SEQ ID NO: 34532 - protein, 243 aa, Streptococcus mutans
  misc_feature (1)..(243): tr|A0A2J9QEP0|A0A2J9QEP0_STRMG 7-carboxy-7-deazaguanine synthase OS=Streptococcus mutans OX=1309 GN=queE PE=3 SV=1
MGFTSMKKQRLLKLPVLEIFGPTFQGEGRAIGQKTMFVRTGGCDYHCDWCDSAFTWDGSEKPTMMTSDQIIEALDKLGTYDYVTLSGGNPCLLAANMAQLVRKLKKRQVTLAVETQGSRWQEWLKAIDQVTLSPKPPSSKMKVNLQTLDFIVSNLDPQKVTYKIPIFDEDDLKFAQMIQGRYQPDVLYLSVGNPEPKASGDIVQNQLKRLKELWEYIAQDDSWGNVRVLPQLHTLVYDNKRGV

SEQ ID NO: 34533 - protein, 238 aa, Streptococcus oralis
  misc_feature (1)..(238): tr|A0A428IKC0|A0A428IKC0_STROR 7-carboxy-7-deazaguanine synthase OS=Streptococcus oralis OX=1303 GN=queE PE=3 SV=1
MTRERVLKLPVLEIFGPTFQGEGRAIGQKTMFVRTAGCDYHCDWCDSAFTWDGSEKPTRMTADEVIAALDKLGSYDYVTLSGGNPAILAANMAQLVTKLKERGVTLAVETQGSRWQNWLKDIDQVTLSPKPPSSKMEVNFETLDFIVSQLDPDKVTFKIPVFDDADLAFAKEVQERYQPDVLFLSAGNPEPKATGNIVQDQLDRLKELWEHVAADDSWGNVRVLPQLHTLLYDNQRGV

SEQ ID NO: 34534 - protein, 238 aa, Streptococcus oralis
  misc_feature (1)..(238): tr|A0A1X1J3L0|A0A1X1J3L0_STROR 7-carboxy-7-deazaguanine synthase OS=Streptococcus oralis subsp. dentisani OX=1 458253 GN=queE PE=3 SV=1
MTRERVLKLPVLEIFGPTFQGEGRAIGQKTMFVRTAGCDYHCDWCDSAFTWDGSEKPTRMTADEVIAALDKLGSYDYVTLSGGNPAILAANMAQLVTKLKERGVTLAVETQGSRWQNWLKDIDQVTLSPKPPSSKMEVNFETLDFIVSQLDPDKVTFKIPVFDDADLAFAKGIQERYQPDVLFLSAGNPEPKATGNIVQDQLDRLKELWERVAADDSWGNVRVLPQLHTLLYDNQRGV

SEQ ID NO: 34535 - protein, 237 aa, Streptococcus pasteurianus
  misc_feature (1)..(237): tr|F5X766|F5X766_STRPX 7-carboxy-7-deazaguanine synthas e OS=Streptococcus pasteurianus (strain ATCC 43144 / JC M 5346 / CDC 1723-81) OX=981540 GN=queE PE=3 SV=1
MTKRQLTLPILEIFGPTFQGEGRAIGQKTMFVRTGGCDYHCDWCDSAFTWDGSEKPKRMTTDEVIEQLDQLGTYDYVTLSGGNPCLLANNMAELVAKLKARGVTLAIETQGSRWQTWLKDIDQVTLSPKPPSSKMTVNFETLDFIVSQLKKDQITFKVPVFDDADLVFAKMIQKRYQPDVLYLSAGNPEPHANGNIVEHQLERLRQLWETVATDPEWQSVRVLPQLHTLLYDNQRGV

SEQ ID NO: 34536 - protein, 237 aa, Streptococcus pasteurianus; identical to SEQ ID NO: 34535
  misc_feature (1)..(237): tr|A0A135YN06|A0A135YN06_9STRE 7-carboxy-7-deazaguanine synthase OS=Streptococcus pasteurianus OX=197614 GN=qu eE PE=3 SV=1

SEQ ID NO: 34537 - protein, 238 aa, Streptococcus peroris
  misc_feature (1)..(238): tr|E8KDG7|E8KDG7_9STRE 7-carboxy-7-deazaguanine synthas e OS=Streptococcus peroris ATCC 700780 OX=888746 GN=que E PE=3 SV=1
MTKERVLKLPVLEIFGPTFQGEGRAIGQKTMFVRTAGCDYHCDWCDSAFTWDGSEKPTRMTADEVIAALDKLGTYDYVTLSGGNPALLAANMAELVTKLKERGVTLAVETQGSRWQTWLKDIDQVTLSPKPPSSKMEVNFETLDFIVSHLDPDKVTFKIPVFNEEDLEFAKDIQKRYKPDVLYLSAGNPEPKATGNIVQDQLDRLKELWERIAADDSWGNVRVLPQLHTLLYDNQRGV

SEQ ID NO: 34538 - protein, 223 aa, Streptococcus pneumoniae
  misc_feature (1)..(223): tr|A0A4U9LPS1|A0A4U9LPS1_STREE 7-carboxy-7-deazaguanine synthase OS=Streptococcus pneumoniae OX=1313 GN=queE P E=3 SV=1
MQYPINEMFQTLQGEGYFTGVPAIFIRLQGCPVGCAWCDTKQTWEKLEDREVSLFSILAKTKESDKWGAASSEDLLAVISRQGYTARHVVITGGEPCIHDLLPLTDLLEKNGFSCQIETSGTHEVRCTPNTWVTVSPKLNMRGGYDVLSQALERANEIKHPVGRVRDIEALDELLATLTDDKPRVIALQPISQKDDATRLCIETCIARNWRLSMQTHKYLNIA

SEQ ID NO: 34539 - protein, 238 aa, Streptococcus pneumoniae
  misc_feature (1)..(238): tr|A0A0T8TL07|A0A0T8TL07_STREE 7-carboxy-7-deazaguanine synthase OS=Streptococcus pneumoniae OX=1313 GN=queE P E=3 SV=1
MTRERVLKLPVLEIFGPTFQGEGRAIGQKTMFVRTAGCDYHCDWCDSAFTWDGSEKPTRMTADEVIAALDKLGSYDYVTLSGGNPAILAANMAELVTKLKERGVTLAVETQGSRWQNWLKDIDQVTLSPKPPSSKMEVNFETLDFIVSQLDPDKVTFKIPVFDDADLAFARGIQERYQPDVLFLSAGNPEPKATGNIVQDQLDRLKELWERIAADDSWGNVRVLPQLHTLLYDNQRGV

SEQ ID NO: 34540 - protein, 238 aa, Streptococcus pseudopneumoniae
  misc_feature (1)..(238): tr|G0I719|G0I719_STRES 7-carboxy-7-deazaguanine synthas e OS=Streptococcus pseudopneumoniae (strain IS7493) OX= 1054460 GN=queE PE=3 SV=1
MTRERVLKLPVLEIFGPTFQGEGRAIGQKTMFVRTAGCDYHCDWCDSAFTWDGSEKPTRMTADEVIAALDKLGSYDYVTLSGGNPAILAANMAELVTKLKERGVTLAVETQGSRWQNWLKDIDQVTLSPKPPSSKMEVNFETLDFIVSQLDPDKVTFKIPVFDDDDLAFARGIQERYQPDVLFLSAGNPEPKARGNIVQDQLDRLKELWERIAADDSWGNVRVLPQLHTLLYDNKRGV

SEQ ID NO: 34541 - protein, 238 aa, Streptococcus pseudopneumoniae
  misc_feature (1)..(238): tr|A0A3A4N138|A0A3A4N138_9STRE 7-carboxy-7-deazaguanine synthase OS=Streptococcus pseudopneumoniae OX=257758 G N=queE PE=3 SV=1
MTRERVLKLPVLEIFGPTFQGEGRAIGQKTMFVRTAGCDYHCDWCDSAFTWDGSEKPTRMTADEVIAALDKLGSYDYVTLSGGNPAILAANMAELVTKLKERGVTLAVETQGSRWQNWLKDIDQVTLSPKPPSSKMEVNFETLDFIVSQLEPDKVTFKIPVFDDADLAFAKGIQERYQPDVLFLSAGNPEPKATGNIVQDQLDRLKELWERVAADDSWGNVRVLPQLHTLLYDNQRGV

SEQ ID NO: 34542 - protein, 238 aa, Streptococcus ratti; identical to SEQ ID NO: 34531
  misc_feature (1)..(238): tr|J3JP79|J3JP79_STRRT 7-carboxy-7-deazaguanine synthas e OS=Streptococcus ratti FA-1 = DSM 20564 OX=699248 GN= queE PE=3 SV=1

SEQ ID NO: 34543 - protein, 243 aa, Streptococcus ratti
  misc_feature (1)..(243): tr|A0A5J6NMV4|A0A5J6NMV4_STRRT 7-carboxy-7-deazaguanine synthase QueE OS=Streptococcus ratti OX=1341 GN=queE P E=4 SV=1
MGFASMKKQHLLKLPILEIFGPTFQGEGRSIGQKTMFVRTGGCDYHCDWCDSAFTWDGSEKPTMMTSDQVIDELDKLGHYDYVTLSGGNPCLLAANMEELVTKLKDRQVTLAVETQGSRWQSWLKDIDQVTLSPKPPSSKMDVHFETLDFIVSQLDPQKVAYKIPIFDEADLDFAKMIQERYQPDVLYLSAGNPEPKASGDIVQHQLTRLKNLWMRVAQDNSWGNVRVLPQLHTLVYDNKRGV

SEQ ID NO: 34544 - protein, 247 aa, Streptococcus salivarius
  misc_feature (1)..(247): tr|J7SIR4|J7SIR4_STRSL 7-carboxy-7-deazaguanine synthas e OS=Streptococcus salivarius K12 OX=1200793 GN=queE PE =3 SV=1
MQSLDGSGWMTRERVLKLPVLEIFGPTFQGEGRAIGQKTMFVRTAGCDYHCDWCDSAFTWDGSEKPTRMTADEVIEALDALGTYDYVTLSGGNPALLAANMAELVSKLKARGVTLAVETQGSRWQEWLKDIDQVTLSPKPPSSKMEVNMETLDFIVSQLDPDKVTFKVPVFDDADLAFAKMIQKRYQPDVMFLSAGNPEPKAEGNIVQHQLDRLKELWETVAADNSWGNVRVLPQLHTLLYDNERGV

SEQ ID NO: 34545 - protein, 238 aa, Streptococcus salivarius
  misc_feature (1)..(238): tr|A0A0A1DXJ9|A0A0A1DXJ9_STRSL 7-carboxy-7-deazaguanine synthase OS=Streptococcus salivarius OX=1304 GN=queE P E=3 SV=1
MTRERVLKLPVLEIFGPTFQGEGRAIGQKTMFVRTAGCDYHCDWCDSAFTWDGSEKPTRMTADEVIEALDALGTYDYVTLSGGNPALLAANMAELVSKLKARGVTLAVETQGSRWQEWLKDIDQVTLSPKPPSSKMEVNMETLDFIVSQLDPDKVTFKVPVFDDDDLAFAKMIQERYQPDVMFLSAGNPEPKAEGNIVQHQLDRLKELWETVAADDSWGNVRVLPQLHTLLYDNERGV

SEQ ID NO: 34546 - protein, 238 aa, Streptococcus sobrinus
  misc_feature (1)..(238): tr|U2KHJ7|U2KHJ7_9STRE 7-carboxy-7-deazaguanine synthas e OS=Streptococcus sobrinus W1703 OX=1227275 GN=queE PE =3 SV=1
MRKQRQLKLPILEIFGPTFQGEGRAIGQKTMFIRTGGCDYHCDWCDSAFTWDDSEKATPMTSDQVIAELDKLGTYDYVTLSGGNPCLQAANMAELVNKLKERGVTLAVETQGSRWQDWLLDIDQVTLSPKPPSSKMEVNMETLDFIVSKLDPAKVTYKIPIFNDADLAFAKEIQARYKPDVLYLSVGNPEPTAEGDIVRHQLDRLHALWDKVALDDSWGNVRVLPQLHTLVYDNQRGV

SEQ ID NO: 34547 - protein, 238 aa, Streptococcus sp.
  misc_feature (1)..(238): tr|A0A1E9G826|A0A1E9G826_9STRE 7-carboxy-7-deazaguanine synthase OS=Streptococcus sp. HMSC076C08 OX=1739270 GN =queE PE=3 SV=1
MTRERVLKLPVLEIFGPTFQGEGRAIGQKTMFVRTAGCDYHCDWCDSAFTWDGSEKPTRMTADEVIAALDKLGSYDYVTLSGGNPAILAANMAELVTKLKERGVTLAVETQGSRWQNWLKDIDQVTLSPKPPSSKMEVNFETLDFIVSQLDPGKVTFKIPVFDDADLAFAKGIQERYQPDVLFLSAGNPEPKATGNIVQDQLDRLKELWKRVAADDSWGNVRVLPQLHTLLYDNQRGV

SEQ ID NO: 34548 - protein, 237 aa, Streptococcus sp.
  misc_feature (1)..(237): tr|A0A4R5G5Y3|A0A4R5G5Y3_9STRE 7-carboxy-7-deazaguanine synthase OS=Streptococcus sp. KCJ4950 OX=2545467 GN=qu eE PE=3 SV=1
MTKRQLKLPILEIFGPTFQGEGRAIGQKTMFVRTGGCDYHCAWCDSAFTWDGSEKAKPMTADEVIEQLDRLGDYDYVTLSGGNPCLLGANMADLVAKLKARGVTLAIETQGSRWQTWLKDIDQVTLSPKPPSSQMTVNFETLDFIVSQLDKNQITFKIPVFDDADLAFAKIIQRRYQPDVLYLSAGNPEPHVSGNIVEHQLDRLRHLWETVAADPEWKSVRVLPQLHTLLYDNQRGV

SEQ ID NO: 34549 - protein, 238 aa, Streptococcus thermophilus
  misc_feature (1)..(238): tr|A0A564RYV2|A0A564RYV2_STRTR 7-carboxy-7-deazaguanine synthase OS=Streptococcus thermophilus OX=1308 GN=queE _1 PE=3 SV=1
MTRERVLKLPVLEIFGPTFQGEGRAIGQKTMFVRTAGCDYHCDWCDSAFTWDGSEKPTRMTADEVIAALDALGTYDYVTLSGGNPALLAANMAELISKLKARGVTLAVETQGSRWQEWLRDIDQVTLSPKPPSSKMEVNLETLDFIVSQLDPDKVTFKVPVFDDADLDFAKMIQERYQPDVMFLSAGNPEPKAEGNIVQHQLERLKELWETVAADDSWGNVRVLPQLHTLLYDNKRGV

SEQ ID NO: 34550 - protein, 238 aa, Streptococcus thermophilus
  misc_feature (1)..(238): tr|A0A3G6JJI7|A0A3G6JJI7_STRTR 7-carboxy-7-deazaguanine synthase OS=Streptococcus thermophilus OX=1308 GN=queE PE=3 SV=1
MTRERVLKLPVLEIFGPTFQGEGRAIGQKTMFVRTAGCDYHCDWCDSAFTWDGSEKPTRMTADEVIEALDALGTYDYVTLSGGNPALLAANMAELVSKLKARDVTLAVETQGSRWQEWLREIDQVTLSPKPPSSKMEVNMETLDFIVSQLDPDKLTFKVPVFDDTDLAFAKMIQERYQPDVMFLSAGNPEPKAEGNIVQHQLDRLKELWETIAADDSWRNVRVLPQLHTLLYANERGV

SEQ ID NO: 34551 - protein, 243 aa, Streptococcus troglodytae
  misc_feature (1)..(243): tr|A0A1L7LJR9|A0A1L7LJR9_9STRE 7-carboxy-7-deazaguanine synthase OS=Streptococcus troglodytae OX=1111760 GN=ex sD PE=3 SV=1
MGLKIMKKQHLLKLPILEIFGPTFQGEGRAIGQKTMFVRTGGCDYHCDWCDSAFTWDGSEKPTMMTSDQIIEALDKLGTYDYVTLSGGNPCLLAANMAQLVSKLKKRQVTLAVETQGSRWQEWLKAIDQVTLSPKPPSSKMKVNLQTLDFIVSNLDPQKVTYKIPIFDEADLAFAQMIQERYQPDVLYLSVGNPEPKASGDIVQNQLKRLKKLWEHIAQDDSWGNVRVLPQLHTLVYDNKRGV

SEQ ID NO: 34552 - protein, 238 aa, Streptococcus vestibularis
  misc_feature (1)..(238): tr|A0A3E4XH50|A0A3E4XH50_STRVE 7-carboxy-7-deazaguanine synthase OS=Streptococcus vestibularis OX=1343 GN=queE PE=3 SV=1
MTRERVLKLPVLEIFGPTFQGEGRAIGQKTMFVRTAGCDYHCDWCDSAFTWDGSEKPTRMTADEVIEALDALGIYDYVTLSGGNPALLAANMAELVSKLKERGVTLAVETQGSRWQEWLKDIDQVTLSPKPPSSKMEVNMETLDFIVSQLDPDKVTFKVPVFDDADLAFAKMIQERYQPDVMFLSAGNPEPKAEGNIVQHQLNRLKELWETVAADDSWGNVRVLPQLHTLLYDNERGV

SEQ ID NO: 34553 - protein, 238 aa, Streptococcus vestibularis
  misc_feature (1)..(238): tr|E3CQ04|E3CQ04_STRVE 7-carboxy-7-deazaguanine synthas e OS=Streptococcus vestibularis F0396 OX=904306 GN=queE PE=3 SV=1
MTRERVLKLPVLEIFGPTFQGEGRAIGQKTMFVRTAGCDYHCDWCDSAFTWDGSEKPTRMTADEVIEALDALGTYDYVTLSGGNPALLAANMAQLVSKLKARGVTLAVETQGSRWQEWLKDIDQVTLSPKPPSSKMEVNMEILDFIVSQLDPDKLTFKVPVFDDADLAFAKMIQERYQPDVMFLSAGNPEPKAEGNIVQHQLDRLKELWETVAADDSWGNVRVLPQLHTLLYDNERGV

SEQ ID NO: 34554 - protein, 222 aa, Streptomyces acidiscabies
  misc_feature (1)..(222): tr|A0A0L0JIE8|A0A0L0JIE8_9ACTN 7-carboxy-7-deazaguanine synthase OS=Streptomyces acidiscabies OX=42234 GN=queE PE=3 SV=1
MQGEGPSLGRRCAFVRLGGCNLSCRWCDTPYTWDWKGVADSGVAYSPGAELHTVHWRDVLDRLTGYGVPMVVVSGGEPLGQQRRLVPLLRALAESGHAVEIETNGTVVPDPDVAERVRFNVSPKLAHSGDRSGRRIVPRALRAFSRLPGTAFKFVCRDSRDLDEVAEVAGMCDAESVWIMPEGRTADEIHRTLRILGDEVIERGWNLTTRLHVTLWDNRRGV

SEQ ID NO: 34555 - protein, 222 aa, Streptomyces acidiscabies
  misc_feature (1)..(222): tr|A0A100JEC3|A0A100JEC3_9ACTN 7-carboxy-7-deazaguanine synthase OS=Streptomyces acidiscabies OX=42234 GN=queE PE=3 SV=1
MQGEGPSLGRRCAFVRLGGCNLSCRWCDTPYTWDWKGVADSGVAYSPGAELHTVHWRDVLDRLTGYGVPMVVVSGGEPLGQQRRLVPLLRALAESGHAVEIETNGTVVPDPDVAERVRFNVSPKLAHSGDRSGRRIVPRALRAFSRLPGTAFKFVCRDSRDLDEVAEVAGMCDAGSVWIMPEGRTADEIHRTLRILGDEVIERGWNLTTRLHVTLWDNRRGV

SEQ ID NO: 34556 - protein, 209 aa, Streptomyces ahygroscopicus
  misc_feature (1)..(209): tr|K7SDP5|K7SDP5_9ACTN 7-carboxy-7-deazaguanine synthas e OS=Streptomyces ahygroscopicus subsp. wuzhouensis OX= 387850 GN=tymC PE=3 SV=1
MRLGGCNLSCRWCDTPYTWDWTGVGDSGVAYDPKRELRPMPWTDVLRALLAYEVPLIVVSGGEPLSQQRRLLPLLGALTEAGRKVEIETNGTVVPQDDLVALGVRFNVSPKLSHSGDPQARRIVPDALRAFAAVPGTAFKFVCRTTSDLDEVAQLVDRYGTRPVWIMPEGQVPAEVGQHLSALGDDVVARGWNLTTRLHVAVWGDRRGV

SEQ ID NO: 34557 - protein, 211 aa, Streptomyces albidoflavus
  misc_feature (1)..(211): tr|A0A2A2UNC9|A0A2A2UNC9_9ACTN 7-carboxy-7-deazaguanine synthase OS=Streptomyces albidoflavus OX=1886 GN=queE PE=3 SV=1
MTYLIKEIFYTLQGEGSHAGRPAVFCRFSRCNLWTGREQDRARAICQFCDTDFVGTDGEGGGRFRTPQDLADAVEAAWPTTDRAHRFVVCTGGEPLLQLDEETIEALHERGFEVAVETNGTRPAPRGIDWLCVSPKIGSTLVLTQGDELKLVYPQVGGDPAQFEELDFRHFRLQPLDDAHREAHTRATVEYCMKNPRWTLSLQTHKYLGIQ

SEQ ID NO: 34558 - protein, 242 aa, Streptomyces alboflavus
  misc_feature (1)..(242): tr|A0A291W4N4|A0A291W4N4_9ACTN 7-carboxy-7-deazaguanine synthase OS=Streptomyces alboflavus OX=67267 GN=queE P E=3 SV=1
MDETEQKHFDRERELIVSEVFGDTQPTFQGEGPSMGVPALFIRLAQCNLTCTWCDTKYTWDWSRYDIKKETRRRSVDELIAWVLGCDTELVVITGGEPLLQQGVIRLVSGLLAGGKRVEIETNGTIAPDPRLLVDGVRFNVSPKLANSGVAEGKRIVPNALAAFAASGHARFKFVTRSVAELDEIQQLVDRFQLSPVYVMPEGTTAEVQIQTTRALADAVAARKWHLTQRLHILAFADARGR

SEQ ID NO: 34559 - protein, 223 aa, Streptomyces albulus
  misc_feature (1)..(223): tr|A0A059WH18|A0A059WH18_STRA9 7-carboxy-7-deazaguanine synthase OS=Streptomyces albulus OX=68570 GN=queE_2 PE =3 SV=1
MQGEGPSAGQRCAFVRLGGCNLSCRWCDTPYTWDWTGVGDSGVAYDPKRELRPMPWTDVLRALLAYEVPLIVVSGGEPLSQQRRLLPLLRALTEAGRKVEIETNGTVVPQDDLVALGVRFNVSPKLSHSGDPQARRIVPDALRAFAAVPGTAFKFVCRTTSDLDEVAQLVDRYGTRPVWIMPEGQVPAEVGQHLSALGDDVVARGWNLTTRLHVAVWGDRRGV

SEQ ID NO: 34560 - protein, 370 aa, Streptomyces albulus
  misc_feature (1)..(370): tr|A0A401QQX5|A0A401QQX5_STRA9 7-carboxy-7-deazaguanine synthase OS=Streptomyces albulus OX=68570 GN=queE_1 PE =4 SV=1
MTFDRLHLVSKLYQPSGWPRILEAATGTRSSGPLVVDLDPTTFCDLACPECISGKLLNQGRFTPERLAELAGELVEMEVRGVVLIGGGEPLAHRGTRQVLRVLGEAGIAIGVVTNGTLIRQNLAELAAYASWVRVSVDAGTSETYRRFRPDRKGRSVFDKVIGNMRLLAEAKRGALGYSFLVMTRQEPDGTVVTNHHEVLQAAELAHDIGCDYFETKAMFDDGHHVIQVPDEILTSVDEQLDKAAVLAGDGFEVVNSSTLTSLRNRVGPVQEKDYHRCRVAELRTLVTPSGVYVCSYHRGNAGARIGDAVTESLPEIWRTSDRGIVDPSRDCRFHCARHRSNLELERIGIGTTAGTLAAPEPGTDYDPFI

SEQ ID NO: 34561 - protein, 244 aa, Streptomyces albus
  misc_feature (1)..(244): tr|A0A0X7JBM7|A0A0X7JBM7_9ACTN 7-carboxy-7-deazaguanine synthase OS=Streptomyces albus subsp. albus OX=67257 G N=queE PE=3 SV=1
MSRQETTRGRKIVVNEIFGPTIQGEGPSMGRICSFVRLGGCNLTCTWCDTPYTWDWTGQSNEGTAYDPKAELHAMHVVDVADRLRAMDVRLVVISGGEPLQQQQTVTPLCHMLKESGVSVEIETNGTIAPSPALTATQARFNVSPKLRHSGMGPERTVVPVALRALNATGGAAFKFVCRGPADLEEVDAIVARHGLESVWIMPEGQDQETLTRHMSSLADAVVARRWNMSTRIHVQAWGNRRGV

SEQ ID NO: 34562 - protein, 250 aa, Streptomyces atratus
  misc_feature (1)..(250): tr|A0A2Z5JQ07|A0A2Z5JQ07_STRAR 7-carboxy-7-deazaguanine synthase OS=Streptomyces atratus OX=1893 GN=queE PE=3 SV=1
MVGATPAKGSALAKALGRAPNNAREVISVEDAGEGEVVALTTSTGNYIAEGWLVHNCDTPYTWDASRFDLRKELTRRPVPELVDRLLDGAPGIVVITGGEPLLHQRRPGWTALLDALTTAGVEIEVEANGTLVPSPYTAEHVTRFNVSPKLDHAGDPEDKRIRPEALAVLVATGRAAFKFVCRTPADVDQVAAHASTLGLPAHTVWVMPEGTTTAELDDRLRTIADPAIAAGFNLTTRLHVHAWGDERAR

SEQ ID NO: 34563 - protein, 248 aa, Streptomyces avidinii
  misc_feature (1)..(248): tr|A0A329BSH6|A0A329BSH6_STRAV 7-carboxy-7-deazaguanine synthase OS=Streptomyces avidinii OX=1895 GN=queE PE=3 SV=1
MTASETITDEPAAAEGESRLIVAECFGVEVPTFQGEGPSCGHPALFIRLSRCNLTCSKCDTKYTWDWSRFDPRKESTKRSVADLVAWAESSPVELVVITGGEPLIQQARLVPLVRGLTAVGKRVEFETNGTIAPAPELMADGIRFNVSPKLASFGVEETKSIVPAALEAFVASGRSAFKFVASTVADLDRIAELADAHRLAPVWVMPEGTTPEAITATTRVLADAVAARHWHFTTRLHVLAFADARGR

SEQ ID NO: 34564 - protein, 170 aa, Streptomyces bingchenggensis
  misc_feature (1)..(170): tr|D7BPU8|D7BPU8_STRBB 7-carboxy-7-deazaguanine synthas e OS=Streptomyces bingchenggensis (strain BCW-1) OX=749 414 GN=queE PE=3 SV=1
MDPADVVERLLAFGVGLIVISGGEPLNQQSRLEPVIRALREAGIAVEIETNGTVAPQAALAAAGIRFNVSPKLAHSGIAEKRRIVPEVLGEFTRLPGAAFKFVCATASDLEEVDALVARHSLKNIWIMPRGQSPEEIEEGIRTLADEVVGRKWNLSGRLHVTIWGSKRGV

SEQ ID NO: 34565 - protein, 247 aa, Streptomyces bungoensis
  misc_feature (1)..(247): tr|A0A117RGU1|A0A117RGU1_9ACTN 7-carboxy-7-deazaguanine synthase OS=Streptomyces bungoensis OX=285568 GN=queE PE=3 SV=1
MTTTKPLNLEPEAAEGESLIVAECFGTEVPTFQGEGPSCGHPALFIRLSRCNLTCTRCDTKYTWDWSRFDPHEESTRQSVAGLVAWASSSPVELVVITGGEPLIQQARLVPLVRGLITAGKRIEFETNGTIAPTPELVADGVRFNVSPKLASFGVKETKSIVPAALEAFVASGRAAFKFVASTVDDLDRIAELADAHRLAPVWVMPEGTTPEVITATTRVLADGVAARHWHFTIRLHVLAFADARGR

SEQ ID NO: 34566 - protein, 239 aa, Streptomyces caelestis
  misc_feature (1)..(239): tr|A0A0M8QPC3|A0A0M8QPC3_9ACTN 7-carboxy-7-deazaguanine synthase OS=Streptomyces caelestis OX=36816 GN=queE PE =3 SV=1
MQLDTDHEFELIIAYTFGDTQPTFQGEGPSAGTPALFIRLSRCNLTCLWCDTKETWDWVNYDIKKESHKRTVDDLAAWALGQNVELVVITGGEPLLQQKKLVPLVQRLLAGGKRIEFETNGTIAPLPELLIDGVRFSVSPKLANSDVAEHKRIVPQALRAFAASGQAIFKFVTRTVGDLDEIASYAEQFGLAPVYVMPEGATAEGLVATTRLLADHVPARGWHFTQRMHIFAFGDKRAR

SEQ ID NO: 34567 - protein, 240 aa, Streptomyces caeruleatus
  misc_feature (1)..(240): tr|A0A101U5Y4|A0A101U5Y4_9ACTN 7-carboxy-7-deazaguanine synthase OS=Streptomyces caeruleatus OX=661399 GN=queE PE=3 SV=1
MRAALLEAPQRRSLRIAETFADTVQGEGPSTGTPALFIRFMLCNLICRGCDTPYTWDSSRFDLRAESKWRSIDDLLGWVLGRPEKLVVITGGEPLLQPELLTLVQELRAAGRDVEIETNGTIPPAKELVDAGPWFNASPKLSGFGSGMPQSRRIVPDALRALAASGRTRWKFVVTDPCELDEIAGLEATYGLAPISVMPEGTTPEAVLDGMRTLVEPVAGRGWRLGTRLHVLLWGDERGR

SEQ ID NO: 34568 - protein, 247 aa, Streptomyces capillispiralis
  misc_feature (1)..(247): tr|A0A561TQD1|A0A561TQD1_9ACTN 7-carboxy-7-deazaguanine synthase OS=Streptomyces capillispiralis OX=68182 GN=q ueE PE=3 SV=1
MTTTKPLNLEPEAAEGESLIVAECFGTEVPTFQGEGPSCGHPALFIRLSRCNLTCTRCDTKYTWDWSRFDPHEESTRESVAGLVAWATSSPVELVVITGGEPLIQQARLVPLVRGLIAAGKRIEFETNGTIAPTPELVADGVRFNVSPKLASFGVKETKSIVPAALEAFVASGRAAFKFVASTVDDLDRIAELADAHRLAPVWVMPEGTTPEVITATTRVLADGVAARHWHFTTRLHVLAFADARGR

SEQ ID NO: 34569 - protein, 235 aa, Streptomyces cattleya
  misc_feature (1)..(235): tr|F8JT13|F8JT13_STREN 7-carboxy-7-deazaguanine synthas e OS=Streptomyces cattleya (strain ATCC 35852 / DSM 464 88 / JCM 4925 / NBRC 14057 / NRRL 8057) OX=1003195 GN=q ueE PE=3 SV=1
MSGPTLVVAEVFGPTVQGEGPSTGRRAAFIRLGGCNLTCSWCDTPYTWDATRYDLRTQLTRQPTADIAARALEGAPAVVVITGGEPLLHQHQPGWLDLLDRLADAGVDIEIETNGTIAPTPLTTAWATRFNVSPKLASAGDRESRRIREDAIHALRDTGQATFKYVCASAEDVTETEKWVQALGIPPEQVWIMPRGTDAATIGRHLAVIADPAIRAGYNLTTRLHVLTWGNERAR

SEQ ID NO: 34570 - protein, 211 aa, Streptomyces chartreusis
  misc_feature (1)..(211): tr|A0A2N9B6U7|A0A2N9B6U7_STRCX 7-carboxy-7-deazaguanine synthase OS=Streptomyces chartreusis NRRL 3882 OX=1079 985 GN=queE PE=3 SV=1
MTYLIKEIFYTLQGEGGHAGRPAVFCRFSRCNLWTGREQDRARAICQFCDTDFVGTDGEGGGRFRTAEELADAVEAAWPTTDRAHRFVVCTGGEPLLQLDEAAIEALHGRGFEIAVETNGTRPAPRGIDWLCVSPKIGSTLVLTSGDELKLVYPQAGGDPAQFEHLDFRHFRLQPLDDADREAHTRAAVEYCMKNPRWTLSLQTHKYLGIQ

SEQ ID NO: 34571 - protein, 209 aa, Streptomyces diastatochromogenes; identical to SEQ ID NO: 34556
  misc_feature (1)..(209): tr|A0A1L7B5N4|A0A1L7B5N4_9ACTN 7-carboxy-7-deazaguanine synthase OS=Streptomyces diastatochromogenes OX=42236 GN=toyC PE=3 SV=1

SEQ ID NO: 34572 - protein, 241 aa, Streptomyces filamentosus
  misc_feature (1)..(241): tr|W9FK61|W9FK61_STRFL 7-carboxy-7-deazaguanine synthas e OS=Streptomyces filamentosus NRRL 11379 OX=457430 GN= queE PE=3 SV=1
MGRVPAVSIVVNEIFGPTVQGEGPSAGRQCVFLRLGGCNLSCHWCDTPYTWDWKGTSDEKTAFDPRKELHNRDAGEVVEELLALGTGLVVISGGEPLSQQRRLRPVLKGLLEAGVTVEFETNGTVVPDDEIITPGVRFNVSPKLAHAGDPASKRIVPAALTKLAQTTDVAFKFVCRTTDDLDEVGTLQADFGISPIWIMPEGKNVAHISQHLSSLADEVVRRGWNLSTRLHVLAWGDKRGI

SEQ ID NO: 34573 - protein, 241 aa, Streptomyces filamentosus; identical to SEQ ID NO: 34572
  misc_feature (1)..(241): tr|D6AIR3|D6AIR3_STRFL 7-carboxy-7-deazaguanine synthas e OS=Streptomyces filamentosus NRRL 15998 OX=457431 GN= queE PE=3 SV=1

SEQ ID NO: 34574 - protein, 247 aa, Streptomyces griseoaurantiacus
  misc_feature (1)..(247): tr|F3NQA1|F3NQA1_9ACTN 7-carboxy-7-deazaguanine synthas e OS=Streptomyces griseoaurantiacus M045 OX=996637 GN=q ueE PE=3 SV=1
MTTTKPLNLEPEADEGESLIVAECFGTEVPTFQGEGPSCGHPALFIRLSRCNLTCTRCDTKYTWDWSRFDPHEESTRQSVAGLVAWATSSPVELVVITGGEPLIQQARLVPLIRGLIAVGKRIEFETNGTIAPTPELAADGVRFNVSPKLASFGVKETKSIVPAALEAFVASGRAAFKFVASTVDDLDRIAELADAHRLTPVWVMPEGTTPEVITATTRVLADGVAARHWHFTTRLHVLAFADARGR

SEQ ID NO: 34575 - protein, 235 aa, Streptomyces griseocarneus
  misc_feature (1)..(235): tr|A0A3L8IGQ5|A0A3L8IGQ5_9ACTN 7-carboxy-7-deazaguanine synthase OS=Streptomyces griseocarneus OX=51201 GN=que E PE=3 SV=1
MSEPSLVVAEVFGPTVQGEGPSLGQRAGFIRTAGCNLTCSWCDTPYTWDGTRHDLRAELRRVPALDIARRALSGAPNLVVITGGEPLLHQRQPGWDALLEHLARAGVDIEIETNGTVPPSPRTAQTVTRFNVSPKLQHAGDPERRRIRPAALSALHATGKAAFKFVCRTPGDVTAVARYTAAWGVPPSAVWVMPEGTNSARITAHLTAIADAAIDAQFNLTTRLHVHVWGEERER

SEQ ID NO: 34576 - protein, 238 aa, Streptomyces griseochromogenes
  misc_feature (1)..(238): tr|A0A1B1BDN1|A0A1B1BDN1_9ACTN 7-carboxy-7-deazaguanine synthase OS=Streptomyces griseochromogenes OX=68214 GN =queE PE=3 SV=1
MASTRLVVNEIFGPTVQGEGPSAGRRCAFLRLGGCNLSCRWCDTPYTWDWQGVSDTGRAFDPRTELRLRMAEDVLDELLAMTVPLIVISGGEPLNQQNRLVPVVRGLRDRGVSIEIETNGTVAPSDELVGLGVRFNVSPKLAHSGDPEHRRISPTALKRLQNTPDVAFKFVCKTSDDLTEVGRLQERFGLEPVWIMPEGKVQQDVTDNLQALADEVVRRGWNLTTRLHVLAWGDQRGV

SEQ ID NO: 34577 - protein, 211 aa, Streptomyces griseochromogenes
  misc_feature (1)..(211): tr|A0A1B1B455|A0A1B1B455_9ACTN 7-carboxy-7-deazaguanine synthase OS=Streptomyces griseochromogenes OX=68214 GN =queE PE=3 SV=1
MTYLVKEIFYTLQGEGSHAGRPAVFCRFSRCNLWTGLEKDRHRAICQFCDTDFVGTDGEGGGKFQTPDDLAQAVENAWPSSSREHRFVVCTGGEPLLQLDEAAIDALHARGFEVAVETNGTRVSPKGIDWLCVSPKIGSELVVTSGDELKLVYPQLGGDPRQFEQLDFRYFRLQPMDNPDVEANTRATVEYCMKNPRWILSLQTHKYLGIQ

SEQ ID NO: 34578 - protein, 213 aa, Streptomyces griseoflavus
  misc_feature (1)..(213): tr|D9XKX5|D9XKX5_9ACTN 7-carboxy-7-deazaguanine synthas e OS=Streptomyces griseoflavus Tu4000 OX=467200 GN=queE PE=3 SV=1
MNMTYLIKEIFYTLQGEGSHAGRPAVFCRFSRCNLWTGREADRSRAICQFCDTDFVGTDGEGGGRFRTAEDLADAVEAAWPSTDRAHRFVVCTGGEPLLQLDEDAIAALHARGFEVAVETNGTRPAPHGIDWLCVSPKIGSQLVLTSGDELKLVYPQAGGDPAQFEGLDFQHLRLQPLDDANREDHTRAAVEYCMKNPRWTLSLQTHKYLGIQ

SEQ ID NO: 34579 - protein, 244 aa, Streptomyces griseoflavus; identical to SEQ ID NO: 30859
  misc_feature (1)..(244): tr|A0A0L8NN75|A0A0L8NN75_9ACTN 7-carboxy-7-deazaguanine synthase OS=Streptomyces griseoflavus OX=35619 GN=queE PE=3 SV=1

SEQ ID NO: 34580 - protein, 211 aa, Streptomyces griseoruber
  misc_feature (1)..(211): tr|A0A101SQR9|A0A101SQR9_9ACTN 7-carboxy-7-deazaguanine synthase OS=Streptomyces griseoruber OX=1943 GN=queE P E=3 SV=1
MTYLIKEIFYTLQGEGGHAGRPAVFCRFSRCNLWTGRERDRSRAICQFCDTDFVGTDGEGGGRFRTAQELAEAVEAAWPTADQAHRFVVCTGGEPLLQLDEAAIDALHDRGFEIAVETNGTRPAPRGIDWLCVSPKIGSTLVLTSGDELKLVYPQAGGDPAQFEGLDFRHFRLQPLDDADREAHTRAVVEYCMKNPRWTLSLQTHKYLGIQ

SEQ ID NO: 34581 - protein, 238 aa, Streptomyces griseus
  misc_feature (1)..(238): tr|A0A2X2MB72|A0A2X2MB72_STRGR 7-carboxy-7-deazaguanine synthase OS=Streptomyces griseus OX=1911 GN=queE PE=3 SV=1
MSALQDAGLRIRVSEKFGSTVQGEGPSTGVPACFIRLALCNLICSPCDTPYSWDHKRFDLRKEAHYESVEGLLAWAVDQPEDLVVITGGEPLIQMAGVTELVKGLRAAGREVEIETNGTIAPAEALVAAGVYFNVSPKLSRFGAAMPETRRLVPDVLRAFVATGRARFKFVVSEPSEVAEIAALEEAYALTCISVMPEGTDPEVILQGMRTLEGPVRERGYRLSTRLHVLLWGDERGR

SEQ ID NO: 34582 - protein, 211 aa, Streptomyces hainanensis
  misc_feature (1)..(211): tr|A0A4R4TUC9|A0A4R4TUC9_9ACTN 7-carboxy-7-deazaguanine synthase OS=Streptomyces hainanensis OX=402648 GN=queE PE=3 SV=1
MTYLVKEIFYTLQGEGSHAGRPAVFCRFSRCNLWTGLEKHRHRAVCQFCDTDFVGTDGEGGGRFRTPDDLAQAVEQAWPSSAMDHRFVVCTGGEPLLQLDDAAINALHARGFEVAVETNGTRVPPKGIDWICVSPKIGSELVVTSGDELKLVYPQLGGDPRQFEHLDFRYFRLQPMDGPDVDANTRATVEYCMKNPRWILSLQTHKYLGIQ

SEQ ID NO: 34583 - protein, 237 aa, Streptomyces iranensis
  misc_feature (1)..(237): tr|A0A060ZZI9|A0A060ZZI9_9ACTN 7-carboxy-7-deazaguanine synthase OS=Streptomyces iranensis OX=576784 GN=queE P E=3 SV=1
MEQDLVVNEIFGPTVQGEGRSLGRRCAFLRLGGCNLSCTWCDTPYTWDWTGAAESGIAHDPRKELHRRPVGDVLAELLAFDTELIVISGGEPLGQQERLIPLVAALTGHGKEIEIETNGTHAAHPELIAAGVRFNVSPKLSHSGDPLQRRIVPDALTSLSALPESTFKFVCQNTGDLEEVAQLVATFDLSSVWIMPIGRSADDVTKHMSELADAVVERGWNLTTRLHTLLWDDKRGV

SEQ ID NO: 34584 - protein, 247 aa, Streptomyces jietaisiensis
  misc_feature (1)..(247): tr|A0A1G7J5N1|A0A1G7J5N1_9ACTN 7-carboxy-7-deazaguanine synthase OS=Streptomyces jietaisiensis OX=235987 GN=qu eE PE=3 SV=1
MTTTKPLNLEPKAAEGESLIVAECFGTEVPTFQGEGPSCGHPALFIRLSRCNLTCTRCDTKYTWDWSRFDPHEESTRQSVAGLVAWATSSPVELVVITGGEPLIQQARLVPLVRGLIAAGKRIEFETNGTIAPTPELVADGVRFNVSPKLASFGVKETKSIVPAALEAFVASGRAAFKFVASTVDDLDRIAELADAHRLAPVWVMPEGTTPEVITATTRVLADGVAARHWHFTTRLHVLAFADARGR

SEQ ID NO: 34585 - protein, 243 aa, Streptomyces kanasensis
  misc_feature (1)..(243): tr|A0A124EC51|A0A124EC51_9ACTN 7-carboxy-7-deazaguanine synthase OS=Streptomyces kanasensis OX=936756 GN=queE PE=3 SV=1
MTGTAATAREPLGQLIVAERFGVEVPTFQGEGPSCGHPAIFIRLSRCNLTCESCDTKETWDWSRFKPQEVSTRESVQDLVAWVRPSPVELVVITGGEPLLQQRNLVPLVRRLLDEGRRVEFETNGTVMPAPALLVDGVRFNVSPKLASFGMDEAKSIVPSVLRAFAASGRSVFKFVASSVADIDRIAELVDRHGLAPVWVMPEGTTVEAITSTTRVLADAVASRHWHLTTRLHVAAFADPKGR

SEQ ID NO: 34586 - protein, 104 aa, Streptomyces klenkii
  misc_feature (1)..(104): tr|A0A3B0A2R6|A0A3B0A2R6_9ACTN 7-carboxy-7-deazaguanine synthase QueE (Fragment) OS=Streptomyces klenkii OX=14 20899 GN=D7231_34815 PE=4 SV=1
MVAEPRLIVAERFGVDRPTFQGEGPSMGEPAVFIRLSRCNLSCGWCDTPWTWDWERYDPRAESAGHSVEDLAAWALGAPTGLVVVTGGEPLLQQRQLVPLVRRL

SEQ ID NO: 34587 - protein, 223 aa, Streptomyces laurentii
  misc_feature (1)..(223): tr|A0A160NUH8|A0A160NUH8_STRLU 7-carboxy-7-deazaguanine synthase OS=Streptomyces laurentii OX=39478 GN=queE PE =3 SV=1
MQGEGRSTGRSCSFLRLGGCNLTCRWCDTPYTWDWTGVSQGRTAYRPADELHAMTVTEVTRRLRELGTGLVVVSGGEPLSQQDRLLPVIEEIRARGADVEIETNGTVVPSAALVAAGVRFNVSPKLAHSAVAERRRVVPAALRALAAIDGTCFKFVCADPSDLKEVDELVERFALRDVWIMPCGQEPEEITDGLRRLADPVIQRKWNLTGRLHVTLWGNQRGV

SEQ ID NO: 34588 - protein, 237 aa, Streptomyces lydicus
  misc_feature (1)..(237): tr|A0A1D7VPH7|A0A1D7VPH7_9ACTN 7-carboxy-7-deazaguanine synthase OS=Streptomyces lydicus OX=47763 GN=queE PE=3 SV=1
MEQDLVVNEIFGPTVQGEGRSLGRRCAFLRLGGCNLSCSWCDTPYTWDWTGAAEGGVAHDPRKELHRRPVEEVVAELFGFDTELIVISGGEPLGQQERLIPLVAALTERGKEIEIETNGTHAAHPELIAAGVRFNVSPKLSHSGDPRQRRIVPAALANLSALPESTFKFVCQNTRDLDEVAELVAAFDLSSVWIMPIGRSADDVTKHMSELADAVVERGWNLTTRLHTLVWDDKRGV

SEQ ID NO: 34589 - protein, 237 aa, Streptomyces lydicus
  misc_feature (1)..(237): tr|A0A0D4DEQ4|A0A0D4DEQ4_9ACTN 7-carboxy-7-deazaguanine synthase OS=Streptomyces lydicus OX=47763 GN=queE PE=3 SV=1
MSASATMRPLLIAETFGDTFQGEGPSTGVPACFIRLSRCNLRCRGCDTPQTWDWARFDPREEARSEPVEGVLAWALDQPEDLVIITGGEPLLQMPGLTRLVQGLRKAGRTVEIETNGTVPPSGDLVAARPFFNVSPKLSGFGAEMEEPQRIVPAVLRAFAESGLARFKFVVTDAAELAEIAALEAAYGLTDIWVMPEGTTHEAVLAGMRELEEPARRHGYRLGTRLHILLWGDARGR

SEQ ID NO: 34590 - protein, 211 aa, Streptomyces mangrovisoli
  misc_feature (1)..(211): tr|A0A1J4NKG4|A0A1J4NKG4_9ACTN 7-carboxy-7-deazaguanine synthase OS=Streptomyces mangrovisoli OX=1428628 GN=qu eE PE=3 SV=1
MTYLIKEIFYTLQGEGAHAGRPAVFCRFSRCNLWTGREQDRARAICQFCDTDFVGTDGEGGGRFTSADDLADAVEAAWPSAERAHRFVVCTGGEPLLQLDEAALAALHARGFEIAVETNGTRPAPAGIDWLCVSPKIGSTLVLDRGDELKLVYPQAGGDPAQFEHLDFRHFRLQPLDDDRREDHTRAAVEYCMKNPRWMLSLQTHKYLGIQ

SEQ ID NO: 34591 - protein, 246 aa, Streptomyces melanosporofaciens
  misc_feature (1)..(246): tr|A0A1H4KRG7|A0A1H4KRG7_STRMJ 7-carboxy-7-deazaguanine synthase OS=Streptomyces melanosporofaciens OX=67327 G N=queE PE=3 SV=1
MSKGTAPAFTGSADELWLIIAECFGVEQPTFQGEGPSCGCPALFIRLSRCNLTCRRCDTKYTWDWSQFDPHEESTKQPVAHLLEWALSSPVELVVITGGEPLIQQRALISLVQGLLAAGKRVEFETNGTLVPDPALLMDGVQFNVSPKIASFGVSKEQRLVPAALEAFAACGRAAFKFVARTVPDLDEVAELVDAYGLAPVWVMPEGTTADALIATTRVLADAVVARHWHFSTRLHVLAFADARGR

SEQ ID NO: 34592 - protein, 248 aa, Streptomyces microflavus; identical to SEQ ID NO: 34563
  misc_feature (1)..(248): tr|A0A285DLB7|A0A285DLB7_STRMI 7-carboxy-7-deazaguanine synthase OS=Streptomyces microflavus OX=1919 GN=queE P E=3 SV=1

SEQ ID NO: 34593 - protein, 211 aa, Streptomyces oceani
  misc_feature (1)..(211): tr|A0A1E7JW47|A0A1E7JW47_9ACTN 7-carboxy-7-deazaguanine synthase OS=Streptomyces oceani OX=1075402 GN=queE PE= 3 SV=1
MTYLIKEIFYTLQGEGSHAGRPAVFCRFSRCNLWTGLEKDRHRAICQFCDTDFVGTDGEGGGRFATPEDLAQAVENAWPSESADHRFVVCTGGEPLLQLDEAAVEALHARGFEVAVETNGTRVPPAGIDWLCVSPKIGSELVVTKGDELKLVYPQLGGIPSQFENLDFRFFRLQAMDGPDLEANTRAAVDYCMKNPRWILSLQTHKYLGIQ

SEQ ID NO: 34594 - protein, 237 aa, Streptomyces olivochromogenes
  misc_feature (1)..(237): tr|A0A250VL88|A0A250VL88_STROL 7-carboxy-7-deazaguanine synthase OS=Streptomyces olivochromogenes OX=1963 GN=q ueE PE=3 SV=1
MEQDLVVNEIFGPTVQGEGRSLGRRCAFLRLGGCNLSCSWCDTPYTWDWTGAGESGVAHDPRKELHRRPVDDVLAELLAFDTELIVISGGEPLGQQERLIPLVTALTGRGKEIEIETNGTHAAHPELIAAGVRFNVSPKLSHSGDALQRRIVPAALASLSALPGSTFKFVCQNTRDLDEVAQLVATFDLPSVWIMPIGRTADDVTKHMSELADAVVKRGWNLTTRLHTLLWDEKRGV

SEQ ID NO: 34595 - protein, 211 aa, Streptomyces pini
  misc_feature (1)..(211): tr|A0A1I4J1P4|A0A1I4J1P4_9ACTN 7-carboxy-7-deazaguanine synthase OS=Streptomyces pini OX=1520580 GN=queE PE=3 SV=1
MTYLIKEIFYTLQGEGSHAGRPAVFCRFSRCNLWTGRERDRARAICQFCDTDFVGTDGEGGGRFTTADDLAAAVEAAWPTAERAHRFVVCTGGEPLLQLDDDAVDALHDRGFEVAVETNGTRPAPRGIDWLCVSPKIGSTLVLTHGDELKLVYPQVGGDPAQFESLDFRHFRLQPLDDANREAHTRAVVEYCMKNPRWTLSLQTHKYLGIQ

SEQ ID NO: 34596 - protein, 237 aa, Streptomyces pluripotens
  misc_feature (1)..(237): tr|A0A221P7H7|A0A221P7H7_9ACTN 7-carboxy-7-deazaguanine synthase OS=Streptomyces pluripotens OX=1355015 GN=que E PE=3 SV=1
METELVVNEIFGPTVQGEGRSMGRRCAFLRLGGCNLSCTWCDTPYTWDWTGAGDSGVAYDPRKELHRRSVREVAEELLAFGVGLIVISGGEPLGQQNRLIPLVELLTARGLEIEIETNGTHAPDPALVAAKVRFNVSPKLAHSGDSVERRIVPSALRSLAVTEGTTFKFVCRNTDDLDEVGALVEEFTLGSVWIMPKGQTGAEISRHMAGLADAVIARGWNLTTRLHTLLWGDTRGV

SEQ ID NO: 34597 - protein, 237 aa, Streptomyces puniciscabiei
  misc_feature (1)..(237): tr|A0A1D7YJJ0|A0A1D7YJJ0_9ACTN 7-carboxy-7-deazaguanine synthase OS=Streptomyces puniciscabiei OX=164348 GN=qu eE PE=3 SV=1
MEQDLVVNEIFGPTVQGEGRSLGRRCAFLRLGGCNLSCSWCDTPYTWDWTGAGESGVAHDPRKELHRRPVEDVVAELLGFDTDLIVISGGEPLGQQERLIPLVAALTERGKEIEIETNGTHAAHPELIAAGVRFNVSPKLSHSGDALRRRIVPDALTSLSALPGSTFKFVCQSTRDLDEVAQLVATFDLSSVWIMPIGRSADDVTKHMGELADAVVERGWNLTTRLHTLLWDDKRGV

SEQ ID NO: 34598 - protein, 211 aa, Streptomyces qinglanensis
  misc_feature (1)..(211): tr|A0A0U1V668|A0A0U1V668_9ACTN 7-carboxy-7-deazaguanine synthase OS=Streptomyces qinglanensis OX=943816 GN=que E PE=3 SV=1
MTYLIKEIFYTLQGEGSHAGRPAVFCRFSRCNLWTGLEKDRHRAICQFCDTDFVGTDGEGGGRFATPEDLAQAVDNAWPSESAEHRFVVCTGGEPLLQLDEAAVEALHDRGFEVAVETNGTRVPPAGIDWLCVSPKIGSELVVTKGDELKLVYPQLGGVPAQFENLDFRFFRLQAMDGPDLEANTRAVVEYCMKNPRWILSLQTHKYLGIQ

SEQ ID NO: 34599 - protein, 237 aa, Streptomyces rapamycinicus
  misc_feature (1)..(237): tr|A0A0A0NW62|A0A0A0NW62_STRRN 7-carboxy-7-deazaguanine synthase OS=Streptomyces rapamycinicus (strain ATCC 29 253 / DSM 41530 / NRRL 5491 / AYB-994) OX=1343740 GN=qu eE PE=3 SV=1
MEQDLVVNEIFGPTVQGEGRSLGRRCAFLRLGGCNLSCSWCDTPYTWDWTGASESGVAHDPRKELHRRPVGDVLTELLAFDTELIVISGGEPLGQQERLIPLVAALTGHGKEIEIETNGTHAAHPELIAAGVRFNVSPKLSHSGDTLQRRIVPEALTSLSALPGSTFKFVCQNTRDLDEVAQLVATFDLSSVWIMPIGRTADDVTKHMSELADAVVERGWNLTTRLHTLLWDEKRGV

SEQ ID NO: 34600 - protein, 244 aa, Streptomyces rimosus
  misc_feature (1)..(244): tr|A0A0M8QYF2|A0A0M8QYF2_STRRM 7-carboxy-7-deazaguanine synthase OS=Streptomyces rimosus subsp. rimosus OX=132 474 GN=queE PE=3 SV=1
MSRQETTRGRKIVVNEIFGPTIQGEGPSMGRICSFVRLGGCNLTCTWCDTPYTWDWTGQSNEGTAYDPKAELHAMHVVDVADRLRAMDVRLVVISGGEPLQQQQTVTLLCHMLKESGVSVEIETNGTIAPSPALTATQARFNVSPKLRHSGMGPERTVVPVALRALNATGGAAFKFVCRGPTDLEEVDAIVARHGLESVWIMPEGQDQETLTRHMSSLADAVVARRWNMSTRIHVQAWGNRRGV

SEQ ID NO: 34601 - protein, 244 aa, Streptomyces rimosus; identical to SEQ ID NO: 30859
  misc_feature (1)..(244): tr|L8EV75|L8EV75_STRR1 7-carboxy-7-deazaguanine synthas e OS=Streptomyces rimosus subsp. rimosus (strain ATCC 1 0970 / DSM 40260 / JCM 4667 / NRRL 2234) OX=1265868 GN= queE PE=3 SV=1

SEQ ID NO: 34602 - protein, 249 aa, Streptomyces roseochromogenus
  misc_feature (1)..(249): tr|V6K5K5|V6K5K5_STRRC 7-carboxy-7-deazaguanine synthas e OS=Streptomyces roseochromogenus subsp. oscitans DS 1 2.976 OX=1352936 GN=queE PE=3 SV=1
MTHTALPLPAADGRNRETHLPINEVFWDVVQGEGPYMGRSCGFIRLGWCNLHCPPCDTAQTWDTSRYDLAVTCPETAVAAAVDRLPARVRMVVLSGGEPLLWQSAPAFITMLDLLGRRGIEVHVETNGTIAPPPSINPFIGHYTVSPKLTVMGGGDPLKRRIKPDAIAAFARLAAAERAAFKFVVADQAHIREVADFAAEHDLEPSWVWVMPEAPDTATLLDRQPVITAGAAAYGYNVSTRLHMIAQCR

SEQ ID NO: 34603 - protein, 248 aa, Streptomyces sedi
  misc_feature (1)..(248): tr|A0A5C4ULL5|A0A5C4ULL5_9ACTN 7-carboxy-7-deazaguanine synthase OS=Streptomyces sedi OX=555059 GN=queE PE=3 S V=1
MTTFEPTDIDPAADDAAFRLIVAECFGVEAPTFQGEGPSCGHPALFIRLSRCNLTCAKCDTKYTWDWARFDPRQESTKRTVADLVAWATSSPVELVVITGGEPLLQQKRLVPLVRQLLVAGKRVEFETNGTLVPLPELVVDGVHCNVSPKIASFGVDEAKSVVPAALEAFAASGRAVFKFVASSVADLDRIAELADAHRLAPVWVMPEGNTVEAITATTRVLADAVAARHWHFTTRLHVLAFAGARGR

SEQ ID NO: 34604 - protein, 211 aa, Streptomyces sp.
  misc_feature (1)..(211): tr|A0A1C4JR01|A0A1C4JR01_9ACTN 7-carboxy-7-deazaguanine synthase OS=Streptomyces sp. BvitLS-983 OX=1838282 GN= queE PE=3 SV=1
MTYLIKEIFYTLQGEGSHAGRPAVFCRFSRCNLWTGREQDRARAICQFCDTDFVGTDGEGGGRFRTPQDLADAVEAAWPTTDRAHRFVVCTGGEPLLQLDEEAIEALHERGFEVAVETNGTRPAPRGIDWLCVSPKIGSTLVLTQGDELKLVYPQVGGDPAQFEELDFRHFRLQPLDDAHREAHTRATVEYCMKNPRWTLSLQTHKYLGIQ

SEQ ID NO: 34605 - protein, 248 aa, Streptomyces sp.
  misc_feature (1)..(248): tr|V9Z0G4|V9Z0G4_9ACTN 7-carboxy-7-deazaguanine synthas e OS=Streptomyces sp. FR1 OX=349971 GN=queE PE=3 SV=1
MTTLVSIVDGPATDDAELWLIVAECFGVEVPTFQGEGPSCGHPALFIRLSRCNLTCVKCDTKYTWDWSQFDPRKESTRRSVADLVSWGTSSPVELVVITGGEPLIQQPRLVPLVRKLLAAGKRVEFETNGTIAPLPELIVEGVRFNVSPKLTSFGVTEAKSLVPAALEAFAASERAAFKFVASAVADLDRIAELADAHRLAPVWVMPEGTTAEEITATTRVLADAVAARHWHFTSRLHVLAFADARGR

SEQ ID NO: 34606 - protein, 211 aa, Streptomyces stelliscabiei
  misc_feature (1)..(211): tr|A0A0L0JS68|A0A0L0JS68_9ACTN 7-carboxy-7-deazaguanine synthase OS=Streptomyces stelliscabiei OX=146820 GN=qu eE PE=3 SV=1
MTYLVKEIFYTLQGEGSHAGRPAVFCRFSRCNLWTGLEKDRHRAICQFCDTDFVGTDGEGGGRFASPDDLAQAVERAWPSASREHRFVVCTGGEPLLQLDDAAIDALHARGFEVAVETNGTRVPPKGIDWLCVSPKIGSELVVTRGDELKLVYPQLGGDPSQFEHLDFRYFRLQPMDGPDVDANTRATVDYCMKNPRWILSLQTHKYLGIQ

SEQ ID NO: 34607 - protein, 238 aa, Streptomyces thermoautotrophicus
  misc_feature (1)..(238): tr|A0A132MK91|A0A132MK91_9ACTN 7-carboxy-7-deazaguanine synthase OS=Streptomyces thermoautotrophicus OX=146914 4 GN=queE PE=3 SV=1
MLLSLAAEESRGLLVAEMFGPTFQGEGPSAGRQAVFVRLSRCNLACSWCDTPYTWDWRRFDPAAEARRIPVREVAAWALNRPSPLVVITGGEPLLQQPRLIDLVGELREAGRRVEIETNGTIPPDPALVGLVDQFNVSPKLASAGGHPTRRIDPGVLRVFVATGKAVFKFVLTNVAEAKEVVELQDTYGLDPIWVMPEGTSAEGVLAGMRELADEALTRGWNLTPRLHVLLWGDTRGR

SEQ ID NO: 34608 - protein, 240 aa, Streptomyces thermoautotrophicus
  misc_feature (1)..(240): tr|A0A132ML27|A0A132ML27_9ACTN 7-carboxy-7-deazaguanine synthase OS=Streptomyces thermoautotrophicus OX=146914 4 GN=queE PE=3 SV=1
MSLLLSLAAEESRGLLVAEMFGPTFQGEGPSAGRQAVFVRLSRCNLACSWCDTPYTWDWRRFDPAAEARRIPVREVAAWALNRPSPLVVITGGEPLLQQPRLIDLVGELREAGRRVEIETNGTIPPDPALVGLVDQFNVSPKLASAGGHPTRRIDPGVLRVFVATGKAVFKFVLTNVAEAKEVVELQDTYGLDPIWVMPEGTSAEGVLAGMRELADEALTRGWNLTPRLHVLLWGDTRGR

SEQ ID NO: 34609 - protein, 239 aa, Streptomyces varsoviensis
  misc_feature (1)..(239): tr|A0A0L8QMJ0|A0A0L8QMJ0_9ACTN 7-carboxy-7-deazaguanine synthase OS=Streptomyces varsoviensis OX=67373 GN=queE PE=3 SV=1
MTSIANAARAPETSLVVSEIFGPTWQGEGPSLGRLAVFLRLGHCNLTCEWCDTPYTWDWTRHDAAAELSVVTVDYAVREVVRVGAPLLVITGGEPLMQQQALGVLLARLPRGVDVEIETNGTIIPGEEIRARVARFNVSPKLANAGVRDAKRLKPRALAALNATGKAAFKFVVSSADDLAEVRGLVEEHSLKPVYIMPEGTTPEAILHGLRELSPTILEYGWNITPRLHVLIWGDRRGV

SEQ ID NO: 34610 - protein, 211 aa, Streptomyces varsoviensis
  misc_feature (1)..(211): tr|A0A0L8QXA1|A0A0L8QXA1_9ACTN 7-carboxy-7-deazaguanine synthase OS=Streptomyces varsoviensis OX=67373 GN=queE PE=3 SV=1
MGYAVKEIFYTLQGEGQHAGRPAVFCRFALCNLWTGREADRARAICAFCDTDFLGTDGPDGGRFATAEELADAVEACWPAGFQDRRFVVCTGGEPLLQLDAAAVESLHGRGFEVAVETNGTRVPPQGIDWLCVSPKIGTELVVSQGDELKLVYPQEGGDPAQFEHLRFASFRLQPMDCPDVESHTRSALEYCLAHPNWSLSLQTHKQLGIR

SEQ ID NO: 34611 - protein, 238 aa, Streptomyces venezuelae
  misc_feature (1)..(238): tr|F2R9E8|F2R9E8_STRVP 7-carboxy-7-deazaguanine synthas e OS=Streptomyces venezuelae (strain ATCC 10712 / CBS 6 50.69 / DSM 40230 / JCM 4526 / NBRC 13096 / PD 04745) O X=953739 GN=queE PE=3 SV=1
MSTLQHTGLRLRVSEKFGGTVQGEGPSTGVPACFIRLALCNLICSPCDTPYTWDTTRFDLRKEAHYENVEELLAWALDQPEDLVVVTGGEPLIQMAGLTELVKGLRAAGRTVEIETNGTIAPSEALVAAGPYFNVSPKLSRFGAAMPETRRLVPDVLRAFVTTGRSRFKFVVSEAAELAEIAALEAAYALTDISVMPEGTDPEVILAGMRTLEGPVRERGYRLGTRLHVLLWGDERGR

SEQ ID NO: 34612 - protein, 247 aa, Streptomyces violaceoruber
  misc_feature (1)..(247): tr|A0A1V0UFX3|A0A1V0UFX3_STRVN 7-carboxy-7-deazaguanine synthase OS=Streptomyces violaceoruber OX=1935 GN=queE PE=3 SV=1
MTLPARSQDPAAPLPDELPLAEAFGPTLQGEGPAAGRPAWFIRFGGCNLSCSWCDSAYTWDSSRYQLREEIRHTPVEKIDQAVPDGALVVLTGGEPLLQQDASAWSRLLDGLRRRGCTLHVETNGTIAPNDRTRELVETFIVSPKLTNAGPHRGRQDPALNPGWAAAARDGQAHLKVVCASAEDVETAVGLARDHGWPQRQVWVMPEGTTVDALNARWPAIADAAARHGINATHRLHVLAWGDKRGH

SEQ ID NO: 34613 - protein, 241 aa, Streptomyces viridochromogenes
  misc_feature (1)..(241): tr|A0A0J7ZH70|A0A0J7ZH70_STRVR 7-carboxy-7-deazaguanine synthase OS=Streptomyces viridochromogenes OX=1938 GN= queE PE=3 SV=1
MTAHDRNRETHLPINEVFWDVVQGEGPYMGRACGFIRLGWCNLHCPPCDTAQTWDTSRYDLAITCPDTAVAAAVDRLPARVRMVVISGGEPLLWQRTPAFITMLELLQGRGIEAHVETNGTIAPLPSADPYVRHYTVSPKLTAMGGGDPLKRRIKPDAIAAFAQLATAGRAVFKFVVADQAQLAEVAGFAAEHGLEPSWVWVMPEASDTATLLERQPVIASAAAQYSYNVSTRLHMIAQCR

SEQ ID NO: 34614 - protein, 233 aa, Streptomyces viridochromogenes
  misc_feature (1)..(233): tr|A0A0J7Z6E6|A0A0J7Z6E6_STRVR 7-carboxy-7-deazaguanine synthase OS=Streptomyces viridochromogenes OX=1938 GN= queE PE=3 SV=1
MVVNEIFGPTVQGEGPSAGQRCGFLRLGGCNLSCHWCDTPYTWDWKGVSDEGRAYDPRVELTSRGPADVLHDLLAMDVDLIVISGGEPLKQQRRILPLVRELRNRGISVEVETNGTVVPDDELIDLGVRFNVSPKLSHAGDPEHRRIKPAALRKLATTPAVAFKFVCRSHDDLDEVAELTRNLGIGPVWIMPEGKNVTDISRHLGDLSDEVVRRNWNLSTRLHVLAWGEKRGV

SEQ ID NO: 34615 - protein, 211 aa, Streptomyces zhaozhouensis
  misc_feature (1)..(211): tr|A0A286DY64|A0A286DY64_9ACTN 7-carboxy-7-deazaguanine synthase OS=Streptomyces zhaozhouensis OX=1300267 GN=q ueE PE=3 SV=1
MTYLVKEIFYTLQGEGSHAGRPAVFCRFSRCNLWTGLEKDRHRAICQFCDTDFVGTDGEGGGRFRTPDDLAQAIEQAWPSSSREHRFVVCTGGEPLLQLDEAAIDALHARGFEVAVETNGTRVPPNGIDWLCVSPKIGSELVVTSGDELKLVYPQLGGEPGQFEHLDFRYFRLQPMDGPDVEANTRATVDYCMKNPRWILSLQTHKYLGIH

SEQ ID NO: 34616 - protein, 243 aa, Streptomyces zinciresistens
  misc_feature (1)..(243): tr|G2G3Z3|G2G3Z3_9ACTN 7-carboxy-7-deazaguanine synthas e OS=Streptomyces zinciresistens K42 OX=700597 GN=queE PE=3 SV=1
MTANLLLDTDHEFELIIAYTFGDTQPTFQGEGPSAGTPAVFIRLSRCNLTCGYCDTKETWDWANYDIKKESHKRTVDDLAAWALAQDVELVVITGGEPLLQQKKLVPLVQRLLAGGKRIEFETNGTIAPLSELLIDGVQFNVSPKLANSDVAEHKRIVPVALRAFAASGQAIFKFVTRTVDELDEIASYAEQFGLAPIYVMPEGTTAEGLVATTRLLADHVPARGWHFTQRMHIFAFGDKRAR

SEQ ID NO: 34617 - protein, 248 aa, Streptomyces zinciresistens
  misc_feature (1)..(248): tr|G2G774|G2G774_9ACTN 7-carboxy-7-deazaguanine synthas e OS=Streptomyces zinciresistens K42 OX=700597 GN=queE PE=3 SV=1
MTTLESIVNGPTTDDAELWLIVAECFGVEVPTFQGEGPSCGHPALFIRLSRCNLTCAKCDTKYTWDWSQFDPRKESTRRSVADLVSWGTSSPVELVVITGGEPLIQQPRLVPLVRKLLAAGKRVEFETNGTIAPLPELIVEGVRFNVSPKLASFGVKEAKSLVPAALEAFAASERAAFKFVASTVADLDRIAELADAHRLAPVWVMPEGTTAEEITATTRVLADAVAARHWRFTTRLHVIAFADARGR

SEQ ID NO: 34618 - protein, 211 aa, Streptosporangiaceae bacterium
  misc_feature (1)..(211): tr|A0A3A4BW36|A0A3A4BW36_9ACTN 7-carboxy-7-deazaguanine synthase OS=Streptosporangiaceae bacterium YIM 75507 O X=2339229 GN=queE PE=3 SV=1
MTYLIKEIFYTLQGEGQHAGRPAVFCRFSRCNLWTGREKDRHRAVCAFCDTDFVGTDGPGGGRYATAAELAAAVEAAWGEGAFARRFVVCTGGEPLLQLDAEAVDALHARGFEVAVETNGSLPPPPGIDWLCVSPKIGADLVVETGDELKLVYPQPGGDPELFEHLDFRSFRLQPMDGPDLDANTRAAIAYCKDHPRWQLSLQTHKYLGIP

SEQ ID NO: 34619 - protein, 210 aa, Subsaximicrobium wynnwilliamsii
  misc_feature (1)..(210): tr|A0A5C6ZJT9|A0A5C6ZJT9_9FLAO 7-carboxy-7-deazaguanine synthase OS=Subsaximicrobium wynnwilliamsii OX=291179 GN=queE PE=3 SV=1
MTRSERQDLIDQGLLLPLMEEFYTIQGEGFHKGTAAYFIRIGGCDVGCHWCDVKESWNAELHPPTETAKIVENAVKYSETIVVTGGEPLTWDMTELTKQLKAKGLQTHIETSGAYELTGEWDWICLSPKKMKLPTQKVYDKAHELKCIIFNKDDFRFAEEQAAKVNGDCILYLQPEWSKRDKMVPLIVDYVMANPKWKVSLQTHKYLNIP

SEQ ID NO: 34620 - protein, 257 aa, Succinatimonas sp.
  misc_feature (1)..(257): tr|R5EI92|R5EI92_9GAMM 7-carboxy-7-deazaguanine synthas e OS=Succinatimonas sp. CAG:777 OX=1262974 GN=queE PE=3 SV=1
MSAKLPVVEIFDSLQGEGPFLHPAIFLRTALCCFKCKGFNCSLMAPDGSTVTGCDTIRAVSPKFKESWTYYEDSLSLIKALEKHVKTYPHSNFKQDLVLTGGEPLLHFNNPVLIESLEHFYRLGHTLTVETNAALPIAFDKTVLTKARFSMSVKLSNSGESRDKRINYSTIRAIVDNTEQSYFKFVVSKDTWEHDKEEIFEILDNTGRSIPVYLMPLGGDFKSLQNNTQFVVEKCIEQGFFYTDRIHIRAWNTKEGV

SEQ ID NO: 34621 - protein, 257 aa, Succinivibrio sp.
  misc_feature (1)..(257): tr|A0A316SD01|A0A316SD01_9GAMM 7-carboxy-7-deazaguanine synthase OS=Succinivibrio sp. OX=2053619 GN=queE PE=3 SV=1
MSAKLPVVEIFDSLQGEGPYLHPAIFLRTALCCFKCKGFNCSLMAPDGSTVTGCDTIRAVSPKFKESWTYYEDSLSLIKALEEHVKTYPHSNFKQDLVLTGGEPLLHFNNPVLIETLEHFYRLGHTLTVETNASLPIAFDKTVLTKARFSMSVKLSNSGESRDKRINYSTIRAIADNTEQSYFKFVVSKDTWEHDKEEIFEILDNTSRSIPVYLMPLGGDFKTLQNNTQFVVEKCIEQGFFYTDRTHIRAWNTKEGV

SEQ ID NO: 34622 - protein, 236 aa, Sulfitobacter brevis
  misc_feature (1)..(236): tr|A0A1I1ULK2|A0A1I1ULK2_9RHOB 7-carboxy-7-deazaguanine synthase OS=Sulfitobacter brevis OX=74348 GN=queE PE=3 SV=1
MSKLRIAEIFGPTIQGEGALIGEPTVFVRSGGCDYRCTWCDSMHAVDPVHRHEWAAMTTDAVWGEVSRLSGGGPLIVTLSGGNPAIQDFGPLIRRGKRVGYRFACETQGSLAKLWFSELDTLVLSPKPPSSEETVDWVAFDACLEAAKGCGKVVMKIVIFDDLDYGWARVVAETYPDLPLFLQPGNPDVDPDVAVDPQQVADRLEWLVGKVIEDRWYTARVLPQLHVLLWGNKRGV

SEQ ID NO: 34623 - protein, 237 aa, Sulfitobacter donghicola
  misc_feature (1)..(237): tr|A0A410XX97|A0A410XX97_9RHOB 7-carboxy-7-deazaguanine synthase OS=Sulfitobacter donghicola OX=421000 GN=queE PE=3 SV=1
MAKIPVLEVFGPTIQGEGRVIGRKTMFVRTAGCDYRCSWCDSAFTWDGSAKEDIQLMSAEEIYDKLREVGGDNFNHVTISGGNPALIKGIQDLVNLFEEHHIQTALETQGSKFQPWMTQIDDLTISPKPPSSNMKPNLEILDSVIEQCVPESLNLKVVIFDEGDFEFAKMIHHRYPTIPFYLQVGNPYLDDEVDNHTAKLLQRYEQLVERVMTSSDMNNVYVLPQLHTLLWSNMKGV

SEQ ID NO: 34624 - protein, 236 aa, Sulfitobacter guttiformis
  misc_feature (1)..(236): tr|A0A420DJH3|A0A420DJH3_9RHOB 7-carboxy-7-deazaguanine synthase OS=Sulfitobacter guttiformis OX=74349 GN=queE PE=3 SV=1
MTQLRIAEIFGPTIQGEGALIGEPTVFVRTGGCDYRCSWCDSMHAVDPVYRHTWAAMDSGAVWAEVLRLSKRNPLTVSLSGGNPAIQDFTQLIALGHAAGYRFACETQGSIAKPWFGDLDTLVLSPKPPSSGELVDWDAFDDCLLKAKGACSTVMKIVIFDETDYAWARMAADKYPELPLFLQPGNVEVDPDVAVDPQVLADKLLWLVDKTMHDRWFAPRVLPQLHVLLWGNKRGV

SEQ ID NO: 34625 - protein, 235 aa, Sulfitobacter indolifex
  misc_feature (1)..(235): tr|A9E8J8|A9E8J8_9RHOB 7-carboxy-7-deazaguanine synthas e OS=Sulfitobacter indolifex HEL-45 OX=391624 GN=queE P E=3 SV=1
MTLRIAEIFGPTIQGEGALIGEPTVFVRAGGCDYRCSWCDSLHAVESQYRHTWAPMSSEDVWRKVRKLSGGQPLTVSLSGGNPAIQDFGPLIKMGKAADYRFACETQGSIARPWFADLDTLVLSPKPPSSGEDVDWDAFDACRTIGAKARQQVMKIVIFDEIDYQWAREVHAHHLDIPLYLQPGNPEVDPATPVDPQALADRLGWLTEMAMADSWFAPRILPQLHVLIWGNKRGV

SEQ ID NO: 34626 - protein, 236 aa, Sulfitobacter litoralis
  misc_feature (1)..(236): tr|A0A1H0LHS3|A0A1H0LHS3_9RHOB 7-carboxy-7-deazaguanine synthase OS=Sulfitobacter litoralis OX=335975 GN=queE PE=3 SV=1
MSQLRIAEIFGPTIQGEGALIGEPTVFVRTGGCDYRCAWCDSMHAVDPAFRHDWAAMSSDAVWQEVQRLSGDAPLTVSLSGGNPAIQDFAPLIQLGQAAGYRFACETQGSIAKPWFAQLDCLVLSPKPPSSSETVDWAAFDRCVVAGETAGQVVMKIVIFDDADYQWARDAAARYPKMPLYLQPGNDEVDPNVAVDPQILADKLLWLVDKTMADRWFTPRLLPQLHVLLWGNKRGV

SEQ ID NO: 34627 - protein, 236 aa, Sulfitobacter pontiacus
  misc_feature (1)..(236): tr|A0A1H2T6K4|A0A1H2T6K4_9RHOB 7-carboxy-7-deazaguanine synthase OS=Sulfitobacter pontiacus OX=60137 GN=queE P E=3 SV=1
MSQLRIAEVFGPTIQGEGALIGEPTVFVRTGGCDYRCAWCDSMHAVDPAFRHDWASMSTDAVWQEVQRLSDNTPLTVSLSGGNPAIQDFAPLIQLGHAAGYRFACETQGSIAKPWFGQLDCLVLSPKPPSSGETVDWAAFDRCVAAGETAAQTVMKIVIFDDADYDWARDAATRYAELPLYLQPGNDEVDPSVAIDPQVLADKLLWLVDKTMADRWFTPRLLPQLHVLLWGNKRGV

SEQ ID NO: 34628 - protein, 236 aa, Sulfitobacter pseudonitzschiae
  misc_feature (1)..(236): tr|A0A073J2W8|A0A073J2W8_9RHOB 7-carboxy-7-deazaguanine synthase OS=Sulfitobacter pseudonitzschiae OX=1402135 GN=queE PE=3 SV=1
MTGLRIAEIFGPTIQGEGALIGEPTVFVRTGGCDYRCVWCDSLHAVDPVHRQSWARMTTDQVWAEITRLSRGNPLTVSLSGGNPAIQDFTALIARGQQAGYRFACETQGSVAKPWFGDLDTLVLSPKPPSSGETVDWDAFDACIMAGQGAVQTVLKIVIFDDADYAWAQQVAARFPTLPLYLQPGNPQVDPAQPVDPQDLSDRLLWLVEKVTADGWFAPRVLPQLHVLLWGNKRGV

SEQ ID NO: 34629 - protein, 236 aa, Sulfitobacter sp.
  misc_feature (1)..(236): tr|A0A085BV95|A0A085BV95_9RHOB 7-carboxy-7-deazaguanine synthase OS=Sulfitobacter sp. CB2047 OX=1525218 GN=que E PE=3 SV=1
MSQLRIAEVFGPTIQGEGALIGEPTVFVRTGGCDYRCAWCDSMHAVDPAFRHDWANMSTDAVWQEVQRLSDNTPLTVSLSGGNPAIQDFAPLIQLGHAAGYRFACETQGSIAKPWFGQLDCLVLSPKPPSSGETVDWAAFDRCVAAGETAAQTVMKIVIFDDADYDWARDAATRYAQLPLYLQPGNDEVDPTVAVDPQVLADKLLWLVDKTMADRWFTPRLLPQLHVLLWGNKRGV

SEQ ID NO: 34630 - protein, 236 aa, Sulfitobacter sp.; identical to SEQ ID NO: 33762
  misc_feature (1)..(236): tr|A0A2G2BZD5|A0A2G2BZD5_9RHOB 7-carboxy-7-deazaguanine synthase OS=Sulfitobacter sp. OX=1903071 GN=queE PE=3 SV=1

SEQ ID NO: 34631 - protein, 230 aa, Sulfuricaulis limicola
  misc_feature (1)..(230): tr|A0A1B4XIA8|A0A1B4XIA8_9GAMM 7-carboxy-7-deazaguanine synthase OS=Sulfuricaulis limicola OX=1620215 GN=queE PE=3 SV=1
MPRPVADAHDSRSTAHGLDRLRVTEIFYSLQGEARTVGYPTVFIRLTGCPLRCTYCDTEYAFYGGQWMELGEIMQRVAEHAPRYVTVTGGEPLAQRPCRELLTALCQRGYEVSLETGGALDIAGIDPRVSIVMDLKTPGSGEERRNLYANMPHLARKDQVKFVICDRADYEWSRAKLAEYQLDQRCEVLFSPCHGQLNPTELAEWILQDHLPVRMQIQLHKLLWNDARGH

SEQ ID NO: 34632 - protein, 222 aa, Sulfuricella denitrificans
  misc_feature (1)..(222): tr|S6AF71|S6AF71_SULDS 7-carboxy-7-deazaguanine synthas e OS=Sulfuricella denitrificans (strain DSM 22764 / NBR C 105220 / skB26) OX=1163617 GN=queE PE=3 SV=1
MPVPNNVAPQLSLRINEIFHSLQGETSRVGLPTVFIRLTGCPLRCTYCDTSYAFNEGETLTLAEIFDKVTQFHARYVTVTGGEPLAQKNCLPLLQQLCDAGYSVSLETGGAMDISKVDTRVSRILDIKTPGSGEAEKNRWKNLELLTPQDEVKFVLCGEEDYQWAKQVLSEKRIADRCPVLFSASQGQLEPARLADWILRDNLPVRLQIQLHKFLWGEGRGK

SEQ ID NO: 34633 - protein, 222 aa, Sulfuricella sp.
  misc_feature (1)..(222): tr|A0A0E9MD69|A0A0E9MD69_9PROT 7-carboxy-7-deazaguanine synthase OS=Sulfuricella sp. T08 OX=1632857 GN=queE PE =3 SV=1
MPVPNSAVPQLSLRINEIFHSLQGETSRAGLPTVFIRLTGCPLRCTYCDTSYAFHEGETLTLPEILDKVAQFHTRYVTVTGGEPLAQKNCLPLLQQLCDVGYSVSLETGGAMDISKVDARVSRILDIKTPDSGEAEKNRWKNLELLTPQDEVKFVLCGEEDYRWAKQVLSEKRVADRCPVLLSVSQGQLEPARLADWILRDNLPVRLQIQLHKHLWGEGRGK

SEQ ID NO: 34634 - protein, 252 aa, Sulfuricurvum kujiense
  misc_feature (1)..(252): tr|E4TXN3|E4TXN3_SULKY 7-carboxy-7-deazaguanine synthas e OS=Sulfuricurvum kujiense (strain ATCC BAA-921 / DSM 16994 / JCM 11577 / YK-1) OX=709032 GN=queE PE=3 SV=1
MLYLVEHFYSVQGEGKYTGVPSLFFRFGGCNLKCEGFGCRESAPDGSEVLGCDTVYAVDRKGFGELWMEIEELQSLIWIMNGYRLPPHVDVVLTGGEPLIYANEPIFVEFIEYLIAHGHRVTFETNATIAPDFKRYPFYAQATYALSVKLSNSGEPLEKRVKPEAYGTIIAHAKESFFKFTVDEPSLVSHIESEIDEIIAPHPYTPVYCMPLGGDKAHIEANCEAVIEFCKRRGFIYSDRLHIRIWDQNHGV

SEQ ID NO: 34635 - protein, 252 aa, Sulfuricurvum sp.; identical to SEQ ID NO: 28772
  misc_feature (1)..(252): tr|A0A258Z360|A0A258Z360_9HELI 7-carboxy-7-deazaguanine synthase OS=Sulfuricurvum sp. 24-42-5 OX=1970440 GN=qu eE PE=3 SV=1

SEQ ID NO: 34636 - protein, 249 aa, Sulfuricurvum sp.
  misc_feature (1)..(249): tr|A0A0C2ZXH7|A0A0C2ZXH7_9HELI 7-carboxy-7-deazaguanine synthase OS=Sulfuricurvum sp. PC08-66 OX=1539066 GN=qu eE PE=3 SV=1
MIHLVEHFFSIQGEGRYVGVPSLFFRLGGCNMRCVGFGTHITAPDGTTIVGCDTAYAVDKEHFASQWRAIDETQTLIDILNSYAIPYSVDVVFTGGEPLLFASELAPFVEYLVARGHRVTFETNGSVALDFDAYPAYRECTFALAVKLSNSGEPHHRRINPKAIDSMATHAREAFFKFTLQASTIEDAQAEIAPIIALAPALGVYCMPISDSKAAIEAVCLEVIAFCKMHGYTYSDRLHIRIWDAIQGV

SEQ ID NO: 34637 - protein, 215 aa, Sulfuriferula multivorans
  misc_feature (1)..(215): tr|A0A401JFE8|A0A401JFE8_9PROT 7-carboxy-7-deazaguanine synthase OS=Sulfuriferula multivorans OX=1559896 GN=qu eE PE=3 SV=1
MFDATLRITEIFYSVQGETSRAGLPTVFIRLTGCPLRCGYCDTAYAFHGGNSMSIAAVLEQVAQYAPRYVTVTGGEPLAQKNAPLLLAALCDAGYDVSLETSGALDISGIDPRVSRIMDIKTPGSGEAAKNDWNNLKYLTPHDEIKFVIVDAADYDWARSLLQEHQLTQRCPVLFSPVHGQLQSGQLADWVLRDRLPVRMQVQLHKIFWGEVAGR

SEQ ID NO: 34638 - protein, 215 aa, Sulfuriferula plumbiphila
  misc_feature (1)..(215): tr|A0A512LAR2|A0A512LAR2_9PROT 7-carboxy-7-deazaguanine synthase OS=Sulfuriferula plumbiphila OX=171865 GN=que E PE=3 SV=1
MFDATLRITEIFYSVQGETSRAGLPTVFIRLTGCPLRCGYCDTAYAFHGGTGMTIAAILQQVAEYAPRYVTVTGGEPLAQKNAPPLLAALCDAGYDVSLETSGALDISGVDQRVSRIVDIKTPGSGEVAKNYWDNLNYLAPHDEIKFVIADAADYKWARAMLHEHKLAQRCPVLFSPVHGQLGAGQLADWVLRDRLPVRVQVQLHKIFWGEVAGR

SEQ ID NO: 34639 - protein, 214 aa, Sulfuriferula sp.
  misc_feature (1)..(214): tr|A0A1Y0G9V8|A0A1Y0G9V8_9PROT 7-carboxy-7-deazaguanine synthase OS=Sulfuriferula sp. AH1 OX=1985873 GN=queE P E=3 SV=1
MDAATLRITEIFYSVQGETSRVGLPTVFVRLTGCPLRCGYCDTAYAFHGGESLTLSTILERVAAYHPRYVTVTGGEPLAQKHALTLLSALCDAGYDVSLETSGALDIGAVDPRVSRIVDIKTPGSGEVSKNRWENLAYLTAHDELKFVITDEADYQWARQTLAEHALAEQCPVLFSPVHGGAASELADWILRDRLPVRMQLQLHKILWNDAAGR

SEQ ID NO: 34640 - protein, 211 aa, Sulfurifustis variabilis
  misc_feature (1)..(211): tr|A0A1B4VGC1|A0A1B4VGC1_9GAMM 7-carboxy-7-deazaguanine synthase OS=Sulfurifustis variabilis OX=1675686 GN=que E PE=3 SV=1
MLRVTEVFYSLQGEARSVGCPTVFVRLTGCPLRCSYCDTAYAFHGGTRVSLDDVLERVAQYAPRYVCVTGGEPLAQPACRTLLARLADRGYAVSLETSGALDIADIDARVSIVMDLKTPSSGEEARNRYANVALLRPADQVKFVIRDRADYEWSRARLAEYGLADRCEILFSPVHGELDPTTLADWILAERLPVRLQIQLHKLLWHGAPGR

SEQ ID NO: 34641 - protein, 217 aa, Sulfurihydrogenibium azorense
  misc_feature (1)..(217): tr|C1DXS5|C1DXS5_SULAA 7-carboxy-7-deazaguanine synthas e OS=Sulfurihydrogenibium azorense (strain Az-Fu1 / DSM 15241 / OCM 825) OX=204536 GN=queE PE=3 SV=1
MKKNLYKETFKVVEIFRTVEGEGRWVGLPVVFIRLEGCNLRCSWCDTTYSYDGKTYTVKTLEEILKEVSTYNLKRVCITGGEPFLTSNLDILVKSLLDEDYYVFIETNGTLWNERFKDLNLDRLYITCSPKPPFYFVNKDLIPYIKELKFVVDENLSLNHIIKPDFIDIIKSDIIVLQPESNKPEMVKKALNLQDQLLQLGIESRIIPQCHKVLGLP

SEQ ID NO: 34642 - protein, 220 aa, Sulfurihydrogenibium sp.
  misc_feature (1)..(220): tr|B2V8D4|B2V8D4_SULSY 7-carboxy-7-deazaguanine synthas e OS=Sulfurihydrogenibium sp. (strain YO3AOP1) OX=43611 4 GN=queE PE=3 SV=1
MKLLKKDLNKETFKVVEIFRSVEGEGRWVGLPVVFIRLEGCNLRCSWCDTPYSYTGENFKLLSISDILEEIKKYNLKRVCITGGEPFFTENLDILVGNLIENNYQVFIETNGTLWNQNFENLDKSKIYITCSPKPPFYFINKNLLPYISEFKFVVDETLDVKHIIRPDLTEYIKNDVIVLQPESNKPEMVNKALKLQDELLKFGIESRIIPQCHKVLGLP

SEQ ID NO: 34643 - protein, 217 aa, Sulfurihydrogenibium sp.
  misc_feature (1)..(217): tr|A0A2J6WZL9|A0A2J6WZL9_9AQUI 7-carboxy-7-deazaguanine synthase OS=Sulfurihydrogenibium sp. OX=2053621 GN=que E PE=3 SV=1
MKKDLLKEEFKVVEIFRTVEGEGRWVGLPVVFIRLEGCNLRCSWCDTTYSYDGKSYTVKNLYDILSQVKQYNLKRVCITGGEPFMTENLDVLVKVLLDEGFYVFIETNGTMWNEKFREIKKDNLYITCSPKPPFYFVNKNILPYISELKFVVDENLSVNHIIKPEFTEILKNDIIVLQPESNKPEMVEKALKIQDELLKLGIESRIIPQCHKVLGLP

SEQ ID NO: 34644 - protein, 217 aa, Sulfurihydrogenibium yellowstonense
  misc_feature (1)..(217): tr|C4FIF0|C4FIF0_9AQUI 7-carboxy-7-deazaguanine synthas e OS=Sulfurihydrogenibium yellowstonense SS-5 OX=432331 GN=queE PE=3 SV=1
MKKDLNKETFKVVEIFRSVEGEGRWVGLPVVFIRLEGCNLRCSWCDTPYSYTGENFKLLSITDILDEIKKYNLKRVCITGGEPFFTENLDVLVENLIENSYQVFIETNGTLWNQNFENLDKSKIYITCSPKPPFYFINKNLLPYVSEFKFVVDETLSIKHIIRSDLIEYIKNDTIVLQPESNKPEMVKKALELQDELLKFGIESRIIPQCHKVLGLP

SEQ ID NO: 34645 - protein, 252 aa, Sulfurimonas autotrophica
  misc_feature (1)..(252): tr|E0UR09|E0UR09_SULAO 7-carboxy-7-deazaguanine synthas e OS=Sulfurimonas autotrophica (strain ATCC BAA-671 / D SM 16294 / JCM 11897 / OK10) OX=563040 GN=queE PE=3 SV= 1
MIYLVEHFYSIQGEGKYVGTPSLFFRFGGCNMKCEGFGCKETASDGAEVLGCDTVYAVNKEHFLQNWIPINKAQELLSILSLYDLPEAVDIVLTGGEPLIYANDEIFVDFLEVLVEQGHQITFETNGSLAVDFEKYPVYKECVFALSIKLSNSGEPLNKRLRGNVIYNIASNAKDAFFKFSIDKESINIALEEEIESVTIHSPQTKVYCMPVAGSKKELEENTEPLIEFCKAKGYNFSDRLHIRIWDANKGV

SEQ ID NO: 34646 - protein, 221 aa, Sulfurimonas denitrificans
  misc_feature (1)..(221): tr|Q30P93|Q30P93_SULDN 7-carboxy-7-deazaguanine synthas e OS=Sulfurimonas denitrificans (strain ATCC 33889 / DS M 1251) OX=326298 GN=queE PE=3 SV=1
MRCEGFGCEESTPNGEKIVGCDTIYAVNREHFLQNWIPITSAHELLNILNFYDLPFAVDVVLTGGEPLIYANEPIFIEFLEKLYERGHKITFETNGTLSVDFERHVIYKKCIFALSVKLSNSNEAFAKRVKGEVISNIALNAKEVFFKFSIDADSINAALEDEILEITSFSPKTKVYCMPLGGTKEEVEANTEPLVEFCKAKGYNFSDRLHIRIWDQNRGV

SEQ ID NO: 34647 - protein, 253 aa, Sulfurimonas gotlandica
  misc_feature (1)..(253): tr|B6BHS5|B6BHS5_SULGG 7-carboxy-7-deazaguanine synthas e OS=Sulfurimonas gotlandica (strain DSM 19862 / JCM 16 533 / GD1) OX=929558 GN=queE PE=3 SV=1
MLYLVEHFYSIQGEGRYTGVPSLFFRFGGCNMKCEGFGCEEEASDGTKVLGCDTVYAVNKEHFSFNWSPIQKTQELLNVLDLYELPQRPVDIVLTGGEPLIYANEGIFVEFLEKLHEEGHKITFETNGSIAVDFEKYPIYKECIFALSVKLSNSKEPFRKRVNGDVIYSIASNAKEAFFKFSIDADSINLGLDEEIFNITLHSPRTQVYCMPLGGNKAEVEANTEPLIEFCKAKGYNFSDRLHIRIWDQNKGV

SEQ ID NO: 34648 - protein, 253 aa, Sulfurimonas hongkongensis
  misc_feature (1)..(253): tr|T0L1C2|T0L1C2_9HELI 7-carboxy-7-deazaguanine synthas e OS=Sulfurimonas hongkongensis OX=1172190 GN=queE PE=3 SV=1
MIYLVEHFYSIQGEGRYIGTPSLFFRFGACNLKCEGFACSEVAPDGTVVVGCDTVYAVNKEHFSSQWGKITKARELLNILELYELPEKSVDIVLTGGEPLLYAQDEIFVEFLQVLHQRGHRICFETNATIAVNFFKYEIYKECIFALSVKLSNSNEPYKKRVRGEVINSIATNAKDAYFKFSVDAESINLGLEDEIFDITSHAPSADVFCMPVGGDKKTVEANTPMLVEFCKAKGYNFSDRLHIRIWDANKGV

SEQ ID NO: 34649 - protein, 252 aa, Sulfurimonas sp.
  misc_feature (1)..(252): tr|A0A2D3VPP6|A0A2D3VPP6_9HELI 7-carboxy-7-deazaguanine synthase OS=Sulfurimonas sp. UBA12504 OX=2015903 GN=qu eE PE=3 SV=1
MIYLVEHFYSIQGEGRYTGSPSLFFRFGGCNMKCEGFGCVEEAADGVKVLGCDTVYAVNKEHFAHAWISIKHEDELLNVLDLYELPEGVDVVLTGGEPLIYANDAVFVAFLEELDARGHTITFETNASLTVDFEKYEVYKKCIFALSVKLSNSGENESKRIRGDAINAIALNAREAFFKFSIDAESINLGLDDEIEDILSHAPFLKVYCMPLGGSRAEVEKNSEPLIEFCKEKGYNFSDRLHIRIWDKNKGV

SEQ ID NO: 34650 - protein, 252 aa, Sulfurimonas sp.
  misc_feature (1)..(252): tr|A0A2G2CUJ2|A0A2G2CUJ2_9HELI 7-carboxy-7-deazaguanine synthase OS=Sulfurimonas sp. OX=2022749 GN=queE PE=3 S V=1
MIYLVEHFYSIQGEGKYVGSPSLFFRFGGCNMKCEGFGCKETARDGTEVLGCDTVYAVNKEHFSHTWVPITKTQELLSVLDLYELPNAVDIVLTGGEPLIYANDTIFINFLETLIRNGHRITFETNGSLDVDFLRYPVYKECFFALSVKLTNSLEPLAKRVRGDIIYNISSNAKDAFFKFSIDKESITLGLEEELCEILVHSPSTAVYCMPVGGSKDEVEKNTEPLIEFCKAKGYNFSDRLHIRIWDINKGV

SEQ ID NO: 34651 - protein, 217 aa, Sulfurirhabdus autotrophica
  misc_feature (1)..(217): tr|A0A4R3XY17|A0A4R3XY17_9PROT 7-carboxy-7-deazaguanine synthase OS=Sulfurirhabdus autotrophica OX=1706046 GN= queE PE=3 SV=1
MTAPQPTLRINEIFYSLQGETSRIGLPTVFIRLTGCPLRCGYCDTEYAFHEGESMPLSAILEKTKAYGAHYVTVTGGEPLAQKGCIDLLKALCDADYSVSLETSGALDVSKVDVRVSKIVDVKTPGSGEVTKNRWENLQYLTPHDEIKFVLCDVNDYQWAKQQLTEHNLVERCPVIFSPVFSTLEPGDLAEWVLRDHVPVRMQIQLHKYLWGEGRGK

SEQ ID NO: 34652 - protein, 217 aa, Sulfurisoma sediminicola
  misc_feature (1)..(217): tr|A0A497XM41|A0A497XM41_9PROT 7-carboxy-7-deazaguanine synthase OS=Sulfurisoma sediminicola OX=1381557 GN=que E PE=3 SV=1
MGAADAKLRVSEIFHSIQGESTRVGLPTVFVRLTGCPLRCSWCDTEYAFAGGEAMTIPQALERVASHGCPTVCVTGGEPLAQKACPELLAALCDAGYSVSLETSGALDVCGLDARVSRIVDLKAPDSGECEKNRWENLACLNRHDELKLVLASTADYEWAKSLLTARRLDAICPVLFSPVADRLDPTQLAEWIVRDRLPVRFQLQLHKLLWCDTRGR

SEQ ID NO: 34653 - protein, 222 aa, Sulfuritalea hydrogenivorans
  misc_feature (1)..(222): tr|W0SK16|W0SK16_9PROT 7-carboxy-7-deazaguanine synthas e OS=Sulfuritalea hydrogenivorans sk43H OX=1223802 GN=q ueE PE=3 SV=1
MSATSDAHLQNSLRVTEIFHSIQGESSRVGLPTVFVRLTGCPLRCVWCDTEYAFSGGESLSIADILQRVAGFDCKTVCVTGGEPLAQKNCLPLLSALCDAGHSVSLETSGALDIGGIDPRVARIVDLKAPGSGEEAKNCWENIGLLTAHDELKFVLASREDYDWAVSACRQRRLFERCPILFSPVQGQLDPTQLAQWILDDRLPVRFQLQLHKLLWDNAKGR

SEQ ID NO: 34654 - protein, 215 aa, Sulfuritortus calidifontis
  misc_feature (1)..(215): tr|A0A4R3JZ29|A0A4R3JZ29_9PROT 7-carboxy-7-deazaguanine synthase OS=Sulfuritortus calidifontis OX=1914471 GN=q ueE PE=3 SV=1
MSEPRLRVTEIFYSIQGETSRVGLPTVFVRLTGCPLRCGYCDTAYAFQGGEWMTLAQILAAVAAYALRQVTVTGGEPLAQRDCPALLTALCDAGYDVSLETSGALDIAPVDKRVARIVDIKTPGSGEVERNLWSNIEQLTPHDEVKFVIVDEADYRWAVELLRQHRLAERCEVLFSPVFGKLQPRQLAEWILRDRLPVRLQVQLHKVLWGEEPGR

SEQ ID NO: 34655 - protein, 210 aa, Sulfurivirga caldicuralii
  misc_feature (1)..(210): tr|A0A1N6ERW5|A0A1N6ERW5_9GAMM 7-carboxy-7-deazaguanine synthase OS=Sulfurivirga caldicuralii OX=364032 GN=que E PE=3 SV=1
MAYRIKEVFYSLQGEGAHSGRPAIFCRFSHCNLWTGKEEDRATAVCRFCDTDFVGTDGQNGGRFDTAEALVEHLIRFWPDISVPPFVVLTGGEPLLQVDTALLKALKRQRFEIAVETNGTIKAPGGIDWLTVSPKAGAPLIQTWGDELKLVYPQADLPPEKVAHLEFKLFYLQPMDGPNQQANLRKTLNYCLKHPQWRLSLQTHKLLGID

SEQ ID NO: 34656 - protein, 192 aa, Sulfurospirillum barnesii
  misc_feature (1)..(192): tr|I3XZ86|I3XZ86_SULBS 7-carboxy-7-deazaguanine synthas e OS=Sulfurospirillum barnesii (strain ATCC 700032 / DS M 10660 / SES-3) OX=760154 GN=queE PE=3 SV=1
MLKVVEIFYSIQGEGTQVGVPSIFIRLHGCNLSCSFCDEELHKGAYEELSFEAVLERIQTYLSMNVIITGGEPTLYDLRDFIAFLQGHGYFVAVETNGFRFSHIANANWITYSPKEWNHIAQEGFHEVKFVVGKNAPLEKILEFKSDKPIFIQPQNESDKPNFENVAFCVEFVKKYPRFILSVQLHKFLGVE

SEQ ID NO: 34657 - protein, 192 aa, Sulfurospirillum cavolei
  misc_feature (1)..(192): tr|A0A2D3W734|A0A2D3W734_9PROT 7-carboxy-7-deazaguanine synthase OS=Sulfurospirillum cavolei OX=366522 GN=queE PE=3 SV=1
MLNVVEIFYSIQGEGAQVGVPCVFIRLHGCNLACSFCDEELHKGAYERLTFEAVLERIAAYPSKNVIITGGEPSLYDLRDFIAVLHSHMYRVGVETNGYNFAHIADADWITYSPKDWDAIALSGYDEIKFVVDKDASVEKIAAFQSDKAMFIQPQNKPHAPDMSNVRFCLEFVMQHPQFTFSAQLHKFLGVE

SEQ ID NO: 34658 - protein, 192 aa, Sulfurospirillum deleyianum
  misc_feature (1)..(192): tr|D1B473|D1B473_SULD5 7-carboxy-7-deazaguanine synthas e OS=Sulfurospirillum deleyianum (strain ATCC 51133 / D SM 6946 / 5175) OX=525898 GN=queE PE=3 SV=1
MLKVVEMFYSIQGEGTQVGVPSIFIRLYGCNLSCSFCDEELHKGAYEELSFDAVLERIKAYPSMNVIITGGEPSIYDLNGFIDFLQAHMYAVSVETNGYNFSNIASANWITYSPKDWNHIAKHGYDEVKFIVSKDSDVSKLLDFKSYKPLFIQPQNNAHTPNQENLAFCIAFVKANPRFILSVQLHKFLGVE

SEQ ID NO: 34659 - protein, 192 aa, Sulfurospirillum halorespirans
  misc_feature (1)..(192): tr|A0A1D7TM90|A0A1D7TM90_9PROT 7-carboxy-7-deazaguanine synthase OS=Sulfurospirillum halorespirans DSM 13726 O X=1193502 GN=queE PE=3 SV=1
MLKIVEIFYSIQGEGTQVGVPSIFIRLHGCNLACNFCDELLHKGEYASLSFDEVLERIKVFPSMHVIITGGEPTIYNLNGFIEYLQAYMYSVAVETNGYNFSNISNANWVTYSPKAWDVIEKYGYDEVKFVVSKDSDVEKILAFKSYKPIFIQPQNEIDRPNKENVNFCVEFVKAHPQFILSVQLHKFLGVE

SEQ ID NO: 34660 - protein, 192 aa, Sulfurospirillum multivorans
  misc_feature (1)..(192): tr|A0A5B9TVI4|A0A5B9TVI4_SULMU 7-carboxy-7-deazaguanine synthase OS=Sulfurospirillum multivorans OX=66821 GN=q ueE PE=3 SV=1
MLKIVEIFYSIQGEGTQVGVPSIFIRLHGCNLACSFCDELLHKGEYASLSFDEVLERIKVYPSMHVIITGGEPTIYNLNGFIEYLQAYMYSVAVETNGYNFSNISNANWVTYSPKNWDLIEKYGYDEVKFVVSKESDVEKILAFKSYKPIFIQPQNETDRPNKENVNFCVEFVKAHPQFILSVQLHKFLGVE

SEQ ID NO: 34661 - protein, 192 aa, Sulfurospirillum sp.
  misc_feature (1)..(192): tr|A0A2D3WFU0|A0A2D3WFU0_9PROT 7-carboxy-7-deazaguanine synthase OS=Sulfurospirillum sp. UBA12182 OX=2015905 G N=queE PE=3 SV=1
MYKIVDIFYSLQGEGTYVGVPSIFVRFYGCNLGCYFCDDEKHKGNFEVLSQEELLEKIEGFTCKRVVITGGEPSIYNLNSLIEFLQERGYYVCAESNGYELSNIKQADWITYSPKDWNEIQSDGFSEYKFIVSTVSEVDKILALKTDKPIYIQPENHFASANVVNVKFCIDFVKANPHLKLSVQLHKYLGVE

SEQ ID NO: 34662 - protein, 192 aa, Sulfurospirillum sp.
  misc_feature (1)..(192): tr|A0A2D3W3Z7|A0A2D3W3Z7_9PROT 7-carboxy-7-deazaguanine synthase OS=Sulfurospirillum sp. UBA11407 OX=2015904 G N=queE PE=3 SV=1
MYKIVDIFYSLQGEGTYVGVPSIFVRFYGCNLGCYFCDDEKHKGNFEVLSQEELLEKIEGFTCKRVVITGGEPSIYNLNSLIEFLQERGYYVCVESNGYELSNIKQADWITYSPKDWNEIQSDGFSEYKFIVSTVSEVDKILALKTDKPIYIQPENHFASANVVNVKFCIDFVKANPHLKLSVQLHKYLGVE

SEQ ID NO: 34663 - protein, 252 aa, Sulfurovum riftiae
  misc_feature (1)..(252): tr|A0A151CGZ3|A0A151CGZ3_9PROT 7-carboxy-7-deazaguanine synthase OS=Sulfurovum riftiae OX=1630136 GN=queE PE=3 SV=1
MFYLTEQFFSIQGEGKYAGIPSYFLRTGGCNLSCPGFGARYEVDGEVRFGCDTYFAVDSVFAKQWQKVEQSSLLIAELQNEFKEIGYYPDVVITGGEPLMYHTDKIFYEVIDWLVKNKIRITFETNGTVEIDFEKYPAYKSCVFALSLKLANSGEPKEKRVIPQALKNIQTHTKESFLKFTIDAELVETTAIDEINEVRHILPELDVYCMPVGESRDTIWKNDKAVFEFCMKHNFRYSDRLHIRVFDTTQGV

SEQ ID NO: 34664 - protein, 252 aa, Sulfurovum sp.
  misc_feature (1)..(252): tr|A0A0C2Z5G0|A0A0C2Z5G0_9PROT 7-carboxy-7-deazaguanine synthase OS=Sulfurovum sp. FS06-10 OX=1539064 GN=queE PE=3 SV=1
  misc_feature (163)..(163): Xaa can be any naturally occurring amino acid
  misc_feature (248)..(248): Xaa can be any naturally occurring amino acid
MFYLTEQFFSIQGEGKYAGVPSYFLRTGGCNLSCPGFGASYDVDGMQKLGCDTFFAVDSHFSKRWQKVDDANVLIAHLKKEFETIGYLPQLVITGGEPLLYHKDEAFYAVISWLVKQGILITFETNGTVEIDFEAYPMYKQTIFALSIKLANSGEPKSKRIKXQAIANMVHHSYDRFFKFTIDRALVDSTALDEILEITKPFENATIYCMPVGESRDSIWKNDRAVFEFCMKHNFFYSDRLHIRVFDXTQGV

SEQ ID NO: 34665 - protein, 252 aa, Sulfurovum sp.
  misc_feature (1)..(252): tr|I2K580|I2K580_9PROT 7-carboxy-7-deazaguanine synthas e OS=Sulfurovum sp. AR OX=1165841 GN=queE PE=3 SV=1
MFYLTEQFFSIQGEGKYAGVPSYFLRTGGCNLNCPGFGASYEVNGEVRYGCDTYFAVDSAYAKSWIKVDESKTLIDKLQNEFTHIGYKPHVVITGGEPLMYHSDKIFYAVIEWLVSEGIEVTFETNGTIMIDFETYPAYRSCVFALSLKLANSGEPEEKRIIPQALRSMRDHAKESFLKFTIDAELVKTSAEDEIASIRQILPELPVYCMPVGESRNTIWKNDKAVFEFCMRHNFRYSDRLHIRVFDTTQGV

SEQ ID NO: 34666 - protein, 223 aa, Superficieibacter electus
  misc_feature (1)..(223): tr|A0A2P5GTG6|A0A2P5GTG6_9ENTR 7-carboxy-7-deazaguanine synthase OS=Superficieibacter electus OX=2022662 GN=qu eE PE=3 SV=1
MQYPINEMFQTLQGEGYFTGVPAIFIRLQGCPVGCAWCDTKHTWDKLSDREVSLYSILAKTKESDKWGAASSEDLLAIIERQGYTARHIVITGGEPCIHDLLPLTMLLEKNGFSCQIETSGTHEIRCTPNTWVTVSPKVNMRGGYDVLEQALQRADEIKHPVGRVRDIEALDELLAVLKDDKPRVIALQPISQKDDATRLCIETCIARNWRLSMQTHKYLNIA

SEQ ID NO: 34667 - protein, 223 aa, Sutterella megalosphaeroides
  misc_feature (1)..(223): tr|A0A2Z6I9X8|A0A2Z6I9X8_9BURK 7-carboxy-7-deazaguanine synthase OS=Sutterella megalosphaeroides OX=2494234 GN =queE PE=3 SV=1
MASLLFVNEIFASLQGEGAWTGTPSVFVRLQGCLCRCPWCDTKNTWKLGEPNDCGLDFAASKADAPRHATCTGEELLAYIDAHYASIPHVIFTGGEPMLFDLTDVTAALLARGKTVAIETSGTEPVRVAEGVWVTVSPKYDMPGGREVLASALRRADEIKMPVSGPKDLEDLEHRTLPETKPGVLVYVQPVSRDDEATRLCVEAAMTKGWRVSFQVHKYVNMR

SEQ ID NO: 34668 - protein, 238 aa, Sutterella parvirubra
  misc_feature (1)..(238): tr|H3KD59|H3KD59_9BURK 7-carboxy-7-deazaguanine synthas e OS=Sutterella parvirubra YIT 11816 OX=762967 GN=queE PE=3 SV=1
MTPIVPTARQNQIKGAEPLFFVNEIFASLQGEGAWTGTPSVFVRLQGCLCRCPYCDTKHTWKLGEPNGEKLDFAAAKADAPRHATATEDELFDFITTHFPKVPHVVFTGGEPFLFDLTGISERLLAAGRTVGVETSGTEPARVAGAVWVTVSPKIGMPGGRVVLPETLARADEIKMAVESEKDIEELKTDVLPFVSKKALIYVQPVSQGERATKFCWDAAMEEGWRVSFQVHKYVSIR

SEQ ID NO: 34669 - protein, 226 aa, Sutterella sp.
  misc_feature (1)..(226): tr|R7IHN4|R7IHN4_9BURK 7-carboxy-7-deazaguanine synthas e OS=Sutterella sp. CAG:351 OX=1262975 GN=queE PE=3 SV= 1
MEEIRYSINEIFASVQGEGLLAGTPAVFVRLQGCPVHCPWCDTKYSWKEDGSGTTKIPLSEVLVKDSRPRSADASLDELVNLILERWPRIPLVVITGGEPAEQPIRPLTERLIAAGKRVSLETSGFLEIDVAPETFVTVSPKITVPGGRVLDSALERADEVKMVIGDESDLAALDAITDKIPASTPISLQPLSMEDSAASLCFRTAVERGGRYRVSVQLHKVLRVR

SEQ ID NO: 34670 - protein, 226 aa, Sutterella sp.
  misc_feature (1)..(226): tr|A0A414VVB0|A0A414VVB0_9BURK 7-carboxy-7-deazaguanine synthase OS=Sutterella sp. AM18-8-1 OX=2292076 GN=queE PE=3 SV=1
MEEIRYSINEIFASVQGEGLLAGTPAVFVRLQGCPLHCPWCDTKYSWKEDGSGTAKIPLSEVLVKDSRPRSADATLDELVNLILERWPRIPLVVITGGEPAEQPIRPLTERLIAAGKRVSLETSGFLEIDVAPETFVTVSPKITVPGGRVLDSALERADEVKMVIGDESDLAALDAITDKIPESTPISLQPLSMEESAASLCFRTAVERGGRYRVSVQLHKVLRVR

SEQ ID NO: 34671 - protein, 208 aa, Sutterellaceae bacterium
  misc_feature (1)..(208): tr|A0A2E2R6P7|A0A2E2R6P7_9BURK 7-carboxy-7-deazaguanine synthase OS=Sutterellaceae bacterium OX=2026794 GN=que E PE=3 SV=1
MFYTLQGEGAQAGRAAVFCRFAGCNLWTGREEDRATAVCKFCDTDFVGTDGVGGGKFKDAVALAQAIADTYQGGLGTARPYVVFTGGEPTLQLDSALIDAVHAQGFEIAIETNGTLPVPEGVDWICVSPKFGSELVQTRGHELKVVVPQLGQDLTALGQLQFDHYFVQAMDDSDPAKKAKNMQAAIQTCLNKPQWRLSVQTHKVIGMP

SEQ ID NO: 34672 - protein, 208 aa, Sutterellaceae bacterium
  misc_feature (1)..(208): tr|A0A2D6RQJ1|A0A2D6RQJ1_9BURK 7-carboxy-7-deazaguanine synthase OS=Sutterellaceae bacterium OX=2026794 GN=que E PE=3 SV=1
MFYTLQGEGAQAGRAAVFCRFAGCNLWTGREEDRATAVCKFCDTDFVGTDGVGGGKFKDAVALAQAIADTYQGGLGTAKPYVVFTGGEPTLQLDSALIDAVHAQGFEIAIETNGTLPVPEGVDWICVSPKFGSELVQTNGHELKVVVPQLGQDLNALGRLQFEHYFVQAMDDSDPVKKSRNLQVAIQTCLNKPQWRLSVQTHKVIGMP

SEQ ID NO: 34673 - protein, 206 aa, Swaminathania salitolerans
  misc_feature (1)..(206): tr|A0A511BQ89|A0A511BQ89_9PROT 7-carboxy-7-deazaguanine synthase OS=Swaminathania salitolerans OX=182838 GN=qu eE PE=3 SV=1
MFATLQGEGAHTGRASIFCRFTGCNLWSGREQDRHKAACTFCDTDFLGTDGPGGARFETPEALADALALRWYEAAGESEGRYVVFTGGEPLLQVDPPLIAAVHARGFEIAIESNGTLEAPEGIDWICVSPKPSSRIVQRSGHELKLVFPQESLPPSTFDSWDFSQFWLQPMDGPDRAANTAAAVAYCQKNPRWRLSLQTHKLIGIP

SEQ ID NO: 34674 - protein, 213 aa, Swingsia samuiensis
  misc_feature (1)..(213): tr|A0A4Y6UHQ2|A0A4Y6UHQ2_9PROT 7-carboxy-7-deazaguanine synthase OS=Swingsia samuiensis OX=1293412 GN=queE PE= 3 SV=1
MSYAIKEMFITLQGEGAQTGRTSVFCRFTGCNLWSGREQDRDTAACRFCDTDFIGTNGEGGGRFKTAELLAEALEACWSRTVKNTGQRYVVFTGGEPLLQLDDALIQAVKAFGFEIAVETNGTIIAPHGVDWICVSPKPDSKLIQTQGSELKLVYPQKELSPEMFDTLDFKHFWLQPMDGPNRFENTQKAVAFCLANPRWRLSLQTHKMIGIP

SEQ ID NO: 34675 - protein, 253 aa, Swingsia sp.
  misc_feature (1)..(253): tr|A0A4Y6U7J9|A0A4Y6U7J9_9PROT 7-carboxy-7-deazaguanine synthase OS=Swingsia sp. F3b2 OX=2558361 GN=queE PE=3 SV=1
MKAALTAFHGYSGLISLMEHAVVYSVKEIFPTLQGEGFHTGRAAVFCRFAGCNLWNGREGDRAHALCRFCDTDFIGTDGPGGGRFHKAADLAQSILQAWQAGTGDQGHASCSPLVRPYVVFTGGEPLLQLDQPLIQALKQLDFEVGVESNGTLKAPLGIDWLCISPKGRAPLVQASGDELKFIYPQTDASPELFTTLPFKHFWLQPLDIPAPSAEAGQPPLRSAENVQAAVRYCQTHPQWRLSLQTHKLIGIP

SEQ ID NO: 34676 - protein, 217 aa, Synechococcales bacterium
  misc_feature (1)..(217): tr|A0A354B255|A0A354B255_9CYAN 7-carboxy-7-deazaguanine synthase OS=Synechococcales bacterium UBA10510 OX=2055 795 GN=queE PE=3 SV=1
MVETFHSLQGEGIHAGRSAFFIRLAGCQVGCSWCDTKHSWPLAAHPQRPLAELVAEAQAAAAAGAAFLVITGGEPLHHQLDPLCKALRQLSAPGGKALPLHLETSGVDPLSGRFDWIALSPKRHRPPRPELLAACHELKLVVHHREDLSFAAAMAAAARQHRRTAGQGRDQSSDQGPVLLLQPGANCAAGQQLAIDYVKANPDWRLSLQSHKLLGLR

SEQ ID NO: 34677 - protein, 50 aa, Synechococcales bacterium
  misc_feature (1)..(50): tr|A0A358BYX7|A0A358BYX7_9CYAN 7-carboxy-7-deazaguanine synthase QueE (Fragment) OS=Synechococcales bacterium UBA8138 OX=2055796 GN=DEB19_06330 PE=4 SV=1
MANPGLLPVVETFHSLQGEGIHGGRSAFFIRLAGCNVACSWCDTKHSWPS

SEQ ID NO: 34678 - protein, 206 aa, Synechococcus elongatus
  misc_feature (1)..(206): tr|A0A3G6X2B1|A0A3G6X2B1_SYNEL 7-carboxy-7-deazaguanine synthase OS=Synechococcus elongatus PCC 11801 OX=22198 13 GN=queE PE=3 SV=1
MSAVIASTTATLPIVETFHSVQGEGAWMGCSAFFIRLAGCDVGCPWCDTKQSWPRDRHPEVAIADLVQAAIAAQPQFVVVTGGEPLLHDLTELTNALRSQGLRCHLETSGSAPPSGQFDWVTLSPKPFKPVVATNYNWANELKVVIQTEADLAFAEQQAIAVPETTLKLLQPEWNSPESRDRVVNYVRQHPRWRVSLQTHKFLGVR

SEQ ID NO: 34679 - protein, 206 aa, Synechococcus elongatus
  misc_feature (1)..(206): tr|Q31NK7|Q31NK7_SYNE7 7-carboxy-7-deazaguanine synthas e OS=Synechococcus elongatus (strain PCC 7942) OX=1140 GN=queE PE=3 SV=1
MSALTSIAAATLPIVETFHSVQGEGAWMGCSAFFIRLAGCDVGCPWCDTKQSWPRDRHPEVAIADLVEAAVAAQPQFVVITGGEPLLHDLTELTNALRSQGLRCHLETSGSASPSGSFDWVTLSPKPFKAVVAANYNWANELKVVIQTDADFDFAEQEAIAVPETTLKLLQPEWNSPESCDRVVNYVRQHPRWRVSLQTHKFLGVR

SEQ ID NO: 34680 - protein, 199 aa, Synechococcus lacustris
  misc_feature (1)..(199): tr|A0A2P7EFD1|A0A2P7EFD1_9SYNE 7-carboxy-7-deazaguanine synthase OS=Synechococcus lacustris OX=2116544 GN=queE PE=3 SV=1
MVETFHSLQGEGIHGGRSAFFIRLAGCNVACSWCDTKHSWPSEAHPQRPAEHLAAEAQSAAQAGAAFVVITGGEPLHHNLDCLCTSLKPVGLPIHLETSGVDQLSGCFDWICLSPKRHRPPSQALLTACNELKVVVHEAADLEFAVAMAAAANRGKNKPVLMLQPGADSKAGSSIAINYVMAHPAWRLSLQTHKWLGVR

SEQ ID NO: 34681 - protein, 261 aa, Synechococcus lividus
  misc_feature (1)..(261): tr|A0A2D2PZJ7|A0A2D2PZJ7_SYNLI 7-carboxy-7-deazaguanine synthase OS=Synechococcus lividus PCC 6715 OX=1917166 GN=queE PE=3 SV=1
MIGDLDLEGVSVPLVEIFSAIQGEGANVGTRQLFIRFAGCDLRCTYCDSAHTWSVPAIALLETIAGDRQFQRVANPLSGTQILAAVAQLHHPHLHDSISLTGGEPLLHALALATLLPALKAATQLPLYLETGGHHPRALERVLPYLDSVGMDIKLPSVSGECHWPAHQQFLTLCDRAGVEVFCKVIISALTTPTDLATMAELVATVNPRIPVFLQPVTPIGTGRLIQPPTPAQVLAWQAYLKNRLAHVRVIPQTHKFLGQR

SEQ ID NO: 34682 - protein, 202 aa, Synechococcus sp.
  misc_feature (1)..(202): tr|A0A1Z9JG94|A0A1Z9JG94_9SYNE 7-carboxy-7-deazaguanine synthase OS=Synechococcus sp. TMED169 OX=1986593 GN=qu eE PE=3 SV=1
  misc_feature (52)..(52): Xaa can be any naturally occurring amino acid
  misc_feature (71)..(71): Xaa can be any naturally occurring amino acid
  misc_feature (81)..(81): Xaa can be any naturally occurring amino acid
  misc_feature (87)..(87): Xaa can be any naturally occurring amino acid
  misc_feature (97)..(97): Xaa can be any naturally occurring amino acid
  misc_feature (102)..(102): Xaa can be any naturally occurring amino acid
  misc_feature (112)..(112): Xaa can be any naturally occurring amino acid
  misc_feature (116)..(116): Xaa can be any naturally occurring amino acid
MSTLPVVETFHSLQGEGLHAGRSAFFIRLGGCTVGCSWCDTKHSWPQTAHPXLELQTLAAEAAAAQQKGAXFVVITGGEPXHHDLDXFCQALAEATXSLPRXLETSGVDPLXGSFXWITLSPKSHKPPTQQLLQRCDELKAVVHGPEDLSFAEAMAAQAPQAQWLLQPGWDSPQGQKLAIDFVRSNPAWRLSLQSHKWLGVR

SEQ ID NO: 34683 - protein, 206 aa, Synechococcus sp.
  misc_feature (1)..(206): tr|A0A0H5PV66|A0A0H5PV66_SYNPZ 7-carboxy-7-deazaguanine synthase OS=Synechococcus sp. (strain WH8103) OX=29410 GN=queE PE=3 SV=1
MNQDAATLPVVETFHSLQGEGHHSGRSAFFIRLAGCNVGCPWCDTKHSWPVNTHPQRSLRALAADVEQAERNGAAFTVITGGEPLQHNLDGLASALREASSHPLHLETSGVDGLSGDPDWITLSPKPHRPPRQELLSHCDELKVVIHTADDLLFAESMAAAVSKQTVLLLQPGWDSSEGQRLAIDHVQNQPRWRLSLQTHKWLGVR

SEQ ID NO: 34684 - protein, 208 aa, Synechocystis sp.
  misc_feature (1)..(208): sp|P73667|QUEE_SYNY3 7-carboxy-7-deazaguanine synthase OS=Synechocystis sp. (strain PCC 6803 / Kazusa) OX=1111 708 GN=queE PE=3 SV=1
MSMGPISELLTVSYPIAETFHSLQGEGAWAGGNAFFIRLGGCDVHCPWCDQKETWPTQHHPRQTVTELVQQAVTAKPSFVVITGGEPLMHDLQPLCKTLKNQGLRLHLETSGAYPLTGQFDWITLSPKPYKLPQAAIYPLANELKVIISQDEDFDWAEMEARKISPGTPLYLQAEWETEAMNEKIFAYILTHSQWRLSLQTHKYLGVR

SEQ ID NO: 34685 - protein, 206 aa, Synechocystis sp.
  misc_feature (1)..(206): tr|A0A068MS08|A0A068MS08_SYNY4 7-carboxy-7-deazaguanine synthase OS=Synechocystis sp. (strain PCC 6714) OX=114 7 GN=queE PE=3 SV=1
MATISEPLTFTYPIAETFHSLQGEGAWAGSNAFFIRLGGCDVHCPWCDQKETWPTQHHPRQTVIELVQRAVQAKPGFVVITGGEPLMHDLNPLCQALKNQGLRLHLETSGVYPLTGQFDWITLSPKPYRLPQAEIYPLANELKVIISQDKDFSWAEIEATKVSRGTRLYLQAEWETEAMNARIFAYVLTHPQWRLGLQTHKYLGVR

SEQ ID NO: 34686 - protein, 209 aa, Syntrophaceae bacterium
  misc_feature (1)..(209): tr|A0A354SG45|A0A354SG45_9DELT 7-carboxy-7-deazaguanine synthase OS=Syntrophaceae bacterium OX=2052184 GN=queE PE=3 SV=1
MYSVKEIFYSIQGEGYYSGRPAVFCRFSGCNLWSGREEDRDKALCKFCDTDFVGTDGIDGGLYKTASLLAKKISQHWPQANERRFLVCTGGEPLLQMDAALIAALHEENLEIAVETNGTIAAPAGIDWICVSPKAGVQLAQASGDELKLAYPQTGLDPQRYAKLNFRHFFLQPMDNVDREEATKQALKYVLAHPGWRISLQLHKILDVR

SEQ ID NO: 34687 - protein, 323 aa, Syntrophaceae bacterium
  misc_feature (1)..(323): tr|A0A1V5E249|A0A1V5E249_9DELT 7-carboxy-7-deazaguanine synthase OS=Syntrophaceae bacterium PtaU1.Bin231 OX=18 11718 GN=queE PE=4 SV=1
MNAFDRKVRRVLPEGLVSGEVRVLQINLGRHCNLSCSHCHLECSPSRRERMTQAVMGEILSRIGGRTFDRVDITGGSPELHPHFRTFLEKLCAEGCPVQVRTNLTNLAGPPLSGLIPFFRDRRVSLVGSLPCYEEENVDLQRGPGVHERSIAALRLLNRAGYGVEEALPLDLVYNPGGPFLPPQQAELEGIYRGELGRRFGVRFSRLLVLTNMPIGRFGRQLEQGGEMAAYRKLLEDSFNPATLARLMCRHQISVDWDGRLYDCDFNLALGMPVNHGSPNTLAAARLDRLASRSIMTGSHCFGCTAGSGSSCAGALAPPSASS

SEQ ID NO: 34688 - protein, 215 aa, Syntrophobacter fumaroxidans
  misc_feature (1)..(215): tr|A0LJR6|A0LJR6_SYNFM 7-carboxy-7-deazaguanine synthas e OS=Syntrophobacter fumaroxidans (strain DSM 10017 / M POB) OX=335543 GN=queE PE=3 SV=1
MALRVNEIFHSIQGESGYAGWPCVFVRLTGCNLRCSYCDTRYAYDEGDFVTLREIIGRVRRFDCPLVEITGGEPLLQPETPELVAELLDLGHTVLVETNGSMDISVVDRRCVKIVDFKCPSSGESDANDMENLERLGSRDEIKCVIGTREDYEFAREIERLAAERAGTGSTVCFSPVFGKLEPRELAEWILADRLRVRLGLQLHKIIWEPDTRGV

SEQ ID NO: 34689 - protein, 212 aa, Syntrophobacter sp.
  misc_feature (1)..(212): tr|A0A2U3K566|A0A2U3K566_9DELT 7-carboxy-7-deazaguanine synthase OS=Syntrophobacter sp. SbD1 OX=2043167 GN=que E PE=3 SV=1
MAIEVTEIFHSIQGESSWAGEPCVFVRLTGCNLRCSYCDTSYAYEHGRLMEIHEILERVSGFRCNLVEVTGGEPLMQAETPLLISRLLDAGRRVLLETNGSIDIDAVDARCVRIVDIKCPSSGMSSHNYLRNLKKLRSHDELKFVIADRKDYEFARDLLATFPAGLCKINFSPVFGSIAPRSLAEWILEDHLPVRLNIQLHKIIWGPDTKSV

SEQ ID NO: 34690 - protein, 215 aa, Syntrophobacteraceae bacterium
  misc_feature (1)..(215): tr|A0A3D0H7H6|A0A3D0H7H6_9DELT 7-carboxy-7-deazaguanine synthase OS=Syntrophobacteraceae bacterium OX=2052185 GN=queE PE=3 SV=1
MALKVNEIFYSIQGESSYAGYPCVFVRMTGCNLRCSYCDTRYAYEKGEDLEIFEILDQVRTYGCPLVEVTGGEPLIQRETPALIQGLLDAGFKVLMETNGSLDIGYVDPRCIRIVDVKCPSSGEVERNDLDNLRRLAQRDEVKFILNDRGDYEYARGILRLMNRTHVRVGHVHFSPVYGKLAPTLLARWILDDCLKVRLNLQIHKIIWDPERRGV

SEQ ID NO: 34691 - protein, 214 aa, Syntrophobacteraceae bacterium
  misc_feature (1)..(214): tr|A0A352PYT4|A0A352PYT4_9DELT 7-carboxy-7-deazaguanine synthase OS=Syntrophobacteraceae bacterium OX=2052185 GN=queE PE=3 SV=1
MALKVNEIFYSIQGESSFSGTPCIFIRLTGCNLRCSYCDTRYACDEGTVLSLDEVLRRIALFPCSLVEVTGGEPLLQQNTPKLLRKLLRLGYKVLVETNGSMNIEAIDKRCIRIVDIKCPSSGEADMNDLGNLKRLTGKDELKFVIGCRSDYEFAKDLVLSPEIMNLKIKPPLFSPVMNKLKPKRLAAWILEDHLNVRLQVQLHKVIWGNRRGV

SEQ ID NO: 34692 - protein, 140 aa, Syntrophobacterales bacterium
  misc_feature (1)..(140): tr|A0A2M7BH96|A0A2M7BH96_9DELT 7-carboxy-7-deazaguanine synthase (Fragment) OS=Syntrophobacterales bacterium C G03_land_8_20_14_0_80_58_14 OX=1974100 GN=COS57_11630 P E=3 SV=1
MQVNEIFFSIQGESSHAGRPCAFIRLTGCNLRCSYCDTAYAYDEGSWLEIPEIERQIRSFDCRLVEITGGEPLLQAETPELIRTLLDRHYTVLLETNGSREIGVIDERCIRIVDVKCPSSGESEKNRLENLAIITPNDEV

SEQ ID NO: 34693 - protein, 190 aa, Syntrophobacterales bacterium
  misc_feature (1)..(190): tr|A0A2G9XLS8|A0A2G9XLS8_9DELT 7-carboxy-7-deazaguanine synthase OS=Syntrophobacterales bacterium CG23_combo_o f_CG06-09_8_20_14_all_48_27 OX=1974101 GN=queE PE=3 SV= 1
MKVNEIFYSVQGEGKNAGIPMVFVRLAGCNLRCNFCDTKYALEAGEEMTVGEILSARGKYPSEWVCITGGEPFIQPLDELVGRLKADGSLIQIETNGTIFQPVTCDWLAVSPKKERRPVESMLERADEIKIVVSSKAALDFAEEYGAWGTCHSVQPENNHGEATKLCLDFVAEHPQWRLSMQLHKLINIK

SEQ ID NO: 34694 - protein, 203 aa, Syntrophobotulus glycolicus
  misc_feature (1)..(203): tr|F0T104|F0T104_SYNGF 7-carboxy-7-deazaguanine synthas e OS=Syntrophobotulus glycolicus (strain DSM 8271 / FlG lyR) OX=645991 GN=queE PE=3 SV=1
MKVILVSKEYPVHEIFDSIQGEGYWTGAAASFVRLQQCNLRCAWCDSKGTWEGKPEKMTADEILAAVHSERVILTGGEPLLHDLTALLESLKAAGKKVHIETNGTQPWKESYPQEAWITVSPKKESGYLVQPSIKSKANEYKFVVDEDFSADILAQLEFNSCPNIFLSPENVRSEMIKKALSIVAQYPFCRLTLQLHKLIGVR

SEQ ID NO: 34695 - protein, 225 aa, Syntrophomonas zehnderi
  misc_feature (1)..(225): tr|A0A0E4C9R0|A0A0E4C9R0_9FIRM 7-carboxy-7-deazaguanine synthase OS=Syntrophomonas zehnderi OL-4 OX=690567 GN= queE PE=3 SV=1
MYPVIEIFGPTIQGEGIWQGSRTMFVRLAGCDYRCRWCDTSYALETAAAKRLTPQEIVSQLKILASYCKTVTLTGGNPCVHMLEPLITTLRAEDYEIHLETQGSLWQDSLKMVDMINLSPKAPSSGMQQNQSTLAEFVSQARSLQLKIIILTDADYAYARELHQQYPDIPMVLQVCNEPGQDNYESLMSKYRALVNKLTLDSSISDNVRALPQLHVLAWGNRPGV

SEQ ID NO: 34696 - protein, 215 aa, Syntrophorhabdus aromaticivorans
  misc_feature (1)..(215): tr|A0A351U6U0|A0A351U6U0_9DELT 7-carboxy-7-deazaguanine synthase OS=Syntrophorhabdus aromaticivorans OX=328301 GN=queE PE=3 SV=1
MSDVLKVNEVFHSIQGESTFAGLPCTFIRLAGCNLRCSYCDTAYAYEEGKEWSIPALIDYAKAYRPLLVEVTGGEPLLQAGTQELVKGLLREGCEALVETNGSLDISVIDKRAVIIMDIKCPDSGMSDKNLFANIGCLKPHDEVKFVVASEGDYLWATSIIREHGLEQTCSILFSPVYGKLEPGRLAKWILRDGIKARLQLQLHKYIWGPEKRGV

SEQ ID NO: 34697 - protein, 215 aa, Syntrophorhabdus sp.
  misc_feature (1)..(215): tr|A0A1V5CGP5|A0A1V5CGP5_9DELT 7-carboxy-7-deazaguanine synthase OS=Syntrophorhabdus sp. PtaU1.Bin002 OX=18117 02 GN=queE PE=3 SV=1
MNTILKVNEVFHSIQGESTFAGLPCTFIRLTGCNLRCSYCDTAYAYEEGKEWSIPDLIDCAKHYQSPLVEVTGGEPLLQAGTPELVRALLDEDREVLVETNGSLDISVIDKRAVIIMDMKCPDSGMSDKNLFANVGCLKSRDEVKFVIASEGDYSWAKSMIKEHRLERTCTILFSSVYGKLRPSRLAEWILRDRLKARLQLQLHKYIWEPEKRGV

SEQ ID NO: 34698 - protein, 215 aa, Syntrophorhabdus sp.
  misc_feature (1)..(215): tr|A0A1V4WLL5|A0A1V4WLL5_9DELT 7-carboxy-7-deazaguanine synthase OS=Syntrophorhabdus sp. PtaB.Bin006 OX=181169 8 GN=queE PE=3 SV=1
MNTILKVNEVFHSIQGESTFAGLPCTFIRLTGCNLRCSYCDTAYAYEEGKEWSIPDLIDCAKHYQSPLVEVTGGEPLLQAGTPELVRALLDEGREVLVETNGSLDISVIDKRAVIIMDMKCPDSGMSDKNLFANVGCLKSRDEVKFVIASEGDYSWAKSMIKEHRLERTCTILFSSVYGKLRPSRLAEWILRDRLKARLQLQLHKYIWEPEKRGV

SEQ ID NO: 34699 - protein, 243 aa, Syntrophothermus lipocalidus
  misc_feature (1)..(243): tr|D7CMQ0|D7CMQ0_SYNLT 7-carboxy-7-deazaguanine synthas e OS=Syntrophothermus lipocalidus (strain DSM 12680 / T GB-C1) OX=643648 GN=queE PE=3 SV=1
MKAYLSEITESIQGEGTLAGSRQIFLRFCGCNLRCPYCDTVGSLSKTPSCKIFLKPGSKNDFREYANPLSISDVVKATANFDTRWVSLTGGEPLLWADYLKRLAPILVSKGYRMLLETNGTLVENLVDILEFTAVISMDFKLPSAIGIDLFPVHKRFLELAACRPVYVKVVVTPSTEPWEIGEVARIIAGVDATIPLVLQPVSLVTSQVAVQAEKLFDLQLDALKHLEDVRVIPQIHKYLRVT

SEQ ID NO: 34700 - protein, 215 aa, Syntrophus aciditrophicus
  misc_feature (1)..(215): tr|Q2LVK5|Q2LVK5_SYNAS 7-carboxy-7-deazaguanine synthas e OS=Syntrophus aciditrophicus (strain SB) OX=56780 GN= queE PE=3 SV=1
MPLKVNEIFYSIQGESSFIGIPCVFVRLTGCNLRCSYCDTRYAYEEGTLWDIPDILDRISSYHCPLVEITGGEPLIQKETPLLIRDLLDRGCHVLLETNGSRPIRTIDERCVRIVDIKCPSSGESRSNDYRNLDDLTGQDEIKFVLGERKDYEFAKEILISRNLANRISHPPIFSPVTNSLDPKKLVRWILEDHLPVRFQLQLHKILWGNDVRGV

SEQ ID NO: 34701 - protein, 215 aa, Syntrophus gentianae
  misc_feature (1)..(215): tr|A0A1H7WB19|A0A1H7WB19_9DELT 7-carboxy-7-deazaguanine synthase OS=Syntrophus gentianae OX=43775 GN=queE PE=3 SV=1
MPLKVNEIFYSIQGESSFIGMPCVLVRLTGCNLRCSYCDTRYAYEEGTHWDLSGILDRISSYQCRLVEITGGEPLLQEETPALIRNLLDKGYDVLLETNGSLPIRTIDSRCVRIVDIKCPSSGESHRNDYSILDDLTERDEIKFVLGERNDYEFAREILLSRSLAARTLHPPLLSPVPERLDPKLLVQWILDDHLSVRLQLQLHKILWGRDARGV

SEQ ID NO: 34702 - protein, 230 aa, Syntrophus sp.
  misc_feature (1)..(230): tr|A0A351Z782|A0A351Z782_9DELT 7-carboxy-7-deazaguanine synthase OS=Syntrophus sp. (in: Bacteria) OX=48412 GN= queE PE=3 SV=1
MRISETFYSIQGEGTLAGLPSVFIRTAGCNLRCRWCDSPYASRHARGSERTIDSLVEEAIRHPTRFCVITGGEPMLTKGIHDLAKRLVDGGRHVTIETAATILPHGISCSLASLSPKLKNSTPGTSTPVAVRRRHEARRLRPDVIREWIDHYDYQLKFVVCSGSDVAEAIALLDALDRSIAPEKVLLMPEGVDAAAFANVADHIVEACKEHGFRYCDRLHIRLYGHTPGR

SEQ ID NO: 34703 - protein, 215 aa, Syntrophus sp.
  misc_feature (1)..(215): tr|A0A1V4Y1C8|A0A1V4Y1C8_9DELT 7-carboxy-7-deazaguanine synthase OS=Syntrophus sp. PtaB.Bin138 OX=1811711 GN=q ueE PE=3 SV=1
MSLKVNEIFYSIQGESSFIGIPCVLVRLTGCNLRCSYCDTRYAYEGGTLWELSDLLGRIASHRCRLVEITGGEPLLQAETPALIRSLLEGGYAVLLETNGSLPIRGIDRRCVRIVDIKCPSSGESHRNDFSILDDLTERDEIKFVLGERGDYEFARDILLSRNLAAKTRNPPLLSPVTERLDPKRLARWILEDHLSVRLQLQLHKILWGKDARGV

SEQ ID NO: 34704 - protein, 234 aa, Tahibacter aquaticus
  misc_feature (1)..(234): tr|A0A4R6ZA81|A0A4R6ZA81_9GAMM 7-carboxy-7-deazaguanine synthase OS=Tahibacter aquaticus OX=520092 GN=queE PE= 3 SV=1
MTAGAGQSVPAAASRADAVPLDQRLRITEIFHSIQGEADAVGWPTVFVRLTGCPLRCTWCDTTYSFHGGQWHSIDEILAEVGRHGARHVCVTGGEPLSQKRCLVLLRRLCDAGYDVSLETSGALDVAAVDGRVRKVMDLKAPDSGEFKRNRWSNLAHLRAHDQVKFVLAGRADYEWARATVEEHQLAQTCQVLFSPVHASLKPRALAEWILADRLPVRMQLQLHKLLWGDEPGH

SEQ ID NO: 34705 - protein, 209 aa, Taibaiella chishuiensis
  misc_feature (1)..(209): tr|A0A2P8DAL1|A0A2P8DAL1_9BACT 7-carboxy-7-deazaguanine synthase OS=Taibaiella chishuiensis OX=1434707 GN=queE PE=3 SV=1
MTAIEAQDITHTSYPVMEHFYTLQGEGAYSGQAAYFIRLGGCDVGCVWCDVKESWDANAHPLMSTGTMQELVSAHPGKIVVVTGGEPSMHDLVPITRALKAAGKRTHIETSASSPLTGDWDWVTLSPKKFKAPLAQNMPLADELKIIVFNKSDFKWAEEFAALVKPECKLYLQPEWDKRDSMTPLIIEYIQDHPQWQLSLQTHKYLNIP

SEQ ID NO: 34706 - protein, 193 aa, Taibaiella soli
  misc_feature (1)..(193): tr|A0A2W2C1F3|A0A2W2C1F3_9BACT 7-carboxy-7-deazaguanine synthase OS=Taibaiella soli OX=1649169 GN=queE PE=3 SV =1
MEHFYTLQGEGRFSGQAAYFIRLAGCDVGCVWCDVKESWDTEGHPLFTTEAIVTAASAHPGRIAVITGGEPAMHQLQPLTDALHAAGFRVHIETSGSSTLSGDLDWITLSPKKFKAPLEESLQQANELKVVVFNKTDFAWAEQHAKNVPEHCILYLQPEWSKRDQMTPLIIDFIQQNPQWQLSLQTHKYLNIP

SEQ ID NO: 34707 - protein, 200 aa, Taibaiella sp.
  misc_feature (1)..(200): tr|A0A3N6ZPP1|A0A3N6ZPP1_9BACT 7-carboxy-7-deazaguanine synthase OS=Taibaiella sp. KBW10 OX=2153357 GN=queE PE =3 SV=1
MSIQYPVMEHFYTLQGEGAYAGHAAYFIRLGGCDVGCVWCDVKESWDADVHPKMSVAEMVAAAAAHPGRIVVITGGEPSMYDLAPLTRALKEAGFRTHIETSASSPLSGELDWVTLSPKKFKAPLAENMAWAHELKIVVFNKHDFKWAEEYAAQVPESCKLYLQTEWDKRESITPIILEYIQQNPKWSLSLQTHKYLNIP

SEQ ID NO: 34708 - protein, 218 aa, Tamilnaduibacter salinus
  misc_feature (1)..(218): tr|A0A2A2HZC1|A0A2A2HZC1_9ALTE 7-carboxy-7-deazaguanine synthase OS=Tamilnaduibacter salinus OX=1484056 GN=que E PE=3 SV=1
MYRIKEAFYTLQGEGAQAGRAAVFCRFSKCNLWNGRESGRATAVCTFCDTDFVGTDGQNGGQFETAADLAAHVALLWPHDTGRPYVVCTGGEPLLQLDEPLIAALHQRGFEVGVETNGTLPAPDGIDWLCVSPKATAPVVIEQCDELKLVYPQIDAMPERFESIRARHFFLSPMASPVAPTEGPDRLKTANTRKATEYCLAHPQWRLTLQMHKIVGID

SEQ ID NO: 34709 - protein, 218 aa, Tamilnaduibacter salinus
  misc_feature (1)..(218): tr|A0A2U1CY48|A0A2U1CY48_9ALTE 7-carboxy-7-deazaguanine synthase OS=Tamilnaduibacter salinus OX=1484056 GN=que E PE=3 SV=1
MYRIKEAFYTLQGEGAQAGRAAVFCRFSKCNLWNGRESGRATAVCTFCDTDFVGTDGQNGGQFETAGDLAAHVASLWPHDTGRPYVVCTGGEPLLQLDEPLIAALHQRGFEVGVETNGTLPAPDGIDWLCVSPKATAPVVIEQCDELKLVYPQTDAMPERFESIRARHFFLSPMASPVAPTEGPDRLKTANTRKATEYCLAHPQWRLTLQMHKIVGID

SEQ ID NO: 34710 - protein, 209 aa, Tamlana nanhaiensis
  misc_feature (1)..(209): tr|A0A0D7W1J5|A0A0D7W1J5_9FLAO 7-carboxy-7-deazaguanine synthase OS=Tamlana nanhaiensis OX=1382798 GN=queE PE= 3 SV=1
MKNDVKELVNKGEMLPLMEEFYTIQGEGFYKGTAAYFIRIGGCDVGCHWCDVKESWNANLHPPTEIVKIVENAKKYSDTIVITGGEPLMWDMEPLTSQLKSEGLKTHIETSGAYKLTGVWDWICLSPKKMKLPTEEVSAKANELKVIVYNKDDFRFAEEQAAKVNSDCILYLQPEWSKRDKVVPLIVDYVMANPKWKVSLQTHKYLNIP

SEQ ID NO: 34711 - protein, 209 aa, Tamlana sedimentorum
  misc_feature (1)..(209): tr|A0A0D7W878|A0A0D7W878_9FLAO 7-carboxy-7-deazaguanine synthase OS=Tamlana sedimentorum OX=1435349 GN=queE PE =3 SV=1
MNEVIKQMVEKGEMLPLMEEFYTIQGEGFHKGTAAYFIRIGGCDVGCHWCDVKESWNAELHPPTKINKIVENAKKYSDTIVITGGEPLMWDMSPLTSKLKEEGLKTHIETSGAYKLTGVWDWICLSPKKMKLPTHEVSAKANELKVIIYNKDDFRFAEEQAAKVNGDCILYLQPEWSKRDKVVPLIVDYVMQNPKWKVSLQTHKYLNIP

SEQ ID NO: 34712 - protein, 209 aa, Tamlana sp.
  misc_feature (1)..(209): tr|A0A2I7SFB0|A0A2I7SFB0_9FLAO 7-carboxy-7-deazaguanine synthase OS=Tamlana sp. UJ94 OX=2069432 GN=queE PE=3 S V=1
MKEEIKSQVDKGEMLPLMEEFYTIQGEGFHKGTAAYFIRVGGCDVGCHWCDVKESWNADLHPPTETAKIVENAAKYSDTIVVTGGEPLTWDMTPLTTQLKAKGLQVHIETSGAYKLTGVWDWICLSPKKMKLPTQEVYDNANELKVIVYNKDDFRFAEEQAAKVNKNCILYLQPEWSKRDKVVPEIVDYVMANPKWKVSLQTHKYLNIP

SEQ ID NO: 34713 - protein, 215 aa, Tamlana sp.
  misc_feature (1)..(215): tr|A0A5C4SPL2|A0A5C4SPL2_9FLAO 7-carboxy-7-deazaguanine synthase OS=Tamlana sp. CW2-9 OX=2583814 GN=queE PE=3 SV=1
MYLCALMQKEIKKRVDKGEMLPLMEEFYTIQGEGYHKGTAAYFIRVGGCDVGCHWCDVKESWNADLHPPTDTMNIVENAKKYSDTIVVTGGEPLTWDMTFLTRELKARGMKVHIETSGAYKLTGEWDWICLSPKKIKLPTKEVYENANELKVIVYNKDDFRFAEEQAAQVNQDCILYLQPEWSKRDKVVPEIVDYVMANPKWKISLQTHKYLNIP

SEQ ID NO: 34714 - protein, 184 aa, Tannerella sp.
  misc_feature (1)..(184): tr|R5I134|R5I134_9BACT 7-carboxy-7-deazaguanine synthas e OS=Tannerella sp. CAG:118 OX=1262978 GN=queE PE=3 SV= 1
MKKINEIFYSLQGEGYYTGTPAVFVRFSGCNLNCDFCDTEHLSGVFMSDNEILTEITQYPTRHIVLTGGEPTLQIDVSFMQMLKEDGWYIQIETNGTLTSGLSIADRWADWVTCSPKKNCIREKANELKVVYIGQDMSQYDSFVCDVRSLQPCSMLNTQEVIDYIKKHPQWRLSLQTHKMLDIR

SEQ ID NO: 34715 - protein, 184 aa, Tannerella sp.
  misc_feature (1)..(184): tr|A0A396MYT1|A0A396MYT1_9BACT 7-carboxy-7-deazaguanine synthase OS=Tannerella sp. AF04-6 OX=2293248 GN=queE P E=3 SV=1
MKKINEIFYSIQGEGYYTGVPAIFIRFSGCNLNCEFCDTDHSLGKIMSDEEILDIIRKFPAKHVVLTGGEPSMQLDDRFLSLLKAQGFYLQIETNGTLTKGFDAVTRWCDWITCSPKKDCVRKQMDELKVVYLSQDMSVYKQYSCKHKMLQPCSMQNTKEVIEFIKKNPEWRLSLQTHKYLHIR

SEQ ID NO: 34716 - protein, 210 aa, Tanticharoenia sakaeratensis
  misc_feature (1)..(210): tr|A0A0D6MIQ0|A0A0D6MIQ0_9PROT 7-carboxy-7-deazaguanine synthase OS=Tanticharoenia sakaeratensis NBRC 103193 O X=1231623 GN=queE PE=3 SV=1
MAYMVKELFPTLQGEGAQSGRASVFCRFAGCNLWSGRETDREAAACTFCDTDFVGTNGPGGGRFADAATLARAIEAAWRGGTQARHVVFTGGEPLLQLDAALVDAMHAHGFTIAVETNGTIAAPPGIDWICVSPKPGYDLVQRSGDELKLVYPQAACPPERYADLAFHHFMLQPMDGPDQGKNTAAAVSYCLTHPRWRLSLQTHKLIGIP

SEQ ID NO: 34717 - protein, 210 aa, Tardiphaga robiniae
  misc_feature (1)..(210): tr|A0A161QPD5|A0A161QPD5_9BRAD 7-carboxy-7-deazaguanine synthase OS=Tardiphaga robiniae OX=943830 GN=queE PE=3 SV=1
MSYAVKEIFLTLQGEGAHAGRASVFCRFSGCNLWTGREQDRAEATCQFCDTDFVGMDGTLGGRYPNADKLADTIAAQWVGPSGNRYVVLTGGEPLLQVDAELIDALHARGFEIGVETNGTVAPPEGVDWICVSPKAGAELVVRSGHELKLVYPQAQAMPEKFEGLSFERFSLQPMDGPDAISNTADAVDYCLRHPQWRLSVQTHKTLGIR

SEQ ID NO: 34718 - protein, 210 aa, Tardiphaga sp.
  misc_feature (1)..(210): tr|A0A2U0U5Z0|A0A2U0U5Z0_9BRAD 7-carboxy-7-deazaguanine synthase OS=Tardiphaga sp. OV697 OX=2135487 GN=queE PE =3 SV=1
MSYAVKEIFLTLQGEGAHAGRASVFCRFSGCNLWTGREQDRAEATCQFCDTDFVGMDGTLGGRYPTAEKLADTIAAQWVGPADNRYVVLTGGEPLLQVDAELIDALHARGFDIGVETNGTVLPPEGIDWICVSPKAGAELVVRSGHELKLVYPQATAMPEKFEGLTFERFSLQPMDGPNAISNTAGAVDYCLRHPQWRLSVQTHKTLGIR

SEQ ID NO: 34719 - protein, 210 aa, Tardiphaga sp.
  misc_feature (1)..(210): tr|A0A5A7WG30|A0A5A7WG30_9BRAD 7-carboxy-7-deazaguanine synthase OS=Tardiphaga sp. P9-11 OX=2024614 GN=queE PE =3 SV=1
MSYAVKEIFLTLQGEGAHAGRASVFCRFSGCNLWTGREQDRAEATCQFCDTDFVGMDGTLGARYPTAEKLADTIAAQWVGPSDNRYVVLTGGEPLLQVDAELIDALHDRGFEIGVETNGTVAPPEGIDWICVSPKAGAELVIRRGHELKLVYPQAQAMPEKFEGLTFERFSLQPMDGPDAIRNTAHAVDYCLRNPQWRLSVQTHKTLGIR

SEQ ID NO: 34720 - protein, 217 aa, Tatlockia micdadei
  misc_feature (1)..(217): tr|A0A098GHQ3|A0A098GHQ3_TATMI 7-carboxy-7-deazaguanine synthase OS=Tatlockia micdadei OX=451 GN=queE PE=3 SV= 1
MKQVSNQLRITEIFHSLQGESTTVGLPTVFIRLTGCPLRCQYCDTAYAFSGGELTQVSTILDKIESYQCKHVCVTGGEPLAQPGCIPLLQQLCDRGYNVSLETSGARDITPVDKRVMVVMDLKTPDSGESTKNLLSNLDHLKHTDQIKFVLCSRSDYDWACQMMKTYNLSERAQILFSPSWNELDPTTLADWIIKDKLPVRFQLQLHKILWNDAPGH

SEQ ID NO: 34721 - protein, 223 aa, Tatumella citrea
  misc_feature (1)..(223): tr|A0A1Y0LRB5|A0A1Y0LRB5_TATCI 7-carboxy-7-deazaguanine synthase OS=Tatumella citrea OX=53336 GN=queE PE=3 SV= 1
MQYPINEMFQTLQGEGFFTGVPAIFIRLQGCPVGCSWCDTKHTWEKLPENAVPVGDILTKTVESDQWGNAEALTILKMISAQGWTARHVVITGGEPAIYDLRPLTEALEAFGYRCQIETSGTHPVQCSEDTFVTVSPKVNMRGGYDVLTPALFRADEIKHPVARQRDIDALDELLVKIQDDKSRVIALQPISCKQDATELCINTCIARNWRLSMQTHKYLNIA

SEQ ID NO: 34722 - protein, 223 aa, Tatumella morbirosei
  misc_feature (1)..(223): tr|A0A095VKE1|A0A095VKE1_9GAMM 7-carboxy-7-deazaguanine synthase OS=Tatumella morbirosei OX=642227 GN=queE PE= 3 SV=1
MQYPINEMFQTLQGEGFFTGVPAIFIRLQGCPVGCAWCDTKHTWEKLPENAVPVGDILTKTVESDQWGNADALTILKMIGQQGWTARHVVITGGEPAIYDLRPLTEALEAFGYRCQIETSGTHPVQCSEDTFVTVSPKVNMRGGYDVLTPALLRADEIKHPVARQRDIDALDELLVNIQDEKSRVIALQPISCKQDATELCISTCIARNWRLSMQTHKYLNIA

SEQ ID NO: 34723 - protein, 228 aa, Tatumella ptyseos
  misc_feature (1)..(228): tr|A0A085JAL4|A0A085JAL4_9GAMM 7-carboxy-7-deazaguanine synthase OS=Tatumella ptyseos ATCC 33301 OX=1005995 GN =ygcF PE=3 SV=1
MIEQVMLYPINEMFQTLQGEGFYTGVPAIFIRLQGCPVGCSWCDTKHTWEKFADNEVPVGDILIKTVESEQWGNAEPLTLLKIISEQQWTARHVVITGGEPAIYDLRPLTTALEAFGYSCQIETSGTHPIQCSDNTWVTVSPKVNMRGGYDVLTPALIRADEIKHPVARERDIEALEQLLAQVQDDKSRIIALQPISCKKEATELCISACIARNWRLSMQTHKYLNIA

SEQ ID NO: 34724 - protein, 223 aa, Tatumella ptyseos
  misc_feature (1)..(223): tr|A0A2X5R250|A0A2X5R250_9GAMM 7-carboxy-7-deazaguanine synthase OS=Tatumella ptyseos OX=82987 GN=queE PE=3 SV =1
MLYPINEMFQTLQGEGFYTGVPAIFIRLQGCPVGCSWCDTKHTWEKFADNEVPVGDILIKTVESEQWGNAEPLTLLKIISEQQWTARHVVITGGEPAIYDLRPLTTALEAFGYSCQIETSGTHPIQCSDNTWVTVSPKVNMRGGYDVLTPALIRADEIKHPVARERDIEALEQLLAQVQDDKSRIIALQPISCKKEATELCISACIARNWRLSMQTHKYLNIA

SEQ ID NO: 34725 - protein, 223 aa, Tatumella sp.
  misc_feature (1)..(223): tr|A0A2G8BSI4|A0A2G8BSI4_9GAMM 7-carboxy-7-deazaguanine synthase OS=Tatumella sp. OPLPL6 OX=1928657 GN=queE PE =3 SV=1
MLYPINEMFQTLQGEGFYTGAPAIFIRLQGCPVGCSWCDTKHTWEKYADQQQPLTNIVHKSAESEAWADASVEQLLAVIAEQGWTAKHIVITGGEPALYDLTPLTEQFEQQGFQCQIETSGTHPIHCSAATWVTVSPKVNMRGGYDVLNSALLRANEVKHPVGRQRDIDALDLLLSQVPPSTERIIALQPISCKKAATELCIATCIARNWRFSMQTHKYLNIA

SEQ ID NO: 34726 - protein, 224 aa, Taylorella asinigenitalis
  misc_feature (1)..(224): tr|G4QDN2|G4QDN2_TAYAM 7-carboxy-7-deazaguanine synthas e OS=Taylorella asinigenitalis (strain MCE3) OX=1008459 GN=queE PE=3 SV=1
MKTINIKSLSDASDEPQFRIVEIFKSLQGEGYNTGMPSVFVRLGRCNLSCEWCDTNYEEFEYKPLSRVLAAVGAFDVRNIILTGGEPSVHPRVEELVAAFKARGYFMCIESNGLARVPVGIDFIAISPKYCYKERYEQAVGFDVDELRIVVDSVAMLSHSIDDFMSWAEAMASKFPAKHRFLSPLELEGQMNILQTIETIGKLNAKGKQRWALSLQTHKLAGIE

SEQ ID NO: 34727 - protein, 189 aa, Taylorella asinigenitalis
  misc_feature (1)..(189): tr|I7IC98|I7IC98_9BURK 7-carboxy-7-deazaguanine synthas e OS=Taylorella asinigenitalis 14/45 OX=1091495 GN=queE PE=3 SV=1
MPSVFVRLGRCNLSCEWCDTNYEEFEYKPLSRVLAAVGAFDVRNIILTGGEPSVHPRVEELVAAFKARGYFMCIESNGLARVPVGIDFIAISPKYCYKERYEQAVGFDVDELRIVVDSVAMLSHSIDDFMSWAEAMASKFPAKHRFLSPLELEGQMNILQTIETIGKLNAKGKQRWALSLQTHKLAGIE

SEQ ID NO: 34728 - protein, 187 aa, Taylorella equigenitalis
  misc_feature (1)..(187): tr|I7JQB8|I7JQB8_9BURK 7-carboxy-7-deazaguanine synthas e OS=Taylorella equigenitalis 14/56 OX=1091497 GN=queE PE=3 SV=1
MPATFVRLGRCNLACGWCDTNYNSFGLKSLSEILQIVEDLGQSNIILTGGEPSVHPNVELLIEAFKSRGYYLCIETNGISDVPEGIDYIAISPKYCYKERYEKVGLRYADEIRIVVDFNETNREDFLNWLQDINEKFNSKKYYLSPLEHDGSMNIQQTIKIIGELNGLKIGPRWELSLQTHKLAGIE

SEQ ID NO: 34729 - protein, 208 aa, Telmatospirillum siberiense
  misc_feature (1)..(208): tr|A0A2N3PTJ4|A0A2N3PTJ4_9PROT 7-carboxy-7-deazaguanine synthase OS=Telmatospirillum siberiense OX=382514 GN=q ueE PE=3 SV=1
MTYSVKEIFYTLQGEGAHAGRPAVFCRFSGCNLWSGREEDRATATCRFCDTDFVGADAGRFTDAATLADAIADLWPNKTAGRPYVVCTGGEPLLQLDAALCDALHGRGFEIGVETNGTQDRPSGIDWLCVSPKAGAPLRLTSGDEMKLVYPQESAMPERFSGLAFTHFTLQPMDGPDQAANIQAAAHYCLEHPKWHLGLQTHKIVGLR

SEQ ID NO: 34730 - protein, 210 aa, Tenacibaculum caenipelagi
  misc_feature (1)..(210): tr|A0A4R6TJZ9|A0A4R6TJZ9_9FLAO 7-carboxy-7-deazaguanine synthase OS=Tenacibaculum caenipelagi OX=1325435 GN=qu eE PE=3 SV=1
MLIKEVQELINTGEMLPLMEEFYTIQGEGAHTGTAAYFIRIGGCDVGCHWCDVKESWDANLHPPTKTDLIVENAKKYAETVVITGGEPLMWSLDYITNKLQEEGIKTHIETSGAYNFSGVWDWFCLSPKKTKLPLERAYQEADELKMIIHNKNDFQFAEEQAAKVGKNCKLFLQPEWSKKEKMTPLIIDYVMENPKWKISLQTHKYLNIP

SEQ ID NO: 34731 - protein, 210 aa, Tenacibaculum dicentrarchi
  misc_feature (1)..(210): tr|A0A2H1XP33|A0A2H1XP33_9FLAO 7-carboxy-7-deazaguanine synthase OS=Tenacibaculum dicentrarchi OX=669041 GN=qu eE PE=3 SV=1
MLKKEVQELIDKGQMLPLMEEFYTIQGEGSHTGTAAYFIRIGGCDVGCHWCDVKESWDANLHPPTKTDIIVSNAKKLAKTVVITGGEPLMWSLDYITKQLQDQGMKTHIETSGAYAFSGVWDWFCLSPKKTKLPTKECYKEADELKMIIHNKNDFKFAEEQADKVGKKCQLFLQPEWSKKEAMTPLIIDYVMKNPKWRISLQTHKFLNIP

SEQ ID NO: 34732 - protein, 210 aa, Tenacibaculum dicentrarchi
  misc_feature (1)..(210): tr|A0A0U3KVR9|A0A0U3KVR9_9FLAO 7-carboxy-7-deazaguanine synthase OS=Tenacibaculum dicentrarchi OX=669041 GN=qu eE PE=3 SV=1
MLKKEVQELIDKGQMLPLMEEFYTIQGEGSHTGTAAYFIRIGGCDVGCHWCDVKESWDANLHPPTKTDIIVSNAKKLAKTVVITGGEPLMWSLDYITKQLQDHGMKTHIETSGAYAFSGVWDWFCLSPKKTKLPTKECYKEADELKMIIHNKNDFKFAEEQADKVGKKCQLFLQPEWSKKEEMTPLIIDYVMKNPKWRISLQTHKFLNIP

SEQ ID NO: 34733 - protein, 210 aa, Tenacibaculum discolor
  misc_feature (1)..(210): tr|A0A497Z2X7|A0A497Z2X7_9FLAO 7-carboxy-7-deazaguanine synthase OS=Tenacibaculum discolor OX=361581 GN=queE P E=3 SV=1
MLKKEVQELINTGEMLPLMEEFYTIQGEGAHTGTAAYFIRIGGCDVGCHWCDVKESWDANLHPPTKTDIIVENAKKYAETVVITGGEPLMWSLDYITQQLQEKGVKTHIETSGAYDFSGVWDWFCLSPKKTKLPLERAYQEADELKMIIHNKNDFQFAEEQAAKVGKKCKLFLQPEWSKKEKMTPQIIDYVMEHPQWKISLQTHKYLNIP

SEQ ID NO: 34734 - protein, 210 aa, Tenacibaculum finnmarkense; identical to SEQ ID NO: 34732
  misc_feature (1)..(210): tr|A0A2H1XZZ3|A0A2H1XZZ3_9FLAO 7-carboxy-7-deazaguanine synthase OS=Tenacibaculum finnmarkense OX=1680763 GN=q ueE PE=3 SV=1

SEQ ID NO: 34735 - protein, 210 aa, Tenacibaculum gallaicum
  misc_feature (1)..(210): tr|A0A3E0I135|A0A3E0I135_9FLAO 7-carboxy-7-deazaguanine synthase OS=Tenacibaculum gallaicum OX=561505 GN=queE PE=3 SV=1
MLKKEVQELINTGEMLPLMEEFYTIQGEGAHTGTAAYFIRIGGCDVGCHWCDVKESWDANLHPPTKTDIIVENAKKYAETVVITGGEPLMWSLDYITQQLQEKGIKTHIETSGAYDFSGVWDWFCLSPKKNKLPLERAYQEADELKMIIHNKNDFQFAEEQAAKVGKKCTLFLQPEWSKKEKMTPQIVDYVMEHPQWKISLQTHKYLNIP

SEQ ID NO: 34736 - protein, 209 aa, Tenacibaculum holothuriorum
  misc_feature (1)..(209): tr|A0A1Y2PGI8|A0A1Y2PGI8_9FLAO 7-carboxy-7-deazaguanine synthase OS=Tenacibaculum holothuriorum OX=1635173 GN= queE PE=3 SV=1
MDLKTQELINKGEMLPLMEEFYTIQGEGAHTGTAAYFIRIGGCDVGCHWCDVKESWDANLHPPTDTDIIVANAKKYAETVVITGGEPLMWSLDYITNLLQENGIKTHIETSGAYDFSGKWDWFCLSPKKTKLPLDRAYEEADELKMIIHNKNDFQFAEEQAAKVGKKCKLFLQPEWSKKEKMTPMIIDYVMENPKWRISLQTHKYLNIP

SEQ ID NO: 34737 - protein, 209 aa, Tenacibaculum jejuense
  misc_feature (1)..(209): tr|A0A238UAT4|A0A238UAT4_9FLAO 7-carboxy-7-deazaguanine synthase OS=Tenacibaculum jejuense OX=584609 GN=queE P E=3 SV=1
MDLKTQELIKKGEMLPLMEEFYTIQGEGAHTGTAAYFIRIGGCDVGCHWCDVKESWDANLHPPTLTDQIVTNAKKYAETVVVTGGEPLMWSLDYITKQLQAKGMKTHIETSGAYKFSGVWDWFCLSPKKTKLPLHKAYEEADELKMIIHNKNDFEFAEEQAAKVNNNCKLYLQPEWSKRDKMIPLIIDYVMNHPKWKISLQTHKYLNIP

SEQ ID NO: 34738 - protein, 209 aa, Tenacibaculum litoreum
  misc_feature (1)..(209): tr|A0A3R9ERV6|A0A3R9ERV6_9FLAO 7-carboxy-7-deazaguanine synthase OS=Tenacibaculum litoreum OX=321269 GN=queE P E=3 SV=1
MKKEVQELINTGEMLPLMEEFYTIQGEGAHTGTAAYFIRIGGCDVGCHWCDVKESWDANLHPPTKTDIIVENAKKYAETVVITGGEPLMWSLDYITGQLQEKGIKTHIETSGAYDFSGVWDWFCLSPKKTKLPLERAYQEADELKMIIHNKNDFQFAEEQAAKVGKKCKLFLQPEWSKKEKMTPQIIDYVMEHPQWKISLQTHKYLNIP

SEQ ID NO: 34739 - protein, 210 aa, Tenacibaculum lutimaris
  misc_feature (1)..(210): tr|A0A420E045|A0A420E045_9FLAO 7-carboxy-7-deazaguanine synthase OS=Tenacibaculum lutimaris OX=285258 GN=queE PE=3 SV=1
MLKKEVQELINTGEMLPLMEEFYTIQGEGAHTGTAAYFIRIGGCDVGCHWCDVKESWDANLHPPTKTDIIVENAKKYAETVVITGGEPLMWSLDYITQQLQEKGIKTHIETSGAYDFSGVWDWFCLSPKKTKLPLERAYQEADELKMIIHNKNDFQFAEEQAAKVGEKCKLFLQPEWSKKEKMTPQIIDYVMEHPQWKISLQTHKYLNIP

SEQ ID NO: 34740 - protein, 209 aa, Tenacibaculum maritimum
  misc_feature (1)..(209): tr|A0A2H1E8W6|A0A2H1E8W6_9FLAO 7-carboxy-7-deazaguanine synthase OS=Tenacibaculum maritimum NCIMB 2154 OX=1349 785 GN=queE PE=3 SV=1
MDLKIKELIHKGVMLPLMEEFYTIQGEGAHTGTAAYFIRIGGCDVGCHWCDVKESWDANLHPPTETDIIVNNAKKYAKTVVITGGEPLMWNLDYITNQLQSKGMKTHIETSGAYAFSGQWDWFCLSPKKTKLPTTECYNRANELKIIIHNKNDFKFAEEQAKKVGDKCQLFLQPEWSKKEKMTPLIVNYVMEHPKWRVSLQTHKYLNIP

SEQ ID NO: 34741 - protein, 210 aa, Tenacibaculum mesophilum
  misc_feature (1)..(210): tr|A0A1M5F6B4|A0A1M5F6B4_9FLAO 7-carboxy-7-deazaguanine synthase OS=Tenacibaculum mesophilum OX=104268 GN=queE PE=3 SV=1
MLKKEVQELINTGEMLPLMEEFYTIQGEGAHTGTAAYFIRIGGCDVGCHWCDVKESWDANLHPPTKTDIIVENAKKYAETVVITGGEPLMWSLDYITGQLQEKGIKTHIETSGAYDFSGVWDWFCLSPKKTKLPLERAYQEADELKMIIHNKNDFQFAEEQAAKVGKKCKLFLQPEWSKKEKMTPQIIDYVMEHPQWKISLQTHKYLNIP

SEQ ID NO: 34742 - protein, 209 aa, Tenacibaculum skagerrakense
  misc_feature (1)..(209): tr|A0A4R2NIW2|A0A4R2NIW2_9FLAO 7-carboxy-7-deazaguanine synthase OS=Tenacibaculum skagerrakense OX=186571 GN=q ueE PE=3 SV=1
MDLKTQELIKQGKMLPLMEEFYTIQGEGAHTGTAAYFIRIGGCDVGCHWCDVKESWDANLHPPTQTDLIVANAKKYAETVVVTGGEPLMWSLDYITTQLQKQQIKTHIETSGAYKFSGVWDWFCLSPKKTKLPLERAYQEADELKMIIHNKHDFEFAEEQAAKVNDKCLLYLQPEWSKRDKMIPLIIDYVMNNPKWKISLQTHKYLNIP

SEQ ID NO: 34743 - protein, 210 aa, Tenacibaculum soleae
  misc_feature (1)..(210): tr|A0A1B9XXW1|A0A1B9XXW1_9FLAO 7-carboxy-7-deazaguanine synthase OS=Tenacibaculum soleae OX=447689 GN=queE PE= 3 SV=1
MLKKEVQELINKGEMLPLMEEFYTIQGEGSHTGTAAYFIRIGGCDVGCHWCDVKESWDANLHPPTNTDVIITNAKKWAKTVVITGGEPLMWSLDYITNQLQDKGMKTHIETSGAYPFSGKWDWFCLSPKKTKLPTKECYKEADELKMIIHNKSDFEFAEEQAEKVGKKCQLFLQPEWSKKEKMTPLIVDYVMKNPKWRVSLQTHKYLNIP

SEQ ID NO: 34744 - protein, 210 aa, Tenacibaculum sp.
  misc_feature (1)..(210): tr|A0A2N1FBJ6|A0A2N1FBJ6_9FLAO 7-carboxy-7-deazaguanine synthase OS=Tenacibaculum sp. Bg11-29 OX=2058306 GN=qu eE PE=3 SV=1
MLKKEVQELIKKGEMLPLMEEFYTIQGEGSHTGTAAYFIRIGGCDVGCHWCDVKESWDANLHPPTKTDLIVENAKKYAKTVVITGGEPLMWSLDYITKELQDKGMKTHIETSGAYKFSGIWDWFCLSPKKTKLPTKECYKEADELKMIIHNKNDFQFAEEQAEKVGKKCQLFLQPEWSKKEQMTPLIVDYVMKHPKWRVSLQTHKFLNIP

SEQ ID NO: 34745 - protein, 209 aa, Tenacibaculum sp.
  misc_feature (1)..(209): tr|A0A4R1A1M6|A0A4R1A1M6_9FLAO 7-carboxy-7-deazaguanine synthase OS=Tenacibaculum sp. M341 OX=2530339 GN=queE PE=3 SV=1
MDLKTQELIKEGKMLPLMEEFYTIQGEGAYTGTAAYFIRIGGCDVGCHWCDVKESWNAKLHPPTHADIIVENAKKYAETVVITGGEPLMWSLDYITEQLKNQDIKTHIETSGAYAFSGTWDWFCLSPKKTKLPLDRAYEEADELKIIIHNKSDFKFAEEQAAKVNSKSLLFLQPEWSKREKMIPLIIDYVMNNPKWKVSLQTHKYLNIP

SEQ ID NO: 34746 - protein, 210 aa, Tenacibaculum todarodis
  misc_feature (1)..(210): tr|A0A1L3JGW6|A0A1L3JGW6_9FLAO 7-carboxy-7-deazaguanine synthase OS=Tenacibaculum todarodis OX=1850252 GN=queE PE=3 SV=1
MLKKEVQELINKGEMLPLMEEFYTIQGEGAHTGTAAYFIRIGGCDVGCHWCDVKESWNADLHPPTKTDLIVENTAKYAKTVVITGGEPLMWSLDYITNQLQEKGIKTHIETSGAYNFSGVWDWFCLSPKKGKLPLDRNYKEADELKMIIHNKDDFKFAEEQAEKVGEKCSLFLQPEWSKKEKMTPLIVDYVMENPKWKISLQTHKYLNIP

SEQ ID NO: 34747 - protein, 226 aa, Tenericutes bacterium
  misc_feature (1)..(226): tr|A0A420Z0W3|A0A420Z0W3_9BACT 7-carboxy-7-deazaguanine synthase OS=Tenericutes bacterium OX=2231116 GN=queE P E=3 SV=1
MEKGGSMKVYSIFKSIDGEVNWFGQGTQTTFLRLAGCNFSCPYCDSAYAQSNDDTSETSVPKVFDTILAKGLRKVTITGGEPMLQKEEVYNLTKLLTQNGFDITIETNGSIKPYAFGSYFVMDYKTPSSKMNDRMISEENFVSSLTFRDFVKFVINDEKDLNFAIWKTLRLINKGLMARVAFSPCIVPGEPEMRPEVILRELWKYKMYNVVINIQIHKVVSLREGK

SEQ ID NO: 34748 - protein, 215 aa, Tenericutes bacterium
  misc_feature (1)..(215): tr|A0A420Z1T0|A0A420Z1T0_9BACT 7-carboxy-7-deazaguanine synthase OS=Tenericutes bacterium OX=2231116 GN=queE P E=3 SV=1
MTTQINTQTPEPRIESDGRSLEVTEIFDTIQGEGPYAGIPATFVRLAGCNLACVWCDTKYTTRKTLSIDTILGECNKNLVVITGGEPMRQNIIPLIKSLEYENKTVQVETNGVYWDPELKNVDATLVISPKTSSIHPEHYNRPHWIKMIVGGVAFPSQPNNKGGEVEGQYYPDYVIPLDSGDEQVNKLNEQQAIAYTFEHDCIFQLQLHKKIGLK

SEQ ID NO: 34749 - protein, 248 aa, Tengunoibacter tsumagoiensis
  misc_feature (1)..(248): tr|A0A402AA69|A0A402AA69_9CHLR 7-carboxy-7-deazaguanine synthase OS=Tengunoibacter tsumagoiensis OX=2014871 GN =exsD PE=3 SV=1
MVVNVATRLLQISEIFGPTIQGEGLLIGKPTVFVRTGGCDYRCSWCDSLYAVLPEHKSEWRSQSAEEVFAEVQRLSNFQPILVTLSGGNPAIQPLSDLITLGHASGYTFAIETQGSVAQPWFAELDYLTLSPKPPSSRQVTRWDRLERCLEIASHGQNGRTVHTCLKVVVFDEEDYAYARDIAARYPDQPLYLQAGNHTPPHLAEKIDITGILERMDWLIQRTIEDQWYTVTILPQLHTLLWGNKRGV

SEQ ID NO: 34750 - protein, 221 aa, Tepidibacter formicigenes
  misc_feature (1)..(221): tr|A0A1M6NVQ8|A0A1M6NVQ8_9FIRM 7-carboxy-7-deazaguanine synthase OS=Tepidibacter formicigenes DSM 15518 OX=112 3349 GN=queE PE=3 SV=1
MFKVVEKFISINGEGRLSGQLAVFIRFAGCNLDCSFCDTRWANEKDVDYELMTKEDIYKYIKFTKVKNITLTGGEPLLQERIMELLEYLSKDEYLLVEIETNGSIDLKKFSRIEKNRPKFTMDYKLMSSNMEDKMVIDNFKYLNKNDTVKFVVGTIDDLNKAKYLIDKYELTNKTNVYLSPVFGEIDMNEIVEFMKNNKMNEVTLQIQLHKVIWHPDKKGV

SEQ ID NO: 34751 - protein, 221 aa, Tepidibacter thalassicus
  misc_feature (1)..(221): tr|A0A1M5QN63|A0A1M5QN63_9FIRM 7-carboxy-7-deazaguanine synthase OS=Tepidibacter thalassicus DSM 15285 OX=1123 350 GN=queE PE=3 SV=1
MFKVVEKFVSINGEGLRSGQLAVFIRFAGCNLDCSFCDTKWANQTHVDFELMTKEDIYEYIKSTGVKNVTLTGGEPLIQEGILELIELLSNDEYLSIEIETNGSIDLKVFSKMQNNRPIFTMDYKLISSDMEYKMLVDNFKYLNKNDVVKFVIGDIEDLNRAKYLIDKYKLTDKTNVYFSPVFGEADMNDIVEFMKKNNMNEITFQIQLHKVIWNPNKRGV

SEQ ID NO: 34752 - protein, 213 aa, Tepidicaulis marinus
  misc_feature (1)..(213): tr|A0A081B8Y5|A0A081B8Y5_9RHIZ 7-carboxy-7-deazaguanine synthase OS=Tepidicaulis marinus OX=1333998 GN=queE PE =3 SV=1
MYSVKEIFYTLQGEGANAGRPAVFCRFAGCNLWTGREEDRAKAVCTFCDTDFVGTDGQNGGKFADAEELAARIASFWPTDGARPQGAPLVVCTGGEPLLQLDEPLIEALHAKGFSIAVETNGTLEAPSGIDWICVSPKADAPLVQRSGQELKLVYPQEKARPEDFDALAFEHFFLQPMDGPGKKENTNAAVAYCMAHPKWRLSLQTHKFIGID

SEQ ID NO: 34753 - protein, 216 aa, Tepidiphilus thermophilus
  misc_feature (1)..(216): tr|A0A0K6INI7|A0A0K6INI7_9PROT 7-carboxy-7-deazaguanine synthase OS=Tepidiphilus thermophilus OX=876478 GN=que E PE=3 SV=1
MKESKRLRVSEIFASLQGESTTVGVPTVFVRLTGCPLRCRWCDTAYAFSGGERLTIDEILARVSDLGLPEVCVTGGEPLAQAACRELLATLADAGHRVSLETSGALSIAGLDPRVRCVMDLKAPGSGEADKNLWDNLDHLRPHDEVKFVLAGRADYDWAKDVLERHGLARRATVLFSPVTGELAPSTLADWIVADRLPVRFQLQLHKILWGDARGK

SEQ ID NO: 34754 - protein, 216 aa, Terasakiispira papahanaumokuakeensis
  misc_feature (1)..(216): tr|A0A1E2V7B6|A0A1E2V7B6_9GAMM 7-carboxy-7-deazaguanine synthase OS=Terasakiispira papahanaumokuakeensis OX=19 7479 GN=queE PE=3 SV=1
MYHIKEAFYSLQGEGQRAGRPAIFCRFTGCNLWSGREQDRATSPCTLCDTDFIGTDGQHGGRFGEAQDLADHLLALWPDSAEGIAAKPYVVFTGGEPLLQLDVPLIEAMQTRRFEVAVETNGTLPCPPQVDWICVSPKGHSPIVQRHGHELKLVYPQPGVNPADFITLDFEHFILQPLDGEPQGLTENYTQAALNYCLAHPRWTLGLQTHKLLNID

SEQ ID NO: 34755 - protein, 216 aa, Teredinibacter sp.
  misc_feature (1)..(216): tr|A0A509DX68|A0A509DX68_9GAMM 7-carboxy-7-deazaguanine synthase OS=Teredinibacter sp. ISS155 OX=2584524 GN=qu eE PE=3 SV=1
MSENSLRITEIFCSLQGEARSVGRPTTFVRLTGCPLRCGYCDSEYAFYGGQRQSLTEILQVVEDFGAKLVCVTGGEPLAQPNCLPLLTALCDAGFDVSIETSGAMDIGAVDNRVSVVMDLKTPGSGEMDRNLYSNIAKLKPTDQVKFVLCDEQDYEWARFKTDEHQLIDKVSDVLFSPCFGQVEPADLADWILRDKLNVRFQMQLHKLLWGDKPGV

SEQ ID NO: 34756 - protein, 214 aa, Teredinibacter turnerae
  misc_feature (1)..(214): tr|C5BQS6|C5BQS6_TERTT 7-carboxy-7-deazaguanine synthas e OS=Teredinibacter turnerae (strain ATCC 39867 / T7901 ) OX=377629 GN=queE PE=3 SV=1
MTDLRITEIFHSLQGEARTVGVPTVFVRLTGCPLRCQYCDSEYAFFGGEKKSLDEIEALVIGFRCSHVCVTGGEPLAQPNCIPLLERLCDAGLAVSLETSGAMDISAVDTRVSIVLDLKTPDSGERDKNLLSNIPLLAAKDQIKFVICSRSDYEWARFMLDEQQLVGRVGDIFFSPSYTQLAPAELAQWILDDRLPVRFQMQLHKQLWGDKAGV

SEQ ID NO: 34757 - protein, 211 aa, Terrabacter aerolatus
  misc_feature (1)..(211): tr|A0A512D5D6|A0A512D5D6_9MICO 7-carboxy-7-deazaguanine synthase OS=Terrabacter aerolatus OX=422442 GN=queE PE =3 SV=1
MSYKIKEIFYTLQGEGTHAGRPAVFCRFTSCNLWTGREADRERAICKFCDTDFVGTDGEGGGKFHDAEALATAVASKWPVNGGGRPMVVCTGGEPLLQLDADAVDALHARGFYVAVETNGTVTPPPGIDWLCVSPKIGSELLVTKGHELKFVVPQGGVDPTTFEDLEFESYRVQPMDGPDVAANTELAVQFCLDHPLWQLSLQTHKQLGIP

SEQ ID NO: 34758 - protein, 243 aa, Terribacillus aidingensis
  misc_feature (1)..(243): tr|A0A285P6I9|A0A285P6I9_9BACI 7-carboxy-7-deazaguanine synthase OS=Terribacillus aidingensis OX=586416 GN=que E PE=3 SV=1
MASKFPVLEVFGPTVQGEGMVVGQKTMFVRTAGCDYSCSWCDSSFTWDGSAKEDIRQLTAEQIWDELQETGGDRFRHVTISGGNPALLKNLGEFTQFLKQKDIRIALETQGSRYQPWFLEIDDLTISPKPPSSLMKTDFHRLDEIIEILREAGRLSHVSLKVVIFDEADLRYATDVHKRYPDVDFYVQVGNDDTTTYDDAALKDALLAKYEWLIDQVSASSELNHVRVLPQLHTLVWGNKRGV

SEQ ID NO: 34759 - protein, 243 aa, Terribacillus goriensis
  misc_feature (1)..(243): tr|A0A075LM03|A0A075LM03_9BACI 7-carboxy-7-deazaguanine synthase OS=Terribacillus goriensis OX=386490 GN=queE PE=3 SV=1
MASKFPVLEVFGPTVQGEGMVVGQKTMFVRTAGCDYSCSWCDSAFTWDGSAKDDIRQLTAEQIWDQLEEVGGDRFRHVTISGGNPALLKNLGEFTELLKKKEVKVALETQGSRYQPWFLEIDDLTISPKPPSSLMKTDFHRLDEIINNLREAGRLMHVSLKVVIFDEEDLRYATNVHKRYPDVSFYVQVGNHDTATLDDAALKDALLSKYEWLIDQVSASNELNHVRVLPQLHTLVWGNKRGV

SEQ ID NO: 34760 - protein, 243 aa, Terribacillus halophilus
  misc_feature (1)..(243): tr|A0A1G6RU20|A0A1G6RU20_9BACI 7-carboxy-7-deazaguanine synthase OS=Terribacillus halophilus OX=361279 GN=queE PE=3 SV=1
MASKFPVLEVFGPTVQGEGMVVGQKTMFVRTAGCDYSCSWCDSAFTWDGSAKDDIRQLTAEEIWDRLEEVGGDRFRHVTISGGNPALLKNLGEFTELLKKKEVKIALETQGSRYQPWFLEIDDLTISPKPPSSLMKTDFHRLDEIINNLRDAGRLMHVSLKVVIFDEEDLRYATNVHKRYPDVSFYVQVGNHDTATLDDAALKDALLSKYEWLIDQVSASNELNHVRVLPQLHTLVWGNKRGV

SEQ ID NO: 34761 - protein, 243 aa, Terribacillus saccharophilus
  misc_feature (1)..(243): tr|A0A268HDR0|A0A268HDR0_9BACI 7-carboxy-7-deazaguanine synthase OS=Terribacillus saccharophilus OX=361277 GN= queE PE=3 SV=1
MASKFPVLEVFGPTVQGEGMVVGQKTMFVRTAGCDYSCSWCDSAFTWDGSAKDDIRQLTAEEIWNQLEEVGGDRFRHVTISGGNPALLKNLGEFTELLKKKEVKVALETQGSRYQPWFLEIDDLTISPKPPSSLMKTDFHRLDEIINNLREAGRLMHVSLKVVIFDEEDLRYATNVHKRYPDVSFYVQVGNHDTATLDDAALKDALLSKYEWLIDQVSASNELNHVRVLPQLHTLVWGNKRGV

SEQ ID NO: 34762 - protein, 243 aa, Terribacillus saccharophilus
  misc_feature (1)..(243): tr|A0A268A810|A0A268A810_9BACI 7-carboxy-7-deazaguanine synthase OS=Terribacillus saccharophilus OX=361277 GN= queE PE=3 SV=1
MASKFPVLEVFGPTVQGEGMVVGQKTMFVRTAGCDYSCSWCDSAFTWDGSAKDDIRQLTAEEIWNQLEEVGGDRFRHVTISGGNPALLKNLGEFTELLKKKEVKVALETQGSRYQPWFLEIDDITISPKPPSSLMKTDFHRLDEIINNLREAGRLMHVSLKVVIFDEEDLRYATNVHKRYPDVSFYVQVGNHDTATLDDAALKDALLSKYEWLIDQVSASNELNHVRVLPQLHTLVWGNKRGV

SEQ ID NO: 34763 - protein, 243 aa, Terribacillus sp.
  misc_feature (1)..(243): tr|A0A268BMJ4|A0A268BMJ4_9BACI 7-carboxy-7-deazaguanine synthase OS=Terribacillus sp. 7520-G OX=2025389 GN=que E PE=3 SV=1
MASKFPVLEVFGPTVQGEGMVVGQKTMFVRTAGCDYSCSWCDSAFTWDGSAKEDIRQLTAEEIWDRLVEVGGDRFGHVTISGGNPALLKNLGEFTQFLKQKGIRIALETQGSRYQPWFLEIDDLTISPKPPSSMMKTDFHRLDEIIDNLKNAGRLANVSLKVVIFDEEDLQYATNVHKRYPDVSFYVQVGNHDTATLDDAQLRDALLAKYEWLIDQVSLSSELNHVRVLPQLHTLVWGNKRGV

SEQ ID NO: 34764 - protein, 227 aa, Terriglobus albidus
  misc_feature (1)..(227): tr|A0A5B9E5R0|A0A5B9E5R0_9BACT 7-carboxy-7-deazaguanine synthase OS=Terriglobus albidus OX=1592106 GN=queE PE= 3 SV=1
MHLIELYKSVQGESSFAGMPCIFVRLAGCNLRCSWCDSEYTFTGGKPYTLEQIEDELAALFPCTLVEFTGGEPMLQARELLPLMDRLLAKGFTLMMETSGERPLAAVPRAVHKIVDVKCPGAGSAANSFHLANLDALTGNDEVKFVISDRADYEFARDFIREHGLAARCGHILLSPAFQKTPSPLRTADNATLDPRLLVEWMLADGLPARLSLQIHKFIWEPQRKGV

SEQ ID NO: 34765 - protein, 233 aa, Terriglobus roseus
  misc_feature (1)..(233): tr|A0A1G7QDJ9|A0A1G7QDJ9_9BACT 7-carboxy-7-deazaguanine synthase OS=Terriglobus roseus OX=392734 GN=queE PE=3 SV=1
MRLIELYKSVQGESSFTGVPCIFVRFAGCNLRCAWCDSEYTFTGGKPFTEDEVVAQIEALACPLVEFTGGEPMLHAKDLLPLMQRLLNDEKTKYTLMMETSGERPLEEVPTAVHKIVDVKCPGSGTAFGSFRMSNLDTLTARDEVKFVLRDRRDYEFARDFIREHLASKIADGTLGHILLSPAFIQHPSPLRTADNMELDARDLVQWMLDDLLPARLSLQVHKFVWEPQKKGV

SEQ ID NO: 34766 - protein, 234 aa, Terriglobus roseus
  misc_feature (1)..(234): tr|I3ZCA0|I3ZCA0_TERRK 7-carboxy-7-deazaguanine synthas e OS=Terriglobus roseus (strain DSM 18391 / NRRL B-4159 8 / KBS 63) OX=926566 GN=queE PE=3 SV=1
MRLIELYKSVQGESSFTGVPCIFVRFAGCNLRCAWCDSEYTFTGGKPFTEDEVVAQIEALAPCPLIEFTGGEPMLHERELLPLMDRLLADEATKYTLMMETSGERPLGDVPKAVHKIVDVKCPGSGSAFGSFRMSNLDTLTVRDEVKFVLRDRVDYEFARDFIREHLAGKIADGTLGHILLSPAFLKAPSILRTADNMELDGRVLVDWMLADGLPARLSLQVHKFVWEPQKKGV

SEQ ID NO: 34767 - protein, 229 aa, Terriglobus saanensis
  misc_feature (1)..(229): tr|E8UYW0|E8UYW0_TERSS 7-carboxy-7-deazaguanine synthas e OS=Terriglobus saanensis (strain ATCC BAA-1853 / DSM 23119 / SP1PR4) OX=401053 GN=queE PE=3 SV=1
MHLIELYKSVQGESSFTGMPCIFVRSAGCNLRCAWCDSEYTFSGGTPFTEDEIVAQIEALAPCRLIEFTGGEPMLHAKELLPLMRRLLADPRGYTLMMETSGERPLQDVPTAVHKIVDVKCPGAGSAFGSFRMSNLDILTQRDEVKFVLRDRVDYEFARDFIREHSLNEKAGGILLSPAFIKVPSILRSADNMELDARHLVDWMLADGLDARLSLQVHKFIWEPQKKGV

SEQ ID NO: 34768 - protein, 218 aa, Terrimicrobium sacchariphilum
  misc_feature (1)..(218): tr|A0A146G856|A0A146G856_TERSA 7-carboxy-7-deazaguanine synthase OS=Terrimicrobium sacchariphilum OX=690879 GN =queE PE=3 SV=1
MDDNAKLTINEIYLSVQGESTWAGLPCVFIRLTGCDLRCSYCDTEYAFYEGKKRLVSEVLAEVSDMPCPMVEVTGGEPLLQKNVKPLMAALCDAGKTVLIETSGAHDISGIDPRVHRIVDLKTPSSGESGRNRYENIPHLTERDEVKFVLGSREDYEWAREQIGRYDLGSRVRAVLLSPVFGKIDPKDIVQWMLDDRLPARFQLQMHKFIWEPRARGV

SEQ ID NO: 34769 - protein, 203 aa, Terrimonas sp.
  misc_feature (1)..(203): tr|A0A2T7Q6J2|A0A2T7Q6J2_9BACT 7-carboxy-7-deazaguanine synthase OS=Terrimonas sp. NS-102 OX=2171976 GN=queE P E=3 SV=1
MEAFYTLQGEGMHQGKAAYFIRLGGCDVGCVWCDVKESWNANAHPQKETYTIITEALKEIPGQCASPQNNNVIAVVTGGEPLMHHLDELTTSLKQAGFRTHIETSGSSPLSGTWDWICLSPKKFKAPLPEILSQADELKVVAYNKSDFKWAEQFEKQVSSKCKLYLQPEWSKAQVMTPLIIAYIKEHPQWQLSLQVHKYLNIP

SEQ ID NO: 34770 - protein, 210 aa, Testudinibacter aquarius
  misc_feature (1)..(210): tr|A0A4R3YB60|A0A4R3YB60_9PAST 7-carboxy-7-deazaguanine synthase OS=Testudinibacter aquarius OX=1524974 GN=que E PE=3 SV=1
MRSEIHYNIVEIFESLQGEGFNTGMPSIFIRFGKCNLACPWCDTDYNRFERWTLDQIMQKVRSYTAKNIIITGGEPTIQPKLNVLLDQLKAEGYFLAIETNGLKPVPPQIDYIATSPKRLYQHKYQQRGIPFAHEVRIVNDGDILPFCQQLEQQMQADHYYLSPREQQGEMNLLDTIRKLGELNQRPEALSGKRPKWQLSLQTHKLVGIE

SEQ ID NO: 34771 - protein, 242 aa, Thalassobacillus cyri
  misc_feature (1)..(242): tr|A0A1H4GY80|A0A1H4GY80_9BACI 7-carboxy-7-deazaguanine synthase OS=Thalassobacillus cyri OX=571932 GN=queE PE =3 SV=1
MPKLPVLEIFGPTIQGEGMVVGRKTMFIRTAGCDYSCSWCDSAFTWDGSAKEEITRMDADEILSELQKVGGENFDHVTISGGNPALFPYLDELIGKLKAKRIEVALETQGSRWQEWFLSIDDLTISPKPPSSEMKTDWDQLDGIINRLKENDRLNNTSLKVVIFNEQDLEYAASVHTRYQEVSFYLQVGNDDLEETDDSQIALKLLQKYEWLVDQVMASSALNRVRVLPQLHALLWGNKRGV

SEQ ID NO: 34772 - protein, 234 aa, Thalassobium sp.
  misc_feature (1)..(234): tr|A0A2G2AGV8|A0A2G2AGV8_9RHOB 7-carboxy-7-deazaguanine synthase OS=Thalassobium sp. OX=2030825 GN=queE PE=3 S V=1
  misc_feature (133)..(133): Xaa can be any naturally occurring amino acid
MATNFYRVKEAFYTLQGEGAQAGRAAVFCRFSKCNLWNGREESRSTAVCQFCDTDFIGTDGNNGGEYSKQALVELVSNLWPGKSKGANIQGKPYVVCTGGEPLLQLDAALINAFHDAGFEVAVETNGTLPLPXGIDWVCLSPKADAELAFIRCDELKLVYPQLLAMPERFEHIEADHYYLQPMADYQPVVLASDKLEGAKEGLSGSNTQKALSYCLKHPKWKLSLQTHKMIGIE

SEQ ID NO: 34773 - protein, 228 aa, Thalassobium sp.
  misc_feature (1)..(228): tr|A0A2G2PUM5|A0A2G2PUM5_9RHOB 7-carboxy-7-deazaguanine synthase OS=Thalassobium sp. OX=2030825 GN=queE PE=3 S V=1
MADRYRVKEVFYTLQGEGAQAGRPSVFCRFSKCNLWNGREDSRADAVCDFCDTDFIGTDGENGGIYSAAELVSLISSLWPDPAQGVPYVVCTGGEPLLQLDVPLTEALHEAGFEIGVETNGTLPAPASIDWLCLSPKADAEIVLTECDELKLVYPQSKAMPERFASFNARHFYLQPMADYQAMILATDKNEGAKEGLSTSNMRKTVEYCLAHPQWKLSLQTHKWLGID

SEQ ID NO: 34774 - protein, 237 aa, Thalassobius activus
  misc_feature (1)..(237): tr|A0A0P1IYS3|A0A0P1IYS3_9RHOB 7-carboxy-7-deazaguanine synthase OS=Thalassobius activus OX=1715691 GN=queE PE =3 SV=1
MLRITEIFGPTIQGEGAVIGAPTVFVRAGGCDYRCSWCDSLHAVDTEHRHTWAKMDSADVFAEVERLSGGTPLTVSLSGGNPAIQDFSDVIALGKSKGYDFALETQGSIAREWFSELAPLILSPKPPSSGHVVDWDKFDACVKAAGEAETVLKIVIFDDTDYAWAKDAAARYPQLPLYIQPGNHTPPSADEDDAAVDMDGIMDRYEWLIDKTLADKWYSPKILPQLHVLIWGNKRGV

SEQ ID NO: 34775 - protein, 193 aa, Thalassobius sp.
  misc_feature (1)..(193): tr|A0A2E9GD62|A0A2E9GD62_9RHOB 7-carboxy-7-deazaguanine synthase OS=Thalassobius sp. OX=1979401 GN=queE PE=3 S V=1
MEAFYTIQGEGAYSGHAAYFIRLAGCDVGCFWCDVKESWDEEKHPQIAVNDIVEEAKKHPARLAVITGGEPLMHDLSELTSKLKSAGFRTHIETSGAHPLSGQLDWITLSPKKFKKALPEIIPQANELKVVIYNKSDFKWAEQYADQVNDSCLLLLQPEWDKEKEMLPQIIEYVKEKPHWKVSLQTHKYMNIP

SEQ ID NO: 34776 - protein, 235 aa, Thalassococcus halodurans
  misc_feature (1)..(235): tr|A0A1H5TKP5|A0A1H5TKP5_9RHOB 7-carboxy-7-deazaguanine synthase OS=Thalassococcus halodurans OX=373675 GN=que E PE=3 SV=1
MTLRIVEIFGPTVQGEGALIGEATVFVRAGGCDYRCSWCDSLHAVDSQYRHTWLPMSDDAVMDEVRRLSGGRPLTVSISGGNPAIQDFAPLIALGKVEGYRFACETQGSVSQPWFADLDTLVLSPKPPSSGETVDWDKFDACVQMSKGCGQAVMKIVIFDDTDYVWAKEAAARYPEMPLYLQPGNLEVDPDLPVNLEDATDRLRQLIEKTTGDGWFAPRILPQLHVLVWGNKRGV

SEQ ID NO: 34777 - protein, 234 aa, Thalassolituus oleivorans
  misc_feature (1)..(234): tr|M5DSF3|M5DSF3_9GAMM 7-carboxy-7-deazaguanine synthas e OS=Thalassolituus oleivorans MIL-1 OX=1298593 GN=queE PE=3 SV=1
MATNFYRVKEAFYTLQGEGAQAGRAAVFCRFSKCNLWNGREESRSTAVCQFCDTDFIGTDGNNGGEYSKQALVELVSNLWPGKSKGANIQGKPYVVCTGGEPLLQLDAALINAFHDAGFEVAVETNGTLPLPQGIDWVCLSPKADAELAFIRCDELKLVYPQLLAMPERFEHIEADHYYLQPMADYQPVVLASDKLEGAKEGLSGSNTQKALSYCLKHPKWKLSLQTHKMIGIE

SEQ ID NO: 34778 - protein, 234 aa, Thalassolituus oleivorans; identical to SEQ ID NO: 34777
  misc_feature (1)..(234): tr|W8FZV8|W8FZV8_9GAMM 7-carboxy-7-deazaguanine synthas e OS=Thalassolituus oleivorans R6-15 OX=1208320 GN=queE PE=3 SV=1

SEQ ID NO: 34779 - protein, 228 aa, Thalassolituus sp.
  misc_feature (1)..(228): tr|A0A558NRK7|A0A558NRK7_9GAMM 7-carboxy-7-deazaguanine synthase OS=Thalassolituus sp. C2-1 OX=2597518 GN=queE PE=3 SV=1
MADRYRVKEVFYTLQGEGAQAGRPSVFCRFSKCNLWNGREDSRSTAVCDFCDTDFIGTDGENGGIYSAAELVSLISSLWPDPAQGVPYVVCTGGEPLLQLDEPLIEALHNAGFEIGVETNGTLPAPAGIDWLCLSPKADAGIVITACDELKLIYPQSKAMPERFASFNARHFYLQPMADYQAMILATDKNEGAKEGLSTSNMRKAVEYCLAHPQWKLSLQTHKWLGID

SEQ ID NO: 34780 - protein, 225 aa, Thalassomonas actiniarum
  misc_feature (1)..(225): tr|A0A0D8CTH1|A0A0D8CTH1_9GAMM 7-carboxy-7-deazaguanine synthase OS=Thalassomonas actiniarum OX=485447 GN=queE PE=3 SV=1
MKTTCYKINELFETIQGEGSFTGQPSIFIRLQGCPVGCSWCDTKHTWEIDPQLQVASDVMLGKTQESDYWSELSIEQILETITTEGYQAKHIVLTGGEPCMVDLKPLCEALEQAGFSCQVETSGTFEIRVSDNCWVTVSPKVNMRGGYEILTSAMSRANEIKHPVATEQHVDELKALLAEHQITTTPVYLQPISQKPRATELAIKTCIENNWRLSVQVHKYLGIE

SEQ ID NO: 34781 - protein, 223 aa, Thalassomonas sp.
  misc_feature (1)..(223): tr|A0A553FI68|A0A553FI68_9GAMM 7-carboxy-7-deazaguanine synthase OS=Thalassomonas sp. M1454 OX=2594477 GN=queE PE=3 SV=1
MSHYKINELFETIQGEGSFTGQPSIFLRLQGCPVGCSWCDTKHTWEINLDSEVSADVVLEKSAETDEWTNLSCDHILQIIKEKGFKAKHIVITGGEPCMVDLTPLCEMFESNGYSTQIETSGTFEIITTDKCWVTVSPKVNMRGGYEILSSAMQRANEIKHPIATEQHVDDLKQLLGQHKIVDTPVYLQPISQKERATQLAIDTCIENNWRLSIQVHKYIGIE

SEQ ID NO: 34782 - protein, 225 aa, Thalassomonas viridans
  misc_feature (1)..(225): tr|A0A0D8CRK5|A0A0D8CRK5_9GAMM 7-carboxy-7-deazaguanine synthase OS=Thalassomonas viridans OX=137584 GN=queE P E=3 SV=1
MKTTCYKINELFETIQGEGSFTGQPSIFIRLQGCPVGCSWCDTKHTWEIDPQLQVASDVMLGKTQESDYWSELSVAQILETIQAKGYQAKHIVLTGGEPCMVDLKPLCLALEQAGFSCQVETSGTFEILVSDNCWVTVSPKVNMRGGYKILNSAMLRANEIKHPVATEQHVDDLKALLAEHQIKTTPVYLQPISQKPRATELAIKTCIENNWRLSVQVHKYLGIE

SEQ ID NO: 34783 - protein, 243 aa, Thalassospira alkalitolerans
  misc_feature (1)..(243): tr|A0A1Y2L7J8|A0A1Y2L7J8_9PROT 7-carboxy-7-deazaguanine synthase OS=Thalassospira alkalitolerans OX=1293890 GN =queE PE=3 SV=1
MRISEIFGPTVQGEGSLIGVPTVFVRTGGCDFRCSWCDTLYAVDPAFRADWKPSSAGDVLSQVKTLSGGKPILVTLSGGNPAIQPLGGLIAMGHRDGFTFAIETQGSIARDWFADLDYLTISPKPPSSSTDFDPDALAACIDAARTNGVLNGPAITLKFPVRDADDLMFADYVRKLHPDIPVCLQPVNTTPAEPHPDGANGVDIAGLTARYRWLVDEVSARKWFDIRVLPQWHVHVWGNLRGM

SEQ ID NO: 34784 - protein, 260 aa, Thalassospira lohafexi
  misc_feature (1)..(260): tr|A0A2N3L6K9|A0A2N3L6K9_9PROT 7-carboxy-7-deazaguanine synthase OS=Thalassospira lohafexi OX=744227 GN=queE P E=3 SV=1
MTVQDPHLADMSQSRDKIRISEIFGPTVQGEGTLIGTPTVFVRTGGCDFRCAWCDTLYAVDPAFRADWKPMSPDAVLDEVKKLTGGAPILITLSGGNPAIQPLGRLIELGQKEGFSFAIETQGSIAKDWFADLNYLTISPKPPSASTSFDADALNACIDAANAKGMLSGPAITLKFPVRDEADLLFADHVRKLHTGIPVCVQPVNTTPAEPHPDGADGVDLDGLTARYRWLVDEVAKRKWFDVRVLPQWHVHVWGNLRGV

SEQ ID NO: 34785 - protein, 243 aa, Thalassospira lucentensis
  misc_feature (1)..(243): tr|A0A367VV80|A0A367VV80_9PROT 7-carboxy-7-deazaguanine synthase OS=Thalassospira lucentensis MCCC 1A00383 = D SM 14000 OX=1123365 GN=queE PE=3 SV=1
MRISEIFGPTVQGEGTLIGIPTVFVRTGGCDFRCSWCDTLYAVDPAFRADWKPMRAEAVLDEVKKLTGGAPILITLSGGNPAIQPLGRLIELGQKEGFSFALETQGSIAKDWFADLNYLTISPKPPSASTSFDADALNACIDAANAKGMLSGPAITLKFPVRDEADLLFADHVRKLHTGIPVCVQPVNTTPAAPHPDGADGVDLDALTARYRWLVDEVAKRKWFDVRVLPQWHVHVWGNLRGV

SEQ ID NO: 34786 - protein, 260 aa, Thalassospira lucentensis
  misc_feature (1)..(260): tr|A0A358HMQ5|A0A358HMQ5_9PROT 7-carboxy-7-deazaguanine synthase OS=Thalassospira lucentensis OX=168935 GN=que E PE=3 SV=1
MSAHDPHLADMSQSRDKIRISEIFGPTVQGEGTLIGMPTVFVRTGGCDFRCAWCDTLYAVDPAFRADWKPMRAEAVLDEVKKLTGGAPILITLSGGNPAIQPLGRLIELGQKEGFSFAIETQGSIAKDWFADLNYLTISPKPPSASTSFDADALNACIDAANAKGMLSGPAITLKFPVRDEADLLFADHVRRLHTGIPVCVQPVNTTPAEPHPDGADGVDLDALTARYRWLVDEVAKRKWFDVRVLPQWHVHVWGNLRGV

SEQ ID NO: 34787 - protein, 275 aa, Thalassospira marina
  misc_feature (1)..(275): tr|A0A2N3KRL7|A0A2N3KRL7_9PROT 7-carboxy-7-deazaguanine synthase OS=Thalassospira marina OX=2048283 GN=queE PE =3 SV=1
MTQDIATPTRAEHGLQSTDQSGDDSQLVRRQGKIRISEIFGPTVQGEGALLGMPTVFVRTGGCDFRCSWCDTLYAVDPAFRGDWLPMDAEAILDQVKKLSGGRPVLVTLSGGNPAIQPLESLIDKGQRQGFTFAIETQGSIARRWFAKLDHLTLSPKPPSSGTVFNADDLAACITAARSGSGMGPAITLKFPVADEADLNFANQVRAMHPDIPCYLQPVNATPAAPHPDGADGVDIDALTERYRWLVDRVAENGWFDVRVMPQWHVHVWGNLRGV

SEQ ID NO: 34788 - protein, 257 aa, Thalassospira mesophila
  misc_feature (1)..(257): tr|A0A1Y2L439|A0A1Y2L439_9PROT 7-carboxy-7-deazaguanine synthase OS=Thalassospira mesophila OX=1293891 GN=queE PE=3 SV=1
MRRQGKIRISEIFGPTVQGEGALLGMPTVFVRTGGCDFRCSWCDTLYAVDPTFRADWLPMDATAILDRVKQLSNNQPILITLSGGNPAIQPLAPLIQLGQQQGFTFAIETQGSIARKWFATLDHLTLSPKPPSSGTVFNANDLAACIAAARSPAATGTTPPFASSGPAITLKFPVADEDDLAFADQVRQLHRDIPCYLQPVNATPAAPHPDGANGVDIEALTEKYRWLVDQVSQKGWFDVRVVPQWHVHVWGNLRGV

SEQ ID NO: 34789 - protein, 261 aa, Thalassospira permensis
  misc_feature (1)..(261): tr|A0A074JGC8|A0A074JGC8_9PROT 7-carboxy-7-deazaguanine synthase OS=Thalassospira permensis NBRC 106175 OX=135 3532 GN=queE PE=3 SV=1
MSGTEIEPKIESELAHDKIRISEIFGPTVQGEGALIGMPTVFVRSGGCDFRCSWCDTLYAVDPAFRADWKPNTAAEVMDRVRTLSGGKPILVTLSGGNPAIQPLGGLIALGKRDGFTFAIETQGSIARDWFADLDYLTLSPKPPSSSTDFDPDALAACITAAQANGVLDGPAITLKFPIRDDADLMFADHVRKRHPDIPVCLQPVNITPAEPHPDGLNGVDIDGLTERYRWLVDQVSERGWFNIRVLPQWHVHVWGNLRGV

SEQ ID NO: 34790 - protein, 253 aa, Thalassospira povalilytica
  misc_feature (1)..(253): tr|A0A2N3KE96|A0A2N3KE96_9PROT 7-carboxy-7-deazaguanine synthase OS=Thalassospira povalilytica OX=732237 GN=qu eE PE=3 SV=1
MSDPAEHRGKIRISEIFGPTVQGEGALIGVPTVFVRTGGCDFRCSWCDTLYAVDPAFRADWKPMTAAEVLEDVKKLSGGKPILITLSGGNPAIQPLGALIAMGKQEGFTFAIETQGSIAKDWFADLNYLTISPKPPSASTSFDADALTACIEAAQSRGMLDGPAITLKFPVRDEADLMFADYVRNLHIGIPVCVQPVNTTPAEPHPDGKDGVDIEDLTARYRWLVDEIAKRQWFDVRVLPQWHVHVWGNLRGV

SEQ ID NO: 34791 - protein, 250 aa, Thalassospira profundimaris
  misc_feature (1)..(250): tr|A0A367W9A0|A0A367W9A0_9PROT 7-carboxy-7-deazaguanine synthase OS=Thalassospira profundimaris OX=502049 GN=q ueE PE=3 SV=1
MSEHRGKIRISEIFGPTVQGEGALIGVPTVFVRTGGCDFRCSWCDTLYAVDPAFRADWKPMTATEVLDAVKKLSGGKPILITLSGGNPAIQPLGTLIAMGKAEGFSFAIETQGSIAKDWFADLNYLTISPKPPSSSTSFDPDALRACIDAAQANGMLDGPAITLKFPVRDEADLMFADYVRNIHIGIPVCLQPVNTTPAEPHPDGVNGVDIEGLTERYRWLVDEVARRQWFDVRVLPQWHVHVWGNLRGV

SEQ ID NO: 34792 - protein, 260 aa, Thalassospira profundimaris
  misc_feature (1)..(260): tr|K2LU11|K2LU11_9PROT 7-carboxy-7-deazaguanine synthas e OS=Thalassospira profundimaris WP0211 OX=1177928 GN=q ueE PE=3 SV=1
MTVHDPNLADISEGRGKIRISEIFGPTVQGEGALIGMPTVFVRTGGCDFRCSWCDTLYAVDPAFRADWKPMSAAEVLDAVKKFSGGKPILITLSGGNPAIQPLGELIAMGKDEGFTFAIETQGSIAKDWFADLNFLTISPKPPSSSTSFDKDALQACIEAAQSDGILNGPAITLKFPVRDAADLMFADYVRNLHIGIPVCLQPVNTTPAEPHPDGADGVDIDGLTERYRWLVDEVAKRKWFDVRVLPQWHVHVWGNLRGV

SEQ ID NO: 34793 - protein, 260 aa, Thalassospira sp.
  misc_feature (1)..(260): tr|A0A419W1X5|A0A419W1X5_9PROT 7-carboxy-7-deazaguanine synthase OS=Thalassospira sp. DSM 26710 OX=2035225 GN= queE PE=3 SV=1
MTMHDPNLADISDARGKIRISEIFGPTVQGEGALIGMPTVFVRTGGCDFRCSWCDTLYAVDPAFRADWKPMSATEVLDAVKKLSGGKPILITLSGGNPAIQPLGDLIAMGKDEGFTFAIETQGSIAKNWFADLNFLTISPKPPSSSTSFDKDALAACIEAAQSDGILNGPAITLKFPVRDAADLMFADYVRNLHIGIPVCLQPVNTTPAEPHPDGADGVDIDGLTERYRWLVDEAAKRKWFDVRVLPQWHVHVWGNLRGV

SEQ ID NO: 34794 - protein, 261 aa, Thalassospira sp.
  misc_feature (1)..(261): tr|A0A2E2T3X2|A0A2E2T3X2_9PROT 7-carboxy-7-deazaguanine synthase OS=Thalassospira sp. OX=1912094 GN=queE PE=3 SV=1
MSGTELAPELGAELASDKIRISEIFGPTVQGEGALIGMPTVFVRTGGCDFRCSWCDTLYAVDPAFRADWKPHTAAEVMDRVRTLSGGKPILVTLSGGNPAIQPLGGLIALGKRNGFTFAIETQGSIARDWFADLDYLTLSPKPPSSSTDFDPRALAACITAARANGVLDGPAITLKFPIRDDADLMFADHVRRLHPDIPVCLQPVNTTPAEPHPDGANGVDIAGLTERYRWLVDQVTERGWFNIRVLPQWHVHVWGNLRGV

SEQ ID NO: 34795 - protein, 261 aa, Thalassospira xiamenensis
  misc_feature (1)..(261): tr|A0A285RNF9|A0A285RNF9_9PROT 7-carboxy-7-deazaguanine synthase OS=Thalassospira xiamenensis OX=220697 GN=que E PE=3 SV=1
MSGTELAPELGAKLASDKIRISEIFGPTVQGEGALIGMPTVFVRTGGCDFRCSWCDTLYAVDPAFRADWKPHTAAEVMDRVRTLSGGKPILVTLSGGNPAIQPLGGLIALGKRNGFTFAIETQGSIARDWFADLDYLTLSPKPPSSSTDFDPRALAASINAARANGVLDGPAITLKFPVRDDADLMFADHVRKLHPDIPVCLQPVNTTPAEPHPDGANGVDIAGLTERYRWLVDQVSERGWFNIRVLPQWHVHVWGNLRGV

SEQ ID NO: 34796 - protein, 255 aa, Thalassospira xiamenensis
  misc_feature (1)..(255): tr|A0A0B4XX56|A0A0B4XX56_9PROT 7-carboxy-7-deazaguanine synthase OS=Thalassospira xiamenensis M-5 = DSM 17429 OX=1123366 GN=queE PE=3 SV=1
MSGTELALAPDKIRISEIFGPTVQGEGALIGMPTVFVRTGGCDFRCSWCDTLYAVDPAFRADWKPNTAAEVMDRVRTLSGGKPILVTLSGGNPAIQPLGGLIALGKRNGFTFAIETQGSIARDWFADLDYLTLSPKPPSSSTDFDPDALAACITAAQANGVLDGPAITLKFPIRDDADLMFADHVRKRHPDIPVCLQPVNITPAEPHPDGLNGVDIDGLTERYRWLVDQVSERGWFNIRVLPQWHVHVWGNLRGV

SEQ ID NO: 34797 - protein, 261 aa, Thalassospira xianhensis
  misc_feature (1)..(261): tr|A0A367UCG0|A0A367UCG0_9PROT 7-carboxy-7-deazaguanine synthase OS=Thalassospira xianhensis MCCC 1A02616 OX=1 177929 GN=queE PE=3 SV=1
MSGTELAPVLEPELVTDKIRISEIFGPTVQGEGALIGMPTVFVRTGGCDFRCSWCDTLYAVDPAFRADWKPHTAAEVMARVRALSGGKPILVTLSGGNPAIQPLGGLIALGKRDGFTFAIETQGSIARDWFADLDYLTLSPKPPSSSTDFNPDALAACIEAARANGVLDGPAITLKFPVRDDADLMFADHVRKQHPDIPVCLQPVNTTPAEPHPDGANGVDIDGLTERYRWLVDQVAKRGWFDMRVLPQWHVHVWGNLRGV

SEQ ID NO: 34798 - protein, 222 aa, Thalassotalea agarivorans
  misc_feature (1)..(222): tr|A0A1I0ENA2|A0A1I0ENA2_THASX 7-carboxy-7-deazaguanine synthase OS=Thalassotalea agarivorans OX=349064 GN=que E PE=3 SV=1
MNYKINEMFETIQGEGSFTGQPSIFIRLQGCPVGCSWCDTKHTWDVEQSDEIAIVDVLAKTQETSKWSASSEEQLLDTVKAQGWQAKHIVITGGEPCMYDLRPLCDTFENAGYSIQVETSGTFEVLVSDKCWVTVSPKINMKGGLEVLAQAIDRANEIKHPVATEHHVDELKALLNQFNANHKPVYLQPISQKQRATELAINTCIANNWRLSIQVHKYIGIE

SEQ ID NO: 34799 - protein, 222 aa, Thalassotalea euphylliae
  misc_feature (1)..(222): tr|A0A3E0U6W6|A0A3E0U6W6_9GAMM 7-carboxy-7-deazaguanine synthase OS=Thalassotalea euphylliae OX=1655234 GN=que E PE=3 SV=1
MLYKINEIFETLQGEGSFTGQPSIFIRLQGCPVGCSWCDTKHTWETKPDLAIPVNDLLAKSEESEHWSELSVDGIAKLFVEQNYQAKHVVITGGEPCMFDLTPLCAALESRGYSTQIETSGTFEVNTTEKCWVTVSPKVNMRGGYKVLSQAMQRANEIKHPVATEQHVDDLKALLAEHQVTDKQVYLQPISQKQRATELAINTCIENNWRLSVQVHKYIGIE

SEQ ID NO: 34800 - protein, 222 aa, Thalassotalea euphylliae
  misc_feature (1)..(222): tr|A0A3E0UKI2|A0A3E0UKI2_9GAMM 7-carboxy-7-deazaguanine synthase OS=Thalassotalea euphylliae OX=1655234 GN=que E PE=3 SV=1
MLYKINEIFETLQGEGSFTGQPSIFIRLQGCPVGCSWCDTKHTWETKPELAIPVNDLLAKSEESEHWSELSVDGIAELFVEQNYQAKHVVITGGEPCMFDLKPLCATLESRGYSTQIETSGTFEINTTEKCWVTVSPKVNMRGGYKVLSQAMQRANEIKHPVATEQHVDDLKALLAEHQVTDKQVYLQPISQKQRATELAINTCIENNWRLSVQVHKYIGIE

SEQ ID NO: 34801 - protein, 223 aa, Thalassotalea sp.
  misc_feature (1)..(223): tr|A0A516HGQ7|A0A516HGQ7_9GAMM 7-carboxy-7-deazaguanine synthase OS=Thalassotalea sp. PS06 OX=2594005 GN=queE PE=3 SV=1
MSQYKINEMFETIQGEGSFTGQPSIFIRLQGCPVGCSWCDTKHTWDIDPEREVSAPVMLAKSAETDEWAEFSIADLLQTIADNGWQAKHIVLTGGEPCMVDLEPLCRVLEESGYSTQVETSGTFEVLVSPKCWVTVSPKVNMRGGYKVLGSAMHRANEIKHPVATEQHVDDLKALLAEHGITDTPVYLQPISQKERATQLAIDTCIANNWRLSIQVHKYIGIE

SEQ ID NO: 34802 - protein, 224 aa, Thalassotalea sp.
  misc_feature (1)..(224): tr|A0A1Q6CJH4|A0A1Q6CJH4_9GAMM 7-carboxy-7-deazaguanine synthase OS=Thalassotalea sp. PP2-459 OX=1742724 GN=qu eE PE=3 SV=1
MSVTYKINELFETIQGEGSFTGQPSIFLRLQGCPVGCSWCDTKHTWDIDVVDQVDIDNMVNKPQESVSWANLTEQEILSVFKEQGFKARHIVITGGEPCMVDLTPLCHTLEEQGFSTQIETSGTFEIKTTDACWVTVSPKINMKGGYPVLKSALERANEIKHPVATETHVDDLKLLLKKNNITDKPVYLQPISQKKRATELAIQTCIENNWRLSIQVHKYIGIE

SEQ ID NO: 34803 - protein, 223 aa, Thauera aminoaromatica
  misc_feature (1)..(223): tr|A0A5C7SBH5|A0A5C7SBH5_9RHOO 7-carboxy-7-deazaguanine synthase OS=Thauera aminoaromatica OX=164330 GN=queE P E=3 SV=1
MSAVETAPATAVRLRITEIFASLQGESTRVGLPTVFVRLTGCPLRCTWCDTAYAFSGGETRTLDDILAEVASHGLRHVCVTGGEPLAQKGCLPLLAALCDAGHDVSLETSGALDIAGVDPRVSRIVDLKAPGSGELARNRWENLALLYAHDELKFVLADAADYAWAKQQIAEHRLAERCGVLLSPVAGALDPAELAGWIVRDRLPVRFQLQLHKILWNDARGR

SEQ ID NO: 34804 - protein, 223 aa, Thauera aminoaromatica; identical to SEQ ID NO: 34803
  misc_feature (1)..(223): tr|N6YZU5|N6YZU5_9RHOO 7-carboxy-7-deazaguanine synthas e OS=Thauera aminoaromatica S2 OX=1234381 GN=queE PE=3 SV=1

SEQ ID NO: 34805 - protein, 223 aa, Thauera aromatica
  misc_feature (1)..(223): tr|A0A2R4BRC4|A0A2R4BRC4_THAAR 7-carboxy-7-deazaguanine synthase OS=Thauera aromatica K172 OX=44139 GN=queE PE =3 SV=1
MPPIETGADATVRLRITEIFASLQGESSRVGLPTVFVRLTGCPLRCTWCDTAYAFSGGSPRSVDDILAEVARHGLRHVCVTGGEPLAQKGCPALLTALCDAGHSVSLETSGALDIGGVDARVSRIMDLKAPGSGEAAKNRYANLALLNAHDELKIVLADAADYEWAKRQIAEHALAERCPVLLSPVAGSLAPAELAGWIVRDRLPVRFQLQLHKILWDDARGR

SEQ ID NO: 34806 - protein, 223 aa, Thauera chlorobenzoica
  misc_feature (1)..(223): tr|A0A1L6FC18|A0A1L6FC18_9RHOO 7-carboxy-7-deazaguanine synthase OS=Thauera chlorobenzoica OX=96773 GN=queE PE =3 SV=1
MPSMETGTAAAGRLRITEIFASIQGESTRVGLPTVFVRLTGCPLRCTWCDTAYAFSGGSTRSLDDILAEVARHGLRHVCVTGGEPLAQKACLELLAALCDAGHSVSLETSGALDIGGVDARVSRVMDLKAPGSGEAAKNRYANLALLSAHDELKIVLADAADYEWAKRQITEHALAERCPVLLSPVAGSLAPTELAAWIVRDRLPVRFQLQLHKILWDDARGR

SEQ ID NO: 34807 - protein, 217 aa, Thauera humireducens
  misc_feature (1)..(217): tr|A0A127K990|A0A127K990_9RHOO 7-carboxy-7-deazaguanine synthase OS=Thauera humireducens OX=1134435 GN=queE PE =3 SV=1
MTAPAVKLRITEIFASIQGESTWVGLPTVFVRLTGCPLRCSWCDTAYAFTGGENRSLDEVLAEVARHGLKHVCVTGGEPLSQKGCLPLLSALCDAGYAVSLETSGALDIGAADPRVSRIMDLKAPGSGEVERNLYDNIAQLKADDEVKIVLANADDYAWAKQQIATHRLAERCTVLLSPVAGELDPAQLAEWIVRDRLPVRFQLQLHKILWNDARGR

SEQ ID NO: 34808 - protein, 222 aa, Thauera linaloolentis
  misc_feature (1)..(222): tr|N6ZBU2|N6ZBU2_9RHOO 7-carboxy-7-deazaguanine synthas e OS=Thauera linaloolentis 47Lol = DSM 12138 OX=1123367 GN=queE PE=3 SV=1
MASGTSTAAAVKLRITEIFASVQGESTRVGLPTVFVRLTGCPLRCTWCDTAYAFTGGESRTLDEVMAEVARHGLEHVCVSGGEPLSQKACLALLSALCDAGYSVSLETSGALDVGAVDPRVSRVVDLKAPGSGEVERNLYANIALLTPHDEIKIVLAGEADYEWAKRQIAQHRIAERCTVLLSPVAGALDPARLAEWVVRDRLPVRFQLQLHKVLWNDARGR

SEQ ID NO: 34809 - protein, 223 aa, Thauera phenylacetica
  misc_feature (1)..(223): tr|N6ZKS5|N6ZKS5_9RHOO 7-carboxy-7-deazaguanine synthas e OS=Thauera phenylacetica B4P OX=1234382 GN=queE PE=3 SV=1
MSAVETAPATAVRLRITEIFASLQGESTRVGLPTVFVRLTGCPLRCSWCDTAYAFSGGETRTLDNLLAEVAGHGLRHVCVTGGEPLAQKGCLALLAALCDAGHDVSLETSGALDIAGVDPRVSRIMDLKAPGSGELARNRLENLALLNARDELKFVLADAADYAWAKQQIAEYRLAECCTVLLSPVAGALDPAELAGWIVRDRLPVRFQLQLHKILWNDARGR

SEQ ID NO: 34810 - protein, 217 aa, Thauera propionica
  misc_feature (1)..(217): tr|A0A235F267|A0A235F267_9RHOO 7-carboxy-7-deazaguanine synthase OS=Thauera propionica OX=2019431 GN=queE PE=3 SV=1
MTAPAVKLRITEVFASIQGESTWVGLPTVFVRLTGCPLRCSWCDTAYAFTGGESRSLDEVLADVARHGLKHVCVTGGEPLSQKGCLPLLSALCDAGYAVSLETSGALDIGAVDPRVSRIMDLKAPGSGEVERNLYDNIAHLKADDELKIVIANTDDYAWAKQQIATHRLAERCTVLLSPVAGEIDPAQLAEWIVRDRLPVRFQLQLHKILWNDARGR

SEQ ID NO: 34811 - protein, 220 aa, Thauera sp.
  misc_feature (1)..(220): tr|A0A2T4IE08|A0A2T4IE08_9RHOO 7-carboxy-7-deazaguanine synthase OS=Thauera sp. D20 OX=2136175 GN=queE PE=3 SV =1
MNAPDGRSPRLRLSEIFASIQGESTRVGLPTVFVRLTGCPLRCVWCDTEYAFQGGETRSIDDIVNAVATFGLRHVCVTGGEPLAQKDCPALLRALCDAGHAVSLETSGALDIGAVDARVSRIMDLKAPGSGEAARNRWENLALLRRGDEIKIVLAGEDDYRWACEQIAAHDLAARCEVLLSPVAGQLDPASLAEWIVRDRLPVRFQLQLHKVLWADARGK

SEQ ID NO: 34812 - protein, 232 aa, Thauera sp.
  misc_feature (1)..(232): tr|A0A290ZQV5|A0A290ZQV5_9RHOO 7-carboxy-7-deazaguanine synthase OS=Thauera sp. K11 OX=2005884 GN=queE PE=3 SV =1
MHDTAAADAAAPLAGAAPPDARLRITEIFASLQGESTRVGLPTVFVRLTGCPLRCTWCDTAYAFHGGETRTLESVLAEVADHGLRHVCVTGGEPLAQKGCLSLLGALCDAGYSVSLETSGALAVGAVDPRVSRIMDLKAPGSGEAGKNLYANIPLLDANDEIKIVLADEADYAWAKQQIAEHDLARRCTVLLSPVAGALGPATLAGWIVRDRLPVRFQLQLHKILWSDARGR

SEQ ID NO: 34813 - protein, 225 aa, Thauera terpenica
  misc_feature (1)..(225): tr|T0AWJ1|T0AWJ1_9RHOO 7-carboxy-7-deazaguanine synthas e OS=Thauera terpenica 58Eu OX=1348657 GN=queE PE=3 SV= 1
MVSIDTPVAETATVKLRITEIFASVQGESTRVGLPTVFVRLTGCPLRCSWCDTAYAFTGGESRTLDAVLQDIASHGLKHVCVTGGEPLSQKASLALMSALCDAGYSVSLETSGALDISAVDARVARIVDLKAPGSGELERNLPANIPLLRAQDEVKMVLADEADYDWAKAQILEHDLAARCTVLLSPVAGDLDPAQLAEWIVRDRLPVRFQLQLHKVLWNDARGR

SEQ ID NO: 34814 - protein, 212 aa, Thermanaeromonas toyohensis
  misc_feature (1)..(212): tr|A0A1W1VF86|A0A1W1VF86_9THEO 7-carboxy-7-deazaguanine synthase OS=Thermanaeromonas toyohensis ToBE OX=698762 GN=queE PE=3 SV=1
MLVKEIFLSIQGESASAGLPTIFIRFSGCNLRCRYCDTTYAYEGGENFTPEKLKARVSIYPYKRVCLTGGEPLLQPREEFQGLLDLLGEWEISIETNGSLPLERFTLKPGHRWVMDIKCPGSGEVEANRWENLKVLRPCDEVKFVLTSEEDYMWAREIIRRHSLEGRVGLLFSPAHGWLDPQNLAEWILRDGLDVRLQLQLHKLIFGPDTRR

SEQ ID NO: 34815 - protein, 224 aa, Thermoactinomyces sp.
  misc_feature (1)..(224): tr|A0A151YXW0|A0A151YXW0_9BACL 7-carboxy-7-deazaguanine synthase OS=Thermoactinomyces sp. AS95 OX=1811386 GN=q ueE PE=3 SV=1
MVEIFQTVEGEGTRAGFPTTFVRLFNCNLRCTWCDTPYSYAPSKPEYFARVSEIVKEVKKFPHRFICLTGGEPLMHGYKSERLIEALAEIDHIEDIHIETNGAIHLKPFAELRQNHEAARQKVRFILDYKLPGSGENKRMIDENFDCLNDDDEVKFVIAGEEDFKVAKEVVQTKMKKGIPLFSPVWESMEPAKLVDLILKHQLTQVKLSLQMHKMIWDPDLRGV

SEQ ID NO: 34816 - protein, 234 aa, Thermoactinomyces sp.
  misc_feature (1)..(234): tr|A0A1K1WAA2|A0A1K1WAA2_9BACL 7-carboxy-7-deazaguanine synthase OS=Thermoactinomyces sp. DSM 45891 OX=1761907 GN=queE PE=3 SV=1
MQATYESTKLPMVEVFQTVEGEGMRAGFPTVFVRVFNCNLRCTWCDTPYSYAPSTPEYLATISEILKQVEQYPAKNICLTGGEPLMHGQKSLLLLQALAELDHIVDIHIETNGAIDLTPFQEWRQTHPQGHKVRFVMDYKLPASGESEKMNLLNFDLLQANDEIKFVIGDEVDFHSALIIAKQHVKQGIPMFSPVWESMPPHRLVELMLEHQLTDIKLNLQIHKVIWDPNQRGV

SEQ ID NO: 34817 - protein, 238 aa, Thermoactinomyces vulgaris
  misc_feature (1)..(238): tr|A0A0N0Y8T6|A0A0N0Y8T6_THEVU 7-carboxy-7-deazaguanine synthase OS=Thermoactinomyces vulgaris OX=2026 GN=queE PE=3 SV=1
MPQAHQTIDEVKIPMVELFETVEGEGTQAGYPTTFVRVFNCNLRCTWCDTPYSYAPAKPEFFATIAEIVAEVKRYGHPRICLTGGEPLIHGEKSLMLIEALAQLEEVADIHIETNGAIHLAPFHAWRKANPEFGKKVRFVLDYKLPASGEQDKMIEENFTFLRDTDEVKFVIADDKDFDVAVEVVRQRMKRGVPLFSPVWESMPPARLVERMLAERLTHVKLNLQLHKVIWDPNARGV

SEQ ID NO: 34818 - protein, 224 aa, Thermoanaerobaculum aquaticum
  misc_feature (1)..(224): tr|A0A062XMY9|A0A062XMY9_9BACT 7-carboxy-7-deazaguanine synthase OS=Thermoanaerobaculum aquaticum OX=1312852 G N=queE PE=3 SV=1
MFVAEVFASLQGEGILAGTPSFFIRTSGCNLRCRWCDTPYTSWQPEGRRVSVGELVAAARDAGLRHVVITGGEPLLQRELPALCAALKAQGHHITVETAGTLAPEFACDLLSVSPKTANSDPEGVWRARHRRLRENLAPLRLLLQRHPNFQLKFVVQGEQDMPEIVALVERLGVSGDRVLLMPEGKTAQEVAQVAPEVARLCLRFGFRFSPRLHLELFGAGRGV

SEQ ID NO: 34819 - protein, 211 aa, Thermobifida halotolerans
  misc_feature (1)..(211): tr|A0A399FW27|A0A399FW27_9ACTN 7-carboxy-7-deazaguanine synthase OS=Thermobifida halotolerans OX=483545 GN=que E PE=3 SV=1
MGYLVKEIFYTLQGEGAHTGRPAVFCRMSRCNLWTGYEKDRHRAICQFCDTDFVGTDGVGGGRFATADELADAVAQAWPSVSTDHRFVVCTGGEPLLQLDEPAVEALHTRGFEVAVETNGTRRPPRGIDWLCVSPKIGAELVVTKGDELKLVFPQEGGDPTKFEQLDFRFFRLQPMDGPELEVNTQAAIEYCLKNPRWTLSLQTHKYLGIR

SEQ ID NO: 34820 - protein, 243 aa, Thermobrachium celere
  misc_feature (1)..(243): tr|R7RV27|R7RV27_9CLOT 7-carboxy-7-deazaguanine synthas e OS=Thermobrachium celere DSM 8682 OX=941824 GN=queE P E=3 SV=1
MKREKFLDEKIPMVEIFNSISGEGITSGFLTTFVRVYGCNLRCSYCDTKYSYDGEYILMTPSDILKEVNKFNCRRIIVTGGEPLEEDKLKRYIPIYLTQNGYEVRIETNGSVKLYNEEEILEFTGSKERKNLFYTLDIKCPSSNMDKFNIFEENFKRLILGDEIKFVVGNVKDLDYSMQVVEKYKEYFKGVTLNFSSVFSKVEPSQIVDYLKAKNKFFMENNLDVRVNIQLHKIIWDKDKRGV

SEQ ID NO: 34821 - protein, 219 aa, Thermocrinis albus
  misc_feature (1)..(219): tr|D3SNZ0|D3SNZ0_THEAH 7-carboxy-7-deazaguanine synthas e OS=Thermocrinis albus (strain DSM 14484 / JCM 11386 / HI 11/12) OX=638303 GN=queE PE=3 SV=1
MLRGEVRRKTALKVSEIYPSLQGEGLLVGTPSVFVRLQGCNLRCPWCDQPESLHPGGGALMSVEDVIGKVREYPHRHVVITGGEPFTQSFLTLLVEELLKEGFSVQIETNGTLWQKGMDTLASHIHITLSPKGVASWFVHPKVLLYARELKWVVDHLLTLDIILMPSFRRFLEEERVVLQPEGNKEIFLQKALSLQEELLSLGYRVRVLPQLHKLLGLK

SEQ ID NO: 34822 - protein, 221 aa, Thermocrinis minervae
  misc_feature (1)..(221): tr|A0A1M6SQF5|A0A1M6SQF5_9AQUI 7-carboxy-7-deazaguanine synthase OS=Thermocrinis minervae OX=381751 GN=queE PE =3 SV=1
MLRSEVRRKTNLKISEIYPTIQGEGLLVGVPSLFIRLQGCNLRCPWCDQPESLELSSTKATLMSLEDILQKVLTFPYGHVVITGGEPFLHKELSILVEELLLLGKSVQIETNGTLWNEAIEPFAYRIHITCSPKGVVNWYVNPNIIMYAKELKFVVDDAIDLDVLLRKEFLRFLEEGRVVLQPEGNKKVYLWKALELQENLLHMGYQVRIIPQVHKLIGLD

SEQ ID NO: 34823 - protein, 219 aa, Thermocrinis ruber
  misc_feature (1)..(219): tr|W0DF13|W0DF13_9AQUI 7-carboxy-7-deazaguanine synthas e OS=Thermocrinis ruber OX=75906 GN=queE PE=3 SV=1
MLRGQVRETIALKVNEIYPSIQGEGLLIGLPAVFIRLQGCNLRCPWCDQPSALSFSEGGTSFEVEQILDKVSEYKIRHVVITGGEPFAQEGLATLVKELVQRGYSVQIETNGTLWQEGLEKLENLHITCSPKWSAHWFVHPKILQNAKELKFVVDDVLSIEVLLKAQFRNFLEEGKVVLQPEGNKAVFFKKALELQRDLSELGFSVRVLPQLHKLLGLP

SEQ ID NO: 34824 - protein, 219 aa, Thermodesulfatator autotrophicus
  misc_feature (1)..(219): tr|A0A177E8M9|A0A177E8M9_9BACT 7-carboxy-7-deazaguanine synthase OS=Thermodesulfatator autotrophicus OX=179563 2 GN=queE PE=3 SV=1
MPAEEPLFDVAEIFVSLQGESTYMGLPTFFVRLSGCNLRCKWCDTIYAQKPQNNLLGLSEILIRWQKEGSLKFVQITGGEPLLQENVYLLMKAFLEKGATILLETNGSVSLGRVPKEVVKIMDFKTPSSGMTHHMCYENLAYLTRKDQVKFVIADKEDYNWAKEILARFYLPVYTQVLFSPVWQTVKPQELAEWIIKDRLQVRFQLQLHKVLWGEKRGV

SEQ ID NO: 34825 - protein, 219 aa, Thermodesulfatator indicus
  misc_feature (1)..(219): tr|F8ACX8|F8ACX8_THEID 7-carboxy-7-deazaguanine synthas e OS=Thermodesulfatator indicus (strain DSM 15286 / JCM 11887 / CIR29812) OX=667014 GN=queE PE=3 SV=1
MPERDLILDIAEIFVSLQGESTYVGLPTFFVRLAGCNLQCQWCDTVYAQQPQKNFISLSEILDRWQRGGKLKVVQITGGEPLLQENVYPLMKAFLDKGATVLLETNGSMPLERVPREVVKIMDIKPPSSEMNAYMRFENLAYLDRKDQVKFVIADREDYKWAKNVMTKFYLPVYTQVLFSPVWQRLEPRELAEWIIKDKLPVRFQLQLHKILWGEKRGV

SEQ ID NO: 34826 - protein, 235 aa, Thermodesulfatator sp.
  misc_feature (1)..(235): tr|A0A432UI34|A0A432UI34_9BACT 7-carboxy-7-deazaguanine synthase OS=Thermodesulfatator sp. OX=1874629 GN=queE PE=3 SV=1
MHTVSRSAKPRQAASSTVNKLDNTLLSVCELFSSIQGEGVFSGYPCFFIRLSGCNLRCSYCDTSYAYGKGKPMSVAELVAAWRKSRIPLVLVTGGEPLMQEGVYELMKELVRCGAECLLETNGALSISRVPGQVVKIVDWKTPGSGFGSSFRMENLRFISKKDQIKFVIISKKDYEWVLNKMRSHFLEYCCQVIISPAFGMVDPEELASWMMQDLPEARLQIQLHKVLWGDRKGT

SEQ ID NO: 34827 - protein, 205 aa, Thermodesulfatator sp.
  misc_feature (1)..(205): tr|A0A432UGS1|A0A432UGS1_9BACT 7-carboxy-7-deazaguanine synthase OS=Thermodesulfatator sp. OX=1874629 GN=queE PE=3 SV=1
METLVTLQGEGPGSGRPVFLIRLAGCNLACRWCDTPQARSPEAGRARSLSDLLREFEASGLSEVLLTGGEPLLQEGTVVLLQALVSRGARVYLETNGSLPLGPVPQEVIKIMDLKTPSSGMSHQMLYENLRHLTFRDAVKFVIADEEDYLFAREKTFSLRLPSFTEVYFSPAWGEMSPERLARLILRDRLPVRFQVQLHKFLGLP

SEQ ID NO: 34828 - protein, 250 aa, Thermodesulfitimonas autotrophica
  misc_feature (1)..(250): tr|A0A3N5BUW5|A0A3N5BUW5_9THEO 7-carboxy-7-deazaguanine synthase OS=Thermodesulfitimonas autotrophica OX=18949 89 GN=queE PE=3 SV=1
MQGPRGTVTGVSLREVFSSVQGEGPYVGCRHLFVRFAGCNLSCRYCDTPRDIPVSCKVQVQPGGHEVVKIPNPLTPEEVAVLAAGLDLSRHHAVSLTGGEPLLYPEFLQELIPLLRGARRGIYLETNGTLPAALEAVVELVDLVAMDVKLPSATGMAPFWEKHREFLRVAQGREVIVKAVVIRGTPLAEVITAAELAAAAGATLVLQPVTTNDRALRPSPAELLRLQAEALGIARDVRVIPQVHRFCGMW

SEQ ID NO: 34829 - protein, 215 aa, Thermodesulfobacteria bacterium
  misc_feature (1)..(215): tr|A0A496QKK3|A0A496QKK3_9BACT 7-carboxy-7-deazaguanine synthase OS=Thermodesulfobacteria bacterium OX=2202153 GN=queE PE=3 SV=1
MGGLRLSVSETFLSLQGEGAWVGWPCFFIRLAGCNLRCTYCDTRYAYNKGEKRDIPGLVEEWRKSRIGLVQVTGGEPLLQAETLTLLEALLNEGAKVLLETNGSLALGNVPMEVIKIVDRKTPGSGMEKFFLEANLGWLNQGDQLKFVITDREDYEWAREEVVRLCLSCYTEVLFSPAWGGPVPFQLAEWIIADRLSVRFQIQLHKILWGEKRGA

SEQ ID NO: 34830 - protein, 213 aa, Thermodesulfobacteriales bacterium
  misc_feature (1)..(213): tr|A0A524JTN6|A0A524JTN6_9BACT 7-carboxy-7-deazaguanine synthase OS=Thermodesulfobacteriales bacterium OX=2528 040 GN=queE PE=3 SV=1
MKISEIFFSLQGEGLEIGLPTVFIRLFACDLRCSWCDTMYAVEGRDFRDQSVSEVVNEVEKYECRRVCITGGEPLIQIKEVEELADCLLGNSYTILLETSGHKMPPPILWTENSTISMDCKCPSSSMQDRMDFDLFVKLRAKDQLKFVIQDEIDYQYARGILRKYNIKANIIFQPTHGSELGWITKKVIDDKLEFIRVLPQLHKIIWGDKKGV

SEQ ID NO: 34831 - protein, 212 aa, Thermodesulfobacterium commune
  misc_feature (1)..(212): tr|A0A3B8N6Y0|A0A3B8N6Y0_9BACT 7-carboxy-7-deazaguanine synthase OS=Thermodesulfobacterium commune OX=1741 GN= queE PE=3 SV=1
MNLKISETFFSIQGEGPFAGYPTFFVRLFGCNLKCTWCDTLYARESDKYQSITLEEIIKLWENHYSSIPYIAITGGEPLLQPEVYPLIDRFLNKKCIVCIETNGSLSLKHLPPQVIKVMDLKTPSSGMADHNLYENIDFLSSKDVIKFVIQDRKDFEFALDKIKTFDLISKTQVYFSPVFEKLSPKELANWLLEVKLPIRLQIQLHKLLNLK

SEQ ID NO: 34832 - protein, 216 aa, Thermodesulfobacterium commune
  misc_feature (1)..(216): tr|A0A075WYZ2|A0A075WYZ2_9BACT 7-carboxy-7-deazaguanine synthase OS=Thermodesulfobacterium commune DSM 2178 OX =289377 GN=queE PE=3 SV=1
MPPTLNLKISETFFSIQGEGPFAGYPTFFVRLFGCNLKCTWCDTLYARESDKYQSITLEEIIKLWENHYSSIPYIAITGGEPLLQPEVYPLIDRFLNKKCIVCIETNGSLSLKHLPPQVIKVMDLKTPSSGMADHNLYENIDFLSSKDVIKFVIQDRKDFEFALDKIKTFDLISKTQVYFSPVFEKLSPKELANWLLEVKLPIRLQIQLHKLLNLK

SEQ ID NO: 34833 - protein, 213 aa, Thermodesulfobacterium geofontis
  misc_feature (1)..(213): tr|A0A2N7Q9Q7|A0A2N7Q9Q7_9BACT 7-carboxy-7-deazaguanine synthase OS=Thermodesulfobacterium geofontis OX=129560 9 GN=queE PE=3 SV=1
MSKLKISEIFFSLQGEGPLIGYPTLFIRLFGCNLNCSWCDTPYAKGNNPHKEVEISEILSFWEKNFNSLPFITITGGEPLIQNPVYNLMNAFLEKNCIVVLETNGSISLNRVPKKVIKVMDVKTPSSNMDRHNLYENFKFLGKKDAVKFVIKDEKDFEFSLDIIDKFFLTYYTQVFLSPAHPFLDPKNLAEWILKTKKPLRFQIQLHKVVGIK

SEQ ID NO: 34834 - protein, 213 aa, Thermodesulfobacterium geofontis
  misc_feature (1)..(213): tr|A0A2N7PMH0|A0A2N7PMH0_9BACT 7-carboxy-7-deazaguanine synthase OS=Thermodesulfobacterium geofontis OX=129560 9 GN=queE PE=3 SV=1
MSKLKISEIFFSLQGEGPLIGYPTLFIRLFGCNLNCSWCDTPYAKGNNPHKEVEISEILSFWEKNFNSLPFITITGGEPLIQNPVYNLMNAFLEKNCIVVLETNGSISLNRVPKEVIKVMDVKTPSSNMDRHNLYENFKFLGKKDAVKFVIKDEKDFEFSLDIIDKFFLTYYTQVFLSPAHPFLDPKNLAEWILKTKKPLRFQIQLHKVVGIK

SEQ ID NO: 34835 - protein, 216 aa, Thermodesulfobium acidiphilum
  misc_feature (1)..(216): tr|A0A2R4W1X2|A0A2R4W1X2_9FIRM 7-carboxy-7-deazaguanine synthase OS=Thermodesulfobium acidiphilum OX=1794699 G N=queE PE=3 SV=1
MIAIHSIFESISGEVGFISQGSWCTIVRLQGCNLRCRWCDTKESQSIEAKYILSIDDVVARCKNSKVLLTGGEPLIQKETLELIDYLIEKKHFVQVETNGSISLPKGYLSDCGWVVDYKGPSSGMMDRMPSFEEFIDNWIEHRVIVKLVVDNSEEDLEFVFQVLSKMHGLFQFAISPLDAKGEKILDIVNFIRERDEKLLDELIFSIQMHKVVGLL

SEQ ID NO: 34836 - protein, 216 aa, Thermodesulfobium narugense
  misc_feature (1)..(216): tr|M1E8P6|M1E8P6_9FIRM 7-carboxy-7-deazaguanine synthas e OS=Thermodesulfobium narugense DSM 14796 OX=747365 GN =queE PE=3 SV=1
MIAIHSIFESISGEVGFMPQGSWCTIVRLQGCNLRCRWCDTKDSQSIEAKYMLSIDEVIDRCKNHKVLITGGEPLIQEETLKLIDRLIERHHFVQIETNGSIFLPSGYSSDCGWVVDYKGPSSGMMDRMPSFEEFIDNWIEHRVIVKLVVDNSKEDLEFVFQILSKMYGLFQFAISPLDAKGEKILDIVNFIRERDEKLLGDLIFSIQMHKVVGLL

SEQ ID NO: 34837 - protein, 217 aa, Thermodesulforhabdus norvegica
  misc_feature (1)..(217): tr|A0A1I4SMB5|A0A1I4SMB5_9DELT 7-carboxy-7-deazaguanine synthase OS=Thermodesulforhabdus norvegica OX=39841 GN =queE PE=3 SV=1
MGEPGIFVSEMFISIQGESSFAGWPCVFIRTAGCNLKCTYCDTLYARNGGRKVTLRNCLRFVEDSGLKLVEITGGEPLLQEELPRLVKMLIDREYTVLIETNGSLDISPIPEKAIRIMDIKCPSSGMMHKNDYENLKRLHPADEVKFVIGNFEDYLFASQWARRVLEESPVRVIHFSPVFGLLEPSTLAEWILKDKIPVRLNLQLHKYIWSPDAKGV

SEQ ID NO: 34838 - protein, 208 aa, Thermodesulfovibrio aggregans
  misc_feature (1)..(208): tr|A0A2J6WN20|A0A2J6WN20_9BACT 7-carboxy-7-deazaguanine synthase OS=Thermodesulfovibrio aggregans OX=86166 GN= queE PE=3 SV=1
MKVCEIFASIQGESSLAGIPMIFLRLTGCNLRCSYCDTKYAYYEGEELSIDKVLKKIHSFPFKYVEITGGEPLLEEEVYEIMNQLVQTHTVLLETNGSISIERVNPQVKIIMDIKTPGSGMSERNYIENLKFLKKIDELKFVLTDRADYEWAKDFLKNHEIKVKEILFSPAYGILNPAELAKWIISDGLSVRLNLQIHKYIFGNLRGV

SEQ ID NO: 34839 - protein, 208 aa, Thermodesulfovibrio aggregans
  misc_feature (1)..(208): tr|A0A0U9HWN4|A0A0U9HWN4_9BACT 7-carboxy-7-deazaguanine synthase OS=Thermodesulfovibrio aggregans OX=86166 GN= queE PE=3 SV=1
MKVCEIFSSIQGESSLAGIPMIFVRLTGCNLRCAYCDTKYAYYEGEELSIDEILKKVRSFPFKYVEITGGEPLLQDEVHELMNELVKTHRVLIETNGSISIEKVNPEVKVIMDIKTPGSGMSERNYIENLRFLKETDEVKFVLTSRTDYEWAKDFIKKHEIKTSEILFSPAYGILEPKELAKWIINDALPVRLNLQIHKYIFGDIRGA

SEQ ID NO: 34840 - protein, 204 aa, Thermodesulfovibrio sp.
  misc_feature (1)..(204): tr|A0A1C3FDR0|A0A1C3FDR0_9BACT 7-carboxy-7-deazaguanine synthase OS=Thermodesulfovibrio sp. N1 OX=1871110 GN=q ueE PE=3 SV=1
MKICEIFPSIQGESSLVGVPMVFIRFTGCNLRCTYCDTKYAYDNGTELSKDEILQIIHDLPFKFVEITGGEPLLQEDVYPLIDELVKNYYVLLETNGSVSIEKVNRKVKIIMDIKTPGSGMCDKNYLDNLTYLKEFDEIKFVLTDKFDYEWAKEFLKIYKLKTKEILFSPAFGMLNATELAQWIIKDGLSVRLNLQIHKYISIK

SEQ ID NO: 34841 - protein, 198 aa, Thermodesulfovibrio sp.
  misc_feature (1)..(198): tr|A0A1G3XZI2|A0A1G3XZI2_9BACT 7-carboxy-7-deazaguanine synthase (Fragment) OS=Thermodesulfovibrio sp. RBG_19F T_COMBO_42_12 OX=1802373 GN=A2Z47_04510 PE=3 SV=1
SSYAGLPCTFIRMKGCNLRCSYCDTTYAYHEGRELSEENIISEVRRAGISLVEITGGEPLLQKEVSQLIKRLLDEGYKVLIETNGSLSIREVDKRAVVILDIKTPGSGMCEKMDLSNIDNIKSTDEIKFVITGRNDYEWSKAIIYKYNLIDKCHLLLSPAYGVLPSEKLAKWMIEDRLQVRLNLQLHKYIFGADERGT

SEQ ID NO: 34842 - protein, 208 aa, Thermodesulfovibrio yellowstonii
  misc_feature (1)..(208): tr|B5YGD1|B5YGD1_THEYD 7-carboxy-7-deazaguanine synthas e OS=Thermodesulfovibrio yellowstonii (strain ATCC 5130 3 / DSM 11347 / YP87) OX=289376 GN=queE PE=3 SV=1
MKVCEIFTSIQGESSLAGIPMVFVRLTGCNLRCSYCDTKYAYYEGEELSINKVLEKIHSFPFQYVEITGGEPLLQDETYKLINELVKSHNVLIETNGSIPIEKVNPEVKIIMDIKTPGSGMSEKNYIENLRFLKKIDEVKFVLTNRDDYEWAKNFIKNHEIKANEILFSPAYGILNPAELAKWLINDGISVRLNLQIHKYIFGNIRGV

SEQ ID NO: 34843 - protein, 238 aa, Thermoflavifilum aggregans
  misc_feature (1)..(238): tr|A0A2M9CWL5|A0A2M9CWL5_9BACT 7-carboxy-7-deazaguanine synthase OS=Thermoflavifilum aggregans OX=454188 GN=qu eE PE=3 SV=1
MPNGPDRGFHPNFAEMPTDTAHIKPLKVADTAWPLNAADPGRLPVMETFYSLQGEGFHQGRAAFFIRLAGCDVGCVWCDVKESWATEGYLQKTVQQLADEAAAHPARLAIVTGGEPTLYDLSALCDALHQRGFRVHLETSGAHEVIGDFDWICLSPKKFKPPLESVCRQAHELKVVIYHRSDFSWAESYARQVSDSCRLYLQPEWSRCAQMAPLIIAYIQQHPQWELSLQLHKYVHIP

SEQ ID NO: 34844 - protein, 238 aa, Thermoflavimicrobium dichotomicum
  misc_feature (1)..(238): tr|A0A1I3RQV5|A0A1I3RQV5_9BACL 7-carboxy-7-deazaguanine synthase OS=Thermoflavimicrobium dichotomicum OX=46223 GN=queE PE=3 SV=1
MTVQTENEQEMKLPMVEIFETVEGEGTRAGFPTTFVRVYNCNLRCTWCDTKYSYAPAKPAFWATIGEIVSQVKKYPHQHICLTGGEPLMHGRKSLALVKALAAIDYVKDIHIETNGAIHLEPFHRLRQTDPLLREKVRFIMDYKLPASGEHDKMIMDNFQYLNERDEIKFVIGNEEDFHTAVTVVKQHVQQGLPLFSPVWETMPPARLVSLMLKHQLSHVKLNVQLHKVIWDPEARGV

SEQ ID NO: 34845 - protein, 236 aa, Thermoflavimicrobium sp.
  misc_feature (1)..(236): tr|A0A364K139|A0A364K139_9BACL 7-carboxy-7-deazaguanine synthase OS=Thermoflavimicrobium sp. FBKL4.011 OX=2137 476 GN=queE PE=3 SV=1
MNLLEYEEIKLPMVEIFETVEGEGTRAGFSTTFVRVYNCNLRCTWCDTPYSYAPAKPEFWATISEIVSEVKKYPHQHICLTGGEPLMHGKKSLALIQALAEIDYIQDIHIETNGAIHLGLFQELREMHPLVQNKVRFVLDHKLPASGEHDKMVLENFQYLTEQDEIKFVIGSEEDFDYAVDILNKWHQNGLPLFSPVWETMPPAKLVSLMLEHQLTHVKLNLQLHKVIWDPEARGV

SEQ ID NO: 34846 - protein, 220 aa, Thermoflexibacter ruber
  misc_feature (1)..(220): tr|A0A1I2C5J4|A0A1I2C5J4_9BACT 7-carboxy-7-deazaguanine synthase OS=Thermoflexibacter ruber OX=1003 GN=queE PE =3 SV=1
MLVLYLLKILDMEISENIPTKTSALPLMEAFYTIQGEGAWQGHAAYFIRLAGCDVGCVWCDVKESWDAKAHPVVSVEAIVQEARQYPCKIAVITGGEPLMYDLTYLTEELKRAGFRTHIETSGVYPLTGQWDWVCFSPKKFKKPHESIYFKADELKAIVYNPSDFSFAESFINSMKKNCKLLLQPEWSRQDKMMPLIVEYVKANPQWQVSLQTHKYMNIP

SEQ ID NO: 34847 - protein, 236 aa, Thermoflexus hugenholtzii
  misc_feature (1)..(236): tr|A0A2A9HEW3|A0A2A9HEW3_9CHLR 7-carboxy-7-deazaguanine synthase OS=Thermoflexus hugenholtzii OX=1495650 GN=qu eE PE=3 SV=1
MERLIVARMADGGPEIFASVQGEGVSMGVPSTFVRLAICNLRCRWCDTAYTWDWQRFDRAASTMEITEEEAAASVRALPPRNVVITGGEPLLQRRQLVPLVEALRAEGYRFEVETNGTVGPGPLAELIDQFNVSPKLAHSGNEGLRRIAPAVLREFAASGRAWFKFVVAEPGDLEEVRAVCAAGGIPPERVVLMPEGTSAAVLTARGRWLAEACAREGYRFSTRLHILLWGDRRGV

SEQ ID NO: 34848 - protein, 233 aa, Thermogemmatispora argillosa
  misc_feature (1)..(233): tr|A0A455SZK2|A0A455SZK2_9CHLR 7-carboxy-7-deazaguanine synthase OS=Thermogemmatispora argillosa OX=2045280 GN =queE PE=3 SV=1
MLVMEIYRSIQGEGSLMGVPTTFVRFFACNLRCSWCDTKYSWSVREGGSWETLSPETVAERVAALGARHVVLTGGEPTLQKELPQLATLLKAQGHHLTIETNATIFPALAVPLIDLWSLSPKLPSAGSGANYLRHPVIEQFLHSLAPTQQQWKFVVRDADDEQALRALLEAHPLFKERRLPIILQPEGDAALPDYPSALAWLAECLRDPFWDQYNVRVLPQLHVLIWGRRRLV

SEQ ID NO: 34849 - protein, 233 aa, Thermogemmatispora tikiterensis
  misc_feature (1)..(233): tr|A0A328VNQ5|A0A328VNQ5_9CHLR 7-carboxy-7-deazaguanine synthase OS=Thermogemmatispora tikiterensis OX=1825093 GN=queE PE=3 SV=1
MLVMEIYRSIQGEGSLMGVPTTFVRFFACNLRCSWCDTKYSWSVREGGSWETLSPATVAERVAALGARHVVLTGGEPTLQKELPQLATLLKAQGYHLTVETNATIFPALAVPLIDLWSLSPKLPSAGSGANYLRHPVIEQFLHSLEPEHQQWKFVVRDAHDEQALRSLLEAHPLFKERRLPIIVQPEGDAALSDYPAALAWLAERVRDPFWDQYNVRVLPQLHVLIWGRRRLV

SEQ ID NO: 34850 - protein, 248 aa, Thermogutta terrifontis
  misc_feature (1)..(248): tr|A0A286RM60|A0A286RM60_9PLAN 7-carboxy-7-deazaguanine synthase OS=Thermogutta terrifontis OX=1331910 GN=queE PE=3 SV=1
MAYHPKGHTTGAAEQRLAQPLRIAEIFQSRQGEGFLTGTESVFIRVSGCNLRCRFCDTPYASWEPEGPLLTVEEILRRVENFPARHIVLTGGEPMMFPQVVPLTRHLSDRGYHVTVETAGTVYRPVQCHLMSISPKLSNSTPDRELHPRWWKEHERRRHQPDVIRRLVREYPYQIKFVIDRPEDVDEVERYLRALAEIDRNRVLLMPQGTDQEALGEKMTWLEPICQQHGFRLCPRKHIEWYGPGRGK

SEQ ID NO: 34851 - protein, 242 aa, Thermolongibacillus altinsuensis
  misc_feature (1)..(242): tr|A0A4V2QA80|A0A4V2QA80_9BACI 7-carboxy-7-deazaguanine synthase OS=Thermolongibacillus altinsuensis OX=575256 GN=queE PE=3 SV=1
MMKKIPVIEIFGPTIQGEGMLIGQKTMFVRTAGCDYSCRWCDSAFTWDGSAKKEIRQLTALNIWRELQQLGGDRFNHVTISGGNPALIQALGELVSLLKQNGIRVALETQGSRWQEWFYEIDDLTISPKPPSSGMKTDFHVLDDIIFRLTKKEKQGVSLKVVVFDDADFSYAEMVHKRYPHIPFYLQVGNDAISSNDESMLRTALLDKLNWLVEKTVQSKDMNDVRVLPQLHTLLWGNKRGV

SEQ ID NO: 34852 - protein, 228 aa, Thermomonas haemolytica
  misc_feature (1)..(228): tr|A0A4R3NC67|A0A4R3NC67_9GAMM 7-carboxy-7-deazaguanine synthase OS=Thermomonas haemolytica OX=141949 GN=queE PE=3 SV=1
MNDVADAAAASAAGQAERLKLTEIFLSLQGEARDAGWPTVFVRLTGCPLRCQYCDTAYAFHGGQWWEIDAILQEVARHGARHVCVTGGEPLAQKRCLALLEKLCDAGYVVSLETSGALDIAGVDARVSRVLDIKTPGSGEVQRNLWANLALLTARDQVKFVICSRADYDWARAVVTEHRLPEVCDVLFSPSATQLAARELADWIVADRLPVRFQVQLHKLLWGEEPGK

SEQ ID NO: 34853 - protein, 228 aa, Thermomonas hydrothermalis
  misc_feature (1)..(228): tr|A0A1M4WBR8|A0A1M4WBR8_9GAMM 7-carboxy-7-deazaguanine synthase OS=Thermomonas hydrothermalis OX=213588 GN=qu eE PE=3 SV=1
MTAVADAAAASAAGQAERLKLTEIFLSLQGEARDVGWPTVFVRLTGCPLRCQYCDTAYAFHGGQWWTLEAILAEVARFDVRHVCVTGGEPLAQKRCLQLLTRLCDAGYHVSLETSGALDIAGVDPRVSRVVDIKTPGSGEEARNLWANLDLLTPHDQVKFVICSRADYDWACAVVARHRLHTRCEVLFSPSAGQLEPRTLADWIVADRLPVRFQIQLHKLLWNDAPGH

SEQ ID NO: 34854 - protein, 228 aa, Thermomonas sp.
  misc_feature (1)..(228): tr|A0A5B7ZPX3|A0A5B7ZPX3_9GAMM 7-carboxy-7-deazaguanine synthase OS=Thermomonas sp. SY21 OX=2202149 GN=queE PE =3 SV=1
MNAVADAAAASAALQPDRLKLTEIFLSLQGEARDAGWPTVFVRLTGCPLRCQYCDTAYAFHGGQWWEIDAILAEVAAHGARHVCVTGGEPLAQKRCLQLLGKLCDAGYEVSLETSGAIDVAGVDARVSRVLDIKTPGSAEVERNLWDNLALLTPRDQVKFVICSRADFDWAKGIVAEHRLHEVCDVLFSPSATQVPARELADWIVAEKLPVRFQMQLHKFLWNDEPGR

SEQ ID NO: 34855 - protein, 285 aa, Thermophagus xiamenensis
  misc_feature (1)..(285): tr|A0A1I2F0Y2|A0A1I2F0Y2_9BACT 7-carboxy-7-deazaguanine synthase OS=Thermophagus xiamenensis OX=385682 GN=queE PE=3 SV=1
MSYLALANEGVFPITKDKDGQSQSELPATGFSFPGTIQGEGKLAGVPSLFIRLSGCNLRCIWSMPDGSFCRCDTPYASFAPERTFSMAIDDVVALVQQNLGAMKHVVITGGEPFLQHKALADLCLELKKIPQLHLSVETNGTLFSREVAQHIDLFSISPKLSNSNPTDEKITFYGLKPSGPLSYHAQRRKNLPVLQKFIDFSRENNKDFQLKFVIGNHNDYLEINKEYLSELKNWNADDILLMPLGATMEELKKTSKMVLEMAIQNGWRYAPRVHIELFGSIAGV

SEQ ID NO: 34856 - protein, 196 aa, Thermosinus carboxydivorans
  misc_feature (1)..(196): tr|A1HNF0|A1HNF0_9FIRM 7-carboxy-7-deazaguanine synthas e OS=Thermosinus carboxydivorans Nor1 OX=401526 GN=queE PE=3 SV=1
MKAIKYPVVEIFTSIQGEGTHMGLPAAFIRLAGCNLRCRWCDTVHAFDPANATYLTPDEIATGLAPQLVVITGGEPTLHDLGPLVAALHARGKYVAIETNGTNPIPEKWGIDWVTASPKPNSGYLLACQADELKYVVDDEFTLDCVADDAVPPGRIFLQVESARPESAKKAFALVMENPERGLRLGIQLHKILGVD

SEQ ID NO: 34857 - protein, 250 aa, Thermosporothrix hazakensis
  misc_feature (1)..(250): tr|A0A326UDK6|A0A326UDK6_9CHLR 7-carboxy-7-deazaguanine synthase OS=Thermosporothrix hazakensis OX=644383 GN=q ueE PE=3 SV=1
MSVAVKRAEKTIAVSEIFGPTIQGEGALIGKPTVFVRTGGCDYRCQRCDTLYAVLPEYKGDWKPMSATEIFAEIQRLSKQTPILVTLSGGNPAMQPLEALIDLGHEAGYTFTIETQGSIAQPWFAKLDYLTLSPKAPGMGNPWPTNWERLDRCLQYARQGEKQPAICLKIVIFDEVDYAYAKELAARYPEVPLYLQVGNHTPPHVSNTIDTAGLLERLDWLIQRVTEDRWYTVTVLPQLHVLLWGNKRGV

SEQ ID NO: 34858 - protein, 250 aa, Thermosporothrix sp.
  misc_feature (1)..(250): tr|A0A455SF27|A0A455SF27_9CHLR 7-carboxy-7-deazaguanine synthase OS=Thermosporothrix sp. COM3 OX=2490863 GN=qu eE PE=3 SV=1
MSVAVKRAEKTIAVSEIFGPTIQGEGALIGKPTVFVRTGGCDYRCQRCDTLYAVLPEYKGDWKPMSATEIFAEIQRLSNQTPILVTLSGGNPAMQPLEALIDLGHEAGYTFTIETQGSIAQPWFAKLDYLTLSPKAPGMGNPWPTNWERLDRCLQYARQGEKQPAICLKIVIFDEVDYAYAKELAARYPEVPLYLQVGNHTPPHVSNTIDTAGLLERLDWLIQRVTEDRWYTVTVLPQLHVLLWGNKRGV

SEQ ID NO: 34859 - protein, 243 aa, Thermosulfidibacter takaii
  misc_feature (1)..(243): tr|A0A0S3QTI4|A0A0S3QTI4_THET7 7-carboxy-7-deazaguanine synthase OS=Thermosulfidibacter takaii (strain DSM 174 41 / JCM 13301 / NBRC 103674 / ABI70S6) OX=1298851 GN=q ueE PE=3 SV=1
MKLKVSEIFCSLQGEGLRVGEPAVFLRLAGCNLRCSYCDTKYSWESGDLLEIEEVVQRVKDFDIRTLIVTGGEPTLQSTALIDLVNKLVPLKYSIMCETNGSVCDEVAIDFLNRLDMVAVSPKLKSFMGEGAADYNMESVLALLSQLSTNFFLKFVVTCWSDLDDILSFLKYCSNQQIENFEVFLQPNASLFSDVEKYVSFLRSSWERTIEFQKRLLEENLSFKVRMVPQLHRLVFWEVEEGI

SEQ ID NO: 34860 - protein, 218 aa, Thermosulfurimonas dismutans
  misc_feature (1)..(218): tr|A0A179D2Z6|A0A179D2Z6_9BACT 7-carboxy-7-deazaguanine synthase OS=Thermosulfurimonas dismutans OX=999894 GN= queE PE=3 SV=1
MPLISGDKIRLKISELFVSLQGEGPAAGYPAFFVRLSGCNLSCCWCDTPHARQPETGQEMEMPKIINRFRKSGVSQVLITGGEPLLQEGVYALMEELLALGAQVFLETNGSLSLKRVPSEVTKVMDLKPPSSGMSKYMLYENLRYLSHRDQIKFVIADEEDYRWAKEKVLGLGLNYFTEVSFSPAWGLMSPEKLAKMILRDRLPVRLQLQLHKILKLP

SEQ ID NO: 34861 - protein, 301 aa, Thermosynechococcus elongatus
  misc_feature (1)..(301): tr|A0A3B7MNY4|A0A3B7MNY4_9CYAN 7-carboxy-7-deazaguanine synthase OS=Thermosynechococcus elongatus PKUAC-SCTE54 2 OX=2016101 GN=queE PE=3 SV=1
MGRHSTYLLNTLTIFKVLSKRMPDCDQACTSPVISVKEQQTKDHFSLAQITLPLVELFSAIQGEGANVGCRQIFIRLAGCDLRCTYCDSAHTWLVPAHALIEEQAGDRHFQTVANPVTAAHILKAVQQLNTPPIHDSISLTGGEPLLHAATLALFLPLLKAHSSLPLYLETGGHHPEALEQILPYLDSVGMDIKLPSVSGECHWSAHEAFLRLCDRAPVEVFCKVIISQTTDPTDLHRLSDLVASVNPDIPVFLQPVTPVGTGRCTPPPTPAQVLAWQGQLKARLTHVRVIPQTHKFLGQR

SEQ ID NO: 34862 - protein, 301 aa, Thermosynechococcus elongatus
  misc_feature (1)..(301): tr|Q8DKG4|Q8DKG4_THEEB 7-carboxy-7-deazaguanine synthas e OS=Thermosynechococcus elongatus (strain BP-1) OX=197 221 GN=queE PE=3 SV=1
MGRHSIDLLNTLTIFKVLSGRGLHCDQACLPPVISAKEYQTKDHSSLGAIALPLVEIFSAIQGEGANVGCRQIFIRLAGCDLRCTYCDSAHTWFVPSHALIEKQTGDRHFQTVPNPVSAAHILEAVQRLNTPPIHDSISLTGGEPLLHAATLARFLPLLKAHSSLPLYLETGGHHPEALQLILPYLDSVGMDIKLPSVSGECHWSAHGVFLRLCDRAPVEVFCKVIVSRTTDPADLDRLSALVASVNPHIPIFLQPVTPVGTGRCTPPPTPDQVLKWQGQLKTRLTHVRVVPQTHKFLGQR

SEQ ID NO: 34863 - protein, 301 aa, Thermosynechococcus sp.
  misc_feature (1)..(301): tr|A0A5C2M6G3|A0A5C2M6G3_9CYAN 7-carboxy-7-deazaguanine synthase OS=Thermosynechococcus sp. CL-1 OX=2583530 GN =queE PE=3 SV=1
MGRHSTYLLNTLTIFKVLSERTPDCDQACTSPVISVKEQQTNDQFSLAPITLPLVEMFSAIQGEGANVGCRQIFIRLAGCDLRCTYCDSAHTWFVPAHALIEAQAGDRHFQTVPNPVTAAHILEAVQQLNTPPIHDSISLTGGEPLLHAATLAPFLPLLKAHSSLPLYLETGGHHPEALEQILPYLDSVGMDIKLPSVSGECHWSAHEAFLRLCDRAPVEVFCKVIISQTTDPADLDCLSALVASVNPHIPVFLQPVTPVGTGRCTPPPTPEQLLRWQAQLKAQLTQVRVVPQTHKYLGQR

SEQ ID NO: 34864 - protein, 269 aa, Thermosynechococcus sp.
  misc_feature (1)..(269): tr|V5V7A8|V5V7A8_9CYAN 7-carboxy-7-deazaguanine synthas e OS=Thermosynechococcus sp. NK55a OX=1394889 GN=queE P E=3 SV=1
MISVKEQQIKDYSSLAQIALPLVEIFSAIQGEGANVGCRQIFIRLAGCDLRCTYCDSAHTWFVPSHALIEEQSGDRHFQAIPNPVPAAHILEAVQQLNTPPIHDSISLTGGEPLLHAATLAPFLPLLKAHSSLPLYLETGGHHPEALQLILPAIDSVGMDIKLPSVSGECHWSAHEVFLRLCDRASVEVFCKVIISRTTDPADLDRLSTLVASVNPHIPVFLQPVTPVGTGRCTPPPTPEQVLKWQGQLKARLTHVRVIPQTHKFLGQR

SEQ ID NO: 34865 - protein, 243 aa, Thermosyntropha lipolytica
  misc_feature (1)..(243): tr|A0A1M5PD70|A0A1M5PD70_9FIRM 7-carboxy-7-deazaguanine synthase OS=Thermosyntropha lipolytica DSM 11003 OX=11 23382 GN=queE PE=3 SV=1
MKAYLIEIMESIQGEGLTAGMRQIFLRFGGCNLRCSYCDTGASLATPEEGFFYPQAGNSRSKEAFKNPLDTLSVIELVRRFSSSWISFTGGEPLLWSDFVRELGLKLKPAGYRFLLETNGTLVEELDKCLPLVDLISMDFKLPSATGKDNWDNHYFFLREAVTKPCYVKIVANQDTREDEIYQAFDIIGKIDRKIPVYLQPVTKEGRPDLKLLPFLLRMQEKGLNRLEDVRIMPQLHVFLGLM

SEQ ID NO: 34866 - protein, 195 aa, Thermotalea metallivorans
  misc_feature (1)..(195): tr|A0A140LAA7|A0A140LAA7_9CLOT 7-carboxy-7-deazaguanine synthase OS=Thermotalea metallivorans OX=520762 GN=que E PE=3 SV=1
MMYPVVEIFDSIQGEGSFMGCPVTFIRLAGCNLHCKWCDTNHTLKENMLVDDILKRIRYSKVVITGGEPTIHHLEPLIKALRLKKGAFVMLETNGTNSTRNIRDFVDWIVCSPKPENHWKINPLCWFDELKYVVDGHFHPDLHIEDEIKNSYQNKIWLQPESSKMHERFAEAYEMAMKYPYLRVGLQFHKILGVQ

SEQ ID NO: 34867 - protein, 332 aa, Thermotogae bacterium
  misc_feature (1)..(332): tr|A0A1V6GZ07|A0A1V6GZ07_9BACT 7-carboxy-7-deazaguanine synthase OS=Thermotogae bacterium ADurb.Bin062 OX=1852 923 GN=queE PE=4 SV=1
MFEVREALFYEEIENGSVRCLLCPRHCVIDKGQVGFCRTRKNVDGVLYTLIYGRLSSIATDPIEKKPLYHYHPGTKILSVGTWGCNMSCPWCQNHEISQGTPQTQKVDPERLVHIALDRNSPGIAYTYNEPMIWFEFVLDTSRMASADGLYNVLVTNGYVSADPFKLLLQTVQAMNIDLKGFDQRFYQKRCSADLEVVKRNIQLAYEEGVHVELTTLLIPDENDSVEKINEQCQWIASIDPAIPLHLSLYFPAYRFNKPPTDLNRAIELWKTAKKTLQYVYLGNQLESEYQRTLCPYCSNVLIERSGYQIQIVGLGEGRRCQQCHRQIPIVL

SEQ ID NO: 34868 - protein, 219 aa, Thermovibrio ammonificans
  misc_feature (1)..(219): tr|E8T5R3|E8T5R3_THEA1 7-carboxy-7-deazaguanine synthas e OS=Thermovibrio ammonificans (strain DSM 15698 / JCM 12110 / HB-1) OX=648996 GN=queE PE=3 SV=1
MITICETFVSVQGEGLTVGTPAFFIRTGKCSVGCRFCDTKYSWSSRERKSVEELVAEAERAGFQTVIVTGGEPLEEEELPHLLTALKRAKPVKQVIVETCGHTFRDDLPRNVRLVLSPKPPSMGVPFPFESVKAFLKHYREVELKFTLFNGEDLKRIKEFIEESEGLLPSPVVFQPLETPLEDYGKTCKRVAQMLLSDGELRKLPFRVIPQVHKLIGLK

SEQ ID NO: 34869 - protein, 219 aa, Thermovibrio guaymasensis
  misc_feature (1)..(219): tr|A0A420W885|A0A420W885_9BACT 7-carboxy-7-deazaguanine synthase OS=Thermovibrio guaymasensis OX=240167 GN=que E PE=3 SV=1
MRICEVFESIQGEGLTVGTPSFFIRTGRCSVGCLFCDTKYSWSSGRELRVDEIVDLVVSSGLPEVVITGGEPFEEEELPDLVELLTSLPSVRRVTVETCSYIFRELPKNKLHLVLSPKPPTMGVEFPLETLLKFLESYEDVELKYTLYDERDLDLFEGFLFSNSNLIPQPVVLQPIHHPKEDYAETFKRVWDMVRRRERLLKSFEVRLIPQVHKLLGMR

SEQ ID NO: 34870 - protein, 213 aa, Thioalbus denitrificans
  misc_feature (1)..(213): tr|A0A369C4E6|A0A369C4E6_9GAMM 7-carboxy-7-deazaguanine synthase OS=Thioalbus denitrificans OX=547122 GN=queE PE=3 SV=1
MSRLRITEVFLSLQGEARTVGLPTVFVRLTGCPLRCDWCDTEYAFQGGVWREIPELTAEVGAFGVRHVCVTGGEPLAQQAVHELLRALCDAGFEVALETSGALDVCGVDPRVSRVMDLKAPGSGEVGRNRWENLHCLTARDQVKFVLRDRADYDWACEQLRVHDLTERCEVLFSPVHGVLPPRQLAEWILADRLPVRFQLQLHKLLWGEERGR

SEQ ID NO: 34871 - protein, 220 aa, Thioalkalivibrio denitrificans
  misc_feature (1)..(220): tr|A0A1V3NKH5|A0A1V3NKH5_9GAMM 7-carboxy-7-deazaguanine synthase OS=Thioalkalivibrio denitrificans OX=108003 G N=queE PE=3 SV=1
MTSIQTDTDRLRITEIFLSLQGESRTVGWPTVFVRLTGCPLRCGYCDTAYAFTGGEWMSLDAVMERVDDYGVRHVTVTGGEPLAQKPCQVLLKRLCDQGYEVSLETSGAMEVAGVDPRVVKVMDIKTPGSGECDRNLFENLRYLTLRDQVKFVICDRADYDWAKQTVATHDIGARCEILFSPSHEQLPARELADWIVADRLDVRFQIQMHKYVWGNEPGR

SEQ ID NO: 34872 - protein, 232 aa, Thioalkalivibrio halophilus
  misc_feature (1)..(232): tr|A0A1V3A0Z8|A0A1V3A0Z8_9GAMM 7-carboxy-7-deazaguanine synthase OS=Thioalkalivibrio halophilus OX=252474 GN=q ueE PE=3 SV=1
MSVEAPLRRTSAPASASGGALRLRLSEMFVSLQGEAAQVGWPTVFVRLTGCPLRCRWCDTEYAFEGGETTDVATVLQRVTGEGARHVCVTGGEPLAQPGSRALITGLCDAGLAVTIETSGAMDVSDVDPRAGLVMDWKAPASCESGRNRAENLAYLGEGDQLKFVLANRADFEWARDALPGMGLDPAVEVLFSPVHGELEPRLLADWIVAERLPVRFQVQLHKWLWGDEPGR

SEQ ID NO: 34873 - protein, 228 aa, Thioalkalivibrio nitratireducens
  misc_feature (1)..(228): tr|L0E178|L0E178_THIND 7-carboxy-7-deazaguanine synthas e OS=Thioalkalivibrio nitratireducens (strain DSM 14787 / UNIQEM 213 / ALEN2) OX=1255043 GN=queE [H] PE=3 SV=1
MQTLAVPDRARADSTAVRLRITETFLSLQGEAAQVGWPTVFVRLTGCPLRCRWCDTTYSFTGGQMLRLDGILDTVAGFAVRHVCVTGGEPLAQPGCLALLEALCERGFAVSLETSGALDLREVDPRVRIVMDLKAPASGESARNRLDNLALLRPGDQIKFVLADRADFDWALDLLARRPRPDGVEVLFSPVYGELEPQRLAEWILEARAPVRFQLQLHKLLWGDVAGR

SEQ ID NO: 34874 - protein, 235 aa, Thioalkalivibrio paradoxus
  misc_feature (1)..(235): tr|W0DKJ8|W0DKJ8_9GAMM 7-carboxy-7-deazaguanine synthas e OS=Thioalkalivibrio paradoxus ARh 1 OX=713585 GN=queE PE=3 SV=1
MAGDGPMTQTAAVPGGARAERAPARLRITETFLSLQGEAAQVGWPTVFVRLTGCPLRCRWCDTAYSFSGGQMLGLDEILDTVAGFGVRHVCVTGGEPLAQPGCPALLEALCERGHAVSLETSGALELREVDPRVRIVMDLKAPASGESARNRLDNLERLRPGDQIKIVLADRADFDWALELLLRHPRPDGVEVLFSPVYGELEPQRLAEWILEARAPVRFQLQLHKLLWGDVAGH

SEQ ID NO: 34875 - protein, 232 aa, Thioalkalivibrio sp.
  misc_feature (1)..(232): tr|D3SF17|D3SF17_THISK 7-carboxy-7-deazaguanine synthas e OS=Thioalkalivibrio sp. (strain K90mix) OX=396595 GN= queE PE=3 SV=1
MTEIPVRATRAPTRGDSGGATQVRITEMFVSLQGEAADSGWPTAFVRLTGCPLRCRWCDSAYAFEGGEARALDSILAWVGQTGVRHVCVTGGEPLAQPGCRELLARLCDDGYRVSLETSGALDIGGLDARVTVVMDWKAPGSGEQDRNLEANIAHLAAGDQLKFVLANRADFDWACAELGRLDLAPGVEVLFSPVFGELAPRELADWIVAERLAVRFQLQLHKLLWGDQPGR

SEQ ID NO: 34876 - protein, 232 aa, Thioalkalivibrio sp.
  misc_feature (1)..(232): tr|A0A318VS47|A0A318VS47_9GAMM 7-carboxy-7-deazaguanine synthase OS=Thioalkalivibrio sp. ALE21 OX=1158175 GN=q ueE PE=3 SV=1
MNVEAPLRRATAPASASGGAPRLRLSEMFVSLQGEAAQVGWPTVFVRLTGCPLRCRWCDTEYAFEGGETTDVATVLQRVTGEGVRHVCVTGGEPLAQPGSRALITGLCDAGLAVTIETSGAMDVSDVDPRAGLVMDWKAPASCESGRNRAENLAYLGEGDQLKFVLANRADFEWARDALSGMGLDSAVEVLFSPVHGELEPRLLADWIVAERLPVRFQMQLHKWLWGDEPGR

SEQ ID NO: 34877 - protein, 227 aa, Thioalkalivibrio sulfidiphilus
  misc_feature (1)..(227): tr|B8GUI6|B8GUI6_THISH 7-carboxy-7-deazaguanine synthas e OS=Thioalkalivibrio sulfidiphilus (strain HL-EbGR7) O X=396588 GN=queE PE=3 SV=1
MSIHAPSPAPVTPQAERLRITEIFLSLQGESRSVGWPTVFVRLTGCPLRCGYCDTEYAFTGGEWMSLEAVLAQVASHGVHHVTVTGGEPLAQRACLELLTRLCDAGYEVSLETSGALDVAAVDPRVVKVMDLKTPASGEAGRNRYENLGYLSLKDQVKFVICDRADYEWARQTVATHDLTARCEVLFSPSYGQLAPRDLADWIVADRLPVRFQLQLHKILWGEEQGR

SEQ ID NO: 34878 - protein, 231 aa, Thioalkalivibrio versutus
  misc_feature (1)..(231): tr|A0A1V3BS55|A0A1V3BS55_9GAMM 7-carboxy-7-deazaguanine synthase OS=Thioalkalivibrio versutus OX=106634 GN=que E PE=3 SV=1
MTTDTLRDARGAGVIDPAAVRLRITEMFVSLQGEAAQVGWPTAFVRLTGCPLRCRWCDSEYAFEGGEALMLATILDWVGRAGVRHVCVTGGEPLAQPGCLPLLEGLCDAGFSVSLETSGAMAIAGVDPRVAIVMDWKAPASQESARNHPENIPRLRAGDQLKFVLAGREDFDWARAELERLGLAPEVEVLFSPVYGELEPRALADWIIAERLPVRFQMQLHKLLWGDQPGR

SEQ ID NO: 34879 - protein, 231 aa, Thioalkalivibrio versutus
  misc_feature (1)..(231): tr|A0A0G3GAB4|A0A0G3GAB4_9GAMM 7-carboxy-7-deazaguanine synthase OS=Thioalkalivibrio versutus OX=106634 GN=que E PE=3 SV=1
MTTDTLRDARGAGVIDPAAVRLRITEMFVSLQGEAAQVGWPTAFVRLTGCPLRCRWCDSEYAFEGGEALMLATILDWVGRAGVRHVCVTGGEPLAQPGCLPLLEGLCDAGFSVSLETSGAMEIAGVDPRVAIVMDWKAPASQEAARNRPENIPRLKAGDQLKFVLAGREDFDWARAELERLGLAPEVEVLFSPVYDELEPRALADWIIAERLPVRFQVQLHKLLWGDQPGR

SEQ ID NO: 34880 - protein, 213 aa, Thiobaca trueperi
  misc_feature (1)..(213): tr|A0A4V2V1R2|A0A4V2V1R2_9GAMM 7-carboxy-7-deazaguanine synthase OS=Thiobaca trueperi OX=127458 GN=queE PE=3 S V=1
MSYLVKEIFYTLQGEGAQAGRPAVFCRFAGCNLWSGREQDRAQAVCTFCDTDFRGTDGVGGGHFRTAEDLASAICAQWPREAGLSAPPYVVCTGGEPLLQLDAALIDALHAQGCEIAVETNGTCPAPPGLDWICVSPKAGAGIKLTVGDELKLVYPQPAAPPERFTSLTFTHFFLQPLDGPDLAVHTARAIAYCKAHPRWRLSVQTHKMLGFP

SEQ ID NO: 34881 - protein, 216 aa, Thiobacillus denitrificans
  misc_feature (1)..(216): tr|Q3SGT7|Q3SGT7_THIDA 7-carboxy-7-deazaguanine synthas e OS=Thiobacillus denitrificans (strain ATCC 25259) OX= 292415 GN=queE PE=3 SV=1
MLAPPTLRITEIFLSLQGETSRTGLATVFVRLAGCPLRCRWCDTTYSFQGGETVSLDEVLARVAGFGVSVVCVTGGEPLAQKNCLPLLARLCDAGYSVSLETSGALDVSAVDPRVSRIVDVKPPESGEVARNRWENLAHLGAHDEIKFVLADRADYEWAREVLRERALERVCPVLFSPVQGELAPAQLAEWILADRLPVRMQVQLHKLLWGSAPGR

SEQ ID NO: 34882 - protein, 219 aa, Thiobacillus denitrificans
  misc_feature (1)..(219): tr|A0A119CVC0|A0A119CVC0_THIDE 7-carboxy-7-deazaguanine synthase OS=Thiobacillus denitrificans OX=36861 GN=que E PE=3 SV=1
MESNAQTATLRLTEVFLSLQGETSRAGLPTVFVRLAGCPLRCRWCDTPYSFQGGETVPLASLLARVADYGVPTVCVTGGEPLAQKNCLPLLAALCDAGYSVSLETSGALDVSLVDARVSRIVDIKPPGSGEDARNRWENLAHLTPHDEIKFVLADHADYDWAREVVREQKLAQVCPILFSPVQGELPPAHLADWILADRLPVRMQVQLHKVLWGNTPGK

SEQ ID NO: 34883 - protein, 232 aa, Thiobacillus sp.
  misc_feature (1)..(232): tr|A0A1Q4EMT1|A0A1Q4EMT1_9PROT 7-carboxy-7-deazaguanine synthase OS=Thiobacillus sp. 0-1251 OX=1895858 GN=queE PE=3 SV=1
MVVEPTSRQQPRTKDVEASTTTLRLTEIFLSLQGETSRAGLPTVFIRLTGCPLRCRWCDTTYSFQGGETVTLTSLLARVADYGVSTVCVTGGEPLAQKNCLPLLVALCDAGYSVSLETSGALDVSKVDPRVSRIVDIKPPESGEEARNRWENIAHLTPHDEIKFVLANRADYEWAREVIQAQKLAHACPILFSPVQGELPPTQLAEWILVDRLPVRMQVQLHKILWGNTPGT

SEQ ID NO: 34884 - protein, 232 aa, Thiobacillus sp.
  misc_feature (1)..(232): tr|A0A1E4NVR3|A0A1E4NVR3_9PROT 7-carboxy-7-deazaguanine synthase OS=Thiobacillus sp. SCN 63-57 OX=1660145 GN=q ueE PE=3 SV=1
MVVEPTSRQQPRTKDAEASTTTLRLTEIFLSLQGETSRAGLPTVFIRLTGCPLRCRWCDTTYSFQGGETVTLTSLLARVADYGVSTVCVTGGEPLAQKNCLPLLVALCDAGYSVSLETSGALDVSKVDPRVSRIVDIKPPESGEEARNRWENIAHLTPHDEIKFVLANRADYEWAREVIQAQKLAQACPILFSPVQGELPPTQLAEWILADRLPVRMQVQLHKILWGNTPGT

SEQ ID NO: 34885 - protein, 213 aa, Thiocapsa marina
  misc_feature (1)..(213): tr|F9UID0|F9UID0_9GAMM 7-carboxy-7-deazaguanine synthas e OS=Thiocapsa marina 5811 OX=768671 GN=queE PE=3 SV=1
MSYSVKEIFYTLQGEGAQAGRAAVFCRFAGCNLWSGREQDRATAVCRFCDTDFRGTDGAGGGLFGDPETLAERIAAIWSEHAGPGGRPFVVLTGGEPLLQLDSGLIDALHAAGFEIAVETNGTIAVPEGVDWVCVSPKAGADLVQQSGRELKLVFPQSGLSPDDLEHLAFDHFFLQPMDGPHLQEHTRQAIAYCRARPRWRLSVQTHKLLGFP

SEQ ID NO: 34886 - protein, 213 aa, Thiocapsa rosea
  misc_feature (1)..(213): tr|A0A495VFS2|A0A495VFS2_9GAMM 7-carboxy-7-deazaguanine synthase OS=Thiocapsa rosea OX=69360 GN=queE PE=3 SV=1
MSYSVKEIFYTLQGEGAQAGRAAVFCRFAGCNLWSGREQDRAKAVCRFCDTDFRGTDGEGGGLFGDPETLADRIRATWSEHAGAGGRPFVVLTGGEPLLQLDVALIEALHARGFEIALETNGTGSVPDGVDWVCVSPKAGADLLQQSGQELKLIFPQPGLSPEDLEHLAFEHFFLQPMDGPHLQEHTRQAIAYCQTRPHWRLSIQTHKLLGFP

SEQ ID NO: 34887 - protein, 213 aa, Thiocapsa roseopersicina
  misc_feature (1)..(213): tr|A0A1H2STH4|A0A1H2STH4_THIRO 7-carboxy-7-deazaguanine synthase OS=Thiocapsa roseopersicina OX=1058 GN=queE P E=3 SV=1
MSYSVKEIFHTLQGEGAQAGRAAVFCRFAGCNLWSGREQDRATAVCRFCDTDFRGTNGEGGGVFADPETLAERIRATWSEHAGSGGRPFVVLTGGEPLLQLDLALIEALHAQGFEIALETNGTLSVPAGVDWICVSPKAGADLVRQSGAELKLVFPQPGLSPEDLEHLAFKHFFLQPMDGPHLQEHTRQAIAYCQTRPRWRLSIQTHKLLGFP

SEQ ID NO: 34888 - protein, 213 aa, Thiocapsa sp.
  misc_feature (1)..(213): tr|A0A0U5DZA3|A0A0U5DZA3_9GAMM 7-carboxy-7-deazaguanine synthase OS=Thiocapsa sp. KS1 OX=610332 GN=queE PE=3 S V=1
MSYSVKEIFYTLQGEGAQAGRAAVFCRFAGCNLWSGREQDRATAICRFCDTDFRGTDGEGGGLFRDPDALAERIRSVWPEPAGAHGRPFVVLTGGEPLLQLDVHLIAALHARGFEIAVETNGTLPVPEGVDWVCVSPKAGAELVQRTGQELKLVFPQPGLSPDDLEHLAFDHFFLQPMDGPNLQAHTRQAIAYCQTRPLWRLSIQTHKLLGFP

SEQ ID NO: 34889 - protein, 235 aa, Thioclava atlantica
  misc_feature (1)..(235): tr|A0A085TSC7|A0A085TSC7_9RHOB 7-carboxy-7-deazaguanine synthase OS=Thioclava atlantica OX=1317124 GN=queE PE= 3 SV=1
MTLRIAEIFGPTIQGEGALIGEPTVFIRAGGCDYRCSWCDSLHAVDSAYRETWRPMQPDAIWEEVRRLSGGQPLTVSISGGNPAIQDFAPVIGRGKAEGYRFACETQGSIARDWFGDLDWLVLSPKPPSSGEQVDWEAFAKCVAAGQGAGATVMKIVIFDEADFNWAREAAARFPDLPLYLQPGNPEVDPQTPVDLETLSERMLWLVDRVTEAGWFSARVLPQLHVFLWGNKRGV

SEQ ID NO: 34890 - protein, 236 aa, Thioclava dalianensis
  misc_feature (1)..(236): tr|A0A074TGH3|A0A074TGH3_9RHOB 7-carboxy-7-deazaguanine synthase OS=Thioclava dalianensis OX=1185766 GN=queE P E=3 SV=1
MSRLRIAEIFGPTIQGEGALIGEPTVFVRTGGCDYRCSWCDSLHAVDPAHRHLWQAMTTDAVWAEITRLSRGRPLTVSLSGGNPAIQDFTALIALGQAQGYRFACETQGSIAKPWFAQLDTLVLSPKPPSSGESVDWPAFDACLSAAKGAAQIVMKIVIFDETDYAWARAATDRYPALPLYLQPGNPEVDPATPVNPQDLSDRLLWLVDKTMADGWFAPRILPQLHVLLWGNKRGV

SEQ ID NO: 34891 - protein, 236 aa, Thioclava electrotropha
  misc_feature (1)..(236): tr|A0A1W9XW04|A0A1W9XW04_9RHOB 7-carboxy-7-deazaguanine synthase OS=Thioclava electrotropha OX=1549850 GN=queE PE=3 SV=1
MTTLRIAEIFGPTIQGEGALIGEPTLFVRAGGCDYRCSWCDSLHAVDSAYRHTWAPMSSEEVWTELRRLSGDRPLTISLSGGNPAIQDFGPLIALGRAAGYRFACETQGSVARPWFGDLDTLVLSPKPPSSGEQVDWGAFAKCVAAGHSARSTVMKIVIFDRADYDWAKDAHARHPDLPLYLQPGNPEVDPEVPVDPQGLADRLGWLTDTAMADNWFAPRILPQLHVLIWGNKRGV

SEQ ID NO: 34892 - protein, 236 aa, Thioclava sp.
  misc_feature (1)..(236): tr|A0A4R7KJF3|A0A4R7KJF3_9RHOB 7-carboxy-7-deazaguanine synthase OS=Thioclava sp. ES.032 OX=1798206 GN=queE PE =3 SV=1
MTTLRIAEVFGPTIQGEGALIGEPTLFVRAGGCDYRCSWCDSLHAVDSAYRHTWAPMSSEEVWTELRRLSGDRPLTISLSGGNPAIQDFGPLIALGRAAGYRFACETQGSVARPWFGDLDTLVLSPKPPSSGEQVDWDAFAACVAAGHAARSTVMKIVIFDRADYDWARDAHARHPDLPLYLQPGNPEVDPEVPVDPQDLADRLGWLTDTVMADSWFVPRILPQLHVVIWGNKRGV

SEQ ID NO: 34893 - protein, 233 aa, Thioclava sp.
  misc_feature (1)..(233): tr|A0A1C2HRU4|A0A1C2HRU4_9RHOB 7-carboxy-7-deazaguanine synthase OS=Thioclava sp. SK-1 OX=1889770 GN=queE PE=3 SV=1
MSLRIAEIFGPTIQGEGALIGEPTVFVRTGGCDYRCVWCDSPHAVDSAYRATWAKMETDEVWEKVRALSGGQPLTVSLSGGNPAIQDFGPMIAMGHAQGYRFACETQGSIAKDWFSDLDMLVLSPKPPSSQEHVDWEAFAACVATKPAKTVMKIVIFDEKDYHWARQAHARFPQLPLFLQPGNLEVDPNIAVDLSAQSARLEWLVDKAMADRWFAPRILPQLHVMIWGNKRGV

SEQ ID NO: 34894 - protein, 229 aa, Thiocystis violascens
  misc_feature (1)..(229): tr|I3Y5B3|I3Y5B3_THIV6 7-carboxy-7-deazaguanine synthas e OS=Thiocystis violascens (strain ATCC 17096 / DSM 198 / 6111) OX=765911 GN=queE PE=3 SV=1
MRGQSLLGRTGTGIADMSYRVKEIFYTLQGEGAQTGRPAVFCRFAGCNLWSGREPDRERAVCNFCDTDFRGTDGEGGGRFRDASALADRIRAAWLGDDDAGVRPYVVCTGGEPLLQLDAPLIAALHARGCEIAVETNGTCPAPLGLDWICVSPKAGAELRLIEGDELKLVYPQPEAPPERFEGLGFRYFFLQPMDGPHLAVHTAQAIDYCKAQPRWRLSVQTHKLLGIP

SEQ ID NO: 34895 - protein, 217 aa, Thioflavicoccus mobilis
  misc_feature (1)..(217): tr|L0GVN0|L0GVN0_9GAMM 7-carboxy-7-deazaguanine synthas e OS=Thioflavicoccus mobilis 8321 OX=765912 GN=queE PE= 3 SV=1
MGEDAARLRVTEIFHSLQGEGLATGERTAFVRLTGCPLRCRYCDSAYAFTGGTRLTIPAVLERVAAHQVRHVCVTGGEPLAQPACLDLLKALCDAGHQVSLETAGALDLGGVDPRVVKVMDLKAPGSGEVHRNRFENLALLTPQDQIKFVLCDEGDYRWAVAQLRTHGLERICTVLFSAAAGELAPNELAEWILRDRLPVRLQLQLHKILWGEEPGR

SEQ ID NO: 34896 - protein, 226 aa, Thioflexothrix psekupsii
  misc_feature (1)..(226): tr|A0A251X6I7|A0A251X6I7_9GAMM 7-carboxy-7-deazaguanine synthase OS=Thioflexothrix psekupsii OX=1570016 GN=que E PE=3 SV=1
MKYSEIFYSLQGEGALIGMPSVFFRSSFCNLRCHWCDTPYTSWQPESQIITVMDAVKTITDYGVHHVVITGGEPFLQKEPLAILCDELMARGHHVTIETNATLFAPVKAHLISMSPKLAHSTPLGDPIWATRHEQSRLQLAVIQQFLTHYDCQLKFVLDTAEDILEIKQLLTHLSIKPEQVILMPQGRQIKTIADKQQWLAELCKQYGFRYSPRLHIDLWEDQRGT

SEQ ID NO: 34897 - protein, 225 aa, Thiogranum longum
  misc_feature (1)..(225): tr|A0A4R1HB16|A0A4R1HB16_9GAMM 7-carboxy-7-deazaguanine synthase OS=Thiogranum longum OX=1537524 GN=queE PE=3 SV=1
MQPVLHTSSHQPAERLRVSEIFISLQGESTTIGLPTVFIRLTGCPLRCQYCDTAYAFRGGEIMATSDVVSRVGDYQVKHVTVTGGEPLAQPASLLLLERLCETGYRVSLETSGALDISQVDTRVMKVMDLKTPASGEVDKNRFENLKYLVPRDQVKFVICNREDYLWACQMLEQHAIDRHCEVLFSPAFGQQDAATLAEWIIADRLPVRFQIQLHKILWGDEPGR

SEQ ID NO: 34898 - protein, 226 aa, Thiohalobacter thiocyanaticus
  misc_feature (1)..(226): tr|A0A1Z4VPF4|A0A1Z4VPF4_9GAMM 7-carboxy-7-deazaguanine synthase OS=Thiohalobacter thiocyanaticus OX=585455 GN =queE PE=3 SV=1
MPEPSTPTLAQAAASRLRITEIFHSLQGEADTVGWPTVFVRLTGCPLRCHYCDTEYAFHGGEWMDLDAILAGVEQYGAQYVTVTGGEPLAQKACRPLLTQLCDAGYRVSLETSGALDIDRIDPRVVKVVDLKTPGSGEVGRNRYCVLEHMSPADQLKFVLCDRADYEWARDKLTEYDIPAICQVLFSPAWGQLEPRELADWILADRLPVRFQVQLHKLLWGDVPGR

SEQ ID NO: 34899 - protein, 226 aa, Thiohalobacter thiocyanaticus
  misc_feature (1)..(226): tr|A0A426QHC4|A0A426QHC4_9GAMM 7-carboxy-7-deazaguanine synthase OS=Thiohalobacter thiocyanaticus OX=585455 GN =queE PE=3 SV=1
MPELSTPTSGPAAGDRLRITEIFHSLQGEADTVGWPTVFVRLTGCPLRCHYCDTEYAFHGGEWMDLGAILTEVGQYGARHVTVTGGEPLAQKACRPLLTRLCDAGYRVSLETSGALDIDRIDPRVIKVVDLKTPGSGEVERNRYCVLEHMSPDDQIKFVLCDRADYDWAREKLTEYDIPAICQVLFSPVWGRLAPRDLADWILADRLPVRFQVQLHKLLWGDVPGR

SEQ ID NO: 34900 - protein, 225 aa, Thiohalomonas denitrificans
  misc_feature (1)..(225): tr|A0A1G5PLK7|A0A1G5PLK7_9GAMM 7-carboxy-7-deazaguanine synthase OS=Thiohalomonas denitrificans OX=415747 GN=q ueE PE=3 SV=1
MAGASRTTLRITEIFLSLQGEARDAGWPTLFVRLTGCPLRCTYCDTSYAFTGGHTMTLDAIMEEVKQVAASRGYGEVRHVCVTGGEPLAQRGCLELLARLCDADYQVSLETSGALDVSNVDVRVVRVMDLKTPGSGEQSKNRWENLKLLTGSDQVKFVIADRNDYEWARAVIKRYRIADRCEVLFSPVFGRFEPRQLADWIIEDRLPVRFQIQLHKLLWNDEAGR

SEQ ID NO: 34901 - protein, 222 aa, Thiohalophilus thiocyanatoxydans
  misc_feature (1)..(222): tr|A0A4V3H439|A0A4V3H439_9GAMM 7-carboxy-7-deazaguanine synthase OS=Thiohalophilus thiocyanatoxydans OX=381308 GN=queE PE=3 SV=1
MSDNAVIAAADRLRITEIFYSLQGEACQVGLPTVFIRLTGCPLRCGYCDTSYAFSGGQWYSLPDILAEVSRYHTRHITVTGGEPLAQKNCPALLTQLCDHGYSVSLETSGALDVCQLDPRVIKVMDLKTPSSGEQDKNLYTNLDCLNSQDQVKFVIGDRADYDWAVEMLRTYNLAGRCEVLFSPVFETLKPAELADWILHDQLPVRFQLQLHKLLWGDEPGR

SEQ ID NO: 34902 - protein, 238 aa, Thiohalorhabdus denitrificans
  misc_feature (1)..(238): tr|A0A0P9C8Y8|A0A0P9C8Y8_9GAMM 7-carboxy-7-deazaguanine synthase OS=Thiohalorhabdus denitrificans OX=381306 GN =queE PE=3 SV=1
MTSDREERLRISEIFGPTVQGEGRHIGEPTVFVRTGGCDYRCRWCDTLFAVLPEHRGEWAPMDPEEVLAEVDRLAGEPILVSLSGGNPALQPLGGLIAAGHERGHSFTLETQGSVAAAWFAALDSLTLSPKGPSSGHITRLAELEACLDAAGEGPETTFKVVVFDEADYGYARELAANYPGHPFYLQVGNPEPVGEPDPADLMARYRWLVERVTNDRWYAATVLPQLHVLAWGNQRGV

SEQ ID NO: 34903 - protein, 220 aa, Thiohalospira halophila
  misc_feature (1)..(220): tr|A0A1I1QLU1|A0A1I1QLU1_9GAMM 7-carboxy-7-deazaguanine synthase OS=Thiohalospira halophila DSM 15071 OX=11233 97 GN=queE PE=3 SV=1
MSEVADRMETLRITEIFRSLQGEARQVGWPTVFVRLTGCPLRCGWCDTTYAFTGGEAWTREAILAEVAGHGVEHVTVSGGEPLAQRGCLELLGELCDAGHRVSLETSGALDITGVDPRVERVIDLKAPGSGEAHQNRWANLEDLRPADQVKFVLADRADYEWARDVVAEHGLDRRCEVLFSPVHEGLAAQELADWIVTDALPVRFQVQLHKLLWGDEAGR

SEQ ID NO: 34904 - protein, 213 aa, Thiolapillus brandeum
  misc_feature (1)..(213): tr|W0TNE2|W0TNE2_9GAMM 7-carboxy-7-deazaguanine synthas e OS=Thiolapillus brandeum OX=1076588 GN=queE PE=3 SV=1
MSRLRVTEIFHSLQGESRSVGWPTVFVRLAGCPLRCEYCDTAYAFKGGEWMDVQEIHQQIGIYGCRHVTVTGGEPLAQKEAWPLLVSLCDAGYETSVETSGSLDISAIDPRVSIVMDIKTPGSGEVEKNRWENLSLLSEKDQIKLVIAHREDYEWARKQLQDRQLAEITEVLFSPVQGQLAPVDLADWILQDCLPVRFQLQLHKILWGDQPGR

SEQ ID NO: 34905 - protein, 213 aa, Thiomicrorhabdus sp.
  misc_feature (1)..(213): tr|A0A4P9K5J2|A0A4P9K5J2_9GAMM 7-carboxy-7-deazaguanine synthase OS=Thiomicrorhabdus sp. G1 OX=2580412 GN=queE PE=3 SV=1
MSYSIKEVFYSLQGEGFHSGRAAIFCRFSKCNLWTGREADRANAVCQFCDTDFIGTDGQNGGKFANAEALCQHLMKFWPDNNTQPFVVLTGGEPLLQVDSALIDRLHHHNFEIAIETNGTKNAPKGIDWVCMSPKANAPIILDKGNELKLVYPQAQLMPEQVADLEFDFFYLQPMDDADPKIQQANVKAALEYCLKHPKWQLSLQTHKLLGID

SEQ ID NO: 34906 - protein, 212 aa, Thiomicrospira aerophila
  misc_feature (1)..(212): tr|W0DWT1|W0DWT1_9GAMM 7-carboxy-7-deazaguanine synthas e OS=Thiomicrospira aerophila AL3 OX=717772 GN=queE PE= 3 SV=1
MSYQIKEAFYTLQGEGFHTGRPAIFCRFTQCNLWTGRESDRAQAVCQFCDTDFIGTDGQNGGRFESAASLVEHLLTLWPSSSATDPFVVLTGGEPLLQVDQTLVDAFHDFKFEIALETNGTKYPPKGIDWVCVSPKANAPWLLTKGDELKLVFPQPQLMPDQIAHMDQFKYCYLQPMDGENASSNIQRAVTYCLTHPQWRLSLQTHKILGID

SEQ ID NO: 34907 - protein, 218 aa, Thiomicrospira cyclica
  misc_feature (1)..(218): tr|F6DC01|F6DC01_THICA 7-carboxy-7-deazaguanine synthas e OS=Thiomicrospira cyclica (strain DSM 14477 / JCM 113 71 / ALM1) OX=717773 GN=queE PE=3 SV=1
MTWANTMSYQIKEAFYTLQGEGFHAGRPAIFCRFTQCNLWTGRETDRAQAICQFCDTDFIGTDGQNGGRFDTATHLVEHLLGLWPKTAKTHPFVVLTGGEPLLQADQSLVDTFHQFNFEIALETNGTKQAPEQIDWICVSPKANAPWLLTEGDELKLVFPQKNLMPDQINQAHQFKHYYLQPMDGPKVAEHTEMAVQYCLQHPQWRLSLQTHKILGID

SEQ ID NO: 34908 - protein, 221 aa, Thiomicrospira sp.
  misc_feature (1)..(221): tr|A0A3S9TPH2|A0A3S9TPH2_9GAMM 7-carboxy-7-deazaguanine synthase OS=Thiomicrospira sp. S5 OX=1803865 GN=queE P E=3 SV=1
MGYRIKEAFYSLQGEGFHSGRPAIFCRFSNCNLWTGREADRAQAVCQFCDTDFLGTDGQNGGQFKTADDLAEHLLTLWPKTHPSKNNQAWPNPFVVLTGGEPLLQVDQALVDTFHEHGFEIAIETNGTQKAPQGIDWVCVSPKAKAPLILDAGDELKLVYPQANCPPEKVAGLAFDHFYLQAMDDADPTIQARNLKATLDYCLAHPQWKLSLQTHKILGVD

SEQ ID NO: 34909 - protein, 221 aa, Thiomicrospira sp.
  misc_feature (1)..(221): tr|A0A0X3TGM5|A0A0X3TGM5_9GAMM 7-carboxy-7-deazaguanine synthase OS=Thiomicrospira sp. XS5 OX=1775636 GN=queE PE=3 SV=1
MGYRIKEAFYSLQGEGFHSGRPAIFCRFSNCNLWTGREADRAQAVCQFCDTDFLGTDGQNGGQFKTADDLAEHLLTLWPETNPSDKNPARPHPFVVLTGGEPLLQVDQTLVDTFHEHGFEIAIETNGTQKAPQGIDWICVSPKANAPLILDEGDELKLVYPQTDCPPEKVAGLTFDHFYLQAMDDANPTIQARNLKATLDYCLSHPQWKLSLQTHKILGVD

SEQ ID NO: 34910 - protein, 211 aa, Thiomonas delicata
  misc_feature (1)..(211): tr|A0A238D4J1|A0A238D4J1_THIDL 7-carboxy-7-deazaguanine synthase OS=Thiomonas delicata OX=364030 GN=queE PE=3 SV=1
MTYAVKEIFYTLQGEGANAGRAAVFCRFAGCNLWSGRESDRATAVCRFCDTDFVGTDGSLGGKYEQADMLARTIASQWPQGHAGRRLAVLTGGEPLLQVDDALVDALHAQRFEIAVETNGTVAAPAGLDWICVSPKAGAELRQIRGDELKVVVPQPGLDLDALAALDFTHRFLQPMDAPARAEHTQWAIAHCLADPRWRLSLQTHKITGIR

SEQ ID NO: 34911 - protein, 201 aa, Thiomonas sp.
  misc_feature (1)..(201): tr|A0A259Q0X2|A0A259Q0X2_9BURK 7-carboxy-7-deazaguanine synthase (Fragment) OS=Thiomonas sp. 14-66-4 OX=197045 0 GN=B7X42_02600 PE=3 SV=1
TLQGEGANAGRAAVFCRFAGCNLWSGRESDRATAVCRFCDTDFVGTDGSLGGKYEQADMLARTIASQWPQGHAGRRLAVLTGGEPLLQVDDALVDALHAQRFEIAVETNGTIAAPAGLDWICVSPKVGAELRQIRGDELKVVVPQPGLDLDALAALDFTHRFLQPMDAPARAEHTQWAIAHCLADPRWRLSLQTHKITGIR

SEQ ID NO: 34912 - protein, 211 aa, Thiomonas sp.
  misc_feature (1)..(211): tr|A0A259QFH6|A0A259QFH6_9BURK 7-carboxy-7-deazaguanine synthase OS=Thiomonas sp. 13-66-29 OX=1970448 GN=queE PE=3 SV=1
MTYAVKEIFYTLQGEGANAGRAAVFCRFAGCNLWSGRESDRATAVCRFCDTDFVGTDGSLGGKYEQADMLARTIASQWPQGHAGRRLAVLTGGEPLLQVDDALVDALHAQRFEIAVETNGTIAAPAGLDWICVSPKVGAELRQIRGDELKVVVPQPGLDLDALAALDFTHRFLQPMDAPARAEHTQWAIAHCLADPRWRLSLQTHKITGIR

SEQ ID NO: 34913 - protein, 211 aa, Thioploca ingrica
  misc_feature (1)..(211): tr|A0A090AC14|A0A090AC14_9GAMM 7-carboxy-7-deazaguanine synthase OS=Thioploca ingrica OX=40754 GN=queE PE=3 SV =1
MTYIVKEIFYTLQGEGLHTGRAAVFCRFSGCNLWSGRELDRAKAICPFCDTDFVGIDGQGGGKFNSAQALVEQVVAHWPWQLPGHPYVVCTGGEPLLQLDNALIEAFHQAGLEVAVETNGTLPLPPGIDWVCVSPKAQAPLVVQSGDELKLVFPQVDALPDKFQQLNFKYFFLQPLADSQQVENTRLAVHYCLKHPQWRLSLQTHKWLEIP

SEQ ID NO: 34914 - protein, 238 aa, Thiopseudomonas denitrificans
  misc_feature (1)..(238): tr|A0A4R6U6D9|A0A4R6U6D9_9GAMM 7-carboxy-7-deazaguanine synthase OS=Thiopseudomonas denitrificans OX=1501432 G N=queE PE=3 SV=1
MILISEIFGPTVQGEGALIGMPTVFVRTGGCDFRCNWCDTLYAVEPQFKTQWQAMDAAAIMQRVNQLSGGVPLLITLSGGNPALQPLAPLLQLGKQQGYRFAMETQASKVQPWFAQLDYLTLSPKPPSSGMHFSAGRLRECVQAAGEDTQVQLKLVVADEQDYQWARQLAADFAQLPLCLQPCNLQAATPQQPERMTDLEQLNAGYRWLVQRISEDRWFDVRILPQLHVLVWNNERGV

SEQ ID NO: 34915 - protein, 210 aa, Thiorhodococcus drewsii
  misc_feature (1)..(210): tr|G2DXJ1|G2DXJ1_9GAMM 7-carboxy-7-deazaguanine synthas e OS=Thiorhodococcus drewsii AZ1 OX=765913 GN=queE PE=3 SV=1
MSYSVKEIFYTLQGEGAQAGRPAVFCRFAGCNLWSGREADRAGAICRFCDTDFRGTDGEGGGRFEDAELLAERIRALWPDDSVAPYVVCTGGEPLLQLDSALIQALHARGCLIAVETNGTLPVPSGIDWVCVSPKAGTELRVRSGNELKLVYPQPEAPPECFDGLAFEQFFLQPMDGSDVSGNTEAALMYCKSHPHWRLTVQMHKLIGIP

SEQ ID NO: 34916 - protein, 212 aa, Thiorhodospira sibirica
  misc_feature (1)..(212): tr|G4E220|G4E220_9GAMM 7-carboxy-7-deazaguanine synthas e OS=Thiorhodospira sibirica ATCC 700588 OX=765914 GN=q ueE PE=3 SV=1
MAYQVKEIFYSLQGEGAHSGRAAVFCRFSGCNLWSGQDRDRASAVCGFCDTDFNGTDGPAGGQYADAAQLAEQIARHWQARDTACSRFVVLTGGEPLLQVDAPLLAALKAQHFQIALETNGTLPVPEGIDWVCVSPKSLHRLRVHHGDELKLVFPQPQLSPEKLTGLSFSHFFLQPMDGPNLADHQQLAAQYCLQHPPWRLSLQLHKLLGIP

SEQ ID NO: 34917 - protein, 216 aa, Thiorhodovibrio sp.
  misc_feature (1)..(216): tr|H8Z4H4|H8Z4H4_9GAMM 7-carboxy-7-deazaguanine synthas e OS=Thiorhodovibrio sp. 970 OX=631362 GN=queE PE=3 SV= 1
MAYQVHEIFHSLQGEGARSGRSALFCRFAGCNLWSGREQDRAAAICRFCDTEFRGTHGSGGGVFASAAALADHLGDLWHSQTSGAERPYIVCTGGEPLLQLDQPLIDVLHARGGEIAVETNGTIEPPVGIDWLCVSPKAGATLVATRGDELKLVFPQPGLTPEAVEALEQLEFREFFLQPCDGPERAANIDAALSYCKAHPRWRLSLQLHKLLGIR

SEQ ID NO: 34918 - protein, 213 aa, Thiothrix caldifontis
  misc_feature (1)..(213): tr|A0A1H4FUJ2|A0A1H4FUJ2_9GAMM 7-carboxy-7-deazaguanine synthase OS=Thiothrix caldifontis OX=525918 GN=queE PE =3 SV=1
MTYSVKEIFYTLQGEGFHAGRPAIFCRFAGCNLWSGLEADRAQAVCNFCDTDFVGVDGVNGGKFRDAKALVAAIIQEWWIGVKQDMNRFIVFTGGEPLLQLDKALIDALHRENFEIAVETNGTKPAPAGIDWLCVSPKADSKIVLTAGNELKLVYPQPLAMPERFAGLDFQHFYLQAMDGAAQAQNTKAAIAYCMQHPQWKLSVQTHKLLGIP

SEQ ID NO: 34919 - protein, 215 aa, Thiothrix lacustris
  misc_feature (1)..(215): tr|A0A1Y1Q9A7|A0A1Y1Q9A7_9GAMM 7-carboxy-7-deazaguanine synthase OS=Thiothrix lacustris OX=525917 GN=queE PE=3 SV=1
MDLSSLRITEIFHSLQGETRTVGLPTVFVRLTGCPLRCHYCDTAYAFTGGTSMALADIVEQVASYQAHYVTVTGGEPLAQKNCLALLSTLCDQGYEVSLETSGAITLEGVDPRVVKVMDIKTPASGEAAKNRWENLALLDSKDQLKAVICSRDDYEWFRDIAEVHDLFERCEVLISPSHTELKPRELAEWVLEDRLPVRFQLQLHKYLWNDEPGH

SEQ ID NO: 34920 - protein, 222 aa, Thiothrix sp.
  misc_feature (1)..(222): tr|A0A432UV00|A0A432UV00_9GAMM 7-carboxy-7-deazaguanine synthase OS=Thiothrix sp. OX=1032 GN=queE PE=3 SV=1
MTSNDLAAGGDRLRITEIFLSLQGESRSIGWPTVFIRLTGCPLRCTYCDTEYAFSGGEWVSLKKILVQVATYGTQHVCVTGGEPLAQKNCLLLLTRLADVGHNVSLETSGALDIHRVDFRVIKVMDIKTPGSGELSRNRLENIRLLKAQDQVKFVLCDRKDYEWAKNLLRELCIDKICEVLFSPVYSQLEPSQLAEWILADKLPVRFQIQLHKILWGEQSGR

SEQ ID NO: 34921 - protein, 217 aa, Thiotrichaceae bacterium
  misc_feature (1)..(217): tr|A0A2A5G6J7|A0A2A5G6J7_9GAMM 7-carboxy-7-deazaguanine synthase OS=Thiotrichaceae bacterium OX=2030882 GN=que E PE=3 SV=1
  misc_feature (6)..(6): Xaa can be any naturally occurring amino acid
  misc_feature (66)..(67): Xaa can be any naturally occurring amino acid
MSNQQXRLKITEIFYSLQGEALNVGLPTVFIRLTGCPLRCTYCDTEYAFTGGEWMDVDVIVNSIEXXNATHVMVTGGEPLAQKNCIELLQKLCDSGYSVSLETSGAILVDKVDHRVVKVLDIKTPASNEESKNKFENFDLLNKQDQIKFVICDENDYQWSKQLIDQQNLADRCEVLFSPAYQQQDATVLAEWILRDQLKVRFQFQLHKYLWGDKPGV

SEQ ID NO: 34922 - protein, 215 aa, Thiotrichales bacterium
  misc_feature (1)..(215): tr|A0A1H6FCP1|A0A1H6FCP1_9GAMM 7-carboxy-7-deazaguanine synthase OS=Thiotrichales bacterium HS_08 OX=1899563 G N=queE_3 PE=3 SV=1
MTYSVKEVFYTLQGEGINAGRPAVFCRFAGCNLWSGLEQDRHKASCSFCDTDFVGVNGKGGGKFATARQLALHIKHYFPETESIRGFVVFTGGEPLLQLDTPLIEALHALDFEIAVETNGTIAVPDQLDWICVSPKAGTDLVQTSGHELKLIYPQNGICPETFESLPFQYFLLQALDDPLDSNKQQQHLQQAIAYCKQHPHWRLSIQTHKWLDIP

SEQ ID NO: 34923 - protein, 227 aa, Thiotrichales bacterium
  misc_feature (1)..(227): tr|A0A2A4RNU3|A0A2A4RNU3_9GAMM 7-carboxy-7-deazaguanine synthase OS=Thiotrichales bacterium OX=2026796 GN=queE PE=3 SV=1
MVSEQDNSSGNAESAVRLRITEIFHSLQGESRTVGIPTIFIRLTGCPLRCGYCDSAYAFEGGEWMSLDQVLFNVVDKECHYVTVTGGEPLAQKGCFPLLSRLCDLGYQVSLETSGSIDITKVDPRVVKVMDLKTPGSGEEAKNRYENIKWLQNSDQVKFVICSREDYLWACNKLVEYDLPAQYEILFQAVHNDLEDRVLADWILQDRLPVRMQIQLHKLLWGDLPGK

SEQ ID NO: 34924 - protein, 212 aa, Bathymodiolus puteoserpentis
  misc_feature (1)..(212): tr|A0A483AP37|A0A483AP37_9BACT 7-carboxy-7-deazaguanine synthase OS=thiotrophic endosymbiont of Bathymodiolus puteoserpentis (Logatchev) OX=343240 GN=queE PE=3 SV=1
MNTELNINEIFYSLQGEAREVGLPTVFVRLTGCPLRCSYCDTEYAFKGNNPLSIDAILAKVKKYNTKFVCVTGGEPLAQINCYVLLDRLVKENYQVSLETSGSIDIADINPGVSIVMDIKTPSSNESDKNLYDNIEKLETKDQLKFVIGSKADFDWSVKFLSKYPTQAEVLFSSVFDAIEPAQLAQWILDGQLNVRLQVQLHKLLWGDEKGK

SEQ ID NO: 34925 - protein, 242 aa, Thiovulum sp.
  misc_feature (1)..(242): tr|J0L433|J0L433_9HELI 7-carboxy-7-deazaguanine synthas e OS=Thiovulum sp. ES OX=1177931 GN=queE PE=3 SV=1
MSIPLSEEFLSIQGEGERAGIPSIFLRFGGCNLQCRGFGVEYFVNGEKRFGCDSYFSVDKDFSSEWKTISKISEFIEILNKYPQNISDVVLTGGEPLLYAKQELFLELLNYLKNSDKTITIETNGTIKIDKKVEFQGIYFSISPKLEVSGEILKKGVSFSAVKSYQKNSEKNFLKFTLRENSEKIHQFRKEFPEIPIYCMALSGDKEELEKNAENVVKFAIEHGYRYSDRLHIRLWGDERGR

SEQ ID NO: 34926 - protein, 210 aa, Tistrella mobilis
  misc_feature (1)..(210): tr|A0A3B9IMP0|A0A3B9IMP0_9PROT 7-carboxy-7-deazaguanine synthase OS=Tistrella mobilis OX=171437 GN=queE PE=3 S V=1
MSYTVKELFLTLQGEGAQAGRTAVFCRFAGCNLWSGRERDRAGALCRFCDTDFVGTDGDGGGRFRDAQDLAAAIEGCWGAGRSRRYVVFTGGEPLLQLDEALIRAVKARGFEIAVETNGTIAAPDGIDWICVSPKAGTELVQRRGHELKLVHPQDGLDPAALEALDFGVMWVQPMDGPDRAVNTEAAVAWCLAHPRWRLSLQTHKLIGIP

SEQ ID NO: 34927 - protein, 247 aa, Tistrella mobilis
  misc_feature (1)..(247): tr|I3TXT3|I3TXT3_TISMK 7-carboxy-7-deazaguanine synthas e OS=Tistrella mobilis (strain KA081020-065) OX=1110502 GN=ygcF PE=3 SV=1
MVDRGGRMCFNSAHGQPESPARDPEDRIADARSNEDKMSYTVKELFLTLQGEGAQAGRTAVFCRFAGCNLWSGRERDRAGALCRFCDTDFVGTDGDGGGRFRDAQDLAAAIEGCWGGGRARRYVVFTGGEPLLQLDEALIHAVKARGFEIAVETNGTIAAPEGIDWICVSPKAGTELVQRRGHELKLVHPQAGLDPAALEALDFGVMWVQPMDGPDRAVNTEAAVAWCLAHPRWRLSLQTHKLIGIP

SEQ ID NO: 34928 - protein, 210 aa, Tistrella sp.; identical to SEQ ID NO: 34926
  misc_feature (1)..(210): tr|A0A2E3EHP3|A0A2E3EHP3_9PROT 7-carboxy-7-deazaguanine synthase OS=Tistrella sp. OX=2024861 GN=queE PE=3 SV=1

SEQ ID NO: 34929 - protein, 210 aa, Tistrella sp.
  misc_feature (1)..(210): tr|A0A2D8QA33|A0A2D8QA33_9PROT 7-carboxy-7-deazaguanine synthase OS=Tistrella sp. OX=2024861 GN=queE PE=3 SV=1
MSYTVKELFLTLQGEGAQAGRTAVFCRFAGCNLWSGRERDRAGALCRFCDTDFVGTDGDGGGRFRDAQDLAAAIEGRWGAGRSRRYVVFTGGEPLLQLDEALIRAVKARGFEIAVETNGTIAAPDGIDWICVSPKAGTELVQRRGHELKLVHPQDGLDPAALEALDFGVMWVQPMDGPDRAVNTEAAVAWCLAHPRWRLSLQTHKLIGIP

SEQ ID NO: 34930 - protein, 225 aa, Tolumonas auensis
  misc_feature (1)..(225): tr|C4LAB5|C4LAB5_TOLAT 7-carboxy-7-deazaguanine synthas e OS=Tolumonas auensis (strain DSM 9187 / TA4) OX=59549 4 GN=queE PE=3 SV=1
MMSNHYPINEIFQSIQGEGFFSGVPAIFVRLQGCKVGCSWCDTKHSWELDADNLIPVRQLFTDKKPKAGWSWLSPEEILSCFSAEEYTARHVVITGGEPCEYDLMVLSQTLIAHGYRVQIETSGTQPVQADDACWVTVSPKINMAGGYDVLPDVLLRANEIKHPVATAKHIAQLDALLAGIDTSEKVICLQPISQKSRATELAMKICIQRNWRLSVQLHKYLDIE

SEQ ID NO: 34931 - protein, 225 aa, Tolumonas sp.
  misc_feature (1)..(225): tr|A0A5C7QYD7|A0A5C7QYD7_9GAMM 7-carboxy-7-deazaguanine synthase OS=Tolumonas sp. OX=1978237 GN=queE PE=3 SV=1
MQSHHYPINEIFQSIQGEGYFSGVPAIFVRLQGCKVGCSWCDTKHSWELDAENLIPVRQLFTEKKPKAGWSWFTPEEILRCFSEQGYSVKHVVITGGEPCEYDLMALSQSLIAHGYRVQIETSGTQPIRADDRCWVTVSPKIRMAGGYSVLPEALNRANEIKHPVATAKNIAQLDELLAGVELSAKVVCLQPISQKSRATELAMEVCIQRNWRLSVQLHKYLNIE

SEQ ID NO: 34932 - protein, 265 aa, Tolypothrix bouteillei
  misc_feature (1)..(265): tr|A0A0C1QXL7|A0A0C1QXL7_9CYAN 7-carboxy-7-deazaguanine synthase OS=Tolypothrix bouteillei VB521301 OX=1479485 GN=queE PE=3 SV=1
MTAKTTVTPTARLIEIFSAIQGEGLNVGTRQIFIRFALCDLRCHFCDSAHTWHAPATCRIERTPGLRDFETYSNPVTLPALLQWVEWQNLPFVHDTISLTGGEPLLHASFLLEFLPQVRSVTGLPIYLETGGHRPKQLAAILPYLDSVGMDFKLPSTSGESHWQEHAEFLQLCHTAKVELFVKLIVSQTTDPSELERSAELVASVDPSIPVFLQPVTPLDTSLNLTDKPQLAPFPEQVLTWQALMKRLVKQVRVIPQTHKMLNQL

SEQ ID NO: 34933 - protein, 265 aa, Tolypothrix campylonemoides
  misc_feature (1)..(265): tr|A0A0C2PST1|A0A0C2PST1_9CYAN 7-carboxy-7-deazaguanine synthase OS=Tolypothrix campylonemoides VB511288 OX=12 45935 GN=queE PE=3 SV=1
MSVKNTITPTARLIEVFSAIQGEGLNVGTRQIFIRFALCDLRCHFCDSAHTWNAPATCKIEQTPGLRDFEIYSNPVPLPMLLKWVERQNLPCLHDTISLTGGEPLLHTPFLLEFLPEVRSVTGLPIYLETGGHRPEQLDIILPYVDSVGMDFKLPSTSGENRWREHAEFLQLCWNSQVEVFVKIIVSQTTDPTELEDSAQLVASVSPSIPVFLQPVTPLDDLIAFNQPPMLAPSPSQVLNWQSLMKRFIKQVRVVPQTHKMLNQL

SEQ ID NO: 34934 - protein, 265 aa, Tolypothrix sp.; identical to SEQ ID NO: 30258
  misc_feature (1)..(265): tr|A0A0D6KR07|A0A0D6KR07_9CYAN 7-carboxy-7-deazaguanine synthase OS=Tolypothrix sp. PCC 7601 OX=1188 GN=queE P E=3 SV=1

SEQ ID NO: 34935 - protein, 218 aa, Tolypothrix sp.
  misc_feature (1)..(218): tr|A0A218QMU2|A0A218QMU2_9CYAN 7-carboxy-7-deazaguanine synthase OS=Tolypothrix sp. NIES-4075 OX=2005459 GN=qu eE PE=3 SV=1
MLDIKTGSTIVQILEIKLPIHETFQSTVQGEGYWTGSLVDFIRLSGCPVGCPWCDTGYGDGGAKLPRKERSIQELLAELKSPRVVISGGEPFIQKHLPDLVQALLAAGKEVCIETSGSFWQEISPAAWITLSPKGHVNPRYPVQKQFWSRANEVKIVIGTGTEVDFYQEHLSAQSNLPVYLQPEWNNSAKTLPLILQLLQQKPHYRLSLQTHKYIGVQ

SEQ ID NO: 34936 - protein, 265 aa, Tolypothrix tenuis; identical to SEQ ID NO: 27931
  misc_feature (1)..(265): tr|A0A1Z4MWA6|A0A1Z4MWA6_9CYAN 7-carboxy-7-deazaguanine synthase OS=Tolypothrix tenuis PCC 7101 OX=231146 GN=q ueE PE=3 SV=1

SEQ ID NO: 34937 - protein, 223 aa, Trabulsiella guamensis
  misc_feature (1)..(223): tr|A0A085A889|A0A085A889_9ENTR 7-carboxy-7-deazaguanine synthase OS=Trabulsiella guamensis ATCC 49490 OX=10059 94 GN=ygcF PE=3 SV=1
MQYPINEMFQTLQGEGYFTGVPAIFIRLQGCPVGCAWCDTKHTWDKLADREVSLFSILAKTKESDKWGAASAEDLLAIIGRQGWTARHVVITGGEPCIHDLTLLTTLLEHNGCSCQIETSGTHEVRCSHATWVTVSPKVNMRGGYNVLSQALQRADEIKHPVGRVRDIEALDELLATLTDDKQRVIALQPISQKDDATRLCIETCIARNWRLSMQTHKYLNIA

SEQ ID NO: 34938 - protein, 223 aa, Trabulsiella odontotermitis
  misc_feature (1)..(223): tr|A0A0L0H0Z8|A0A0L0H0Z8_9ENTR 7-carboxy-7-deazaguanine synthase OS=Trabulsiella odontotermitis OX=379893 GN=q ueE PE=3 SV=1
MQYPINEMFQTLQGEGYFTGVPAIFIRLQGCPVGCAWCDTKHTWDKLADREVSLFSILAKTKESDKWGAASAEDLLAIIGRQSWTARHVVITGGEPCIHDLTPLTTLLEHNGFSCQIETSGTHEVRCSHATWVTVSPKVNMRGGYGVLTQALQRADEIKHPVGRVRDIEALDELLDTLTDDKQRVIALQPISQKDDATRLCIETCIARNWRLSMQTHKYLNIA

SEQ ID NO: 34939 - protein, 221 aa, Trichococcus collinsii
  misc_feature (1)..(221): tr|A0A143YUD1|A0A143YUD1_9LACT 7-carboxy-7-deazaguanine synthase OS=Trichococcus collinsii OX=157076 GN=queE P E=3 SV=1
MVLQVVEKFVSINGEGRRCGQLATFIRFAGCNLNCGYCDTAWANDRKVAFDPMTAEEVYAYIKDTQVTNVTLTGGEPLLQQDMGELLELLSQDPDLYVEIETNGSVLLSKFSDLDNPPSFTMDYKLPSSGMERMMALENFDHLTEKDTVKFVSGSMTDLEKARELINKYNLTEKTNIFISPVFGDIELESIVDFMKDNQMNGVNMQVQLHKIIWDPNERGV

SEQ ID NO: 34940 - protein, 219 aa, Trichococcus ilyis
  misc_feature (1)..(219): tr|A0A143YHJ0|A0A143YHJ0_9LACT 7-carboxy-7-deazaguanine synthase OS=Trichococcus ilyis OX=640938 GN=queE PE=3 SV=1
MQVVEKFVSINGEGRRCGQLATFIRFAGCNLNCGYCDTAWANDRKVAFDPMTPEEVYAYIKDTQVTNVTLTGGEPLLQQDIGELLELLSQDPQLYVEIETNGSVLLSRFSDLENPPSFTMDYKLPYSGMERMMALDNFEQLTAKDTVKFVSGSLADLEKAKEMIDRYKLTEKTAVFISPIFGEIELETIVDFMKDNQLNGVNMQVQLHKVIWDPNERGV

SEQ ID NO: 34941 - protein, 238 aa, Trichococcus palustris
  misc_feature (1)..(238): tr|A0A143YEA6|A0A143YEA6_9LACT 7-carboxy-7-deazaguanine synthase OS=Trichococcus palustris OX=140314 GN=queE P E=3 SV=1
MKRRQTAQPTKKAGLNKMVLQVVEKFVSINGEGSRCGQLATFIRFAGCNLNCGYCDTAWANDRKVAFVPMSAEEIYGYIKDTKVTNVTLTGGEPLLQKDIGTLLALLSKDPELYVEIETNGSVLLSKFSDLENPPSFTMDYKLPSSGMERMMALDNFDHLTNNDTVKFVSGSLEDLEKAKELINKYKLTEKTNIFISPVFGDIQLESIVDFMKDNNMNGVNMQVQLHKIIWDPNERGV

SEQ ID NO: 34942 - protein, 221 aa, Trichococcus pasteurii
  misc_feature (1)..(221): tr|A0A1W1IFU5|A0A1W1IFU5_9LACT 7-carboxy-7-deazaguanine synthase OS=Trichococcus pasteurii OX=43064 GN=queE PE =3 SV=1
MVLQVVEKFVSINGEGRRCGQLATFIRFAGCNLNCGYCDTAWANDRKVAFDPMTAEEVYAYIKDTQVTNVTLTGGEPLLQQDMGELLELLSQDSELYVEIETNGSVLLSKFSDLENPPSFTMDYKLPSSGMERMMALENFDHLTEKDAVKFVSGSMADLEKARELINAYKLTEKASVFISPVFGDIELESIVDFMKDNQMNGVNMQVQLHKIIWDPNERGV

SEQ ID NO: 34943 - protein, 221 aa, Trichococcus patagoniensis
  misc_feature (1)..(221): tr|A0A2T5IJ19|A0A2T5IJ19_9LACT 7-carboxy-7-deazaguanine synthase OS=Trichococcus patagoniensis OX=382641 GN=qu eE PE=3 SV=1
MVLQVVEKFVSINGEGRRCGQLATFIRFAGCNLNCGYCDTAWANDRKVAFDPMTAEEVYAYIKDTQVTNVTLTGGEPLLQQDIGGLLELLSQDPELYVEIETNGSVLLSRFSGLENPPSFTMDYKLPSSGMERMMALDNFDQLTEKDTVKFVSGSLQDLEKARELIDRYKLTEKTAVFISPIFGEIELETIVDFMKDNQLNGVNMQVQLHKIIWDPNERGV

SEQ ID NO: 34944 - protein, 221 aa, Trichococcus sp.
  misc_feature (1)..(221): tr|A0A383TDR2|A0A383TDR2_9LACT 7-carboxy-7-deazaguanine synthase OS=Trichococcus sp. ART1 OX=2094020 GN=queE P E=3 SV=1
MVLQVVEKFISINGEGRRCGQLATFIRFAGCNLNCGYCDTAWANDRKVAFDPMTAEEVYAYIKETQVTNVTLTGGEPLLQQDMGELLELLSQDPELYVEIETNGSVLLSKFSDLENPPSFTMDYKLPSSGMERMMALENFDHLTEKDTVKFVSGSMEDLEKARELINKYKLTEKTSIFISPVFGDIELESIVDFMKDNQMNGVNMQVQLHKIIWDPNERGV

SEQ ID NO: 34945 - protein, 207 aa, Trichodesmium erythraeum
  misc_feature (1)..(207): tr|Q11A86|Q11A86_TRIEI 7-carboxy-7-deazaguanine synthas e OS=Trichodesmium erythraeum (strain IMS101) OX=203124 GN=queE PE=3 SV=1
MTENLIIPIHETFQKTIQGEGYWAGTPVDFIRLAGCPVGCHYCDTGYADGGISLPRQIQTLDKLINELFSPRVVISGGEPFIHKQLPALINRIEATGRQVSIETSGCYWQNISPNAWVTLSPKEHISHKYPIVPSMWTRASEIKLVIETGKELEFYSKILLLKNQTPVFLQPEWYNRDFTLPLVQKLLQEYPHCRLSIQLHKYLGIK

SEQ ID NO: 34946 - protein, 264 aa, Trichormus variabilis
  misc_feature (1)..(264): tr|A0A1Z4KLE1|A0A1Z4KLE1_ANAVA 7-carboxy-7-deazaguanine synthase OS=Trichormus variabilis NIES-23 OX=1973479 G N=queE PE=3 SV=1
MTAKTTAEPTARLVEVFSAIQGEGLNVGTRQIFIRFAFCDLRCHFCDSAHTWNAPASCRIERSPGLRDFESHPNPVPLTTLIEWVERQNLPCLHDSISLTGGEPLLHAPFLQEFLPKVRSLTGLPIYLETGGHRPEQLATILPYLDSVGMDLKLPSVSGESHWQAHSQFLQLCLTQSETFVKIIISHRTNLAELERAALLVADVSPEIPVFLQPVTPLAESEQFSPTPALAPAPADVLTWQASMKRFLKYVRVVPQTHKMLNQL

SEQ ID NO: 34947 - protein, 289 aa, Trichormus variabilis
  misc_feature (1)..(289): tr|A0A3S1ADX3|A0A3S1ADX3_ANAVA 7-carboxy-7-deazaguanine synthase OS=Trichormus variabilis SAG 1403-4b OX=44771 6 GN=queE PE=3 SV=1
MEQEAKNVLVVVQNQCDRAAIYHLMIAKTRVKPTARLVEVFSAIQGEGLNVGTRQIFIRFGLCDLRCHFCDSPHTWNAPSMCKIERSPGLRDFEIHSNPVPLPILIEWVERQNLPSLHDSISLTGGEPLLHAPFLAQFLPIVRSLTHLPIYLETGGHRPEELGLILPYLDSVGMDLKLPSVSGETYWTEHKKFLQICFDANLEIFVKIIVSQKTEPAELERSAMLVAAVSQDIPIFLQPVTPLADPEKFSQVPVTAPTPDQVLGWQALMKQFVKSVRVIPQTHKMLNQM

SEQ ID NO: 34948 - protein, 210 aa, Trinickia caryophylli
  misc_feature (1)..(210): tr|A0A1X7FAQ5|A0A1X7FAQ5_TRICW 7-carboxy-7-deazaguanine synthase OS=Trinickia caryophylli OX=28094 GN=queE PE= 3 SV=1
MTYAVKEIFYTLQGEGANAGRPAVFCRFAGCNLWSGREEDRESAVCRFCDTDFVGTNGENGGKYRDAGALVEKIASLWPAGERHRFVVCTGGEPMLQMDEPLVRALHEAGFEVAIETNGSLPVLESIDWVCVSPKADAPLVVTKGNELKVVVPQENQRLAEYAALDFEYFLVQPMDGPARELNTRLAIDWCKRHPKWRLSMQTHKYLNIP

SEQ ID NO: 34949 - protein, 210 aa, Trinickia soli
  misc_feature (1)..(210): tr|A0A2N7VLG0|A0A2N7VLG0_9BURK 7-carboxy-7-deazaguanine synthase OS=Trinickia soli OX=380675 GN=queE PE=3 SV=1
MTYAVKEIFYTLQGEGANAGRPAVFCRFAGCNLWSGREEDRESAVCRFCDTDFVGTDGENGGKYRDAGALVDRIASLWPAGEAHRFVVCTGGEPMLQMDEPLVAALHRAGFEVAIETNGSLPVLDSIDWVCVSPKADAPLVVTKGNELKVVVPQDNQRLSEYAELDFEHFLVQPMDGPARELNTRLAIDWCKRHPRWRLSMQTHKYLNIP

SEQ ID NO: 34950 - protein, 210 aa, Trinickia sp.
  misc_feature (1)..(210): tr|A0A4U1HV42|A0A4U1HV42_9BURK 7-carboxy-7-deazaguanine synthase OS=Trinickia sp. 7GSK02 OX=2571161 GN=queE PE =3 SV=1
MTYAVKEIFYTLQGEGTNAGRPAVFCRFAGCNLWSGREEDRAEAVCRFCDTDFVGTDGENGGKYKSADELVALIASLWPEGEGHRFVVCTGGEPMLQIDPPFVDALHAAGFEIAIETNGSLPVLETIDWICVSPKADAPLVVTKGNELKVVIPQENQRLADYAKLDFDHFLVQPMDGPSRDLNTKLAIDWCKRHPQWRLSMQTHKYLNIP

SEQ ID NO: 34951 - protein, 210 aa, Trinickia symbiotica
  misc_feature (1)..(210): tr|A0A2N7X7Q1|A0A2N7X7Q1_9BURK 7-carboxy-7-deazaguanine synthase OS=Trinickia symbiotica OX=863227 GN=queE PE= 3 SV=1
MTYAVKEVFYTLQGEGANAGRPAVFCRFAGCNLWSGREEDRESAVCRFCDTDFIGTDGENGGKYRDAAALVDKIASLWPTGEDYRFVVCTGGEPMLQLDAPLIDALHAAGFEVAIETNGSLPVLESIDWVCVSPKADAPLVVTKGDELKVVIPQDNQRLAEYAALDFDHFLVQPMDGPSRDINTRLAIDWCKRHPKWRLSMQTHKYLNIP

SEQ ID NO: 34952 - protein, 210 aa, Trinickia symbiotica
  misc_feature (1)..(210): tr|A0A2T3XYV5|A0A2T3XYV5_9BURK 7-carboxy-7-deazaguanine synthase OS=Trinickia symbiotica OX=863227 GN=queE PE= 3 SV=1
MTYAVKEIFYTLQGEGANAGRPAVFCRFAGCNLWSGREEDRESAVCRFCDTDFVGTDGENGGKYRDAAALVAKIASLWPTGEDYRFIVCTGGEPMLQLDAPLVDALHTAGFEVAIETNGSLPVLESIDWVCVSPKADAPLVVTKGNELKVVIPQDNQRLAEYAALDFDHFLVQPMDGPSRDLNTRLAIDWCKRHPKWRLSMQTHKYLNIP

SEQ ID NO: 34953 - protein, 235 aa, Tropicibacter phthalicicus
  misc_feature (1)..(235): tr|A0A238JEX5|A0A238JEX5_9RHOB 7-carboxy-7-deazaguanine synthase OS=Tropicibacter phthalicicus OX=1037362 GN=q ueE PE=3 SV=1
MTLRIAEIFGPTIQGEGALIGEPTVFVRTGGCDYRCSWCDSLHAVDSAHRHDWHPMSAEAVWDEVERLSGGTPLTVSLSGGNPAIQDFTQVMALGQSKGYRFACETQGSIAKPWFGALETLVLSPKPPSSGETVDWADFEDCIAATGAKTQVVMKIVIFDANDYDWARAAAGRYPDLPLYLQPGNPDVDPDLPIKTQDSLDRMLWLVEKVTSDGWFTPRILPQLHVLLWGNKRGV

SEQ ID NO: 34954 - protein, 218 aa, Tumebacillus algifaecis
  misc_feature (1)..(218): tr|A0A223D451|A0A223D451_9BACL 7-carboxy-7-deazaguanine synthase OS=Tumebacillus algifaecis OX=1214604 GN=queE PE=3 SV=1
MRLNELFLSIQGETSSAGLPTIFVRFTGCNLRCTYCDTKYSYFEGDTITPGEVMDKIRALKCKRVCLTGGEPLIQPRAEMQQLLDLLAAEGYEVSIETDGSIDISKFKLHDKQRFIVDMKVPSSGMSDKMHLPNLQHIVAERDEVKFVVGNREDYEWCTRLIAEQGIDPKDGYQLVFSPVYREIELVDLVNWILEDQLDARFQVQLHKIVWDPDKRGV

SEQ ID NO: 34955 - protein, 218 aa, Tumebacillus avium
  misc_feature (1)..(218): tr|A0A1Y0IMP2|A0A1Y0IMP2_9BACL 7-carboxy-7-deazaguanine synthase OS=Tumebacillus avium OX=1903704 GN=queE PE=3 SV=1
MRLNELFLSIQGETSSAGLPTIFVRFTGCNLRCTYCDTKYSYFEGDIITPDEVMDKIRALKCKRVCLTGGEPLIQPRAEMQRLLDLLAEESYEVSIETDGSIDVSKFQLHAKQRFIVDMKVPSSGMSEKMHLPNLQHIVAERDEVKFVVGSRADYEWCTALIREQGIHPKDGYQLIFSPVFREIELEDLVNWILEDELDARFQVQLHKIVWDPDKRGV

SEQ ID NO: 34956 - protein, 218 aa, Tumebacillus flagellatus
  misc_feature (1)..(218): tr|A0A074LNU4|A0A074LNU4_9BACL 7-carboxy-7-deazaguanine synthase OS=Tumebacillus flagellatus OX=1157490 GN=que E PE=3 SV=1
MRLNELFLSIQGETSSAGLPTIFVRFTGCNLRCTYCDTKYSYYEGDPITPEQVMEQIRALKVKRVCLTGGEPLIQPRQETQVLLDMLANEGYEVSIETDGSIDISKYTMHENQRFIVDMKVPSSGMSERMHWANLRHLVPNRDEVKFVVGNREDYEWCTNLVREYDLDPAKGYQLIFSPIFREIELEQLVNWILEDGLDARFQVQLHKIVWDPDKRGV

SEQ ID NO: 34957 - protein, 218 aa, Tumebacillus permanentifrigoris
  misc_feature (1)..(218): tr|A0A316D8H4|A0A316D8H4_9BACL 7-carboxy-7-deazaguanine synthase OS=Tumebacillus permanentifrigoris OX=378543 GN=queE PE=3 SV=1
MRLNELFLSIQGETASAGLPTIFVRFTGCNLRCTYCDTKYSYFEGDTITPADVMDKIRELKVKRVCLTGGEPLIQPRQEMQLLLDLLGAEGYEVSIETDGSIDISKFALHDKQRFIVDMKVPSSGMSENMHLENLRHIRPTRDEVKFVVGNRADYEWCVDLIREHDIHPSKGYQLLFSPVFREIDLEEMVNWILADELDARFQVQLHKIVWDPDKRGV

SEQ ID NO: 34958 - protein, 218 aa, Tumebacillus sp.
  misc_feature (1)..(218): tr|A0A4R2R0N1|A0A4R2R0N1_9BACL 7-carboxy-7-deazaguanine synthase OS=Tumebacillus sp. BK434 OX=2512169 GN=queE PE=3 SV=1
MRLNELFLSIQGETSSAGLPTIFVRFTGCNLRCTYCDTKYSYYEGDTITPDEVMDKIRALKCKRVCLTGGEPLIQPRAEMQDLLDKLAEEGYEVSIETDGSIDVSKFKLHPKQRFIVDMKVPSSGMSAKMHLPNLQHIVAERDEVKFVVGSRADYEWCTQLIREQGIHPKDGYQLIFSPVFREIELEDLVNWILEDELDARFQVQLHKIVWDPDKRGV

SEQ ID NO: 34959 - protein, 222 aa, Turicibacter sanguinis
  misc_feature (1)..(222): tr|D4W838|D4W838_9FIRM 7-carboxy-7-deazaguanine synthas e OS=Turicibacter sanguinis PC909 OX=702450 GN=queE PE= 3 SV=1
MYQVIEKFISIDGEGPCAGQLAAFIRFKNCNLRCDWCDTCYSYDGSVEGENLSPLEIYHFVKENKVNHVTLTGGEPLIQPQIEVLIGILAADKELTIHIETNGSVNIQRFKKKFSKSNVVFILDYKLPNSLMQSRMDDENFKWVTKTDVYKFVIASQEDLKVAHEVIREQGLLERCLVYFSPVVDYINPSLIVDYMKDHQLNDVRLQLQLHKYIWPKEMRGV

SEQ ID NO: 34960 - protein, 222 aa, Turicibacter sanguinis
  misc_feature (1)..(222): tr|A0A174UPG4|A0A174UPG4_9FIRM 7-carboxy-7-deazaguanine synthase OS=Turicibacter sanguinis OX=154288 GN=queE P E=3 SV=1
MFNVIETFVSIDGEGPTSGELATFIRFSSCNLKCIWCDTTYSWDGTACITKMSTKEIYELIKKAGTKNVTLTGGEPLIQPNIEWLLDALAEDEALSIHVESNGSIDITGLKERYKNSNIHFILDYKCPTSKMSAQMCHQNLNVVDQQDVYKFVVAGYEDLHMALSIIKSYHLTKKCRVYLSPVTEFIEPSKIVEFMKEHQLNDVRLQLQLHKYIWPKEMRGV

SEQ ID NO: 34961 - protein, 222 aa, Turicibacter sp.
  misc_feature (1)..(222): tr|A0A109RMQ3|A0A109RMQ3_9FIRM 7-carboxy-7-deazaguanine synthase OS=Turicibacter sp. H121 OX=1712675 GN=queE P E=3 SV=1
MFNVIETFVSIDGEGPTSGELATFIRFSSCNLKCIWCDTTYSWDGTACITKMSTKEIYELIKKAGTKNVTLTGGEPLIQPNIELLLDALAEDEALSIHVESNGSIDITGLKERYKNSNIHFILDYKCPTSKMSAQMCHQNLNVVDQQDVYKFVVAGYEDLHMALSIIKSYHLTKKCRVYLSPVTEFIEPSKIVEFMKEHQLNDVRLQLQLHKYIWPKEMRGV

SEQ ID NO: 34962 - protein, 224 aa, Turneriella parva
  misc_feature (1)..(224): tr|I4BC20|I4BC20_TURPD 7-carboxy-7-deazaguanine synthas e OS=Turneriella parva (strain ATCC BAA-1111 / DSM 2152 7 / NCTC 11395 / H) OX=869212 GN=queE PE=3 SV=1
MDVTAKREDLKLTVNEIFYSIQGEGSYALHPCVFVRLTGCNLRCTWCDTTYSFYEGEPQTITQILQTVTGYAAKNVEITGGEPLLQKNVYPLMHALHESGHKVLLETSGSVKVNQVPQFVHTILDMKAPGSGEHKKNRYENLQLLKSSDDLKIVIANHEDFQFAEDLIREHKVEALLQNPVIIQPVFGELNLAEAGEWLKNSPLNLRLGMQLHKYIYEPTLRAV

SEQ ID NO: 34963 - protein, 208 aa, Tychonema bourrellyi
  misc_feature (1)..(208): tr|A0A2G4EZA8|A0A2G4EZA8_9CYAN 7-carboxy-7-deazaguanine synthase OS=Tychonema bourrellyi FEM_GT703 OX=2040638 GN=queE PE=3 SV=1
MSILQVKLPIHETFQSTVQGEGFWTGTLVDFIRLAGCPVGCPWCDTGYANGGKGLPIVPRSIAQLLAQLQSPRVVITGGEPFIHRDLPELVEALLAADKQVSIETSGAYWLDISPLAWITLSPKEHVNPKYPVKELFWTRSNEIKLVVSTGEEVEFYHNHLANNVNIPVFLQPEWNSKISVIPIILELLKQNHSYRLSLQTHKFIGVQ

SEQ ID NO: 34964 - protein, 219 aa, Tyzzerella sp.
  misc_feature (1)..(219): tr|A0A1Y4UDN3|A0A1Y4UDN3_9FIRM 7-carboxy-7-deazaguanine synthase OS=Tyzzerella sp. An114 OX=1965545 GN=queE PE =3 SV=1
MKVVEKFVSINGESRRAGELAVFIRFKGCNLHCCYCDTKWANETDCDFEELTVEEILSYIISTNVKNVTLTGGEPLLQPEIGSLLKALSQYPEIRVEIETNGSVSIEPFCNDDYRPSFTMDYKLPESGCENDMCLENFCFLKNTDTVKFVCSSIDDLKKAKYIIEKYNLTKICAVYISPVFGKIEPADMVSYMIENNLNDIKLQIQMHKVIWDPNLKGV

SEQ ID NO: 34965 - protein, 217 aa, Uliginosibacterium sp.
  misc_feature (1)..(217): tr|A0A2N4XTX4|A0A2N4XTX4_9RHOO 7-carboxy-7-deazaguanine synthase OS=Uliginosibacterium sp. TH139 OX=2067453 GN =queE PE=3 SV=1
MAAAAPRLRISEIFHSLQGESTRVGLPTVFVRLTGCPLRCVWCDTEYAFTGGKMRELEDILAEVAGYGARHVCVTGGEPLAQKPCLTLLTALCDAGYSVSLETSGALDVSEVDARVSKIMDLKAPGSGEVDKNLWSNLAHITAQDEIKVVVADEADYQWTRAVLAEHGLTSRCTVLLSPVQGKLDPQDLAAWILRDRLTVRMQLQMHRIIWGERTGV

SEQ ID NO: 34966 - protein, 209 aa, Ulvibacter antarcticus
  misc_feature (1)..(209): tr|A0A3L9YRC2|A0A3L9YRC2_9FLAO 7-carboxy-7-deazaguanine synthase OS=Ulvibacter antarcticus OX=442714 GN=queE P E=3 SV=1
MKKDIKALVDKGEMLPLMEEFYTIQGEGFHKGTAAYFIRVGGCDVGCHWCDVKESWNAELHPPTDIDTIVNNAAKYSKTIVVTGGEPLTWNMDPLTNALKSKGMQLHIETSGAYKLSGTWDWICLSPKKIKLPTEEVYEFAHELKVIIFNKDDFKFAEEQAAKVNKDCILYLQPEWSKREKMIPLLVDYVMENPKWKVSLQTHKYLNIP

SEQ ID NO: 34967 - protein, 209 aa, Ulvibacter litoralis
  misc_feature (1)..(209): tr|A0A1G7BTY4|A0A1G7BTY4_9FLAO 7-carboxy-7-deazaguanine synthase OS=Ulvibacter litoralis OX=227084 GN=queE PE= 3 SV=1
MQEDIKELVNKGEMLPLMEEFYTIQGEGFHKGTAAYFVRIGGCDVGCHWCDVKESWNATLHPPTHTNKIVDNAASYSNTVVVTGGEPLTWDMGPLTKQFKEKGMQVHIETSGAYKLSGTWDWICLSPKKIKLPQPEIYEVAHELKVIIFNKDDFRFAEEQAAKVNKDCILYLQPEWSNRDKMIPLMVDYVMKNPAWKVSLQTHKYLNIP

SEQ ID NO: 34968 - protein, 192 aa, Ulvibacter marinus
  misc_feature (1)..(192): tr|A0A5J4J8E2|A0A5J4J8E2_9FLAO 7-carboxy-7-deazaguanine synthase OS=Ulvibacter marinus OX=1397112 GN=queE PE=4 SV=1
MEEFYTIQGEGFHKGTAAYFIRVGGCDVGCHWCDVKESWNPDIHPPTSIEAIADNAEKYSKTIVITGGEPLTWDMGPLTSLLKRKGMKTHIETSGAYKLTGTWDWICLSPKKLKLPTKEVYDNAHELKVIIYNKDDFKFAEEQAAKVNDDCILYLQPEWSKRDKMIPEIVDYVMANPQWMVSLQTHKYLNIP

SEQ ID NO: 34969 - protein, 209 aa, Ulvibacter sp.
  misc_feature (1)..(209): tr|A0A167IDK9|A0A167IDK9_9FLAO 7-carboxy-7-deazaguanine synthase OS=Ulvibacter sp. LPB0005 OX=1763537 GN=queE PE=3 SV=1
MQKEIQDLVNAGEMLPLMEEFYTIQGEGFHKGTAAYFIRIGGCDVGCHWCDVKESWNADLHPPTKKDAIVANASAYSKTVVITGGEPLTWDMGPLTSALKEKGMQIHIETSGAYALTGTWDWICLSPKKIKLPQPEIYEVAHELKVIIFNKDDFRFAEEQAAKVNDNCILYLQPEWSNRDKMSPLIVDYVMQNPKWKVSLQTHKYLNIP

SEQ ID NO: 34970 - protein, 209 aa, Ulvibacter sp.
  misc_feature (1)..(209): tr|A0A5J4G0D0|A0A5J4G0D0_9FLAO 7-carboxy-7-deazaguanine synthase OS=Ulvibacter sp. KK4 OX=2494560 GN=queE PE=4 SV=1
MKIEIQDKVDNGIMLPLMEEFYTIQGEGYHKGTAAYFIRVGGCDVGCHWCDVKESWNPKSHPPTAIESIVDNAVKHSKTIVITGGEPLMWDMNPLTTLLKSKGVDTHIETSGAYELSGTWDWICLSPKKRMLPTQKVYEQAHELKVIIYNKDDFRFAEEQAAKVNKKCKLFLQPEWSKRDTVIPQIVDYVMANPQWVVSLQTHKYLNIP

SEQ ID NO: 34971 - protein, 217 aa, Umboniibacter marinipuniceus
  misc_feature (1)..(217): tr|A0A3L9ZXR1|A0A3L9ZXR1_9GAMM 7-carboxy-7-deazaguanine synthase OS=Umboniibacter marinipuniceus OX=569599 GN= queE PE=3 SV=1
MYTVKEMFYTLQGEGAHTGRAAVFLRFTGCNLWSGLEKHRAEAICSFCDTDFVGTDGVNGGKFKTASELAEAVAKLFPGEKNRFVVCTGGEPLLQLDNELVSALRERNFEVAVESNGTIRPPSGGVDWLCISPKGTAEVVVTHCDELKLVFPQADAMPDRFAGIKAQLRYLTPMADPHAGMDEVIYRNTTTQQTIQYCLDHPQWQLNLQSHKVINIA

SEQ ID NO: 34972 - protein, 212 aa, Alphaproteobacteria bacterium
  misc_feature (1)..(212): tr|A0A212KJV4|A0A212KJV4_9PROT 7-carboxy-7-deazaguanine synthase OS=uncultured Alphaproteobacteria bacterium O X=91750 GN=queE PE=3 SV=1
MYRVKEIFHTLQGEGAHAGRAAVFCRFAGCNLWSGREKDRERAVCRFCDTDFLGTDGPGGGDFATPEALAAAVAACWEDSSDASGAPYVVCTGGEPLLQLDAPLIAALHAAGFAVAVETNGSRAAPPGLDWICVSPKAGAPLVQTAGDEFKLVWPQPAFDPQALAALAFDHFFLQPMDGPDAAANLSACVAYCRAHPRWRLSLQTHKLIGIP

SEQ ID NO: 34973 - protein, 208 aa, Avibacterium sp.
  misc_feature (1)..(208): tr|A0A486XF01|A0A486XF01_9PAST 7-carboxy-7-deazaguanine synthase OS=uncultured Avibacterium sp. OX=1936169 GN= queE PE=3 SV=1
MAELISNPSYSIVEIFQSLQGEGANTGMPSIFIRFGKCNLTCPWCDTPYNDFEPWSLQQILAKVRSFSAKNIIITGGEPTIQPQLSLLLDQLKAEGYFLAIETNGLKPVPAQIDYIATSPKREYAQKYLQRCIAQANEVRIVADADVQEFCALIESQIQAQHYYLSPCESNGEMNLLHTITQLGLLNQRPNKPKWQLSIQTHKLIGIE

SEQ ID NO: 34974 - protein, 219 aa, Unknown
  misc_feature (1)..(219): tr|L7VWA3|L7VWA3_9BACT 7-carboxy-7-deazaguanine synthas e OS=uncultured bacterium A1Q1_fos_1807 OX=1256552 GN=q ueE PE=3 SV=1
MGYTVKELFYTLQGEGSHTGRAAVFCRFAGCNLWSGRESDRPSATCRFCDTDFIGTDGPGGGKFASADALADAVLACWDTHARSHPERRFVVLTGGEPLLQVDAALCRSLHARGFYLAIETNGTQPLPIGPPADRIDWVCVSPKAGSTLVLSAGDELKLVFPQPGAEPERFADLPFSAFFLQPMDGPLRSEHTTSAIAYCQTHPRWRLSLQTHKLLGIP

SEQ ID NO: 34975 - protein, 213 aa, Unknown
  misc_feature (1)..(213): tr|K2B1L4|K2B1L4_9BACT 7-carboxy-7-deazaguanine synthas e OS=uncultured bacterium OX=77133 GN=queE PE=3 SV=1
MSRLRITEIFFSLQGETRTVGLPTVFIRLTGCPLRCTYCDTAYAFHGGTWYEIDSILQQVAHYRTRYVTVTGGEPLAQKACLELLTGLCDANYEVSLETSGALDVSAVDPRVIKVIDLKTPGSGEVEKNNLSNMTCLLPHDQIKFVICHRTDYDWAKDMVQQYSLTEQCQVLFSPSYIEQSAVELADWILADQLPVRLQIQLHKFLWGDVQGR

SEQ ID NO: 34976 - protein, 181 aa, Bacteroides sp.
  misc_feature (1)..(181): tr|A0A1C5LIK9|A0A1C5LIK9_9BACE 7-carboxy-7-deazaguanine synthase OS=uncultured Bacteroides sp. OX=162156 GN=qu eE PE=3 SV=1
MRKINEIFYSLQGEGFHTGTPAVFVRFSGCNLKCSFCDTHHEDGRMMSDDEIIAEVCKYPCRMVILTGGEPGLWIDGKLTAALHAAGKYVAIETNGTCILPEDIDWVTCSPKEGAILKVSRIDEVKVVYVGQDVYEYLKLPARHFFLQPCSGQNTNDVISYIKEHPQWRLSLQTHKLIDIP

SEQ ID NO: 34977 - protein, 181 aa, Bacteroides sp.
  misc_feature (1)..(181): tr|A0A1C5NSP4|A0A1C5NSP4_9BACE 7-carboxy-7-deazaguanine synthase OS=uncultured Bacteroides sp. OX=162156 GN=qu eE PE=3 SV=1
MKKINEIFYSLQGEGFYVGTPAVFVRFSGCNLKCDFCDTRHEKGTFLSDEEIVEEVCRYPCRMVILTGGEPGLWIDEPLIEALHRAGKYVCVETNGTCVLPSSVDWVTCSPKKSGSLHVARIDEVKVVFVGQDVEPYLQLKASAYFLQPCSGKNTTEVVEYIKQHPVWRLSLQTHKLIDIP

SEQ ID NO: 34978 - protein, 216 aa, Blautia sp.
  misc_feature (1)..(216): tr|A0A1C6JH71|A0A1C6JH71_9FIRM 7-carboxy-7-deazaguanine synthase OS=uncultured Blautia sp. OX=765821 GN=queE P E=3 SV=1
MKVVEKFTSINGEGTRAGELAVFIRFKGCNLRCSYCDTMWANEPECPYKEETPEEILNYVLGTGIHNVTLTGGEPLLQKDIRDLIHLLLKAGLQVEIETNGAVDLAAFCEERPVFTMDYKLPSSGCEDHMITENMELLEKNDTVKFVSGSQEDLLKALELIRTYDLTNRCHVYLSPVFGSIEPVQIVEFMLKHRLNGVRLQIQMHKVIWDPDKRGV

SEQ ID NO: 34979 - protein, 222 aa, Blautia sp.
  misc_feature (1)..(222): tr|A0A1C5WDL2|A0A1C5WDL2_9FIRM 7-carboxy-7-deazaguanine synthase OS=uncultured Blautia sp. OX=765821 GN=queE P E=3 SV=1
MSTYQVVEKFVSINGEGRRAGELAAFIRFKGCNLQCSYCDTSWANEPGCESERLTEEEILSWIRETGVKNVTLTGGEPLLRKGMEELIEAILEDPFRRVEIETNGSVDLKPYHILKKRPSFTMDYKAPDSGMEKEMLLSNLELLGSEDTLKFVVSSRRDMEKALEILEKYRLVGKTAVYFSPVFGRIQPVEIVDFLMEKKLNDVKLQIQLHKVIWDPQKRGV

SEQ ID NO: 34980 - protein, 172 aa, Citrobacter sp.
  misc_feature (1)..(172): tr|A0A212IL51|A0A212IL51_9ENTR 7-carboxy-7-deazaguanine synthase OS=uncultured Citrobacter sp. OX=200446 GN=qu eE PE=3 SV=1
MGHDTLAVKTKESDKWGAASSEDLLAVISRQGYTARHVVITGGEPCIHDLMPLTDLLEKNGFSCQIETSGTHEVRCTPNTWVTVSPKVNMRGGYDVLSQALERANEIKHPVGRVRDIEALDELLATLSDDKPRIIALQPISQKEDATRLCIDTCIARNWRLSMQTHKYLNIA

SEQ ID NO: 34981 - protein, 172 aa, Citrobacter sp.
  misc_feature (1)..(172): tr|A0A212I879|A0A212I879_9ENTR 7-carboxy-7-deazaguanine synthase OS=uncultured Citrobacter sp. OX=200446 GN=qu eE PE=3 SV=1
MGHDTLAAKTKESDKWGAASSEDLLAVISRQGYTARHVVITGGEPCIHDLMPLTDLLEKNGFSCQIETSGTHEVRCTPNTWVTVSPKVNMRGGYDVLSQALERANEIKHPVGRVRDIEALDELLATLSDDKPRIIALQPISQKEDATRLCIDTCIARNWRLSMQTHKYLNIA

SEQ ID NO: 34982 - protein, 216 aa, Clostridium sp.
  misc_feature (1)..(216): tr|A0A1C5TKY0|A0A1C5TKY0_9CLOT 7-carboxy-7-deazaguanine synthase OS=uncultured Clostridium sp. OX=59620 GN=que E PE=3 SV=1
MKVVEKFTSINGEGVRAGELAVFVRFKGCNLRCSYCDTMWANEPECLYKEETPEEILNYVLGTGIHNVTLTGGEPLLQKDIRDLIHLLLQAGLRVEIETNGAVDLAAFCEERPVFTMDYKLPSSGCEEYMITKNMELLGKDDTVKFVSGSQEDLLKALELIRSYDLTNRCHVYLSPVFGAIEPVQIVEFMLKHRLNGVRLQIQMHKVIWDPDERGV

SEQ ID NO: 34983 - protein, 226 aa, Clostridium sp.
  misc_feature (1)..(226): tr|A0A1C5UBC6|A0A1C5UBC6_9CLOT 7-carboxy-7-deazaguanine synthase OS=uncultured Clostridium sp. OX=59620 GN=que E PE=3 SV=1
MKVIEIFDSIDGEGIRTGQCATFIRLAGCNLRCSYCDTVYSLFGEETPCEYTEMTVDEIISKVNMTYKRVTLTGGEPLVHTDSAELVSKLTEIGCDVNIETNGAVDIVDFLGKVPKSDNLFFTIDYKLPSSGMTDKMIWNNFINLRPCDVIKFVIGSDEDMNLTIDIVKKLKQVYTEMPHIYLGAVYGMYDAQKLVNIMLKEPVLCDATFQIQLHKVIWDPEERGV

SEQ ID NO: 34984 - protein, 222 aa, Coprococcus sp.
  misc_feature (1)..(222): tr|A0A1C5RZA9|A0A1C5RZA9_9FIRM 7-carboxy-7-deazaguanine synthase OS=uncultured Coprococcus sp. OX=458253 GN=qu eE PE=3 SV=1
MAKFKVAERFVSINGESVKAGELAVFIRFTGCNLNCSYCDTKWANEADAPYEELTDEEIYDYIKRTGVRNVTLTGGEPLIQKDIDKLLLMLAMDEELQVEVETNGSVDIAEFKALTDRVAFTLDYKLLGSGMESNMCFSNYNYIDKKDAVKFVSGSIKDLETARDIIHEWALDIKSNVYISPVYGKINPEDIVDFMIENEMNGVKLQLQLHKYIWDPEMRGV

SEQ ID NO: 34985 - protein, 218 aa, Unknown
  misc_feature (1)..(218): tr|H5SJE1|H5SJE1_9DELT 7-carboxy-7-deazaguanine synthas e OS=uncultured delta proteobacterium OX=34034 GN=queE PE=3 SV=1
MAKEDTLVVHEIYASIQGESTWAGWPCTFVRTTGCNLRCSYCDTPQAFYGGTRMRRSEVLSKALAFETPLVEVTGGEPLLQPGVIPLLTELADAGRTVLLETSGERDISRVDPRVHRIMDLKTPDSGEVHRNRWENLPLLGPRDEVKFVLCSRRDYEWMREVIRTHQLDRRVRAVLASTAFGRLHPRELVAWVLEDKLPVRIQLQIHKYIWSPDAQGV

SEQ ID NO: 34986 - protein, 221 aa, Desulfobacteraceae bacterium
  misc_feature (1)..(221): tr|A0A484HIF6|A0A484HIF6_9DELT 7-carboxy-7-deazaguanine synthase OS=uncultured Desulfobacteraceae bacterium OX =218296 GN=queE PE=3 SV=1
MRYQINDIHPCVQGEGVHAGVPMVLIRLQGCGVGCPWCDSKETWGFSEKNRVGLADALGTNPRWAGAGVGETLAFVRSRPPKIRWALITGGEPAGQDLAPLAKGLKEDGYRTAIETSGTARGHLGAGFDWICVSPKFDMPGGGEPLPECLESAHEIKHVAGKPADIDRLDRALDGLGLREGVVISLQPESLGRKATELCVKTVMERGWRLSLQTHKFINQR

SEQ ID NO: 34987 - protein, 219 aa, Desulfobacterium sp.
  misc_feature (1)..(219): tr|E1YHE5|E1YHE5_9DELT 7-carboxy-7-deazaguanine synthas e OS=uncultured Desulfobacterium sp. OX=201089 GN=queE PE=3 SV=1
MRSENMTLLINEIFYSIQGESLYSGLPCAFIRLAGCNLRCAYCDTKYAYNEGSEIETDHLVKKISEFGCPLVEITGGEPLIQEETPVLIEKLLDNKFSVLLETNGSLDISYIDKRCIKIIDIKCPTSGESEKNNLANINRLNQKDQIKFVIGNRVDYEFAKDIVKQIPKTFFRENILFSPIYNKLELSELARWMLKDKLTVRFHLQLHKIIWPDTIRGV

SEQ ID NO: 34988 - protein, 215 aa, Desulfobacterium sp.
  misc_feature (1)..(215): tr|A0A445MUQ5|A0A445MUQ5_9DELT 7-carboxy-7-deazaguanine synthase OS=uncultured Desulfobacterium sp. OX=201089 GN=queE PE=3 SV=1
MSLLVNEIFYSIQGESSYAGRPCVFIRLTGCNLRCLYCDTRYAYSEGFLMGAEEILERVSSYECPLVEITGGEPLLQDETSLLTTRLLDKGHMVLLETNGSLDIGGTDERCIRIMDIKCPSSGEQKSFLPENLGLLMGKDEIKFVIGDRQDYEFARKMLNPIRRDCPATICVNFSAVFEKMDARHLAEWILGDHLDVRINVQIQKVLWGPEQRGV

SEQ ID NO: 34989 - protein, 212 aa, Desulfovibrio sp.
  misc_feature (1)..(212): tr|A0A212IZN0|A0A212IZN0_9DELT 7-carboxy-7-deazaguanine synthase OS=uncultured Desulfovibrio sp. OX=167968 GN= queE PE=3 SV=1
MSFAVKEIFYTLQGEGFHAGRPAIFCRFSGCNLWSGREEDRKFAKCPFCDTDFLGAEKSGGEFKNAATLAQAICSFFPSYTHPGYRPYVVFTGGEPALQLTEELLQELGRCGVETGIETNGTLPLPKGLDWITVSPKAGTKLVVTSGSELKLVWPQEGISVQDFEQLDFKHFFLQPRDYAGQSQATEDAVRICQDRPLWKLSLQTHKFIGIA

SEQ ID NO: 34990 - protein, 193 aa, Dysgonomonas sp.
  misc_feature (1)..(193): tr|A0A212JLF1|A0A212JLF1_9BACT 7-carboxy-7-deazaguanine synthase OS=uncultured Dysgonomonas sp. OX=206096 GN=q ueE PE=3 SV=1
MKLIVNEIFYSLQGEGGRTGEASVFIRLTKCNLVCSFCDTDFADGDEMSVDEILEAISVYPCKWIIWTGGEPTIQLKDEHLAVFREHGYKQAIETNGTRRVPSLIDYITCSPKQDYETIKNRISFVHEIRMPIQAGDPVPDISVFPKADNYFLSPVFDADKINLENVAYCVELIKQHPQWRLSLQTHKLIHIE

SEQ ID NO: 34991 - protein, 193 aa, Dysgonomonas sp.; identical to SEQ ID NO: 29810
  misc_feature (1)..(193): tr|A0A212JSQ8|A0A212JSQ8_9BACT 7-carboxy-7-deazaguanine synthase OS=uncultured Dysgonomonas sp. OX=206096 GN=q ueE PE=3 SV=1

SEQ ID NO: 34992 - protein, 222 aa, Eubacterium sp.; identical to SEQ ID NO: 27753
  misc_feature (1)..(222): tr|A0A1C5ZTK3|A0A1C5ZTK3_9FIRM 7-carboxy-7-deazaguanine synthase OS=uncultured Eubacterium sp. OX=165185 GN=qu eE PE=3 SV=1

SEQ ID NO: 34993 - protein, 221 aa, Eubacterium sp.; identical to SEQ ID NO: 27742
  misc_feature (1)..(221): tr|A0A1C6F8X9|A0A1C6F8X9_9FIRM 7-carboxy-7-deazaguanine synthase OS=uncultured Eubacterium sp. OX=165185 GN=qu eE PE=3 SV=1

SEQ ID NO: 34994 - protein, 65 aa, Gammaproteobacteria bacterium
  misc_feature (1)..(65): tr|A0A5E5PSZ5|A0A5E5PSZ5_9GAMM Queuosine Biosynthesis Q ueE Radical SAM (Fragment) OS=uncultured Gammaproteobac teria bacterium OX=86473 GN=BSPCLSOX_1610 PE=4 SV=1
MNTELNINEIFYSLQGEAREVGLPTVFVRLTGCPLRCSYCDTEYAFKGNNLLSIDVILTEIKKYN

SEQ ID NO: 34995 - protein, 212 aa, Gammaproteobacteria bacterium
  misc_feature (1)..(212): tr|A0A5E6NDT9|A0A5E6NDT9_9GAMM 7-carboxy-7-deazaguanine synthase OS=uncultured Gammaproteobacteria bacterium O X=86473 GN=queE PE=3 SV=1
MNTELNINEIFYSLQGEAREVGLPTVFVRLTGCPLRCSYCDTEYAFKGNNLLSIDAVLTEIKKYNTKFVCVTGGEPLAQINCHILLDRLVKENYQVSLETSGSIDIADINPGVSIVMDVKTPSSNESDKNLYTNIEKLELKDQLKFVIGSKADFDWSVALLSKHPTPAEVLFSPVFEAVKPMQLAQWILDGQLNVRLQVQLHKLLWGDEKGK

SEQ ID NO: 34996 - protein, 220 aa, Megasphaera sp.
  misc_feature (1)..(220): tr|A0A1C5MAL0|A0A1C5MAL0_9FIRM 7-carboxy-7-deazaguanine synthase OS=uncultured Megasphaera sp. OX=165188 GN=qu eE PE=3 SV=1
MKYKFPVVEIFDSIEGEGKRTGYLSTFIRFAGCNLRCSYCDTAYALSADDAAAEYTADELAQIVLDKPWSRATLTGGEPMLQPLQELTERLCRGGCEINIETNGAVLLPSRRPEGLFYTMDWKSPSSGMSEAMKLENLQERLTPADVVKFVVATKDDLDDMAYTISHLLPASRPLLYVSPVWGEIEPAALVDFVKEKGLDDVCVQVQLHKIIYDPEARGV

SEQ ID NO: 34997 - protein, 230 aa, Unknown; identical to SEQ ID NO: 28231
  misc_feature (1)..(230): tr|H5SJQ6|H5SJQ6_9BACT 7-carboxy-7-deazaguanine synthas e OS=uncultured planctomycete OX=120965 GN=queE PE=3 SV =1

SEQ ID NO: 34998 - protein, 225 aa, Prochlorococcus marinus
  misc_feature (1)..(225): tr|Q1PJG1|Q1PJG1_PROMR 7-carboxy-7-deazaguanine synthas e OS=uncultured Prochlorococcus marinus clone HOT0M-3E5 OX=379388 GN=queE PE=3 SV=1
MKMTNFLPLVEQFHSLQGEGYHAGKSAFFIRLAGCKVGCSWCDTKNSWDEKKHPSISIEKIIDRIKIARKKGASFCVITGGEPLQHNLDNFCKAIKKMTMGEEQKPMKIHIETSGVNSISGSYDWITLSPKRHSPPKNYFLKNCNEIKIIINEIEDIEFAIQIKNETLKQYQISKSEDGLKKEDKIFYLQPAWNNANGFSLAIDFVKNNPDWKLSLQTHKYLKIN

SEQ ID NO: 34999 - protein, 222 aa, Roseburia sp.
  misc_feature (1)..(222): tr|A0A1C5VYP3|A0A1C5VYP3_9FIRM 7-carboxy-7-deazaguanine synthase OS=uncultured Roseburia sp. OX=512314 GN=queE PE=3 SV=1
MANYKVVEIFSSINGEGKRAGQLAVFIRMQGCNLNCRYCDTAWANEEDCRYHWTSTEEILELIHSMGIKNVTITGGEPLLQKDIGVLLENLAEEKELHVEIETNGSVDLKPFLAMENRPSFTMDYKLPGSEMEAHMLTENFSCLDQRDTVKFVVAGWEDLVRAKAVIEQFDLTKQCSVYLSPVYGEIDLEEIVYFMKRNCMNGVTMQLQMHKIIWDPQLRGV

SEQ ID NO: 35000 - protein, 221 aa, Ruminococcus sp.
  misc_feature (1)..(221): tr|A0A1C6DMM9|A0A1C6DMM9_9FIRM 7-carboxy-7-deazaguanine synthase OS=uncultured Ruminococcus sp. OX=165186 GN=q ueE PE=3 SV=1
MYRYNIAEKFVSINGEGRKAGQPAVFIRFKGCNLNCSYCDTFWANSDNCPAEMMTANDILVYIQKTGISNVTLTGGEPLIQTGIYELIDLLCQNGLDVEIETNGSEDISPFRQMKIMPSFTLDYKLPSSGMERFMEMKNYDFLTKNDTIKFVCGSNEDLQKALEIIEKKHLTKKCAVYLSPVFGKIEPREIVDFMLENKMNGINFQLQLHKFIWNPDKRGV

SEQ ID NO: 35001 - protein, 235 aa, Ruminococcus sp.
  misc_feature (1)..(235): tr|A0A1C6A9F6|A0A1C6A9F6_9FIRM 7-carboxy-7-deazaguanine synthase OS=uncultured Ruminococcus sp. OX=165186 GN=q ueE PE=3 SV=1
MRPPTTAQFTKLVMIMIFKVAEKFVSINGEGTKAGQPAVFIRLAGCNLRCSYCDTMWANGSDTPFEPMTEDEIAAYIADSGIKNVTLTGGEPLMAENVRVLLERLSHEDIAVEIETNGSADISVCDGISPRPSVTLDYKLPSSGMEKHMLMSNYDRLTKYDTVKFVAGSHDDLEKALEVIKKYDLTNKCHVYFSPVFGKIEPVEMVDFILKHKLNGVNFQLQLHKFIWDPNKRGV

SEQ ID NO: 35002 - protein, 210 aa, Sphingopyxis sp.
  misc_feature (1)..(210): tr|A0A1Y5Q0B6|A0A1Y5Q0B6_9SPHN 7-carboxy-7-deazaguanine synthase OS=uncultured Sphingopyxis sp. OX=310581 GN=q ueE PE=3 SV=1
MVYAVKEIFLTLQGEGAQAGRRAVFCRFAGCNLWTGREKDRAKAVCQFCDTDFVGTDGTLGGKYRSAAALADVIAESWGEGGEDRYVVLTGGEPMLQVDDALVGALHDRGFTVAIESNGTLPIPRSIDWICVSPKAGSELVQTSGDELKLVWPQPGSDVARLAALDFKHLLVQPLDDPHAAANVQACIDLVMADPRWRLSLQTHKHLGLR

SEQ ID NO: 35003 - protein, 241 aa, Sporomusa sp.; identical to SEQ ID NO: 34390
  misc_feature (1)..(241): tr|A0A212LR58|A0A212LR58_9FIRM 7-carboxy-7-deazaguanine synthase OS=uncultured Sporomusa sp. OX=307249 GN=queE PE=3 SV=1

SEQ ID NO: 35004 - protein, 229 aa, Stenotrophomonas sp.
  misc_feature (1)..(229): tr|A0A1Y5PZS7|A0A1Y5PZS7_9GAMM 7-carboxy-7-deazaguanine synthase OS=uncultured Stenotrophomonas sp. OX=165438 GN=queE PE=3 SV=1
MNHPAASVPSEIVQSPLPRLKITEIFLSLQGEADTAGWPTVFVRLTGCPLRCSYCDTEYAFHGGQWRDIDDIVAEVLGHSVRHVCVTGGEPLAQKRCLVLLRQLCDAGLDVSLETSGALDIGGVDPRVSRVVDLKTPDSGEMGRNRLQNLPLLTARDQLKFVLCSRSDYEWARDMVATHRLHERCMVLFSPSKSELAPRELADWIVADRLPVRFQMQLHKLLWNDEPGR

SEQ ID NO: 35005 - protein, 212 aa, Unknown
  misc_feature (1)..(212): tr|A0A483A821|A0A483A821_9GAMM 7-carboxy-7-deazaguanine synthase OS=uncultured SUP05 cluster bacterium OX=6551 86 GN=queE PE=3 SV=1
MTTDLNITEIFYSLQGEAREVGLPTTFIRLTGCPLRCSYCDTEYAFKGNNLVSINEIIGEVEQYNTRYICVTGGEPLAQINCHILLDTLVKNDYLVSLETSGSIDISEINPDVSIVMDVKTPSSNESSQNLYGNIEKLQEKDQLKFVIGSRTDFDWSVDILGEYSTNAGVLFSPVFDRITPTQLADWIIEAQLNVRMQVQMHKLLWGDEKGR

SEQ ID NO: 35006 - protein, 209 aa, Unknown
  misc_feature (1)..(209): tr|A0A482ZQV0|A0A482ZQV0_9GAMM 7-carboxy-7-deazaguanine synthase OS=uncultured SUP05 cluster bacterium OX=6551 86 GN=queE PE=3 SV=1
MLNINEIFYSLQGEAREVGLPTVFIRLTGCPLRCTYCDTEYAFKGNNPLSIEAILTEIGQYNTQYVCVTGGEPLAQINCHILLDALIKADYQVSLETSGSIDIAEVNPAVSVVMDVKTPSSNEADKNLYQNIALLQSKDQLKFVIGSKADFDWSVDILNQYPTTAGVLFSPVFNAVEPVQLADWILEKQLNVRLQVQMHKLLWGDEKGK

SEQ ID NO: 35007 - protein, 215 aa, Thiohalocapsa sp.; identical to SEQ ID NO: 29131
  misc_feature (1)..(215): tr|V4JM15|V4JM15_9GAMM 7-carboxy-7-deazaguanine synthas e OS=uncultured Thiohalocapsa sp. PB-PSB1 OX=1385625 GN =queE PE=3 SV=1

SEQ ID NO: 35008 - protein, 211 aa, Undibacterium parvum
  misc_feature (1)..(211): tr|A0A3S9HP27|A0A3S9HP27_9BURK 7-carboxy-7-deazaguanine synthase OS=Undibacterium parvum OX=401471 GN=queE PE= 3 SV=1
MTYSIKESFYTLQGEGNHAGRPAVFCRFTGCNLWSGREEDRSSAVCQFCDTDFVGVNGEGGGKFKTALALAERINSLWPTSYPQTKYVVFTGGEPLLQLDANLIKAMHQFGFEIAIETNGTLPVPEGVDWVCVSPKMGSKLVVLKGSELKVVIPQLGQPMSEYASLDFEHFFVQAMDGPLQADNLRLAIDYCKAHPQWKLSVQTHKLLQIP

SEQ ID NO: 35009 - protein, 211 aa, Undibacterium pigrum
  misc_feature (1)..(211): tr|A0A318JIM2|A0A318JIM2_9BURK 7-carboxy-7-deazaguanine synthase OS=Undibacterium pigrum OX=401470 GN=queE PE= 3 SV=1
MTYSVKEIFYTLQGEGNHAGRPAVFCRFSGCNLWSGREEDRATAVCQFCDTDFVGTNGEGGGKFKQAEALAATINALWPVSYTASKYVVFTGGEPLLQLDAALIEAMHAVGFEIAIETNGTLPVPEGVDWICVSPKMGSELVVRKGSELKVVIPQFGQDMAAYANLDFEHYFVQAMDGPLRDDNLRLAIEFCKQHPQWKLSLQTHKLLQIP

SEQ ID NO: 35010 - protein, 211 aa, Undibacterium sp.
  misc_feature (1)..(211): tr|A0A3S0I0M3|A0A3S0I0M3_9BURK 7-carboxy-7-deazaguanine synthase OS=Undibacterium sp. S11R28 OX=2495591 GN=que E PE=3 SV=1
MTYSIKEIFYTLQGEGNHAGRPAVFCRFSGCNLWSGREEDRSSAICQFCDTDFVGIDGEGGGKFKTAAALAERINSLWPLSYPDSKYVVFTGGEPLLQLDTELIHAMHQVGFEIAIETNGTLPVPEGVDWICVSPKMGSKLVVLKGSELKVVIPQLGQSMSDYEALDFEHYFVQAMDGPKQDENLRLAIAYCKANPKWKLSVQTHKLLQIP

SEQ ID NO: 35011 - protein, 209 aa, Unknown
  misc_feature (1)..(209): tr|A6EMG7|A6EMG7_9BACT 7-carboxy-7-deazaguanine synthas e OS=unidentified eubacterium SCB49 OX=50743 GN=queE PE =3 SV=1
MQKELKEQVDKGVILPLMEEFYTIQGEGYYKGTAAYFIRIGGCDVGCHWCDVKESWNPDIHPPTSIETIADNAAKYSKTIVITGGEPLMWDMNPLTELLKSKGVNTHIETSGAYSLSGTWDWICLSPKKMKLPTPEVYAAAHELKMIIYNKDDFRFAEEQASKVNADCKLFLQPEWSKRDKMVPEIVDYVMQNPKWVVSLQTHKYLNIP

SEQ ID NO: 35012 - protein, 242 aa, Ureibacillus terrenus
  misc_feature (1)..(242): tr|A0A540UX12|A0A540UX12_9BACL 7-carboxy-7-deazaguanine synthase OS=Ureibacillus terrenus OX=118246 GN=queE PE =3 SV=1
MSKIPVIEIFGPTIQGEGMVIGQKTMFVRTAGCDYSCSWCDSSFTWDGSGKDLIRQMTPEEIWSELKRLGGNGFSFVTISGGNPALIRNIGELVRILKDNRMKICVETQGSRWQDWLYDIDQLTISPKPPSSGMKTDFAALSEMLDKLKARNGSGHISLKVVVFNDEDYQFAKEVHRRLPAIPFYLQVGNDDTTSEDREKLVRHLLGKYEELIRKAMGDEELKDVRVLPQLHTLVWGNKRGV

SEQ ID NO: 35013 - protein, 242 aa, Ureibacillus thermophilus
  misc_feature (1)..(242): tr|A0A4P6UX91|A0A4P6UX91_9BACL 7-carboxy-7-deazaguanine synthase OS=Ureibacillus thermophilus OX=367743 GN=que E PE=3 SV=1
MSKIPVMEIFGPTIQGEGMVIGQKTMFVRTAGCDYSCEWCDSAFTWDGSGKELIRQMTAEEIWTELKRLGGDGFSFVTISGGNPALIRNLEGLVRILKENGIQIGVETQGSRWQDWLYDVNQVTISPKPPSSGMKTDFTVLTEIIDKLNARNGNQHISLKVVVFDEEDYEYAKKVHLRYPTIPFFLQVGNDDTTTKDQTKLVSHLLKKYERLINKVMADEELQNVKVLPQLHTLVWGNKRGV

SEQ ID NO: 35014 - protein, 210 aa, Uruburuella suis
  misc_feature (1)..(210): tr|A0A4R2MY60|A0A4R2MY60_9NEIS 7-carboxy-7-deazaguanine synthase OS=Uruburuella suis OX=252130 GN=queE PE=3 SV =1
MQTIHPENPEFRIVEIFESLQGEGYNTGMSAVFIRLGKCNLACAWCDTDYLKFGMMRLSDILSRLQTYAARNIIITGGEPTIQPHLSVLLDALKAQGYRLCIETNGLKPAPVQIDYVAASPKACYAEKYRQQCIEAADEVRIVADGDVLAFCAEMEQKIRAAHYYLSPCEIDGQMNIYDTIRQIGLLNARADAQVHWQLSVQTHKWAGIE

SEQ ID NO: 35015 - protein, 223 aa, Vampirococcus sp.
  misc_feature (1)..(223): tr|A0A410P2Z0|A0A410P2Z0_9BACT 7-carboxy-7-deazaguanine synthase OS=Vampirococcus sp. LiM OX=1930593 GN=queE P E=3 SV=1
MKAKIAEIFESIQGEGLYTGERQVFIRFYGCNLSCSFCDTPLTHYREYTAESLRRQIAAYDGCHSISLTGGEPLVQAEFLVSFLPLLRQDRPKIYLETNGTLWREFSLVRDNVDIVAMDIKLPSSGGQKPFWDEHKKFLELAAAKDAFVKIVVGLSTQAQDIVASSVILASFSGRIPVVLQPVWQDMGPNVLEKMEAFKRLLAERGVNSVHILSQAHKLAGVK

SEQ ID NO: 35016 - protein, 211 aa, Variibacter gotjawalensis
  misc_feature (1)..(211): tr|A0A0S3PW79|A0A0S3PW79_9BRAD 7-carboxy-7-deazaguanine synthase OS=Variibacter gotjawalensis OX=1333996 GN=qu eE PE=3 SV=1
MAKFAVKEIFLTLQGEGTHAGRAAVFCRFAGCNLWSGREQDRASAECTFCDTDFVGTDGTKGGRYADADALADAIEAEWTGGSGNRFCVLTGGEPLLQVSEALTAALHRRGFEIAVETNGTVPRPEGIDWMCVSPKAATELAITAGDELKLVYPQREAPPERFADLPFANFLLQPMDGPDVIENTRAAIAYCLKHPQWRLSAQTHKHLGIR

SEQ ID NO: 35017 - protein, 212 aa, Variovorax boronicumulans
  misc_feature (1)..(212): tr|A0A1E7U2E2|A0A1E7U2E2_9BURK 7-carboxy-7-deazaguanine synthase OS=Variovorax boronicumulans OX=436515 GN=que E PE=3 SV=1
MTYSVKEIFYTLQGEGGQAGMPAVFCRFAGCNLWTGREEDRDTAVCRFCDTDFVGTDGTLGGKFKSADQLADTIAAQWPAGDTAHRLVVLTGGEPLLQVDAALVDALHARHFRIAVESNGTVAAPAGIDWLCISPKAGAPWVQQRGQELKLVWPQVGIDLDAMARTGEFMHRFLQPMDGPDRLANTELCIAECMKQPVWRLSVQTHKITGIR

SEQ ID NO: 35018 - protein, 212 aa, Variovorax boronicumulans
  misc_feature (1)..(212): tr|A0A250DFX3|A0A250DFX3_9BURK 7-carboxy-7-deazaguanine synthase OS=Variovorax boronicumulans OX=436515 GN=que E PE=3 SV=1
MTYSVKEIFYTLQGEGGQAGMPAVFCRFAGCNLWTGREEDRDTAVCRFCDTDFVGTDGTLGGKFKSADQLADTIAAQWPTGDTTHRLVVLTGGEPLLQVDAALVDALHARHFRIAVESNGTVAAPAGIDWLCISPKAGAPWVQQRGQELKLVWPQAGIDLDAMARTGEFTHRFLQPMDGPDRLANTELCIAECMKQPVWRLSVQTHKITGIR

SEQ ID NO: 35019 - protein, 212 aa, Variovorax gossypii
  misc_feature (1)..(212): tr|A0A3S0H039|A0A3S0H039_9BURK 7-carboxy-7-deazaguanine synthase OS=Variovorax gossypii OX=1679495 GN=queE PE= 3 SV=1
MTYSVKEIFYTLQGEGGQAGMPAVFCRFAGCNLWTGREEDRASAICRFCDTDFVGTDGTLGGKFKTADQLADTIAAQWPAADADHRLVVLTGGEPLLQVDAALVDALHARRFRIAVESNGTVEAPEGIDWLCISPKAGAPWVQQRGQELKLVWPQAEFDLDTMARTGEFTHRFLQPMDGPDRVANTELCIAECMKRPAWRLSVQTHKITGIR

SEQ ID NO: 35020 - protein, 212 aa, Variovorax guangxiensis
  misc_feature (1)..(212): tr|A0A3S0ZRV4|A0A3S0ZRV4_9BURK 7-carboxy-7-deazaguanine synthase OS=Variovorax guangxiensis OX=1775474 GN=queE PE=3 SV=1
MTYSVKEIFYTLQGEGGQAGMPAVFCRFAGCNLWTGREEDRASAICRFCDTDFVGTDGTLGGKFKTADLLADTIAAQWPATDADHRLVVLTGGEPLLQVDKALVDALHARRFRIAVESNGTVEAPEGIDWLCISPKAGAPWVQRRGQELKLVWPQAGFDLDTMARTGEFTHRFLQPMDGPDQLANTELCIAECMKQPVWRLSVQTHKITGIR

SEQ ID NO: 35021 - protein, 210 aa, Variovorax guangxiensis
  misc_feature (1)..(210): tr|A0A433MHZ7|A0A433MHZ7_9BURK 7-carboxy-7-deazaguanine synthase OS=Variovorax guangxiensis OX=1775474 GN=queE PE=3 SV=1
MTYSVKEIFYTLQGEGLRAGRPAVFCRFAGCNLWTGQEKQRSNAICQFCDTDFVGTDGTLGGKYPDANVLAALIAAQWPEGHAHRYVVLTGGEPLLQVDAPLIDGLHSHQFEIAVETNGTIAAPVGIDWICVSPKAGADWVQRSGDELKLVYPQLGLHPDSLNEHDFQHHLLQPMDGPLQRQNTRDAIDYCQAHPQWRLSVQTHKILNIR

SEQ ID NO: 35022 - protein, 212 aa, Variovorax paradoxus
  misc_feature (1)..(212): tr|E6UYM0|E6UYM0_VARPE 7-carboxy-7-deazaguanine synthas e OS=Variovorax paradoxus (strain EPS) OX=595537 GN=que E PE=3 SV=1
MTYSVKEIFYTLQGEGGQAGMPAVFCRFAGCNLWTGREEDRASAVCRFCDTDFVGTDGTLGGKFKTADQLADTIAAQWPANDAEHRLVVLTGGEPLLQVDAALVDALHARRFRIAVESNGTVAAPEGIDWLCISPKAGAPWVQQRGQELKLVWPQTAFDLDAMARTGDFTHRFLQPMDGPDRVANTELCIAECMRQPAWRLSVQTHKITGIR

SEQ ID NO: 35023 - protein, 212 aa, Variovorax paradoxus
  misc_feature (1)..(212): tr|A0A0P9G0W8|A0A0P9G0W8_VARPD 7-carboxy-7-deazaguanine synthase OS=Variovorax paradoxus OX=34073 GN=queE PE=3 SV=1
MSYSVKEIFYTLQGEGGQAGMPAVFCRFAGCNLWSGREADRASAVCRFCDTDFVGTDGTLGGKFKEADALADTIAAQWPADDAGHRLVVLTGGEPLLQVDAALIDALHARGFRIAVESNGTVAAPEGIDWLCISPKAGAPWVQRRGQELKLVWPQEGIDLDAMARSGEFAHRFLQPMDGPRQAANTALCIDACLRQPRWRLSVQTHKFTGIR

SEQ ID NO: 35024 - protein, 212 aa, Variovorax sp.
  misc_feature (1)..(212): tr|A0A1H7MD16|A0A1H7MD16_9BURK 7-carboxy-7-deazaguanine synthase OS=Variovorax sp. YR750 OX=1884384 GN=queE PE =3 SV=1
MTYSVKEIFYTLQGEGGQAGMPAVFCRFAGCNLWTGREEDRASAICRFCDTDFVGTDGTLGGKFKTADLLADTIAAQWPAADADHRLVVLTGGEPLLQVDAALVDALHARRFRIAVESNGTVEAPEGIDWLCISPKAGAPWVQQRGQELKLVWPQAEFDLDTMARTGEFTHRFLQPMDGPDRVANTELCIAECMKQPAWRLSVQTHKITGIR

SEQ ID NO: 35025 - protein, 212 aa, Variovorax sp.
  misc_feature (1)..(212): tr|A0A2P8KLZ9|A0A2P8KLZ9_9BURK 7-carboxy-7-deazaguanine synthase OS=Variovorax sp. WS11 OX=1105204 GN=queE PE= 3 SV=1
MSYSVKEIFYTLQGEGGQAGMPAVFCRFAGCNLWSGREQDRDSAVCRFCDTDFVGTDGTLGGKFASAGSLADVIAAQWPAGDAEHRLVVLTGGEPLLQVDAELIAALHARRFRIAVESNGTIAAPEGIDWLCISPKAGAPWVQRSGQELKLVWPQPGLELDVLEAQGRFAHRFLQPMDGPTQAENTALCIDTCMRRPGWRLSLQTHKLTGIR

SEQ ID NO: 35026 - protein, 215 aa, Varunaivibrio sulfuroxidans
  misc_feature (1)..(215): tr|A0A4R3JI76|A0A4R3JI76_9PROT 7-carboxy-7-deazaguanine synthase OS=Varunaivibrio sulfuroxidans OX=1773489 GN= queE PE=3 SV=1
MSYAIKEMFYTLQGEGARAGRPAVFCRFAGCNLWSGREEDRAQARCTFCDTDFVGVDGAGGGRFEDADDLAHAIERLWPTPAETEKAGGRYVVLTGGEPTLQIDAALIDALHARHFEIALETNATRVPPPGIDWICASPKGDAPLAVGAGDELKLVYPQPGVDPAAFADLDFTHFFLQPMDGPERARNTALTVRYCLDHPCWKLSLQTHKIIGIP

SEQ ID NO: 35027 - protein, 220 aa, Veillonella atypica
  misc_feature (1)..(220): tr|A0A3A6WKD0|A0A3A6WKD0_9FIRM 7-carboxy-7-deazaguanine synthase OS=Veillonella atypica OX=39777 GN=queE PE=3 SV=1
MLLSMNVIELFSSIDGEGKRQGFLTTFLRLHDCNIRCSYCDTLYSYGPESTFESMSVQAVADAIEQLENHRITITGGEPLLQEPAIIELIDELTRRNHRYDFNIETNGTIIPSFHRDNVWFTYDYKTPSSLAEDAMNLDIFKVATPADIIKFVVGSMQDLDRMDEILKTYPTDAQIFVSPVWGNIEGATIIEYMKAHDWQNVRFQLQIHKFIWDPDAKGV

SEQ ID NO: 35028 - protein, 220 aa, Veillonella atypica
  misc_feature (1)..(220): tr|A0A380N5J3|A0A380N5J3_9FIRM 7-carboxy-7-deazaguanine synthase OS=Veillonella atypica OX=39777 GN=queE PE=3 SV=1
MLLSMNVIELFSSIDGEGKRQGFLTTFLRLHDCNIRCSYCDTLYSYGPESTFESMSVQAVADVIEQLENHRITITGGEPLLQEPAIIELIDELTRRNARYDFNIETNGTIIPSFHRDNVWFTYDYKTPSSLAEDAMNLDIFKVATPADIIKFVVGSMQDLDRMNEILKTYPTEAQIFVSPVWGNIEGATIIEYMKAHNWQNVRFQLQIHKFIWDPDAKGV

SEQ ID NO: 35029 - protein, 219 aa, Veillonella criceti
  misc_feature (1)..(219): tr|A0A380NNK2|A0A380NNK2_9FIRM 7-carboxy-7-deazaguanine synthase OS=Veillonella criceti OX=103891 GN=queE PE=3 SV=1
MNVIELFSSIEGEGTRQGFPCSFLRLHDCNLRCVYCDTLYSYGDDAVFETYTINEMADALEALGNRYITITGGEPLLQAKEVEALIDVLSARTTPYGPYEFNIETNGSILPPFQRANVFYTFDYKCPDSAAEEHMQPKLCDSLTDKDVLKFVVSSYSDLQKMKEIVTTKQPKGHIFVSPVFGKIDPKDIVEYLLTNHLQQVRLQLQIHKFIWDPDAKGV

SEQ ID NO: 35030 - protein, 239 aa, Veillonella denticariosi
  misc_feature (1)..(239): tr|A0A2S7Z7Y6|A0A2S7Z7Y6_9FIRM 7-carboxy-7-deazaguanine synthase OS=Veillonella denticariosi JCM 15641 OX=1298 594 GN=queE PE=3 SV=1
MLRFMNVIEIFSSIDGEGSRQGFLTTFLRLYDCNIRCSYCDTKYSYGPDSVYKEMFVQEVADTIESLGNHRITITGGEPLLQEREVIALIDELTRRSESSESCVSEREDEIYSHDTMPYDFNIETNGTIVPSFQRDNVWFTYDYKTPSSLAEKSMNLDIFKAATERDLIKFVVGTPEDLDCMRHILAAHMTEAHIYVSPVWGQIEATSIIEYMKAHNLQNVRFQLQIHKFIWDPDAKGV

SEQ ID NO: 35031 - protein, 247 aa, Veillonella dispar
  misc_feature (1)..(247): tr|A0A3D2WR55|A0A3D2WR55_9FIRM 7-carboxy-7-deazaguanine synthase OS=Veillonella dispar OX=39778 GN=queE PE=3 S V=1
MNVIEIFGSIDGEGSRQGLLTTFLRLHDCNIRCSYCDTTYSYGIDSTFTDMTVQEVADAIESLGNHRITITGGEPLLQEAAVVELIDELNRRKSTKLEDKPCTVGKSTARYELSKGTQGILTDESPYDFNIETNGTIIPSFHRDNVWFTYDYKTPSSLAEESMDLDIFKVSTRQDLIKFVVGSVEDLDCMRRIIKEHPTKAQIYVSPVWGKIEAASIIDYMKTYNLQNVRFQLQIHKFVWDPDAKGV

SEQ ID NO: 35032 - protein, 247 aa, Veillonella dispar
  misc_feature (1)..(247): tr|C4FPK9|C4FPK9_9FIRM 7-carboxy-7-deazaguanine synthas e OS=Veillonella dispar ATCC 17748 OX=546273 GN=queE PE =3 SV=1
MNVIEIFASIDGEGSRQGLLTTFLRLHDCNIRCSYCDTTYSYGIDSTFTDMTVREVADAIESLGNHRITITGGEPLLQEAAVVELIDELNRRKSAKLEDEPCTDIKSTTGINVSVDAQDVLDSESLYDFNIETNGTIIPSFHRENVWFTYDYKTPSSLAEKSMNLDIFKVSREQDLIKFVVGSVEDLDCMRHMINQYPTKAQIYVSPVWGKIEAAAIIDYMNEHNLQNVRFQLQIHKFVWDPDAKGV

SEQ ID NO: 35033 - protein, 211 aa, Veillonella montpellierensis
  misc_feature (1)..(211): tr|A0A096CRW8|A0A096CRW8_9FIRM 7-carboxy-7-deazaguanine synthase OS=Veillonella montpellierensis DNF00314 OX=1 401067 GN=queE PE=3 SV=1
MNVIEIFNSIEGEGIRAGELCTFIRLAGCNLRCSYCDTQYSFTGGKKMTIGEIVKIVDRYGNYNVTITGGEPLLHDISPLLDKLSNYYVNIETNGSIDPIPKYKKYNNVMFTVDYKCPSSGQEKFMRNGVALQQLRCHDVIKFVVGSLEDLNCMKQLIQENKFRSQIYVSPVFGEIKPSDIVDYMKTYNLQGVRLQLQIHKFIWPPEMKGV

SEQ ID NO: 35034 - protein, 244 aa, Veillonella parvula
  misc_feature (1)..(244): tr|F5L2V1|F5L2V1_9FIRM 7-carboxy-7-deazaguanine synthas e OS=Veillonella parvula ACS-068-V-Sch12 OX=768727 GN=q ueE PE=3 SV=1
MNVIEIFASIDGEGSRQGLLTTFLRLHDCNIRCSYCDTTYSYGIDSVFTEMTVAEVADVIESLGNHRITITGGEPLLQEAAVVELIDELNRRKALKIQDSPSSQSDLTRINDVDKRERPNNSPYDFNIETNGTIIPSFHRDNVWFTYDYKTPSSLAEESMNIDIFKVATERDLIKFVVGSPEDLDCMRRIISKYPTVAQIYVSPVWGQIEAASIIDYMKTYNLQNVRFQLQIHKFVWDPDAKGV

SEQ ID NO: 35035 - protein, 251 aa, Veillonella parvula
  misc_feature (1)..(251): tr|D1YS15|D1YS15_9FIRM 7-carboxy-7-deazaguanine synthas e OS=Veillonella parvula ATCC 17745 OX=686660 GN=queE P E=3 SV=1
MNVIEIFASIDGEGSRQGLLTTFLRLHDCNIRCSYCDTTYSYGIDSVFTEMTVAEVADVIESLGNHRITITGGEPLLQEAAVVELIDELNRRKALKIQDSPSSQSDLTRINDVDKDVDKFDKRKIPNISYYDFNIETNGTIIPSFHRDNVWFTYDYKTPSSLAEESMNIDIFKVATERDLIKFVVGSPEDLDCMRRIISKYSTVAQIYVSPVWGQIEAASIIDYMKTYNLQNVRFQLQIHKFVWDPDAKGV

SEQ ID NO: 35036 - protein, 239 aa, Veillonella rodentium
  misc_feature (1)..(239): tr|A0A239ZEY0|A0A239ZEY0_9FIRM 7-carboxy-7-deazaguanine synthase OS=Veillonella rodentium OX=248315 GN=queE PE =3 SV=1
MLRFMNVIEIFSSIDGEGSRQGFLTTFLRLYDCNIRCSYCDTTYSYGPDSVYKQMSVQEVADTIESLGNHRITITGGEPLLQEREVIALIDELTRRSESSESCVSEREDEIYSHDTMPYDFNIETNGTIVPSFQRDNVWFTYDYKTPSSLAEKSMNLDIFKVATGRDLIKFVVGTVEDLDCMHHILETQTTKAHIYVSPVWGRIEAASIIEYMKTHNWQNVRFQLQIHKFIWDPDAKGV

SEQ ID NO: 35037 - protein, 219 aa, Veillonella seminalis
  misc_feature (1)..(219): tr|K9DIR7|K9DIR7_9FIRM 7-carboxy-7-deazaguanine synthas e OS=Veillonella seminalis ACS-216-V-Col6b OX=883156 GN =queE PE=3 SV=1
MNVIERFSSIEGEGTRQGSLCSFLRLYDCNLRCIYCDTTYSYGLDVEYDTQSAAAVAEDLKQMGNRYITITGGEPLLQAAEVEQLIDILSRETTPFGPYEFNIETNGSIIAPFQRDNVFYTYDYKCPDSSAEESMHPHLCEALTDKDVLKFVVSSFGDLQRMKEIVLTKQPKGHIFVSPVFGKIAPKEIVDYLLTNNLQQIRIQLQIHKFIWDPDAKGV

SEQ ID NO: 35038 - protein, 220 aa, Veillonella sp.
  misc_feature (1)..(220): tr|A0A2S7Z9F0|A0A2S7Z9F0_9FIRM 7-carboxy-7-deazaguanine synthase OS=Veillonella sp. T34266-5 OX=2027457 GN=que E PE=3 SV=1
MLLSMNVIELFSSIDGEGKRQGFLTTFLRLHDCNIRCSYCDTLYSYGPESTFESMSVQAVADVIEQLENHRITITGGEPLLQETAVIELIDELARRNPGYDFNIETNGTIIPSFHRDNVWFTYDYKTPSSLAEEAMNLDIFKVATPADIIKFVVGSMQDLDRMNEILKTYPTDAQIFVSPVWGNIEGATIVEYMKAHNWQNVRFQLQIHKFIWDPDAKGV

SEQ ID NO: 35039 - protein, 223 aa, Veillonella sp.
  misc_feature (1)..(223): tr|R5BVV5|R5BVV5_9FIRM 7-carboxy-7-deazaguanine synthas e OS=Veillonella sp. CAG:933 OX=1262980 GN=queE PE=3 SV =1
MWRFMNVIERFSSIEGEGTRQGSLCSFLRLYDCNLRCVYCDTTYSYGDEVDYEVQSVEDVADALRQMGNRYITITGGEPLLQADEVEQLIDVLSRETTPFGPYEFNIETNGSIIAPFQRDNVFYTYDYKCPDSSAEESMHPKLCEAMTDKDVLKFVVSSYGDLQRMKEIVLTKKPKGHIFVSPVFGKIDPQEIVAYLLKNNLQQIRLQLQIHKFIWDPDAKGV
